United States Patent Application Publication US 2006/0134663 A1 - sequence listing, part 124

SEQ ID NO: 407332 - DNA, 1000 bp, Homo Sapiens; identical to SEQ ID NO: 294848

SEQ ID NO: 407333 - DNA, 1000 bp, Homo Sapiens; identical to SEQ ID NO: 294849

SEQ ID NO: 407334 - DNA, 1000 bp, Homo Sapiens; identical to SEQ ID NO: 294850

SEQ ID NO: 407335 - DNA, 1000 bp, Homo Sapiens
ctacaagaagatggtggaggattactacaaggggatccggcagatggtgcaggtcagcgaccaggacatgaacacacacctggcagagatttcccgggcgcacacggactccttgaacaccctcgtggcactccaccagctctaccaatacacgcagaagtactatgacgagatcatcaatgccttggaggaggatcctgccgcccagaagatgcagctggccttccgcctgcagcagattgccgctgcactggagaacaaggtcactgacctctgacctacaatctccagtgctgccttgggacataggtacctgaggtacctgagagcccctcaggggaggaggccgagtggctgtggctgaggcccccaccctcccctggaacgcgccccaagccggagtgggtgcagccggaacccgcccagcgtctagactgtagcatcttcctctgagcaataccgccgggcaccgcaccagcaccagccccagccccagctccctccggccgcagaaccagcatcgggtgttcactgtcgagtctccagtgatttgaaaatgtgccttacgctgccacgctgggggcagctggcctccgcctccgcccacgcaccagcagccgcctccatgccctaggttgggcccctgggggatctgagggcctgtggcccccagggcaagttcccagatcctatgtctgtctgtccaccacgagatgggaggaggagaaaaagcggtacgatgccttcctgacctcaccggcctccccaagggtgccggcactctgggtggactcacggctgctgggccccacgtcaaaggtcaagtgagacgtaggtcaagtcctacgtcggggcccagacatcctggggtcctggtctgtcagacaggctgccctagagccccacccagtccggggggactgggagcagttccaagaccaccccacccctttttgtaaatcttgttcattgtaaatcaaatacagcgtctttttcactc

SEQ ID NO: 407336 - DNA, 1000 bp, Homo Sapiens; identical to SEQ ID NO: 294851

SEQ ID NO: 407337 - DNA, 626 bp, Homo Sapiens
agataggctcagtgttgtaaccagcagtccatggactcagtgattctgaagggcagctgcctgtcaacctttaaaaacatggtcatcccactctgagatgacaagagccactcctctagagacctgggggattttagaacagggctttcaaggtaatgaaggaagagaatcttctttggacttctttttgctccagatgcggagaaggcaacttcccggagtctctaccagtgagaaggctacagaatcatgggcagataaggtctcgctctgtggctatagctcactgcagcctcaaattcctgcgctcaagtaatcctcccacctcagcttcccaagtagatgggactacaggtatgtgccaccaagcccagctcctttctcaagctttaaaacaacaacgaaaacaaacaaacaaaggaaaaacctttgcattgtgtaatttagatttattttgtaaccatgttggattaagtataatttttatactgaggactcctctctttctttaaatcgggggaaaataaaaaccaaaataacgataacaaaaaattttacaatgagtaacaaataataaaccatgataaaatagcaacaaaaaactagtaaatactaaatagatgact

SEQ ID NO: 407338 - DNA, 675 bp, Homo Sapiens
cctgacttctcgcctcggtgggctgggtcggcggctggagcattacccctactgcgggtcccactgctggcagcgctggaaactgagtggacggcatgggttggtctcaggatttgttccgcgccttgtggagatcgctgtcaagggaagtgaaggagcacgtgggcacggaccaattcgggaacaaatactactacatcctgcagaacaagaactggagaggacaaactattcaagagaaaagaattgtagaagcagcaaataaaaaagaagtagactatgaaacaggggatattccaacagaatgggaagcttggattagaagaacaagaaagactccacctactatggaggaaatactaaagaatgaaaaacacagagaagaaatcaaaataaaaagccaagatttttatgaaaaagaaaaactccttagtaaagagaccagtgaggaactcctgcctccaccagttcaaactcaaattaaaggccgtgcctctgctccatacttcggaaaggaaaaaccctcagtggctcccagcagcactggtaaaacctttcagccaggatcctggatgccacgagatggcaagagccacaatgaatgaatgcattatggtcaaatcttttcacgtatatggatgcgactattttagcaaataaaagaagtgaaaagtt

SEQ ID NO: 407339 - DNA, 1000 bp, Homo Sapiens; identical to SEQ ID NO: 294852

SEQ ID NO: 407340 - DNA, 1000 bp, Homo Sapiens
agtgaggtgatgtgccctactttaaaacagatcgaccagctgggctcctgggattcagatatgaaccagcagtcctctactaaaagtttctttctgcagcgatgggaaaattcagccattgctctgtttcttccaacaagtgaagtccattacagcctaatgtctcaatcttttagttctagctctaaggcctcaggttcaatggctgctgtccctttaaacccttcatttgtcctaaatgtttcaaatagctgcccccaaatgcacgtgtgttaaagatggaagctctaggtcggggtctgagagacagcttgacacttggtagaatacatagactactgtgtctcaaagtgtgttccatggaacattaactccagacctgttcctggagaagagaaaatcctttgtatctgagggggaaacattaccataaccttcctttggggaattcatgtgtgtattagcatattaaaggctctcataaggcctgcaatgcagaaatctatttaagttttatctgtttaacccaatgtttcccttaattccagaacattttctttgttcataacacctgttaacacctcctgaaagtgttcacgtagtagacttatctgagaaaagcaatttttgagccgttaaagcttctagattggacaaactaggcaattaatgatactagatcaattcagaatgcaatttgagcctcttccccctgggaaacaaagtgaaaagagtggatctcatggaattaggggagaagtagacccagaattcatggggggtgggtggctgtgaacaggacctgcagaagaggctcggctgtgaatatttccaaggccccttgacctgtgagattctgtagtgaacggttccagctttggccagcttaacaatgtgctgggccccaaggtcttgagagcattgccttttcttccattgaaataagttcgcttgtttgggaccattcaaaggatcaaaataaaatttacttaccaaaaaa

SEQ ID NO: 407341 - DNA, 803 bp, Homo Sapiens
agagacagacactgccctggctctggagtgtagcgaggagtggatggtgtgcacactaaggtaagagaaaaggcattgatcaaatccttcctctcacatagcaagaatgcaagagaagtggcagatcccagcggtggcaagatgcactttcttgcttttctttgtggttgcagaggttgcagtgagccaagattgcaccactgcactccagcctggcaacagagcaagactccaccagaaaaaaaaaaaaaaaacaaaaagagagcaacaagactgatgaaattaagattgggacctcatgtaagaatggagggtgttcaaagacatatcggggtctagagagtctagaagaagtctgtgtgtatcattctggagtacctattttccatgaggggatgaaatactggagctgttgtagaagaaaaacttctgattttaatacattcttagcccaagagggctgttcaacagggaaacacatatgggctaaaaaggatgctggggaaaatgttccacgtagagaggactggcatcagactgaaggtgaagttaccatttcagtatatgctaaaaattcacttccagaacttagccgagtagaagtaaatagcacgttgttaaatgtgcacattggatttgaaggagagaagggatttcatcaaaatgtgaaattatggggtgtgactgatgtaaagtgaagttatgtaactatgactgcaacaaagattgagatcactatgagaaaagctgaaccgatgcagtgggcaagccttgaactgcctgcagccaaaaagcaggaaaaa

SEQ ID NO: 407342 - DNA, 840 bp, Homo Sapiens
tgtatgttttagaagcaaaccatggcagaaatgtgtatggaattggaggggaagaaaattgaaagcagagaagccagtcagaatgtcattaccatgcccaaagcttgcagtctgctgaggggaacatccaaaactatctgaagccccgggctgaaccaggctctgcagacattggtggtgtcctagaaggctcttgctgaggtcttatgtctgaaaagaaaccctcggaaacccacttgagtctgtcttgcatttcacatgaaacaaggcttcattctgcaaaaatatctgggaccttcaaattcacaagtggattttctgctcaggggagagctaccaatcggttgaaaggtatgttacagctctaagaagctgcatccatttcctgtaggatccatagtttctggttctggttccagggaactccttcaaatgaactggtcgccatatgaattgatgctacactttgagcgttgccgcagtcaggtgaattcaagctacagagaagaggcgattcacattttttccttctgtcttgtattattcctccggctcaagaacctgccagagatggaatctccctatgttccccaggctgatcttgaatttctgagctcaagcgatcctcctgccttggcctcccaaagtgccaggattataggcgtgagccaccatgcctggccagagagcattttagtaaggataaaaagttttattggcctcaggctgaagtttgcaattatattccaaatacccaaagtgggtatattattgacgttgtcctgagagagggacagacagtttgactgtgttgctttctttggagtcagttttggggct

SEQ ID NO: 407343 - DNA, 1000 bp, Homo Sapiens; identical to SEQ ID NO: 224939

SEQ ID NO: 407344 - DNA, 1000 bp, Homo Sapiens
gatgtgcctcccaacatgacaagctgggccagctttcataatggtgtggctgctggcctgaagatagctcctgcctcccagatcgactcagcttggattgtttacaataagcccaagcatgctgagttggccaatgagtatgctggctttctcatggctctgggtttgaatgggcaccttaccaagctggcgactctcaatatccatgactacttgaccaagggccatgaaatgacaagcattggactgctacttggtgtttctgctgcaaaactaggcaccatggatatgtctattactcggcttcttagcattcgcattcctgctctcttacccccaacgtccacagagctggatgttcctcacaatgtccaagtggctgcagtggttggcattggccttgtatatcaagggacagctcacagacatactgcagaagtcctgttggctgagataggacggcctcctggtcctgaaatggaatactgcactgacagaaagtcatactccttagctgctggcttggccctgggcatggtctgcttggggcatggcagcaatttgataggtatgtctgatctcaatgtgcctgagcagctctatcagtacatggttggaggacataggcgctttcaaacaggaatgcatagggagaaacataaatcaccaagttatcaaatcaaagaaggagataccataaatgtggatgtgacttgtccaggtgctactctagctttggctatgatctacttaaaaaccaataacagtgtcttctaggaagcccagacacatggagaagttctgagtgttttggccgatagtcccagatgaggttccagcaacagctgggatcacccatgagatgtgagtgaggaaggctttgagatggtttcagccctagccaccactgacctcataagagaccacaagaatgagaatcacctggccaagcccagcagaccttcagaattcagaaataaaataattcatcttattttaa

SEQ ID NO: 407345 - DNA, 1000 bp, Homo Sapiens
gagagagaaagcagaaggagtagtaagtatcaaggaagataaatattttcaaacttctagaaagaaaatttaaacatttggttctggatacatgttgaacttagttgaatataaaaatctagataaaaagtgtgtttaccatactgtataattccatttacatgaagcatccagaaaagataaatgtatagggacaaaaagtagattaatgtttgcaaggggctggggctggaagctggtagtgactgctaatgggcatgaggaatcttacagtgatggaaatgctctaaagttggattgtagagatggctgcacaactcagtaaatgtactaaaaatcttttaactttaagtcaaaacagatacattctatagtatgtaaattatatttcaacaaagctgttttaataaaaaaggaaaaatgtttactatatcggcttagaaacatgcctcatttctaggaaataaaagaggtgagagatgatttactttgagaaaagacattgtgtcacctatgaaattttattaggcacagagtcatattttaaggtagatagttctgtactgctgaaatagtaattttaatgtctttatattgccacatgttaagaccataatgtagttataaatggaaatgtttacacctgaagtattttcaaattaaaatttaattaagtgattttcttcgacacttaattctagattccccagatgaattgaagtgtattgctgtgtcttgtagtaccttgctttaactagctttttatgtattttagttggtatagctttgttattattcatattaatttaacaaatctgaaaatatgtcaaattacgtatttttatgaccacgtaatgttttaaaggcacctacttgttataaaatcataatttaggagaaatgtggtaaaacttagcaaaactatatttggtttagtcttcccactggtatttatagtttactttgaatatttatattaataattaggtcataattttta

SEQ ID NO: 407346 - DNA, 1000 bp, Homo Sapiens; identical to SEQ ID NO: 224940

SEQ ID NO: 407347 - DNA, 918 bp, Homo Sapiens; identical to SEQ ID NO: 294856

SEQ ID NO: 407348 - DNA, 1000 bp, Homo Sapiens
agcaactggatgatgatcaataaattataccaaatatatgtttacagtatgatttaaagtctgattcagaccagggactctattttaagttcaactgaaataacactgggttttaattatatcacaggaaaaaaaaagtgcatttaagtattgttatcgtggactttataaaagcaaaggaaattgaaagtaacttttgattctgtatcaagaatcatattttcatacagtcataactgtctttctgtgaccctttcacagggcactgtaggatggattaaaggtggcaatttactgataactgcagatgtctctactttgttctaaaatctaagtcatgaggtgatttgatttactttatagaagctggattttgaagatctaatgaaaaattttttgataatatagtagtacaaaaaaagcaccagcaactgataaaaattgcttttttgtgcgctacccaactggttaaagccaatgtgatcttttatggtgaaactcctaagaaacaggtggttttgctggaaacttggtagacccttaattatagtggtgctaatgagcactactgtaatataaagccaccattattttttatcaaacatctgaatacattttacaaaggctattgtgagggcattattttgagcatctattttgaggtgatgtttaaaaaaactttaacatcaaatcaaattgtaaattaatttaaatatattgccttaaggacctactaaagaatgtgccaccagactttaagtgatagttgcaatatccttgtctaaaaaaaaaaaaaaagttgacttaaacattttctttaacagttgtcttttttttctaaattcagtctttctcttgcttttttttccctgctattgaggaagtattttgccttccctactcactgagaagtattgacttcgtggtacacattctaaagcatttctgatttgaatatttttgtacatttttatcaattattaaaccttctcttctagtg

SEQ ID NO: 407349 - DNA, 1000 bp, Homo Sapiens
ataagattaaactagtggtcacccaagaagatgtagagctggcctaccaggaggcgatgatgaacatggcaaggctcaacgggacagctgccggactcatgcacacgttcaatgcccacgcggccactgacatcaagggctttgggatctggggccacgtgcagaacctggccaagcagcagaggaacgaggtgtcatttgtaattcacaacctcccggtgctggccaagatggctgcagcgagcaaggcgtgcggaaacatgttcggcctcatgcacaggacctgcccagagacctcaggcggccttctgatctgtttaccacatcagcaagcagctcggttctgtgcagagataaagtcccccaaatatggtgaaggccaccaagcatggattattgggattgtagagaagggcaactgcacagccagaatcatagacaaaccctggatcatcgaggtcgcaccacaagtggccacccaaaatatgaatcccacacccggggccacctcttaatctagacagaaatagctgtttggttttgtttttaaatagacctatttcctttatcatcacttcaattaaagactataaacaacagaaatctcattgtgtctacacatcgggtgaccttaggtcggtttgtaagtggatacaattaataaaataaaatccgtcacctttttttcctgttacattaactgaagatgcacccaatcttgaggcagcttctgagttgagaattatattgttatccaatactgttgattcattttgaatctttagacacttatctcttgctgcataggctctttttaaaggtgctttcacatagcacagacattaccagtagtcttgtcaaatagcagttggtgtcttcattttatgtatatttatcataagtctgattttttttaagcgtcttgaatggttttctggagagacagcattgataagtggcacatgacggtatctcagtcataagagggttgcatgattcc

SEQ ID NO: 407350 - DNA, 1000 bp, Homo Sapiens; identical to SEQ ID NO: 294858

SEQ ID NO: 407351 - DNA, 1000 bp, Homo Sapiens; identical to SEQ ID NO: 294859

SEQ ID NO: 407352 - DNA, 1000 bp, Homo Sapiens; identical to SEQ ID NO: 119236

SEQ ID NO: 407353 - DNA, 1000 bp, Homo Sapiens; identical to SEQ ID NO: 224943

SEQ ID NO: 407354 - DNA, 717 bp, Homo Sapiens
atgtgtccatccagatatttcacctgtgtacacgatggcgagagtgaggctgaattaatacctgatgactttgaagaaaaaccagaaagagaaaagaaacataccaactttactttgtgcaatgtatgtaacattcagctgaattcagccgctcaagcacaaatccactacaatggcaaatcacatcaaaagagattaaaacaactcagcaatgggacgctgaaaaatgacaatgttttgccatttttgcttcaagcatttggaagttccatggtagggacatatccatttagcattatatcttcttgtttacagaacattctatgcagtttcttatatggaccactcatggagctgttcagattttcatacaaaaagaggttgtttttttttctggcaatattatctgtcacaattatcccttcacttagtagttagaagtcggggggtgctaagagcaatttccacagatgctttgtttgtggagaaaagtaggatggcccctctgcttgtcttagtgcagagcaaggaatggcttcgaagccattccttgagtactgaggtctctgtgtagtcttacttcttttctgaatttttcagagtcttctgatagttgcttgatatattttgtctatggttttcagttctatgtagtagaaagaatagagtatctccccccagtcctctaagtagaaataaaaattaatataaaaaatt

SEQ ID NO: 407355 - DNA, 571 bp, Homo Sapiens
atggaggaggtgtcatttcagatagcgcggaaagcgaagaaggaagttcccgtccctcctaaagccgaagccaaagcgaagtctttaaaggccaagaaggcagtgttgaaaggtgtccgcagccacaaaaaaaagaagatccgcacgtcacccaccttacggcggcccaagacaccgcgactccggagacagcccaaatatcctcggaagagcgctcctaggagaaacaagcttgaccactatgctatcatcaagtttctgctgaccactgagtctgccatgaagaagatagaagacaataacacacttgtgttcattgtggatgttaaagccaacaagcaccagattaaacaggctgtgaagaagctctatgacaaagatgtggtcaaggtcaacaccctgattcggcctgatggagagaagaaggtgtatgtttgactggctcctgattacgatgctttggatgttgccaacaaaattgggatcatctaaactgagtccagttgcctaattctaaatatatatatatatatcttttcagcataaaacaaaaaaaaaaaaaaaaaaaaaa

SEQ ID NO: 407356 - DNA, 883 bp, Homo Sapiens
agaccggaaggtgaacatgccctgcacgggtctggcagcaagcgtctcccccgtctcctcacaggatggacctgacagcttacgctgagctgctgaaagaatccggcaaccaggttcttaagaatgggaacttctctttggccatcagaaagtacgatgaagccatccagattctcctgcagttataccagtggggggttcccccgagggacttggctgtgctgctgtgcaacaaatcaaatgcatttttcagccttgggaagtggaatgaggcatttgttgctgccaaggaatgtctccaatgggatccaacctacgtgaagggatactaccgagctggttattccttgctgaggttgcaccagccttacgaagccgctcgcatgttttttgagggtctgcgacttgtgcagagaagccaagaccaggcaccggttgctgatttccttgttggagtcttcaccactatgagcaccttttctgtcttctcccaccagtcatttctgcttctgtcagcaaaaaaagaccgattaccaagaaatattcatgtcccagagttatcactgaaaagtctctttgagaaatacgttttcattggactttatgagaagatggaacaagtgcccaagttagtccagtggctcatctccattggtgcaagtgttgagactataggaccgtatccccttcatgccctcatgcgactctgtatccaagccagagaaaaccatcttttccggtggttaatggatcacaagcccgagtggaaaggccgcattaaccagaaggatggggatggctgcactgtcctgcacgtcgtcgctgcccactccccaggatacctcgttaagcgtgagtagtggcattacccagagggtgcgct

SEQ ID NO: 407357 - DNA, 617 bp, Homo Sapiens
atgacccagcaagggaaccattatactcctgttcccatggactcagagggtgcagccaggatggagatatgggtctctctgaccacagccatggactgcttcacaccagcctgcccctgggacctcagctgtctggggagctctaaggggaatttgaaggtacaggagtatcctgctgctgctgacatccatatctccaagcccttctattttattgatgcttttccggcagtgacgacctacccacacgagaacatgcctctcgcaaaggatctccttcatccctctccagaagaggagaagaggaaacacaagaagaaaggcctggtgcagagccccaattcctacttcatggatgtgaaatgcccaggatgctataaaatcaccacggtctttagccatgcacaaacggtagttttgtgtgttggctgctccactgtcctctgccagcctacaggaggaaaagcaaggcttacagaaggatgttccttcaggaggaagcagcactaaaagcactctgagtcaagatgagtgggaaaccatctcaataaacacattttggattaaaaaaaaaaaaaaaaaaaaaaaaagaaaaagaagaaataaaaaaagaaaag

SEQ ID NO: 407358 - DNA, 1000 bp, Homo Sapiens; identical to SEQ ID NO: 294863

SEQ ID NO: 407359 - DNA, 1000 bp, Homo Sapiens
gtcctctttctgagacctgttgatgacatctggaagcttctgaggctgtttaattccacccagcttgcagccatggcccctgagcacgaaatccccaagattggctggtacagccgctttgctaggcatcctttctatggctctgcaggagttaattcaggagtcatgttaatgaatttaactcggataagaagtacccagttcaagaacagcatgattccaacaggcctggcttgggaggacatgttgtaccctctgtaccagaagtacaagaatgccatcacgtggggagaccaggatttattaaatattattttttatttcaacccagagtgtctctatgtattcccctgccagtggaactaccgtcccgatcactgcatgtacggaagcaactgcagagaggctgagcatgaaggtgtgtctgttctgcatggaaaccgaggcgtctaccatgacgataagcaaccaacgttcagagcactctatgaagcaatacgggattttccctttcaagacaatctctttcaatccatgtattacccccttcagctgaagtttttggagactgtgcacactttatgtggacgaatcccgcaagtttttctgaagcaaattgagaaaacaatgaaaagggcttatgagaaacacgtcatcatccatgttggccccaaccagatgcactgaatattttgtcttgttgcaagtcaattaggtgtcttgtgaccaaggaaatactaatctctaagctgcctgggtctttttgtgtgaatatttaatggtgctccatgactgttgagttttaaaaacctcgttaaattttgccaaatcagttgcccccaaaagggaatatgcttttccttatttttttttctaaaatgctatttatctctaaggaaaaaaaaaaaagactattactcatttaacattgtttaagcaggttgagctagctgtgaaaatagcttttgtgagccttctaattcctaaacgtctgagacca

SEQ ID NO: 407360 - DNA, 876 bp, Homo Sapiens
gttaggttatgacaggagcagcactgcagccacaagccatggcagtcgtggcccggggatcattccaagtctatttacagcagcaacattaaaccagccctgccaacatcctccctgtgcttgggccacgctggggctggtcacctctgagggcagcccccagcctcagtccaacatccttttctccatcagcaactagaacgttgcactggtgagcgcttccaggctggtaccaggtctcaccatggggaagggcactgtgtctgggcttgtgcaggtggtggatgcagagactggcaaggtggtcatcatctctcaggacctcgttcaggtgaaggtgctgctgcttggagccgtgaggatccgcagccccatcatgcagataaggatgggcacccagctggggaagaattggatacatctcccactgcttgaaggaggcagcacagcttctgggggcattcccagtgctggcaccccgctggtcaccaggcctgacttctccccaccgatgtccatctatatcacctggatcaccaaccaccagaaccctttctcctttggcaatgccatgccaggcctgaccttccactggtctgtcaccaagcgggacatcctggatctccaagggcagcatcacaagatgagccattaagtccagcccacattcaaggggagaggaagtaagcatcacctcaggcacagaagaacagaaagaagttgtgtgcatatctttaagacaaccacataccaggaactgcttttttttggtatagaaactatctttttaaaaatttacccttgacatttggaaacttcatccagctatgtctgatttgcaaattcaggtatatctttaaaataattttctttgat

SEQ ID NO: 407361 - DNA, 1000 bp, Homo Sapiens
tgtattgcctgccagagcttggaagggaggactcttcttctgtctctacagttgtgccatcttcctccagcaccaggaagaagggcttgtctgccagcatcagagtgccctggtcctggggaataagggtcttgactgttgcccaagctggaatgcagtggcacagtcactgctcactgtagccttgactctggagctccactgatgcccccacctctctgtgcagctgtgtgacctcagatcctgaagatcttcgtggacaatctctttgctatcgtcctgctgaagcaggccacagctgtgcgctgcttggacatgagtgcctcccgtaagaagctggccgtggtagatgaaaatgacacttgcctggtgtatgacatcgacaccaaggagctgctttttcaggaaccaaacgccaacagtgtggcctggaacacccagtgtgaggacatgctctgcttctcgggaggaggcaacctcaacatcaaagccagcatcttccctgtgcactggcagaagctgcagggctttgtggtcggctacaatggctccaagatcttctgcctccacgtcttcatttctgccgtggaggtgccacaggtaactgggagcacctgtccactctcagcactggcaaggccagtaagaccagggaagccgggcccctggctggtgctttgaggagagagtagcaaggagagaagaatggcagctgtgatgtcgtgggaggcagtctgggcttggaacctgcagccctatctccactccttgcaacctgtgtgactgggggcaaggagctcaacctccctgtgcctcaatttcttcctggtcccccttctggtaaggattcagaggggtatacagtgttgtcagcagagtgtattttacagagagcccagtgtgggccaagtggagagagcagcaaagccgggagtccagcagggtgtgtgtgtgtgagcacatgtgtgatggtggtgatgtgtgtgtgagagagggggaa

SEQ ID NO: 407362 - DNA, 1000 bp, Homo Sapiens; identical to SEQ ID NO: 294864

SEQ ID NO: 407363 - DNA, 1000 bp, Homo Sapiens; identical to SEQ ID NO: 294865

SEQ ID NO: 407364 - DNA, 1000 bp, Homo Sapiens; identical to SEQ ID NO: 119237

SEQ ID NO: 407365 - DNA, 792 bp, Homo Sapiens
atgctgctctccatagggatgcttatgctgtcagccacacaagtctacaccatcttggctgtccagctctttgcattcttaaacctactgcctgtagaagcagacattttagcatataactttgaaaatacatctcagtcctttgagaatgcctgtgaacgcagagtgcctccaccagtaaaaaacaatttgtctggcactttcattgtgttaattagaagacttgattgtaattttgatataaagattttaaatgcacagagagcagaatacaaagcagccatagttcacaatgttgattctgatgacctcattaacattggatccaatgacattgaggtactaaagaaaattgacattctatctgtctctattggtgaatcatcagctaattctctgaaagatgaattcatgtatgaaaaaggggaccaccttatcttagttccagaatttagtcttcctttggaatgctgcctaattcccttccttatcatagtgagtatctgtctcatcttgatagtcattttcatgatcacaaaatttttccaggatagacatagagctagaagaaacagactttgtaaagatcaacttaagaaactccctgtacataaattcaagaaaggagatgagtatgatgtatgtgccatttgttcagatgagtaggaagatggagacaagctcagaatccttccctgttcccatgcttatcactgcaagtgtgtagacccttggctaactaaaaccaaaaaaacctgtcctgtgtgcaagcaaaaatttccttctcaaggc

SEQ ID NO: 407366 - DNA, 525 bp, Homo Sapiens
atgccgggcgaccctccacctaccaagctctatcatttcaggtcaacttcagactgctgtgctggcagtgagaatttcaagccaatggttcttaggtttctgggatgtgtgggagtgggacccactaagcgagaccacttggctccctggcttcagccccctttccaggggagtgaacggttccatctcactggggttccaggtgccactgggaggaagaaacttaaggcccaacaaatttatgcattgagccaaggacaagaaagaaatagcagaacaagatctaaaagacaaattccttcgacttcagaattcatgacttttctactagcccaggttacattttgtttaactgccaaatcacagtgcatttgatgtcacagatgttgtgctctcattttgcagccttctgtcctcaggaagactcaggcagcatgttcctctgttattgaacgtacacaatattgtaattaattgtttacctatctggcactcccaataaactgtacttcttatgcataagaa

SEQ ID NO: 407367 - DNA, 1000 bp, Homo Sapiens; identical to SEQ ID NO: 294867

SEQ ID NO: 407368 - DNA, 1000 bp, Homo Sapiens; identical to SEQ ID NO: 294868

SEQ ID NO: 407369 - DNA, 851 bp, Homo Sapiens
aacctctcttggtgggcaggcagtcggacgctcagcaggactggcaaaacagaatatctgtgtgtcagtgtacgttttattcatctgtcgtttgggtcagggtctgcggggcagatccccgcagctaatgccctcttgtgagcagcaatacctcactttttatcagcctctggctgcagaagagcaggaccacaatcctggaggctcagcaaacatcccatcaatggtggaaaatgtttcctcttcgtcccacatggagtttacagatgatgggtttccaacttccagaagaggaaccagctgaagagaacatcccactccccgctccccaccacaaaaaaaagattcagagggtacatacgcaggtttgttacctgagtagacttcctgatgctgaggtttggagtacaactgatgccgtcactcaggtacagagcaaaacaggttggagtgcagtggcgcgatcttggctcactgaaacctctgactcctggattcaagcaattctcctgcctcagcctccagagtagctgggattacaagagcccaccaccatgcctggctaatttttgtatttttagtagaaatggggttttgccatgttggccaggctggtctcgaattcctgagctcaggtgatccacctgccttgacttcccaaagtgctgggattacaggcgggagccctcggtgtccagcctagaatatcctcaaatccttccacagtgaccccagtttttatttctacctttctgcattctacattttctttgtacttttcttgagcacacattcagtctggtattagtaacttccacctgcattagccccgtttcttcagaaaatactaa

SEQ ID NO: 407370 - DNA, 1000 bp, Homo Sapiens; identical to SEQ ID NO: 224944

SEQ ID NO: 407371 - DNA, 799 bp, Homo Sapiens
ctcactctctttctgccaccatcttggttcctcgttccctgcacaaaatgccctgtgaagccacagaaaccgtccctgctacagagcaggagttgccgcagccgcaggctgagacagggtctggaacagaatctgacagtgatgaatcagtaccagagcctgaagaacaggattccacccagacgtccacacaagaagcccagctggtggcagcagctgaaattgatgaagagccagtcagtaaagcaaaacagatttggagtgaaaagaaggcacagaaggctatgtccaaactgggtcttcgacaggttacaggagtcactagagtcgctatccggaaatctaagaatatcctttttgtcatcacaaaaccaaatgtctgcaagagccctgctttggatacctacatagtttctggggaagccaagatcgaagatttatctgagcaagcacaactagcagctgctgagaaattcaatgttcaaggtgaagctgtctcaaacattcaagaaaacacacaaactccaactgtacaaaaggagagtgaagaagaagaggtcgatgaaacaggtgtagaagttaaggacatagaattggtcatgtcacaagcaaatgtgtggagagcaaaggcagtccatgccctgaagaacaacagtaatgatattgtaagtgccattatggaattaacaatgtaaccatctgaaagcaacttttcttggtgtctcaaaggagtaactgcagcttggtttgaaatttgtactgtttctatcataaataaagttatggcttcttgttggaa

SEQ ID NO: 407372 - DNA, 1000 bp, Homo Sapiens; identical to SEQ ID NO: 119239

SEQ ID NO: 407373 - DNA, 1000 bp, Homo Sapiens; identical to SEQ ID NO: 294872

SEQ ID NO: 407374 - DNA, 1000 bp, Homo Sapiens; identical to SEQ ID NO: 224946

SEQ ID NO: 407375 - DNA, 1000 bp, Homo Sapiens
tttaggaaagaaatgaattttctaagcatttaatacatttggaataattttagtttctaaaaagtactaatgtaagttaagtttatatcaaatgcaaattaccttgtataactaacaagcacagttattgtttaacattatggattttaattgtgttgacacccttctttgaatttgttgctttacatgtgtgtctgtgtgtgtgtctgcatgtgtgcacgcatgtacttgtatgcaatgtaaaagtaacagcagaatcattgcatttggtttacttaaaattttggagttagcaagtaaacaaaaagctgatagttttatgaagtctcggttaaaataaaatttctttgctatctcactcctaggaagttatggagttcatattttcaaaagatatgttaaaaatggttacacactctgctggccacattaaaaattagaagactcatgttaaattatctcctccaaaggactttttatttacagcttttcttttcctggactctacctgcttggttcagtgtcctgaagagttatttaaatgaaccactacttagtaattagttcttttttaaagtatctacttctaaaattacctagttgaaaatatgaaggatatgcttagttttagaaatatcatgaagcaaggatctagtcagtgttacagggtaaaggtggagttttttaaagtctgtatttaaatggtgcactgatggattcatttttaatttgcattacaaaaatgttgctcaggtaatcagtattttcttccacgtatgtgcatattgcactgttagatcatagaaatatctgaatgctttaatttttatgtatgcaaaatctataaatcttttgtataatgtattttatacaaatgtaactgtagaacattgttagcatgtgtatctgtaaaaccagtttttaaaattttttgccccttatttttcatattttgaaagatctccaacatgtaataaagtttctcttattcaatctaaaa

SEQ ID NO: 407376 - DNA, 1000 bp, Homo Sapiens
gcagaactggaaacaaaacaataatagagccacagccaaactctggtggccaaacccagtgttgcattttgtcttactctgaaagaagaacagcaaattcactgcttcaaagtggcctggctgccaagctagaatttggcagaacgcactttactattcctcaaggagtcaaccaacctatgatctggggaggtgggaagaggatgaggagcaaagttgggatttggcagaaggcagtcccaggctctctggatactaggggctaacttttgtgttgactctggtgctcatctgggaacttaggagaaacgagctcaggggtaatttctgggttgcagccttaaaggcttggacagctgtgaatctcaatggccaactggaggtgcagacttggcatggggtgcattctagctgttgaccagattgctaccgagtcccctcctccactgatgagctgcccacactgggaagcagcatgccctgactgttccaacaccacctgctatggggagtacctttggtcccctcacatttggccagaggcatacaaaaaaccagagcagctggagagggagataattactattccttcccttcctatctcctttctagccacaagagtgtgggggttggagaagaaccattagaaagggaaattagtgggctggtgtatctggaaagagggaagacttgatcctcagccccgaggttggtgcagggcctcccctgtgtgactctacctgcactctgtgtttatatcctgtgccctaagtgggccaagcccaggtaaattcctgctggccttggaactccaaggtttggctgaccagcagactggctccctgactcttcagcctcaaatccccagtttttgatgaatgtggatttctgtctgtaattaaaagcaatgcaacaagttggctcttgagaatggcagtaaactgagggccctaagagtgtggtctgcagggtcaagaataaagattacagattatattta

SEQ ID NO: 407377 - DNA, 1000 bp, Homo Sapiens; identical to SEQ ID NO: 294875

SEQ ID NO: 407378 - DNA, 1000 bp, Homo Sapiens; identical to SEQ ID NO: 224948

SEQ ID NO: 407379 - DNA, 1000 bp, Homo Sapiens; identical to SEQ ID NO: 224949

SEQ ID NO: 407380 - DNA, 1000 bp, Homo Sapiens
gatacggctcctgatagaatatggagccaggccctgcctggttactagtgtgggctggaccccagctcattttgcagcagaagcaggccatctgaatatactcaaaactctccatgcattgcacgctgccatcgacgcccctgacttctttggagacacaccgaagaggattgcacagatctatggacagaaagcctgtgtggcatttctggaaaaggcagagcccgagtgccaggaccaccgttgcgctgcccagcagaaggggctgcctctggatgagcgtgatgaagactgggatgccaagaaaagggagctggagctgtctcttccttccctaaatcaaaacatgaataaaaagaataagaaaagtcgaggccccaccaggcccagcaataccaaggggaggagagtatgagaactcaaccttatgttttctggcaaggaactttccctggtgccagaaatgaggctgttaggcatggtggcctttccatgactttactcatagacccttacccacctggcttctgcccatggacctgtcattaggtgctgtccacatgggctgttgtttcctggctagcacctactgtgtacaataattaccgggaaaggacaaaacctgcttgcattttgtcatcagtggtttgcacagtcagcatcttttgacccctgccccccaacaataatagaatttcaggagacaaggaaactctggcatgaattaacttcatccctgataacgatcgagagataatgtaaaataatgaacatgtgattataggtctactttttcaactgtaaatttgggaaaattaaattcagatcagataattccaataaaaaattgcatccaaattgagatgcaaaatacacattagatttcaaacacttagtacaaaaatataaaatgtctccttaataatacttaatattgattccacattgaaatgataatattttggatattgcgttgaataagatatattaccaaaatgaa

SEQ ID NO: 407381 - DNA, 1000 bp, Homo Sapiens
atgttggtgctaaactgttctaccaaattactgatactggagaaaatgttgaagagttgctttcctgaatcactcaaggtttacggagcggtgatgaacataaatcgtgggaacccctttcaaaaggaagtggtgttggattcatggccggatttcaaagctgttatcacccgacgacaaagagaggctgagacagataaccttgatcattatactaatgcctatgctgtgttctacaaggatgtcagggcttatcgacagctattggaagaatgtgatgtttttaactgggaccaagtttttcaaatacaagggctgcagagtgagttatatgatgtttccaaagcggttgccaattcaaagcagttgaatataaagctaacttccttcaaggctgttcatttttctcctgtttcatctctgccagataccagtttcctcaaggggccttccccacgactaacctacctgagtgttgccaatgcggatctactcaaccggacttggtcccggggaggcaatgaacaatgtctccggtacatcgccaacctcatctcctgcttccctagtgtgtgtgtccgggatgagaagggaaacccggtctcctggtccatcacagaccagtttgccaccatgtgccatggctacaccctgccagaacatcgcaggaaaggttacagccggctggtggccctcacgctggccaggaagttgcaaagccggggattcccctctcaggggaacgtcctggatgacaacacggcgtctataagcctcctgaagagtctccatgctgagttcttgccttgtcgcttccacaggcttattctcacccctgcgactttctctggcctgcctcacctctagcccagtaaaaaactgcagtggttttattactttccctgagcatacacacactcttggctgccaacgaggggagagttaaaatgggaatcaggggactcttgagttgttggaaagggtctggagaatatataca

SEQ ID NO: 407382 - DNA, 1000 bp, Homo Sapiens
gttttgtgagtgtccaaggctgtattcaggcaagctgtgccagtttgcaagttgtgaaaacaacccatgtggaaatggtgccacctgtgttccaaaatccggaacagatattgtctgcctctgcccatatgggaggtctggacccctctgcactgatgctattaatattactcagccaaggttcagtggcacagatgcctttggatacacctcattcctggcttattcacggatctcagacatcagcttccattatgaattccacctgaagtttcagctggcaaacaaccactcagcactgcaaaataacttgatattttttactggacagaaaggccatgggttgaatggcgatgacttcctggctgtgggcctgctcaatggcagtgtggtttatagttataacctggggtctggcatagcaagcatcaggagcgagcccctcaatctgagccttggagtccacactgttcatctgggcaagttcttccaagagggctggctgaaggtagatgatcataaaaataaatccattatcgccccaggaagactggttggtctcaatgtcttcagtcagttttatgtaggtggctacagtgaatacactccagatctcttaccaaatggagcagattttaaaaatggttttcaagttcaaaaggcaagagacagactgcagtcaacccatccataccaccaaggggtagcccacagaggccagagcaagccaagaggattaaggacaacattgtgcttggaaacattaagattgcacactcctggaagtatgtcaactgccacagtctttatctcgctgtgtcatcaaggctggagtacagtggtgccatctcagctcactgcaaccttcatctccagggctcaatcaatcctcccaccttagcctctcatgtagctgagccactaaacccagctaacatatccttacaaagctgatttatattgtagtagagttataaaataaagacatgctttaaattgt

SEQ ID NO: 407383 - DNA, 1000 bp, Homo Sapiens; identical to SEQ ID NO: 294879

SEQ ID NO: 407384 - DNA, 1000 bp, Homo Sapiens
taatggaatattacctcacagctgttaggatggcttttatcaaaaagacaaaaaataacaagtattagtgagactgtggaagagaaggaaccctcacacaccactgataggaatgtatatcagtataggcattattaaaaacattatggagattcttcaaaaatgtaaaactaagaatactatataatcaaacaatcccacttctgggtatatatccaaaggaaatgagatccatgtataaaagagatatgtactctcccatatccattgcagatttactcacaacagtgaagatactgaaacaatataaatgttcattgatggaaaagaatacagctggaggcatcatgctacctgacttcaaactacactacaaggctacagtaaccaaaacagcatggtactggtaccaaaacagacatatcgaccaatggagcagaacagagacctcagaaataaaacaacatgtctacaaccatttgatctttgacaaacctgacaaaaacaagaaatggggaaaggatctcctattcagtaaatggtgctgggaaaactggctagccatatgcagaaaactgaaactggaccccttccttacaccttatatgaaaattaactcaagatggattaaagacttaaatgtaaaactgaaaaccataaaaatcctggaagaaaacctaggcaataccattcaggacatagggatgggcaaagacttcatgatgaaaacaccaaaagcaattgcaacaaaagccaaaattgacaagtgggatttaattaaattaaagagcttcttcacagcaaaagaaataatcatcagagtgaacaggcaacctacagagtggaagaaaatttttgcaatctacccatctgacaaaggtctaatatccagaatttaaaaggaacttaaacatatttacaagaaaaaaaaaacaaccttatcaaaacataggcaaaggatatgaatggacacttctctaaagaagacatttacatggcc

SEQ ID NO: 407385 - DNA, 794 bp, Homo Sapiens
agactcagcccacctgcacccaggtgaaataaacagccatgttgctcacacaaagcctgtttggtggtctcttcacatggacgcgcatgaaatttggtgccgtgactcggatcgggggacctcccttgggagatcaatcccccgtcctcctgctctttgctccgtgagaaagatccacttacaacctcaggtcctcagaccaaccagcccaagaaacatctcaccaatttcaaatccagaccagaaaatctttctcttccagtcagtgtcattcatttatgaccagcggttgaatccagtcataaaatctgaagctcctgggtacctctacatcactgggcctatgatacactgtttcagaacgtacttacacatggggtgggacgattttcttaactaatacttgtgactactccacagcaaagctggaaacaaaagtattgggtgagctatcttccaaaatctggagatggtttcggagagagtttcattgccataaatttaaagggggattggatttactcaggaaaaattacaagtgagcgtaggagataaactagtaaatgccatatttggcccaccaggcacaaagaagggttataattggctcctttaagtcctatatgcagatatcaaatccctatacttgctctttattgcatagaataaatttacctcactccttactttgaaacatgaaatgaggatcaaattatagtttcaattattgcaaatagttgtacaaatgaaaagattgtcttattgtgggcattacacaaacccaccaaggaata

SEQ ID NO: 407386 - DNA, 1000 bp, Homo Sapiens; identical to SEQ ID NO: 294880

SEQ ID NO: 407387 - DNA, 1000 bp, Homo Sapiens; identical to SEQ ID NO: 224951

SEQ ID NO: 407388 - DNA, 1000 bp, Homo Sapiens; identical to SEQ ID NO: 224952

SEQ ID NO: 407389 - DNA, 1000 bp, Homo Sapiens
cggccattgaattattcatagatttatttcaaatagtttggaaattgttgtacttttgaaaacatgctgttcctgtagttttttgatgagagttatagttgttatatatacataaagataattttcttttcatttttaagagacaattcttttatcctaaatattttattatctttaaatttgtttctgtattattatatgtgctcctgaagcgagcactctttttatctatgatacttccataataatctcttctatttatagctattggtagttccccaccagaaaaatacataattctggtgatagaaatttttatttgctgtttaggtttgtgactgaattgtgagaattcagttgtgatttttaacatgtctcagatatatatactaacacgtctaatatatactatctattttattggtttattttgaaaaacatgggtatagaattatttaaatattattttatttatttaaatatttattaaatatatttatttatttaaatattatttttacattaaatattattttaaatattttggaaatactggtatttttgaatagatgctgtttctacaaagctgtgtgatgggtattataactgttatatacacatacatataattttgttttcctttttaagagaggattcttttcatcctaaatcttttacctttcaatctttgtatctattattacacgtgctgctgaagggagcatggattttatctatgatacttagttaacatatatattacatttatagctatgtagtagttcccctaaattcttgtaaaaataaatttttatttgatatttcatatatgtttgaaatgtgagaattcagatgtaattttttaccttgttttggcatgtttgtatattactttaaagagaatgtgtgttctaaaggaggacatgagctgtgtgttttcaagagaacaatagagtgggtctcttggggaaacataataaaaatgaacttttctcacctt

SEQ ID NO: 407390 - DNA, 1000 bp, Homo Sapiens
atccagggaggtgagctgggggccccggagaatctccaacctccgccagccgcaaccgaacttggaccaagtacgtcgccccagatgggcaggaggacacccgcccaggtgcccggcgtcgaccggcagcctccgcacagcagaccttgcctgcctactgcccaggcctgcaccatgtcccatcacccagcggccagccatgatggggcccagcctctcagagtgctcttccggagactagaaaacagacgctggagctccagcctcctggcggccccctcatttcactctcctgagaagccgggagccttcctcgctcagagccctcatgtgtcagagaagtctgagggtccctgtgttcgtgtcccaccgaacgtcctctatgaagaccttcaggtttcctcctcctcagaggacagcgattctgacctgcagtgagactgcaggtggcaggggctccttggcctccagctcccgtgacttggaggggactgtgggactgaggagagcagagcagagagcacactctgtgcggtgactccgaagctccccggctgtggcgcttctgtggatgtgggagcccaggccaggcagggagcagatgcagggactctgcctcattgaattctggtgagggacgttgtagttggcgtggttctccggaaacgcgccaggaaaagcttccgtgccagagattcgttgcctcagaaactgcgtgacgcgcaggagtcagacttccgctgggacgtcaataggaaactggggaattactgtgtatttgctctctagatgactgaataagggaaaagttagggaaccctgagaggtgcagcccttccgctgtgccccgccctgagagcagtgtttcggacgctgggaagcgtgctgtgcgaagcgctctcggggtctttcctcagcctcgaaaactgggctctggaatgcctttgtaaacaggtgtgttgaatttgttttgaagtgaataaaattctcaaaaagatga

SEQ ID NO: 407391 - DNA, 1000 bp, Homo Sapiens
atccagggaggtgagctgggggccctggagaatctccaacctccgccagcagcaaccgaacttggaccaagtacgtcgccccagatgggcaggaggacacccgcccaggtgcccggcgtcgaccggcagcctccgcacagcagaccttgcctgcccactgcccaggcctgcaccatgtcccatcacccagcggccagccatgatggggcccagcctctcagagtgctcttccggagactagaaaacagacgctggagctccagcctcctggcggccccctcatttcactctcctgagaagctgggagtcttcctcgctcagagccctcatgtgtcagagaagtctgaggctccctgtgttcgtgtcccaccgaacgtcctctatgaagaccttcaggtttcctcctcctcagaggacagcgattctgacctgcagtgagactgcaggtggcaggggctccttggcctccagctcccgtgacttggaggggactgtgggactgaggagcgcagagcagagagcagactctgtgcggtgactccgaagctccccggctgtggcgcttctgtggatgtgggagcccaggccaggcagggagcagatgcagggactctgcctcattgaattctggtgagggacgttgtagttcgcgtggttctccggaaacgcgccaggaaaagcttccgtgccagagattcgttgcctcagaaactgcgtgacgcgcaggagtcagacttccgctgggacgtcaataggaaactggggaattactgtgtatttgctctctagatgactgaataagggaaaagttagggaaccctgagaggtgcagcccttccgctgtgccccgccctgagagcagtgtttcggacgctgggaagcgtgctgtgcgaagcgctctcggggtctttcctcagcctcgaaaactgggctctggaatgcctttgtaaacaggtgtgttgaatttgttttgaagtgaataaaattctcaaaaagatga

SEQ ID NO: 407392 - DNA, 1000 bp, Homo Sapiens; identical to SEQ ID NO: 294887

SEQ ID NO: 407393 - DNA, 1000 bp, Homo Sapiens; identical to SEQ ID NO: 119241

SEQ ID NO: 407394 - DNA, 1000 bp, Homo Sapiens; identical to SEQ ID NO: 224953

SEQ ID NO: 407395 - DNA, 1000 bp, Homo Sapiens; identical to SEQ ID NO: 294890

SEQ ID NO: 407396 - DNA, 780 bp, Homo Sapiens; identical to SEQ ID NO: 294891

SEQ ID NO: 407397 - DNA, 832 bp, Homo Sapiens
ttcagcagaaccagagctactcccctggaatccaaccagtaagctgttatcagaattctccagccactcctggataccattgccaacaagctggaaagaactgtgtaggaggaaatgccagacttgctgagtcaggcaacttcttcaacccaaggttgactggaaatgagcgtgactgcatccatgggaacacaggagcacctactcaatgcttggccctataaaatcgtaatgatcccatgaagcaagtattattttgcttcatggaaaatcaaccgaaaatggattaaagacttaaatgtaaaacccaaaactgtaaaaaccctagaagacaacctaggcaataccatcctggacacaggaactggcaaagatttcatgacaaagacaccaaaagcaaacacaactgaagtaaaaattgacaaatgggatctaattaagagcttctgcacagtaagagaaactatccacagagtaaacacacaatctacagaatgggagaaagcatctgcaaactatgcatgtgacaaaagtctactattcatcatctataagaaacttaaacaaatttacaagagaaaaacaaacaaccccattaaaaagtgggcaaaagacatgaacagacacttttcaaaagaagacatacatgcagccagcaagcatatgaaaaaagatcaatatcaccattcattagagaaatgctcattaaaaccacaatgaaatagcatctcacaccagtcagaatggctataataaaaagtcaaaaaataacatgccggcaaggttgcagagaaaagggaacacttatacactgttggtgggagtttaaatt

SEQ ID NO: 407398 - DNA, 1000 bp, Homo Sapiens
atttgaaggtggcttcttgagcttttgtagtggtacttaaaagtgatttattttcatctttcctttcctcatcttcctttgcttccttatcattaaaattgtactttgtgttgatgtttgcttctcatgggacatctaataggttaaccagagcgcaaagaaacaagtcatcttgtcctcagggacagaattcaacgccgtcaaatctctcatattgggaaaggttttaggtaagtaggagaaagagctttttcccaaaaaatctaagtgtcatgtcacaaactctggaagcattcatcatgctgaaagaagctccttgtcttacttgaataataatttcacagtgagtgacaatcaaggtgcaaactgtactcttgcctgagtgtacatataatcatgagtaagtgctgcctgtgagatgtgcaagggcgttcctggaaaaatacctccacacttaacctctcacttggcaatcatgcataatgaatcacggtatttttctaacccttcttgaaaagtgaaatgttatcaaagctgacacgaagttcacagattatgtatgtattaatcaacatcaactccggagaccatcattcaatgataaaactacatttgagttgaacacaagagaaaaaactggtaatcttattacagcagatgaatacagttttatttctctctcaagccctgctttgcctgttgtttccatcctttttgactttagtatctaacaggaatggggaggcatattcataaatatctgttacgcaaggtagaaagttacagtaattgtctatcatattgtctatcataacctgttgtaaaagcacagttagctttacatttaataaaggaactgaggaaagtaatcttttttaaaaaaaacccatcttatgtaactcaattaagaaaatgaactatactttaatattaggatcaaaaagttgaataatatttattatatacatctttgtttccttccaaataaaggagaacatgg

SEQ ID NO: 407399 - DNA, 1000 bp, Homo Sapiens
ggaattgtttaaggaagaagatctgacggaagaggaagatgggggaatcatccgcagaatagggactcgcggtgaaggctatgtcaagcccgatgagggcgctatggtggaggttgcgctggaagggtgctgcaaggaccagccctttgaccaacgggcgctccgctttgaggttagcgagggggagaacctggatctgccttatgatctggagagggccattcagcacttggagaaaggagaacattccactgtgtacctcaagcccagctatgcttttggcagtgttgggaaggaaaagttccaaatcccaccaaatgccgagctgaaatatgaattacatctcaagagttttgaaaaggccaaggaatcttgggagatgatttcagaagagaagctggaacagaacaccatagtgaaagagcagggcagtgtgtacttcaaggaaggcaaatacaagcaagctttactacagtgtaagaagattgtgtcctggctggaatatgagtctagtttttccaatgaggaagcacagaaggcacaggcccttcgactggcctctcacctcgacctggccatgtgtcagctgaaactacaggccttctctgctgccattgaaagttgtaacaatgccctagaactgggcagcaacaacgagaagggccccttccgccggggagaggcccacctggcggtgaatgactttgaactggcatgggctgacttccagaaggtcctgcagctctaccccaacgacaaagccgccagggcccagctggctgtgggtcagcagcggatccacaggcagcttgcccgggagaagttctatgccaaaatgtttgagaggctggctgaggaggagaacaaggccaaggcagaggcttgctcaggagaccatcccactgacacagagatgaaggcggagtgcaagagcaacacggcgggagccagtctcaggtggagacagaagcatagcgcctctcaccagccctactcctga

SEQ ID NO: 407400 - DNA, 1000 bp, Homo Sapiens
taaaaaaaatagcttaactgaagatcactaattccttttctaaattttgaactgctctaggcataaatatcattgtgtattatcctttcatctaatcacttttggaatgtaaactgaaggctgttcactccaagttaagttagcatttacatgatgtttattaaatctgccagtctgatcaaaggtttatgaccatagggccaaattcccatagattacccaaaattgaatatgtgcagttaactggaacatgtctcattaaggtttacatacacactaagacagcaaaggattggaattaactttatggagacagttccagggactaatattgaagcagtggttatttgataatgcatggaaccaccatttggattcaataaaccaattacataaaagcaatgatgctacgctcttcatattccagataccaactgcctaccaaggactaatgagatggtatatttcttccacatcagggcaagctgaaaatatattgattcagcgttactgttacgtaaatgaatttccatcttctcatatgtgttatttttgaaagaatgaatacactctctgtcttaaatccgctcttaacaaatgatctcttctcagaatactacatctgtattgagagtacagacagcccattggtcactgcaccttttgcaagacagcgaaacggatgcatcaaattgcattgatacatcatcaccatcaatcttttgcactgatttttagacttaatcttcttatttgaaaataaactcatttttaaataaaataaaaaatattttagggaaagctctataaaattaaaattacagaattatatgctttttaaaatttatgcaaaaatgtgcagacaaatgtattctgtattggtttatgtatcactttgcccttgtatattttgagattattaagatttgttgacttttttggtttgatatttatcatctgttaaatttttccttttaaattattaaatgcaaagtgcaag

SEQ ID NO: 407401 - DNA, 1000 bp, Homo Sapiens; identical to SEQ ID NO: 224954

SEQ ID NO: 407402 - DNA, 645 bp, Homo Sapiens; identical to SEQ ID NO: 294893

SEQ ID NO: 407403 - DNA, 1000 bp, Homo Sapiens; identical to SEQ ID NO: 294895

SEQ ID NO: 407404 - DNA, 884 bp, Homo Sapiens; identical to SEQ ID NO: 294896

SEQ ID NO: 407405 - DNA, 1000 bp, Homo Sapiens
cccgggagaggcggccgacgcgtcccccgaacccagcgccgacgaggacgacctgatgacctgctccaatgcgcgctgccggcgcaccgagaccatgttcaacgcctgcctctacttcaagtcctgccacagctgctacacctactactgctcgcgcctgtgccgccgcgaggactgggacgcccacaaggcgcgctgcgtgtacggccgcgtgggcagcgtgtgccgccacgtactgcagttttgccgcgacagcggcccggtgcaccgcgctttctcgcgcatcgcgcgtgtcggcttcctgtcgcgcggccgcggcgtgctcttcctgggcttcccaagtccaggctcggccgacaacttcctgcgctttggcctggaggggctgctgctatcccccacctacctatcgctgcgtgagctggccacacacgcggcgcccctgggcagctacgcgcgcgagctggcggccgctgggcgcctctacgaaccggcagagtgcttcctgctcagcgtgtccgtggccgtgggacccggcaccgcgccaccggggacaccggccctgcccgcgcccgcgccacgcagccacgggccaacagtgcgcaagttcgccaaggtagcgctggcggccggcagccccgcgcggccgcccccggcgcggagccgcgagcccgacatggagacgctgatcctgacgccaccgccgggcacggcgggcctggatcaggacggcgaggcgggccggcgcgcgcgcgaggtggccttcatccacatccagcgcgagctgcggctgcgcggcgtcttcctgcgccacgagttcccgcgcgtctacgagcagctttgcgagttcgtcgaggccaacaggcgcttcacgcccaccaccatctaccccacggaccggcgcaccggccgccccttcatgtgcatgatcatggccgcctccgagccgcgcgcgctcgactgggtggccagcgccaacctgctggacgacatcatgtga

SEQ ID NO: 407406 - DNA, 1000 bp, Homo Sapiens; identical to SEQ ID NO: 119242

SEQ ID NO: 407407 - DNA, 1000 bp, Homo Sapiens
gccgcagccacagccccagccccagctcctaggagccaggcccgggccagggagatgcaggatgaggagacgaccacaggcgcccagggcaggacgaggtgccgccctcgcccgggccctctgacccctctcttctaccgcgtccaggaggggggcgtgtcctggtgctgctccctccgactcacctgaggatccagccagtgaccacggccactccccacgcctgggagggaggtgctaaagtctgggtgggtggagggcaggcaggtggctgggtaggagggtggccagattcacagatgagaacacagggcattcggttaatttcagacaggcaatagtggggaggtcattttactaagaagttgttgtttatctgaaatcaaatgcaaccgcaccctgcgtttcttctggggtgcagggggagctgagtggcaggacaggacttggacctcggaggggtctgagcagcaagacactccggctggagctctgggcagaggcaggggagaggacacagggtggcctcaaagaggggatgggcagcctcctcacaggtgggctgggctggcaagggctccaaggcccatcactcttgatcctcaaaggactgtggccaaggcctctgcgggctctggcctgagacagcgaaggctctgcctgcccctccccagtgcagcagcccctgcagggtgggggtctgtggcagagccgcgagcccctccccgggagccctgggtgcaggtgcagagggagaattcggtggcctcagatggagggctgggctcctggggttgtcccgggggctcctgtggggcagctggggacccacagccaagaggagtcagagatgaggtgggaaggtcggtgaggggcccgaggtggcagaggaagggggctgcctggctgggtgctgggtgggggtcctcaagactgtgggagaccctggctgctgagcagagaacacatggatgcagcaccaataaaattctatcttttc

SEQ ID NO: 407408 - DNA, 1000 bp, Homo Sapiens; identical to SEQ ID NO: 294901

SEQ ID NO: 407409 - DNA, 844 bp, Homo Sapiens; identical to SEQ ID NO: 294902

SEQ ID NO: 407410 - DNA, 1000 bp, Homo Sapiens
ttctggagtatgtatagctttaatgaatgaaatttaatggacctgattaaaatgaagggatttaatcgttgttaaagttaagttagtcaaataaattacctactggaatatagcccaagccagtaaaggtttattatttgcattttcatgcttttattttctccttccattcataagtatatacttgaaagtacatctgtagcctatgatttgagtctattgaagttctaggaagaggcaaactacaaactactaggattctgatttcagatgtagtcattccagaaccttctctttatgagttcacctgctagtacaatctccacaacttgaatggcattggttgttctataattcctgccacaagcatcacaagttgtacatcatcaaggctccctttgcactcccaagaagaactggtaattttaaacaaaagtatgtgtctttatttgtattggaaaatactgtctttaaattgtttcttgttgacactccccacaatggaaaaattaccgaattaaacctgttttatggatggcagcttggagcatagcaagaagttggaggatttgaattccattcccagttctcattgtgttttgtttcttaaaactataataatcggttactgttataaagtttaaaaggtggttttaatgtgaatagcaaattctggtatatcgtgactaacgcttaagaatgcctgtctttgagaggaaggtgttataatattaatgaacagtgccaaatacactgtgcatatctgcaatttaatctttgaatgtatgttactggattagctccctcctcctgtgtgatggtaccatgcatagagtcaatcaaatccttgtgatgttttgtatggactttgacaacatgtaaataatgtgtaaagccagtttttatgattaaggaatcaaatttattgaattttattattgaaagttgaaacttaacatgtatgaacaaaaaccaataaaagaatatactcttttcattg

SEQ ID NO: 407411 - DNA, 1000 bp, Homo Sapiens
tctctctgacaggcaccgatgtgagatgccgagtcccgagttgtgtctggtctgtgagatgtcgtcgctgtttcgggagttgtattctggaaacccgtctcctcatgtgccctataagttactgcacctggtgtggatacatgcccgccatttagcagggtacaggcaacaggatgcccacgagttcctcattgcagcgttagatgtcctgcacaggcactgcaaaggtgatgatgtcgggaaggcggccaacaatcccaaccactgtaactgcatcatagaccaaatcttcacaggtggcctgcagtctgatgtcacctgtcaagcctgccatggcgtctccaccacgatagacccatgctgggacattagtttggacttgcctggctcttgcacctccttctggcccatgagcccagggagggagagcagtgtgaacggggaaagccacataccaggaatcaccaccctcacggactgcttgcggaggtttacgaggccagagcacttaggaagcagtgccaaaatcaaatgtggtagttgccaaagctaccaggaatctaccaaacagctcacaatgaataaattacctgtcgttgcctgttttcatttcaaacggtttgaacattcagcgaaacagaggcgcaagatcactacatacatttcctttcctctggagctggatatgacgccgtttatggcctcaagtaaagagagcagaatgaatggacaattgcagctgccaaccaatagtggaaacaacgaaaataagtattccttgtttgctgtggttaatcaccaaggaaccttggagagtggccactataccagcttcatccggcaccacaaggaccagtggttcaagtgtgatgatgccgtcatcactaaggccagtattaaggacgtactggacagtgaagggtatttactgttctatcacaaacaggtgctagaacatgagtcagaaaaagtgaaagaaatgaacacacaagcctactga

SEQ ID NO: 407412 - DNA, 869 bp, Homo Sapiens
atgggcagagtgaggaaccgcgccactgctcagcggcggaggcgaaagcggcccggggatcctcccgccgcctgcgcggccatcgcggtcacgggcgccagccgcgcgcagtgcccccgggtccaagtcggggtcgggagccacgcggcggccaagaggtggctgggtaggtggcgacggaagcgccgctggcggcgggtccggaaggcgggccccagagacctgctgccctccgcgccaaccccggacccgccggggcccgccccgtcccccaaggatctggacctgggcgcacagcgggagcgctgggagacgttcaggaagctgcggggcctcagctgcgagggcgccgccaaggtcctgctggacaccttcgagtacccgggcctcgtgcatcacaccgggggctgccactgcggcgcggtccgctttgcggtctgggcccctgcagatctgcgcgtcgtggattgcagctgcaggctgtgcaggaagaagcagcaccgccacttcctcgtcccggcctcgcgcttcacgctgctccagggcgcagaaagcatcgtcacctatcggtccaacacgcacccggcgctgcacagcttctgcagcaggtgcggggtgcagagtttccacgcagctgtctctgacccccgcgtgtacggcgtcgccccgcactgcctggacgagggcaccgtgcgcagcgtggtcatcgaggaggtcggcggtggcgacccgggggaggaggccgccgaggagcacaaggccatccacaagacgtcctcccagtcagcccctgcctgtccccgcgaacaggagcagtgattggggccgcaagcccgcctgaaaccggcccgggcggccctgcggggagc

SEQ ID NO: 407413 - DNA, 1000 bp, Homo Sapiens; identical to SEQ ID NO: 294903

SEQ ID NO: 407414 - DNA, 1000 bp, Homo Sapiens
aaatgggagtgaaagaggaacttgtctctggaggccctggctgtcttccacaaatgactccccaaggcagatgaggaagctggtggatttggctgctggtggggcaacggctgctgaggtcaccaaggctgaatccaagttccatcaccctgtcaggctcttctggcctaaatcccgctccttcgactatctgtacagtgctggggagattttactgcagaactttcctgtccaggcaaccatcaacctatacgaggactcagacagcgaagaagaagaggaagatgaagagcaggaggatgaagaagagaagtaggaggccaatgaaaaggggccagaagggtgtgtgagggtaccagggtccataccctacagcgccacagctcatcccccttcctcacccctaacctatccaaatggaggcagccagagtctgattggggttcagtttgtctggcaagttttcacagacatcagttagccggaagtattagtccagcagatagagctttctggactgaaaattgggtcatctagctgcccagctcaccctggcttacctgaatggcctgtgagctcaggcctcttgcatctcattgtctgggctgctgttgtgttgaccatgggagggttctaggagctctagaaggaaggcttgctgaagcccccaggaagcagagcagggcagggaatgcccttgtggagggaagtagtcattcctcaggccctttgactccctagccttcccaggtggccatgtagtcccgtctctctgtggaaagcctgacttctggcttcaccccaaggaataccaacagcagatccatgcaaggttggggtgcctttttgatgagtcttacaggaagggaaggcagtgtgtagagaatcggcttgctctggggatgcctccccattttgcctgctgtccattgaagtctgtgtgttggcatgagatgaatcaggagaaaaataaactggatggtgttttcctttttcttgg

SEQ ID NO: 407415 - DNA, 898 bp, Homo Sapiens
ggaggaccaagagtaggcagcagcggcggcggcggaggaggaggcggtggtggaggtgcgcggcctgaagaggaggatggaggagcagcagaaggagggcgaggccgaggtcgcggagcactggttttccaagtgggagcgccagtgcctggctgaggccgagcaggaggagcagctgccccccgagctgcaggaggaggcggctgcagagttggcagggctcaagagcgagaagcagaagctgtggcacctcttccagatctcggccaccgccgttgctcagctttacaaggattctgggtgccaacagcaaggactttccatgtgggaccccttccagaatgcggccatggccgtgaccagcctctacaaagagagcggggatgcccaccaacgaagttttgacttgggtgtccaggttggccaccagcgtcgcatcaaagatgtgctggagtgggtgaaaaagggccggagcaccattcgtcgcgaagacttgattagcttcctgtgtggcaaagtgccccccgctcctcctccacctcgcactcctaggacacccccgaagccacccactggggtcaccagccaggctgtggcaactgagtccagctcatcggtggacgtcgacctgcagcccttccaggaggcgatcgccctgcatggcctcagtggtgctatggccggcatcagcatgcgatcgggcgactcgcctcaagacagcggtgtcgccagcagtgggcgccgaaaaactagcttcttggaggacgacttgaatcccttcgactcagaggaactggccctccacctggacagtggggggatccgcaagcgcacctcggcccaatgcagtgatggcatcacagactccccaatccaaaagcgcaaccgaatggtctaa

SEQ ID NO: 407416 - DNA, 741 bp, Homo Sapiens
atgaatggtctggatccaagaagaattgaaactcctaaaaatgactccgaacataaatttcaacataaccacgatagtgtgtctgaagcatttgtgtatgcagggctgcgcaggtttcccctttctgcgaatggaccactggaggggttcaaagattccagttctaatatgggaatgagcctctttgatctcttccggggctttttcggctttcctggacctcagagcttcagcccaggaggagggatacgtttccacgataacttcggctttgatgacctagtacaagatttcaatagcatcttcagcaatatgggggcctggaccttgccttcccatcctcctgaacttccaggttctgagtcagagacacctggtgagagactgcgggagggacaggcacttcgagaatcaatgcttaagtatccagatagtcaccagcccaggatctttgagggggtcttggagagtgatgcaagaagtgaatcccccaaaccagcaccaggagcgtcttggcccggttctacagccccagcccagatctacttcaagagcatctctgtgaccaaaatcactaagccagatgggatagtggaggagcgctggactgtggtggacagtgagggccagacagagaccgcagtaacccaacacgaagcagatagcagtcctaggatgatccaaaatcaccaagacctccagctctggatgatgccttctccatcctggacttattcctag

SEQ ID NO: 407417 - DNA, 1000 bp, Homo Sapiens
ggtactgctgaagaaacgccattacctgaggccctccctgtctgtgtacccagaggagtcgctggtgattgggagctcaaccctgttcagtgctctgctcatcaagtgtctggagaaggaggttgcagcattgtgcagatacacaccccgcaggaacatccccccttattttgtggctttggtgacacaggaagaagtgttggatgaccagaaaattcaggtgactcctccgggcttccagctggtctttttaccctttgctgatgataaaaggaagatgccctttactgaaaaagtcacggcaactccagagcaggtggacaagatgaaggctatcattgagaagcttcgcttcacgtacagaagtgacagctttgagaaccccgtgctgcagcagcacttcaggaacctggaggccttggccttggatttgatggagccagaacaagcagtggacctgacattgcccaaggttgaagcaataaatagaagactgggctccctggtggatgagtttaaggagcttgttcacccaccagattacaatcctgaagggaaagttaccaagagaaaacatgataatgaaggttctggaagcaaaaggcccaaggtggagtattcagaagaggagctgaagacccacattagcaagggcacgctgggcaagttcactgtgcccatgttgaaagaggcctgccgggcttacgggctgaagagtgggctgaagaagcaggagctgctggaagccctcaccaagcacttccaggattgaccagaggccatgcgtccagctgcccttccacagtgaggccaggctgcctggccttgtcctcagccagttaaaatgtgtttctcctgagctaggaagagtctacccgacataagtcgagggactttatgtttttgaggctttctgttgccatggtgatggtgtagccctcccactttgctgttccttactttactacctgaataaagagccctaagtttgtactaaaaa

SEQ ID NO: 407418 - DNA, 1000 bp, Homo Sapiens; identical to SEQ ID NO: 294904

SEQ ID NO: 407419 - DNA, 1000 bp, Homo Sapiens
gctctatctgaggctggaccggaaccggctgcgggccatcccacgcggcctgccgtcctccctgcagttgagctggagcccccaggatggggaggagctgcacctgggcaccaacctcatcgaggaggtggcggagggcgcactgagccacatccacagcctcagcgtgctggtgctcagccacaactggcttcaggagcactggctggcaccccgagcctggattcatctcccgaagctggagacccttgacctgtcctacaaccggctggtgcacgtgccccgcttcctgccgcggggcctgaggcgcctgacgctgcaccacgaccacatcgagcgcatccctggctacgcgttcgcgcacatgaagccaggcctagagttcctgcacctgtcccacaacaggctgcaggctgacggcatccacagcgtgtccttcctgggcctgcgcgcctcgctggcggagctgctcctggatcataaccaggtgcaggccatcccacgcggcctcctgggcctcaagggactgcaggtgctgggcctgagccacaacaggatcagacaagtgcccttgaattccatctgtgacatgcgcgtggctcaggactccaaccttacctccacacacctggagaacaacctcattgaccggcgccgcatcccgcccactgccttctcctgcacccgagcctatcacagcgtggtcctccagccccagcggcggggggaggagggctcctagtcctgcctgccgccttcctccagcacacactctgcttctcgagggggtggaggggcaggctgaggtgtgcttggcctttgcaccactgggagaaaggtctagaagaccccactgcttccagtgcacccacttcccattgactggtgaggccgcttcacttagcaaatggcccaggggcgaaaggtggcactggtttgtacttgaacataataaatgcagcttgggcaggctcaccagccagcctccctccctccagga

SEQ ID NO: 407420 - DNA, 684 bp, Homo Sapiens
atgtgggcgagcctaagggccaaagtcggcgccccgctcacctgtgcccgccgcgcgtctgggctgggaggcgtgggggatgggctcgcgctggctgccctgccgggagctgtggaagggctggccaggagggaggaagaggcttttgcagacgctgccgccaccaggagccctgtagtatcagccatagtcaatcccacggtgttcttcaacattgccatcaatggtgagcccttgggctgcatctcctttgagctgtttgcagacaagtttccaaagacagcagaaaaccttcgtgttctgggcatgggagagaaaggatttggttgtaagggctcccgctttcacagaattattccagggtttatgtgtcagggtggtgacttcacacgccataatggcactggtggcaagtccatctatggggagaaatttgatgatgagaacttcatcctaaagcatacaggtcctggcatcttgtccatggcaaatgctggacccaacacaaacggttcccagtttttcatctgcactgccaagagtgagtggttggatggcaagcatgtggtctttggcaagatgaaagaaggcataaatattgtggaggccacggggcgctttgggtccaggaatggaaagaccagcaagaaaatcaccattgctgactgtggacaacttgaataa

SEQ ID NO: 407421 - DNA, 559 bp, Homo Sapiens
atgaccagcaattttgatgaactaacagtgaacccatcaagagagttgcttctatatccaaagcttgatgaaggcatacagtgctactattccgtgcgaggtctgtgcctccaagatgacaaaagaaggaacaacggtcgtgccaaaaagggccatggccacgtgcagcctatttgctgcactaactgtgcccaatgcgtgcccaaggacaaggccattaagaaattcgtcattcgaaacatagtggaggccgcagcagtcagggacatttctgaagcgggcatcttcgatgcctatgtgcttcccaagctgtatgtgaagctacattactgtgtgagttgtgcaattcacaacaaagtagtcaggaatcaatcttgtgaagcccgcaaggaccgaacacccccaccccgatttagacctgcgggtgctgccccacctcccctaccaaagcccatataaggagctgagtccttaaagactgaagacagactattctctggagaaaaaataaaatggaaattgtacttaaaaaataaataaataaataaataaaaaaaca

SEQ ID NO: 407422 - DNA, 969 bp, Homo Sapiens
atggggactacacataagaggcaggaaaaagcacaagttaaggaaagaatctttcagcgacagtggactaaggaaaagaaaatgagcagaggtttccagagctggcagcactggctgtctctgcccctcagcctcctcttcctcctggccatgggggccaatgccacccttctgatcaccatctatctggaagcctctctgcaccagcccctgtactacctgctcagcctcctctccctgctggacatcgtactctgcctcaccgtcatccccaaggtcctggccatcttctggtttgacctcagatcaatcagcttccctgcctgcttccttcaggtgttcatcatgaacagttttctgactatggagtcctgcacattcatgatcatggcctatgaccgctatgtggccatctgcaagcccctacagtactcatccatcatcactgatcaatttgtcgctagggctgccatctttgttgtggccaggaatggccttcttactatgcctatccccatactttcttctcgactcagatactgtgcaggacacatcatcaagaactgcatctgtactaacgtgtctgtgtctaaactctcttgtgatgacatcaccttgaatcagagctaccagtttgttataggttggaccctgctgggctctgacctcatccttattgttctctcttacttttttatcttgaaaactgtgctaaggattaagggtgagggagatatggccaaagctctaggtacttgtggttcccacttcatcctcatcctcttcttcaccacagtcctgctggttctggtcatcactaacctggccaggaagagaattcctccggatgtccccatcctgctcaacatcctgcaccaccttattcccccagctctgaaccccattgtttatggtgtgagaaccaaggagatcaagcagggaatccagaacctgctgaggaggttgtaa

SEQ ID NO: 407423 - DNA, 792 bp, Homo Sapiens
atgggcatcgccgagtccacgccggatgagctgccgtcggacgcagaggagcagctgcgcagcggcgaccagcagctggagctgagcgggcggcggttgcggcggctgcccagcgcagtgtgcgcgctgagccgcctgcagaagctgtatgtgagcggcacggggctgcgcgagctgccggaggagatcgaggagctgcgcgagctgcgcatcctggcgctggacttcaacaagctcgagcgactgcctgacggcctgtgccgcctgccgcgcctcacgcgcctctatctgggcggcaaccggctgctggcgctgcccgccgacttcgcgcagttgcagagcctgcgctgcctctggatcgagggcaacttcttgcggcgcttcccgcggccgctgctgcgcctggtggcgctgcagtcgctccagatgggcgacaaccggctgcgcgcgctgccggccgagctgccgcgcatgacgggcttgcgcggcctctggctctacggcaaccgcttcgaggagttcccgcccgcgctgctgcgcatgggccgcctgcacatcctcgacctcgaccgcaaccgcctgggcggcttccccgacctgcacccgctgcgcgcgctgcgcgtcttctcctacgaccacaaccccgtcaccgggcccccgcgcgtcgcggacaccgtgttcctcgatgaggaggaggaagacctgctcataggcggcgctggttcccgggctctgggcgcccccgggggcagcttccgcgccctggaagccgctccaggactgggcacctga

SEQ ID NO: 407424 - DNA, 1000 bp, Homo Sapiens; identical to SEQ ID NO: 294908

SEQ ID NO: 407425 - DNA, 696 bp, Homo Sapiens; identical to SEQ ID NO: 294909

SEQ ID NO: 407426 - DNA, 999 bp, Homo Sapiens
atgggggaaagaaacgacctagaaatgtccacagacctggactctgaagtctctgatggattggaggactcaggcctctctggaagaagccggctgctcttggaaatcctacaccagctggcaaacactgaccctggcacccaagagaggccattttcacagcttctggaaagagaggctattttcacggcttctggaaagagaggctgggtttgcacagtgcttggcacagatatgcctctcattccttgcaacttgccgttaaggcaggaatatgaatgtgggttgaaagtggatgaatggaagcttggaaagggaataagagaagcccagggcacagtcacttcctgtagctctccaattcaaaggcatcccgggtgtaagcccacagttcagtgtatggctgagatgaactacctggcgattaaactgcagccagctgccttcaggcatcaaaggtcttcccctgggttctcctgggggtatgaaaggagaaatcacagagacactccgagccccttctgcttctgccatgccagtgccactaccgccacgggcctcaccatctcctctttcttctcccacctctttgacaagaagcagatgcacattctgatggttggattggatgccgctggcaagacgaccattccgtatgaactgaagttaggggagatagtcaccaccattcctaccgttggctgcaatgtggaagcggtagactataaaaacattcgtttcacagtatgggatgctggtggtcaagatagaattaggcctctccggaagtattacttcccaaatacccaatatcttatatttgtggtagatagcaataatcgtgaaagaattaaggaggtagcaggtgagctgcagaaattgcttctggtagatgagttgagagaggcagtgctgctgctttttgagaatcacaggatttgccaaatgctcttcgatctcctcctaacaggacatgatctgttcaagccacgtgcataa

SEQ ID NO: 407427 - DNA, 1000 bp, Homo Sapiens
ccgccgcagcgttactcccagtgggcgcttccgtgaccgccgcagcgttactccccgtgggcgcttccgtgaccgccgcagcgttactcccagtgggcgcttccgtgaccgccgcagcgttactcccagtgggcgcttccgtgaccgccgcagcgttactcccagtgggcgcttccgtgaccgccgcagcgttactcccagtgggcgcttccgtgaccgccgcagcgttactcccagtgggcgcttccgtgaccgccgcagcgttactcccagtgggcgcttccgtgaccgccgcagcgttactcccagtgggcgcttccgtgaccgccgcagcgttactccccgtgggcgcttccgtgaccgccgcagcgttactccccgtgggcgcttccgtgaccgccgcagcgttactccccgtgggcgcttccgtgaccgccgcagcgttactccccgtgggcgcttccgtgaccgccgcagcgttactccccgtgggcgcttccgtgaccgccgcagcgttactcccagtgggcgcttccgtgaccaccacagcgttactcccagtaggtacttccgtgacccttgcagcgttactcccagtaggtacttccatgaccaccgcagcgttactcccagtgggcgcttccttgaccaccgcagcattactcccagtgggcacttccgtgacccttgcagcattactcccagtgggcacttccgtgaccaccgcagcattactcccagtgggcgcttccgtgaccaccgcagcgttactcccagtaggcgcttccgtgaccaccgcagcattgctcccatttccgaaggggatccagagacctttggggaggctcccctgctgggaacgtgggctacagacgtggtcgtcttatgtgaatctttagaccctggaacaccagtgcatcccaatctccgcaacaggtctctgttctccttcataattacttctcggggcttccacgggtatcacggcatcagttattag

SEQ ID NO: 407428 - DNA, 1000 bp, Homo Sapiens; identical to SEQ ID NO: 294910

SEQ ID NO: 407429 - DNA, 372 bp, Homo Sapiens
atgagggagaggccctcagggtcagccgaatgccagagaggcaggacaggcccaaagctcctgcttcatagctgtcagctgcagtgggggacagctgcacaaggaccaagcaggtctgtgtgtttacgcagggttctgccgcatggccctgccgagcagaagctgatggacgaccttctgaacaaaacccgttaccacaacctgatccgcccagccgccagctcctcacagctcatctccatcgagatggagctctccctggcccagtgcatcagtgtgcttgctcaacaggtgaccttacaggctccctactctttgcgaggaataagaaccagactgcgagaaccgatgggtacagaggcccaggtgtag

SEQ ID NO: 407430 - DNA, 402 bp, Homo Sapiens
atgacctccaggaagcctggcatggcctcagccagcacctcagctcccattgtccaaatcggctctcagggtcagagcagccaacagctgcggtccaggggatatacggatgagggtggcccagaacagaccaaggaattcatcttctcagagctgctgtccaacctgtactcgcatggggaccagaacacgctgatggaggagttggcagagaaggcacagtggggcggcgagatgctgcgcaagcgccacgtgctgacggaggcacccagcaacatcggtgaacatcaacacgaccactgtcagcacgcccacgggggcccgtggatgactcctggctgcagcacctcgttagtggtgactgaggcctggaagtcggggaccttggtgaccaagtgttga

SEQ ID NO: 407431 - DNA, 1000 bp, Homo Sapiens; identical to SEQ ID NO: 294911

SEQ ID NO: 407432 - DNA, 1000 bp, Homo Sapiens; identical to SEQ ID NO: 294912

SEQ ID NO: 407433 - DNA, 1000 bp, Homo Sapiens
ggacacagggtgtgagatctccctcatcccttggcagaagaagactcaagttcccagctttgttaggagcagagggatctgcttcagggtctccatgtggcccccccaagaattgctacttcaagctaggcactgcctggggatggctttcaccaacttatattacaactctgaactacagaggttttgcagtgtcaagaacctgagtgatattgagtgtaatgaagtctgccatgagatgctggtcatgtatgcccagatcgggggcatcccagagcaccccatcagtgcttgtgtggaccagattcttgaggatttagtcatgtacatgtacgccaacaagctggtcaagacctacagtgatagaagcccgactccaattaaagcaaggccacaggccccgcaggtccaaggactcccttcgtgttgtgtgcagcgcccccggaggcacacagcgatggagaggtgcttgccctcaacacttcaaaccctcaaagaagactcgtcggccgtgtgctcaccctggactcatccctgtgtccaggggaacaagttatttcctgagtggatagcccaagccacaattcagctctgggtgaaagtggtggactgcattgctgaaagccccatgagggagcctgccttcatcttcctggatgagccatccactggcatggaccccgtggcccggcgcctgttctggaatgctgtggcacacgcccacgagtctggcaaggccatcatcatcacctcccatagcccccagcacctcaagagcaagttcagcagtggctactccctgcgggccaaggtgcagagtgaagggcagcaggaggtgctggaggagttcaaggccttcgtggacctgacctttccaggtgtgtgccggccccggcagcccccactgggcagcgttcttgaagacaagcaccaaggcatggtccattaccatctgctgggccgcgacctcagctgggcgaagttgagcgcacatttttga

SEQ ID NO: 407434 - DNA, 1000 bp, Homo Sapiens
acacctgaccagtggccagcaccacactggggttgactgccttcaccgtgtccatgcctgctccggcagtgggagctcagtgccaggctgtggggggcatcttggaaagcagaggtgtccctgcaggatctctatgagactgtgttgtcggtggccgcgctggtttccccggagtagcgcccgatgtcactgccgagaccttaacggaaggtgcgcgtccagtcctcgcactgctgtgtgttctggtcagaatggaagtggtggcctccactaggagcttctgtgctttgggagaatttgtccaaactgtggtcccgtttgttctccaatcctgtgtagacaccatgacccagttgtgtaaacacaggccccttgcagctcagaggctgccctctgagagtcaccgtcgtgtcgctttggggaaaagatgagcccgcccggttcctctctgtgcacctcatgcctggggctccgtcccgtcctgggtgggttttcacctgcaccgctggcccctcccccgggagcgttggtggagccggctttctcagccaggagcctgttgcggggtcagcggctggagctcaaggtcggctcaggggactttctcgtgctggaggttggctgcggagcagcctgcatttctcggaaaacagggcccagggcctgctccacgccgctgtccacgtcttcaccatcccctcgttgcaggttcgaggccgagctcagacctgtggagcagaagctgagtgcgctgcagtccccgctggcccagaggcccttcttcgaggtgccctcacccctgggcgccgtggacctgtacgagtatgcatgcggggatgaggacctggagccactgtgacgccacccatgagaacgccgctgcggggccgctccacacgtgccacggccaccactgggacaccgccgcttgtgtaaaaactgttgtcttttgtggaaaatgagtgtgtttgcatggaatgataaatttttatttattcac

SEQ ID NO: 407435 - DNA, 684 bp, Homo Sapiens; identical to SEQ ID NO: 294915

SEQ ID NO: 407436 - DNA, 429 bp, Homo Sapiens
atggagaaggtggagtccctaggggctgctggcggcctcaaccgggattcccctggaggggcagccagaggagtgcccgcagcggtcacaggagtcgaggcaggcgctgggcagccctccagagtagtcttgtttcacggttctgggccccacgtgcactcagggggctccgaccggccccggagcatcctacgaaagaacagctccaacttgatgcagaaatcccccaatgtggagaaccccagaaggaagtctcagcactgggacgagatgaatatcctggccacctaccgccctgctgacaaggactatggatttatgatggtggatgagcccaacactccctaccacaggctgcaggacagttttgaggacctctctgccggctcctcctgctcagtgaatcctggagtgctggcagagaggtaa

SEQ ID NO: 407437 - DNA, 1000 bp, Homo Sapiens
tggagaactatttatgcagttagaaagagagggaatatttatggaagacactgcgtgcttttacttggcagaaatctccatggctttggggcatttacatcaaaaggggatcatctacagagacttgaagctggagaatatcatgcttaatcaccaagcatattattttcctcattgtacggcccctgaaatcttgatgagaagtggccacaattgtgctgtggattgttggagtttgggagcattaatgtatgacatgccaactggagcagctcatccattctttagacacattaactgggaagaacttctggctcgaaaggtggagcccccatttaaacctctgttggtggaggaggaggaggatgatgatagtgattattttttggtcatggagcataatgtgacccactttaaaaaacaacaaacaattcaatctgaagaggatgtaagtcagtttgattccaagtttacacgtcagacacctgtcgacagcccagatgactcaactctcagtgaaagtgcccatcaggtctttctgtgtgtgcctcacgaaatggctggaaagaagttaacaggtctaaaaatgaggttgaggacgtgggagactgtacacattggtggttttaggtgtgcatcgctgtgtagtgtgaaagaaaagttttcctttgaaccaaaaatccgatcacctcgaagatttattggcagcccacgaacacctgtcagaggcgcttcggccagcacagcaaatcctcagacacctgtggaatacccaatggaaacaagtggcacagagcagatggatgtgacaacgagtggggaagcattggcaccacttccaatacgacagccgaactctgggccatacaaaaaacaagcttttcccatgatctccaaacggccagagcacctgcgtatgaatctatgccacagcaatgcttttaatgaatttaaggcaaaaaaggtggagaggccgatgtgtgagcatcctacagggtga

SEQ ID NO: 407438 - DNA, 675 bp, Homo Sapiens; identical to SEQ ID NO: 294916

SEQ ID NO: 407439 - DNA, 828 bp, Homo Sapiens
atgacgtggaaaaacaacaagttcacggccattccagggcgggcctgcgccgcgctgtgccctgtaagccgactcccaccccggccccggccctttgtggggggtgtgcgcacggacagctctggaacaccctttcttcctgggggcagcttctccccctattccaaccacgtggccctagtggggctgccatgccatcccggaaccctacctgatgcagggtctctgcagctcagcctttcccacatgcggagcggccaaaggttacaagccagaccctttggatctctttctccggacttttctgccaagcttgcctcacaggtgcagggggcaggactggaaggaggtggcctggagctgctgaagcccacaggggctgggtctctaacggtggcctgtgaggtcttcagagacaccccagttgctgccattctcagcttcctggtgtccttccaatcggggcctgttgtttggtcggcggttgctgcaggccggtgtgagggtggggatgccacagtccaagggtgttcagggtcagagcttcttagggaaagatttgccggggataaaggctacttaatgaaggagggcctgaaagtactcatgggaaaggagttccttggatttttggagaatcaaaaagaccctctggctgcagacataacaatgaaggacatggaccagtgccaagacagcacactgaacttccagaacttgttttcactcactgcggggctcaccactgtggacaacaactattttgtagtacctatgaagcagaagggaacgaagcaggcagaactaagcaattactcagccctgtga

SEQ ID NO: 407440 - DNA, 1000 bp, Homo Sapiens
gagcgctgtccgtgatgagctgcaagaaatggctgtggagctgctagggctggggcgcaccctctttgtgccctccaacactatggccaacctcatctctgtgatgtgtcactgctggcgccggggctcccagctcctccttgggcaggagtgccacctccacgtctatgagcagggtggggtggctcaggtctgcgagctcatttgcctggagaactcacacagcatctcgggggtccggatcctccccatcaactacctacgccaggtgcacctcctggcccagacctatggggcctgggtccacctggacagggcccagctgatgaacgtggtgctggccctgcatgtcccgcccacctacattgtggagcactgtgactctgtgtctttctgcctctccaaggtgggaaagccctgggctggcctcccacagacagatggggctacgcatctgtccccaccctggcccaaggacagggatgtgagctggcaggagtctctcctctccacctcccagggcctgggcgccccagtggggtccctggctgggaggcccaaggacttcattgaagaagcctggcgcctccaaaaagccctgggtggaagcatgcaccaggtggggatgctggctgcggtggccctggtgggactggttgacacaaagcaggcactgtggcctgcaggcttctggatcctgggactcagggtggccattgagtcactagggcgggacccagggcaccagctgcttcagcagaccctactcagcgcagagtccagcctggggaagccctcggtggacggccaggattttgatcccaccttcgtggagacgaacatggtggtggtgagcatggctgggttgcgggccgtgagtgctgatgagctggcccacactggccacgtggcgtgcgtgccactgttcctatggacagagcagtccgtgcttccgtgtggcaccgcgacgtctcggtgtaggacactgaactggtgctga

SEQ ID NO: 407441 - DNA, 1000 bp, Homo Sapiens
tattataaatcatgtcagtgctccagagtttgcaacccgtgtcgtggtggcagtgcttgcaaggacagcagaagcaattttcactccactgcaaagagttcagacattgcttcaagaccacaagcatcatgacaaatttaccagcacttatcaggctttcaaggcactgaaatgccatagaattggagagcgttatcgaggcttgctgcccattcttttccagaatggactcaacaatgtcttgtttttcggccttcgaggtcccattaaggagcatctgcctacctcaacgactcacagtgctcatttggtcaatgattttctctgtggagattgtgaactgaatgtctatggaagatcagatgttcatgaaaagtctttgcgcagtggatgtccaacactgtacatggccatggtgattcgcactccagccagccccgacttcctgtatcagtcaatgataccaggatctccaggccacggcagcccattctgcactctccgccagggcctccagggcccaactgccctggattcctgtctggagcagcccccacggtcacaccactccggaatcactgtgaatgctttcctgcgtgtgcttttctggaactgctccccagggcgcagggatggctggtggctggagagtgatagctcctcccttcgctttcagagcgtctggagagaggaactaggagtcctacttcttttagcagaagtggcggctggccctggaatccagggctgcatgtgccacccttgggctccttgcatgggaagttgccgattccgaggaaagctacagtttccctcctgtgccccgaagggaatgttgcatctgctgcaatttgcctttgacaggaaaacactccctccttcagcaccccacacccacaccctctcccttgtcttccaacggtgcctggacaaggaagcctgggctctgcagctgggacttgtgctgctctcggtgtccttggcttctaagccacagtga

SEQ ID NO: 407442 - DNA, 855 bp, Homo Sapiens
atgacaaagaaaagagggaacaatggtcgtgctaaaaagggccgtggccacatgcagcctattcgctgcaggaactgtgcccgatgcatacccaaggacaaggccattaagaaattcatcattcacaacatagtggaggccgcagcagtcagggacatttctgaagcaagcgtcttcgatgcctatgtgcttcccaagctgtatgtgaagctacattactttttgagttgtgcagttcacagcaaagtagtcaggaatcaatcttgtgtagcccgcaaggaccaaacacccccaccccgattgagacctgcgggtgctgctctacaacccccaccaaagcccatgaaatcgaagagactgaaatttaattctcatggctcccagtttcaagtgggtgtcatgggcattgttgacatattaaagagaaaacagctaaaatggagagaaatgatcataaatctctacatgaatgccaaaggagagacagcatccaactttgagtggctgaagaatctaaatcatgtcagctatggctgtttgaccttcaaatatgaaagggagtgtaactaccacttgctaatatctgttcaagagaatttagcaagaaaatttggaaagcacagtggaactattctcattatacccacagcagagttccaagacaggatatcaggtgcatcagagaaagacaccatgcatgctgacttggtgtacgcaatggagagttctgccaggcaaattttgtgcatagccatgaggtataacctgggattggacatgaggaccaccgtctatgtcaacgccattgagaaagtgttcaaagtatacaatgaagccagagtgaccttcacgtag

SEQ ID NO: 407443 - DNA, 471 bp, Homo Sapiens; identical to SEQ ID NO: 294918

SEQ ID NO: 407444 - DNA, 1000 bp, Homo Sapiens; identical to SEQ ID NO: 119244

SEQ ID NO: 407445 - DNA, 1000 bp, Homo Sapiens; identical to SEQ ID NO: 294920

SEQ ID NO: 407446 - DNA, 453 bp, Homo Sapiens
atggcgcaggcccgcggcgctcaggccggccccgacccgaccaatcgagcggccgacgcgccggtgcctggccagccgagcgccgagttatcgaggaggcgccccctggcgccggcggccgctcctgcagtgtgtaggcttcagacaggcatgcaagttgcctttggaaagccccagggcaccgtggccagggttcacattggccaagtcatcatgttcatccacaccaagctgcagaacaaggagcatgtgattggggccctacatagggtcacgtttaagttccctggccaccagaaggtccacatctcaaagaagtggggctttaccaagttcaatgcagatgaatttgaatatgtggtggctgagaaacagctcagcccagatggctgtggggtcaaatccatccctagtcatggccccctggagaagtggcaagccttgtactcatga

SEQ ID NO: 407447 - DNA, 1000 bp, Homo Sapiens
acagcagcccttgactgtgttcatagacctttgcctcaagaacaggactctggatgaatacttcacctgcctctttctatgggtcaagcagagggaaggtttagtacacctgtgctgtaagaagctgaaaatgttgggaatgctcttccacaatatcagaaacatcctgaaaacagtcaacctagactgtatccaggaggtggaagtgaattgcaattggacactgcccgtcctggcagagtttaccccatacctcggccagatgaggaatcttcggaagctcgttctctctgacatagattctcgctacatttccccagagcagaagaaggagtttgttacccagttcaccactcagttcctcaagctgcgctgcctccaaaagctttatatgaactctgtttctttcctcgaaggccacctggaccagatgctcagctgtctaaagacctcgttaaacatcctcgcaataactaactgtgtgcttttggaatcagacttgaagcatctgtccaagtacccgagcattggtcaactaaagaccctggacctgagtggcaccagactggccaatttcagccttgtgccgctccaagttctcctagaaaaagttgcagccacccttgagtacctggacttagatgactgtggcatcgtagactcccaagtcaacgccatcctgcctgccctgagccgctgctttgagctcaccaccttcagcttccgtggaaatcccatctccacggccaccctggagaacctgctgtgccacacaatcagactcaacaacttatgcctggagctgtatcctgccccgcgggagagttatgatgttcgtggtatcgtctgccggagcagatttgcccaacttggggctgagctgatggggagagtgagggccttaagggagcccgagaggatcttgttctgtaccgactactgccctcagtgtggcaacaggtcactttacgacctggaggtagatcggtgttgctgttga

SEQ ID NO: 407448 - DNA, 1000 bp, Homo Sapiens; identical to SEQ ID NO: 294922

SEQ ID NO: 407449 - DNA, 1000 bp, Homo Sapiens
ctatttccctgctagacccccagcgcccagcggattccaaggctgcgctcccgccggctggtcccgggaggtagaaagtaggcagaggggcgtggcgtccctgtcgcccccacatgccagccctcctccaacgcctgacaccaccacaagccacggctgggaacactgggggcctcccaacccggcgcggggcgcacggccgcaggctggcgaggagggtggagagaaaagaggtgaggccaaagtaggtcacttagaaccagtgtgggcagagtccacacttgaaatggagtctgaaagcattgctgtttgtggcctgaagcctccagccaccacagaaaccaagattttccagacaatggttcctctcagttcaagtatggcagattttcggaagttttttgcaaaagcaaagcacgtggtcgtcatttcaggggctgatgttattgcggtaagtggggttccacccttcagacaagccggaggtcatggggaaaatgtcagtccaggccctggcagctcctctgtcctctgcccacgcttttctgggtgtgggagctccccactgcgggtgagaggtcaggccgagcaggagcccagtccgcacctcgccaccatcgaatgtgatgccctgctgggcggacagggccgccagggcatgatcatgacagaatatccatgggcggcacccaaggctggcgccaagaaccttctggaaatccactgtagcttatttaaactccatgtacctcttgtggagtcgtgtctgagaattatgagagtcgagagcaggggcttgccgcaacctcacgccctgtggtttggcaaaaacttggatcccgcctttctggaggagatgtctgccaagggagtgccagtgaccgaatttaacatggagaccacctcagccatgagaagattcaggtttcatttccagggaccctgtggtaggatgcttcctgaaccccttgctggtcatgaaaatgaaactgtttcttaa

SEQ ID NO: 407450 - DNA, 1000 bp, Homo Sapiens
agttttcaagccattttgcttcagagctcgttttgcagcagcaaactccaggccagagcccagacctcagctgtactgtgttctgtgtgcagggaagcccatgaactttgacagctatggagacatacatgtccctgctgtgatcctgaagaccttcctggtcaagtttcaggtgaaatcactagacaagaaatatcattcagactgcctagggctgtgttctgaagctacagagggttctagcatggtagagtgctacacaggaggtgaaagtatcaatgaacatgtcatcatcatgattgggcattggttcatgcaggccactttgaagattgttcacttggcctattctggacagcatatccctactttccaaccattcccacacctggagaataatggcaccccacatggtgagcacggaactgtggaccatcacaatgaaatccccacgacagtgtttctcatattgtgtgccacagaataccggtgttctgtgaataacctgcaggtgtgctatcaaaacttgggcataaggcaggatggcttgtcatcactggcaggtgctgccgaggggaagctgggatgcagcatgagctctgagagaatgaatctagctgcagaggcacagaagggggattggcattcctacctcaaacactgtgggaatggcgggacacagaccatcatacctgaaggagacattagaaagccaaagccagctgttcgcgctgaaacagccctgtgctttagtcagcatcgcgttcttggagaccgcatgttggctcctccgcacagccaaggctgcatcagttctctgcagaggaggcagctcgctccaaagccagcagagctcagggctgtgttccccaccctctcccctgattcaggccttactagccaggcccgttccatggagagctccattgggtgccccatggggagccttgctgcacgggtttatcctgattggcaagaagaggcaggatctgatctctaa

SEQ ID NO: 407451 - DNA, 498 bp, Homo Sapiens
atgctctttcgggtcctcacttccaaggtgacaaaaggaacaatgatcatgccaaaaagggtggcagccacatgtgtgcccaaggacagggctattaagaatttctttattcaaaacacagtagaggctgcagcaagtgtcttcaatgcatatgtgcttcccgagctgtatgtgaagctacattattgtgtgagttgtgccattcacagcaggaagcctgcaagaactgaacatctccacttctatttagacctgcagatgctggcaccaaagctcatgaataaaactccccagccagggtgtcgcaagggctgccgttgtgatccgcagggggtgaacgcaaccgcgacggctgatcgtctgtggctgggttggcgtttggagcaagagaaggaggagcaggagaaggagggagctggaggctggaagcgtttgcaagcggcggcggcagcaacgtggagtaaccaagcgggtcagcgcgcgcccgccagggtgtag

SEQ ID NO: 407452 - DNA, 605 bp, Homo Sapiens
atgggactcactatcaagggtctaatcagtgagctcaaccgtctcaagtatcaagcccaaaatataacatcaggtgataccacaactatcctgcctgctgcttgctgcaccatgaagtctgccaagctgggatttcttctaagattcttcatcttctgctcattgaataccctgttattgggtggtgttaataaaattgcggagaagatatgtggagacctcaaagatccctgcaaattggacatgaattttggaagctgctatgaagttcactttagatatttctacaacagaacctccaaaagatgtgaaacttttgtcttctccggctgtaatggcaaccttaacaacttcaagcttaaaatagaacgtgaagtagcctgtgttgcaaaatacaaaccaccgaggtgagaggatgtgaactcatgaagttgtctgctgcaccatccgaaataaagacacaagaaaattcagactgattttgaaatctttgtaatatttccataatgctttaagcttccatatgtttgctattttcctgaccctagttttgtctttcctggaaattaactgtatgatcattagaatgaaagagtctttctgtc

SEQ ID NO: 407453 - DNA, 1000 bp, Homo Sapiens; identical to SEQ ID NO: 294923

SEQ ID NO: 407454 - DNA, 1000 bp, Homo Sapiens
aggccaggcccagccctgtctttggaagcccacacttgctggcgaagaaggactgcggtcaccggccaagcaggaagaggtgttgctgctgcagtggcggcagctcagtagtgaaggtataagacctcgagctgtgggttcgcgtcctgggttccatgcattcgtggaaagcggcatagccgacgtgtatctgtgcctgtttctgtctgtagtcgtctgccccagtagactgactgggcatcaggtgcaagtgtgtgactgtccccctgtgtgtgagtctgggcctgctgtgatcgccggtcccgagtcagtcaaggctggtgtgcctgttactgtggccagcccaagctgcctccctgaccccacccccaccccaaaggccccagtccttgttccagcagtccccacccactggaagaagctggcccctgcctgtgggggcccaggccagtccctcatcgacattgactttcacagggtccggcggaactctaccctagggcccttcatcttccgaggctatgactcagcacctccaggcccttggaccctggagaatgacagccacacagagactcccccactcagaaccccttgcacttggagcccctcccaggagcaggactgtagcaacaccaacttctgcgccatagtgtcgggcttgaggaaagtgcctgagccagggctctcagtgaatctgaggtccaccttcctgctggcgtcgatgcggcccaacacctcgagctactgtcgcttcgctgggtcactgaccccgcctgactgcgagcccacggtgctctggaccgtcttcgaggaccccatacccatccggtgggtgcagatgaccctgttccacagcgtgccccaggctggaccctcccactttcaccccataccgctcacgggccaagagatgagaagctgctggctccaggctccgctgcaggctgccctggctgagcgggtgctgggcaccgcggagggctgcctggtgctctga

SEQ ID NO: 407455 - DNA, 1000 bp, Homo Sapiens
tctgaggcttgaatctagtaagtattctggaatcacttgccaagaaaacaatctggatgccaagaaagctccccatgaggacaccgtacacgacatcactaacgaggacgccacacacgacatcgctaacgaggatactgtacacgacatcgctaacgaggccgccgacaagggcatcgccaacgaggacgccgcccacggcatcgccaacgaggacgccgcccacggcatcgccagcgaggacgccgcccacggaatcgccagcgaggacgccgcccacggcatcgccagcgaggacgccgcccagggcatcgccaacgaggacgccgcccagggcatcgccaaggaggacgccgtccacggcatcgccaacgaggacgccgcccagggcatcgccaacgaggacgccgcccagggcatcgccaaggaggacgccgcccagggcatcgccaacgaggacgccgcccagggcatcgccaaagaggacgccgcccagggcatcgccaaggaggacgccgcccagggcatcgccaacgagggcgccgcccagggcatcgccaaagaggacgccgcccatggcatcgccaacgaggacgccgcccagggcatcgccaacgaggacgccgcccacggaatcgccagcgaggacgccgcccacggcatcgccagcgaggacgccgtccagggcatcgccaaggaggatgccgcccagggcatcgccaacgaggacgccgcccagggcatcgccaacgaggacgccgcccagggcatcgccaaagaggacgccgcccacggcatcgccaacgagctgtatacgacatcgctaacgaggacaccctacaagccgtcgctaacaagtacactgtacacaacatcgctaatgagggcactgtacaagacatcaccaatgagggcgctttatacgacattgctaatggcaccgacaaggcacgctaacgtggacgctgtacacgacattgctaatgaggacagcgtataa

SEQ ID NO: 407456 - DNA, 1000 bp, Homo Sapiens
aacaagtcccgtgtggcccctgctccttccagccaaactctgcagttcacccactaccaggagactggagtatgccctggaagatatcaggggcttcctcggcccacgagatgggtacatatggctgcctgccagcagcaaggccatgtccggtgtcgcccctgagctgcaacctgagttgattgctctccagggtcagcgctgtccagacctccaccttagcaaacgctgtcctccagtgaggaacggcctttctgtcagactcctttcctcccggaaagtggtcagctccacccacctctcaagtcccccgcccttgtaccgaatcaccttacagagatccagaaacagcgttcctgcccccaagagcctctgcagccgcctgcagcccactggaaagaccacatctctgaagattctgccaaaacaacatttctcattcccgctgtctccacaaatccttctctctgtggatggatgtaaagccagctccggtacccagatccccatgactcatatgggcgtccacaccccacagccggtctccctgtcaggccctgctgagctagcaaggaagtccagcactttggagggtcgcagaggacaaatctttgtcttcagaaagtttatcagggaaaacactgcatttgggaatagaggtgtgcagcagtgctcagttggaggggccagtccccagttctgtgacagggatgagggacccgctggacaagatgtgtcttgggtcactgctctccagatatgtgttgtcctgttagagaaatggaatgaaatcctggtgtctggggatgggagacatctaacggcgaggggaggcagggccactgcagagccgggcgccatcttcctgccgagaaggaagaagcgcctgcggcagcttcccaagacgctggcgagctccgtgctccacctcggaggggccgtgggggcctccccacaaccagaggccacctgcgctcgggctccttacagccagaagtag

SEQ ID NO: 407457 - DNA, 1000 bp, Homo Sapiens
cacccgccgccgtggctttttgtccgcggcggctttttgcccgccacggctttttgactccccgctgctgcggctttttccccgccgtggctttttaccccctgcccccacggctttttaccggccgcggctttttgcccccaccctgcctcgggtgatctacccggactcagtggagggcatgcgaaggaagggctacccggagcaggacctggaagccatcctggacatcgtgcacctgcaccacatcctgcagtgggagggagacagacaaggacgcagaggcacaggggccctgtcgtcacagctagctcattcccgcagctcccccagctccccggctggaccccaggtctgggtactggtggaactgagccaagaccattgcccctgcctaggttgggaggctatgtgtgactggaaagatgtcctgccgggtggcgagaagcagagaatcggcatggcccgcatgttctaccacaggcccaagtacgccctcctggatgaatgcaccagtgctgtgagcatcgacgtggaaggcaagatcttccaggcggccaaggacgcaggcattgccctgctctccatcacccaccagccctcctgtggtaggtgccctgtctccctgcctggggtcagtgggagtggctgcctgaggggaggaggtggcctgttgggccaggcggcagcagcaggcggctgtcatcagcagccctcgtgccatgcccctgaccctgtccctctcctggccagggagtaccacacacacttgctacagttcgatggggagggtggctggaagttcgagaagctaggctcggctgcccgcctgagcctgacagaggagaagcagcggctggagcagcagctggcgggcattcccaagatgcagcggcacctccaggagctctgccaaatcctgggcgaggccgtggccccagcgcacgtgccggcacctagcccgcaaggccctggtggcctccagggtgcctccacctga

SEQ ID NO: 407458 - DNA, 1000 bp, Homo Sapiens
cgccgtggctttttgccccatggccatcctcagaagcgctgctcacacccggtgcaggagtcagccccagtcaggacacagcacggacgtgagggcccccactcagctcctggggctcctggggctctggctgccaggtgccagatgtgacatccagatgacccagtctccatcctccctgtctgcatctgtaggaggcagagtcaccatcacttgccgggcgagtcagggcattagcaataatttaaattggtatcagcagaaaccagggaaaactcctaagctcctgatctatgctgcatccagtctgcaaagtgggattccctctcggttcagtgacagtggatctggggcagattacactctcaccatcagcagcctgcagcctgaagattttgcagcttattactgtcaacagagtgacacaatgagggaatgtcatccttacccagatgccagccacctgtctcacatccaggacagagagtctccatctcctctccagcaaatacccatgcgctcctcagccgctgaggcctggcctggctgccaccgccggagtttcacaaagaaagtctcccggcccgagcccctcacgcactcaccggcgctgacgccggctgcgactcgggctcccgccgccttcagctccttgcgggggtcggcccttgggtcggctcgggcgccggcggcgacgactgctccatatccacggggtcctggccgcgtcggcctcgagctaacggtcccgccaggtaggcgcgcgcgccagttccgcgcgccatgttcccgccctgctgcgcgcccccgcggcgaccctcactgccccccaaccgcgctcgacccccctccccgcgcgccctgcctcgcgccctctggagctggccgctgttcccagtgtctcacccacccacgccgggcctgtccgacttggcgggtgagcgcgtggttcccggttccgcaccgccgcctgcctctctgcagaccaccccagacctga

SEQ ID NO: 407459 - DNA, 1000 bp, Homo Sapiens
ccttcttcaggggcgctgtaggaagaaagaagcagcgagaaggcagcagctgctggaccaggtgaatccaaagggtgtgcctcaccatgcgcaggccagtaatagcgtctccattcagtacaagagttctaaaggaacagcagatgtaaggccaactggaccaatggaaacagcagccacaggtgcctccaagcctatacctgtacctgaaagaatgtctcggggtcaacaaactgaggacagcaactcatgttaccagttaaaccaatacaaagacaagttgcaagctatatacacctcccaggaagaaagaatttgtcgatttgaaacaaggattcacaaactcaaaaccaaccaggatagtctatggaccaagctacaacagataagacgggacctacaggcaaggttgcagccacccggtccttcatcttcttcctttcaaaatgtggggaacaaggttgaccattcttcaactgaaaaggttccaaagggaggggattatttgcagatcaagaatgccactgaagatgcttcaacaggggaacctcttcctaagcttgatgaggttgacagaagtcacagaagtcacacaaatgcagagcatgctctgcgaaatccagaatcaccagagaccactttgcacagcaccagggcacaaagccaaacacaaaagatgccacagaaagtcattagtgccctacccagttatcaggagggactgaagcaggacatccccaaaatggttcctgctgaaatgagcagtcctgctctggcagccgtggaaaagaaagaggcaggtaacatcaaggagagaaaggatgagctggaggaagaggaactgcaagaactattgtcaaaacttatggatgccttcaatctagaaacgccatcaggcccggagtcttcagtaaacatggacctgtacagtggagctcagcgagtgtgcagggccttctctgcccttgttgatcaaattgccttgcccaatttgaagtga

SEQ ID NO: 407460 - DNA, 798 bp, Homo Sapiens; identical to SEQ ID NO: 294925

SEQ ID NO: 407461 - DNA, 780 bp, Homo Sapiens
atgttcgcggttcaaataaagttcttcccttgctcttccctaaggcgaggcgccgccacggtctggggtgctggagcgccacgcgagggtcctggcgcctctggctccccgccttctggccatgcgatgcggacgccggacccgcttggggagcggtggagggtggggctgaactcggtgacgcctccctcacacccagcttcagtggcgccaacgccgcttccccgcaccctcagggcgagggaagacttccctggctcaccaacttgctgccgcccagcgcctttctcagggcatggccccagtcagatcttttaccgtctgggaaaagacccacagattagccatgagattgtagaagcctattcttctcagagttttctgtgcaacaccaattcccaagccacagactgccctgaccctagatggtcatcagcagaccaagaagccaagaacataacggctacatgtgacccctgctgtggctgctacctagcagcagctgccattttcagggactgcatgtccatgagggagccacttccagagctaaaaatgtcctccaccttcatcagcaacaacacagccatccaggagctgtttaagcgcatcttggagcagctcactgtcatacgcaggtgcaaggcctccctgcactggtacatgggtgagggcatgaatgagatggatgagtacattgaggctgagagcaacatgaatgacctggtgcccaagtaccaacagtaccaggatgccatggccaaggaagacagagtttga

SEQ ID NO: 407462 - DNA, 1000 bp, Homo Sapiens
gccaaagcaagagagggaacctgaagcagccccagaatccaactcagagttagcatcccctgcccctgaggcagagcacagctctaacctgacagccgcccacccggagagcgaggagctcattgcccagtatgaccaaatcattaaagagctggattccggcgccgagggcttgatggaacagaattaccccacacctgatcccttgcttctcactaaggaggaagaagggaaggaagagacggagatgcctgctgtagagactgtgccttccccatttgtggggagagatgaggctgcctttgccagtcgccatcccgtgaggactcaaagcaccccattcacaggtgaccatcttaaattgctttgtggtttctgctttcgaaagtacttgtatatattggaacaggaaaggaaggtaggaaaaggcccattcatcagcgtagtcctgtcaaagctggagaacatgctggagaactctttacatgttaatttgctgcttatcgggatcattactcagctagccagctacccccagccactcctgcgctcctttctgctcaacaccaacatggtcttccagccaagcgtccgctctctctatcaggtccttgcatctgtgaaaaacaagattgaacagtttgcttctgtggagagagacttcccagggctcctcattcaagctcagcagtacctgctcttccgtgtggacatgtctgatatgacccctgcagcactaaccaaagatcccattcaggaggcttccaggacaggaagtggcaagaaccttttggatggacctccaagagtgcttcagcccttcctgacccacagaaccaaggtggctgaggcaccccccaacctgcccctgccggtgaggaaccccatgctggctgctgccctcttcccagagttcctgaaggagctggcggccttggcccaggaacactccattctgtgctacaagatcttgggtgactttgaggactcctgctgttag

SEQ ID NO: 407463 - DNA, 1000 bp, Homo Sapiens; identical to SEQ ID NO: 294927

SEQ ID NO: 407464 - DNA, 1000 bp, Homo Sapiens; identical to SEQ ID NO: 224959

SEQ ID NO: 407465 - DNA, 525 bp, Homo Sapiens; identical to SEQ ID NO: 294928

SEQ ID NO: 407466 - DNA, 1000 bp, Homo Sapiens; identical to SEQ ID NO: 294929

SEQ ID NO: 407467 - DNA, 1000 bp, Homo Sapiens
cgtggccgtgggcggcccgctctgggcgctcattgatgtctacggcatcaccgacgaggtgcagcttctggagagcgccttcgctgacacgctgacgcccgcgcgcctcagccaggcccgcttcagcgcctgcctgccgcccagcagccacgacgcggccaacttcgacaacaacgagctcgagaacaaccaggtggtggccaagctgggccacctggcgctggtggcctgcgcaccgcggcccgacggcggccgcacgctggtcttctccgagcgcccgctgcggcccggcgagagcctcttcgtggaggtgggccgtccggggctggcggcgcccggcgcgctggccttcggcatcacgtcgtgcgacccgggcgtgctacggcccaacgagctgcccgccgacccagacgcgctgctcgaccgcaaagagtactgggtggtggcgcgcgccgggcccgtgccgagcggcggcgacgcgctcagcttcacgctgcggcccggcggcgacgtgctcctgggcatcaacgggcgtccgcgcggccgcctgctgtgcgtcgacaccacgcaggcgctctgggccttcttcgccgtgcgcggcggcgtcgcgggccagctgcgtctcctcggtaccctgcagtccagccctgcgaccacgactccatcagggtccctcagcggctcccaggacgatagtgattcagatatgaccttcagtgtcaaccagtcctcctcggcatctgagtcatccctggtgacggcccccagctccccgctgagccccccggtgtcccccgtgttctccccaccggagccggcaggcatcaagaatggcgagtgcacggtgtgcttcgatggcgaggtggacacggtcatctacacgtgtggacacatgtgcctgtgccacagctgcggcctgcggctcaagcgacaggcccgggcctgctgccccatctgccggcggcccatcaaggacgtcattaagatctacaggccatag

SEQ ID NO: 407468 - DNA, 1000 bp, Homo Sapiens
agcgtattggagatctcaaatcaagtatctccactgccacggcgtttcagacacctttgacccttacctggacatcgccctggatatccaggcagctcagagtgtcaagcaagctttggaacagttggtgaagcccaaagaactcaatggagagaatgcctatcattgtggtctttgtctccagaaggcgcctgcctccaagacgttaactttacccacttctgccaaggtcctcattcttgtattgaagagattctccgatgtcacaggcaacaaacttgccaagaatgtgcaatatcctaagtgccgtgacatgcagccatacatgtctcagcagaacacaggacctcttgtctatgtcctctatgctgtgctggtccacgctgggtggagttgtcacaacggacattacttctcttatgtcaaagctcaagaaggccagtggtataaaatggatgatgccgaggtcactgcctctggcatcacctctgtcctgagtcaacaggcctatgtcctcttttacatccagaagagtgaatgggaaagacacagtgagagtgtgtcaagaggcagggaaccaagagcccttggtgctgaagacacagacaggccagcaacgcaaggagagctcaagagagaccacccttgcctccaggtacccgagttggacgagcacttggtggaaagagccactcaggaaagcaccttagaccactggaaattcccccaagagcaaaacaaaacgaagcctgagttcaacgtcagaaaagttgaaggtaccctgcctcccaacgtacttgtgattcatcaatcaaaatacaagtgtggtatgaaaaaccatcatcctgaacagcaaagctccctgctaaacctctcttcgacgaaaccgacagatcaggagtccatgaacactggcacactcgcttctctgcaagggagcaccaggagatccaaagggaataacaaacacagcaagagatctctgcttgtgtgccagtga

SEQ ID NO: 407469 - DNA, 792 bp, Homo Sapiens
atggctaaaggtgaccccaagaaaccacagggcaagatgtctgcttatgccttctctgtgcagacatgctgcaaattttccaagaaatgctctgggaggtggaagacaatgtccagtaaagagaaatttaaatttggtgaaatggcaaaggcggatgaagtgtgctatgatcgggaaatgaaggattatggaccagctaagggaggcaagaagaaggatcctaatgcccccaaaaggccaccatctggattcttcctgttctgttcagaattccgccccaagatcaaatccacaaaccccggcatctctattggagacgtggcaaaaaagttgggtgagatgtggaataacttaaatgacagtgaaaagcagccttacgtcactaaggcggcaaagctgaaggagaagtatgagaaggatgttgttgactgtaagttgaaaggaaagttttatggcgcaaagcgtcctgctaaagttgcccggaaaaaggtggaagaggaagatgaagaagacgaggaggaagaagagaaggagaaggacgaggaggatgaacaaagaaactgtttatctgtctccttgtgaatgcactttgccgttggtgtgacaaggcatttaaagatgtttctggcgttttctttttatttgtaaggtggtgttaactatatggttattggctagaaatcctgagttatcaactgtatatctctatagtttgtaaaaagaacaaaacaaccgagacaaactcttgatgctccttgctcggcgttgaggctgtggggaagatgccttttg

SEQ ID NO: 407470 - DNA, 1000 bp, Homo Sapiens
aggtgcttcatgctcaaaatatgatgtggctgccatgggtcaagatgagaaaagtcctagtacctcccgtgatgcctccgtttctcaagagtctcagggagcttcacccattggccctcctgatgcaggtatttcatgctcaaaatctgatgaggctgccaagggtcaaaatgagaaaagtccaagcacctcccgtgatgcctctgttcctcaggagtctcagggagcttcacccactggctcgcctgatgcagatgtttcaggctcaaaatctgatgtggctgccaagggtcaagatgaggaaagtttaagctcctccaagagagctgcgttctttacaaccacagacggagatcctataaaaaggaaggcaaacaagatggtgcaattcctgcagaagaagtttgagaagaaagagcccattttgaaggcagacatgctgaagcgtctccgcagacagtacaagccatgcttccctgagatcctcaagagaacctccgaacatttgacggtgttctttggcgttgaattgaaagaaacggattccagcggcgagtcctacacccttgtcagcaagctgggtctctccaatgaaggaagtctgagtggtgataatgcgctgccgaagtcgggtctcctgatgtcgatcctgggtttgatcttcatgagaggcaaccgtgccactgaagaggaggtctggaagttcctgggtctgttggggatatatgatgggatcctgcattcaatctatggggatgctcggaagatcattactgaagatttggtgcaagataagtacgtggtttaccggcaggtgtgcaacagtgatcctccatgctatgagttcctgtggggtccacgagcctatgctgaaaccaccaagatgagagtcctgcgtgttttggccgagatcaataacaccagtcccggtttatacccacatctgtatgaagacgctttgacagatgaggtagagagagcattgagactgagagcttaa

SEQ ID NO: 407471 - DNA, 951 bp, Homo Sapiens
atgcaatcagatgtcgagttggactgtgacatagagccatgtggccacactaaattcccccccacccttcccctgtccacaaccgtcattgtctgttcttgccatccagtggccactgcctccaccatggctgaggctttctctaagacaacctctgaggaagaccagagcatccaggagcccaaagaggccaactccatgacggcccagaagcagaagaactttgccgcctatttcccccgggtgctgaagcaggttcaccaggccctcagcctttcccaggaggccgtgagtgtcatggattctatggttcgtgacatactggaccgcatcgccaccgaggctggtcacctggcccactactccaagtgcgtgaccatcacctcccgggacattcggatggccgtgtgcctgctgctgccggggaagatgggcaagctcgctgagtctcagggcacgaatgccaccctcaggatagaatcttttgtttttgaaaatcttcatgactggcctctacgtgtcatggggatcatggaatgctgtccgatggcgcagcacaagctccactcggatccattggcatcggccgctttccgctccttcgtgctcaggcctttgtcagaggtcgtctcagaggaaggcttaaccatctcagaggcaactgccagtggatgtgagtgttggggagcaggtcgaccgacacccacagtgattgccaagcaacgagaccatcgaatcgcctccaaggccaggaggcttgctgataggctccctgcgtggcacttcattcagtcagatgtggagttgctggcccgtgacataagccatggggtgactacaaaaggccatcccgctggtggtcagccatcattgtccgttcctcacatccactggcagttgcctccaagatggctgagccttcctctgagacaacctccaatgaatgcctga

SEQ ID NO: 407472 - DNA, 555 bp, Homo Sapiens
atgggctatcaagtaactaactgcatacctgccgttggcatcatcagaacagtccgaagaaatagtctccactcactaattacctcctatataacgacctgtacttcagtgaacagaaaaattgccaagcaaactaatggctataaaagcgtaatttgcatgtgtgggcataaactacagagcctcattgccatgaggcgccgccgcgccgccgtcgctctccaacgccagcgccgcctctcgctcgccgagctccagccgaaggagaaggggggcctggtactgtggcgctccgtgaaattagacgttcagaagtccactgaacttctgattcgcaaacttcccttccagcgtctggtgcgagaaattgctcaggactttaaaacagatctgcgcttccagagcgcagctatcggtgctttgcaggaggcaagtgaggcctatctggttggcctttttgaagacaccaacctgtgtgctatccatgccaaacgtgtaacaattacgccaaaagacatccagctagcacgccgcatacgtggagaacgtgcttaa

SEQ ID NO: 407473 - DNA, 1000 bp, Homo Sapiens; identical to SEQ ID NO: 294934

SEQ ID NO: 407474 - DNA, 1000 bp, Homo Sapiens; identical to SEQ ID NO: 294936

SEQ ID NO: 407475 - DNA, 1000 bp, Homo Sapiens; identical to SEQ ID NO: 119247

SEQ ID NO: 407476 - DNA, 757 bp, Homo Sapiens
caggtgttcacggataatgaagctgatgtgagagccctggagagaaacatcagtcaaagggaatcccatccagcgtccctctactctcctctgcagcttccatggttggaatgctgagccattgctaggacgatgaggctacaggaaagtgaaatgcacctgctgcgatctgatccaactgaccactcctgctgctcctcccttgcacctcaggcatctccttccaatctggaggaaacacttttacctccacttttcttttacagtcctccaaactctgttccttctagggagcacaagtacagaaatagaaacctggactcccatcatcctgcttcacaaacttacaatgttaaagaaagaaaaaaaaaaagaccaagtacattacctggtagaattggagagatgggcacgaaagagctgtaaatacagttagaaaacacactagcatttacaaatgtgtatgagaaacaatgaggaggattttcagagactatcataaccatttatttttctaatatgtgataagtaaacgcacagaaaatcaatttaatatttggggcttttatttctcattttttagattgccagaaagactgtccagtgttataaagtttgtgtcaatattctggaattggcaattttgtcatttatatgggagaaatagctaaaggtgtagtataaagtatttgctcgtaggtaatggaatgttacctttacccaaagatataaaaaataaacggtagaacaaaaactc

SEQ ID NO: 407477 - DNA, 940 bp, Homo Sapiens; identical to SEQ ID NO: 294938

SEQ ID NO: 407478 - DNA, 1000 bp, Homo Sapiens; identical to SEQ ID NO: 224960

SEQ ID NO: 407479 - DNA, 897 bp, Homo Sapiens
atgcgcacgcgcacaacaaacgtcacacgctacgcacgcgcgtgctgtcccctccccgcagccagttccctccccttcgggccagtgcgcattgcctaccccgtgctacaggacttcgctgagcgccaggcgcagggactggacgcatacggacccccgggagccccggaactcgcgttcccacgccagacctcatccccttctgacagagacgccctcgtcccaccgtcgccgcaggcgccaggggtccctccccaccgccgaggtctagccgccgcccgcccgccttcagggcagcgcggggaccccctggccctcgcccagtgctccggggctcacccgccgctcctcgccgcctccggaggcgagggattgtttcccacaagggactggagtccagggaaggactcgcctggagcgggaggcggggatgcacatgcgcagagggagaggccgagcgcccgagttaggctggtggatgcgatgcggggcttggaagcggcgctagacggtgcctgtcagctctggccgcaaccctcagttgtaaaatgaggctgatagtgcctacctagcaggggttttatgagaattggaggcgcttacgttgtaaaagcatttaaaccggtgtctgacacataaattgttcagtatatttctcacaattatatatcatgctggtcatcataaggctctcctgcaaaacagccttgtatagtgggttgagagattactgtctcagttacccactcctgcttggaaccaggattctgtcagtgtccccagaggttgtggatcaaatcaatgtgcctgttagacacaagccaagagaaggaaaggtgtgcttgaattcattcacgatcatgcatggtaacgtttaactgaaagactggaagagaa

SEQ ID NO: 407480 - DNA, 1000 bp, Homo Sapiens; identical to SEQ ID NO: 294940

SEQ ID NO: 407481 - DNA, 1000 bp, Homo Sapiens
tgatcattattttagtaattcaggtgtgaaaccatgatcttcctgttttgataattccacaaaatatacttcccactgagatagtgtttagtagaaattgtcttctcagttttactcagacattttttaaagcccttatctgtcagtcattttgtttaataacgaaaatctaagatgtttaatactgatttatttatttctgccttgcaggagaggttatggatcagagcaacagcaactgctgaggccctctcttcttaaaccagaggaattatccatggagtctggaattgatcctggccaggaatatggacaagattattacagttatgagcatgggtatgaaatgcctcaatatgggagtcgccgtcgattgttaccaccagctggacaggaggaatatggtgaggtggttggtgaagctgaggaagaatatgaggaggaagagtgggcaagaaaaagaatgatcaagttagttgttgatcgagagtatgaaaccagctcaactggagaagacagtgctcctgaatgtcagagaaaccgtcttcaccatcctagtatccacagtaatatcaacggcaatatatatattgcacagaatggttctgtggtgagaacccgccgtgcctgcctcacggacaacttaaaagttgcttcccctgttcgactgggagggccctttaagaaactagacaagttggcagtgacacatgaggagaatgtacctctgaacacattatcaaaggggccattttctactgaaaaaatgaatgcaagaccaactctggttacatttgccccttgccctgtggggactgacaatacagcggtgaagccactaaggaacaggctgaaaagcacagttgaacaggagtccatgattgacagtaagaacatcaaggaggctttggaatttcatagtgaccacacacagtctgatgatgaagagctttggatgggcccctggaacaacctccatataccaatgacaaaactgtga

SEQ ID NO: 407482 - DNA, 431 bp, Homo Sapiens
atggtgcggcaactcgcatttcatcagcagagccatacatggccatatgctgtgcagaggaaccaaagatggataccacatgtggctttggggaggactagtgtaaagtctaccaatgtccaaggcatggccttggtagaaagaggaccactactgctactcactgaccaagtagtcctctggagtggaccaggatcttctagccttcaaaaaccctttataacccccaaacagcaccttcatcctgtcatccaggctcaaggagaaaccacagagcttgcaggaagaagaggccatgtgagtagagagtgagaactcggctgcctatgagcccatacgaagaagcctcaggatgaaagctacctgaccaacaccttgattttggactcttctagaacatgggaaataaatttttgttgttttataagcta

SEQ ID NO: 407483 - DNA, 775 bp, Homo Sapiens; identical to SEQ ID NO: 294941

SEQ ID NO: 407484 - DNA, 808 bp, Homo Sapiens
gagatggcagctggcttggcaaggggacagcacctttgtcaccacattatgtccctgtaccctacatgctgcgcctatacccaggaccgatggtaactgaggcggaggggaaaggagggcctgagatggcaagtctgtcctcctcggtggttcctgtgtccttcatttccactctgcgagagtctgtgctggaccctggagttggtggagaaggagccagtgacaagcagaggagcaaactgtctttatcacactccatgatcccagctgctaaaatccacactgagctctgcttaccagccttcttctctcctgctggaacccagaggaggttccagcagcctcagcaccacctgacactgtctatcatccacactgcagcaaggtgattctgccaaaacatatctccttaaaagccaactggagcttctcatcagcatcaatgtgaagccaaaaatccttaggaggacagagggagtccctcacaacctagactggtccccttccctccagctgcctcaactgtccacaggactctcttcccacctgcggccacactgtgcaacctggaatttccccacctgggcggactcatcacgtcatcaccaattggatgcatcttctgctctgtgcagctggtgaaatctttctcaacccttgagatgcagcccaatcttctcctaacatctggattcctctctgtcactgcattccctcctgtcatcctgcctttgttttcttgccctcctttctctcccgggtgataggcattaactaaaattaaataaaaattcagatcatccttgca

SEQ ID NO: 407485 - DNA, 471 bp, Homo Sapiens
ataggagttcattttgtgaagctgtcacgagttttccagtagaccatgagcttgctgatggcaggagcctgcctgtccttgatccttgtttctgtggggtctatcccagtgcctggcacagtggctttggagatggaaggaatagagggagagcagatcctcaaacacagcctgcatctctccctgctcccctcccaccctccagttttccagccagaggcatttgctctaaggcccaggctgtggcccacctatcaccgctacccaagtagtacaggaaaaggaaatttgaagaggaaaagaggcaccagggatgaggacacaccgagaaaagaccatgtgaagacatggcgagaagacagccagctgcaagccaaggagtgaggcctcagaagaaaccaaccctgccgacaccttgaccttggacttctagtctctagaattatgcgaaaataaattcctgttgtttaa

SEQ ID NO: 407486 - DNA, 1000 bp, Homo Sapiens
cccgcagacgccggaggcgccatggccgccaagcccggcgagctgatgggcatctgctccagttaccaggcggtgatgccgcacttcgtgtgcctggccgacgagttcccgcagcccgtgcggcccgccaagctgcccaagggccggggccggctgcggcggccgcgccagtctcgcttcaagacgcagccggtgaccttcgacgagatccaggaggtggaggaggagggggtgtcccccatggaggaggagaaggccaagaagtcgttcctgcagagcctggagtgcctgcgccgcagcacgcagagcctgtcgctgcagcgggagcagctcagcagctgcaaactgaggaacagcctggactccagcgactccgactcggccctgtaaggggcgccgcccgcgggggggacgcgcgcgtccgcggtccgcgcggggaccggcgtgtgaaccccgagagtgcccgcgccctgctcccgggggacccgcaaggacccgggaccgccgctcctcgcgcgctcggactcccgccccgctgcgaaccggtcggtgcgcccctcgccgcgctcgccctggcccgggagcgccgggagcggggccgctttcctcgtccttgtaaatgtttattttttaactcttcccagtgcgaactctgctgtgagtgtgtgcggggaggcgcgcccgcgctgagtcggcggcgggtagccactccatgcccttgtccgatggtttgcaactccgattttgcacaccgctccaccgtgccccccagcgcacacccattcacactcacgccaacactctcgctgaacacttttataattgttaggcgtggccgttgggactttgggcgcagcgcggctgctactgcgtctggaggattgatatttatttttgcattgcgatggctgaaggcatttatttaacgatctttttacctggatatgtctgtgaggctcctgaaaggagacaaataaagtcaatatatttgcacagtgca

SEQ ID NO: 407487 - DNA, 1000 bp, Homo Sapiens
ctgccgctcccggcccgcgctcgccccggagggggcgtcggagaccccggcggtccgcgcccctctcgggggctggccggcagctccctgcttgggcacagagggcgccgcccacggccagcgacgcaggggagcagggggcgctgccctccggggggtgggggtgtccgcgttgtcatggggacgcggcgccccctcgcgggctggggaaggagctggcagctgggtccggccgcgctcccgcctccgccctgaccatactcccgggaccctgagctattttcgcgcctctccgggacctcagcgccctgcgtggccccgctggcggtttggccgcgaggcgcgggagtctgaccccagcgggaggctgcgggtgggtggggcgggctgcgccgccagggatccgtcggggtcgagggccgggagctccagccgcgccgctgcgtgccggccgggccgcccgcgaggaggggcgccgtcggggcctggggaagcgcaggagcgggtggactggagaggttcggccggggagagaagagcccaccgcggaccactcgcccgcacccgctcggctgcctgctcagcgttccgggccggggaaggggcgcgcccctgctctcccagccctgggatgggacgcgccgccagtccaggcgcagcctggaccgccagttcaccgccgcctgtgagggacagtcggttgcccaaggtcgccggggccggagcccgggacaagatcccggagagcgggcagccaatctcagaggtcgctgggaaccgcacgggccgtagcctcaggactccgggcctcgcccaggctgggcggaccttggggcggcttcagcacctcggagagctccccgcgccctggcccagcagcctcgcctgcctgattccgctccagcgcttgtctccctccgagagcgcccttccgggggaccgccggggtcggacgctccccactgcgcccaggaccgaggcctgtaaccccaaattctga

SEQ ID NO: 407488 - DNA, 1000 bp, Homo Sapiens; identical to SEQ ID NO: 294942

SEQ ID NO: 407489 - DNA, 559 bp, Homo Sapiens; identical to SEQ ID NO: 294943

SEQ ID NO: 407490 - DNA, 1000 bp, Homo Sapiens; identical to SEQ ID NO: 294944

SEQ ID NO: 407491 - DNA, 1000 bp, Homo Sapiens; identical to SEQ ID NO: 224961

SEQ ID NO: 407492 - DNA, 814 bp, Homo Sapiens
atggagggagagttggctagggctgcgggtaacccagcgcctactgccggggaagactcggacgaaaaccgaggacagtcagcaggtcccaggagcgcagcacgcaacagcgcagagcagacccagacttttcccggggtgagacccggaggcccgcgctctggaccgtcctccctacccagcctggaggccggcgttccccggcccaacccggagacctccccgcctccctcctgggccgccgcgcgccccagttggagcagcctcgaggggctgggccctttcggccggactcccttctcccggacatccaaaacaggttaccttgtccacgctctccggaccacgctttggacttgctcacttttatttaagagtccgacgggggaaagagggaaaaaaaatccagaggagatccaagtcaattggaagaaaaaatttcaaaagggtgtccacagaggcgaaaaaaggctctaccgaccttcaaactacaacagagctttcaggagaatgcggagagacggcttcccacccggacctcaccagaaacccgcacaccccagccacattgctcctcattcagccagaaaggactccaactccaccaccaggaggccccccttcctggtgctggccagttgcagaggctgttcatggcatcccacaggtggcgactgccccccaccctcctcctagcactttagagggtccctctgtggcagacaccatggctaggtttctctttccaactcctgttggtctggcaagtgacagatcatcttcactacattaatcagtagtcacccgaacattc

SEQ ID NO: 407493 - DNA, 1000 bp, Homo Sapiens; identical to SEQ ID NO: 294946

SEQ ID NO: 407494 - DNA, 670 bp, Homo Sapiens
ttctcatcctttgaattcttaggttagacgagaagatacatgagatctctaaatcttcaggtttaaacgtagatgtctttcactacaccagagtaaatagcttattcaatattcattttatgatcgttattggacttcggcttcctactgcctttcaaataggccatcgcaagattttgtccagtagtaacgccttggaaagaaggcctgcagtagaaaaaacactccattcattttccatggaatacatttgtttgccagcattcatcctttaatgttcgtgcccgtctccttagtgcttgatagaaaggatgcacttcttatgttagcaatgcttgtggagcctttgtggtcattctcagacatgcacagagtggggaaaaacattgagtcacctggaatccacgttcagctgaggttgaaccagcaatcctggaatcagggcactacgggtaaccacattctcactttacaaatgataactcacacaccccatggaagatccgggaagtcttctgatgcccctgctttccaagacaatatgatgcttctctacattccatggactatgacaagtatatcagtcgtcgaagtgggtggtttaatggcatgattagctccattttctcttcctgcagcatagcaaagtgcataaagcttgagctctgtg

SEQ ID NO: 407495 - DNA, 988 bp, Homo Sapiens
atgaaggtatcaaaacatgtcttagagctaattattctaggaagccgcattggaaaagaagttactctgcttgtacttttttctgttattctccggaatcagttttctgactggaagggacttgcatatattgtgagaattaaatgggatactacatatcaagacttaccatactgctacgttgtgacggtgcctgcttccccttcaccttctgctgtgattgctatacaagaagcatggcaccagcatctgcttctggtgaggacttatggaagtttccactcacggcagaagggagaggggagcaggcatcacatgatgagagagaaagaaagagaggagaaggtgccaggttctttttttaacaatcagatctggacccaggaactcagagcaataagtcactcattaccccttccaccaggccctgccttcaaccctagggatcaaatttcaacatgagatttggaaaggccagacatccaaactctactagcctatcagtagccccttactcttccaagaataaggacattcctgcattaaaatgtataatataatgctgagtgataagctcttaaaataaaagtaaaaataaataggtgaaattaatgttaatgatatattttatttaaccaatattccaaaatattatcatttcaataggtatttaatgtattaataattaatgagatattttaccttcttttttgtactaagatctcaaaattcagcctttataccgtactgcaattcagactagttgcatttcaagtagcccatagccaaatgtggcttgtggctagtggctacggccttcatacaactgtagagtatctctgtatcaatgtagcaaatattgttttcaattgactaaaacaacacatgtccattaacaatcaggcatggtactgggttaaaataattttgtgcaattcaaggtacttgagaaacattaagtatccaatagcaaacttattcaaaatag

SEQ ID NO: 407496 - DNA, 1000 bp, Homo Sapiens
attgtgacgcaagccgtggcggctggagacccagttgcttgtgtcgagggagggagggagggaacagagggtgcgcgtgtgaaagctccgcccccagccctagctcctccttcccgcttcagcaggtccaggctctgcgccagtgcatccttctccaagagtgcgctgcctgggcccgcttgccctggagttaacttcagcagtcaacggagagaagagtggaaaccttactggatgcggacaggagagccagttactgaaagcagatataacgcggatcctgtaaagagtgaaaggagaagaccacttttagttgcctccctgctagcaccctgacttgctctgcttgaataagaatccaaggacacaagctaagacatttgcactgggtttagatctactgcgattcacaaaacacaaaagaactttcagtcagagggtgacacataatgattttagacaaaactcagtttcttctggtggaagctattcagattgtttggagagtgggaggaaaaaggagtgaagcatcgcttaacaacaaaagtaataatgcaggcagaatattaaatggagaagccagactttcaacacatagaaaagaaagctagttcagaatgttgagagacttgggagctgattgattgaaggtggcacttagaaggttgccctttttaaagataaaggctgatactgtgactctgtcccaggggacctgagtaaagaactcctcagagatgtgggaccactattcagaacaagatttggagagctggggcagagaagattttaccttggggatttcttcagctgcgagtagtaaattggttatgccttaatgaatgaagtttgtcaaattttaagataggatgttattacgccttttaaaagaatgaggtagagtataacatctgatttggagttctttccagcattttaaggtctttaaagaaaacaaattggagaaaaataaataaatatagatcatgctgtacatata

SEQ ID NO: 407497 - DNA, 712 bp, Homo Sapiens; identical to SEQ ID NO: 294947

SEQ ID NO: 407498 - DNA, 833 bp, Homo Sapiens
gcgattcctccctggtctggctatcatgtgttttgcagtggaccaagagacatgaagcccgttttccaccctcgcctctttctccatctagctgcatgaccttgggaggtggcgtgacctctcggcttctttgctgcctcatctgtcatgatccacctttactacttcatagccatgttctaggataaatgagagaagcctctacatcttttagtctcccagaaagactggaaccagtgatgagttccatgaagacaaagacctgtttatcttgttctgctccagcaccgagcaggtgcagtggcttatgcctgttatcccagaactttgggaggctgagtcaggaggatcacttgaggccagttcaagaccagcctgggaaacatagcaagagcctgtctctattgggagaaaaaaaaaaaaaagcaacagcgacgaggcccgaggtgcagctgtctcgcctcgcctgtcttttgcaggcaccggcatgcacagaagatggctctccgggaggaagattcctttccattttgttctctctctgcctccgcaaggctcgcagccacctctcgggagtgcagggccagatcctgtgccagcggccttgcttgaatggcttcttgacggttactgctccagttttgctgagtcagaagaatcccacagccgctcaccggaaacacagctgttgggcaaaaataaccacagagctgagcatcatgcaccttccagaaaagatggcagaaaacctcaaaacaaaagagaaatacaaaacaataggagacactgtcaagaaaaaaaaaacaaaaacaaaaaccaccgcagctcactaa

SEQ ID NO: 407499 - DNA, 771 bp, Homo Sapiens; identical to SEQ ID NO: 294948

SEQ ID NO: 407500 - DNA, 1000 bp, Homo Sapiens
tgccgccgacatacaaggggacagcgggctccacgggcttggggctggcatcgaggctcggccccacgtggggactgggaacgaagagagaggatgctgtcgggggctcagcctcctcacacctgcccgggcaccaggcacggccttcaggcctccgggacggtcctggtggggctcggcccccctcgtcctgcgcctcctctgggcccgcgggtccccagctcccccagccccgccgcgggccgcacctctctggacggcgctgtcaggagtaggagttcagccccagcgcatccgcgccaggacccgggctctgtggccactgagtgcagaacacgccgagcttcggagtgcgggggagaggggggatccatatcggcagtcaaggagcgggaatctgaaaaggccaaggctgaaccctgcacagaacccagacctccagccaagtctgcagggcacccaacaaataacccccaagtcactgttcacgctgctcctgctcccccgggctctgggtggctccttccccctccagagcctccggagccgcccgtgctccttgctccagcctgaagcacccaggaggacccagcagcaggtcaggagcagtgacaagctcctgaaccgtggaaatgagtctggaggctcctcgctctcagaaacagtcactcctccctcccacgtgacgcagcctgtgcattttcaggggcttcattgctccctgccccgggtcacccctcggctcaccgtctctcaggtgtggaatatcctgctccaatcaaagccatgtcacctgcgttgtccagtgaaacatcagtggacaggcgctgcccgggctccagggagctcctcactgaggctcactccctgtgcctctgccatcagcacagggggacatgcctggctgcctgtgggaccagggaggacgcgcggtgcgggagcagagccagccacactgccgctgctgcactgttcatctgagtggcgcaaggtgagctga

SEQ ID NO: 407501 - DNA, 688 bp, Homo Sapiens
cccagcctcttcacctcccgccccgcccggtgggctttcctcaggagtcgaggagacccgggccacccgcgtcgggaccagagaggctcgctcctgccccattcgcgacgcggctgactgagccggagccggaccacgtgggcgaaggcggaagtggaacgaccgactgcacggcggccgagcgcggacaaaactaattcgggagaagagacaaactcatatgatcctgggcccgcgcagataatctggcataatctcaaaatccttaatcccatctctggggccacaattcaaccaactacaagcttgaatttggggaatgagccatggaggtgttggggagagcgtgttcctggcagtgcaagagccaggaggcaggagacagccgtctgcagcagccccactcccgccctccaggggctgtgccttctcctacagaagtaccaggaggatcacggcgcccacagcctggcagctgctccaccacaccttctcactcggtgccgagtgcagctgttcctgtctgaggaggctcagtttggaagcagcccctcttgggactcagaaatcaaggtctccgccttccccttcctcgagaacaccaacctctcaatgaactttcacttcttactgcggttagcagtttttagcaagttatttttatctaataaaaacaatatatagtttt

SEQ ID NO: 407502 - DNA, 1000 bp, Homo Sapiens
tactccttggaggccgtgtggaccataaggtccaccaccctgttgctgctgccaaattcatcccaggaaaggagcctgacaaagtggccattgaaggtaatgccagtcgtggcattgaagaccatggagttgaggccagtgaagagatcattgatgatgacagtgtccattttgccgagttgaaagctgccctggtgaccagggtttggcccggtgggcagcgcatggtagacattcacacgcgctccagcactgaacactgcgacctggcagggaaccactgggagcccgcaccagaaaacaccatgcgcttcttactcctgctgcaagggaagaggagagacccggagaaggttgcaacaagagcagctgagatgaccacgattaaggagatgtggctgcagaggtcagactccaaaaggactctcaaagggctgccttcaggacgtggcttcaaaaggcaaccgcccctgagtccctgcggtgatgaggaagagattttgtgcttgtcctctgcaaatgaattcatcctgtcctcacaatggctggtgtggagacccacagacttcatccttaggacggaccttcaggcacccaggctgcctactgacctccctggcatgggtgggaaccgggagctcgttggtaagcaggaggattcaggactatcgactgaaccccacctcctctgtggcacgcaccgtgctgtgtctttgcagtcatcatctcatcacctctgcacaggaagattatctcccccattttgtgatgaggaaatggaggctccaggtggaaagatgcaacctgggccagaggcccctggaggttgtgcctgaacccagacagatcacacaaacctgagcagccattagccgctgtgtgggctcctttgcactgtggggctgctcctggggatatttacgttgtgaactggtaaaatctgaactgcagaatatcaatttccagacattcttcctagatgatgccgtctgccacgggt

SEQ ID NO: 407503 - DNA, 438 bp, Homo Sapiens
atgcacaaaaagcagtcaaaaactttcttccttcacctacatcgggttttcccaacacgcaataaacaagtgcagggactatcctcagaacataatggtgagtacagtcacatagcaaggatggttaaagccctaagaagagatggaaccacttggactgcatggcagttggggcccaggaccaagctgtggggagctccagcattcaggggccgcagaggggacccagcaagtggaacacacagaggaggcatggcaagagacccaggcgggaagccaggaggaatgctgttcctttcatcagaggatgcagcattcaaggtaccatcttgggagcagaaaccaggcccttaccagacaccaagcctgccagcacattgatcttggattttccagcccccagaactataagaaataaatttcttttcttcaaaatta

SEQ ID NO: 407504 - DNA, 471 bp, Homo Sapiens
ctgaaagactgaatgagaaatgcatctgatctaatgctgagacagtcgaatttgggaatttgaaatgcgatttaccagagagcaacttgggcttagcacatggctgaggaagagaggaagaggaaggttggactttccatttcagagatggaagaggtcaaggaaaatctgcatgctcaaacaatctcctgcctcaacttcccaagtggctgcgactacagttcattaaggagcacgcagtcacagctagcttcctgtttgaagaaaaagaaaacagtcccttgttcaaatatcataattcaccaaaatctcaccatgtttttcatttttttctattataaatttacgttaattgcatgctgcttaaatgtggttttacatatttactctcagcagctcacttttagagctacatatattttcccacaaatgagtctttcaaatcttcaataaatgctctttcaatatttg

SEQ ID NO: 407505 - DNA, 1000 bp, Homo Sapiens
gcggctggacatgcacacccagtgccggctccgggcgcgcacacatgcagcacctccgcccctgcgccggctcggctctggccacagcagcgaggacagaggggccccgggcgcggcggactcgcgggcgcacgctcccaggagcgcgccgagaggggcgccgcggcgcaggaaacttgggcgaagttagttgcaagtgccaggcggctgccgagaagagcgaggcggggacgcggccggtgccaggcctgcggcgccgcgtggaggctgcgctgccctccgcggccggcgagctccgggagccctaagtcggcaggcgcgcctgaaggggctcggagcgaacagagccggcatggcccaggggacggccggacgcggctcctcggcgagccgggagaacttcctctgaggccgggcgaccaacgcttgctcaagcctcatccaccctccttcctcgccccacccgtcagtccagcagcgggagaggaagactcgagaggcaggtgctgcgggggacagctcccccctccaaaaaaaaaaaatcacccagccgattgggggtttcccatcggcgcaccctgcccggagccaagaagacaggctggtgctgctgtatttgtatttatatccattgctgcgctctgcgttctcgtggcacgcctggacactcctccgcctccccctcctcttcctcctccagggccacctccccgccttccccacccccatctgcttctgtcaaatgagaaagtcaccgaggagaacccaaacactccagccgctgagagccccctttggcacttggcagcacgcggcggcgggctcctcggctcaacttcgaggagtctccgcgacgcaacttttggggacgctttgcatttaagagagaacgaccgaggaggaggagcgctctgcccggccgccgctacctgcggggagctcaccagcaaacgccactgcagacgaaggacccaaagaacgtaaagggcaaactgccgcc

SEQ ID NO: 407506 - DNA, 519 bp, Homo Sapiens
gttgaattcatatcctgtcttcttccatgggagattttcacacagctccaacatgtggaaggaaagggagaagtaaagccatgctcttctgctgacaaacctcagggagaaggaaaagtaggaggaggaagaagaggaagaggaggagaagaatgtagagactttttaagaggccaagtgtgatgaaattaactgagctgtcaacatggagaaaggattttctgctcttctctttcctggaaaatttgttgcaaaagagcgcttctttgccatttatggggacacaaacccctttgaaatctgatccaaactatggactcactctcagaaacatgagcatacactcaaaaccttgcagaaattttcagaaggtccaggaagcctttgaaactcatgtaagacccccaattaagaacctccgaatgttctccaatgacactgaacaagaaaaaataagacagatgagaaaatggaggcttggagaagttaagtagctttcccgaggttccacatcagtaa

SEQ ID NO: 407507 - DNA, 1000 bp, Homo Sapiens
cacccaggggtcctcaggaccccggagctgactggcacctgctgcggaagaggatggcctggacctgccctgtggacggagggatcgctgcatcccttcctccaccatgtcagtgtgacgggccgcgcgtgccatctgcagccttcactggagtgtttgggacctggactgtgggttggcgatgggtatcaccctgtcctgggcaggcttcgtccttcagggctccatgtggtggggcagtggttctcgggacgggcctgctctccagggccgggcattggtgtttgcaaagctccctggggactgacagcagtggccctgagagcgcctgtggggtggtctgggcacctgcagcctcatgtttgactgttggagatttatcctgtgcaagagacctggaagcaacagttattcttccccacaacggcccaatgaggccaaaaaggaggaaacggatcaccaaattgatgtgtctgacgtcatcaggcttgttcaagacacaccggaggcgacggccatggccacagaggtctcggcatctcgtccacagtgagctggtgtcctgccagtctcgggaggcactcggcagtgtgagtacatccttcacctctgtgtctacagacccggcctccccgcccagcatgggttgaagccaggctaaggcgttgatcccaaggggctgtctgcaggggtttggggcaggcctgagcattcaccccagcgtcctgtgcaaacgtcttcgtcaggagcgcacttgggaagtcctacactagcgcagagggtgcgcagccagcgggtctatcaacttggatgcaggtagtgctcagtggcatttggaggagagtctaataaccaagaggatgaatctctttgaaggatctgatggaaacaagaaatgaagagggttgttttgttttgtttgttttatgagacagagtcctgctctgttgcccaagctggatggagtgcagtggtgcaatctcagctccttgcggccgcc

SEQ ID NO: 407508 - DNA, 1000 bp, Homo Sapiens; identical to SEQ ID NO: 294952

SEQ ID NO: 407509 - DNA, 899 bp, Homo Sapiens; identical to SEQ ID NO: 294953

SEQ ID NO: 407510 - DNA, 1000 bp, Homo Sapiens
gggacaatgcgcggggccgcggggttttgtcggcctgaatggctaataggtttgcctgtgagctgcgagggggcggtgtcggggaggaggcggcggcgaggggagaaggggtcattgtccgcgcgctggcccgggcgccgaggcgtgtccctgcctgcgccgcgcggctacccccgtgcccggcgccgccgacgggaaggcagcggcggggaggccccctggaggcctgctgggaaatggcggctggagcggcgggcgcgtgggtcccctcggggaggcgccccaagccacggtccgctcccaaagagaagcccagactgggcccacagtacccgggaagggcaggaaccagacagaaatggatggccgcttgttggtgaaggactcacagtgaggcaaggaagatctcttcttcatcatgttccccgtcactgacttcatcatgttcaccgtcactgatttcccttaactctatgcctgatcagaacccacaaaccaaggagacacacctggtcctgttggtccatttgctatttcgtagttgaatttcacctcagcattctatatagaagatttgtatttttttcaatcacatgccctaatgtaaatttcatgcattcaagacagttgattggtttccaaaaaattaaatacagaattgccaaatacataatataacaattccacttaaagaagagaatttaacagatctttgaacactaatgttcacagcaacattcatggcagctaaaaggtagaaacaacccaagtatcatcaatagatgaatagacaaataaaacatggtgtagaggatatggagaaaagggaacccctgtacactgttggggggaatgtaaattagtacaaccactatgaaaaacagtttggaggttcctcaaaaaactaaaaatacagctatcatatggtccagcaatcccactgctgggtatatacccaaaagaaaggaaatcagtatatcaaagagatatctgcactccc

SEQ ID NO: 407511 - DNA, 1000 bp, Homo Sapiens
gcggcgggagcgcgaggagcgggagaagcagcgcgccctagagcagggccgccgagcctgggccgcgcaggtggaggagcggcgaggccgccgtggccgcgaagagcgcgaggcggcgcggcggcggcagcggcagtacgagcgcagcgaggagcggcggcgggagctggccgaacgccagggcctcctgcggcgggagcgggcggagcgcgcggcccgggaggatcggctgcgcaagcttcagcaggagcagaacctgaagcaacgtgaggaaggtctacaggaagggcgggagcgggctgagcagatccgcagggagcgcgcccagcgcgcggcccgcgccaagcagcggcaggagggccagctgcagcgggagaagcgggagctgagccgggccgagcgggcgcgccacgaggcgctgctacagggtcggacccggcagcagcgccaggagcgagagggcctgcggagctcgctggaagccagtttgggccgtgcgcaggagaactacgagcatttggtggagcagcgcacccgggagctgcgggagcgggcccggcgagaggagctgcagggtcggcgggccaaggaggcggcagagcgcaaagagcgggaacatcaggcgcacctggaggcgctggcccgggcgggggagcgacggctgcagcacgcgacgcaggtggccgaggaagcagtgcagcagaaggcgcggcgcgtgggccagagccggctggagaaggaacgagcccagcgcgccaacaaggagaaggtggagagggacgaagactgccgccggcgagagctactccaggccatcgggcgcaagctggagcgcagcgagcagctgacgcgggaacggcgcagtgcgctggagagcgcccgctccacagcccgggcttccttccacgtgcgtgagaaggtgcgcgaggagaccaacacgcgatccttcgaccgcatggtgcgggaggcccagctacacgccagcctggaccgcaaataa

SEQ ID NO: 407512 - DNA, 1000 bp, Homo Sapiens; identical to SEQ ID NO: 119250

SEQ ID NO: 407513 - DNA, 623 bp, Homo Sapiens
gatatctgcagactgcgtagttgtggagagtggcagattcacaccagaaacactaggtgttcatatccatagcatggatgcagaataagcagttgggagagaagcttcttcctacctggtactcctcccattcacctcagcccagccccagacaggcgttagcattcagtgtgggccctcaggcagccctgaagcctggctgggtcatcagatgggggcagcctgtgacgggcaccagcggcctgattccagggaagagttcctggagggtgttggctgtttttgttagctcagtttttttctgggctccaccattcctaactccaggtagacaagatagatgtcacacacaacaattttaaagtattttgcttagtgcattttgtttatgattgcagtgtttgtttcttatttaataggctttttacttcattctattaaattttagtgtttagaagaggcgggtactgtcactgtgtaaaatatgtaatattttatatgttataccatgtcatatatacttgcaatatcagaccttgcattcaatatacaatgcaattgactctttgcagacctgcatttttcagtgaacaataaaaagattgtctggcaaaaaaaaaaaa

SEQ ID NO: 407514 - DNA, 1000 bp, Homo Sapiens
ggtaatggtgatgcccattttacagagaagaaaagtgcagcttccaaaggtgcaatccgcggtggggaaaggggccggcaaactcccacacccgcgctgtcccgccccgtcgcagttccgcgggccctggcgcggcctggagactccagtctcttcctctctggacctcagtttcgccaccggtccagcggaaagcggatctggtgggtcccatgcatatgaaacgttcccgctccctagaggggccctgcccggagatggcctgtccggaggcgatgcttcgccatttgccggcgccctcttcattgttatctcctttgtgtccgctctggtcttagccgtcggaacatcctgggactccaaggctccgacccccagcgcaaaggactctagggactggcttcctggctgtaccgcgcagcgggactcctcgtctgcacagcttcggggaggcccagagcacgcccctactagccggctccgtccaaggcccaccaagacaacccgccacgaaacttcccggccccctcagcccagggctcccggtcccgagctgctggccggtggcgcggggcctgccgcccgccttctacgagccgcatggacggaggcctgcgtgttatttcatagaggccgaaacggagacccaggaaagataaaagaagggctcaacccgggacccccactagccagccgagggcgagaaatgaaagccaaggctgaatgattccctgtgccgtgagctctctcccactccatccacactctcctccctgcaaagagtgttctgcaatttgcagcgtcgtctgtagcccaagcaggaggtgcgctgtggaaactgaggccgctgggaggccttgccaaccgtgacccggacgtcggacgccccagccgaggcccggcgagtccttagcccctctcgaactaaaatggaccgaacagaaaatgcggacggggctccctcctttcgggtagcggcggggcagacgggaggccgtct

SEQ ID NO: 407515 - DNA, 1000 bp, Homo Sapiens
ctcccttaaggaactcccacccatctactcccagtacatgcccctctgtccccatgctcctgcagctggaattgaaaccactgtgctggggctgaccacgggcactctctgcaggcctcaggctgaccaccagctgctctggaagagagctccttttgctttcaaaagcaaatacaaatacgggcagcttctgaatggatggccaagtgactctggagcttccgcgctgttacagcagatttatggctttgctattctgggaagcagccgtttttccgtgggatctaagggggccacggccggagagccaggacccccaggcctcatcccagggagaagatggttcagaccacacctctaccctgactcagcacacacagctgtaccgtcaggggctgcaaaccaacatctctcagggccttcctggaagctgcggctggactccccttgtactccaggggagcatccctggaggcccaggtcggggctcctggagggtccctgggttctgggggacagaagaacagggaggaagaatccagatgtggctcactgggctctgtggatctggcactggaacagctgtccaggctttggggcccccgacacccctgctgctctccctcaggccccagatctgcttgggcccccagtgggcaaccgctcggtgctggcccaccacagggaaatattccggtggaggtaagctctgtcctgttctcagagagccctggccaggcctggtagataaattccaggccaagccataggatttggacactggggctacaggaattcaagaaagaagaataaagaagcagccttgagtattagtgaatgtggcctgacattggcagatggctttagcacagccttcctggaggaaaaggaggagggagactgcactgaacgggtttctgaaacttgtgccctgacgccaagcataccaccacatcacttataggatgtgcaagtataaacaagggattttgccgctctg

SEQ ID NO: 407516 - DNA, 431 bp, Homo Sapiens
atggcacctacggccctgaccggagagagggaaggaaacatctgtgctggggcctgctccctctgccccagcactggggaatcactgccttcctggctgctgccacataccacaatctcctctgctggagaggagaggatgtgttcctcccaggccacggggcccctctgccttgccccaagcacagagctacctaagggactgacctttgccacactggagctcacctcccgggggcctctggcctacccttttccctgccagctgaagagactgccggcagcctggacgtcctggttagctgaaggcagctgaaatgtgggcctccctatgtggggtttagtactgaattatgtgtttgtggttttgcttctttttgtagacccacaaatatttttatttgaatagtaaagagctgtgctcagattgta

SEQ ID NO: 407517 - DNA, 722 bp, Homo Sapiens
atggctgacgctcctcaggggccactgatagtgattctgaaagacagcttcaaatcacatggcaggtcacatgcatgggtggggcaggcctgggggtgggggacacacacacgcacatgccggagtgtgcacacacatgctgtgaggccccacggcccacatgcacacgctaacacacatgcccacaaacaacacgcatacgtcgccctccccgccacctcccaatgcccagcaccctcaccggccggcacgtgccacatggatctggggcgtgcagccactcggcacactgaagcacatgcgtgggcagagtcacaacacagatgctcacccgcacacagaggcatttgcaccagctccctgcacactcgtgcctggcgtgctcagaggaccacccatgctgctcacggagacagggcttgctcactaatgtccggctgtcatttctccacctcagagccttccatggctccctactgcctacagcgttgaatcccaacaagtcatactctttggactttgaaggttctccaccctgtgcgctggacttggagccccttggagtatggcttttcacatgggcttctataccgcttcgactggaagatccacctccccactgccttttctcactcagatggggacaccgaggtccagaggaaaagacacctgtcaaatgtcacagatctgggaggggacttaagacttatcatgccaagagg

SEQ ID NO: 407518 - DNA, 630 bp, Homo Sapiens
atgacggcggaagtagctcggagagacgggctggggcagggcgtgcgttcgtgcggtcaaaatccactggtggcgtttggggtgttcccgtggacgcggcctcccggcaggcggacctccaccgggtgggcgcggcaggcgggctgtgcgggcaggaagagcgacgagcttgagagtgggagatggggtgcaacggcgggcctctccggggaggtgacactgccgctgagacccgaatggaagggcgcgcccggcgggggaacagcaggcgccgaggtggacccaggggcagctgcggctagtccatttggagctccttcaagccgaagcatccaacaccagtgtctgtgaggtgtgggcccggccccaggagcggggcctgggcagccccgtgtgttgaggaaggaaggcagggcccccgctccccgggcctgaccccactgcttcagccccctcctgcctgcctacagcctggcctcgagggcccatcagatggagtctcactgtagtccagatggagtgcaatggcgtgatctcggctcactgcaagctccgcctccccggttcacgccattctcttgcctcagcctcctgagtagctgggactacaggtgcccgccaccacacccg

SEQ ID NO: 407519 - DNA, 1000 bp, Homo Sapiens
caccctctctgtgcgggcctgggagcccagagtccaagactttcccagaggctgagcacggctgcggccctccagggctccttctgcctggcgtggccgctccctagttctggctggggccttggcatcgccctggggctagaaacctggatgcagcggaccgtggaggccgggtgcagccccgtcggctgcgcgctctctgcagaaaaggattttctacgctccccgcccatcacttggatctcgtctggggaggggcggattttttttctggaagtacccttcttctccacggtggaggatttaaggctgggctccaatcgaggcggaggctgcagggcccgcggggcgccccccgcccggcgcacgcctgcccggagcccgggaaggcgcagccctgggtgggggggcccgtgcacccccggaggcggcagcggcggtgagtgctccccttcttcccgcctggcaccttccgccagccaaggcagggatcgcggcagataaacctgccagtaatttcagcaaatgaaacgtggaacacgtcaaggccagaggatggaaaaggctccagttttgataaaaggaggcctgcttggcttggaatcctctctcctgctggttgggagatgcaaagatgtttccagagaggggctgatgaattgaggggaaagaaatgagcccagtatgagtcccctttcagggctgagcgtgtataaaaccaaacaacttggaaccgctccaagagaggggattaaagcaacatgttattctgagtgattgcttaatttattgagctgcggctggatctgtaatgaaatacagcccttgtaactgataacctcctgctgccattgaacttctacaattaaggaatattttctgagtttctctggaacggctctgaatttttagcctctgtggtagggtgcttctgaacatttgttttccaggcaattttttttgagtattaggctgatgttaataaataagcagcatttta

SEQ ID NO: 407520 - DNA, 555 bp, Homo Sapiens
atggcccgggtagctacagcagccgtcgcagccaccggtcacctcagctgtgaaccatgtaggagccgtctgggtgtagccctacctgccaggcggcgccccgcgggctgccgccgccgctgccttgaagaagcagttcaacctcatcagcaggtggccgacctgactatgggccggtcggctctggaccgaaccacagcccagcccgaggccagcgggacgcccgctgccgctcaatcgccccctggtccttggcgaccatctgggacgggccgctgcctcctctgtagcaacccctcgggtgccccctgcccattgtccctaccccggcgagcattgccctgcgaggactacacccgatgcttctcctctcttccggaggacacagccagcctgggaccgctgccctgtgctaaaactccgatgacttctgtccctaacgctgtgccgagcgctgtgctgtggggggcagcattgtcagactttccgggttgacccgctgttgggagtcctttaagtgcatggtagcaagaaataaagggatatatgaaagcc

SEQ ID NO: 407521 - DNA, 1000 bp, Homo Sapiens; identical to SEQ ID NO: 294956

SEQ ID NO: 407522 - DNA, 645 bp, Homo Sapiens
atgagatgtgtggcagctgagacccgggaactgctcaagggcaccaggccccatctgtctgcactcactcaccttcctcagagcttttcggggagcaacttggcaagggggggtcccagcagctgctcgcgggccaggaaccatggggcacagccccgggcgaccctcgggccggcgggggccttccgcttcctggcgtctttcttccccgccccgccggctgctggggaagcggcgggcgcccagtgcctggaggtcgctccctcgcctcctctggctgcgggaacggagaggcggcggcggccggagcagggtgggcggcctgagccgagagcccggccggcccccgcgaggaatatggcgacctgcggcgaccggagcagcagcggcgtcagttgctgcaccgccgacttcttggagcagcgaaagcgactcgcgagaagacgccgccaagtggaacccgggccctgcggccctgggagggggcagcagcgacacagccatgaagccccgggcgcggcgctgggcgccaacgagagccacggcaacctccagacggcgccacagcaacctctaggcagtgcccacaccagcctacaggtggcgcccctcgcactgcacctgccgcggccgccccgggtgtga

SEQ ID NO: 407523 - DNA, 1000 bp, Homo Sapiens
cagaaccccatgctctcctggacataaaagccatgcggtccctggtagacaggatcccctccaagcattttccaaagcccgaggggctgcttacaagactctgcccatcacccccaacctggctgatctgggaccacatcagcacctggcctgactcttctaccaggatgccctccaagaccaacactgatgccttagtcaccctcaccagggaggctgggggtgcccccacatggctgctgcacctgatgttggaaacggaggctccaaaaacgtgagaaaaccgaggcccggaaagtgtcaacccaaatcacgacactccttgccccaaacccagaagcctgaggaagtaaggaagtgcggtgggatctgtcttcccgtgtgtcttcaggatcctggggcctgcccctcctggcttcctcttgaggaaggcctcagaagacccgcctttggtcacaggacagaagctgggccaagaggcaaaggttttggccgccacaggggaaactctgggctcagagctgccgaagtgactcacgggccctgctgggaagcagctgacgttccttgtctgcgccttacaaaaccacacgggctgcgagtgacagctggctgctctgagtggcggaggaatgttgttgccagacaggttcctgaggcatctgctgagctgtgctccagaaaccagccctgggcagctgccacaccaggcagcctccacccctccccacaaccaggagtcttggagggcacccccaccaacctcaacagaactctcccctcagggatccgtggaagtcagccactgccacagggacagccaccccttccaggcaggagctcatgggaaaccaagaccagggaacccatcccacccccagtaagacttgaggccagggaggttggaggggtctccctgtgaccaaatctgtggccatcacaaccgaccttgaaccataatactaagaatgataacaataataatcacagctaacccttc

SEQ ID NO: 407524 - DNA, 767 bp, Homo Sapiens
atgaaaagagacaactcccggggatgcctgcctgctccggcctcggcctggccagcccgcccccgacagcaggcagaattagtgaccgatggccgtgtcctggctgggacagtgtcctccgagcccactgatggcttccgctccccagccccgggccctgggaggaggacctcggctatggtccttctgaaaaacaggcggcgtagcaggtgggcagcacgttgccatgatgtgccgtggcccggccgtggctggcgtgatcccaccagagtgagctggagcagatctgcaccatgggccaagtttctcagaaaatacatggcttcctgcgggctgcagcctaatgcccacgttcctctcggggcagaccgaaggttattcaaccagggcaaaggacagccttgcaaaccaactacgtcctccttctggagtttgtgtgacccctggcccctgagcccacaccctctcggagcggggttccaactccgtggaagctctgctgagatgcaggtccctccctcgacacctggggattacaattagagatgcgatttggatggggacaccgagagaaaccatgacaggggctctccagagaagcagcccagccttgggcaacttagttctcccatctgaccatccaacccaataaggctgctgactcacataggaccaggttagtgtttttcttaaaggcactacctttttgtggctaatttttagaatttatttttattattatttttttgagacggagtctcactctg

SEQ ID NO: 407525 - DNA, 1000 bp, Homo Sapiens; identical to SEQ ID NO: 294958

SEQ ID NO: 407526 - DNA, 504 bp, Homo Sapiens
atgccgggccgggaactcacaggcgaggtgtcgggtagccgcgggcaggattcaggactcacttgcctgccatcctgcgcgctgggtagacgcggggtcagcggctcagagcgcggctgtgtggggctgcggggctcccgccatgcccgctggggtaggtcctgcggaccccggccactggagccactcatcatttccgacggatgggccggaggggccgccggccgccccagccagggtctcggtagcctgcaaggagagaaagaggtgggagcagcccgcgcggggccctgcgtcttgcataggcgcttctgggcgcggaattggaagcagtcgtcacccggaggcctgggcgtgcaagcaccgaagctctggctggccctgagcctccccaccccacccgctcttttcgctggaacgcgtgtactttgggcagttgctgacgtggagacaggacgtatgtcttcatattttagtaaaacccaatgccctctgcctctctga

SEQ ID NO: 407527 - DNA, 1000 bp, Homo Sapiens; identical to SEQ ID NO: 224962

SEQ ID NO: 407528 - DNA, 767 bp, Homo Sapiens; identical to SEQ ID NO: 294959

SEQ ID NO: 407529 - DNA, 704 bp, Homo Sapiens; identical to SEQ ID NO: 294960

SEQ ID NO: 407530 - DNA, 1000 bp, Homo Sapiens; identical to SEQ ID NO: 119252

SEQ ID NO: 407531 - DNA, 644 bp, Homo Sapiens
tttaacccaaaacaaagggccttgatcccctgtatggcctgcattccatgggatgagatggggattcctatgttcctcataggatctctataaaagtagagatcaggcctgagctcccatgagtgttcacaggagatggtgccatgcatgcacagaagttcccaaaccagcatccaccatatcaaacccggaatctgtgtgagaaggcatgccttcatacttcaggcagtttacaagacagccttagctttcgttttctgcttgctacagagccttaaggtcagccagaagcgagtgactggaaacttcttcattcccatctctctcctggcatctcaccattgtcacaatgactgccagttcccaggcctcaacctggaatctcagaagcaactctttttgtacagctgaggggcacctggaacatagaagttaagaagagatctggctgggatcaagaaacctcttttcactgcacctgaggctcagttgtgccctctgctgacactaggtcaggaggctggacagctccaactggaaacttggagcagggttttaagacctctgctttctcactttgaagaattggaatagaaaaatagaaaatacaaaaatgatgagtccttggaattgataggacacgt

SEQ ID NO: 407532 - DNA, 1000 bp, Homo Sapiens; identical to SEQ ID NO: 119253

SEQ ID NO: 407533 - DNA, 1000 bp, Homo Sapiens; identical to SEQ ID NO: 294962

SEQ ID NO: 407534 - DNA, 1000 bp, Homo Sapiens; identical to SEQ ID NO: 294963

SEQ ID NO: 407535 - DNA, 827 bp, Homo Sapiens
cgctcggccccgccccgggcagctatttggcacatttcaattagcgtaacgggtgcctggtaaacagccgaggccggctgcgggcacctgcaatccccgacccccgacgccctccccgagaccctggagacgcggctccgcccccaccggtaattaggagattttcaaggcctatgtccccaaagcccagcccagctggagagatcagccctgcggtcctgccgcgcactccaccgccagcctctcgggagtcaagggatccgccttcagggtgaattggggttccaccatgtcaccctcatggagctttcgttagccttgtttgggatacaaaggggtaagtgtcccctcattttagagaaagatcaagagccagtgaacaggatttcccagccagggacatggagcagggcacctgcagatggtccacgtgctcttggctgatggcagcccacctccgggaggggcctgtgcacctttctcccaggaggagggaaggacccaatcattatccagagtcaacgggcctttgcacaggctgttcctgctgcctggaagctcatccttttggctcactccctcacttcctgcccaaatgtcatctccatgagatcgccctggaaacccaggactaccttcccaccttccacactcccttgccctcttgctataattttctctatggcatgtattaaatatttgtttattgtctgtcttctgccaactgcattataagctccccgagagcaggcaccttcttttgtacacagctgtatctccagagtggtgcttgcgggcagcaggttctcaataaactcgatgaatga

SEQ ID NO: 407536 - DNA, 829 bp, Homo Sapiens
atgtttagtcactactcgcagcagagaaaggctgagcgcggaggaggcgggggcgccgcttcgggagagcgggcagttctaggaggccgacctggagagcctcccggttccccttccccttttcccggaccccgcggggacaccccctcgccgccacccgggcctccccgagggcccaactgcgggtcaggcggcccgggccagccgaaagggaagtggggctaccccacagccaggcagcggggctggggtcagacccgggagccggaggttggagacgtgcgacagtcacctgcgggcagattccagaggggagacccagggctgcaggggacgccccttcgtggcagctacccagcctcggcccactgccagtgttacgtggctgcatgaccatacacttctgggtagagcccagtggaagacaaagaagactcaaggaatagcccttgagatcctgaaccaactttgaaggcagagaagtgggctagaagaagtggggttggagcctccaccaaggacaagaaggccttagccccctgcttccagctcaagctgaagtggctgtgagctgagctaagaagaccccacttcgccaggaggagtgcctcacgcctgtaatcccagcactttgaaaggccgaggcaggtggatcacgtgaggtcaggagtttaagaccagcctggccaacatgatggagtctagctctgtcgcccaggctggagtacagtggcgtgatctcggctcactccaacctccgcctcccgggttcaagcgattctcctgcctcagcctcctgggtagctgggactacaggcatgtgccaccc

SEQ ID NO: 407537 - DNA, 1000 bp, Homo Sapiens; identical to SEQ ID NO: 224964

SEQ ID NO: 407538 - DNA, 752 bp, Homo Sapiens
atgaagctggtgcctgagtgtccccaccaggaaccgacgccaggctccatccccgcatgtggacagcttccgacctggcgctggggcatgactggagaagtgcaggaatactgcttgcggaccttgctcaaagtgagtcccggatggaggcgtcaactacaagaccgggaacagcactcctggggctttgctggaaccatcggcgtgggaatgctgtctcttccctcgccagaaatacgacaagttcccggcgggcctcgcctagaggagggaaaggccgtggcgtccgctccctccgcggctcatggcgacgacgcttggcacatccgggaccctcaggccgctgcagtcgcgtcgccggctgctcgggccccagccccggccgctgtggtgactccgccgcgcctcgccgtcgcccccgtcccgcccgccgccccagccgccagggacatgtctaacctcggaggccgtaggaacgggcctgtcgaagtgcgcctgacagggacatgccacccccgttttaggagaacttgtatttggtttgagaaggaattggaatcacggcgttatcctaccttcaccatttacccctgataaattgtccacgtttatatttggacacaatctgggagcaatatggaggatggactggaatgggagccatgaagactggttttaggataactggttaagaagattcaacagcagccatcgttcagattttttttcttgtttgaacatttatttccaaa

SEQ ID NO: 407539 - DNA, 1000 bp, Homo Sapiens
catggggctcagacacgtgcacagcctacctaggcctgacccacaatccaggcacaaaaaagcttgtgggacacaaagccaagagcccttttaaaggtccttttgaaaatttcaatctgaccaagtggaacaaaagaaaaacatgtgagctccttgagggtaatccctctctccctggtagccctagtactgccttcaggcagatatccacaaaagcaccttgcacagaaacatctttgagctattttaagaggcagcattattttactgacaaatgttcagaattgagctctctgacttgcccccagcccaacctctatggattgaccattctcctcagagagactgtgtatgcctgtgcaggcacacatgttgaggggaagacaggaagacctaccctcccccaggccctggcttctcttcagacagtgccattcacactgagcctcacaggcaagtactgcctggtgtaacttggggagtgatggggcctgctgaccagaatcactcctccaaaagcttcacacacaagcctgagtttccagtcatcaccagcagcaccttcagtctttgagagccttcttaatgaacacacatattttacctggatcaagacactgtgttatctggcaaaggttgcccatttaaaatgagtgactggaaaggttcgtttatctggtcaaccctctactgcccccctattgtcacccctttgggattagaatcctgaaagaatgatgagaagaaaggctacatatggagagacctgagaaaccccgaatctttcttgagaggaggaaatcagacacctgcacagtccagcagcctgatcccaggagccagggagcagggagcagaggagagttccagggaccagaagccaggaagtgggattaaaggctaacactggccacacaagacggaccgctgcacaggaatttacagttcacagagcactttttcatctccttaaaatctcataaaatcgcagtgaattgag

SEQ ID NO: 407540 - DNA, 1000 bp, Homo Sapiens
acgaaggagctggccgtgctctggcgcccccagctctcgggtgggctgcagggcgccggactgctgcagctgctagcggctgcggcggcggtggcagcggcggcccggcgactgcctgccacgcccgagcgctcgcggtagacgctgtacacggcctcggccaggctcgggggctcccgcggacagcgcggggaagaggccaggtccggcggggacgcggcgccccgagggcggccgccgctcggcgccgcggggtgaggaggccacgagcccttggccagcatcgccgccgctccgaaggcgtccccggagccaccgcagcccccgggcttcagctccaggccccgcgactgcacgtagctgaggaagccgttgagcggtatggccccggggggcgccgcggcgggggcagacgacgacgaagaggcggcggcggccgcggcggcggccgcggcggccgccaggtctttggcgcggaggctgtgcacgtcgatgacggtggagtagaggtcccgcaggttgatgattttggtcttcttgtcccggttctcgtggaggaccgcgtttgcgcagatgaagaggaagatgccgatgcccatgatgaggggcccgaagaccttgagcttgtcagagtgcaggtagccagagaagatgcggaagaagaagcccacggacgtggaggaggaggacggggaggcggctcgtgctggaggcgtgctcctgggcgcgcccgcggaactggagttgacaccccctggagccctagggtggctcctggaccggtttttgctgccactgctactgctgttggccgtggttgggacccggtggctgctgcccgcaggcggcagctgcttacccccctcccgattggtcccggtggccttgggccagtagcccaccaccgccatggctatgcccaccagcagcaccaggatcccacagagggcgatgagccctgagatggagcacagcttcagcttgcctttcaccaccacca

SEQ ID NO: 407541 - DNA, 781 bp, Homo Sapiens
atggggccgcggcggcggcagcaaggacatcccagccgcgcggatctgggggaggggcggggagggggtgaggacccggctgggatccgcggctcggcccgccagggcgcagagagaggatgcagccgcaaatcccgagccggatcctcgtgccggacggaaggcgtggaagcgggaggggccttcgtcgccgggaagggctggagcgcgcgggggtgcagggagtccctccctgggcgccgcaacggcacctcctccctttcccggctccgtcccgccctccctcggcctctgcggacgcgacccacgcagaccacagccgagcccgccggaccccgggactacggaagccatcccgtccggccacccacacccgcgccgcggctggggcttgggttggggactgtggcggcgaagaagccgggggagggagttctcacaagatctgatggtttaagcgtggcagtttcccctgagctctccttcctgctggtatgtaaggcgtgctttgcttcctcttcaccttccgccatgattgtacatttcctgaggcctccccagccatgcagaactgcatacaacttaggattcataactacatatatacggatagaagtgcatgaacagaaaatctgcccttctggaataccaaatgcaaaattaaagtgactacaagcagaatttggagaaaaaaataaaagatgcaatatagtttttaaaatcattgttaaaatataatgagtctgtactttgcttaaacaataaaaaagtcttcgattta

SEQ ID NO: 407542 - DNA, 1000 bp, Homo Sapiens; identical to SEQ ID NO: 220460

SEQ ID NO: 407543 - DNA, 1000 bp, Homo Sapiens; identical to SEQ ID NO: 119254

SEQ ID NO: 407544 - DNA, 747 bp, Homo Sapiens
ccgagggatgctgtgtctcccagccagcagagtggctgcctacacttggaaaatgaacaggatctggtctcaagccttcctgagctccaaccagccctgcctgagcgaccttgggtgtatcatctgtcctgctgagcctcacattttccccacgtaaactggcgtgtggggtgagcacagccacagagagctcctctggctgagtgccgagtctgtgaggaaccggagctgggggttcagctgcagttggagctcgacctggatgaatggatggcacatggaggatgctgggtgtcactctgttgcccaggctggagtgcagtgatgagatctgagcccattgcaacctctgcctcctgggttaagcgatcctcccacctttgcctcccaagcagctggattacagacactgaagactcagcagagatcaagagagacaatatttcctgtacttctggaactcatggaagctggagagagacagaatttgcaaatgtctctcagcctgagtttccttccagaatttccatgaaccagggggttggctgcagtgtctgtttgaaagatgtggctgggggtatgaagggactgccttgaagctgagttgacatggcaggctcaccttttcaacttggatgggctcaaccccagccacgctgtcctctgctcctgagtacagggtctcggcccctcagctcctactctgaagcagccacggctgctggaagaaggttctggaagaaaggg

SEQ ID NO: 407545 - DNA, 691 bp, Homo Sapiens; identical to SEQ ID NO: 119255

SEQ ID NO: 407546 - DNA, 771 bp, Homo Sapiens
atgtggattgcagtggagacgctggcgttagagaatgcggggagggaaacgttcattacaagatttacggccagcccaagggggagcgaggctgggggaccgggtcgcggagacccggcttcgcacaccttttggaagactcagggagaagcgggggccgccttcggggggaaaggcgggactggggagcccacaggccatggctcctcccacaggatccccaggccggaggcgggatccccccatgatcctcccgtggcccccgcacaatctggggagatgcggagctgcccagagagggctctggggcgacagtcactgcgcagggacaggacaggactcccggagtcccagctgccggcccagccccaccctgcggccgagaggaccgagggccgagctgctccaggggaactcgggtcccagaccccggagtcgcagcggacaggcccgggtcccgccacagccagatccggctggttccaccagctcctcctccggtctcgggacgtccggccccgcacactcagcatttccggcttccgggtgtcccggcgtcctcccctgggcctgctcacgtcgcagaggggcggcgacggggattagaggggaggagggcctgcgcgagcagcaaagaccccaaaccccaaaaaacaaagaaaccgccagaaactgaagcttccacagcccgccacgtcccccggctacggctacgctcctgattggatagttagtacggcccctagtgcccctgattggataccgcttcag

SEQ ID NO: 407547 - DNA, 1000 bp, Homo Sapiens; identical to SEQ ID NO: 294969

SEQ ID NO: 407548 - DNA, 756 bp, Homo Sapiens
gggaattccctgagacacacacctccaatgccaagcaccgaacctgatagcccatctcacagatgacagcaatcagtgtcatcaaccgcatcacaccagtcctccaagacacagcatttataacgtcaggctgtgaccaccaacaaacagaaaaaaacaaagtaataaaatatcccaggtcacgcttggatgctaaaatcaagcagtcgtggaataaagaaagtcactttcagggcaactatgtaaaatcagtcgtggcctttgggcagcctagaggagaactcagtcagccacggctcctaaccctgccccacaccctgagtgtctatgaggggtcacccagaaatcagttaccaccgggacgttttgttccgttcaaaaaccagccgtgtgggggcatcctgggtctggggcagatgactgtttccccaaaatatctccatgcccaaggaacagctccctttatcccagcagcaggatctggtcctccgaactcacccactaaccttccaagcaaagttgtaaataataaagacttcctctgtggcaagtcctgttctaagctctgtacagatgagagtacaaattagcttcttacatttcatcctcatgaaaacccaaggatgtggatggagtatttattattctcattttaagtatggggaaactgaggcaccgagcagcatcttgtcacacctaagatcactcgcatgtaaacaacggggctgagattcagagctggacagtggaggtccc

SEQ ID NO: 407549 - DNA, 1000 bp, Homo Sapiens
ggctcaggaagatgtggcgaggatccattttctcaacaagacccagccccatcccaggcagaagctggtgttctatgattccagcgaggatgtggacaaagggtccctagacgctgacccttggctccctgcctggaccccagagaacagcccccaagggagcccactgttcctggggcctccccagattgatgtctggagtggaacaggccacccaagtgagatcctcgggctcagccctagccttttcagctccccagggaaactgctgccagacgagatcttggaggatgacatggagtacctgacccaagcggctttctttgaagaagtgtgcttagatctggagtcttcaccttcagcctacacgcaggaggctccacaggaaaaggatatgcaggccaaccctgtgggcacgccgggctccagcgaagaggacgaagacaccacatggacccccacccggctggcctcacccctgctggcagctgagaaaaaggccacgaagggccaagtagccagggcccctgtgaagcccaaggagaagaagaaaggcccctgcccaccccagatgaagaagaagtgtgtcaacggcttcatcatgttctgcaggatgaaccggaagcagtacatccggtggatcctgccctggaaccgcttccacagctgccaccaaggagctggcccagctgtggcgggtgatgacccagcaggagcggaggccatactggctcgcccaatagaggctaaaacggtggcccaggcccctgcggggacacaggattgggagtggtacagggatgcccgggaggcgagtgaggaagccaggccatcctgccaccgtctccccagcaccaaggctcgcaggttcagccgccagcacaaccgcatcgtgaagcaggacggctccagcagcgaggctgaggactgggagacgccaaagcccttctaccagctgctggccgagaaggccttgccgctgcccccgcacctccagtga

SEQ ID NO: 407550 - DNA, 1000 bp, Homo Sapiens
cccaactgtctactaaccggcttcccgacagggtgagggtgaggtcgcatctacaaccagagccagcgcttccccgccgccaccccttttcttggaatcccgctgcttagctacctgcgggtgtcattggccccgccccatttccccacgctttgaagggggcgagtctccacagacctcctagggggatagacagcagctggtgtgaccccacacacccagtgaggtctctggagccgcggtgcgggaagcggggacccgggtttgaatcctgcccctctggtgtggtgcggcctcttcccacagacttttggcctcagtgttccccgcctgggaagtggggactggccctggtacctggctccagagctgcacccagaggcgatcagcccggtgcgggaacggggcggggtggccgcaactacgggccacggatcctgacccgccctgcccacgatgactatccacatcctcatcctgctgttgctcctcgccttctccgcccaaggggacctggacactgcagccaggcgaggccagcaccaggtcccccagcaccgcgggcacgtctgctacctgggcgtatgccggacccaccgcctggcggagatcatatactggattcgctgtctccaccaaggagccctcggggaaggccagccacgagccccaggacccctacagctatgggcgccgccggtggcgcgaggcggaagcccggctcggttcccaggattccggcctgcagcgagggggctagcgcagtgcccagctcgctgggtgacctcgggcacggctcgtcccctcctcggcttcagtttgcctatctgtatgttggagcttctactccacatttcttctcccctaactccagcccctgaaaccgtcttccccagtccctccccgggctgcgactaggttggacctagaagcacacgggaccaggctgggcgaagaacactgacgcccagagccgaataaacaagagttccgtgtttca

SEQ ID NO: 407551 - DNA, 972 bp, Homo Sapiens
atgctgaagagaggcaaaagacagattattactaggaggtgctccaaagacattctccggtttctaattgtgatgatgaagcatggttacattggtaaatttgacatcactgatgatcacagagctggggaaattgtcgtgaacctcacaggcatgttaaacaagtgtggaatgatcagccccagatttgatgctacggagtggctccccgggtactttccaaggccaggtctccacctcgaagtgcgtcaaaggctgcaggccctggggaggctgaccagggcccgagggaggacgacaagcggggacgttggcggaggggttaatggcggagtcgcgatccagccgagcccacaactctgggaggctggttctgcctctctcccgaagcgtcgcccggctaagcttcgagcaccaggacacacaaccgccgactattccagagcccacagtcggcttcacgctggaggccggaaacgacacgtccccaaagcccgcgcgcgcggcccgccagaactgacctacccaatcaccgcaccgctgcgatcaagcggcgacacacgttgccgggtaagagtcacgctttggcaaataagcaacctgcctcatccaatcagcgtctcgcctgcccggttagttccttgtcttgcccaaccagattcttgcctcctccataccgctacttgcgtgtgccggtgcctggcccaatcagcgtcttgcgcctcttctcgctcccgggcctggtggaaacagactcagggccattttggctacacctgggagcagggcaccctggcggctggctgcggccgctgcagagatgaatggccccggatctgtggaggctcgcctgcccctggggaccccgtcctcggcctggggggtgagaagcatcccgttcccaccttgggaatggcccagcgcctgccggtcctagacgcccagcctggcctggccacggactcttggtga

SEQ ID NO: 407552 - DNA, 622 bp, Homo Sapiens
ctgggattacaggtgtgagccatcttgctcattctagtttaaacttttgagtggtttgtgtctcctgattggactcctacaaatacagaattgatgctaggaagggtaccaggagatagacgcacacagatgggatttgggaataggtttggttatccaaggagcagtgctgagctccttgcaatgggatatgggatgctggtgatttccaggatgtgagctcacaatgactcaagctgccacatactgttgattgtgaaatgccagttgaagcatatgtcctgcgagcttaggggtgctacaagttgaccactgcagcagtaaagatgactctgaagaatggcgtgggttggttcctttcaaatgcacttgagcagcggtctccaaccacagggccacagagctggagctggatctaccatgaaagacttgtgaatccaggaagagagactgactgggcaacatgttattcaggtgggaacatccagttgcaggaaaacaagcttaacacgcccactgattctacattatgggtctccctctgttgtccaaggctggagtgtagtagtgctatcgcagctgactgcagcctcaaccttccaggctgaagcgatcctcccac

SEQ ID NO: 407553 - DNA, 1000 bp, Homo Sapiens; identical to SEQ ID NO: 294971

SEQ ID NO: 407554 - DNA, 1000 bp, Homo Sapiens
caagggcacaatactgagcaacatggacaaggtctggccctatggtaaagtcaggtctggatcatggaattgaatggggtgtgttgccaggcacccgcatgaggggctggctcctccccgtgaattctgggcacagacacccagacctgagcaggcccctcaccccacagcgactggggagccggagcccgagtccctcccacctgctccctcggtttctgagggtctgtctcatcctgcagctggacagacgtgatcttcagccccaagttacagacgcttagagaagctggagacttgcacaatgtctcagaggaaagagagccagaacctggacccgtgttgtaccccaaccaaaccctccatggtggaaggaataggagtgggaaggggaggaggagacatatggtccaggaggttccatatgtacccacacatggacctcaaagaggcccccacagcaagacagcaaatgacatccacagtcacagatcacggagtgatttcagatgaagatggtgctggcagtttccccatcagcgcaatggagtttgagcaaaggatctcactggagaagtcgcagcgacagtggatctaagagcagagggcaagggctgcctgagccttgtgaagctcaattctgccccctggtgcccagaatgccgcgccagcaatgggatgcaggaagaagaggcaggagacacctgaggtctcttaccttttccaagctactcagacctccctcttacagggcagggaacacagggcaccagccctactaacccaatctgaggggaaactctgaggctccctctcctgcagagatctcagactctgtggtagagttggtgtggggggacacgtgacgtcagcaatagccctgtccatccagcacctggacaccccgagtggttccttctatgggaggcagaggcagggctgccccctctgctgtgcaattcctggggtcttcatctgagttaaattcttttaagtcagg

SEQ ID NO: 407555 - DNA, 806 bp, Homo Sapiens
atgactgatgtgaagcgacctgacgcacaagcggagacttttctccttggcagccaacaacctgcagcagcggcgcctcctcgcctgccaatcctggcacctgtgcgccgagccactgcaccgaggaggaccctactccgggtgaacaccgggcttgaagccacggacacccagccccagtgcagcgggttctcgccggcgggacctgcagccgcccactcgggccaccgccaccgcctcctgcagttgcggagcgctcagcccctccgagacgcccgctgcgccctggcccctggggatcctcgccctgcacaggcgcggcaacgggcaggggttgttacggagttgggtgcaggattcgcctttcctgcttgtctcttctccgcccaggatttattgtctgtggagccttctgggggcggggagggagctgcgcctccgccaccgccgccgccgccgccgctgctgctgcggtcgctagcgcggcgcgctgggcaggctgaggctggggagtggacgcgctcctgcctcccccgccggcgcttcgggcttcccctcagccgcttcccgcgggaacctctccagccgtccacctgaagggcactggcatcatggtctaacgtggcaccttcctggattcccctctatctcctgttcttcctaccttctactccttccctcctcttctcctccgaagaccctggcgcccactccactgcggacccctgaacacttaaggaataacccttggcagctgcacgactacgctctccgaaacctcatgggcagtttctcccgccggcgat

SEQ ID NO: 407556 - DNA, 1000 bp, Homo Sapiens
aaagaaggcattataaaatttcagtaaggactgtgacctctagagagcagaggctgtatctttttcatttgcatattctgagcatctattacaatgcttcatacatatatagtgtctcactacatattaatatttattgttcaataaatgaatccatgaactcattttatgtgaaactatggaaagtaggacaatctctcctacaagaaatattgatgggatcttgccatgttgttcaggctggccttgaattactggactcgagtgatcctccaacctcggcctcctgagtacatattccctggtctatagatgaagaaatgaaggttcaagaatactggacatctggactaattaaatgacaactaaatggcagaaatggtatttaagctcaggcctagcagatgcaaagtcatgggcacatgtcaagaaagacgagatatatcattttttcccacatagatcctggattattactatccttcgaatttatttctataatctctaagtcaggtggaacagagctataatttattagagtgaaactttggaggtgcatacagtagtcacattattatgttcatctcctacaggaacaacttttgatttcatttcattacattgaaaggtaacttcaaatatgaaaggagcctttaatgttataaatatgaccatgatgataatcatcactatcatcatctaaggtactcacaatcaataataagcctatacacttagaggtccaaattgaaattaaaaaaggaagacaagatctaaacttcagacaagctgatgagaaagcctgcttgcttcttccttcatttggacaggaaggtcaaaccatgtaggaaccgtcatcccagctgcaatccctgaccatagaaaccccaagccagttttctttccttgtttctcgagtcatctttggacttgcttgagatttgccttgttctcccagaaaagctcattatgggagcaataaacctttccatttcctctt

SEQ ID NO: 407557 - DNA, 1000 bp, Homo Sapiens
gcatctgcgagcaccgccagcccccatccaaccggctaccgcgccgtcatccagcagcctctactggaaagacaacggtggcggcggcggggagctgctggggggcgcggagagaccgcggccatctggggccgggaaggagaaagccaggcagagtctgatggagtctgcctccggcctgccttcctctgggccttcgaagccccctctcaaaaggccaggacgcgctgggcccaagaaagacacccgtcttcacaggccaaccagaactctggccacctgcgggaggacggcactgtcccttgcgacccggcccaggagccgtcctcctccacagcctcctcgaggatagcgagcccgaattccacgcgggcgatgagccccgaagcgcgcggttgcctctgcccctcccgaaccgagaaggaaagaggggagagggaaacaggagtctgatggaggggagagaaatggaattccagaggcagcccacgggcagacacctgcaagaatggctgtgttctggccctgaagttcttaatagtgagggcccaggatagttcccttggggctgtgggaaaagagggaagttcacgctctcagatgttggaggaattggaagccggaggtgtgatttcttggcctccagcagaaacttggttacagtggccacgttctttctcgctctgagaatttggacaagtcactcaatctctctgctcttctgttttctgatatgtgcgatatcatctcaaaaatttcttccagctcctgagatattagtgacaaaatcatcacaagttattttttcagcccttctaaatatagcttcatataatgtaatatattgaagtaaataatctagaaacatgtgaaatgaccaattcctctcacaatgaagatgtgcatcagaaataaaaaacaaagaacatgtttcttttaataagcaaaatagacccattctcagacttatgatcagaaataagactgactcaaagttttc

SEQ ID NO: 407558 - DNA, 494 bp, Homo Sapiens
gtaatatgaaaaagttatttaaatttcatttcacgttgtccttttgaatcctcgcattaataaaatcgttttcagtggaaatatcagcagcaagaaatagaaaatactaacagcaagattttttaatgcccataagaagcagcttggaaattgacactcggttgccaggcacgttttacagctttgctctttaccatggaccagagataattttccttatggagaatttacaagtttccagatgcattatgctgaagatagccaggatccagtacaaggttggtatcccactacaaagcaagggcctgccacaaccagatgcatgtttcaacgacatcgaaagactcaccttggactcatcgctgacttgtcaaccagaactccaatatctgagtttgtcaagatctcaaaggacgtggagtgcatttgtattatcatataaagcacgtgaaattatggttttctctgtgaatttttctaaaagcatactttga

SEQ ID NO: 407559 - DNA, 1000 bp, Homo Sapiens
ctattattctgaacagaaaacaagaaatacagctggagctatttcctatctacctgatgaagggcactaccaggcggtcactctggctctgtccaccgatgcctgtgcccactttgtgcgacgtagcttccatggagacaagagcaatggtaatggaagaagaaagtctggatgtactcttgcagaagcagaaagcttcatggaacaatattaatcttctggtcatctctgtgctggtctagttgcccataaagttgtcagattgactttggatttaaagcctgaaaatgagtcccaaggaaatccgttgacatgaggcccaaggaagacagtttttggaaggggcaaggagggacagttctctgctccactgaagctaggtatggccatgtgacccatgttgccagtgaaacaggaggagaagggacatctgggtggaaacatttaagagtcaagtgtatttctccatactctctttctttggctttggcagtgatgaaggtcaatccaattacagttgattcttgaacaacagaggtttgaactgtgtgggtcaacctatacgtggattttcttctgcctctgccacctctgagacagcaagaccaatccttccttttcctccttctcctcagcctatacaatgtaaaaatgacaaggatgaagacctttatgatgattcacgtccacttaatgaacaacgtacctttcacttcccaccatgattctgaggcctcccgagccatgtggaactgtaagtgcaattaaacctctttttcttcccagtcttgggtatgtctttatcagcagtgtgaaaatggactaatacagtaaataggtaccagtagagtggggcattgctgaaaagatatctgaaaatgtggaagcaacttttgaactgggtaacaggcagaggttggaagagtttggagggctcagaagaagacaggaaaatgtgggaaagtttggaacttctagagatttgttgaatggctttgac

SEQ ID NO: 407560 - DNA, 714 bp, Homo Sapiens; identical to SEQ ID NO: 224966

SEQ ID NO: 407561 - DNA, 573 bp, Homo Sapiens; identical to SEQ ID NO: 294978

SEQ ID NO: 407562 - DNA, 1000 bp, Homo Sapiens; identical to SEQ ID NO: 294979

SEQ ID NO: 407563 - DNA, 682 bp, Homo Sapiens; identical to SEQ ID NO: 224968

SEQ ID NO: 407564 - DNA, 1000 bp, Homo Sapiens; identical to SEQ ID NO: 294980

SEQ ID NO: 407565 - DNA, 802 bp, Homo Sapiens; identical to SEQ ID NO: 294982

SEQ ID NO: 407566 - DNA, 1000 bp, Homo Sapiens; identical to SEQ ID NO: 294983

SEQ ID NO: 407567 - DNA, 1000 bp, Homo Sapiens
atatgaaaaaagtttagtaattacagacataacagcagaaagtcctcggaaccaagcttattctcatggccgattctgctccacctgggactctgctgtgctgcgggcatcctgtggtcagaatcgcagaggggccatcagggaggaccttcccagaggatggacctcacgtgactgctgcgtgggcaagtggcactggccactctgcctggagagaggagtaaatgcagggctggccaggcgacctgcacactctgctaccggccttgtccatctttagcctctaatttgaaaatgaggatcacacagaccaagagtatctttgagggttagtacagaccacagaaatgccctgggcctttcactctctccttttgcaaattcccatgtgtggaaatgccgtttggataatgagggagcctgaaggaggtggacacatgagcagccccgacaggcctggctccatcctctgaaaatggggccccgtgcccggcgtgtggccttactggttcagtcttctttacagtggtaggttttgagtgcccagatgcccagtgcctcctacccggaacaggacaggaccaggctgtcccctggaagaatcccatgcacacttggctattcagggagtttccacccagccgagctcgcctctgtggctaccctggtcttgctgctcatatctgccaggaaaggcctggacttggagagaaacctgggatttggattcagtccttgccagcctggctggttcatatccttacctctgtctgtggaagcctatgttcctgagcagcgagtcagagggggcatctgaacgcagagcagggagcttcagatgggaagaagtcagaggaaccagaatgtatcagacgatgtggagttgggtgcctgagctcaaagcaagctgggccttgggctggctgtgtgatcttgggcaagttcgaccagcttctttgtgcctcttttctctccttaataagataaatgtcttcactag

SEQ ID NO: 407568 - DNA, 758 bp, Homo Sapiens
atgaaaggtgcaggtgggtcctcgtcacgtggtaaaaagtatcgcacgcccacagttctacacccgaaagtccggacacctgagcgactttccgggccagaggccccaaggtgcatcggggcagagccggaagcggacgctgaaaactggcggctccttaatggttccggcggcagggaccgcagcgacgccctcaccggaagtcccgcctctgccgtgggcctgcgagaatcgaggcactcgctggcgtacccatgtatcgaaatgagttcacggcctggtaccggcggatgtcggtggtctacgggatcggcacctggtctgtgttgggctcactgctttactatagccggacaatggcgaagtcgtcagaccaaaaggatggctcagcaagtgaagtacccagtgaactctctgaacgcccaaaaggattttatgtggaaacagttgtcacatataaagaagattttgttccaaatacagaaaagatcctcaactattggaaatcatggactggtggccctggtacagaaccatgactggctgctgaattctgaaaaccaggacttggttcaacatttaaatttgatagttgccctgattcccattttgggtttgtgaaaagtgtatgtatttaaatttgctgtaaaacataatcactaataatatgcaataaatattttcttgaaggaaactatctgcgttttcttttttttttttttttttgagacggagtcttgctgtgtcacccaggctgg

SEQ ID NO: 407569 - DNA, 1000 bp, Homo Sapiens
ggggcctttccagcccctgcaacagatcccgggatctgtagttgggcggaggggctcgttatgggaaaggggtgcgtgcgcgtttgtgctaaaacaagaaaggcaagaatctccgagaacaaaactctggtcctcgcctggccggggaccgcagaagacaggggcggcagcgccaaggcggggtaagcgtagcgggtggttgtcaagaggggcggaggctggcggttacagggaatggagggatgggccggacctggggtcgcgcaggcgccttggtcgctgcctccgatccgatcacccccgccccatctcctctgcgagctcaggaaggtggctgggggagggggatggctccctactgccgagggacggcccgaggcaaacacaaagcccttccctcccctcctcctctttcctctcctctcccctcccctcccctcctttctcccccttcctcctcttcctcctcctcctcttgctcctcccgggcggggaaacccagccccgcgctcgtctttggggccaccggtcgcccccgcctccgggacctgcggggagggcccgcgagagatggagacgagagatctggacttctgaacatctaccggaaaagataaaatgtgcaagcccttcagaacgctggggaggttgggctgaactgcagtgggagaggagaagagatgctggcgtgaagggctggggcagaagatcaggggaaaattgcggatgatctgaatgatagcagtgaccaccagcaacctacagagctgcccaaccaggaaattgtcagatggaagcaacgcttgcaggcaaagaaggctgaagcaggccaaggcaggaatgaaacagtcataaatgttggagtgaagcgactgacctccccggtccacaccccggcccagcgtcctgcatctgctggaggatggtggagaccatgtggaggatggggacttggcagtggaggagaacatggaagcaggatatggcagtcccctagcgt

SEQ ID NO: 407570 - DNA, 1000 bp, Homo Sapiens
aagacagatgcctttggacccttgcagaaagaagtccaaactaagcacagtcccctcatcgtagtaacagctcctatcatggaaaattggccattcctacagattaataatgaatcagtgaccaaggaacatcttcagaacaaacagaaaagcaaagcaagtgggagaagtttacttctaaacttccagatagttttcgaaaattatcccaagtcctccagacttccttgtcgtgtggcctcagtccttcgccgtccctcgccgtccttcgccatcgcacgccaccgcaccccatctctcgaaatctgcagacatcttgatttttcccacgctgtctgtcaggtctccgccgccactcgacgccagggcgccgggccttgtgggctgtgctgcacctcggacggcttcgcaccagccagcgccctctctctcctgcagcactctgatctgcaccccctgaggggcttccactgtccgcggggtgagaatgcccctgggagtgtaacatgactgccgccccatgtgtgtgagaggcgtcctctgggagagcatggatcctgaggtcccaggattgtcagctgacctctgtcctgtgtgcccagtggccccaggtgacgtgtcttcaagaagaggctgagctgcggtgcttgtaagatgggtccgctgtgtgcagaggctccatgggatgtgttgtcttcatagtagcaggtcgctggaccatgggtccgcaaggtctcagccttagatccaaggacagtccaaggaagtcctaagaccatggagttggtgatctgggatctgggtttgctgatatttctcaccgtgaatctcttggtggtgtttgtgggcacgagaggggcagagaatggagagtgaggctaccacatgaagcgtcaccagagctgctccctgctgcctgctcagagcaccccggatccactgttcaatctgcacaagattcggggtccagacatgggagacttcagctgcctcagaggac

SEQ ID NO: 407571 - DNA, 1000 bp, Homo Sapiens
agccttcccaggcaggttccctctcattcccgcccacgtcccggcccctgcgccccagccgtgtcaggactgccacccaagcctggagctgacctggcagaggcagtcagcagctatggccgaacagctcctggaagaaggagccagcacacgggcgaatggacgagcatgctctgccatcagcgctcactctgcggctgaggagctccatcccgcggtgcaccttattccagactggggggccagggggttgggctcccacagctcctgcaccacgatcctgcagagctgccccacggggtgcagatggcatctgggcctgtctgcagcagacaacaacatgcagaccccaccatcccctctgctggagctggagaacaagcagaccacccacagtctccctgactcgggctccaacatctgcctgaggaaaggccggggaggtggcacccagaagctgctgggagggaagggggtgggcctgcctgccgtgcctgggcctgcgcccccacatcccacatgacggcctccccagcccccactctgcaaggaagtgacagaaactccacagaatccagagggcctaggaatgttggtcctgcaggactgtgcagcccaaggggcggccgcactgcccacctagtcctgtatcccttctgggttctccactccagttccctgggaggggctgcctccttgctctcagagattttacagctggctgtggattttagacggtgctgactggttgggcaccgtggttcatgcctgtaatcccaacactctgggaagccatggtgacagatcacttgagcccaggagttcaaggccagcctgggcaacacagtgagagctgggcatggtggtgtgcacctgtggttccagctgctcgggaggctgaggtgggaggatcgactggagtcagggaagttgaggctgcagtgatctgtgattgtgccactgcattccagcctaggtgacggagaaagaccctgtctcc

SEQ ID NO: 407572 - DNA, 1000 bp, Homo Sapiens
gcaaaaccaaaaaagagaaagttattccggagatttatgtctgaaaataaaatatttgaaggaaaaactgtgaatgacaaaatctggcaggaacacagcaagcataagaatgattcccacatcagaaggccctgtcagctaaaagatctaaatgaaaatgattttctaagtaacaacatacatacctatcaaggaaaaactctacaaggaacttcctatcaggtgacctctgaatgttggagtccatttcactatcaaagacatgttgagaccactgttgatgaactggctcaagaatttatgtaaagtaacaaaagaagatacttatgtagtcaaatgtccccaaggatatttgaggaacaatgaattcctgtgatccaatccttcaatttaaagatgaagggctgaagtgcagagaggagaagtggctcactcaagttcacatggccagtcacaaagcagattttcaaagcagaacaatcattagtcggcacacaagggcaggttcttactctaggttttcttaacatttcttgtgtatatgaaataaatattagataaaaatgtttttttactgtgtaattttccattcatagctcctcttcttgctaagaatccaatagatacttaataaaaattaattaatttgcatactggctcttaaatttcctattgttcataatttttggtcagctaggaggtgtacccagaaacagaaatgttcttatgagtagttctagaaacttcttcaaaatttcagagcagaggatattacgcaggaagtaagaaagatgtggcttctgtggccttttctcttaaatcaacacaacccccatttgcaatgctggtttgtgtaatcctggcaactcccagctagcttggcagtgtgtccacattcaaagactgacccaaagctataggtcagtgagcaaaaagcagtcttggcttcccctgcagaagtggagaaatggcagtgacattgcgacttcattatactatg

SEQ ID NO: 407573 - DNA, 1000 bp, Homo Sapiens; identical to SEQ ID NO: 294985

SEQ ID NO: 407574 - DNA, 1000 bp, Homo Sapiens; identical to SEQ ID NO: 294986

SEQ ID NO: 407575 - DNA, 907 bp, Homo Sapiens; identical to SEQ ID NO: 294987

SEQ ID NO: 407576 - DNA, 1000 bp, Homo Sapiens
ggctgggagaaagggatggggagagtccctcctgccactgacccaggatggataaaagtacccctttcatagaaggaagaaaatgggaacaaaggtgctgctgatcatctgaggttgcctgcatggcagtgaagaacatggacctttgggtagcccacctgggaggaattttccagagatcactgtctgatgaccctgtcttggaattggagccatgcaagttacactgaccacgtttgggttgggatattgaggaggttatggttaaaagcatacgatgggagatcatattgtacttgcgagtgagacccggctggaggaatgttttaattcttcggaaataccaagtggtctctgtctcacatgagtacttcacaatggggaaactgaactggaactctactgacaacgcagttgggagttcaaacttaataaccttccagagttggtatcaaattcagacgctgacgctccttggagaggttctttgctgcaagaggatggaaaggatcactgtgattttgtttttctcctgctgctctgtctggaagccatgtgaggaggacatctgagcagccctgtggagaggcccccagccaacagccagcatgaacttgctgggcatgtgagtgcaccaccttgaaagtagagcctcaacccctggtcaagccatcagggagagctcaagctggcctgttggaagatgacaggccatatgcaacagacgtgaagtgtcccagctgatccccttccagaacacccaccttccagatgaccacagatgcaagggtgagccagccaatagctgctgagacattcccagaaagacagaacatccagctgacccatggactcatgggcgatcatggataaatggatattgtttcaagctactaggtttggggttggtttgttacgcagcaatagctaacagctacacctctattttaaggagttgtgaagataaattgcaaaggtacagaaaaatgaatagctataa

SEQ ID NO: 407577 - DNA, 522 bp, Homo Sapiens
atgaatgcagattccccaacaatccagaggtatatgcaagaggaggggcaggggttctttcaagtcaccttccaggtgaccaggtgcctttacaactctaaggctctcagtgggaaagagcttcaggtctctgagcttgaccagtgtttcagctctcccttggagtcccgggaaacgtatctcttgggatcaggagctgggatggaacccagggctcctgagatgggacaaagctatgctctgtgcacctgtcttgcctcctcactttgtacaatgagtgtgccttcagccaaaagcagaactggaaacatcctaagtgggccggtaacgaggctagctctgtcgactagttcaagacccctgagcgctttgggcctgaggttcctcagcttccaagtgaaaggcttcgacttggcattctaagagacaatctctgtgaccatcagtttcctcatctgtaaaactggcatcatgataactttgaaggtaattgtgaagattaaagggagtcatgcatgtaaa

SEQ ID NO: 407578 - DNA, 1000 bp, Homo Sapiens; identical to SEQ ID NO: 294989

SEQ ID NO: 407579 - DNA, 1000 bp, Homo Sapiens; identical to SEQ ID NO: 294990

SEQ ID NO: 407580 - DNA, 1000 bp, Homo Sapiens
agtctgatggaagagacacggcccctgttgtatcattcttgccttcttacccatgtcacacaagggagtgaaggaggtggcaggcccagggataggtccatttctgtggtgaatggaggctttcagaggacattcccacagccctgctgtcaagggccccttccccttcctccctccccggcacgatgccttacccactggaatgaatcctgagctctgagcctattcctaacacatgaatgctgacccctttgtcacgtcccgctttccctccaactctgttttttgttctttttcccacccagactcgccctcccccacttgccatttcccaagctcatcccggggagaccagactcaatggcccactggtgatcttgttttacatgagacatttccaaaaaagaccaaaaaatcctttccaggaaaatgccatttttaaaattcagctccagacactgcggcaacattaggaaaacaaaggacttggcagaaaggttttctgcgtggggactttctctcgaaaataccttctccaaattgcctccagtggggatgactccaagggtcagttctggagcacccaggcaattgcagacagagtgacttcgggtttgtacactgtcccaggtctttccttacctgatatcaccctgggatcttccaggcttaaacaaggagccccttccaagggtccccaaaggaagcagctgtctctgagggtcaagaaataatgctgcttccttcctccagaggggactcctcaacccctctcttgccaccatcactaagccaggggcccaggttaggaggtggagggacatagtgtgcttagtagagagcttgtcttctcttatcatccaagtgagaggaatacacagcttcccctggggcatacatagtggtgttccccttttttgcatgtatcaggtataattaatcaggttgacatcacatatgtaataataatggccattatttattaaacacttccaatgtg

SEQ ID NO: 407581 - DNA, 1000 bp, Homo Sapiens
cgaaaaccagctctctgcccccctgctctccgggactctcccactcacccaccatcggcctcctgggccgcggtctgaagctgcgaccttgttcctgaggtttcgcgttttctggatgtcacgggggacagctctggaaaggggacgctcactcccttcacaaggggccaggcggggcactgcgcgggagaagccgccggagcggtcccactgccaccctccagctgttcgcggggctggaagcagctccagtgcccagacacggtgccgcgaccggcttggaccaggacgctggccaagtagcccgagcccatctcaagagaacacgccagccgtcaggacacgcagaagcagcctgacctccctcgaccttcaccttccacccgcgaccgcggaaccgcggacgactctgctccggccagtttttccgtacggcggacgaattccccgggggcagttctcacgacaggctgtgagagccgggactccccaaactttcccaccccaccttcgaggccgcagaaaggcgccgctccgaggcctaggagggcgcgggcggcggtggggaggctgggacctggaccttgccggcgcactgcggagagggagccgcagagagttccgcttcctcgccgctgccggggtccattctagcggcctgagcgctgcctgggcgcgcagatctgggttgggcctcctgacgccccaaggccacggggtccgtgcgccgcgcaactctgcggggactccaggccgggtcttggcagcggcccgcctgagcgccgggagccgtggtttggagagcgctcagggcgccccggccgccacaaagcgggttaaagtctattttccactcgactgctccgaaaagcccccgcgcgccgacgccgttccggcccccttgggcgaggtggggaggggcggccaggggtggggaggcgaggcggccgcacccagcactcctccgcgtcctgggaaccccggggcctggcacggctga

SEQ ID NO: 407582 - DNA, 1000 bp, Homo Sapiens; identical to SEQ ID NO: 294992

SEQ ID NO: 407583 - DNA, 1000 bp, Homo Sapiens
aaagcaagtctcgctggccagtgacactccaggagcatggcccatggaaggatccaaggctgagggatctggggtagccccacagagatactctgccaaaatccagtcacgagaaggagggaggaggcgaggaacgaaaatgagatttggtttaggccggaagaacgggctgcgccaacaacgagaaaataaagtggcgagctgggaagggcgagagcgcgcagcagcccacagcagccgagttcgcgccgccggtaggtgctgccatgccagggggcgggatcgtggagcgcctcgcagaaccgcacgaaagcaaaaacaaagccatctctccggagcagaaatagaacagacgtggccggggaaagccaaatatttgtggctggactcagacacatcacgctccagtttgggttccaaggtgcttctctctggattttcacctgccttgccaaaaatgattgattacgctgggccaactgggtgtccggcaatacccaacaaatgactttggcccctaacagcaggtcttggccagacagaaatcaatatttcaccattaaaatctatcaaagaagagttaaggcaccatctgtccctgccgcctctctatgcttgtggccttgaacaactgccttaacattgctgaaactcaatatcttcatttgaacaaacagagtggtgatttccaccccacagtggtgttgttcagaatgaacatgaaaataaagcagcgagcatgtagtcggctctcattaaaatcctggatatggagtccgagatatggaaggccaattggctgccaaagaaatgggagagacaacacgtgcggtggcttcaaaggaggagggagagttgagtttaaactaatgaagtaaaggcagggatgggagactgaaaggaaggaagacgctgacacttcttcagtgtgattgtatgccatacactgtgctgggtgctgttaatacaacaacgcttctggctatgtactgtttaaccc

SEQ ID NO: 407584 - DNA, 646 bp, Homo Sapiens
atggacgctgccaattttgaacagcctttccgagagaggatcaaagaggcgcggggactcgggggggggggcggccccctttcctccggaggctcccgggtggcacgtcagtgcctcaggtcccgggggtttctgggttctgcgctgcccatggggtgcgcaggagcctctggagggggcgggttctctccagccagaaagcccggagtcgcccaggaagtttggctcggactgagagcatttccttctgggccggccgggcgcgatccgggaagggcggctgcggtcgcaagccgcgctgctttcagccaggctggcaccatgcggcccctgctttgcgcgctggccgggctggccctgctctgtgccgtgggcgctttggccgatggtagagaagaccgtggatcacctggggacacaggtgaaaggcctgctgggcctgctagaggacctggcctggaacctgcccgggggacccttcagccccgtccccgacctcctcggaaaagatggcttctgagccccggagctggagcccagcagctggaggtggtgcacctgccaggcagcaccctctgatagccagcgctgtcctctcgccttccttcctcagcttcgtgtgaaataaaagctactgtttttggtc

SEQ ID NO: 407585 - DNA, 1000 bp, Homo Sapiens
ggcctttgccgctttccatcttctcactgcagtttcttcacgtgggccacttgtacttaaaatgtcttcttaatttattctttttacttccccagctccaatttgtctacagatttacaaatttgttttatagttttatgactcaatttgtattttcggtcctatgaagctttttgccttaaatatttttctctgtttataagaatgtgctgtttcctaggccagttttgtacacactcttccatagaatagatccagaagaaacacaacaatactgccttcatcatatcaggagatcttgataccaaatacgagtgttgcctccaagatgcaagatcctgagggctccaaagaatccactgtccgtcacaaatcgacggtccgccagctcagtttcagagacgtggtgctccgctgcaggcctcatcctcaggtgcaccctggcagtcagccatctgaaggtactatggaaattcagttactcactcttgggagcagaaggattccagaccattcctgtgtgcaccctggcagggagccatctgaagatttcagggaccacctggaggggagcggaccagagagacttcctcggaataggctgtggctcttcacaaggtgtcttctatgctttatttgggagccattgccttgagcgttatttcccagatggttttctaatgtcaccaactgaagaaaagacccatgcacacaggacacagcatgatctgatgctcacagcgttttccttcctctctgaaaacggactcagcgattctggcaagcggtacttactctgagatcacccgtttgctaaggaaaaatcttagtactgagaaaggtgacactttcctccctgcttttgctggagagacactttggttatgagttatttctagcataacacagtttatttcagaagtccagctcaatagcagaccaaggcatgaacaacacatgaaaatttatgttgggaaaatatatattgtatgtctgcttg

SEQ ID NO: 407586 - DNA, 1000 bp, Homo Sapiens; identical to SEQ ID NO: 224969

SEQ ID NO: 407587 - DNA, 666 bp, Homo Sapiens; identical to SEQ ID NO: 294994

SEQ ID NO: 407588 - DNA, 825 bp, Homo Sapiens
atggacaccgacattccaaccttctttccttcttcggcgctcctgaagcccccaccctcggctgctgcccgagcttcctccacgcgccgtgcagtctccacggcgacgctgcgttcccgactcggagcccccagctccgcgcgagcagctagccgggctggctctcggtgtgtgcccttcggatggtctgctgaagagggccgccagctggtaagacactccgaggcaacgaccggtctccctctccctagcccggtgtgcagtctgacccagcccccacagcagaccacccccagaccgggcgcccgagtctgcggaccgctctaccgcacctggttctggctctgggccccgggccccgtggctgccaggggccgccgggaagggaggatgcgcgccactggggtgcgcctggcttgcggcaccctcctcccgcagtggtcggaagaggtgaggaagcgccgttcgtgtctacacgggtgtggagataactgggcgattctgacaggcttgtctacactaccattctttgaccggccggtgcacacgcaccaactccttccccgcaaataacgaagatggcccagcccatcccagggcttcccgacccccttccctcagtccttgcccttgcccggaattcttttacttatttttggaaaattagttaagacatcactactagctagatataacttgctagccatacaaatttcgatggaatttggacaaatcatttatattcccgggccttattctcatcttatgagatgatgaaattgacttgaaacttccaaaatgttgatattgttcttttgactactc

SEQ ID NO: 407589 - DNA, 1000 bp, Homo Sapiens; identical to SEQ ID NO: 294995

SEQ ID NO: 407590 - DNA, 1000 bp, Homo Sapiens
gtggagccgttccagtgcgtgggccacgcgtccgcccttttccgcgtcacatgaccacgaacactcttccgctacggctcccagaaggggccagcccgcgcctttcgcgcttctgccctggccctctgcgggccgctccgccggtgctgtccctgggcgcctccgtgctctcagccaaccacctctgagagcgcccactcgagcgccccgggagccagagggcgggggtcctcgccgggaccctcctgtgggcccaggggtgagtgttgacgtcttcccgacccgcgacctgccgcccgagctggctgccaggcctatcgccgccgccgagaccctccggccaacagggacccgcggtggccccggcccccccggtagtgtctccctgacccgagtcccgtccccgggcctcttgccttcaaccctggtctttcctcctccccgggaccttgagtccccgaggagagcgagggagaggagcgtcttctgcaggtgtttttgggcgaacctcttcaccttgtgtggttcggcgtctccttttgtgtattaacccggacttttccgactggaaaataggggtttgggaagcagcgggagtcccgtgagcgtgaacgccgggctttgcaggtcttcactcatccttccctgccaaggccctgacaccttacaggctgaccttaaacctgccttgtttaaaaggaggtttttgtgttgttttgtggcaagtacattttggaaaagaagggccttgttggaagcccaggttgtggcatcgcgggtggctgcgggccaccctgtccgtctgtgagcatccctgctcgcagatgtggctgcaggcagttgctctcgggtttccttccaggagctgggaagccggaggaaagctgcggttcctgttccgccgagcttctgaccttcctctgcaggacgtgtgctactattactatcgtaaaagaacacccctgtctacctcccacaaagttagaagcaaagggcattc

SEQ ID NO: 407591 - DNA, 715 bp, Homo Sapiens
caaggcaaagggtgtgcctccctcaatgggctccccagcctctattttcgaaccagaggagtgagaacaaaccgagttggcatgacggacgcacccctgccccgcacacagttcagttctaaagaccactggcccatctggactgtcctggacattctgtctgcagcctgtctattcagcaggtgcaagaaactgctaccaatccaccccagcctcttcttgaatgttgactgctagatcaaccctgtggacagccaattcccagatggaccatccccatagaagtggttcccaaacctggctgcccactggaatcatgaggaggatgtggagagcttttagaaaatgcccatgcttgttctgcccacagagatggttcctggagagcccacacctctctcttctcctgtcctcaaggaaaggcccaaccaccctgatgtgtgaccttggccaagacctcctctcactcccagcttcagtcttcttatccagaaaacaggaaatctggactcttcaatgtcacagtccctttcggctttcatattcaggagttttcaggctttgttaaaagcaaaatgcccaggcccatcccctgtagattcaggatgtggtgcaggctcaggccaggtttgggacttctgcaggtttcaacatcatccctgaggagttgtctgatgcctattaaagtgcaccctctatgacagtgtgtaccgaa

SEQ ID NO: 407592 - DNA, 1000 bp, Homo Sapiens
taagcgcattcagtttgagcagaagcacggaactctgcggactggcaagttggtcctaccctgcccaggtttctgtggcacctctgtgattccaaatcagcgatcaggtgggcagcggtctgggcagtcacccacagggagtacacttggtgctgcacgttcggactttcagtcttgctcaaagcaaagaatctccaagagcgctgaggctacggattcattcgggtggggcgaggtgttattattgtgggattgtctctgcagagttggcctggagagtgagcggtggagggagtggaacaaggcttcgtcaagagtccccaggagtccaggggcgcccccgagacggtggcgcagaggcggcgacactggcaggcgtccggctgccgccacctcccgggtgtggcgggtctggggcccggggtctccggccagagcagctgtggagccacgtgcaacacgcgcgttgccctcagcccgggcggggaccggacgcatccggagctgcggggaggagccgggcgccgcccccggcggcagtgccagccgcgtgggagggcacggaccggcggaggggcagacgacggaggcggccaagctggaggaacgggaccgagggatcgaccgaggctggctggctaggggtgggactggcagagctacggacaggtgggagcagtcagacagcctgagagagggagaccagaacgcaaagagagcgagagcattaagtaggcagggagaggcacacagaaagatagacagcaacactcgcgtgctccctccctccacacgccctcctcttaccgagcgaagcggccaggggcacagagtgggagaggactgtgggcacagaagaccggaagagggacgctgcattgctggtgggacggagggattcggacggacggacagaccagcgcacagactggcagcctgcgagagtggcagctttgagagcagagcgcagcaaagcgagaatcccgcgccgagctgctag

SEQ ID NO: 407593 - DNA, 774 bp, Homo Sapiens; identical to SEQ ID NO: 224970

SEQ ID NO: 407594 - DNA, 559 bp, Homo Sapiens
atgagcctgcaggcctctcacttcagccctccagtggcagaggctccctgttctgaagctggctgtcagcactcccccaactgccgtctcaagcagagaaagcaagggagggaagcttccaggaccaagccctggtgggcaggtagcagcccacctccagtgagacggagaagttggccggggccagcaatgaaggaccagcctgtctcctccccgagaactgaaaggcaaaaggcacccaaggctgggaagagagcagcagcctcaccaaaaactgctgctgcacaggctgtttgccgcacaggcttggtgctgagctgtgaaaagcatgttctgggatcttgtcacttcgcggaggtggcctgtgcagcatgaggcaaagacctggcctgtttagtcaggaagaactgggttggagcctggtgtcctctttaacagctatgtaaccttgggcaaaatacccattcaaatttcagtgttctcctctataaaacagaaatacgtgcgtgtatcagaattattaaaataattaaattttctaatttttaagtgcccagtt

SEQ ID NO: 407595 - DNA, 319 bp, Homo Sapiens
atgcacaatactgcaccaggattacaaagcttaacaagtcatgatttagattcagaagttacaaagagtggaaaaggtcatattctttcttatgaggagacaagaactcaggttgctgcagatccatatggaggatatgcctctggttacatattttggtgccatgtgagtcggatacgttctgttgctaacaatacagtacgtaaccttttgagaatggcttccttcactcaacgtgatgcttttgagattcatccaagttgttatgggcatcagttgccagctctttttaatggaaagtaaatctacttgcaaagcc

SEQ ID NO: 407596 - DNA, 410 bp, Homo Sapiens
aattggtatctgattggcatagggaatgaagctgacctgcacacagttcactttcatggccatagctttgaatacaagggctgatggagcagaacctctgaagcagacaaaggagagtcagcatgaacagtttctcagaatcttctctcaatatcaggactacatttgtcaacaaaaccaaaaactgattagccaccgatataatttttacctacaacatcctattaatgtcaataatatcattattgatacaattctaataatcactacccttattcctatcagtgttcatgtacattcttagtaaaagagactttggtgcgctgtccatgaaataaatcccccattgctaacattctttctttggaaaagtagattttgcatttcaaagaatataaagtcaaattgga

SEQ ID NO: 407597 - DNA, 1000 bp, Homo Sapiens
ctgctggccctggggaggcgaacaccatgccaggtggggagcctgtttaattgtctcagacaccttcatgtcatcagtgagaacatcagtgctgatgatgctgccagaaagaatggcaagaagaatgtacctagctacatttccttctataaccaaaaaggagaagcctcatgcccatcagctctcattaatgtcttatcaatgcatccagaagggtccccagcccacattgtgtggagtcaggattcaatacacagttggattatccactacgtgaaagaggatccacctaaaggatctctacagggccaacgattccaaggaatcctgtacttccttgggagcactgaaccaccagatggtgcagcgcatcgtaggagcatttatttccgctgtgctgtgcaagctgatagagcagaggaaggcacaggcaatgctgatttaaatctatccaaccgtggagaggtgctcggtgttctgacggaggctaactctgcagcagcagcacagaggatgcaagcacagatcctgaatcatgaaggcaaccatacatctgctgatgaaaatgaagatggaacaggactatctcagcccaaaggacaaggacatttgccatcaagtggcctttgttctattcccaacccctctatcatctcttcaaaattgggtggctttcctatctccctagcaatggccacgatgcctgaagccacaggaagatgggcaggtatgcagagctcccggaacactgcactcagctcactggccttcaagcctctggatggagccttaacttgtatcttatatagatacttaatcgctgtcctttcaagcaacgaagatagataatatgtaatccttgccagggcccccagccctcagtgattctgctgcctacactgtggtatagaccagaagttagagcaactatctgcattttacttgacaaggaaatgtttttaatgaaaaactttaataaaaatgtattcttggcttctgc

SEQ ID NO: 407598 - DNA, 1000 bp, Homo Sapiens; identical to SEQ ID NO: 119259

SEQ ID NO: 407599 - DNA, 1000 bp, Homo Sapiens; identical to SEQ ID NO: 294999

SEQ ID NO: 407600 - DNA, 845 bp, Homo Sapiens; identical to SEQ ID NO: 224971

SEQ ID NO: 407601 - DNA, 822 bp, Homo Sapiens
atgacaccagggctagatcacagcttcgtcctgtggccaaaagaaatgcaagccgtcatagggtcttattctagattcctaaagaagaaagatgcccttagtctcctaaagctcctgacctttaacctttatacaataaaatggctacagcaaactgcagatgatggacctgcctatgaagactgctcagaattccaaaatgaggtacttctgaagccggatgccagtttcttcagcaacgtgcctgaaatggaaagcctcaagtcctctctttgcttgttttgcctgatccagatggcctccttcatctgtctggatccttcattcttctttcctcagggatattttagaatcagcttccacaaagatgaacatttctttaccgtgagacttgtactaacctacagggaccttgtgcaaatcacctttggcaaaggtgttctcattcattactgtggctcaacttcctaatcaaccgagacaagaattctgtcacatttagagaaggctgaaggctttctctgttaacttcccagatgtttccaggatcaggaaaaaaaaaaggaaaagaaactaagaattctaaattgttttaacctgaaggccaaaatactgatactttagcctcttttggctcattactggaagatgtttccaagcatattcttaagaatgacataaaatattttcaatttgcttcattttcatggtcagaattattgtgtaagttttggggtctaagaattagaactgatgtcacatgcagagtttgtcaagtgcttgttaaattaaaaagaaaataataaaataatattctgtaca

SEQ ID NO: 407602 - DNA, 1000 bp, Homo Sapiens; identical to SEQ ID NO: 119261

SEQ ID NO: 407603 - DNA, 490 bp, Homo Sapiens
cttatgagagactaagccagaaccacccagctaagtggctcccacattcatgactcacgaaaactgtgtcttggttttgagctataaattcttgctgctatcttggacttttcctgagaatctgaatccttcagcacatcctatcacattccaccaattcttgaccttctgttatcctcaccagccccccgggctttgttcaaagtcctgcagggaggctgcagagacaatggaatgcacaggctgtggtagctcagctgcggggactgtccaggcgcctaactggttgtgtgaggctttcagagaacgctgctcctgtgctgggcttcagagagagggcttgctgcagcacagtggggtggcctcctgctggtggcccaggccacagggatatggaaacatgtgtctagtctagagctgcgggcttgggtgaccttgaggcaagggaggcacctgggggctaaaatataaggaggcactcattctcctc

SEQ ID NO: 407604 - DNA, 680 bp, Homo Sapiens
acaccttttgccacccccgccagtggacatggaaggagtgccgcacacacccgccctgaatgcagaagcagcagagtcagccttctaatagcacccgaagggctcctcatgctggtgcaaccccgctgccactgctcctgagcctatgttcccttctctccaccatgcaccttctgacatcatgactcactggagaaccaggccaggatcccaaccaccccgtgtctcagtgggcctgggcgggagccctgtgctgccaggaggagcagagataacattgattgtccagaagctctacgatggagacaggttgtcattggaagtccaacaagagacagaggcaagtgagctttatggagcacctactgtgtgccaggccccatgcaacgggcttctgtggaggcctgcccctgccatcttcacaaccctcaggtgagccagctttagctttacattttatagatgaaaaaagctgagagttgatgagactaagatactatttgtgagaccaaaagaaagaggaaaatctcatttaatctccaggatttgttaaattaggcaaagacaagaaggaacttttatgtgaggacagactgaagtcctggcattttccagctcagaaagtctgagaaaggatatgctcaagaactatcacatgaaggaagagctcctgcttgacc

SEQ ID NO: 407605 - DNA, 907 bp, Homo Sapiens
atggccaagttaatagttgacacaatgctcagcctaatgtttccagtaactggcatttggttatggggtggctgtttttctacgtggaccaagcagggtcccagttcaagtttctgctgcctatctgataatcttgaggtatttatgaaggactcctttgaaagttctctactgagtttccttaaggaattggaatatgagaccaatttgttgaattggacagctggaagcaaggaagggaaaaagtatttcaccgaaaaggcagaagactggcatcaattgcaagctgtggaatcaagacaactttggctgagtcccattttatataggactaaaggagagtgcagtcctcaaaggcaataatatttatgagaacaaagaagactgtggagaaattttaggcagtagaagagagcagaaaggccaagaggatcagggttgaagtaagctatatagcaaatcaggcattgcccagttacctgggaattacattcaggcaaagcagaaatacctgaagctagttgcttatacaaccaaatattgagaagtaaagatattttcatctagaacaatcctaaaaatcactcttgtttctaaaaggccaaaggtagtgggcaggtatacaaagaaagggatatttatgagagagggcctgacatttaatctatttatgtaagtgacatcaatacatattgtcaagcctggatatgacataattaatcattaatacaacctaattgcagaagttctttttaaaaatagagttatgtctcagaataaagaaagatccctagctccaacacttattgcctctattttcttgggcaaattacttcaactcactaagcctcagtatgctacagtaaaatatagataataatagtacctacttcataggatgtttggg

SEQ ID NO: 407606 - DNA, 567 bp, Homo Sapiens; identical to SEQ ID NO: 119263

SEQ ID NO: 407607 - DNA, 1000 bp, Homo Sapiens
cttcccccggtttggaccgtcgcagcggcgctggatgaatgaattgcctgggcttccggggagcgtgaaagacacccgggacctcagggaacccgcgcctgcgccctcggggtcggtccagtccgcctgggttggagcccggctcctggtggggctgcggcgagtcggaaaaggtgggatgctgctgcctggcggtgctgcagtggcggatcttcagggggaggtcctgggcttcggctggggcgcaggggcggacagggtggagggagggggcggttgggaagcacggagacaaaacggggaaagagggagggagcgggaagccaaaagcctacggtacccgctattcccaggcggaatccatccaagtactaaccaggccggaccctgcttagcttcacgagctcagaggagctggggcgcgctcagggtggtgtggcctagacaccggcagcggcgcctgcccgccccgacagcccggcccagccacgtccgcccggctccaggcgtcaccgccaccccggggcagcggggctcggatccgggacccccagagccgctcgtccgtgcccccgggcagctgtctccctctacgcccgagcaccgccggcctcccagagcgtcccgccgtcgccggcggccaggcctcgcgcaggaccaatgtggcgccgccctgctgttgctggggggcgtcctaggcctccgtgccctgcccaggcttccggctctcggggcggcctcccttccgcccacgctccagggcgtccccggctcccgagctccgagctccaccacatcggccggctcaggacggggtttccaccgtaaagtctgctgccagaggtgttggagctcactgatttgtccccggtgccttatttagttcacttggtgaggtcatgttttcctggatggtgttgatgctagtagatgttattcagtgtctggacattaaattcttgggcatgcagcaccatatgagaggtttaaaaaataaaat

SEQ ID NO: 407608 - DNA, 1000 bp, Homo Sapiens
tacaagtgcagctggcacggcgatggtgcctctgcccccgagcaaccgggaggtttataaaatatttacgtgtgtgcacacgcatgtaattcacttccttcgacactggggacggcgtcgtagcggcactccaggccaggccactgcggtccattcctctgccctgcgtttgtgggaaatacgggcccagtgccgcagctttagggcctgggtcgcccttggtccgcccgccgcgttcccgggtggtgtccccacgctgctgaggacctggttccgcgatgcttgccgcggggggcactccccgcagcctgcgaccgtcctgcgtccttcgcttctgggcgtttccttctggggtttccttggagcggctcgagtcgactcctcccgcctgcccaactcagctccgctcgccactgggtccctgcagccctgcaccctcggggcgctcattgtagactattcttggtccccaggggccaccggtccctgcctggcgtggcaggaaagcgcagactggacacaggggtcggagcctagggaaccatcgagtcgcagcggccggacccaccgggggtctcaacagctgaggactgtctgactattgcctcaatgtcgccgacttgggtggcctcccagctgctgctgagggacggtgcgaagtcctagtgcgtttttaagcagactcctaagtctgcgcgcgagtcggggcgcggcgccaggtcaggccgcctccgtcgccaccgagccgcggcccagcgcagagccccgccatctggagctgacagtggccattgtgaaggcaggaggccagggccgcgccacccgttgcatcccgcggcaggtctgtgtcgcctggttctcggcgccaaaggctggtcccacagacggcttccgggagtgatgcgtccccacgagcatcctcctcttccttagcgacccccggactgcagagcttcaagaccagcgaactgtttcccaagaaataaaattgtaaattagg

SEQ ID NO: 407609 - DNA, 900 bp, Homo Sapiens
atgcgggttcccgtgggcccctactgggtagtaaccgatcgtctgccaatgaccggcctcgccgcccttggggaagcggggagcggccgagctctgcgggctctttcaattgtgcaaactttgagcgagggcaaatcccgcggagaagtcgccagctcgggggaagcaggcgcagtcggcgccgcgggttctcggagggaggggtgggggagacgcggggggaggggctttctcttcacccagaaagccccctggcagccggagggaaacatcccccgcgcccccgcgaagggggaagacggtgtggcctggacgcccgatgggctccgtttcgccgcggccctggccgtgcggctcccgggagaagatgccaagtgcacgggcctcctcgcctccctgagcctgggaaggcgctggcaggccacttctgcgcctcgtggctggagagctccggacggtgccgtggggaaccgggtaccagtcccggctcccggggccactttgcgaaccacctcctacgcagagacggggccgggagttcaccccgctgcggctctccagcacaccggactccgcgggaatttcagcagcgcactctggcgtcttctcggctttaggccgggttggggctacgggatgaaggcggccatcgggccagagtcggcatgctgttctgctggtggtttgagccacccgtatcctggacaccggccaggcggtcccttcaccccctgcctcgcttccctctcttcacggagcctcgaggcccagggacttcagcagcatcaggaggggctccggttttccgggcctgaggacagacactgagacatcgcctataattagcaacaataatgcccgtgatggtagtaattactaataaccagctccgacatcggg

SEQ ID NO: 407610 - DNA, 1000 bp, Homo Sapiens; identical to SEQ ID NO: 295003

SEQ ID NO: 407611 - DNA, 774 bp, Homo Sapiens
ctgttagatcatggcagctctctttagagccatgtggttatggtgggaagaaggaacatctcccagaagaaggttgactattaccctcagcagacaaaagagtcaatgtccgccacatccctgctccagcgatctgggtgcgtttctcttctacaactctctttttggggatgtcgccaataatctatatttcaacaagatggataaagctgtgaaaaggatcggattctgcccaggacttcaagtatgtgacctcagcagaactgaccaatacattactggagcagaataatcagtcttgaaataaacccatggataaaggatggattgtccaataaatgacattacgacaattaggtaagcatttggaaaaacaaatgaagttttgttacaccatatatgttatggattgaattgtgtcctcccaaaagatacattgaagttctaacccctggtatcagtgcatgtggcctttttggaaatagggtctctgcagttgtaatcaagatgaggtcattaggagggccctaatccaatatgactgacatctttataagaagaggaaaagagacacaaacacacaaagaggatgccgtgtgaagacagaggggccgaggctcaagtgattcttctataagccaaagattgctggtgacatcaaagcgaagagaaagccgtggaacagatagatgctcccctagagcccttcaagaaagcacagccctgctgcctccttgcaaacagaaccatgaaagaataaatttctgctgtttt

SEQ ID NO: 407612 - DNA, 789 bp, Homo Sapiens
cgggcggtcggagaaggtctgccgggagtacacctgccctctgcctgaagcgtccccaagtgtcccgggcccgcgtcgttgccggatgcacaatgctgacacccttcccgggggcttccagtgtattctgcctcctcttgtgttcccgttgccacccttagctccctgactcttccagccaccttcccctcctccctcttccctgaggtgcctcctcgggcgattccagagcgcccatcttcccagtccgggcaaaacccggagaggtggaatccctcgcccggagcgccccggcggccactgggcatgctccgttgtcaggcaagttcggggctgcaggcagcttgcgcgccgcgcggattccagctgcggtcgcgcgtactcctcctcccaagtagggagcgggcgcatgatggcggccgcggcggcagcggctgcggggagctccagcagcggcggcggcggcggcggcagcggcagcagcagcagcagcagcgacacgtccagcaccggcgaggaggagaggatgcggcgcctcttccagacgtgcgacggcgacggggacggatacatcagcaggttatgcaccagaaaggagaagaatggagaggcaaagactgattgaccccactcatggtgcctgcccatcctgtggatcctccatcttttgaaaaagagctctgaatcttgtcatacttaaaaacttttggaatctaaaagtaggcacatgacagaaaaatcctattgtgagatttaatgtgcgttatgtgttttttatttatagcgatg

SEQ ID NO: 407613 - DNA, 621 bp, Homo Sapiens; identical to SEQ ID NO: 295006

SEQ ID NO: 407614 - DNA, 1000 bp, Homo Sapiens
gctggccccaggagccacggtcaaggcagaaggcgctttgccgctggagctggccactgcgcgcggtatgagggacggcgcggccacaaagcccgacctgcccacctacctgctgctcttcttcctgctgctgctctcggtggcgctcgtcgtcctcttcatcggttgccagctgcgccattcggccttcgccgcgctgccccacgaccgctcgctgcgcgacgcccgcgcgccctggaagacgcggccggtgtagcttgggactgagccacggccgccgggcgccccgtcccgacctagccaagagcagccagcttgagcctggtagggagggcacgacaccggggatcgctggcccctgggaacacggtgccctgacccaaagacccttcctgaactagagtggcaacccgagaggaaagggagaccgaggcgtcgggagcctgtgtagggtctcgatcccagtacctgtaggtaccgtgattctgatcccctggccaaatctttcttcctctggacagagggtccagtcgggaaaccttcccgaaagacggcggtcgggtcgggaaaccttcctgaaagacggcgcgccagcccgtcttgcttgctcgccgcctgctgacttccttactttgcacacggaaggggcaggaaccgcaagcgtgcaactagcctggagctacccgtctggactcgcaggccctgtggctgtttcccacagctgctacggcctctcttgctccttgacaccgaggaggaccccactaggatccgagcgtcgtgaactcacctgaactttggaaggttggcactggggggccgcatccccctgggaaatgactgaacgcggggtttcagtgggtcccgcctgggtctaaggacccagtttcttctgtgagcacgggcagtgggaggccggtggaaaggcgcaggggcccacctacgcgtctcacatcttcaggggcgcatttctacaataaaaactcacccaattagacct

SEQ ID NO: 407615 - DNA, 1000 bp, Homo Sapiens
catcaaggattttctaccggtggtgccgcacccctacgagcctcctgaaccgtccttcgacacggtcgcccgggacgcctcacagcccaacggggtcctgcggcggagggcagagaacagcacggcgaagcccttcaagcgcacagagatccgcctgcctggggccctggccttgggtcgccggcccgaggtaacctcgcgagtgcgagcgcgcggccctggaggagagaacagggatgtagaggcccagcgcctggtccccgacggcgacggtcggaccagccctctaggcggcgcccgcagctcatcccagcgctcccccgtagggccagcaggggtccgatcgccccgccccggctcccctcagatgcaagccagcccgagccctgggatagcacccaaaccgaagacaccacctacggcccccgagcccgcggctgccgtccaggcgccactcccgcgggagcccctggcgttggcgggcaggacggccccagcccagccccgcgctgcctcggcgcctcccacggaccggtccccgcaaagcccctcccagggagcgcgcaggcagcccggggccgcgcccctggggaaggtcttggtggaccccgagagcggccgctactactttgtggaggcgccgcggcagcctcggctgcgggtgctcttcgaccctgagagtgggcagtacgtggaggtgttgctgccgccctcgtctcccgggccgccccaccgcgtctacacccctctggccctggggctcggcctctacccgcccgcctatgggcctatacccagcctctctctgccaccgtccccgggcccgcaggccctcggcagcccccagctaccctgggtctctgaggcagggcccctggacgggacctactacctgccggtgagcgggacccccaaccccgcacctcctctgctcctctgtgcgccgccctccagctcaggtcccacccagcccggcaagggttcattgttcccgctgtga

SEQ ID NO: 407616 - DNA, 454 bp, Homo Sapiens
gcagaaccgctctgagaccagggggagcttttccagtagaatgaaaggattgcttctgctttaacctctgatgctttatcaaggccgagctgagggctgcactatcgggagcttgatgaggaaactgaggcacagagagatgaaggaacttgcccaaggtcacacagctgaggaacccaggcactcagattctggggcctgctctcataaccacaatgctacatccctgcctctaacatcgggacaaccaggccttcctcacaggcattatcgggactataagataagatgcataaggttttatctccagagagaaggcagctatggtccaaggtcaaacacagaggctacaactagaaacctctagaccaagtttggtccatgtggtgttctctatagagtttctttctttttaatttggattttcaatactttaaaattaagagcacacaca

SEQ ID NO: 407617 - DNA, 639 bp, Homo Sapiens; identical to SEQ ID NO: 295010

SEQ ID NO: 407618 - DNA, 424 bp, Homo Sapiens; identical to SEQ ID NO: 295011

SEQ ID NO: 407619 - DNA, 845 bp, Homo Sapiens; identical to SEQ ID NO: 295012

SEQ ID NO: 407620 - DNA, 1000 bp, Homo Sapiens
cgagaaattctgggcaaagaaaggcattaccccagtccgcacgctgaaagtcgcctttcttttccttttttccccgctgtgcctgaatctcccgggacacttagacggctggagcctcccgactccaaggcgggcgacggcaaagttaaacgccagcgcgctgcggtccccgggcaccgaggcgtccccgctcccgccacccacacagggcgccaagtgccccgacccgcgagtgacgaggacgcacaggctagtgacacgacccgtagccagcactgagcgggacgacggggcccgagcgcaggagggtgcgcggggagctgaggagcgccgggggcccgggcgcggcgcgtacctgaggccgccgccgaggaggcgacggggagcagcgcggccaagagcagcagcgccgcccaggacagccggcgcggcgcgcgcagggtcgccccggcctcgggggccatcgagagcccggggtgggccggggctgggtgcttgcggctggcaggggggcgctggccggagtctggggagtgccgaggcgccgccgtcgggtccccgccgccgtccgtctgttctgcgcgctctgcgcggtgcccgccgcgcccctgccccgcggcgatcgctcccggccgcacaccggcagccgcgctccgccactgaggccgccgacctcccgccgagccttttagctgcgctcgggcgccccctgccgggcgcgcacgatgcgggtcgaaaaggaacccagttttcagtgtgccttgttgcccaggccaaggactcagcggacctcgcctctcccttttctgtaattgtaacactgccccaggtctccctattcctccttctccctattcctccttccagcctggaagcctcgcggccctccagatggactcggagcgcccctggaggctacagtgacctaagctctaggaaggccgggtcctggacgccgcgtgctgctgtccgccgccgaccggtgtcctcgcagagataa

SEQ ID NO: 407621 - DNA, 1000 bp, Homo Sapiens
ccctcgaccccaagcgcctggtagaacaccagcagtgtgcgaggtccctgaaagacacttgatcattgaaggaatgaatggagatccagggtcactgtcattcggggacgtggctgtgggcttcacccggaaagagtggcagcagctggacctggagcagaggaccctgtaccaggatgtgatgctggagaactacagccacctgctctctgtgggtgaggaagacttccccgtggtcctcgggctgaactgtctgcttgcttggaaggcccagctggctcagcacaaatcctttaaccgtttctccccaagagggtgtcaagtcagcaaaccagctgtgatctccagtttggagcaggggaaggagccatggatggaggaggaagagataaggacgtggagcttcccaggagcgaatccacgcggaggtcaccagtgtggaagtgctttaagctgtgacgagggagttcctgcagctcagggagccagtagtgagaaaccccacgaatgcacgaagtgtgggaaagccttgtgctgcagatcggacctcagggtacatcacggggtccacgcgggggagaagtcctctgcgtgcagtgaacgggggagtggtttcagggagaagctttgccctgacaaacagggaactcacacaaaggagaaacccgctagagacagcagaagtggtaaaacgatcttccggaagacacgcctgtgtgtcccgggcacagttcacgccggagcgaagccttacaagtgttgggagtgtgagaaaacctcccacaagtcgcgcctcatcgagcaccttcgctcccacacgggggagaagccctgcggctgcagggaatgcggaaaggcctttttccagaagtcacacctcatcctgcgcggactcgcggggaagaaaccgtacgagtgctccgactgcgggaagacctcccggaaggcgaacctcatccgccaccacgggatccacacgagggagaagctgcatgggtga

SEQ ID NO: 407622 - DNA, 645 bp, Homo Sapiens
atgcccacccagttaaacaacgagcaggtcaagtgtcaggatagtcaaggacctctagacaatggaggacataggaagctgcgctttgtgcctgcaacaagaacagaagaaccaattttgcagaaagttgccattctgcagaaaattgatgtgaacttagcagacaaaggtaaagaaaatagaagtaaaggctgtctaaggtcattatattttgaggataaaacaaagtccaagaacacaaataattcagctctagccacttacccagaaggagaaaatgaaaggctctctgccaaggttatcacttgtccttgtaaaagccgaaaccctttccttgggatgcagcagccttatcacatgacctcggctggcctagcagagcagacctgcccaaaactgtgtaaatactgctggactggatggaacacaggatgtattagaatatttttcctgtatttaaatgtacacaagaaaggaagacatgctcatggattgacacatcttgagaaagacttgggagaaaaagacaaaacaaatgtgtcaaaaagagagaatgtaatacacaaccttgcttcatttgaaactgatttttgttgtttgtttttgtttcgttttgttttttacttaccaccaggaaatagctaa

SEQ ID NO: 407623 - DNA, 801 bp, Homo Sapiens; identical to SEQ ID NO: 295013

SEQ ID NO: 407624 - DNA, 912 bp, Homo Sapiens; identical to SEQ ID NO: 295014

SEQ ID NO: 407625 - DNA, 1000 bp, Homo Sapiens
atactgacttagaaaatgttgcagaggccaggtgcggtggcttatgcctgtaatcccagcacttcgggaggccaaggcaggcggatcatgaggtcaggagtttgagaccagtctgactaacatggtgaaacccctctctactaaaactacaaaaattagccgggcgtggtgacacgcacctataatcccagctactcgggaggctgaggcaggagaatcgcttgaacctgggagttggaggttgcagcgagccaagatggcgacactggactccaacctgagcgacggagagacattttatctcaataaataaataaataaataaataaataaataaataaataaaataaaaaggaagaaaaaagaaaattcacagacactctggtgaacaggtaggccctctcctgccactccaggtaaaagtttcttggccacaaacctgatttggcaatatcccttcatcttaggtgggtaacagaaagccattcatgacctatccaagcatggagaggggatttgacttagaaaactgttacgtggactagttggtgaaagaaagtgcattctaggactcacaggcctacacacagagttgctatcagataaagccgatgtatgaactctttctgagcccatggcaagatgagggtgcacttcatcagtctcttatgctggtatgaataggtacttgcctgaaaaataaaagaataattcaggaagcccattcttctacaggacaccaggcagtacagtaggagtcctggggttgctgtggtatttatgttttaaggttgtcttttaatcatcttcagcaaattcaacagtcttcaggaacataaaaaaatttttcaacattacataaaaatgaccacaaatatatccatgataaagaactgtaccaatataataacattaataacaatcataatggtgatgatatgtcaatttaatgaagagagtaataaaaagcagatatttaagaacatattcctaaaaaaaa

SEQ ID NO: 407626 - DNA, 1000 bp, Homo Sapiens
ctcttcatggaatattcccagtcaaagcccacttaataacgaggtccttctgcaggggaccatcaaggagtacgttcctccaatccttgtcaatatttcaaaaatgatcaacacatgtgacagcgacgagatccgcatccgtcccttccgcaggctctgcgctggcccacgtgagacccgcctccgctccgccggcgctgccgccccctttagccctcagcttcggcccccaggcccctggaacgccccctcccctccccgaggaccggtcccgtcaccctgggcggcgcgctcgcctgtcccctccccaccccggccgccgggcagcgggaacagattccagcgcgcacttacccgcagctccttcaagcgctccgggagcaaagacgcagaggcggggagggctggcgccctttgcaccactggcggggtcgccgagaacccgccccggaggtctcgggggcggcccgaactcgggcctcccgccccaacccggggcggctccttccgaaggctccactccagcggctcgctgcgggagaccaaggccagccgccgtcccaggggacggccctcggggaacctgaatgacgtgcgaggccgtacctcggggcgctggactccgctcgggcgctcccgctctccgctcccgctctcgggtcccaatcccgacgctccgcgcgctcccggactaagtgcggacgcgccccacgccccccggcgccagcccgggacagcgctgcacctgttgccacgtgcgacgcggcgctcagcggctgccactgccgccggcgcacctggctgcaccgcgcgtcccgggaccacgctcgtccccgcaggagcccggggctccgccgcacccagcgctagggcccaggccgggccgcgtcagtcaacgaacattcgagatcctgtcatgtgtcagacactgtgcggagagctggagataaaactgtcaacaagatgaatgcagcctctaaaataaagagtttctaatcca

SEQ ID NO: 407627 - DNA, 952 bp, Homo Sapiens
attattttccagatgaggcctgctcaagagcatttggctgatgggggctgaaacctctcactgcaaccaggttcatttggctccaagtcctgtgtgctctttatgaagtcatagcaaggcctggactagggtgagaaaggacaggtgcctgtgaggcaggacttaaaggaggcgctggccctcaggggcatgcgagggcagggtgagcacctgagagtgagggcctccttaaagtctgtggtccagggtcctttggtcccctaatcccagagcagaaaagaaagccttcaaatccagctgctgcctgaagagcctcagactcactcccctggggcagcaaagtgcatttctttacccacaaggccctgtagtgctgactggaagatggggctgtcagggactcatgggaaagaatggcacattggatacaaactcattcggcttagttttaccctgtggctgcccctgtagtgtcatttgtgacaccaggaatatgttccataccaaccgaatagcttctcttcctattcgtgccagtgcatggaactatataatcattcatctattcattaattcatttatttgtagccttcctctttatataggcttagagagccactactcgaagccaagccttacgtcaggcagcagagataccaagatgaggttgaagaaaacacacggctttctccactcatggactccaatgaggatggcaacaacatgggctgagacttgaccttgtgactccagcctaggattatataaggatgtgactgaccttagaggatttcacgggaacttagctgtacacgtggaacccatttatttgctgacacttctcatttcctttcagaacaaacctacattcccagacctataattttcttgagaaaatgggtttattataagtcactcaataaaacaccctaccatggcttcccagtacaaa

SEQ ID NO: 407628 - DNA, 1000 bp, Homo Sapiens; identical to SEQ ID NO: 295017

SEQ ID NO: 407629 - DNA, 820 bp, Homo Sapiens; identical to SEQ ID NO: 224973

SEQ ID NO: 407630 - DNA, 423 bp, Homo Sapiens
gtcatgaaagggcagctgccacctcaggccatggtggcggagacaaaggctatgggccggtgtagacgtctaagaaaccaacaggaagtcccagccggaaacacagaaaggatatggagaaaattattattctgcccctacagtttcggtgacccagatgggatctctgggacaccctgcctgctctacaattgggatccctggaaaagtgacagaatctggcaacagatgagtaagaaaggtcacttcctggcagacctcaggtatattggggacatcaagaaaagaataattcatcaaagtctacagatattgcaggcaaagttgaaacaagccagacaagttctctttgtattcttgagagacttggaaagtctaacctgagattccttattaaaagttccagcaaaacagacttaaaaa

SEQ ID NO: 407631 - DNA, 1000 bp, Homo Sapiens
tcgccgcactcccccatcagacctaagatcttttaccttttaaattaaagtgaatccagatccttgttaatgcggcctaatgtagcagcgggaagagtgtaggtccctggcgaggggagcgcgctccggtgacctctagcgcctcagacgcccgcgcaggaggaactcccgcagcccgcccgggacccgagggcaggagggtgcggggaacggggctgccactgcgcctaagcctttccccttttataggctttagggaaacaaatcctcttttcctagtggatgtaagaagtgagtgaatttaaagtcacagccacggcggtaagcggccccaattgtctgggattcataatgctgttaatatacacacgtatatgtaacagcactttgcaggtatacatacatatatattatatgtattttttttcatatgacgtttgcatcaatattctgcgtgctgtccctcccccaccccaaccccaatctgtttttaaaaatccacctccgcagaagaggagaggagtgcttcagggaagggtggaggcatccatgtcctcacctttcccagtgaggaatcgagacttcccgccttcgcgatggaactagaaaagggtatgtagtcctggactttaaaagacaattaacagaagtggaaataaggatgtaactatattccgaggaagagcgggcaggaaattcttagctgtcgtagcagaaagtaaatgtctaaaactcataagcctaaaattagccatgcaggtacattaattaattaaccactagacaagcagaattattaatgtaggtaatgcccagtagggggaagaaaaaaggaattgattctgacctgtggcactggggctggggagagatggaaacttctgacaactctgtttatattacaagcccgtctgcaatgttgtttgagttgttgtaagcgtgtgcatcatttacatttttaaaattatttttaaatgaataaaacaataatgttttctat

SEQ ID NO: 407632 - DNA, 647 bp, Homo Sapiens
atgtcggacagagtggaagtggagttaatactgtggggattggtggaagaggtggtggtgctgataggagaggggtctggaatcctccctgaggtagtcggagagcagagtcctggacagcagttccgtgcactagggaaggaaattttagagtcgagtgatgcaggcggagaccctgcggctgagaacgggcgatgcgggtgttgctgtgacccctggaatgcaaaggactgcacccccatcagaaagttagaaagccagtgcagagtagccaggagtcctgttcactcggcaggagcaggggtgccgagtggggggatctctggtcccgcagctcggccgccaccaagagcccgaagtgctgggcgcggtgccaccagaggcccgccacgccccacgccgccctgcaggcgaacgctggaggccccgccgggccgccgtagcgctgcggctcgggccgctcctcccgcgccgccctccgcccccagcctcccggcgccgcggcagctctgggcagggagcgccgccgccgccgccgccgccgccgcttcctcgtctgcagccgttcggccgctgcgtgacgcgtcgtttcctcccaacatggcggccggggcaggtcggcggtgatgggggccagttcgcggccg

SEQ ID NO: 407633 - DNA, 701 bp, Homo Sapiens
acaatgacagcccccaaagagggagacaggagtgtcagctgagagagaagacataagaacgaaagcggaggttggagtgatgtgctttgaagacggaggaagaggccataagccaaggaatgaacctcaccagcaccacaggacccaccaccaccatcacaagccttatcatcacccctgccttctctatccctgcagcagtccggggatagacacagggagaggacagccatcttaccagccgaggaaggaagcctcagagaaaccaacactgccaacactcggatctctggcctccaggattgtgaccgcacccaccacagttatcacaggggcagctataatggcagcagctgcagcagcagtgagccccatgccaatagagagacataggcagtcacacccattgtagaactgatcacttaggccaagttattaattttgtactggaggaaactgaagtccagagaggtcaactgacttattcaagcctatggagctcttaaatagaaaactaagtccaaagatcctattttttggcctcacattttctttctttctactggtccacatgacttcatcccagcccatcagccctggaggctgggctaaggacagccccactatttgagcctgctcttccttcctatcaggagcaaaccatcatgaaaatcagccccattaaactctgattgtctgtg

SEQ ID NO: 407634 - DNA, 845 bp, Homo Sapiens
atgccggcggctgtcccatactccccttttgccactgtcccgctggtctatgtgtgcccacggatcctgccccgctggacgccctgttggctctcggtccagcggctgttctgggatgtgtctccaggtgcccctcgaggagtcccctcctttctgcaaggaatgccagccacaccctctttgccactgtcctgtgggcccattgggtttggaaatgtgggcctcgctgaccagcagcgccccgtggtgtggctgctgctacgcgaccccccgggggatgcggaggccctggggctgctgagcaagctgccacgtggaacaaagacgctgggaccagctcaagacacagacgtctggacagccttactggagacggtggggacttggaggccagggagggcgaggggccggggggacaaggaggggcggaggaggggaagctttggtccagcctggcagcctgaggtccagtcctactctgcctaccccgccgttaggcgagtccagccctgcaggagtgccctaagcactaaagagatttccccagcttgccagctttcaccccggagctcagcagatggctgtgactgcctatggtggggtctccggcagcttgcttcccgcaaagctccttccagggctcagggcttccttcggggtttcctgctacgggagatttggagacagatgtgccacatgaaggagaggatggccctctgcaagccaaggaggcaggcctggaacggacccttccctctggccctcggaagaacccagcctgctgacaccttgatttcagacttctggcctccggagctgtgaggcaataaatgcctgttgtttca

SEQ ID NO: 407635 - DNA, 872 bp, Homo Sapiens; identical to SEQ ID NO: 295019

SEQ ID NO: 407636 - DNA, 637 bp, Homo Sapiens
atgagaagtccggaggaagctaggtcccaccttctcctccagcttcaattgatttccgcattgggtcggcctggtattctgtcggtgttggcgcttcttctcccaagctcttgcagccccctcgggactaggtttccaacggcgcttgcggggggcctcgcggaggtggatgtggaaaaggcgagcgcgggggaactgtgctgtaaccatcgccccgcctccacagaaagccccgaagcgccggctcggggccgaacgcgggcatccggcgttcgtctgttaggcaggcagacattaagcgcctactgtgtgctgggccctactcaagacccaggcggggagaacggcgtctgtccgggagctgcacacgaggacccggtggtccctgacctgccctctccaggggggacctgcactttctgccaccaaagaggattctctgtagggaggccaggatgattctccagaatttaccatgccttgagatgaaatttcctttcaaacttccttgtgtccttttgtcctcattccatgttcaccagtcttctgactgtttcattttccagaaaggagaaactgaataacatgtatattttaaccttgcctgcaattgtaaatcaataaattggtgtattta

SEQ ID NO: 407637 - DNA, 1000 bp, Homo Sapiens; identical to SEQ ID NO: 119265

SEQ ID NO: 407638 - DNA, 1000 bp, Homo Sapiens; identical to SEQ ID NO: 295020

SEQ ID NO: 407639 - DNA, 1000 bp, Homo Sapiens; identical to SEQ ID NO: 295023

SEQ ID NO: 407640 - DNA, 1000 bp, Homo Sapiens
atccctcctgctcgaaagcatccagctgcccattccctctgaagtgacgtctgtatcactcctgctcgaaagcgtccagctgcccattccctctaaagtgacgtctgtatcactcctgctcgaaagtgtccagctgcccattccctctaaagtgacgtctgtatcacttctgctcgaaagtgtccagctgcccattccctctaaagtgacgtctgtatcactcctgctcgaaagcgtccagctgcccattccctctaaagtgacgtctgtatccctcctgctcgaaagtgtccagctgcccattccctctaaagtgacgtctgtatcactcctgctcgaaagtgtccagctgcccattccctctaaagtgacgtctgtatcacttctgctcgaaagtgtccagctgcccattccctctgaagtgacgtctgtatcactcctgctcgaaagtgtccagctgcccattccctctgaagtgacgtctgtatcactcctgctcgaaagtgtccagctgcccattccctctgaaatgacgtctgtatcactcctgctcgaaagtgtccagctgcccattccctctaaagtgacgtctgtatcacttctgctcgaaagtgtccagctgcccattccctctaaagtgacgtctgtatcacttctgctcgaaagtgtccagctgcccattccctctgaagtgacgtctgtatcactcctgctcgaaagtgtccagctgcccattccctctgaagtgacgtctgtatcacttctgctcgaaagtgtccagctgcccgttccctctaaagtgacgtctgtatcacttctgctcgaaagtgtccagctgcccgttccctctgaaatgacatctgtatcacttctgctcgaaagtgtccagctgcccgttccctctgaaatgacgtctgtatcactcctgctcgaaagcatccagctgcccattccctctgaaatgacatctccatcactcctgcttgaaagctctctctga

SEQ ID NO: 407641 - DNA, 1000 bp, Homo Sapiens
gcgcatcccttacctgcctgcggccggcgaggtggagcagtacaagctggtggagagcgcggacacccccaaggccagcaagggcagctacatggaggttcgaaccggggaccctccggaacgcagggactgtgagctgggccggccgggccccgacagccagagttcggtggccgagatctccaccatcgccaaggaggtggacaaggtcaaccagatcatcaacaactgcatcgacgcgctcaagtccgagtccacctccttccagggcgtcaagtcggggcccgtgtccgtcgcggagccgccgctggtgctgctgtccgagccgctggccgccaagcacggcttcctggcgcccgggtacaaggacgccttcggccacagcctgcagcggcaccacagcgtggaggccgccgggccccctcgtgccagcacctcgtccagcggctccgtgcgcagcccccgcgccttccgagccgaggccgtcggggtgcacaaggccgctcttctgagcgaagtacatcgagaagggctcccccgcggccgacgccatcctcactgtgacacccgcggccgccgtgctgcggccgaggccgagaagggtcgccagtacggcgagcaccggcactcgtaccccggctcccacccggccgagccacctgcgccccccgggccaccgccgccgcctccgcacgagggcctggggcgcaaggcgtccatcctggagccactcacccggccgcggccccgcgacctcgcctactcgcagctgtccccgcagtaccacagcctgagctactcctccagccccgagtacacctgccgggcctcccagagcatctgggagcgcttcagactgagccgccggcggcacaaggaggaagaggagttcatggccgcgggccatgccctgcgcaagaaggttcagttcgccaaagacgaggatctgcacgacatcctggactactggaagggcgtgtcggcccagcacaagtcctga

SEQ ID NO: 407642 - DNA, 1000 bp, Homo Sapiens
ccgggagaagttctaccccgacaggccgcgctgggacaggtgccggtactaccatgacaggtacgccctgtacgctgcccgggactggaagcccttccacggcggccgcgagcacgagcgggccgggctgcacgagcggccgcacaaggaccacaaccggggccgtaggggctgcgagccggcccgggagagggagcggcaccgccccagcagcccccgcgcaggcgcgccccacgccctcgccccgcaccccgaccgcttctcccacgacagaactgcacttgtagccggagacaactgtaacctctctgatcggtttcacgaacacgaaaatggaaagtcccggaaacggagacacgacagtgtggagaacagtgacagtcatgttgaaaagaaagcccggaggagcgaacagaaggatcctctagaagagcctaaagcaaagaagcacaaaaaatcaaagaagaaaaagaaatccaaagacaaacaccgagaccgcgactccaggcatcagcaggactcagacctctcagcagcgtgctctgacgctgacctccacagacacaaaaaaaagaagaagaaaaagaagagacattcaagaaaatcagaggactttgttaaagattcagaactgcacttacccagggtcaccagcttggagactgtcgcccagttccggagagcccagggtggctttcctctctctggtggcccgcctctggaaggcgtcggacctttccgtgagaaaacgaaacacttacggatggaaagcagggatgacagaagcgtgggcaccagcctctgcttgagtgacactgcagaggcctccatgtggcagagcgctggctgcccctgccaggtgtcctggattctcttctgccctgtggggctgtgtctccgtcctgtggccacacgctgtgctcttactgcacttgaggcagccccccacttcctctcccgttggtgtccggtgaccgctcaccctcgagaggagctgtga

SEQ ID NO: 407643 - DNA, 1000 bp, Homo Sapiens; identical to SEQ ID NO: 294882

SEQ ID NO: 407644 - DNA, 1000 bp, Homo Sapiens; identical to SEQ ID NO: 119266

SEQ ID NO: 407645 - DNA, 1000 bp, Homo Sapiens
ccaggaagactctgtggaagacgaggagcccccaggctctctgggcctcccaccgccccaggcaggagtccagcctgccgctgctgctgtctcaggaaccacacagcctctggggactgggccgcgagtcagcctctcgcctcactccccactcctcagccccaaggtggcctccatggatgccaaagacctggccttgcagatcttgccgccttgccaagtgcctcctccctctgggccccagagcccagctggccctcaagggctctcagcccccgagcagcaagaggatgaggacagcctggaggaagactcgcctcgggccctgggctcgggccagcattcggatagccacggggagtcatcagccgagctggacgagcaggacatcttggctcctcagaccgtgcagtgtccagcccaggccccagcaggcggcagtgaggagaccatcgccaaagccaagcagagtcgcagtgagaagaaggcccgaaaggcaatgtcaaagctgggcttgcggcagattcagggagtcaccaggatcaccatccagaagtccaagaacatcctctttgtcatcgccaagcctgatgtcttcaagagcccagcctcagacacttatgtggtctttggcgaggccaagattgaggacctgtcccagcaagtgcacaaagccgcagctgagaagtttaaggtgccctcagagccctcagccttggtccctgagtcagcacccaggccccgggtgaggctggagtgcaaggaagaggaagaggaggaggaggaagaggtggacgaggcggggctggaactgcgtgacattgagctggtgatggcgcaggccaatgtgtccagggccaaggccgtgcgggctctgagagacaaccacagtgacatcgtcaacgccatcatggaactgaccatgtagccactgaccggaagctggagccatcctacgccttccctcagctctgctactcaataaatcggtgtcccttca

SEQ ID NO: 407646 - DNA, 1000 bp, Homo Sapiens
taatttttaaatggctaaatatgacatgactgtattatagctatatttctgaggctttttttgtattttattaatatagactctcattgaataatttaccttgcagcagatttgacattgccgcatagaaggggcaggtgttggtttttgtttcttgcatttctctgggatgtgaaacacttggctaacaaacacaactaaggcctctggtaccctctgccctgctcgcctggtgatgtcccagtgtctcagaactgatcacttgctcctcctattgtgtgaaccactcttagcaggcattgctactggattcttaactagagaaaacttacagaacaggtgttaagccttttccaatatttagtattgtagtcttcatagaaatcatttctagttacagaaaaatttaactccagaatatggtgatacagtttatgttaagaaacatattttaatttattatgccatgaatttataaacatttaatataaaacattataacatttgctgttttaaaatttttgctattttttcacaaactgatattcaaaatattaaacatttgttattttgtataaacctttaagtaaaaatatgctgttttaatatttaatttagtagaattaacaaaaactttttaatagtcaaactgaattaccttgttttataaatgttaaattgtttatatttaagtaattagcttaaaaatatagttttatgttttgtacattaattgattaataaaataataattttatgtgagaatgttttcaaaaagccaaataaagtcacagatattttagcttctttcccagaataaacttatcatgcatttgcttacctaaaatttaagtttcaaattagttctctatatgagatacttaatcgagcatatatatttatattcattgatcaaactgatatgctacaggagaatgtatgcaatgtgtaaaaaatgcaaatggctgtatgcattgaataaaaataatatacaattaga

SEQ ID NO: 407647 - DNA, 1000 bp, Homo Sapiens; identical to SEQ ID NO: 224975

SEQ ID NO: 407648 - DNA, 1000 bp, Homo Sapiens; identical to SEQ ID NO: 295028

SEQ ID NO: 407649 - DNA, 1000 bp, Homo Sapiens; identical to SEQ ID NO: 295029

SEQ ID NO: 407650 - DNA, 1000 bp, Homo Sapiens
cgcccactccccaggggtgcaggagcctggccctgactccatgcgggtcacagccgccacatcccagctcccacgaggctcccacgcggctcccaggccatcctgtgccatggaggctgctgggcacctggaccctgtcctgccctgggtggcaccatgctttgctcctcctccctcctcaactgcagcccctgatgtgaacacccacacttctgtgcccgcgctggaccctgaccactcactctgctcagccgggtcctgggcccccctcacctcagcagcccccgggggtccccccaggcctcctcccctggcaaggagccagtcaggggcaccccaggcctcggcagagatgccagccgcgtccttgggccgtgtccgtctgctccaggtgaccggcctggcctccctgtccctgctcgccaccagctgggagggggctgccgagtctcaagacagctcctgggccccttccctacagagaggttcgtccccaccacccaccacctcctctcgggccaaccttgaccgctgcctggtcctcaacgttctcggacagcgtctagagcccagccccttggcgccctcgccctctgagatgcccaacagccctgcagccgcgtgggaccgccaggtgcgcacggggctccgccacacaggaggaggtgcccgcgtctcctgccccacgcacgggttgtgctgggcccagatgtgtgactgcaggtcctacggcccccaggacctgcacagggggcagaggatccaggtgagcaactcggggcgggggcaggggcaggtccggaatgcggcagggccccccagtgcttgggacgtcacaaaggtgacgacgacaggtgccgcgctcccccttgccatcatctcagcagctgccgagcacacccaggggccgggctccctctccaccccctcagcagacgctggcataagcagccgcgggctctatctgcagcatccaccccctcagcagacgctggcataa

SEQ ID NO: 407651 - DNA, 1000 bp, Homo Sapiens; identical to SEQ ID NO: 224977

SEQ ID NO: 407652 - DNA, 1000 bp, Homo Sapiens; identical to SEQ ID NO: 224978

SEQ ID NO: 407653 - DNA, 1000 bp, Homo Sapiens
gttggatggggaggcaaggatcagatcctgagtcccttggagaagcaggaaggcatcatgatgactaatgtcagaggcaggggaggacaggtagggatagacagggaagcagtgctgggaagatgctaaaatgctgcagtttgtgcttggaaagatcatggcctggttcttccattgtcatgatgggttgttctctttcttattgtttttctaatttgtcttgactaatggagaagatcaggagctcaaaaatagaggttgtttacagcactcagtttggctgctataggttaatgggcttagactctttaaggggattaggcttttgctcagagaccagtggagtattctagccaggctgtcttgtgaaggtggtatgttaagaactaggtttgtctgatttctcaaattaaaatgtggtacatcaaattaaatttgaatttcagataaataacaactaatttcagatgtgtcagataaagaatggatatggctctagtacaatatgggataatgaatattttcagataaatagatgccctgtattctgtgtagcaagcataactagagaatcaatgttagtgctcaaactaagaagacttttgagaaattatcagaggtaaatacaaatatacatttccatccatccatccatccatccatccatccatccatccatccatccatccatccctgttgagctccaactatgtgtcaggcacttctggggggttgagggtattgtgatcagtaagacaaactctctgcctttatagtgtttacattctaggagaaaaatattcatcttagagagattataaaaaacaaatcttccgaaatagtatctgttacgtccaaaatagaggaatgtataaataaatgttaatatgatggactaacacgcagccattacaaaaatcctgttttgaaggctattaaatgtcatggtgaattgattccaatataaaaccaaatgaaataaaagcagttcacaaaacca

SEQ ID NO: 407654 - DNA, 1000 bp, Homo Sapiens; identical to SEQ ID NO: 224979

SEQ ID NO: 407655 - DNA, 930 bp, Homo Sapiens
accgcagccgcgtcccctcctccaggggccgggaatggcggcgtccggctccccggggccaactccgagtcccggcccggggaggacgcccgcggagcccgccgccgccggcccctcacggcgggagctgaggaatggaagttacctcagtacggtcccgactgctaggctgtgggcagcggacagagctggcggtcccgggcggccgagcagatccggcgcggcgcggcgcggcggcggcggcggctaccgcagtgccctccgccccattgtttcccttccaagaggatcccggcgaagccgagcccgggaaccaggaagttccccggcgcgacacctcctgccgccgctatggaaacggcccccgcctcccagggcggctcgcccgggaccccgcctccgcgcctccggccccgcccgcctcaccggccgccgccaaccgtcaccgcagcggccgcagccgccgccatattggcgcggccccttcccggcggcacgtgcgctccgctcccgcactcccgccgtgcgcgctcccgcccgcctcggggacgcgcgcccagggctgcaggtgcccggagcccctcggcgggaagcgggcgctggaagcccaggacccaaagcggggcttcggggcacgcaaacgagcgacattggcgtgtccagccggcaggtcagaggatagcagagacgtagggaggtcagctgagtagggggcgagaggatggtctccggagccagcctggcttttttttttttttcatttctgcctcaactacttaccaggtgtcagcccttggacacttttccctgtgcctcagtttcttcatctgtaaagtggaatgataataggacctgcctcatggggctgtcctggaacaagcgagtgcttggtagtaagtgcaaagctcaataaaatgccattgctactga

SEQ ID NO: 407656 - DNA, 1000 bp, Homo Sapiens; identical to SEQ ID NO: 119267

SEQ ID NO: 407657 - DNA, 1000 bp, Homo Sapiens
gcagcctgcacctaatgcaaatatcagtgggcatagtctgcaggcacctaatgactcaggaactttgacagtcactaagagtgtatctccaaggaatagtccaacaacacatggctggcctgacccaagggccagccctgggttgcaccagcaccagggattggtgtgtcactgtgagtctgagatctatgaggcagcagctggggacctgatagcaggagtgcctgtggctgctgctgtagagcctggtgaggtgacttttgtagctggtgagggcctccacatgcaccacatctgtgaacgggagatgcctgaagatatacctttggagcccaacccttctgaccatccaaaggcaagcacaatattcctgagaaaatctcaaacagatggatcctgctgttcatattgtaaaaaactaaaagacatctcaccaatcaaaattatccgaaaagaggttttggaggaatattttaagtatgatcctgaacacaaattgatcttcagatttgttcgtactctgtttaaagccatgaggctaacagctgagtttgcaatcatttacatagaaagacttgtaagttatgctgatatcgacatttgtccaactaactggaagaggattgtcttgggagccattcttcttgcctccaaggtttggagtgatatggctgtgtggaatgaggactactgcaagctctttaagaacattacagttgaagaaatgaatgagttggaaaggcaattcttgaagctaattaattataataacagcattactaacagtgtttatagcagattctacttcgatcttcgcaccttggcacacaacaacggcctgtattcaccagtttatcttcttgacagagaaagagcttggaagctggaggctttttcaaggatggaacaagacaaagttttctacagtgctgccaagaatgggtctctgagtgcagatgatttaattcatcttcagcgtgctaaggccatcctcttctga

SEQ ID NO: 407658 - DNA, 1000 bp, Homo Sapiens; identical to SEQ ID NO: 295034

SEQ ID NO: 407659 - DNA, 1000 bp, Homo Sapiens; identical to SEQ ID NO: 119268

SEQ ID NO: 407660 - DNA, 1000 bp, Homo Sapiens
tagtcgtggcacagcccggttggactcaagttcttctaagtttgcagctggccaaggagcagagagagacgtccctgacccccaacaaggggttggcatggaaacctgcccaccccagatgactgcccgggactctcagggacgaggcagagcacacactggcatggccaggtccgaagactctgttgtgcttttgggatgtcaggattcccctgggctgagggctgcctggccaacctctcctccccaggaccacagacccacctgccctggcgtgggtaccaaggatgccttggatctccctggagggtctcctgtcagggagtcacatgggctggctcaggggtcaagtgaggaggaggaactccccagcctggccttcctcttgggttcccagcacaagcttctgccctggtggctaccccagagccctgtccctgcctcgggccttctcagcccagaaaagtggggaccccagggaactcatcagtccccatctgctgagagaagaggcctcaacctagcaccttctcctgccaacaaggccaagaagcgacctctctttggaagcctgtcccctgctgaaaagacaccctacccagggcctgggctcagggtctctggggagcaatccctgacttgggggctgggtggcccctcacagtctcaaaagagaaagggtgaccccttggtctccaggaaggagaagaagcagcattgtagccagtaggggcttctgagcaggctctctggggccaatccccaaggatggggctctggcatccgatgccccaaagcggtcaaaagcttcttctcccccagtgctgatcttgctgggccttagctttggagggtaggggagggaggggagggagagggtggctgaatggggagggcaggaagggagggtctggggggaaggggctggggagtgggggtgggaagcagtgcgttgggggcctcgtgtgtaagtgtgaataaatgtagttgtcttggaaaa

SEQ ID NO: 407661 - DNA, 1000 bp, Homo Sapiens; identical to SEQ ID NO: 295036

SEQ ID NO: 407662 - DNA, 1000 bp, Homo Sapiens
caggacctgcggaaggggcctcctcttagcacttgggactttgaacatctgctcctcacaggcctgtcctgcgtctaccggctccacgcagctagtgaggctgaggaacggggccgctgggcccaggtcttcgctctcctggcacaggaaacactctgggacctgtgcaaaggtttctgcccccaggaccggcccccttccctggggtcctgggcctccatccttgaccccttcccctgaccctcctcttttgttctttcacctgccattaccccctcccatctcctcctcaaccccccaggcagacccatcttgcgcaggggcttctgtctggcatctgattcttttcaccgtgttcagatctctgggcttggcttgcaccctggacaccccctctctgcttaccccgaccagatcttgtttcctagatcttgagaggctaagaacccaggctctgggtcgcaaggagtgcgcaaggagtgggcacagagctaagggcacgacttgcaggcagtgtgtgtgtgagtgtgtgtgtgtgtgtgtgtgtgtgtgtgtgtgtgtggagatcaggggtcagggttgagaagtgtgttcaagagatgctgaagggaagctgccccaagtaaggcctggtcagaccttccaactcctaccctggcagtctgtgacaggtcctgtggaattcacaggaatcctctaggtgctgagcatccccttttaggcacaaccaaggatttggggtctctgagcctccaagttcccatctgggttgggagaatcgactttttgagttctgtcagttggaagagtggagggaagcagggggagggaggaacattatctcttttggggtagggaggcaatatctcaacaagcgtcgggtgaatacctcagaggggggagtaaggctgggagaccaaggagagacaagcggaggtgggctggagcaggtgtggccctgattctgtgttgctcttctcataaaatgttctgtttcggc

SEQ ID NO: 407663 - DNA, 1000 bp, Homo Sapiens; identical to SEQ ID NO: 224981

SEQ ID NO: 407664 - DNA, 1000 bp, Homo Sapiens; identical to SEQ ID NO: 119270

SEQ ID NO: 407665 - DNA, 1000 bp, Homo Sapiens
tcccagctgctctagcaccgaggggccgggctgcacgcctgtccttcctcccatccaggaaggttatataatgagcggaccgctgccaaagtcagagggaaaatgaagtctttgttaaatgccttcaccaagaaggaagtgcccttccgagaggccccggcgtactccaaccgccggcggcggccccccaacacgctggccgccccccgggtcctgctgcgctccaacagtgacaacaacctcaatgccagcgctcccgactgggccgtctgctccacggccacctcgcaccgcagcctgtcaccccagctgctgcagcagatgcccagcaagcccgagggggccgcgaagaccattgggagctacgtgcccgggccccgcagccggtccccatcgctcaacaggctgggcggcgcaggcgaggacggcaagaggccgcagcctctctggcatgtcgggtcgccttttgctcttggtgccaacaaggactcactctcggccttcgagtacccggggcccaagcggaagctctacagtgccgtgcccgggaggctcttcgtcgctgtcaagccataccaaccccaagtggacggcgagatcccccttcaccgcggtgacagggtcaaagttctgagcatcggtgaagggggcttctgggaaggcagcgcccgcggccacatcggatggtttccggcggagtgcgtggaggaggtccagtgtaagcccagggacagccaggcagaaacccgcgctgaccgcagcaagaagcttttcaggcactacaccgtgggctcctatgacagcttcgacacttccaggtggaatggctgtgaaggaagggggcaggcgagccaccaggtagccagatcttctaagcacagcaggtttgagttcgtctgatgtgtggaaagagccctgcatctttgacaatgtgactggcacaggcacgtggttggatttttctgcagaaaccacacctgtgtgtcaccagctgtgggga

SEQ ID NO: 407666 - DNA, 1000 bp, Homo Sapiens; identical to SEQ ID NO: 224982

SEQ ID NO: 407667 - DNA, 1000 bp, Homo Sapiens; identical to SEQ ID NO: 224984

SEQ ID NO: 407668 - DNA, 1000 bp, Homo Sapiens; identical to SEQ ID NO: 295042

SEQ ID NO: 407669 - DNA, 1000 bp, Homo Sapiens; identical to SEQ ID NO: 295043

SEQ ID NO: 407670 - DNA, 1000 bp, Homo Sapiens; identical to SEQ ID NO: 224985

SEQ ID NO: 407671 - DNA, 1000 bp, Homo Sapiens; identical to SEQ ID NO: 295044

SEQ ID NO: 407672 - DNA, 1000 bp, Homo Sapiens
cgtcagtcgttttcatgaccccaaagccaactcaataataccagaaaatatttgtttgcttgcctacattttgtaataatccaatgtcctgaaataaaaatgaatattttcttcctggaaataaagtgagataattttcttcttccgagagagtcatgaaacaagaacagaatgacattatactaaactatttcacaaatattggtcaacagtggaggcttttttgttcatttatgtaaatttgatttggctctattttcctaagttgcattttatgcttctttcacctgccttgccaaatgaaaagaaaaatcatttatttattaaaacatacactaatagaagaaaataatttcactcttcagaaactttggcattatgaagtcactggttactggagatttaatttctgtaacatatctgaagtgcttatttttttctttccatgaaggaaaccttttggaattaagatatggtacattgaactaaacggggattgcatttgctgtttctgtgataacattttacatctgaaattccaataaatatttctcttcttgctttgaggtggtttagttaatcattcaggtggttggctttcataagaagtaaaggcatgccagcatttatagtttcccagagttcgttttttgcctcaagcttgtatttattcttattacactcactagcttagataccaggtgaatacctgggagaaagaaacaattaatttcaaaagtaataaaaataaaagaacaaaaaaacacaaaactattcaacatgccagcaatcctgttctcttaagaaacctacctgtttttttcaatgtgtgtaagttttagcattttatagcaattagatgagtctgtatatcattagaacttctgtcgttggaattaggacaaaactattttctgcaataaatatttggctctagaaatctattttgacctgtactataatgcatagcagcagaattaaaatattgtgtgttatcatc

SEQ ID NO: 407673 - DNA, 1000 bp, Homo Sapiens; identical to SEQ ID NO: 224986

SEQ ID NO: 407674 - DNA, 1000 bp, Homo Sapiens; identical to SEQ ID NO: 295046

SEQ ID NO: 407675 - DNA, 1000 bp, Homo Sapiens; identical to SEQ ID NO: 295047

SEQ ID NO: 407676 - DNA, 1000 bp, Homo Sapiens
aaagcagaaagagaagtagctgtgagacagcttcaatgaaaacgagatgatgtcttaaacaaacaatcagcaacaaaagctttgctggatgcttcatcgcgtcactgcatctatttagaaaatgagatgcaggattcaaggaagaaattagaccagatgagaagtcaatttcaagaaatacaggatcaacttacagctactataagatgtactaaggagatggaaggtgacgcacaaaagcttgaagtagaaaatgccatgatgagaaaaacgattaaaaaacaggatgaccaaattgagcggcttgagaaaatcctgcagcgttcaagtttgatgctgccaggtgttcaagagctagatgaagcatccagccaaactagactacacagagctccacagtgatcgtcctcacctccagctcttcgcatttacttcttccctctatcctacatgtgttttccttccccttcagatatcaacctatgaattgcctctaccaaaaagcctacaatattaacacaaacctgggctagtatcccttctatgtcttccagtaagtggtgtcttatgcctgtcattgtatgtatgactctgtatgggaattgcctgcttgttttttcggattatagcatacagttgttgaggggtggaccgtatcatctttttcttgttaatccagtgcttgtcctagtaccttagcacatggttgctgaatacatgaatgaagagtgagaaaccagaagctctgatacttaactgccatgataatgaaatcagtgtgcaactatgggcaaattatatttaatagtaattgcatattgtacatatttttcattcttattaacacttataaacttttcaacttatactgactttctctcagttaactgtgaaatcatttagataaagaatataattctttttcattctaacttctgaatttaaatctgaatcctctatagcaggggtccccaacccccaggccacagtcaggtccatg

SEQ ID NO: 407677 - DNA, 1000 bp, Homo Sapiens; identical to SEQ ID NO: 220461

SEQ ID NO: 407678 - DNA, 1000 bp, Homo Sapiens
ggctggcagggctgcaggccccttccttgggagatgctgggggtgacagcgaccacctcaggcaccagctccctcaggacctcagagcactttcctgattgtgtgtgcatgtgtgtgtgtgtgcttgttttggcagacaaactgatggaagagaccgaagaactctgccttcagagggagcagagagaggtaggtgcacaccaaggggctctcagcagccgtggtgtaatggctcacgtttctagcactagggaatgatgcaggggagctgggtgcacagaggacttgctagaagatcagatggggcagggcggggaggccaaatgggatcacagtgcttgcttgggacttgctgtaacttgttggtaagaagtgtctttctccttaccaacccctgggagtaaagtgaaaagggtgggtgatgaccttctagagaaagagccatccaaagtgtcatcagctgcatcagttggtaatgagctgcttgtcaatgatgttcacgggagctataatgccctctgttatccatagagggctatctggcacctgagggtgattgggcttgatgatctcagaagttccttcattctctgaatgtcaaaagtccacagcaggctaagcactggcttgaggcagactggagggtaaaggagactcttgccttgtgtgaaggaggggagccaccgaagccctcttcttcatttagaatctcagtgcaggctgggcgcagtggctcacgcctgtaatcccagcactgtgggaggccaaggcgggtggatcacctgaggtcgggaattcaagaccagcctggccaacatggtgaaaccccgtctctactaaaaatacaaaaataagccgggcgtggtagcgggcgcctgtagtcccagctactcgggaggctgaggcaggagaatggcgtgaacccgggaggcggagcttgcagtgagccgagatcgcgccactgcactccagcctgggcgacagagcgagactccgtctc

SEQ ID NO: 407679 - DNA, 1000 bp, Homo Sapiens; identical to SEQ ID NO: 295050

SEQ ID NO: 407680 - DNA, 1000 bp, Homo Sapiens
cggctagttaacagtggtacgatttctagcccgtggctttaaaatgcacttaaagtcctgtccttgccttttattttctgaacttgatgtttttgcattctttgagttcagtttaaagacaactacgagcatctgtaaccaatctgacaataatgtgttcatcaggtgcctatggattaaatcacatactggcatatttaagctgaatgtcaatctggaaaataaattgactgtattaacagaaataccactctttgtgtagatatttgtcgtatatttaagaaaaagctaaaaagaatggaaatcgcatgactataacttaagtctttcttcaaagtgcatgcagtcttttgcgatacctcattcagccaagtattggtattcttcctcattcggtataaggcagctttcaatttgcttagaaggcaacattggaaggttagagttcatcagaaacagaattctaaaatgtgagttcaattcaataaatttgaatttctgtaggaagaatcaaatcaccgatttaaagagtgcaatatataataatcatttttaaagtattggattaaatctgataggttttccagaaatgaacaaaaatcagctctaaaaccaaagctgatttttagaaaatttgaaaatgtaaatcagccctatccatactatagtttctctaaaactttatctgaaagagtcattttaaaataactattaaacaatgtaactgctatcttaatgttctgaaataagttaaaacattttaaaatatgaatactgtaaaggaaataaatggtgggaaggaaaagtagagaaagaaatgccaattccagtccaaagctttatttgccaagttttcttagaatgaattttaccaatttatgaattcttgtaagcggaatgtaaaacggaaatactgaaagacttttgcctaaagtggcattattgactgctggtgtgatgatactgtaatgtaataaattattaagttgttgcaaagtgc

SEQ ID NO: 407681 - DNA, 1000 bp, Homo Sapiens
acccggcttcaccgacctgtgggctatcgcataggaaaaccctcacctccacccccaccccgcgccagagactctgacaagagaggacccctgccccctgctccccggactacagcaaggcaggaaccaccctcctccaagatcctcactatggcaactgtggacccccgccctggtacgccctggactaagtcaccgaaggaccccgaccccacaacgccgtgaactccagcattggaggaccattgccttactgcggactcaagcactggactatcgcagggcaggatccctgtcccgccatgccctacactatggcacgggaggacccagcctcactgtgctctggactccagcaccggaggactcctacacggaggactccggctctgccacgtcctggactcctgaacaagagaaccctcgccccgctgcaccttggatatagcaaggcaggaatcccgccctgtcgcgctctggactgtggcacctgaggatccacgccccagcgcgccctggactactgctccgcaggactcctgttccaccgcaccctggactatggcaccagaggacccagctccccggcgtcatggactaaggcacagtaggaccccgcagcatcgtgtactcctgcacaggaggaacctcgcagggctgtaccctggactgagctactgaaggagcctcacccctgcctcaccctggactaaggcactggagaactcttgctccgcagagccgcggactcttgcaggagagaatctccgcccagccgtgccctggactgtggcacagcagggcccacaccgcgccatggactcctgtactggaggaagagtagtaataaatgtccaggtttacaagttgaaaagtagcaatcaatgtgttacaatggatggatttgatgtaaaattacaaatgctgaaaacattatgtgtaattgcctagccagatcaattacacaagacaaagaaataaaagaaatccatatagggaa

SEQ ID NO: 407682 - DNA, 1000 bp, Homo Sapiens
agaacttcaactggtagaaactgaaaagtctgagatccagctccacatcaaggagctaaaaaggaaactggagacggacaaaatcccgctgccacaggttcaaaccaacactttgcaggagaagatgtggaggcagaaggaggagctacaggatcaggagaagctacggaagcacaaggagaagatgtggtgacaggagcagaggctgcgggaccaggagaaggagctgtgggagcaggagagcagatgtggaagcaggaggagcaaatgggggagcaggaggagcagatgcagaagcaggaggagcaggtgcgaaagcaggaggagcagatgcggaagcaggaggagcagatgcggaagcaggaggagcagatgcggaagcaggaggagcaaatgcggaagcaggaggagcagatgggggagcaggaggagcagatgggggagcaggaggagcagatgcggaagcaggaggagcagatcatgcagctgccccctggaatgaagaacgcccaggagcgcccaggcttaggcagcacctcctgcatcccattcttctaccgaggagacaagaaaaagatcaagatcatcaatatctaaaaagaacggtcaacaaggcctacagaagtgtaagccgccatgtgaccttgtgaatatagtctgagaacaaacttgaaaaaaagaaaatgtattttaaattgtggcaaaatactggccgggcacggtggcctgcacctgtaatcacaccactttgggaggcctaggccggtggatcaccaatcccagctacgtgggaggttgaggttgcagtgagccgagatcacaccactgcactccagtctgggtgacagagtgaaactcccatttcaaaaaaaaaaaaaaatttttctacctgaggactctaatatctatgtatgtttctattgttttttttgtttgttttctcctttcgtcttgtgttgtcttgtcttatggcatgcctagtaaagttttatgtgtctcc

SEQ ID NO: 407683 - DNA, 1000 bp, Homo Sapiens; identical to SEQ ID NO: 295052

SEQ ID NO: 407684 - DNA, 1000 bp, Homo Sapiens; identical to SEQ ID NO: 224988

SEQ ID NO: 407685 - DNA, 1000 bp, Homo Sapiens; identical to SEQ ID NO: 295054

SEQ ID NO: 407686 - DNA, 732 bp, Homo Sapiens
atgagtgagagcatcaacttctctgacaacctaggccagtgtgtggtgatgccaggcatgcccttccccagcatcaggtctccagagctgcagaagacgacggccgacttggatcacactcttgtgagtgtccccagtgttgcagaggtgagaggagagtcgacagtgagtgggagtggcgtcacccctagggctctactgggccggcgtctcctgtctcctggagaggcttcgatgcccctccacaccctcttgctcttccctgtgatgtcatctggagccctgctgcttgcggtggcctataaagcctcctgctcagagcccaggccaggggcccccaagaaaggctctggtggagaacctgtgcatgaaggctgtcaaccagtccataggcagggccatcaggcaccaaagggattctgccagcatagtgctcctggaccagtgatacacccggcaccctgtcctggacaggctgttggcctgaatctgagccctcgtggagtttcaccagaagtaggcctcttcctgacaggcagctgcaccactgcctggcgctgcgcccttcctttgctctgcccgctggagacggtgtttgtcatgggcctggtctgcagggatcctgctacaaagttcctccaagtcgatggcacctccctccctctcaaccacgtgagcaaactccaagacatcttctaccccaacaccagcaattgtgccaagggccattag

SEQ ID NO: 407687 - DNA, 1000 bp, Homo Sapiens; identical to SEQ ID NO: 224989

SEQ ID NO: 407688 - DNA, 1000 bp, Homo Sapiens; identical to SEQ ID NO: 295056

SEQ ID NO: 407689 - DNA, 1000 bp, Homo Sapiens; identical to SEQ ID NO: 295057

SEQ ID NO: 407690 - DNA, 895 bp, Homo Sapiens
aggagtcatgaggctgtggccatgggtgctggtgtgggtgtggctggctgcactaggggccatagaaactgggtcccaagtcagcttccgcctcgagagataaaggcaggggtcagcttggctgttgtcacagagtttgcttgggtcctagcacccagacccaagcgtgccacggcgtcagccctggggacagagtctccgcgcttcttagacagacctgacttcttcgattatccggactcagaccaagccaggctgctggctgtggcccagtttattggagagaaacccatcgtgttcattaactcaggttccagccccgggctcttccatcacatcctggtgggcttgctggtggtggcgttcttctttctccttttccagttctgcacccacataaacttccagaaaggggcctaaagagccggacaagggctctggactcaacctgagcacccacacccacctcctctcctgttgatgagcaaaagttccctgctttcctcctccctgactgcccagcgagcagctggggatcctgtcccctctgtttcccatggcccaagccccccacctcctcccttcccagccccaaagaacttggtggcaagggccttggtggcgttcacgcagatcgtcttttattagcggtctgtaaagcacctcccagggtcccccgaccccagattggaggaagccttgagaggtcagtagcaccagggacatggcagggcccgagggcgcgatgtgcagccgatggtgagggactgggcgccctcgcctgcccccggggttgtcagcactgggaaggcttgggggtagcagccacctccttcccccaacccaacagactagttcaaatttgggtaaataaataaaataaataagattcctc

SEQ ID NO: 407691 - DNA, 1000 bp, Homo Sapiens
actgaaaaaatttttgagatcctggcactcagagaatatttggggactcagaaggtgttaaatttcacttcatttaagtactaatatggtcaggatggaggggaagattcaaatgttcacctgaaggtgcatgggaggttttggaaatgagggtcggtgggaactgtgctggcgagtatctcactcacatgcttcttttgcggggatctgtccaggagaggagcacagcttgatgttgaaaaagaaactaaagtcctccactttgcacagcaataaactcaaggagacctgtgatgcccaccacagagggcctttcatgactcacactgggtgcaccaagcagcacaggtctcagaccctaggagttcaatggctgtcatttcagaaaagcttggtgactttacaagctgtgtcaaggccatttatcaagacctatactgggtatcggtgcagcaggtccattctccactgacctgggagcagctcactcagcttgcccggttctggcggcctctatgtgctcaggtgcagaccttctattttatagccacccaggtaggttatgtcttccctgctaagaactggcttgtttcagccacattgcctggccctggggatccagccctggatagagaagcccatcccttgcctgggcaggagataactgagcctgtcagtgggtcagatgaggcttgagctgggtgcaccctgaccccattcagcagaaattgcaggtcttggaatgagagcaagaacctgctataggaaagtagcttgaacaatatactcaaaatggtgaaccctgcatttcacagagggctaagattataaacaaattttatgtttcttgttagacatttgatgtctttcagatgtctggtgacagtcatgcatttctatataatcagacaaatattaggatgtaatcattcatatgcctttgcaaattttaaattgtagaaaaataaataaaaagttatatgtttctcttttaattcag

SEQ ID NO: 407692 - DNA, 1000 bp, Homo Sapiens; identical to SEQ ID NO: 295058

SEQ ID NO: 407693 - DNA, 1000 bp, Homo Sapiens; identical to SEQ ID NO: 295059

SEQ ID NO: 407694 - DNA, 1000 bp, Homo Sapiens; identical to SEQ ID NO: 224990

SEQ ID NO: 407695 - DNA, 1000 bp, Homo Sapiens
caaatggagacctgtgcacctggttgtgagcattttaaagggtgtcacacagggcatacccttcggtgcctggattcctttgatgaaagggcaaagccttgaacctaagtcatcttcgagtcctcagcacttcacccagagcctggcacacagtaggagcacagaaaggtttacatccagcaggagttggccctgagctctgagtccagatcattgctcttggctgaagcagcctgtctactcacaaagatgagcatggtccctgccacgaggaaactcgtggtcctgtggactgcggtgtggagggaaagcttgggattctgagcctgataatgcaccattacatccccactcactcgggctgtgtgaacccagcaagtcacaggatcactgggtggtgaaagaaagaaacactcacagaagcgtctgtgcttggagagccatctggtccgtcattgtgactgctgctctcattgctatcatgggtgtcaccattgccatcactcaaggacttctctccaggccccgaagccaagctggtgcctggttcctctgggttgggagaggggctgggcatggacaggaggagggaaaagggacctgtgctagcaggtgatgccatccaagacatctgcatcctaatccctggaacctgggattccactaggtgccatggcaaagagggattaaggtggcaggtggagtgaaggttgctaatcagccgaccttaaagtagggagatgatcctgaatgagacaaaagagagaaccagtcatggtgtcatgagaaggactcaaaatgcaactgctgactttgaagattaaggggctacaaaccaaggaacgtggtagtctctggaaaagacaaggaatagacgctgcgttggggccaccagaaggaaccagccctgtcaacaccctaattttagcccagtgaggcctgtgctggacttctgacctccagaactgtaaactaataaatgtgtgttgtttctgccact

SEQ ID NO: 407696 - DNA, 1000 bp, Homo Sapiens
gaaactttcgctagttccgatgccattaggaaacaaataggaaaatagtttggcaataacagcttgtcgaatattatcacttgacaaattttaacgttttaggtggaaagcggtacattacgttaacggattttcttatgttgaaccaccccctgcattcctgggatgaagccctcccatcccctcagctgcagcacctgattaaagccttcttccttggcaagaatcgttgtctcactgattggctttctgtgagatggagtcttgctacgtagcccaggctggagtgcagtggcacgatctcggttcactgcaacctccgcctcctgggttcaagcgattctcctgcctcagcctcccaagtagctgggaccacagacaaagtctcgctctgtcctcagaggcaggagtacaatggtgtgatcatagctcactatcaccttgaaatccaggaccgaaacgatcctcccacctcagcctcctgagtagctgggattacaggagcagtttcagtctcaacttcaaaagaacaaacgcgcactcaaaacaaaggaagaccgtcctcgactgcagaggaagcaggaagctgtcggcccagctctgagcccagctgctggagccccgagcagcggcatggagtccgtggccctgtacagctttcaggctacagagagcgacgagctggccttcaacaagggagacacactcaagatcctgaacatggaggatgaccagaactggtacaaggccgagctccggggtgtcgagggatttattcccaagaactacatccgcgtcaagccccatccgtggtactcgggcaggatttcccggcagctggccgaagagattctgatgaagcggaaccatctgggagccttcctgatccgggagagtgagagctccccaggggagttctctgtgtctgtgaaatgggcaaactgaggccagagaggggccatgcctgatggagatcgcccagcgggcagttagcacccag

SEQ ID NO: 407697 - DNA, 1000 bp, Homo Sapiens; identical to SEQ ID NO: 119272

SEQ ID NO: 407698 - DNA, 1000 bp, Homo Sapiens; identical to SEQ ID NO: 295062

SEQ ID NO: 407699 - DNA, 1000 bp, Homo Sapiens; identical to SEQ ID NO: 295063

SEQ ID NO: 407700 - DNA, 1000 bp, Homo Sapiens; identical to SEQ ID NO: 224991

SEQ ID NO: 407701 - DNA, 1000 bp, Homo Sapiens; identical to SEQ ID NO: 295065

SEQ ID NO: 407702 - DNA, 1000 bp, Homo Sapiens; identical to SEQ ID NO: 295066

SEQ ID NO: 407703 - DNA, 1000 bp, Homo Sapiens; identical to SEQ ID NO: 295067

SEQ ID NO: 407704 - DNA, 1000 bp, Homo Sapiens
ctccttcgcgtcaggcggagacacggacatgacggattacgtggcctacgtcgccaaggaccccatcaaccagagagcctgccacatcctggagtgctgtgagggcctggcacagagcatcatcagcaccgtgggccaagctttcgagctgcgcttcaagcagtacctgcacagcccgcccaaggtggcgctgcccccagaaaggctggcagggccggaggagtcggcctggggggacgaggaggactctttggagcacaattactacaacagcatcccggggaaggagccgccgctgggcgggctagtggactccaggctggccctgacacagccctgcgccctcacggccctcgaccagggcccatctccttctctaagagatgcctgcagcctgccatgggacgtggggtccaccggtacagctccaccgggggacggctacgtgcaggcggacgcccggggccccccggaccacgaggagcacctgtatgtcaacacccagggtctggacgcccccgagccggaggacagccccaaaaaggatctgtttgacatgcgaccctttgaggatgccctgaagttgcatgagtgctcagtggcggcaggcgtgacagcagcccctcttcccttggaggaccagtggcccagcccccctacccgccgggcccctgtggcccccacggaggaacagctgcgtcaggagccctggtaccacggccggatgagccgccgggcggcagagaggatgcttcgagctgacggggacttccttgtgcgagacagcgtcaccaaccccgggcagtatgtcctcaccggcatgcacgccgggcagcccaagcacctgctgctcgtggaccccgagggcgtggtacggacgaaggacgtgctgtttgagagcatcagccacctgatcgaccaccacctgcagaacgggcagcccatcgtggccgccgagagtgagctgcacctgcgtggcgtggtctcacgggagccctga

SEQ ID NO: 407705 - DNA, 1000 bp, Homo Sapiens; identical to SEQ ID NO: 295069

SEQ ID NO: 407706 - DNA, 1000 bp, Homo Sapiens
gccttcagtcttgccggttcccttcgaagacatgaagcaactcacactggagtgaaaccctataaatgtcagtgtgggaaagcctttagtgatctctcttcctttcaaaatcatgagacaactcacactggagagaagccatatgagtgtaaggaatgtgggaaagcattcagttgtttcaaatacctttctcaacataaaaggacccacacagtagaaaaaccttatgagtgtaaaacatgtagaaaagccttcagtcatttcagtaacttaaaagtccatgaaaggattcactctggagagaagccatatgaatgtaaggaatgtggaaaagcattctcttggctcacttgccttctacgacatgaaagaattcacactggagagaaaccctatgaatgtctacaatgtggtaaagccttcactcgttcccgtttccttcgaggacatgaaaaaactcacactggagagaagctgtatgaatgtaaggaatgtgggaaagcattgagttctctccgttccttgcatagacataaaaggactcactggaaagatactctctaaatgtatggaatgtgggaaaacattcagtactttaatttcagaaacttgaaagaactcactttggagatagaccctatgaatgtaaacatgggataaagccttaagtagtttcaatttttttaaatacagttatcccccaatatattgcaggggattggttccagcaccctctaaatccacagatgccaagtcctttgttatatggcatatttgcatgtaacctatgcatatcttccagtatactgtgtaaatcatctctagatgacttttaatacctcatgcattgtaaaagctatgtaaatagttgtttgattgtattgtttagagaatcatgacaagaaaaatagtctctacatgttcgatgcagacacaaccattgcaggcccacctacgtggtatatgtcacccagaacattaaaatttgttttaacattca

SEQ ID NO: 407707 - DNA, 1000 bp, Homo Sapiens
tcccccaggtgctctgtcccagggagatggggattttgtctgtaagcccctgactggggctgtctcctttccatccgagatgccctgcccagcgaggaggaatctagagaagcagtctggccatattttggcagcccacaaatcctcccagcctccttagcactagaaaactgcctactaaagcctcagtaatgggggatgcccctccccccaccaagctcgatcatcccaactcaacttcagactgctgtgctgtcagtgagaatttcaagccagtggttcttagcttgctgagcttcatgggattgggacctgctgagcgagaccacgtggctccctggcttcagcccctttctaggggagtaaagggttctgtcttgctggggttccagatgccactgtggtacaaaacaaacaaacaacaacaacaaagcaaaactcctgcagctagcttggtgtctgcccaaatagccacccagttttgtgcttgaaacccagggctgtgctggtgtaggcacaccagggaatcccctgatctgcagattgcaaaaatcatggggaaaggatagtaacctggccgggtagcacagttcctcacggcttcccttggctgggggagggaggtcccccagctccttgcacttcgtgggtgaagcgatgccccaccctgcttctgctcgccctccatgggttgtacccactgcctaaccagtcccagttggatgaactgggtacctcagttggaaatgcagaaatcacctgtcttctgcatgggtctcgctgggagctgcagactggaaatgtttatttggccctcttgaccctgtcccccaaatcatcttttatttttatttcatccaaatagctgctatcttttttttgtacatctttgcctaaattataataagaacaacgatctaaatttgcatagcaagtggaccctatatttggaatttaaagagtttctggcaaaatttagattaaattggctaattaataa

SEQ ID NO: 407708 - DNA, 1000 bp, Homo Sapiens
tctctagtacttttgccagtggctttgactgcaaataagttaaacaatattatttctttaaattaaatttttgtttctattttatttaattttttttgagagggagtcttgctctgtcacccagtctggagtgcagtggcacaatctcagctcactgcaaccttgcctcctgggttcaagcaattcttctgcctcgatctcccaagtagctgggattacaggcacccgccaccacacccagctaatttttgtattttagtagagacagggtttcactatgcaggtcaagctggtctcaaactcctgacctcaaatgatccacacgtctcggcctcccaaagtgctgggattacaggtgtgagtcaccatgcccagccaaatttttattttatttaaatttatttttcttaattatttggggtacataatatgagtatatattcatgcaatatatggcatattttgatacaagaatacactatataataatcacaccagggtaaatgaggtatccatcacctctagtatttatcttttttttgttgttgagacagagtcttgctgtgctgcccaggctagagggtagtggtgcaagcttggctcactgcaacctccacctcctgggttcaaatgattcttctgcctcagcctcctgagtagctgggtttacaggcatgcaccaccatgcccagctaatttttgtgtttttagtagagacagggtttcaccttgttggtcaggctggtctcaaactcctgaactcatgatctgcctgccttggcctcccaaagtgctgggattacaggtgtgagccaccgtgcccggcttagcatttatcctttgtataacaaacaatccaattgtatgcttttagttatttaaagatgtacatttaaattgttattgattacagtgtaatttttatggtcaaaataaaagttatgtagaaatatgaataaaatccatacatttctgagtcctgaataaatatttttaaagt

SEQ ID NO: 407709 - DNA, 1000 bp, Homo Sapiens; identical to SEQ ID NO: 295070

SEQ ID NO: 407710 - DNA, 1000 bp, Homo Sapiens; identical to SEQ ID NO: 224992

SEQ ID NO: 407711 - DNA, 1000 bp, Homo Sapiens; identical to SEQ ID NO: 295072

SEQ ID NO: 407712 - DNA, 1000 bp, Homo Sapiens
tccccccaccaccccatgaaatgatctcatttggtcatttaaacggaaaactaaaaagttttaagtgactctaggagagcaggagagaggcaggtctcccagctcagaccccgccccgggacggccccacggaagatgcacatctggatgtaggcgctcaaggcaccgcgcgtgcgccgagtggccttgctcagctccgtccttctgaaacccggaatcctcatgtgtctgggtcccgccccatcctggcctcctacaccactggtccagatcctccaccttcccccaacgcgaggtattgacatcaaagcatcacctcatctggcacaagaatctgaaacacagaccgcaccttacaccaacgtagtgaatccctccttggacctgagttcaacaagcccagagtcggggctctgggttcccgcccaaatgccacgcatgcacacagatggcacctggcgtctcctcaaagggacaggaatcccgggcttcccagaatcaccaggtcgatttaaatggcatcagatgaactggaaaagaatgaaagtgctattgcctaaagtgatgaaattttcagaggatgtatcggtcctgtctggtggacagacggccaccagagggaatgaaccagtcttctctgaacatccatgaggatgaagaacagtcactgaggtgacggtaccaagtcaccggccacctcccagggatcctctcatccggtcctcacagcagcgctgcatggtcggacctcatcacccacattccaccaagaggaagctgaagcccagggccttcatccactcatgtcctccagacccctggcacccatcctgggccccaccccatcatccaggccttgggccttcgacctggggagagtccctgtctcctccatgagccgtccagggcctgaagaggtatccaataaacaagaaagcagaacacaaagagctgtgatggagtggatcttatgtagtaagaataaaattattttgagaaa

SEQ ID NO: 407713 - DNA, 1000 bp, Homo Sapiens
ccataacagagttcatactgaagagaaaccttacacatgtaatgaatgtggcaaggttttccagcgtgattcataccttgcacaacatcagagagttcatactggagagaaaccttacacatgtaatgaatgtggtaaggtttttaatcaaaaagcacaccttgcatgtcattataggcttcatactggagagaaaccttacaagtgtaatgagtgtggcaagaccttcagtcagaagtcatcccttgtgggccatcgtagacttcataccggagaaaaaccttacaactgtcatgagtgtggcaagacctttgctcgaaattcatcccttctaattcataaggcaattcatactggagagaaaccttacaagtgtaatgaatgtggcaaggtttttaatcaacagtcaaaccttgcacaacatcagagagttcatactggagagaaaccttacaggtgtaatgagtgtggcaagaccttcagtcatatgtcatcctttgtataccattatagacttcatagtggagagaaaccttacaagtgcaatgagtgtggcaagaccttcagtcatatgtcatcctttgtatgccatcatagacttcatactggagaaaatccttataagtgcaatgagtgtggcaaagcctttagccccgcccacctcgcgggccccgcccagacctggcttctgtactgcgcgcgcacatgcgcgcaaacccggaagcggattatgtggagtgaaagttacaccgtggcggccactggagcgcagcgccagggccccagtcccagggaggccgcgtactttgcctggtcctggaatcctgcagaccccaaccttgtcttaaggcgccgtctcccccccacctccctcctcgtggcgggccctgctgctccacagctccagcccccggaaaacgagctcctccgggatgcaggcgtcttatccaaaccctcctgtgattgtgtcggccaaaggcattgggagacagagcagtag

SEQ ID NO: 407714 - DNA, 1000 bp, Homo Sapiens
gtgtggagagtgtgggaaatcttttagtcataaaggcaccctcattctacatcagcgagttcaccctagagaaagatcttatgggtgtggagaatgtgggaaatcttttagttcaatcgggcaccttaggagccatcagcgcgttcatactggagagaggccttatgagtgtggagaatgtgggaaatcttttagtcataagcgcagccttgttcaccatcagcgcatgcacactggagaaagaccttacaagtgtggagactgtgggaaatcttttaatgaaaaaggacaccttaggaatcatcagcgagttcacactacagaaagaccttttaagtgtggggaatgtgggaaatgttttagtcacaagggtaacctcattctacaccagcatggccatactggagaaagaccttatgtatgtagggaatgtggaaaattatttaagaagaagtctcacctccttgtacaccagagaattcacaatggagaaaagccatatgcttgtgaagcttgtcagaaattttttagaaacaagtaccaactcattgcacatcagagagttcacactggagaaaggccttatgaatgcaatgattgtggaaaatcatttacccacagctctacattctgtgttcataagcgaattcacactggagaaaagccttatgagtgcagtgaatgtggaaaatctttcgctgaaagctccagtttcacaaaacacaaaagagttcacactggagaaaagccttatgagtgcagtgaatgtggaaaatcttttgctgaaagctccagtctcactaaacacaagagagttcacactggagaaaagccttataaatgtgagaaatgtgggaaattatttaacaagaagtctcacctccttagagttcacactggagaaaggccatatgaatgcagtgattgtgggaagtcatctacccacagctctgcattctgtgttcataagagagttcacactggtcacaccaccttatga

SEQ ID NO: 407715 - DNA, 1000 bp, Homo Sapiens; identical to SEQ ID NO: 295074

SEQ ID NO: 407716 - DNA, 1000 bp, Homo Sapiens; identical to SEQ ID NO: 295075

SEQ ID NO: 407717 - DNA, 1000 bp, Homo Sapiens; identical to SEQ ID NO: 224994

SEQ ID NO: 407718 - DNA, 1000 bp, Homo Sapiens; identical to SEQ ID NO: 295077

SEQ ID NO: 407719 - DNA, 1000 bp, Homo Sapiens; identical to SEQ ID NO: 295078

SEQ ID NO: 407720 - DNA, 1000 bp, Homo Sapiens; identical to SEQ ID NO: 119273

SEQ ID NO: 407721 - DNA, 1000 bp, Homo Sapiens; identical to SEQ ID NO: 295081

SEQ ID NO: 407722 - DNA, 1000 bp, Homo Sapiens; identical to SEQ ID NO: 295082

SEQ ID NO: 407723 - DNA, 1000 bp, Homo Sapiens; identical to SEQ ID NO: 119274

SEQ ID NO: 407724 - DNA, 1000 bp, Homo Sapiens; identical to SEQ ID NO: 295084

SEQ ID NO: 407725 - DNA, 1000 bp, Homo Sapiens
gaaggatctaggttggtgtctgcctgggtgctctactgtgtcctgggcctacctccacatgctgcatcatggtgcctgttggcagtccctttcttcaagaagatggaactggaagggttgggccaggacattgggttgatggatcaaaatatgctttgatggagctaaatcccaggtctctcgaaaaaagagcaattttggatctgaaaggcagctttgatgcctttgaattccttgcagattgtgccttttagtactctgtacaacaccagctgcatgtgggctacaagaaagagacacggtcgggggcagtggctcatgcctgtaataccagcactttgggagcctgagggcggtggatcacctgagacagagtctctctccgtcaccaggttggagtgcaatggcatgatctcgactcattgcaatcttcgcctcccaggttcaagcaattctcctgcctcagcatcctgagtagctggggctacaggctggagtgcagtggcacgatctaggttcactgcaagctccgactcccaggttcatgccattctcctgcttcagcctcccgagtagttgggactacagagtctagctctgtcacccaggctggagtgcagtgacacattctcagctcaccgcaacctccgcctcccagtagagacaggatttgccgtgttggccaggctggtctcaaactccttacctcaaagtgagctgcctgccttggcctcccaaagtgctgggattacagctctaaccttggtccagacaccagctgtatagactatcaaagctgctgtcatttagaggggaatagctcctcattaggccacagatgcaccgcggacctgttcttccttttgggttggcaggcgcaaagccccattagcagtaatgtgcaccagtgggactccagggagaggaagaaagctgaaagggctggagttcctggtccaatttttaaagaaaacaagagaataaaaggcccataaaactc

SEQ ID NO: 407726 - DNA, 1000 bp, Homo Sapiens; identical to SEQ ID NO: 119275

SEQ ID NO: 407727 - DNA, 1000 bp, Homo Sapiens; identical to SEQ ID NO: 295086

SEQ ID NO: 407728 - DNA, 1000 bp, Homo Sapiens; identical to SEQ ID NO: 224996

SEQ ID NO: 407729 - DNA, 1000 bp, Homo Sapiens
gaagatatgaaagtgtctgggatgttctctcctctgtactggaaaggctgtggccatgtccgcttcttttctctgattaggcaagtgatggagaactaaataaagaacagttcaagggaaattgtccctggtcagcacctgaccttgacaatggtgatacataagggaatggggagggggaagtagagctgagaatctcatcttcatccaggtgcattaagtctgggagatacttgtgaatatttgctgtattccttcaaaactcattttcttttaccatctgtggtagagttagagaagttgggttagggcagggtagctcacagagcacattgatcaaaaccacaggatctaagaggtgaaggtctaacatgatctggcttggcagacttaaaacatttgattcaagtcccaagaagatacagttttctaccccaactccctcaaaacccctttgtacttccctcagtttcacatttttatttttattttttccttatctggcataaaaagcagaaagtcagttttccctcaatgcccaaggctcagcaaaaggcaacattgttccaagatactaagtggtcttttcccccacatgaggggatgaatttttccagtccccttccctgagggcagccacagctacctggtcattatgatttctctcctcatgacttttggtgtctcctttctctcccactgcaactccactttctttgcatctcttcagggcactgtgtggccaagaagagttgaggaaagattatttttcttagacaaagacatagccatggccttcagagtggtctacggaacccaaaccctttcactcagttggtcctgctaagaatcctgggatttaggaatcatctgggctcctgtccagccccacatgtcaattctggagaggagttataacatcctcacctttccttctcacctgtcctgcttttgcttcccaaaggagcagaacaaaaataagaaataattagcatggtgg

SEQ ID NO: 407730 - DNA, 1000 bp, Homo Sapiens
catcagtcgttttcatgaccccaaagccaactcaataataccagaaaatatttgtttgcttgcctacattttgtaataatccaatgtcctgaaataaaaatgaatattttcttcctggaaataaagtgagataattttcttcttccgagagagtcatgaaacaagaacagaatgacattatactaaactatttcacaaatattggtcaacagtggaggcttttttgttcatttatgtaaatttgatttggctctattttcctaagttgcattttatgcttctttcacctgccttgccaaatgaaaagaaaaatcatttatttattaaaacatacactaatagaagaaaataatttcactcttcacaaactttggcattatgaagtcactggttactggagatttaatttctgtaacatatctgaagtgcttatttttttctttccatgaaggaaaccttttggaattaagatatggtacattgaactaaacggggattgcatttgctgtttctgtgataacattttacatctgaaattccaataaatatttctcttcttgctttgaggtggtttagttaatcattcaggtggttggctttcataagaagtaaaggcatgccagcatttatagtttcccagagttcgttttttgcctcaagcttgtatttattcttattacactcactagcttagataccaggtgaatacctgggagaaagaaacaattaatttcaaaagtaataaaaataaaagaacaaaaaaacacaaaactattcaacatgccagcaatcctgttctcttaagaaacctacctgtttttttcaatgtgtgtaagttttagcattttatagcaattagatgagtctgtatatcactagaacttctgtcgctggaattaggacaaaactattttctgcaataaatatttggctctaaaaatctattttgacctgtactataatgcatagcagcagaattaaaatattgtgtgttatcatc

SEQ ID NO: 407731 - DNA, 1000 bp, Homo Sapiens; identical to SEQ ID NO: 119277

SEQ ID NO: 407732 - DNA, 1000 bp, Homo Sapiens; identical to SEQ ID NO: 295088

SEQ ID NO: 407733 - DNA, 1000 bp, Homo Sapiens; identical to SEQ ID NO: 224997

SEQ ID NO: 407734 - DNA, 1000 bp, Homo Sapiens; identical to SEQ ID NO: 295091

SEQ ID NO: 407735 - DNA, 1000 bp, Homo Sapiens; identical to SEQ ID NO: 224998

SEQ ID NO: 407736 - DNA, 1000 bp, Homo Sapiens; identical to SEQ ID NO: 119278

SEQ ID NO: 407737 - DNA, 1000 bp, Homo Sapiens; identical to SEQ ID NO: 295095

SEQ ID NO: 407738 - DNA, 1000 bp, Homo Sapiens
gtcaactatgcaggtgaaaattaccagtccaggcctgttcagaattgtatatatcgcagaaagacataattgccaatatccagaaaacattctatcttttatcaaatgtgtgattcataacttttggataccaaaggaatctaacgaaataaccataatcatcaatccatacagggagactgtgtgcttctctgtggagcctgtcaagaagatatttaactatatgatacatgtgaatcgaaacatcatggatttcaaactcttccttgtgtttgtggcaggagtttttcttttcttttatgcaaggaccctgagtcaaagccctactttctattactcctcgggaactgtgctaggtgttctaatgacattagtctttgtcttgctgttggtgaaaagattcattccgaagtatagcaccttttgggctctaatggttggttgttggtttgcctcagtttatattgtatgccagttgatggaagatctgaagtggctgtggtatgaaaacaggatatatgtattaggctatgtcttgatagttggatttttcagctttgttgtttgttacaagcatgggccccttgcagacgacaggagcagaagtcttctgatgtggatgctgcgactcctctccctggttctggtctatgctggtgtggccgtgcctcagtttgcctatgcagccataatcctcctcatgtcctcctggagtctgcactacccactgagagcatgcagttatatgaggtggtatcagttatcaaaccagttgcttaggacccaggcagatactatggtgagtgatgctgagcaggggaaaatggagcagtggtttacatcaaaagagctggtggtgaaatatcttacggaagacgagtacagggagcaagctgatgctgaaacgaacagtgctctggaggagctacgccgggcctgccgaaaacccgactttccctcatggctggtcgtctccagactccacactcctagcaagtaa

SEQ ID NO: 407739 - DNA, 1000 bp, Homo Sapiens
gtgccatactggtctttgctgttagtaataaaacatcaaattaggtttggagggaaacttgatcttcctaagaattaaagttgccaaattattctgattggtctttaatctcctttaagtctttgatttatattacttgttataaatggaacgcattagtgtgtgccttttcctttacatcccttgccccacccatcccatctccaaccctagtcttccatttcctcccgccagtctccattgaatcaatggtgcaggaccgaaagccaatttccttctttccttgtacttctccccactggtcatcttttaactagtctttcataaggatcctctgaaaccccctctgtgccccaagcacagatcccgttacttctgctttcgtatttcctcaggcaaaaatggagggtgccttttgggtcctcctcataggttgtctctgcatacatgaacctaacccaaatttgttttggtgccagaaaaactgagctatgtttgaacaaagatatcctgcagactgtactgtgaacaacagttagtttaaaatatgagaggggcaaggaggaagatgcatttcaaaagcctgattgatggtttaaagccaaattaagaggagttttcagatcaaaaattggttaccattttttgtcagagtgtctgatgcagccactcatttggtcccccaaaattcctggagtgggttaatagggtcatattgtgaatgcctcactacaaaacgacttgaatccagtgaaatctcattagggttaagaatatttcagggatccttaatgttttgatttttgttttctgaaattggattttattttgtcttaaaatttcagttcatctaaattgtgagttctgtacatgtgatgtttgtaccgttgactgttctggaagttcagcattgtatgtctctctctacactgtagtgcagttaacttgtggaatttttatgctaaaaatgtagaataaagactattttgaagatttgaaa

SEQ ID NO: 407740 - DNA, 1000 bp, Homo Sapiens; identical to SEQ ID NO: 295097

SEQ ID NO: 407741 - DNA, 1000 bp, Homo Sapiens; identical to SEQ ID NO: 295098

SEQ ID NO: 407742 - DNA, 1000 bp, Homo Sapiens; identical to SEQ ID NO: 295099

SEQ ID NO: 407743 - DNA, 1000 bp, Homo Sapiens
cagaaggatgggaacaggtaaatcttcacttcatgaaaagaagtcaagaggatcttctttttccttgatgttctgaagctacaagatgacttccaataccatgttgaataggagtggttttggtatcaggatgatgctggcctcatagaatgagctggggaggggcctttcctcctcaattttttggaatagtttcagtaggaatgggaccagctcttctttgttcatctgatagaattcagctgtggatccttcttgtcctgcgctttattttgttgagagttgcccaaggaagtcaacaggagagccaggtattttctctttatccatcaactttgagcctggaaaaggcactgtggcccctggtcatagttgcctttgtgacatcacggccatctctttctccacctttcctgcccctgccaagatcaggaaacagcaaccagagggagatgatcacctgaaccactgctccaaaccatgggcagtaaatgctgtaaaggtggtccagatgaagatgcagtagaaagacagaggcggcagaagttgcttcttgcacaactgcatcacagaaaaagggtgaaggcagctgggcagatccaggcctggtggcgtggggtcctggtgcgcaggaccctgctggttgctgccctcagggcctggatgattcagtgctggtggaggacgttggtgcagagacggatccgtcagcggcggcaggccctgttgagggtctacgtcatccaggagcaggcgacggtcaagctccagtcctgcatccgcatgtggcagtgccggcaatgttaccgccaaatgtgcaatgctctctgcttgttccaggtcccagagagcagccttgccttccagactgatggctttttacaggtccaatatgcaatcccttcaaagcagccagagttccacattgaaatcctatcaatctgaaaggcctggggcatggagaacaggctgcactaccctaataaatgtctgaccaggt

SEQ ID NO: 407744 - DNA, 1000 bp, Homo Sapiens; identical to SEQ ID NO: 295101

SEQ ID NO: 407745 - DNA, 1000 bp, Homo Sapiens; identical to SEQ ID NO: 295102

SEQ ID NO: 407746 - DNA, 1000 bp, Homo Sapiens
tctttgctgtgttcctacttgtcacaaactccagaggggaaaaggttttatgctacttgaaatctaacaatgtagctgccacagtttcaaagatgttgccagaagacacaaaacccctgggtcagagacaaagaatattactatgcatggtacaagagggagattaatgttcacatggttctcttgaccctcaagtgccatgaggatgatgcggaggaagactcgggtggatgctgtgcacacagtgaatctgtgtttcagcttaggagctgttctaaaaagtaggctgctagcaaacttgtccaaactttgccctggagaagatgttatctttattgttctgcgcagggaaacagatctgcactttgccccacagagagaaactatgtatcttctaaggttgtttgctatataaatattttggaaagatagtccagtaaaagagttgattcaagtcatccataatacctcttatggagaaatgtctctcaacaacactaaccatctttcagtttctgtaatggcctatgcccactctgagtgctgctgtatttgctatttttcttttggaaacattttccccggctttctctgtctcatctaattaacttctcatcattctttaaatgtattttttttttcagttcctcagattaagttggattcccccataggttgctatttattccattaagaggatttattggcttgatgtggtggctcatggctgtaatcccagcactttgggaggccgaggcaggtgaagcacaaggtcaggagttcaagaccagcctggccaagatgttgaaaccctgtctctactaaaactacaaaaactagccaggggcagtggcaggtgcctgtaatcccacctactcgggaggctgaagcaggagaattgcttgaaccctgggcggcagaggttgcagtgagctgagatcacgccaccacactccagcctgggcgacagactgagattctcatccagagtcaaattttc

SEQ ID NO: 407747 - DNA, 1000 bp, Homo Sapiens; identical to SEQ ID NO: 295103

SEQ ID NO: 407748 - DNA, 976 bp, Homo Sapiens
atgcccatggcagccccgcgcgggctgcctctgacatttagggaggctccggaagccttgcacccggcccgggcggttgggcgcgagaggttaaggtcagaagctcgggaagctgcttgggccgccagtagcagccgcctcccgcagcctccgcgcgccgcgggctcctcctcccgcccaagcctggcgtgcggcgagcgggagcgctgctgcgacgcgaccaacgccacggcggtgcgctgctgcaagctgccgctgcacgccttcctggacaacgtgggctggttcgtccgcaagctctccgggctgctcatcctgctggtgctcttcgccatcggctatttcctgcagcgcatcatctgccccagtccacgcaggtacccgcgcggccaggcgcgcccgggacagcggcccgggcctccggggggcgccggaccgctggggggcgcggggccgcccgacgacgacgacgactcgcccgctctgctgcgcgacgaggcggcagccggctctcaggactcactgctggacagtggcggcggcggccggggccggggaggcggcgggcgctcggacccctcctgcgcctcagagcacgagatgcgtgtagtgtcgccggtcttcctgcagctgcccagctacgaggaggtcaagtatctgcccacctacgaggagtccatgcggctgcagcagctcagccccggggaggtcgtgctgccagtgtcggtgcttggccgccctcgaggcggggtcgccgcggagcccgacggcggcgagggccgctaccctcttatctgagcgctcggggatcggcggctggtgcagggctgggggctgcgggtggcaagcaacggccggggtgccgccgccaactgcctcagaccttatctggcaccctggcctaactgcccggcaccccgcgactgggttggggtcactcgtctccctcgcgttctcccgggatcttatgtttctc

SEQ ID NO: 407749 - DNA, 1000 bp, Homo Sapiens; identical to SEQ ID NO: 295104

SEQ ID NO: 407750 - DNA, 1000 bp, Homo Sapiens; identical to SEQ ID NO: 224999

SEQ ID NO: 407751 - DNA, 1000 bp, Homo Sapiens
agtcaaaggagatcatttaggatctttaaaatttgactgccctgctgggtttcagacttatatggggcctgctacccctttggtttggccaatttctcccatttggcatgactgtatgtacacaatacctgtactcccattgtatctaggaagtaactagcttgcttttgattttacaggctcataggaggaagggatttgccttgtttcaaatgagactttgtactgtgcactttgggttaatgctgaaatgagttaagactttgggggactgttgggaaggcatgattggttttgaaatgtgagcacatgagatttggaggggccaggggcggaatgatatggtttggctatgttcccacccaaatctcaacttgaattgtatctcccagaattcccacaggttatgggaggatccagggggaggtaattgaatcatgggggccagtctttcccgtgctattctcatgatagtgaataagtgtcacaagatctgatgggtttatcaggggtttccacttttgctttttcctcatcttcctcttgctgctgccatgtaagaagtgcctttcacctcccgccatgattctgaggcctccccagccatgtggaaatttcttatctcccctagtaaaatttcagcttccagatagccggagttatttctcaacagagtgaagtcagaaggtgtgtttcccagacaatctccagggtttctccaagaagctttcaagaaagccctgtggctaccctgtgggttggccacactggtccctgctgctaagtggtaagacttcccttcccagccgatgccaaccatcacatatgtggtcacctttggagacattggatacctctcaacacagttcagctgagaggaaactgaaggaatgagacataggacagataagtttcaatggaagaagatgaagataaggaaaagaaaaggccatagcctcccatgggtgactgggatgagaaataaaatatgaaagtgaaa

SEQ ID NO: 407752 - DNA, 1000 bp, Homo Sapiens; identical to SEQ ID NO: 295105

SEQ ID NO: 407753 - DNA, 1000 bp, Homo Sapiens; identical to SEQ ID NO: 225000

SEQ ID NO: 407754 - DNA, 1000 bp, Homo Sapiens; identical to SEQ ID NO: 295108

SEQ ID NO: 407755 - DNA, 1000 bp, Homo Sapiens; identical to SEQ ID NO: 295109

SEQ ID NO: 407756 - DNA, 1000 bp, Homo Sapiens
tgttcccttctccaagaggagatgtgatgacaattgtcttttggcacaattgaactctagaaactccatttttgtttttccagaggtctgaatcccaaataacagaattttgtgcagtagggaccaggagccctagtaaggatgggtggccctggtggccagcaatgctcactattactgctcagagagagggggccagtcatgggaagaggctagatttcggtgttcaacaaacttgggtaaaattctggttgctgcattttctagatttgtgttctagggcaagtcatatcatctacatgagcagacatttcctcatatttaaagtggaatttccaaacctagaggagttcatgcgggaggcaatgagctgctggagcacaggcataacacaggtacccagtgtgtgccccacccagtgccccgtcatcacagcaatgacttgactttaaacagtcttctttttggaagcagtcgcttgtaacctaagttggaaatacttactttggagataatttgaaacttacccaagtattaaagtatcatcagctacatttttaatgaatggatcccttggaagaaatcatctctcatctaccatgattaaatttcccacagtttagcagtgaatgggcaggtggcctaattaatttcaatactgatcgctccatcactggttttattgttttgaatatggaaaaaggattctctaaaaataaatgacactgaattccggcaatttcaaggctgagtgactcctaagtatttctttatttttttgaaaacagtttttcagtgtaggtgtcttttatttatttcaaacaaatggcagtagtttatttcgaatgcctttgggtgcattataccatatttatagtaacataatagaaaatatataaagtttgggttatagaaatatttataaattattcattattcagacttgatttcaacaaagacaaggcatctgtaagtgactgtaataaatcaaagtcaaact

SEQ ID NO: 407757 - DNA, 1000 bp, Homo Sapiens; identical to SEQ ID NO: 295110

SEQ ID NO: 407758 - DNA, 1000 bp, Homo Sapiens
ggatgttgttgaaataaaaaataccttaaggaagcacatatatagagctcaggctgtcagatacaactgcattagaatagataaacaaccagtgtacaacgtagaggttaaaaatgctgaatttcccagaggtgtattaaatttaattgaaagcctcatagaaggacatttttttaaagaagcaattgaggaactttccactttgcaggcacattatatccctcctgtatgcgttcttcatgcccttctagagaacgttctacaggataacatagatacattttctggtcgatactttcatatattgtcagctcttcttcacctgcatcctccttggaagtctccagccatgtcgagatattatttagagttgtttcagtgtccaacttgtatgaaaggagcatggtctttagtagaagtccttatcaggtcttgccttttcaatgaaagcttttgtcatcaaatttcagaaaatattggctccaaggtgctccacctgacgctactcaaatttttctttaatttaattgaaagtgaagtacaacatctgagtcaaaagttgtatgactggtcagattctcagaatctgaaaataacaggaaaggcaatgcttcttgaaattttttggtcaggaagtgaaacctctgggcttttgaccaaaccagtaaatatgcttttggaatggactatatattctcacaaggaaaaattcaagtctaatgatagaatggagttgatttcctgcagtgttttctggagactagcactagaccctagtcctgccgatcacaccaggggaggtgttggtgctactgatgtggtcagacctgctgctggtttcccatgccatatagccgcaactgcaaggcttaaactcagctgtcctatcaaggcaggagactgggtgggattgacagccacctgtgaagactcacctgctaggatctggctggctgtcttggtcgctgatcatgtccgaagaagtacaccactttcttaa

SEQ ID NO: 407759 - DNA, 1000 bp, Homo Sapiens; identical to SEQ ID NO: 119279

SEQ ID NO: 407760 - DNA, 456 bp, Homo Sapiens
agaaattctccgagcttcgcaatgccgcccaaggacgacgagaagaaggacgctggaaagtcagccaagaaaaacaaagacccagtgaacaaatccgggggcaaggccaaaaagaagaagtggtccaaaggcaaagttcgggacaagctcaataacttagtcttgtttgacaaagctacctatgacaaactctgtaaggaagttcccaactataaacttataaccccagctgtggtctctgagagactgaagattcgaggctccctggccagggcagcccttcaggagctccttagtaaaggacttatcaaactggtttcaaagcacagagctcaagtaatttacaccagaaataccaagggtggagatgctccagctgctggtgaagatgcatgaataggtccaaccagctgtacatttggaaaaataaaactttattaaatcaaaaaataaaaa

SEQ ID NO: 407761 - DNA, 1000 bp, Homo Sapiens; identical to SEQ ID NO: 225001

SEQ ID NO: 407762 - DNA, 1000 bp, Homo Sapiens
aggagagattaaagcctgtgaaatagaacttttccagataatggcgagtttttaggcttgctcatgctgaagcttaatataagctaataagtagagaaattaggaggcttggatattgcaaactttattggttggggtgttacccaggctaatagaaaaaaaattatatcctagaaagacagaacaggtgcgacttctgagaagaaaggttagagaagactagaaaggctgggaccaccttgaatttggcacacacacacacacacccacacgcacacacaaaatcaccaaatgatctggaatgtgctatgcgatgagtcagcctccactgctgtacgtccttggctacagactcctggaacagcagctcttctcaaggctagttgtgacagactcctggaacagcagctcttctcaaggctagttgtgacatccaaagtgacaagagcaggcccatattcagccacctcatccaggccttatcaaagaagagtcttatatgagatcaaatggctgcctttccccacaagattatatttttcctggtatgctctactttgacacatgtggctttctcaggaattttcaataaacgtgacttcactaggtggcctaagccccgatgtaaaatgtatatcccactggaccctgattacaatgcagactgccccaatgtgacagcacctgtttgtgcctcaaatggccacactttccagaatgagtgtttcttttgtgttgaacagagggaatttcattatcgtataaaatttgaaaaatatggaaaatgtgattaatgggtaccagagtaactacacttgcttattctttttctacttaattcagaatagtatttcttttagagtgtgagaatgtaaattaaataacatccctatgctgtacttaaatgtcgaacaaaatgagagacaaaaatgaaggaatcaaactgacaagaaccaaatatcacatttgttacaaataaacaacaaaagagctgatattc

SEQ ID NO: 407763 - DNA, 1000 bp, Homo Sapiens; identical to SEQ ID NO: 225002

SEQ ID NO: 407764 - DNA, 1000 bp, Homo Sapiens; identical to SEQ ID NO: 295115

SEQ ID NO: 407765 - DNA, 1000 bp, Homo Sapiens; identical to SEQ ID NO: 295116

SEQ ID NO: 407766 - DNA, 1000 bp, Homo Sapiens
attttaaactgtttattctaactcttttgcccttctcttctgccagtgaatatgattgtttcttcatgtaaaaagatgttttattccagttgactacgactgagaagccattgagaaagccaccttccagactgaaaaaactcaagatcaaaaagcaagtgaaggatttcacaatgaaggacatcgaggagaagatggaggctgccgaggagcgcaggaagactaaagaagaagaaataagaaaaaggctacggagtgaccgacttttgccttcagccaatcactcagattcagctgaattagatggggccgaggttgcatttgccaaaggacttcaaagggtgaggtctgctggatttgaaccatctgacctgcagggaggaaaaccattgaagaggaagaagagtaaatgtgatgcaaccttgattgatagaaacgaaagtgatgaaagttttggggtcgtggagtcagacatgtcctacaaccaagcagatgacatagtctactaagccattttttgtgaatttcataagaaagcattcattctccccatttgtgacatttgtagtatgtctcatattctttgactgactgacctcattccactgggatttctgccttgggcttaaggatgattgtgtgggctgcacaggctgaaggttagttgagtaaattaagtagctatgctagcttttaaaaaaagagcgagggggagacttgaccagcatagatatttggcactctcctttgtgtggcttcaaacattatggagatgtctttaattcatttataagtgccttcagtttacattaataagttcgtgccaaatgaaatccttcctgtttactcctgccttgtggcggggtccatcctctgctgctcctttaaaacaaattgcatggatttgtattaagtattttaatggcttatatgttttttatgctgtatgtctatggttttataatttttttctctgtgttgtgaaggaataaagcaatgt

SEQ ID NO: 407767 - DNA, 1000 bp, Homo Sapiens; identical to SEQ ID NO: 119280

SEQ ID NO: 407768 - DNA, 1000 bp, Homo Sapiens; identical to SEQ ID NO: 225003

SEQ ID NO: 407769 - DNA, 1000 bp, Homo Sapiens
acaagacgcaggactggaggccttgccccgcagctcgagaggccgttttgggacatatcaaggaaggaaggcttaagcgacacaggacctggctgacttacgcacccgctgtctaaagatggggtgctggccggtgaactggagtggctcacggcagacctggagtgacagtcatgggtctgtacctgtgtggagtcctccatggctgggcttgcagagactgagctggactgcattgcacattggctggaaggagaggagccactgagagacccagcttacggcactctgcccaccccactgcccaccccaaccctggcgctccaggggggcccaatgccacagacacactccagggggacaattggggctgttcccaaggaccaggagggacaaatgccctaaagatgtccatggtttgacccctgctgtctgtgggccctgcctggctggcctccccttctcacactctccacagtcctcatgcaacacagcacatctgaaaatgctgtcctgaaaacgcgcactctggggaagagcagcttcctcctctccgagtggagcgggctggccccatgaggcgtgattttcactgtgaaatgtgcttcacgtaacactggggcctttgtcaccatttttaattgtacagtttggaggcattaagtgtgttcatcatcaccaccttccacccacagagcttcttcgtcttcccaaacggaaactctgtcgtcggtaaacactccctcccctcccacagcccctggcacctgccttctccttcctgtctccatgaacctgacaactcttcggaccccacctaagtggagttgggcaggatttgtcctctgtggctggctcgcgtcactcagcggccctgaagactcatctgcgccgcagcctgtcccagaatctccctccctctaacactgattaatatcctgctgcacaaaaaaacaaagatgatcatttgatacccgaaatccacttgaaaattggtaag

SEQ ID NO: 407770 - DNA, 1000 bp, Homo Sapiens
ctatatgcaggttctgtggagcctgtttaaggacctgaatatgtgcagattcaggtatacgcaggtgatcctggaaccaatctcctgaggatactgagggatgactgtaaaacctactgtataagggatggtagagtttattcatttattttacagttatctatttcagggcctagattgtgctaagtactgttttagcagcagtgatacaaaaagatccaagatagaagcttatatttggggactgggggagaggtggagagaataaacaaataaataaatgactagtaagacaatttcagagagtaattacaagaacgaaaaaacaaagcagggttatgggatggagagactggggtcgggcagagaatcgaatgatgggaaggggcaagtaccaagtcctcaaggcagaacaacctggaaaattctaggggtacaaagaaaaaccagtctggctggagtggagcgagggccagggagagagggaaaaaggaacaggaattcattctgtgtgcaccagcatcaattctgtatgccacactctgtacccaccatcggtgtaagtgttgaggggtctgaaagaaaaatcaccgtccttgccctccaggaatgtatagattccaaactttaatgctagagggacgtcagcgtatctagaattagagaccaaaacttgtatttctcaaacaaggacactgaaaagtcaaaagacctgctaaaaattccttgagaatgcctcgccaataacaaataatccaaaaatgagtcttgaattgaattgaaagagtgcatgatctacttttgctaaatggggtttagcctaatactgcctctttacatattttaagtttggcctaaaggtttctctgtacactgaactgtagcctaaatggaagtgtaaacagagtgtgatctactcgggtgtcaattactgagttttggccactcaattgtggccagctgttcaaaccatgttcaaataagacaaatgctgagctgt

SEQ ID NO: 407771 - DNA, 1000 bp, Homo Sapiens; identical to SEQ ID NO: 225004

SEQ ID NO: 407772 - DNA, 1000 bp, Homo Sapiens; identical to SEQ ID NO: 295120

SEQ ID NO: 407773 - DNA, 1000 bp, Homo Sapiens; identical to SEQ ID NO: 119281

SEQ ID NO: 407774 - DNA, 1000 bp, Homo Sapiens
agcaatagcatatgttgtataggatagtgcattggggtaaatcttttttttattatttttattttttcatcagcccactgacattgaaaggggataggttttaggttattgacgagcagttttctctcagataactgccttagtataggggtttgtggtcatgttgatgagagggtaggctggggttaaaagtcgttatggcagtaacaaccttctgaggaccaggaaattcaaatccctctcatgatactttgctaatatctcccgagtttgctgtgccttccctttgtgcctcttcccacacgtggtttcttgcacttggcccagctatattccactgttttgactccatgcttcttagcctggtggcagtggtgagggagtgaggagatctctaatgttctgaggaagcctcagacttagcactgtgaactggggtgtggggttactgaccgttgaagagtttcctgcccatcctgtacatgcaatgccaggacaagagcacattcctgtccctccttgtccatggtaggggaaacgtgctccttctccatgctcttaactcccagttgaagtgggccttgaacagtgccctgtaaattaatggtttcttttctttatgggagatgcatctgtgcagaaatgcgggtgttggccttgttccttcaccctcagttccatgagcttttccccagtgccctttggctcaggtttggatgctctttctctgcagattaggcctcatgttatataggagagatgtgagggctgtgtctccagagttgcagtagtggatgggatagtggtccctccccatcagcactgtgggacgtttaaagtattgctgtgtgtttcaagtggaggaggtcatattacaactgacatttgtccttgactactggacatatcacaccagccctgattgcagttatacttgaagccagatctacccttaacgtatattcattttactattcaataaatattaacttatcatgaa

SEQ ID NO: 407775 - DNA, 1000 bp, Homo Sapiens
aggcagagaagctgcaggagctgctgcggcgtcgggagcgttctgcccagccggcccccacctcggctgctgatccccccaaatccttcccggctgcagctgtcctgcccactggggccgcccgggggccaccagcagtgccccggagcctgccccccttggactcccgcccagtgcccccactgaagggctcccccgggtgccccctcggcccggcccccctgctgagccctcggccctcgcagccagagcccccccaccggtaggatccacggtgcggccccccagttggggggcctagacaaacttgatgcgtggctcctcctcctcccccactgcctgggtggggggaggggcaggcccctccccctggcctcaggcaggccctggccctggaggctgagctggggaggagggtcccctggaagaggcccgagagggggctgggggtgggtgggcagggctttatgcctctggcgctgaagacaccctgccttttttgtttccgtgccccggggcctctagggtgatggaccagccccgttaaagaacttgactcaactacaggggcctgggaagatgcctgggtcccctaggggccttgccaaggggacctgtcgcaccccaccactccactgggctcgcacaacgccaaggccgccaggagtgttttacatcatgtcctgagcctacctttcccccaaattctggggcccacagcctaggagccaggtgatcaggcctcggctgtggggccagggacaccatggccctggggctactacgtgtccacacatgctccagaccctggggcaaggtaggccaggggcttctgacctgtgcaggtgagagtgggccatacccaggaaagaccattctgtatttttctgtccctgtctccttagaatggaagctttttgagggcaggtccttgtctttgtacgttctgtccccagccccgcctcttaggggccgtcaataaatgtgatgatgaggatga

SEQ ID NO: 407776 - DNA, 1000 bp, Homo Sapiens; identical to SEQ ID NO: 295123

SEQ ID NO: 407777 - DNA, 573 bp, Homo Sapiens
atggtgcagcagatccgggctctagacagcgacatgcaaaccctggtctatgagaactacgataaacttcctagtgccaagtgtataagtgtgtccggaattggtgggttcttggtctcattgacttcaagaatgaagccacagaccctcctggcggaattctccacgagttttgagcagcctcggttttcccaccacctccaaatcatggaagacacagggcagagcccccggagccatggccagcccttccggcagctccgaagccactggcaagccccgaggcagggatggccggcccaggagggaggaggacgacgtccctcccggggagaagaggctgcggctgttgctggaggggggaagagcacagccctaggactgcgaggacggggaggacgcgccgcggccgggcagggaggagaccggcacccagacaggtggcgacggcagaggatgatgttttgttctggggtgcatcacaagagacaaggttcttggccgggcgtggtggctcaagccaataatcccagcactttgagaggccgaagggggaggatcgcttgagcccag

SEQ ID NO: 407778 - DNA, 1000 bp, Homo Sapiens; identical to SEQ ID NO: 295124

SEQ ID NO: 407779 - DNA, 1000 bp, Homo Sapiens; identical to SEQ ID NO: 119282

SEQ ID NO: 407780 - DNA, 1000 bp, Homo Sapiens; identical to SEQ ID NO: 119284

SEQ ID NO: 407781 - DNA, 1000 bp, Homo Sapiens; identical to SEQ ID NO: 295126

SEQ ID NO: 407782 - DNA, 1000 bp, Homo Sapiens
aaaagcactcgatctgggtgatggcagtgggatcagcatgtgtacattagcagcagcaaggtggtggtggtatccacacatgcacatgccagatatataatttgtaagctataaatgtacttaacaccagagacccaaaatatgtgaagaaaagacacataattgaagagagaaatagacaattagatataattcaatactccacattcaatagcgaatagaataactaggcagatcaataacaaaatagaatacatgaataacacaacaacagtataacataatgaaacctactatacacataaagaacactccacacaacaaccgagaatacacattattctcaagtgtatgtggaactttctccaggatatactgtatgataggttataaaacatacctcaagggttttttttaatgatataatacaaaatgctttctcagactacaatgaaagaaagttagaaagtgataataggagaaaattttggaaattcacaattatgtggaaatttataagataattggtcaaagaggaagtcacaatggaagtcagaaaacaccttgggaaaaatgaataccgaatcacaacacactaaaatttgggggatgcagctaaagcagtgcttagagggaaatgtatttgtatctggctatcttaaaggaaataaatatttcaaatcaacactataagttttcaccttataaaattagaaaaagtagagctaaccacatccaaaataaatgaaaggaaatagtgtacattagaacaaaaaatgaaataaagaatagaaaattcaataaagttatcaataaaaccaaaagttacttcttagaaaatataaacctttaattgactgatagagagaaaaacacacatatttgaacaaatagtataacttgattgcagatatatgtatcgctgtatctttggtggtaagttgaggcagtatatgtctgatcactctggatatctgtgtaaaataaaatgctaggtgga

SEQ ID NO: 407783 - DNA, 644 bp, Homo Sapiens
cagaggatgtaaggaaaagcctggatatacaggcagatgtttgctgcaggggtggagccctcatggagaacctctgttagggcagtgcagaagagaaatgtgaggtcagagccttcacacacagtccccactgaggcactgcctagtggagctgtgagaagagagccactattctccagatcccagaatggtagatcaaccaacagcttgcactgtacatctggaaaagctgcagacactcaatgccagcctatgaaagcagcttggaatggggctgtaccctgcaaaggcacaggggcagagctgcccaagaccatgagagtctacttcttccaccagtgtgacctgaatgtgagacatagagtcaaaggagattattttggagctgtaaaattcaatgaataccctgctggattctggacttgcatggggcttttagcccctttgttttgtccaattctcctatatggaatgggaacatcctcatccaatgcctgtaccctcattgtatcttagaagtaattaacttggttttgattttataggccatgctaatcagcattcagttctagattccaatttattctcagtgtgcctgtataacttttctttctatatatatataattaaatttctattactta

SEQ ID NO: 407784 - DNA, 1000 bp, Homo Sapiens
aaaatattagaaaggaataaatcatgtcttgtcaacatgaagaaaaagtgtattttttttgttaacttattattgtgtttccttgtataattttcacttggttttgttggttttactacttgcttcattctttcaaaaactacatcttcatagaccatttcagcttttgctatgtgggcagaattataaaacccaatttcaaaatttcaactgaacgttgtcagcatttttctttgggctttttattgaaaaaaaatcctaattgtgtgtgtgtgtattttagtattaccatgaatgtaataacaataaaataaaacaaaaacaaatggatatgcaatatgttggactagcatctcaaatatgaaaaaggcattgccaacagtgatataattttttttataatggtaagctttttaaagtataatcttattttaacctaaaatcttactatcagaaaatgcagtgtacattaaaatgttctgaaatgctttattcacatttattaaatggttgtactcactcagatatctacaaattggtttttcacttatgtaattatcttatagaatgttcaaaagtcatgcagaatgtgagataattttctattgaatatgattgttttatcattgcaagacatcaaacatccctgtttcctgccaaatgaatgtacaatagcaataaatgtaaagatgtgttttttggaaaagacacatttttgagttataaaacaaggattttaaaacttgaattgttacagtgagtatgtcttaatataggctacagtcactttagataaaaaattacctcacatctattttcaatattacttaaagatgttcatttagtggcaaatatttttttttttgcctagaggcagatattttgccacatggctatttatgaaactgtatttaaatgcatgtacacatataaaagctgccactgtggctgtaaactattacaagttatcaagattaaaaaataaacaaaaaatatttca

SEQ ID NO: 407785 - DNA, 1000 bp, Homo Sapiens; identical to SEQ ID NO: 225007

SEQ ID NO: 407786 - DNA, 1000 bp, Homo Sapiens; identical to SEQ ID NO: 295127

SEQ ID NO: 407787 - DNA, 1000 bp, Homo Sapiens; identical to SEQ ID NO: 119285

SEQ ID NO: 407788 - DNA, 1000 bp, Homo Sapiens; identical to SEQ ID NO: 295129

SEQ ID NO: 407789 - DNA, 1000 bp, Homo Sapiens; identical to SEQ ID NO: 295130

SEQ ID NO: 407790 - DNA, 1000 bp, Homo Sapiens
atacttttgaagagtttcccagggactagtcatggtaatagcatataattgatctgaatgagatggagagaagaatgaagaggtggtggttctgggtttgatttgagttcacctgtgggcagtgggcagtgtcttggtgaaagggagcggatactactttttgcctcactgtaaagtacccactagtaaatatttcattctctctttactcccactttttacgtttgcagatgccaaaataatgtccacttctccctttcatgctgcatgttaactggttaattatactgcagaaaacttttcacctccactagtctgatacagtacatctgtacttccatataccttgcactgattttgtctgaatgccctgggagaagttgaaaatgactgaaagtgacttccgtatctcagcccatgactcagcaaggcagaatggccacccctgccaaggtttgcttctcttttcgacagtgcctcaccctccctctaggattaaagtgcttctgcttttccatgaactcctcctccatttcctttttgggatttgtcaccatccttctattctctggtcttctatttttggtgttgttcaagtgaaggaagagatgttccctctaatttctctctagcccattataacctgctatcttcgggcaacttttgatgtatgacatgtcacccttcccaacttggtctcctccaacatgctgtcttcatgtggagccctcaccacaatccctgactccggtcatttgtgcctttctcttgtcatctctgtacactacttatattcactgtgggttgagggagctaattttaagcatgttcagtggcagctcccctccagtttcagtgtcactgttaaaatttatccaaaagcaacttcactaggggttttcttaaggggtaaaggccttttacagaagctaaacccttccccacatgtggtagaatgtgctcttctgtatctactcctcaataaagcatgttctctgct

SEQ ID NO: 407791 - DNA, 1000 bp, Homo Sapiens
gagggctggagtgcactggagcaatcctggctggccaatactgagttcttgaaaacaggagatgcttgatgaggatgggatcatctagttgcaggaaaacaaggctcagggtgcctactgattctacattatgcttggtccggagagctgccttggactctccaatgcagctgcctctgttaccttgactcgtctcagatttcattgacccaagatgggtcctggcactaggaatgtaagactgtctccattcttttggcttgttccagagaagcccatgcaaggttcctactgaccatatgtttctttcttttcttttgttttttgagacggagtttcgctgttgttgcccaggctggagtgcaatggcgcgatctccgctcactgcaacatccgcctcccggactcaagcgattctcctgcctcagcctcccgagtagctgggattacaggcatgcgccaccacgcccggctaattttgtatttctagtagagttagagtttctccatattggtcaggctggtttcgaactcctggcctcaggtgatctgccctccttggcctcccaaagcgctgggattataggcgtgagccaccgcccccggccttgaccatatgttttatttctagctttgatgtctgggcatcgatttccctcggttaaactatttgctcaatgttaaggccactctgtagaaatttgtctgtgtaactgaggtgctatgcaggcctgcctgtgtgactgtcatgcaggcctgtctgtgtgattgtcagggagaattggtctgccacaatccttttctaagcatagccaatagaggtagttaggcataatttgtatattacagaaattgccttacagagagtaacacatttctatactctccttccataacagacacttaaaaaaacaaaaaaagtaatgtatgcttgctgtggacctcatttaagattgcaacagaagcacttttcaatactattaaacagctttttactttc

SEQ ID NO: 407792 - DNA, 1000 bp, Homo Sapiens; identical to SEQ ID NO: 295131

SEQ ID NO: 407793 - DNA, 1000 bp, Homo Sapiens
aaacaactggttccagaacaatagagccagacttccaccggaagaaagacaaagaatatttcttacttggaaaaaacacgatttcccagtccaagcctgtccatttttaagcctccaggaaacccaggctgcagcttccaactatgccacagagcagagtttttcctgtgccaagagggctctgatgagaagacctggttgctcccttctggagaaacagaggattgcctgtcaacagatgggctacaattgcttctctttggagaaccaagagactcccagtcaacaggtgggctccatgtgctcttctctggagaaacaagggattcccagtcaacaggtgggttcccagtgctcctatctggtcgcaggtactgaaaagcatccaggctatgctttggagtatggaggtgacacaggaagtgagcattctactgcctatcgttttctcagctacaactctgcagaatgccttcatcctcccccatcttctgtgccatattttcatggagaaaggactgaaaccagggaaagccagcatgcaagtcccttccttttggattacgctcaaggtgcttacggggtgaagaaagaccattgtctttgctcattctgtctctcactgctgcaagaacagcagcagaatgattggcagtatcacccacagcagcaccaacagcctcagaattactcagaggggatgatgttgcaggaacagctgccaatggactcgggtccttgggatctagagaagcagtggccctcggctcagtcacagctgcagagtcaactgcctcagaataatggaaagccgttgtgctctcaactgcagcacgtgcctccccaaatagctgccaactcacccctgctgcctctggggcaagatatgcaggtaggggcttcaagcaactcaggactcaaatgcagcagttttaggttgaggggtctacacgggcctgccacaggaacccaaggatgcagctttgcaaagtattgctaa

SEQ ID NO: 407794 - DNA, 1000 bp, Homo Sapiens
gaattggttccagaataaaagagccagacttccacctgcagaaagacgcagaatatttgttcttcagaaaaagcatgattttccagtccaagcccattcatttttaagctgccaggagacccaggctgcagctcacaactatgccaccaagcagagcctctctggtgcccagagggctctgatgagaagagctggttgctcccatctggagaaacagtggattcccagtcaagaaatgggctataattgtttctctttggagaaccaagagactcccagtcaacaggtgggcccccagtgctcttatctggagaaaccagggattcccagtcaacaggtgggttcccagtgctcctatctggagaaactagggattcccagtcaacaggtggcctcccagagttcctatctggtcacaggcactgaaaagcatccaggctgtgctatggggtatggaggtgacacaggaagtgggcattctggaagtgggcattctactgcctatcattttctcagctacaactctgcagaatgccttcatcctcccccatcttctgtgccatattttcatggagaaaggactgaaaccaaggaaagccagcatgcaagtcctttccttttggattacgctcaaggtgcatatggggtgaagaaagaccattgtctttgctcattctgtctctcactgctgggacaacagcagcagaatgattggcagtatcacctgcagcagcaccaacagcctcagaattacttagaggggatgatgttgcaggaacagctcccaatggactcgggtccttgggatctagggaagcagtggtcctcggctcagtcacagctgcagagtcaactgcctcagaataatggaaagccgttgtgctctcaactgcagcacatgtctctccaaatagctgccgactcaccccttctgcctctggggcaagatatgcaggaaagggcttcagagcaacccaggacccaaatgcagcaactttaa

SEQ ID NO: 407795 - DNA, 1000 bp, Homo Sapiens; identical to SEQ ID NO: 295132

SEQ ID NO: 407796 - DNA, 1000 bp, Homo Sapiens; identical to SEQ ID NO: 119286

SEQ ID NO: 407797 - DNA, 1000 bp, Homo Sapiens; identical to SEQ ID NO: 225008

SEQ ID NO: 407798 - DNA, 768 bp, Homo Sapiens
atggcagtaggagactgctcagaaaatggagagcggcgcccaccttgcagtgcgcaggcgtcgtcagtagacatcgcgcaggcgtcgtcagtagacatcgcgcaggcgtcgtcagtagacatcgcgcaggcgtcgtcagtagacatcgcgcaggcgtcgtcagtagacatcgcgcaggcgtcgtcagtagacatcgcgcaggcgtcgtcagtagacatcgcgcaggcgtcgtcagtagacatcgcgcaggcgtcgtcagtagacatcgcgcaggcgtcgtcagtagacatcgcgcaggcgtcgtcagtagacatcgcgcaggcgtcgtcagtagacatcgcgcaggcgtcgtcagtagacatcgcgcaggcgtcgtcagtagacatcgcgcaggcgatggagttcatggctggggctgctcgttgggtgggacaagaatcctctgcaatggtttgttttggctgcccaggaggtgcgtcaagtcgctgccgctcccctcgtgggcgtcaggcctcaagagttccccgcctagaaaatggagctcagcgagtcgtgcgtaccatggtgcacctggttttgcagcctaagcgggtcactttagtgcatcctcctcgcggattggagcctgtttgcacccctatagcccgaatgagacccaagtcacacgggctcagaagttctttgcccctggccatgatcccccagccagccacccgagtttccaggcctcaggcgctttggaaacgcctgtacgtcgcctgtacctga

SEQ ID NO: 407799 - DNA, 1000 bp, Homo Sapiens
cagtagacatttgtggcaagttgtaattaccaaaagtaaaccatcaattgagaagggagtggaatcaggaaaaacatgtagtttgacttcaaaccatgtaccagaactgattagaaataatggaaactattcaggaaagagatctgaggagtttaattgttttgaatatagtggacggaggaatgccttcaacgtggaggctatattaacacataagagtgcttctatgggaaagacctcttgtaaatctaataaatgtgggaaagcctgtaatgagtcagctactattgctcaagagctaactcaggtagggaggaaaacttttgaacgtcatgtatgtgggaaaatattcagtaagaagcataaagtcactgaacataagaaaatacactcaggaaagaaaccttataaatatagtgaatatgagaaagccttcattagccaatcatgtgttacaaaacatcagagaacacatacagaagagaaaccctatccatgtgccatatgtgagaaatccttctgtcagaaatcaaatctaagcgtttatcagagaatccacacagagggaaaatcctattttgctaaaaacattttggcagcatcaaccctcactatccatcaaagaactcacacaggtaagaagccatttgaatgtaaataatgcaagaaaccctatgaatgtaacgaatgtgggaaaacctatgagaaaggaatcctcactagccatcagagaaatcacacgggggaaaaaccctatgaatgtaatcaatgtggaaaaccctttggctggaagtcaagccttaggtcgcatcagagtattcacagagggcagaaaacctatggatgtaatgtatgtagtaaaagcttccaccagaagtcagacctcactaaacatgaaagaattcacactggggaaaatccctatgaatgtaatgagtgtggaaaatcctttggctggaagtcaaggctcagccaacatcagagatctcacatagggtag

SEQ ID NO: 407800 - DNA, 1000 bp, Homo Sapiens
ggtgtcgctgcacctgcagcactgcggcatcgcggagctggaagcgggcgccctggccgggctgggccgcctgatctacctgtacctctccgacaaccagctcgcaggcctcagcgctgctgcccttgaaggggctccccgcctcggctacctgtacctagaacgcaaccgtttcctgcaggtgccaggggctgccctgcgcgccctgcccagcctcttctccctgcacctgcaggacaacgctgtggaccgcctggcacctggggacctggggagaacacgggccttgcgctgggtctacctgagtggaaaccgcatcaccgaagtgtcccttggggcgctgggcccagctcgggagctggagaagctgcacctggacaggaatcagctgcgagaggtgcccactggggccttggaggggctgcctgccctcctggagctgcagctctcgggcaacccactcagggccttgcgtgacggagccttccagcctgtgggcaggtcgctgcagcacctcttcctgaacagcagtggcctggagcagatttgtcctggggccttttcaggcctggggcccgggctccagagcctgcacctgcagaagaaccagcttcgggccctgcctgccctgcccagtctcagccagctggagctcatcgacctcagcagcaatcccttccactgtgactgccagctgcttccgctgcacaggtggcttactgggctgaacctgcgggtgggggccacctgcgccacccctcccaatgcccgtggccagagggtgaaggctgcagctgctgtctttgaagactgcccgggctgggctgccagaaaggccaagcggacaccagcctccaggcccagtgccaggagaacccccatcaaaggaagacagtgtggagcagataaggaaatgggagtcagtcctcacaaacacagaaagcagctcaaggccaccacacaggtcgccaaaatccacatcctggtcactgcttcttag

SEQ ID NO: 407801 - DNA, 1000 bp, Homo Sapiens
caggaacatgaggccgcctgtgtcagccatcaggggcaaggcagaggctccggagaacagagatgcaggagacagcaggctgaagcaagctcagagcacggccacttccacccatttgcctctgggccaaggcaaggactgggacacatattctgctcccacgagcaaggcaagccatgatgtgcgcactgtgcagagaagcgagggactggagctcagaaaggaggcgctttggacaaaacccctgaaaacgtggctcggagcaggcagaagcccccgtggagctgccaggaccctgcagagccggccactggaacagttctccccccgacgccgattgccatcaagatgggaaagcatgcagccatcccatgggaaatcagccatggttctcaagctctgtccccagcggaacacgtgtgctctgaccttagaatggactagtggagagtggaaagggcagcaggttcgtagtcagaaagacccagggctgcaggtccgtagtcagaaagacccagggctgcaggtccgtagtcagaaagacccagggctgcaggtccgtagtcagaaagacccagggctgcaggtccgtagtcagaaagacccagggctgcaggtccgtagtcagaaagacccagggctgcaggtccgtagtcagaaagacccagggctgcaggtccgtagtcagaaagacccagggctgcagagcctttcagagatgcacctgccaggccccgccaaccagtcttggagctgtgcagggcaagtgctctttggctatgactctaattacagcccctcagatacagcgaagaatgacaggtatggcggcccctgggtagcagaacatcatgaggaaaccacagcctgtggcgtcctcctgcacttcatgaaaaggctcacggggctccaggtggagctccttccaaagcccagcacaggcaatcacagcagggcgggggtagagcaggcaccggcagaaacagtctactacagctga

SEQ ID NO: 407802 - DNA, 1000 bp, Homo Sapiens
agccctagaaaggaggttggggtgtatgggtagtgagctagggtgggagaaaggtggtgctgaaaggacagatgctagttgtagtttcactcactcattcattcattagtgcaacagtactgagcaccacctgcactagaggcagaggggtgaacaagatacccttctgcctggggggacgtccacttcccatgggtttggctatttccaggaaagcccctcagtcctccaccctgttctggctgtgtgtgaaggatgtgtgtgagcaggcccaatcctttgcagcaagaatgagaggtcagagtattccattgcacacgcaccctggggctgacagacttgtgccccctagccttcatgcatgcccaagcactggcagctttgcagcccctgccccaccagccccttgacgctcttcttttgttctctcctcggggatgagctctgctgctgagtagggagcttttgcttgctgggaggctctatgcatggatttttttggtgaccatacagctagggctgaggatgggaacagggacagagggcctggctatccctagaagcacttcatccatctttacccacccaaacgggatcccttcacatctcatacccagtaagatgcaagaaaggaatatctgagagcaagcagccctgctccaggggccccaggtatgtgtagaggcccagtgggggtggccacttggtgtttctaccaccccctgccatccagtctggccccagtacctacctgggaggttggtgtacttggcttaagtacttcatgctttattcaggctgcttccccacagcaccggcaggaaatgaaggtgcacttatatgcatccctgcaggaataaagagtgggtggcctgcccagcccagcaccacagcctttccccagccaggagagaccacctaaggatcaaggcagctcctgttttcttggttctgtgacactcgagtctgagccagcccctcaggaattgcctcaaaagag

SEQ ID NO: 407803 - DNA, 1000 bp, Homo Sapiens
ggggtggggaggaggagtgcaactgtgacgaggtgtgaagaaagggcccagaggaactgtgaaccccgaggaaaggagtctccctgggctaaggcctctggaataccggcacggagaaacactcgtttcccgccctggatgttcacttttccatctcggtggaagtgggtgggagagacagaaaggatgcagccgagaccgggcgcaggcggggaggctggagcatcctctaagggcacttcgcagcagcaccaactccagggggtcggtggtgccagccggaggagggagggggcgcagtcggagggaaaggaagtgagaggagcagggggccgacgggtggatccccaggcattagtgacgcagtcttcaaatcgcttcttttcctccccacggctgcgctctgcccctggctacctagatcaccagtccctgggctggggcgggccgccgcgagggaggcgaacaggagagggggaaacagacgggcaggcggccacgcatcccacccggggaggcagaaaagggctggcgaggcaggcgcccccgacccaccccacccccacggcggccggccgcccggagcacccggcccagccggtactaaaggctgaagatggaatcgtggatgctgccaattttgagcagtttttgcaagaaaggatcaaagtgaacggaaaagctgggaaccttggcgaaggggtggtgaccgtcaaaaggagcaagagcaagatcaccgtgacatccaaggtgcatttttccaaaaggtatttgaaatatctcaccaaaaaatatttgaagaagaataatcttcgtgattggttgtgcatagttgctaacagcaaagagagttacaaattacgttccttccaaattaaccaggacgaagaagaggaggaagacgaggattaaatttcgtttgtctggaatattttgtatgagttcttgaataaaacttgggaaccaaaacaaaaaaaaaaaaaaaaaaaaaaaaaaaaga

SEQ ID NO: 407804 - DNA, 1000 bp, Homo Sapiens; identical to SEQ ID NO: 225010

SEQ ID NO: 407805 - DNA, 996 bp, Homo Sapiens; identical to SEQ ID NO: 295138

SEQ ID NO: 407806 - DNA, 765 bp, Homo Sapiens
atggcagaagaaactcgacaaagcaaattggccatagccaaggaaaagttaaaagaatattggcagagaaacagccttggtgttccagcaggagtgaagaggaacaggaaaacgagtggcagtagccctgaaacagccacttctggtggttgccactcacctgaggattcagcaacaggtatccacggggagggccctacatcatctgctaccctgaaggatctggagagcccatgccaagaactagcagtagtcctggacccgaggtccataaaaatcagtcaactgaataacaccatcaaatctttgagcagttcagaggaccatcagctaccatacccactaaacgaaaatggcaaaaggacttctcagatcatcttcctccacttctcagcccacatgtctaacgtggctgggaccagctcagagtgtttcaaatgtgtaggtgctcggagagagagagacccaaccctcttagactcagcagaaagggtgaacggacccgtcctgcccgactcctctaggccaggaaggcaggacccggcgagctgccggatgagggagccgttgatggagtcgcctgggccgctgtttcgcctcagatctgaccagaacttcctaaggcacagaaagtaccaaagaaccacacacaagcaccccagagcgaagaaaccagtcacgcgccacgaccttcagccagtgtccatgggacccgacccgcctgtgaggagtgcctgtccacccctcaatcagaggaagccttga

SEQ ID NO: 407807 - DNA, 1000 bp, Homo Sapiens
ggagccagtgcccaatgaccgctatcacgccatctactttgcgatgctgctgtctggcgtgggcttcctgctgccatacaacagcttcatcacggacgtggactacctgcatcacaagtacccagggacttccattgtgtttgacatgagcctcacctacatcttggtggcgctggcagccgtgctcctgaacaacgtcctggtggagagactgaccctgcacaccaggatcaccgcaagctacctcttagccttgggccctctcctttttatcagcatctgtgacgtgtggctgcagctcttctctcgggaccaggcctacgccatcaacctggctgctgtgggcaccgtggccttcggctgcacaggtagtgagcacaagggcccaattcaggtccagatcggggtgctgacaaggactgtgtttggggctgctcccatgcagacacagccccatggacaggccctgataggtgcacagaggaagatgggggaaagtgtaaaccttgtggcagctcgccggcgcatgcgcgctccaggaagacccagcagccccacctcgagttccaattggctgcgcgtggcggtcggtccgataggcgcgccttcggcaacgtcatacacgctggccttccgcgacgccacagacgcgcgctttcagcgacgtcacaggggcgatatagtacctggagctggtcagtctcctcagagtcgagcctggggcattagcagtatggtcaggtgctgcatccacaagcccacgagccaggagcatgctgtgaaggtcatcgacgtcaccagtggaagcagcttcacccccgaggaggtgcaggagctgcaagaagccacactgaaggaggttgacatcctgcacaaggtctcagggcacctcaacatcagtgaagccacccagagttcccttgctgaggatctgagcatgacccgggatgaggcactgccggactctcattccgcacaggacttccatgacaattattag

SEQ ID NO: 407808 - DNA, 1000 bp, Homo Sapiens
gaaggcgctccccagtgacgacagagagccacgcccctcatgtggaaccaatcggaactcgaggagcggctgccgggtcgtccagaagcgcgcatgcgcagacgcgtggccacagccggccggtcagtgttcgcaggctccgacccggcggccaacaccagtaagctacaaggaggagctttcccactgcctgtgctactactaccggcgcgacttcccagcctgcagcgtagggcgcagcaagggcctgacgctgagcgagcaggcgctgcacaccaagcggttgtcgcctggcgggcacaaacagaaggtcgggcagaagctccttaatggccactgcaagccggctagctccggctgcagccgttgccgcacactcgcctcacctgaggctgggtcagacaagggcagcatgtgtgaagactgcgggccagacccgtcaccaacctctgaggaaatgacagactcaatggctgggcacctgccatcggaggattctgattgtgggatggagatgctgacagacaaaggcctgagtgaggacccacggcctgaggagaggcccgtggaggacagtcaaggtgacgtgatccggcccctgtggaagcaggtggagctgctcttcaacacaagatacgccaaggccattggcatcttggaaccagtcaagatgccgtactccaagtttctgatgcacccggaggagctgtttgtggtggggttgtctgaaggcatctccctccgcaggcccaactgcttcgggatcgccaagctctggaagattctggaggccagcaacagcatccagtttgtcatcaagaggcctgagctgctcactgagggagtcaaagagcccatcattgacagtcaaggaactgcctcctcacttggtttctctccccctgccctgcccccagagagggattccagggaccctctggtgggcgagagcctgaagagacagggctttcaaggcccagtgcctgctccttctcactga

SEQ ID NO: 407809 - DNA, 1000 bp, Homo Sapiens
ggacaggagtcaccaggtagacatcaggccccagatggagctaccaggccaggcctcaccagtgatcccaccagggccacatctgcacattgtccttgtccagctggagcctctggagctcattgagacacaggcacatgctcctgcttcaggtgcagaaacacagctatttccagtgccagctgttgagccagtgccagcaccaggggcagagccccttccagggacagcgctggagctagaggaacctccagagccttcctgccgctgccctgggactgcacaggaccagcccagtgagaagctgcctgacttcatggcacctcctgtagagccaccggcctcagccctggagctgaaagaggtgggctactacagggacatgagctgcctaactgccatcctcctcctgtatctgccagaggaagacaacttctgggcactggatcagcggatggctgaggagaggcactccctgcaggttttccacgtagaaatccagggctccatgcagcatttgctggacatgaggggaaaacttttagggcaggcatctgccctgggtggggacagaggagtatcctggagtctgagtgtcaggagttcaacatccctgggttcatccacacctgtgttttctatgagttctccaatatcaaggagatttaacagtttgtttggtaaaacaggcttccgcatgtcacccagaatgcagctctattctccaaacagcaaacgatcctttccatcttccaggggctccctcacagctgtcctatcccaagcattcccgacaggaatctccagctgggttggagtgacagctggcttccagcaccgcagctccgcaacccctgctggcgtctcccgaggctcgcgcgcccctggtgggcgtgagaagaggcgtccccgcggcggtccggcctcaggaagcccgtgggaggcagagtcagtcccgcggatgacgcgcccagtgggctacgttcaggaagtcatttga

SEQ ID NO: 407810 - DNA, 1000 bp, Homo Sapiens; identical to SEQ ID NO: 225012

SEQ ID NO: 407811 - DNA, 911 bp, Homo Sapiens
cccggccccgagggcaggctctccccggaggctcagccccctctgctccccatgggcaactgccaggcagggcacaacctgcacctgtgtctggcccaccacccacctctggtctgtgccactttgatcctgctgctccttggcctctctggcctgggccttggcagcttcctcctcacccacaggactggcctgcgcagccctgacatcccccaggactgggtctcttttttgagatcttttggccagctgaccctgtgtcccaggaatgggacagtcacagggaagtggcgagggtctcacgtcgtgggcttgctgaccaccttgaacttcggagacggtccagacaggaacaagacccggacattccaggccacagtcctgggaagtcagatgggattgaaaggatcttctgcaggacaactggtccttatcacagccagggtgaccacagaaaggactgcaggaacctgcctatattttagtgctgttccaggaatcctaccctccagccagccacccatatcctgctcagaggagggggctggaaatgccaccctgagccctagaatgggtgaggaatgtgttagtgtctggagccatgaaggccttgtgctgaccaagctgctcacctcggaggagctggctctgtgtggctccaggctgctggtcttgggctccttcctgcttctcttctgtggccttctctgctgtgtcactgctatgtgcttccacccgcgccgggagtcccactggtctagaacccggctctgagggcactggcctagttcccgacttgtttctcaggtgtgaatcaacttcttgggccttggctctgagttggaaaaggttttagaaaaagtgaagagctggaatgtgggggaaaataaaaagcttttttgcccagtggc

SEQ ID NO: 407812 - DNA, 1000 bp, Homo Sapiens; identical to SEQ ID NO: 295142

SEQ ID NO: 407813 - DNA, 1000 bp, Homo Sapiens; identical to SEQ ID NO: 295143

SEQ ID NO: 407814 - DNA, 1000 bp, Homo Sapiens
tgggttatgctttcatccctgcagcccctggtctgcccccctgtcctcagaaacagctcagtcctttcggtgaaatcggtgaaatcggtggttctcatcttctgtttcttgaacacacgtcttgttcccacccatcggttatggttggagaagcatttcaagaaaacacctgttagggctttttgtgtgtgttaagccgctgtgctggtgtgctttagaatcatccggaaggtttgttaaaaccagagtgctgggtctcttccctggagtttctgagtgtgcaggtgtggaatagagctcaagatctgcgtttctaacatgttctgagctgctggtcccagtactacgctcagccaaccagccctccagacttatatgcaatgagccctgtggctttacacggtatcttgatgaagaaaatgttatgtaaatcatgctctaaaacaacgattggatttcagtgcaattacagaaaaccttttcatcaagatgtctatgaatgaaatactgattttaacaggctgcccattttcaacagcataaaatcacgcattcaaaaccatgatgagccccttaaattttaggattgagtttcacttcctcactgacattttgtgaaaaataacacccgcaagaggcctaaacagggcgatcggaaccaagaaaacttaaggaagtatttgcacgttttgatgtgtttatttatttgggatgcgcggaggctctgaatggagaaagtcgtcgatgcctgcactggtcttggcctgttctttatgttccgcgcggtgacagctttaagatgaaggaggaacataaagggtttcatcacaggaaatagaactattgctttattcaaacatttaaaaaataaatacaataaatcagggatttttcccctttccgagtattaaatacagatgtactgtatgcatatgaaatttttgattaaaatgtctttcaccagtctgtctctttaattaaataaagcctgtttggtatt

SEQ ID NO: 407815 - DNA, 1000 bp, Homo Sapiens; identical to SEQ ID NO: 295144

SEQ ID NO: 407816 - DNA, 1000 bp, Homo Sapiens; identical to SEQ ID NO: 295145

SEQ ID NO: 407817 - DNA, 1000 bp, Homo Sapiens
tgggtgccacctggactccactctcccctctctctgggatcatagagtccaaggtgttctgtggcctctcggccaatcccagcagctcagcgtgcagaagaccgaggagccattggaattcaacacaacacgaaataatcaacaaattcggggaatgttaatctgaccatcaccagttacaaatgatgtttcatgctaccttctattcctgccttcataaatcaaggaaaagaaaaagagaacatatatccccctaccttttgatttccaacagtctactgagaggccaagattatttgcagggaaagaaaaggggaatgccatccccaccctctcgcagctacgtgccagttccagagcacctgttcccctctactttgaaaaggtcaaaatgttttgccagtaactcccaaatcatctacagccaaggagaaaagtgtttcaagacagaggtgctcaatggtatcaaatactgccaacagaccaagtaatacatgcattgaagtgtctactggatctagctatatgaatttttaatttaggacacttaggccatactgaagcaaggtgacaaaatgaatagctacaatgtctcgtgaatcttgggtttccattcaccctggtattcaagagaaattcttgcatcatggaagttgcagttggataggactttctcagctgaacactgtcatctgccagagcttcaggcaagaacccagaacagatgaaaccccagacatgacaaaataagccaaagaataccaggccaaggtgtgaaaggccagatgagaacaagcagcgtacacgattctgttgccaacagatctcccctaacagtgtcgtgcaccaaatttccacagtgaatgtcaggaaaaaatggcaattgaggtgggtggtcaaaagagaagcacagtctatgatgaagtcaccccagagaagtcctttttccgttttctcctgagaaattaccagaagaaattaaaatccttttgagtattgc

SEQ ID NO: 407818 - DNA, 1000 bp, Homo Sapiens; identical to SEQ ID NO: 295146

SEQ ID NO: 407819 - DNA, 902 bp, Homo Sapiens
gtgactgaaatcatgactgaccgagtcagtggctagaaaaggggctttgcctttgtaacttttgatgaccatgactccgtcgataagattgtcattcagaaataccatactgtgaatgaccacaactgtgaagttaggaaagccctgtcaaagcaagagatggctagtgcttcatccagccaaagaggtcgaagtggttctggaaactttggtggtggtcgtggaggtggtttcagtgggaatgacaactttggtattggaggaaacttcagtggtcttggtggctttggtggcagtcgtggtggtggtggatatggtggcagtggggatggctgtaatggatttggtaatgatggaagcaattttggaggtggtggaagctacaatgattttggcaattacaacaatgagtcttcaaattttggacccatgaagggaggaaattttggaggcagaagctctggcccctgtggcaatggaggcctatactttgcaaaaccatgaaaccaaggtggctattggcggttccagcagcagcagtagctatggcagtggcagattttaattaggaaacaaagcttagcaggagaggagagccagagaaatgacagggaatctacaggttacgacagatttgtgaactcagccaagcacagtggtggcagggcctagctgctacaaagaagacatgttttagacaaatactcatgtgtatgggcaaaaaactcgaggactgtatttgtgactaactgtataacaggttattttagtttctgttctgtgggaagtgtaaagcattccagctaagggttttaatataggttttttttttgcacccatgctgttgattgctaaatgtaatagtctgatcatgacgctgaataaatgtcttttttttaaaa

SEQ ID NO: 407820 - DNA, 1000 bp, Homo Sapiens; identical to SEQ ID NO: 295147

SEQ ID NO: 407821 - DNA, 1000 bp, Homo Sapiens; identical to SEQ ID NO: 295148

SEQ ID NO: 407822 - DNA, 1000 bp, Homo Sapiens; identical to SEQ ID NO: 295149

SEQ ID NO: 407823 - DNA, 1000 bp, Homo Sapiens; identical to SEQ ID NO: 295150

SEQ ID NO: 407824 - DNA, 1000 bp, Homo Sapiens; identical to SEQ ID NO: 295151

SEQ ID NO: 407825 - DNA, 1000 bp, Homo Sapiens; identical to SEQ ID NO: 295152

SEQ ID NO: 407826 - DNA, 1000 bp, Homo Sapiens
ctgcctcccaggttcaagcaattctcctgcctcagcctcccaagtagctgggattacacgcatgcgccaccatgcctggctacttttgtatttttaatagagacagggtttcttcatgttggtcaagctggtcatgaactcccaacctcaagtgatccgcccacctcggcctcccaaagtgctgggattacaggcatgagccaccgtgcccagcccttaaatctcatttttaagaaaccctcacctattctgtagtcagctaagcttttaattacattaattttaagcacttgagaataaaatgactgcatttatcatccaagtgtcaaacaattaaaaacctaaaaatggtaactatatataagctgaggtaatatgggcttgataaagcccatgaggtaaatatgaacactaaacttggttttaattctaacagactatatctaaacctgtaagcagtatactcctaacagtaccctcataaattctgaatataattcttgtttgctgcagtcaatatttggcagtttaaattagcacagacgttgaggccttgctgagttattaggctatgtaaaagaggttaaaaatatgatcattctttattgttaattggtaatattttctcatacattaggtaaatgtcaagctttgggtctctggagtataactttttgtaacattagccattatttggtaacagaatttaaggatgatggaatgatggaaggtattacatatttctaaaacttaattaagctctaggtcagataacaatggagtaaagtgatacctgcatttttttccccagtgtaatcttaatttactattgtatttttcacttaaaattttgtagggaaaaaaagttttcaagggaacactaagattaaattgactaggttcaaatatgcttccttatgagattcaaaatttactgtgtgaaattaaagtttaagagacctaaaaaaatgtactcccaataaagaatcaatactgcttc

SEQ ID NO: 407827 - DNA, 1000 bp, Homo Sapiens; identical to SEQ ID NO: 119287

SEQ ID NO: 407828 - DNA, 1000 bp, Homo Sapiens
atgatcaaacaattatttatgttgacagcccacatctccctttccgtagtttccatctgaagacttagctctacccttctggtgcagaacaggaaagcctaatctgtcttccctgagattcaagaaattcaagaggctgctcctcctggggcctctgtcggtatcctccttgttgctcctagttaaactcttattcctcaggtaagatggtgctgagtctactcaccatcggactgtggtgtctagtattggacaccacatccctgatgtgccctgacacctcagtgctctcccacatagaacctagtgggcactgtgtccccgcatctatctgaagaactgctcaagaggctttgtgggaggtctagctcctcctcaccccctccaggcttgacatgcctccacccccaccaccccgtacccttcgcagcatacttccagtcaggcagcaatcagcttgcacctgagagggatcagctgtggtgactgaggctggcttgctcttgcagccccaggaacacagagattcgtgctgaagaaccaaatggtttctacagtacaagcaggcgccagggactccgcaggaggcatcactggcaccttctaattgatgagcagtccagctctgaagctgtgggctctaaagccagatacctcctccaggtgactctgatcttcctctcccagctgaatagagtgaacttcagcgtttctggcctccagttcctgaactctgcttcttccaaggcagttttagcttaggcatcgccttctccgggaagctcttcctgacccccattgctacccacagtgagtcacttgctctctgttcctcacttccacgatgtttcctcctgtctccatcattctactcattagcccaggtggcaattatttgttgtggtgtttgttgtagacaaagacagtcttgtttttttggttttggcattttgctactaaatgtgtttttgataaatgaataaatataataacaccacaa

SEQ ID NO: 407829 - DNA, 1000 bp, Homo Sapiens; identical to SEQ ID NO: 119288

SEQ ID NO: 407830 - DNA, 1000 bp, Homo Sapiens; identical to SEQ ID NO: 295155

SEQ ID NO: 407831 - DNA, 1000 bp, Homo Sapiens; identical to SEQ ID NO: 225013

SEQ ID NO: 407832 - DNA, 1000 bp, Homo Sapiens
ggacaaggaaaacttttatttccttctcatctggcctggactgagccagctcttccttacctgctgccccaaacagggaggccagcatagccagagagggggccagcgtgtgtctgatcccaggggcaatattaaagtttgcctcagtccagggcgcccatctgaaaaatcagggcaaaaacaggactaagaacaaaggagaaaaaggctaagagcaagggaccacacaggaactgagaaatgatttctcagctaagcgtctggcctttggagatgcctccctgcccatctgtgtggctggggtcagagaacccccaccaggagggtgagggggagtgaagaagggtgaagaagagacctggggctcttcccggagagtgtgcgtgagagccaggggctggctgagaggccactggcttccagatgtcccagcctccatcaggccagacctactcctgcaggccagggttgcaaccccatcaacatgatatagggagcccgagggaagcaggacaaactctgcctgatgttccttccctccatcagccatcaatcccccagtacaatgagacggtcctctcagctgtgcccagccacagaaacagcctctgtgccttgggaaaaaatgatgttggcgggctacaccccattcacactcatgaatccactccagaagtctgaagactttttccccaggacatctagcacaatgttgaaaagtatggcccagaccctatcagaataatcccagcccatcatagcaaaattggtgaaaacaaaaaaaagggaaaaatgacaaaacagccagaggaaaaagacatctattttcaaaagattaataataaggcaaatggctgacttttcaacagaagcaatagaaaccaaagacaatagagtgacatattgaaattgctgaaagaaaattactgccaatctagggttctgtatctagagaaaatatctttcaaaaatgaaaacaaaataaatatgtttttggatg

SEQ ID NO: 407833 - DNA, 1000 bp, Homo Sapiens; identical to SEQ ID NO: 295158

SEQ ID NO: 407834 - DNA, 1000 bp, Homo Sapiens; identical to SEQ ID NO: 295159

SEQ ID NO: 407835 - DNA, 1000 bp, Homo Sapiens; identical to SEQ ID NO: 119289

SEQ ID NO: 407836 - DNA, 1000 bp, Homo Sapiens; identical to SEQ ID NO: 295161

SEQ ID NO: 407837 - DNA, 1000 bp, Homo Sapiens; identical to SEQ ID NO: 225014

SEQ ID NO: 407838 - DNA, 1000 bp, Homo Sapiens; identical to SEQ ID NO: 295162

SEQ ID NO: 407839 - DNA, 988 bp, Homo Sapiens
atggtgcagcaggcgggcaccagtgtgcggctggcaggcacggctgagaatgcagtcctgggcatattccacatccacagttctcagtggacacagggtctgatgcccgaggctccaagccgtgctccagtccacattaaactccccttgctcgcccaggcatctctcagtgcccgagtccccatctctggagctccttcagaactagtgtctgcgccacgcattggatgcttggcacatgcgtccttccaccagggcgcccaaggtctcccaagtccggccacgcccggtggccttgaggccggaaggtggcgctgttgctttagccatcaagaaaggcaaggctggggacgccgcatccccgggtgcggagggcgatgcctaggggcgatgctgtgcctgtggcggccaaacagtgccacccactccgggaaacaaagccaagcgccggacgctagcttcctaggtcttccacgtgttcaacggaaattcacaaattctctagtagcagaagccaagaacaagttctctggatcacataggctcctctgctgcttcctcagaaacagagatggtacttggtgccgaagaaagagacagagactgggaaggagaaggaagtcagcagaaagaagaaagacgcacaggaaagagagaagggtagctaaaagaaagagtcagggagatggttccaggagaagaaaagaaagtcagttgctttctgagatcaggtgggaagtttatcctgtcaactccacctttagagtgctagtctctggagccacaaggactgaaactctgcttcagagacccaccactgatgacaaccatcaggctcaggaactgaaaagaaatggtgcaaatgtggccgagggacttgggttttacatttattgccgagtctggttttcttgagtttcagatgataaaattgaagcccagagaagcttgggagcctcaactattaatggaaaaaccataactagaa

SEQ ID NO: 407840 - DNA, 1000 bp, Homo Sapiens; identical to SEQ ID NO: 119290

SEQ ID NO: 407841 - DNA, 1000 bp, Homo Sapiens; identical to SEQ ID NO: 295163

SEQ ID NO: 407842 - DNA, 1000 bp, Homo Sapiens; identical to SEQ ID NO: 295164

SEQ ID NO: 407843 - DNA, 1000 bp, Homo Sapiens; identical to SEQ ID NO: 295166

SEQ ID NO: 407844 - DNA, 1000 bp, Homo Sapiens; identical to SEQ ID NO: 119293

SEQ ID NO: 407845 - DNA, 1000 bp, Homo Sapiens
actgcggggtccaggggcgatgaatgctcccgcaacctccggagcttgtgcgcgtacttcagggaccggcaccacgtcaccgtcacctcctgagtagtgagttcccctctgatgaaaccactggtgtgtttactcaccatccccaccatttttttttccccaacctgatggaaggaagtacataatggagagcaagtttttaaagcacggtcgtgtcgtgtgaacttgctctagccaaattaggtttatagcactttttttggctctcattacctccagtccccacataaacaagagtgaccagctgggtcatccgcaagaccgtttgaaattattgtggcttgggtggaaacttaaaggagtgaagtatctgctttccagaaaaatcgttgtcattcaaagtgaaattaaacttgttttctttgcaataattcgcctttatttccttgtatatctgtaaactcttcacttttttgtaattactagacaattcggacttaaaaagagcctcagcatgtgtattttggaattgtgtagcttcataatgtgaaaattattcttttctatttgagtaaagtacagttaatttgaagtaaataaaatttctatttccattggttgtttcttttaaaaagtcaccttttacttacaaaagaatcactgtaatccagtttacatttatcattgaaggtcaaaagcaagaaataggaagaaacacaagcatactataaaataaaaggtaactgtcatgtttttgaaggtaaggtgttttgacatatcagcagacattgtgtgaatttatttcaactcctagtggtactggtgtaggtagaaaatgttttgcttggttattcatttcatcaaacactctacttcactgtttttttttcacttcaggaaaattcgaggaggaacaacacatactagtgtctttcctttctttctccccgtcttctgcaaatagtcccttcctcttcctgctttctcctccttctcatgt

SEQ ID NO: 407846 - DNA, 1000 bp, Homo Sapiens; identical to SEQ ID NO: 225017

SEQ ID NO: 407847 - DNA, 1000 bp, Homo Sapiens; identical to SEQ ID NO: 295173

SEQ ID NO: 407848 - DNA, 1000 bp, Homo Sapiens
gggcctgtatccccatgtgggtgaatgtgagccatcctgccttctgggctgggggtgggagccgccccagcagaccacagcaatggcacagcaggatgtcaacaccagaaggacccgtgggcacattcctgagctcaggaaaagactcagaatggatggaagttgtttataaattctcctctgctgcatactgttaagaaggggaaagaggagtgctggactcaccctgaattctttcttacgcgagatccaagaattgtctcttggggtctgtgctgggactgctttcctgtaacatatttctggcgtccacagaagggactatagtgaggaaaccactgactttggatcactccctgcaggtgaagccaactgccatgttgtgcagaggctccagcctcccgtggagaggcccacacggagaggatctgccatcgccagcaggagctttccagccatatgatttctggcatgggagacactgaaccataaccacccagctaagctgcccctggattcctgacctgcaagacatgaacagggcaagttaattctattgcgcccttacagatggagcaatgcacacccttctccatatgtatttgtgcacgtgtatgtctgttggaaagatgggtcctagaaatagagttgagagggtagaagtttatgcaagttttgaagtttgatggaatctgccattgcccttggaaaaagctgtgccttgtcattttgagtggaacctacactgtcagctttcctggttctcaggcctttggactcagactggaactgcaccatcagctctcctggggctctagcttgtcaattacaggcaaggattcctctcgtggtgacaagatggctgccgcagctctgagaatcacatcctcacaagatagcatccagatccaggaagggaagacagccaaagcaggaaaggcactttctctgcatgtaccactcttttattaaagggactgtgaagattacctcctgaaaa

SEQ ID NO: 407849 - DNA, 1000 bp, Homo Sapiens
tcccagatcccatgccaggtggtagctgtgagtacctctttctactcctttcaggtgggatgcttctaagacacctccattccagtttctgcacatctgcttgactcatgggaagctcatgcatccttggcacctggatcagggtctcaatcagatgccagtctccccagacttcagggaattcacagcaaactagagatatttcctgtaagttcctctcaccaggcaaggctgtggtcaggagtcattgcctctctcctcttccaaggggactgagactaacttcatactggactactttctccagaaaaatcctctccccagtttccaacttcagccttttcagagatggccgttggaccaagagtcagaaaactatttccatttagaccctttgcaaggttggaaatgtcaggtatttgaacatttcattttgtttttggcccatggagcctcaactgaaaccaatacccaaatattccattttagcatcctgttatatgcatacagttgctgttcagtccatggtgctttgtaacttttacgttgttgtgggagatttactgcactgatggacctcatcaatggtatccacactctttgccatggcttgttagcccctctcatcaagggttgaagtctatttcccaatccttggatttgggctagtcttgtgattgctttgaccaacagaatgtggcagaaggaacattataccttttctgagcctgggaacaagagaccctgaatgattttggcctgtctcttggagttctcctgctgtcctgtgaataaacctgtgggcggaatgacagactatgtgaataagagcagaatcagctcagttgtcccagatgtgtgagaaagccccaccaagattagcagagccacctagcctcaccacagaaatatatgcaaaccccaccaacctcagctcaggtgatcagaactgcccagctgacccactgacttgtgagtgaaaataatcgatggttaccgt

SEQ ID NO: 407850 - DNA, 1000 bp, Homo Sapiens; identical to SEQ ID NO: 295174

SEQ ID NO: 407851 - DNA, 1000 bp, Homo Sapiens
ggtgctgaagaaggtctaaggaggtctacaccacagaggctgcacccactcctcagccttgctgagccacaccattctcatctctacagcatccacctctcttggctcttgtaaggattgagacatgccaccaggcttactattgattctgagtaatcagcacagatttctaaaagaaactttatgggatgctgagacatgaataaaaacaactttattcctttggaaaggacaacccacatgctaagaagatgacactacacgttgttatagcccgaaaggccctctttccacaggggagcagtgaaaagtagaggttgcccatgtggattcccaagtcagatagatgtggattcagatcccagctctgctgcttgctacccaagagaccatggactgtggactctttaggtctcagggtttttgtttgttgtctgtttttcacttccaaaaccagaaaatgagaagatattttccataagatggcggtggagaagagaacttgatggaccttgcttggacaaaatgccttcaccgctaactcagtcagctatggcgatgggtcaaggacctggtggttttacagagaagacccttggtcaaatctttgtgaatgaagcaaccattctgatgttcaataacaggaatgcaccagtttataccaaactatctgtactattgagaacagcaaaaatatctgaccaaaaacaccaaagagtgacattttaaaagacatcaaagaactctcaaggcttccagagttggaaagatcaagaaagagagaatgcaacttcattaagtgactcaactccaaataggagcatttcaagagtatgtatttcaacaaagaagtattagaagatgacagtgtccttgcagtatcttttaggggctatcagaacatgatttctgctatattctatcatcggagccttaataatgttaactataattcaagggaagatcaaataaacttcacctttcaaggaaaggagtaaca

SEQ ID NO: 407852 - DNA, 1000 bp, Homo Sapiens; identical to SEQ ID NO: 295175

SEQ ID NO: 407853 - DNA, 1000 bp, Homo Sapiens; identical to SEQ ID NO: 295176

SEQ ID NO: 407854 - DNA, 1000 bp, Homo Sapiens
caggtataggcacatctcaaaacatacccgtaaatgtcccaagtttgaatattttcaaaattataagcttgtatatagcttatatatttgcattgtaatccatttgtacagtacctaattcaatgcgagcaattactaatttggaaattgtactgatataaataattcctctctttattgcatgtaacactgtgtcagtgatataaaagctatgtgtgtatatatatacatatatataatatacagatgtattgaaataacttttctatttgtaaacataatggaattactgtagaatatcaccctcaagggaaggaagaaatacatgtgagcactttcagggtagtttgcctgcatctgagcagttgtagatactttggtggtataactggtgatgaagaagaaggagggaagttgcagaggaaagaagcttggagatgtttgggatagcttttttaattttcactggagtcgattgtgctagggcttggttttgaggatctgtgggtaaatgctgagaggggtgggtgcagttgcctaggcacaaatatctgaatagagcagatatggatgagtggttcaggggaggaaatattatctgccttcttttcattctgcttcatgctaggcagggcaatgatgattggttttcattcagcttgtgctccaagagtacctcagaaaatggggagccatttttccccagttttggtttttagaggtttatatccccaactggctatggttggctggcagcctttagcttcagtgtagccacacatgatttcacgtcgtctgtacattcttcggcaggaacctgctccttttacttccagtggacacagagcacttcagctatgggcatccataactacttcctcctggatctgaggctttcttggctctgagagcttcctgggtttgctgacctcacccctgtgaggaggaggattggcccggctgctgaaaacatacgtgtaattgaaggaattctattaag

SEQ ID NO: 407855 - DNA, 1000 bp, Homo Sapiens
aggaccagctcacgaagtctttcaggacaaaggttttgtcttaacgctcaaagatctgcaggaccctgtatggtagaagaaacatatcattgtatttagaaacttctctatacatacaggaatttgacaacagtttgtgccacttatggatttaaagaactggcaccttgaatgggattctgaatagaattcgtacagatggaatgtaaatatcaccctgaactgaattggccctcatcctgtccagccaatctggaaatgtctgacacatgcagagtcatggtgatcaaacacccagcagagataacagccaaatatggccagcctcacgataatgttggagaagcagtgcagactgtggcctggaaacccacaagatatccattaagtgtcaacatctattcaaaacgaggcatccaaaactgctccttgttcagcatcattacccaaaagtctgcctgtggtaggtagaattctaagatggcaggtggaattaagtttgctcatcagttgacagtaagaaaggaagattacccaggttagcctaacctagtcacacgggcctcttaaaaccagagagttttctcctgctggttgcagaagtcaaagagattcaaatcgagagagggatccactgaaaggactcttctccattgctgaaccggagggagccacatggcaaggacccaagagcgacctctctgagctgggagtagttccctgctgaaagccaacaagaaaaccagacctcagtcctacaaccacaagtcctacaactgccaacaaccaatggtacttggaaacaagatttctccctagctgaggctccaagagaggatgccaatatcttgattttaagccttatgagaccctcagtggaggacccagttaaaacgtgccaggctcccgagtcacagaaactgtgatgttttaagccactaaatatgtggtaatttgttatacaaatatagataatgaatatactgccccttctatttta

SEQ ID NO: 407856 - DNA, 1000 bp, Homo Sapiens
gcttagtcggcccagcgagagggcgaaggagccgcgggcgcgtccccgccaaccctgctcgcccgcgccgaggcgggccacgtgacagcccggggccccgcgccccgccgcgccgccttacttggtgtactcgcgcagccccttggcgaaccacacgacgctgcggtacagggacatgccgggagcgccccacgcctagccccaccgcgctcccggcgcggcctccgccctggtcccgccccccgggagtcgcccgccctgacatcatcccggttatgtaagagccgcggcttccggttccttgctccaccggtaaggcaaggggtctcggggccggccggtcgactccgccccagcctcagagggtggagtgagggcggaccggccctggtgggggccgcagtcgaggtccgcagtctcctcggggtcgaaatcgggcatcagcgccgtttagagaacaccgtcctgctgggcatggccgggatgcgaagatggccctgcaacgcacctcctagaatttggttacctagaaaaccatgtggaataaaacgacgaggcttatgatatttaaaagacttctgcatcgaattggtgttatcataagggttattttaataactggcattctctaagtttctacacgtgttgggggatgcagtgccgtgccacatttcccgtctccagcaagcgcagtcagattggcgacatcgcaggcaagaggcagggctggggctcccacccgagaagtaattgtctccaaagttggacttttgccactggttctgcgacttcatgcaatgccagggagagccccttgatttcccccaaatcctcatcagcctctttccacccaagcccagatgaacagtactcatctactcacctgaggattatgaggattatgagttttatggagcaaaatttgcctagaacaggttgtcagcttctgtggacacagtcttctaccctcagaaatcccattggaagaaagaacaaatga

SEQ ID NO: 407857 - DNA, 1000 bp, Homo Sapiens
ctgatcctgcatctatcagcaaatttcacataaattaattcattttacagagtgaatgctgaaacttggaagccaactgacaagatgccagggatggcatggcaaggaagagagagccttcatggcaattttgaatacctgatctcttgctttcatcatcttgtctaggggaagaaacacggagcctggtagttgggaggtgagaggcaggaatggataccagagatggacagacagtggggtggtgagaagggagctgcaatttgctaatccttgtagtactacctgtcaatcatcttgctttccttaatcatcgatcctggagagactttgaggaaagggctggtggagttgcgcagatgtgatcttcatttcagccttatgaatacataccaaggtctctttaaatctgtggttcctgcacaaagtgctgtgacttcaggctaatagagaggtccagatgtcacatgtgccaattagaaagaaatgaggaccatggctatggcccactgtgttcagaagacacgcccaagccacccattgtcattcattgtgtctaatacttgacctgtcctgctgtttattatgtggggtggctccatattttaaaaactgtattcataaaaagatatttctcatcctgctgagtctcaggcccattgttgtaggtgaggtggtttcttttgtttgatatataacgttttgctgactttcgacttgggaattgcaaaggcttacccaaaaccctgaaggaaaagctaagaattcatacttattaagcacttggtaggtgtctgacactgtagtagatatatgcgagagcccagaacaagctgatgtccatgtacatatctttaaaaaatataatgatctagtcttatctgtggaaactgcttcagatactgatcttactctttcctgttacatcagaaattctggaaggtaatatcctgaaagatttatcctcaagaataacaatacattaaaatcttctgctttg

SEQ ID NO: 407858 - DNA, 1000 bp, Homo Sapiens; identical to SEQ ID NO: 119294

SEQ ID NO: 407859 - DNA, 1000 bp, Homo Sapiens
ggccctaaaaggcaccgagactttcaccttgtcacgaagatgcccagggagcccacggagaggtcaacatggcaagcactggaggtggaaggggtcatgggggtctggtcctcctgccacagtcaagctttcagatgatgcagcctgctgacattgtgactgaaggacaccaagctggaactacccatctaggcctctctggactcttggcccacagaagccaggtgaagcagaatcagagaaggcttgaagctcagcctccccaagctacgaatgcatgattgcaccagcgcaagacaggaatccccagtcccggctgcaggggccagggcagcttggactctccacggctcttcagcttggctttctgggcatttcaagacaggtcatggaaggtccactgggagccgaggatgctgttcttgcagtaaaggtctcagcttctgctatgccagtcaatcggggtgaaggaagtgacttttcttcagatggagaggccaagaattttatgcagatagcaacaaggtccctgacacagggaagcaatatccctgcacagaccagcttaagacaagattagtgtggagcacaggaggatcaagaggatctgcacggggtgagataaggaatctggacagaccagaaaagaggcgattccccagacacccagtgagaagtgacatttgggagatgaggatgggccatttacatacatcatgaatgggaatgcctgtattgttcatgtaactcgcagggaaaatgtcagaaaattcatccaaatctacattgtacacttgatgaggcagccgattggctgagaggcttgggaaaatcagccgggtctacccagagcttacgtagctcagattgcgggcacatggctgtggggcaccctaattcctgagggtccccccaacatgggctggcaaggcggggattgcaaaagtctccagttaccagcaccctgaacatgcaccctttgattaaatcaccccacacc

SEQ ID NO: 407860 - DNA, 1000 bp, Homo Sapiens
agaaaaacgttttttagctcatgagtcctcttcaggccaagctcagaagctggtgccattggtcagcctcccttcgtggttggagttcttctcccacatcagcttctgccagggcgtgtgcctgtgcagcccgagtccagtgttcctgtgagctgaacttggcagggaaggctgctctgaggcggacaccacagcaacatcggtgcctggggaacttcagatccaagggcacctgaagacctagtatccacacggctcccttctcctgtaacccaccacgatgtgggcggcctcgaagaaggcccacgagcaacataccgagtgctccagggaagcgagagcacacaccgggcaggattcacaatcaagacaaggtgatgatggacaggcatgcacacatgagcacgtggagcacacagtgtgtttggctgcaggagaagaatccagttttcagcaggtgaatgcagagaagccctgctgctcaggacaaagaatgtttccagaatgaaccatgtttgcagctctccattgcccaggatgagcggcgtccccaggtgcctggcccttttatcacccaggctgatggtacatccagaggcagccatggctcagcccccaagcaaggccagcaatggccgggaagaagcttattcaatgggattctctgcagagttgttctgactttcagcttgcagggatgtgggcatagaaaacaagaggctgacttctcaatcaatcgtcacttaaggatgcagagccagtggaagccctttctttcatgacttttagcattttttcttcattttcagaaaatccacaccatctccatatatgcatgcacgcatgagtgtccgtccgccccctaactgtggggttaagaatcatgtgactgctcatgctggaaaaacaagacaatcaccatcataaaagcccacatcatttacagatcttggaacttgaactttctttaaaagataaatatagtagtttacattttgga

SEQ ID NO: 407861 - DNA, 906 bp, Homo Sapiens; identical to SEQ ID NO: 32663

SEQ ID NO: 407862 - DNA, 1000 bp, Homo Sapiens
gaggccgcagggaggaattctgagactttagaggccgcacagccttcagcgcgctcaccgcgtccaggcgtcagtgaggggctatctcgaggcgcgagtgcacaaaaggtagcgcgagtctcttctcaggcgatccagataagaggaaatgagagccgggttttctgacttccaactcattagggaccaggttctttttcttcaggatcaggcacagagactgactgaatggctccaattatcaggatttgaaaacccagtatcagaatctaccactttgtgcctgagggagagggaaaagcggatacccacctgtgtcgctgtttgcgtgccaagtccaggaacagtccatacagccctgctgcatcccacgacgctgtcacaaagcaggagttcatccgaggccaagatgttaattattcatactgcatgactgaggattttggaggcagagagagattcatctgcaatatttggaacaccaatggaggtctacgtcaacacagaatttatacagcagctggtgctagtcagagctaatgacagaatttcagtttaataaaaagacccccaactgagcacaccatcttgaaaaaagtatacttatcaaacagctttcaatcagttcaagagagacaccttaattggggagaggaagaattgcagagtagtttgtaatcatgccaattccagatcaataactgcatgtctgttctttggtagaaatagcttttgctttatattaagtaatcacatatatattctctctatttggataaggaaaccttcgctttatttgacaatgtataatgatatactcttctaattcacctctgtgtcttcacaataaacatgagtaaaatttagacaagtgatggtaaaggtcaatataattatttatttttaaaataaattttgtatctaacaggaaagcagttcttatgaaatttttatattttcaaaaattgttttgttcaaataaaattttatgagtaaagtt

SEQ ID NO: 407863 - DNA, 1000 bp, Homo Sapiens; identical to SEQ ID NO: 295180

SEQ ID NO: 407864 - DNA, 1000 bp, Homo Sapiens
tcagtcctctggtgtttggtgacatcaaagctgtgccgaaaggccttccctcactgctaacacttgaagggcttctgtccggtgtggaccctctgatggcgaatgtggtctgtcttatgcttaaagatccacctccattaactgcactcttagggtttcttcctctgaaaaggaatgaacacgggaaccccctcaaaggcatttttaaatgaagcgtggaaggcatcaaagatgtgctcttcttcaggactcaggcttctccatcattctctgttccttggaagcgtgagggctaaggagctgctgacttctctctcttggccccacttcaagaaaggcttgcttcccacacacctctccacgctcccagtgcgggactgacactctgcaccgggaggccaagggccaccatcgtcttgctgggagaaggtgtgacgtttcttggtcataggagggagtgtgatctgacaccagaggacttaatataacattgcagtgttaacatcttcactggcagattcatggactttccccctcctgaatgcatttcaacaccttgaaatgaacgatgcctcatgtctctgcagggtggacatagctctaactctctgaagctgagttggacaggtgaaacatccacagtctttcttgacctgaatcaagctcagagtgacagtgtttaagattatatgtcaagttctgtgtgaaatgagagaccatggggattcattattgctggagttgacggtattgcagttttataaccatctaataaattagcatttaatactgagagatttcatcttaaactcagaggattgctttgttttaaagaagatttttgcaaggagaagcaatggaaaccattcagaaaatgtgggagataaaaatcctattcaagaaaacggatcttggatctttgcattcacttgatttgtcagaatattattctgtgctaaaaaatagaagggattaaatgttaaaaatcactgaggcacaa

SEQ ID NO: 407865 - DNA, 1000 bp, Homo Sapiens; identical to SEQ ID NO: 295181

SEQ ID NO: 407866 - DNA, 1000 bp, Homo Sapiens
acatttatctctgaccttctcctgctctcttatccctcagttcctttctcccgcaaggcaggtcatagaaaccagaaccccctttccccaaagccagccataaaacctaaaaaagccttactctaactttccctctgcctttctatgtaaaaactggccataaagaaattatctgacttaccttgtttaggtcattaggctgccattccagagaaggaggaaatgcattctcagagaagccaagaagaatctaaacaggccttgctgggcttcccagctcagtctatagctagcattagatgttaccctttctgcccaatcatatttcgacacaattgtccagactttgttgaacctaagcataaaaatggacagttcctctgttatccttgagtcttcattctgaaggctcctgtgtatacacattaaagaaatttgcatgccttttctctagtctgccttttgtgagttgatttttccacaaactttcagagggccaaagggaaagctctctcttggcccccacagctctatcagtgagcagagtaaagaaaagacttcctgctctcatgcagtctacaacctggccatccacaaaaccacgggctgcctgcttttggttgggacagtggttttatgtaggggagccataaacgtaatgattgaagtagaattctaagtttctagacccactgcccattccccaaatattgtttatgaccataatcctctctctgacttcctattttcattctaaattggaataaatgacttggtctttgccaaacactgcgtgtttcagaaaggacttccaaaaggactttccagaaagtaccagactcttaggaatcgcatgaggtgggagattaaaaatacattcttaatttatttgataggagcaatgggaggtcaaatagcttactgatttctctatgtctaagtcaccaactcattgtgtttgctgagaattactaaaccaataaatgaagtactaccggaa

SEQ ID NO: 407867 - DNA, 1000 bp, Homo Sapiens
gtacagtgaagaataagactggggaacttttacaattcagagtggccttcactgtgggcggtccgaattgatccctgtatacaggtgcttctggggtgacattttccctgctccatggagctccgggaggagtgcggaccaaccccttctttgcaggcctgtctgtggggtgccactcctcctcccacctccccactgcacagacagcccatcagtgtccctgagctgctccagaaggatgcagctctgaggaggctctgggagcggtgtatcctagcaacctctgaggctggcatctgcagggctaggcccagactcaaggctctttctaatttgccagccttcccttaatgataagctttcccacacggatgtggagtggggaggaagaggggagaagtgggcaggaagtgttgcctccaaccccatcacagagtaggtcaagcctcgcccacaatactgccggggatggggaaggagggagggcacagtgagtccgttaactgaatatgccacttgtccatcaccgtggccggtttatcaccatttagaggacaatgaatccaggcagtgatccaccaatgataactaacatcataaaaagatacatggccggatatgatgttccttctgacggaagaccacaacacctgctgaaaaatcaaatctgaatcggatcaagcctctagaggaggcagcacccagggtcattcctggagcataaacgatccctgcagaacatgggctagaagaccccacagtggggcagaggcaggtcctggactgggatcccagcagtgagaagacctggacatcaaccctatttcattgtgcctctgcaaatctcccaacttttggagctgtagctgcaagctcagacttgtggtttcctgtacctggaggaggcccaggtcattctgttaagtcccttgtctatttcctgcttttatctggatgctgagttaattatttgatccaacaataaaactaacaaggtttt

SEQ ID NO: 407868 - DNA, 1000 bp, Homo Sapiens; identical to SEQ ID NO: 295183

SEQ ID NO: 407869 - DNA, 1000 bp, Homo Sapiens; identical to SEQ ID NO: 295184

SEQ ID NO: 407870 - DNA, 1000 bp, Homo Sapiens; identical to SEQ ID NO: 295185

SEQ ID NO: 407871 - DNA, 1000 bp, Homo Sapiens
tgatggtaaatggcaaggagaaagacttaaagatctatctagagacaaacccttatactctaggcatgctgccagataaagactaaaaacagcgtgtaagatggcaaggaaaatgtgctgtttggtttcttcattgccataaaagccactgagaagggcttaaagagatatgccattcctaaatggtaacattagacttcttgttctatgacttgagtgaaaaattttgccattaggaaatggggacaaggaatgtcatcttcaacacagggtagctttttggtctatctactcgtggtcaacaaaaggtacagtaagtaaggtcacagaatggtcaccccactttggttcaatcctgttcttggacagatcagtaactcaacgacgctttgtttttcttttgtgaagcctcttcagccttgatcataatgatttcattagcagtgtgtgcttgatttttgcacacccacacaatgttttgtattacccaacaaacttacagaatgtagccacagcttcttgctccaggaaatgtctatcaatttaattattaaaactagtttaatgtttggtgccctgtgagcaggatctttaagatgaaatgagccaatccacattccattatttcactgacatttaacataatccttgcagctatcaagctatgcctcccaaatctaagacaatgagtaaatgttattagttgaatcggtgactaaatcagctaaaatggttgcttgactaaatgaacgagttacttgatacatcgtgaacacattgaaggaaattggaagaaatggaattctggctcctgggtccctaaaaattgctgagtgtgtttccttttttgtaaaataggtatattaatattttgcctagatgtgttacagtaaagattaaaaataagtcaagtaaaatatctagcatatagcagagaataaatggttgctgtaacttattatgattatttattaaaagttcaagttgctttgaagaaatt

SEQ ID NO: 407872 - DNA, 1000 bp, Homo Sapiens; identical to SEQ ID NO: 295186

SEQ ID NO: 407873 - DNA, 1000 bp, Homo Sapiens; identical to SEQ ID NO: 225019

SEQ ID NO: 407874 - DNA, 1000 bp, Homo Sapiens; identical to SEQ ID NO: 295188

SEQ ID NO: 407875 - DNA, 1000 bp, Homo Sapiens
tccctccgccgccccgccctctgcccaatcccggctccgggcgacccgggccccgccccctgcgtccccgcgggcgcagtcaccttcaggaggaagcgcggcggcggcggcggaacgcgcgggcaggttgccctttcggtgggactaaattctgcggcggaaggacacagattcagagtcacattttaagaaacctgatgaccaatggggacgcggcggggcaacggggcccgcccccggagcgactttcctcccagacccccgggcgccgggccacctgttgccgccaagttgggctgccagatggggtgtcttttcttggctctcggcccaggccaccccagctgtcccggcctacctgggcagggcccagatttatgggttccggggcagcattctcccggccccgccctgccactccccactcctccgggtgtctgctctggcgcaccctcggagactgagctgaacggaaagttggggagagctgcagacttgtgcgtggttggaggtcctggccgccttcggaggggctctggcactggagcggcagtagggagaactagggactgcgaagtgggcctggagcgggagcgcgaggccgttttcctcttaggaccattcattgtgttaggaccgcggaacaaggaaggaccggttggggccatgtgaataatttagtagggtctggaatcctgcagagcgaatgcctcagagtagaaagtaaatagacggtgttgatattagcgcagagctgggcatctggaaatatcaagtcagaacattagggccgataacctatgcaggagtcagcatttctgttttcacctttgtcgtgtttaagtcagtattgttggaacttttcttacatttttctacaagacattttctgatttcccagttgttagccagcaactaatgatgcgagcagttatcaattaaacagctgttaactcttgccttcattcacagatacaatgttgcgcattcaaaatgtgaa

SEQ ID NO: 407876 - DNA, 1000 bp, Homo Sapiens; identical to SEQ ID NO: 295189

SEQ ID NO: 407877 - DNA, 1000 bp, Homo Sapiens; identical to SEQ ID NO: 295190

SEQ ID NO: 407878 - DNA, 1000 bp, Homo Sapiens; identical to SEQ ID NO: 295191

SEQ ID NO: 407879 - DNA, 1000 bp, Homo Sapiens; identical to SEQ ID NO: 295192

SEQ ID NO: 407880 - DNA, 1000 bp, Homo Sapiens; identical to SEQ ID NO: 295193

SEQ ID NO: 407881 - DNA, 1000 bp, Homo Sapiens; identical to SEQ ID NO: 119296

SEQ ID NO: 407882 - DNA, 1000 bp, Homo Sapiens; identical to SEQ ID NO: 225020

SEQ ID NO: 407883 - DNA, 1000 bp, Homo Sapiens; identical to SEQ ID NO: 295195

SEQ ID NO: 407884 - DNA, 1000 bp, Homo Sapiens; identical to SEQ ID NO: 295197

SEQ ID NO: 407885 - DNA, 1000 bp, Homo Sapiens; identical to SEQ ID NO: 295199

SEQ ID NO: 407886 - DNA, 1000 bp, Homo Sapiens
ttctcagttatgctttttacaaaggtggttttgattttacataagggacttgagcatcgagaattttggtatccatggggactaaggtaccaatccctcacagatactaagggatgactgagctcaagttttcagcttcagtttgctcatctataaagcaggtttaataataacactttgttgataatgttattctgaagattaaaggaagagtaaacgtaaactacttagaagagtgtctctggcacattgtaagccctcaataagtgtgaactaacaccactaataagttctttataaactgcctaataggtagtcaaataagaggggaaataaagccctaaggagtaatatttgtgttttgtttgccctacatggttttgtgaaattttctattcattatcaatatttaaagttggggttttcaatctttgactgggcatgatggctcattcctgtaattccaacactttgggaggcccagctgggaggatggcttgagctcagaagtttgagatcagccatggccaacatggtgaggcccccatctctacaaaaaaaatatatacgcgcgcgcgcacacacacacacacacacacacacacgcaaaaattagccaggcatggtggtgaacacctgtggtcccagctactcaagaggctgaggtgggaggacagcttgagccaaggaggaagaggttgcagtgagctgagattgcatcactgcactccagcctgtgtgacagagccagactctgtctcaaaaataaataaataaacttgggacatttcacataaaaccctactgtagctgactgctctggaaaagtggggaagtctgacgacagtgggccagccttcccccatggcagcacttgttcagaacttgggagagaccgtccccttttgtgaagcatgtgcttccctggtgtgtggagagataaaagaatagaaaacgctgggaacaccagcatttcaagatcaaagcgtcaagaaaaaaa

SEQ ID NO: 407887 - DNA, 1000 bp, Homo Sapiens; identical to SEQ ID NO: 295200

SEQ ID NO: 407888 - DNA, 1000 bp, Homo Sapiens
attttcacatatagcttttttctagtttttatcacgggatattcattttttcactatagccccaattagctccaaaatgtccattcatagattttacaaaaacagtgtttctaacatgctgaatgaaaacaaaggtttaactctgtgatatgaatccacacattggaaagtgttttcacagatagtttgtttctaggttttatcatggaatattcagtttttcactataggtttcaattagctccaaaacatccattcgtagatgctacaaaaagagtgtttccaacctgctgaatcaaaacaaaggtttaattctgagataaatccacacatcacaaagcggtttcacagataccttgtttctagtttctatcgtggaatgtttggttttcttactatgggcctcaatgggctctgaaagttcccttagatattacaaaaagattgtttacaacctgctgaatcaaagcaatgttttaactctgtgagagaaatccaaatgtcacaaaacattgttagaggtagcttgcttctagttttcatcactagataatcagtttcttaatataggcctcaatgagctcagaaatgtccctttgtagattctacaagaagacagtttccaacctgcttaatcagaacaaaggtttacctctatgagatgaatccacacattgcagagaattttaacagatagcttgtttctggagtttactgcagaatatttggttttccactataggcttcaatgagctcaaaaatcgcccttcgtagattcacaagaagagtgtttccaacctgctgaatcaaaacaaagttttaactctgcgagatgaatcaacatatcacaaagtattttcaaggatatcttctttctaggtttcattatgagatattccctttttaactatgtgtttcaatgggcttcagaatgtccccttgtagtttgttcaaaaagagtgtttccaaccttctgaataaaaagaaaagtttaactctg

SEQ ID NO: 407889 - DNA, 1000 bp, Homo Sapiens; identical to SEQ ID NO: 119297

SEQ ID NO: 407890 - DNA, 1000 bp, Homo Sapiens
cattcacaagagtccaaaatccttcaaatctctagggacagaagacaaacgtgctgcccagaatgagctgagacacaaggcaaacccttggaaatgacacatggatgaggaggctgtggttgtccctccttattcctgctggatttgcagccacggctctggatctggggcatctactggcctcccctgttcactcaagaggccactgcctctcaggagtccagaatgctctgatatctgacaccggtggtcaggaagttatgctgccctctcctcttgaacagctaagatgcttggacactagacagaggcaaagcagttatgccagaagcaggggagagtcattcactgtcagatctgtctgttcaaagagctcacattagaccaatcacagaaaaccaccagactcacacagcttgtatttgaatgaaccaggagagacttcaaggatcaactctaaagtgctagaagagaaatctgtgtttggggcactgaataaacaagtgatgtcctagaagatcaacaccccatcagtcttaggagtatgaccctattcatggacaaggggtttcaatggacagcctgagtgctcagccccccatcctcctctcctagcaagacaagcagtctgttgctcagagggggaaactgatgtcatttaacaggaggtcaggatttctggttctacttcaacaaacagtgcataattttggacacagcatcagatttcctgacttcttacaaaggacagctaattaaaaacgtgtcaatctgtagtaattagttggagattaacaagggcagaagagaatccaagtcttaaaactctatgtgggatacatttctgatgaagcttctatttgactaatatactgtgatgatggcactattcgattttaaactatggagacagcttttattatttcgatttggatcctggtaagtggtgatactgctatgtaacagttaaagcacaaatgtattgccatagttaaggttg

SEQ ID NO: 407891 - DNA, 1000 bp, Homo Sapiens; identical to SEQ ID NO: 119298

SEQ ID NO: 407892 - DNA, 1000 bp, Homo Sapiens; identical to SEQ ID NO: 295204

SEQ ID NO: 407893 - DNA, 1000 bp, Homo Sapiens; identical to SEQ ID NO: 119299

SEQ ID NO: 407894 - DNA, 1000 bp, Homo Sapiens; identical to SEQ ID NO: 295205

SEQ ID NO: 407895 - DNA, 1000 bp, Homo Sapiens
ggtgtagccaagtgcccacttctctcattcagctgcttcggggcaaactggaaagatcctttgagctcacagccccctgctcagtgctactcctgaacctgcgggcctgtgtgcacagccacccacagcgcgcacaacacatgggcctgcccagggcaacggcaccgtcaacagcgtgtgccctcgctcagggccctgctggtactacgcttcccagtgtgcagggttcccagacgtgtgtcctctcatacattgcatttcctccctaagctgcacggggcaacaccgtgttaggtcccgcgcatctgctcctgggccacatccggctccgtctgtattgttcctgaattcagtttgctgtcctagaacaaggcagcaggaggggagaacagcttttcagtgtctttaattaggcaacaggaaaaaacaaagtctggctgaaaattactatttgaagcttggccgatgccaacacagcactcgctccctgcgttctggtaagtgatggccattgatttcaaggacgtaccaaggggcgaaaagcaagagcaggaagtcacctcgctctggaaaagaagctggttttcatctgctgtatgtgctggtcccaaacatacccttttctctttttttagtattttttttcccaattaggaattcaatgtggaaaacataccctttttcttcaacaggcttttaatgttgggaagacaggttaaaaaaaacaacaacaacaggctggctgtgccggcgcacgcctggaatcccagcactgtgggaggccaaggcaggcagatcacctgaggtcaggagttcgagaccagcctggccaacatggcgaaaccccgtctctactaaaaatacaaaaattagtcaggcgcggtggtgtcgcttgtaatctcagctacttgggagactgaggcaggagaatggcttgaacctgtgagctgggatcgtgccactgcactctagccggggcgacagagcgagactctgtctc

SEQ ID NO: 407896 - DNA, 1000 bp, Homo Sapiens
gcctactccctagaaagcaccaaataaggaaaagcactccggaagaatgaagctaagaaggctgtgctctctgaggcatccgggcagccttcactggagggacaaggtccagtgggaccttcttactcaagatggcttcaattccaatcaccagagagttttgagaaccagtgggaggggttcctgggcagcggggctctgctcctaccgggatttgtttattcagctgatgttaataaatgaagctgaaggtaacaagctgtcacttagcatctccaggctggaccagaactgccattggttaagtttcagacttcagccccaaagtacagtgtcaccaccttggatgaaggatattaattagtgtcatgagggagatcacagtctcattcccctccgtcactagcacgagactgaaaaaaaaaaagaaaatcaaattcagttagaacagagacgtgctgagaagctgggccagagaccccgcggggaacctgccgttgtttgtcaaaaaacgaggccagcgaggaagaagccaaccatgcctcccgctccactcgctttggaacccacagaatgttcaacagggcagcacctttcagttattaagacactcagattccaccctggtgcagtgaagcaaactggattaaccacgcggcacgtggcagagccacagcgcaaaccacggctcctgctgctgaggaaaatacaggcacctcggccactctgggctgtgggttcgacgtgagcagcctcagggcagagacggattctgttcatgtctgtcccctctgccatcccaggtctcaggggttctgttcacctgaccatggcagagttgttttgcccacctgtgaaaaccactccaaccatcatggttaccattgcattgcatgttggcaaatttggggaacatcaccttccaggccacttacagcactcgaataagggctttgacaaaacacaagcgttattatgaatataataataatcagcgtta

SEQ ID NO: 407897 - DNA, 1000 bp, Homo Sapiens
aggcacttgggcctggcttggggccgggggcttgtttgagctgggatggggtttgctggctcagtgaagtaccagagtgcctgagccatgggtgggcaggggcacaggaatgaccaggttcctgggggccaaggaggccatgctggcttctccaagggaaggcacagaggctgccggcctgccccctacagctgtcttgggtctggcctgggccacaccttgaccgtgcctttccagacggtctttgtggagtctgcccgtgccctccactgtgccccagccctccttccaaaatctcctagagacacggtcctcaagcaggcagccccttttgttctgacctcctcacacagggtccattcctgtgccctggggcctcctggctccctgccttcctgggctctctgcactgcccgggcctctggcccacatcctcacacccggcgcactgaattaagaggcctggctcccctcacagtcaggaaattggtttcactttcccggccagagtttggctgctcaaaagggtcataccaagtatgaagctcggcccccggtggtctggcttccctccgccttccccacatttacccgcatcacggctgccatttattgagcacctgctgtgtgccaggcactttacccacatgctcccagtgtgtactcatgacaaccctgtgggacagggactcattatcaccagcaaggagactggagtacacgtgcccaaggtcatgctgcaaattggtggcaggactggggctcaaactccagagcccgactttctgaccaggggccacgctggccctcactgcactccagctctgcagcctacccgcccaatccctgtgcaggctgggagggtgctcttgggggagtggccaccgagcccctggccctggttactgcctcttgaggacactggcatctgggctggagaacaggagcccggggtggggtagggcatggggacaatcacatcttcagaggaggcagcaaa

SEQ ID NO: 407898 - DNA, 1000 bp, Homo Sapiens
atccacagagaagactatgggtgaaagatgaccccaggtgtagaacttcatcttaggaagagatcacccaaccagagacttcgtacacatcatttggttgattttagttaacgagagcatggaagatgttggaataattgctaacaatcctggccggggaaattaggaagcccatcctctaattaaaatttaatgtagaggaactgaccatcatgaatgaatggactcaattccttgagaagaagacagataatttcaaactatttcctagaacaagtaaaggcactcagttgtacagagtgaggaggtttccctaggcaagattggtggcagcctcaggatgtatggggccggaggctgttatattctcactgggcgagagaaatggatagggaatgataatgatgaatgagttttctttcaaagtactcactaagggaggctctccattttctttttcctcactaaagtgcctcaaaatgcttaaagaattccactttggaattacttccgaactagtttatattttctatcccatgactctacaattgcacctcatttttaaccaaaaaatcatttcctgcttcatcaaccaccttattcatcagacgtggccctggatgattttcggttgtttccaaaaatgaaattcaacctcaaagcttaaagatttacgctatcgcagctcctgaagaaatgtgccatcaactctaaagatgaagaggagttccagatatattttggtattgaaaaaaatttacgtctcattattttgccatctcatacattttcatatcttcttctcttatattgctttgaagatgaaactcagatctgtataaagtatttcaagcatattaaccaaagagttgtgcttaatccagccacctgtaactaaatttctgtctctatagtgtctcggaaaaaagaaagaaagtggaaaggcaggttgagaaaaaatagaagtgcatataattaaatcatgaaagagtgatggata

SEQ ID NO: 407899 - DNA, 1000 bp, Homo Sapiens
gccccagccctggcattcactagctagtccctggaggaaacactgtaaattttccaagcctcagtttcttcacatagaaaatgattataatgattcctcttaaataagatactgccatatgttaacagcattttattagctataaagtgcggaagggtttcctccctcttcaagagtctgctgggattccactgtcatggacaacatttcattcttatgaaattaaaatctcacctacaggcaggattctgccagtgcttatgctatacagacatatggaatgcaaatgtcctcggaggagcacacagccttgttggcaggatgagacaggattcttgaaagctgtactaaatgtgactggtgctgaaaaaaaaatggatgtcttaggatatgttcttgctttttaatggaaaaagaaacgtgaatgcataaatatgtataatgtgagaatatctttcatacaaataggacattaaatgatagtgtctatggaagcatgatgagaagatatgctaggaacgtgctgggcacaattaggggcacggtagaatgtgagatagtccaggctgtgagtacgggatctgtagccagaatgcctggttggaatccagcctctgtcatttctttgcagtgtgtcttgagaaagtgactgaacatctcgctgtgcctcagtttctccctcttctaaaagaggatgatggggtgcctatttcatacggttgtgaggattaagtgatttgatgcatataaaatattcaagatggtgcctggcatatgctaaacacgaagtaaatataacctattatcatcattatcaaggacttgcggataactgatgctactgagccgatggagcgtggtgtagcagaacagctcaggtgctagaaatagccagtctcattgactcaactgtgtttcctcagagaatcccgattctcatttttcctatctgtaaatggaagggaggatagcaaataataataaatgttatttggtgact

SEQ ID NO: 407900 - DNA, 1000 bp, Homo Sapiens
cactgggaccccgacaccaggccctgcccaggcttatgacagaggaggcaggtcaggagacaccccagcaacaaggcagcacctgcctgcgatgcccctcagtagaagaacgtggcatggaaggagcccaggtggcacacgcccagctgcgtcgcagccccagatggctgctggaccttggttctgggccttggaaaatcccattcagcggggcttggtcccatcaaggcctctggagggaaggctaagcatagggttcctgcagccccagccagccagccagccagcagcatgccctggggcctctgaccccacctgtgagtcccaggcccagaggtccctggcttcaactcgagtcctaggaagagagaggcaccagaggcaccacaggctcccagggtgaccacagaggggaccagggcactgtgagccctgatgctgtaaggattcacatcagagaacctgggcaagacgggagaccgtgcagtaatgaggatgtggagggctggctcaatgcggccaacagctgtgaacactgctgcctcttcccagcctcatcactgcagtgcaggcagtctgatctctggagcccagcccaaaagtgtcctgagtgccccggcttcacatgccaatatgccacctggaggcttcaaggccctgcctgctgcacgcccgcctcaccattgctgagcaccccatctgatgatgagagacttgctgtggattcctgggccggcaccatttcccaggaggaccagcgggctgcctgtgggcaggccgcccacactgtggagggggctgagatcagccttcactgtaggaagcccctacctggacacagacttgccggctctacctatcgccatcatggcagcctacatggcattacttgtgaccagggtgccccatccaggtcggtctgccctggctgctgttttccctcctgccaccctctctttgactgcttgtgtcaataaaaggagaactggccagttttcag

SEQ ID NO: 407901 - DNA, 1000 bp, Homo Sapiens; identical to SEQ ID NO: 295206

SEQ ID NO: 407902 - DNA, 1000 bp, Homo Sapiens
ctgctcacaggataaaccgggaattaaatccacgcttcctcattcccaaccctggctccttctgattcttgcatttgaggcatctgtaaaaatgtatagctctacctcctcctgctccccatccccagcccaccactggagcatttttcactaaatgctgaagaacagtccttagaggtaaagtggacacttcatctgccttaccagtgcccatgcacgtcctcatcttccttaccaagagaacccagaactggttcagagatccaggcctcccacctcagactcataagaagagagcttctcttcctcctctggacgctgtcctgtgtgtagcactcaggactgctgaagacatctaggtaacagcttgaaggtgaaaccagcactgaggtttcctgattcctgggtggagcgcagactggagcctaagccctgacagcatgtttcatttcaacacatcaaattttcattgagcatctactgtgtgcctggcactgtggtcaatgccgtgataataagggacttgcagctcaagtatatctgtgcttcactggaagagttgaaagagctggagactgtctgtgatcaatgagcccctgtcactctcatgacactttcctgaaccatttcaccagcactcagaagatgaagactgtgctctacctgttccttctctgaagctagaagatctggtgtttcgactttgccccagccaactgaccacattgagtgatgtgcttagtttacactgaataccaagagatgggtgggattgctgtgcatatatattagcaggattttggctggaggccacttgtgacctctattgaatgtaacttcctcactcaggagttgatatggaaccactcactcctattggctcagtgcccagaaggcctcagagagagcccacaagatcaacccgacagaccccggctttccaaataaagaaacgcaccccccccaccccagggtaggggtctttgtgggtcctgcctac

SEQ ID NO: 407903 - DNA, 1000 bp, Homo Sapiens; identical to SEQ ID NO: 225024

SEQ ID NO: 407904 - DNA, 1000 bp, Homo Sapiens; identical to SEQ ID NO: 295208

SEQ ID NO: 407905 - DNA, 1000 bp, Homo Sapiens; identical to SEQ ID NO: 119300

SEQ ID NO: 407906 - DNA, 1000 bp, Homo Sapiens; identical to SEQ ID NO: 295211

SEQ ID NO: 407907 - DNA, 1000 bp, Homo Sapiens; identical to SEQ ID NO: 295212

SEQ ID NO: 407908 - DNA, 1000 bp, Homo Sapiens
gagaggacttgaccgctgagggatggagttccaaggaagtcagtccttgatggggccaagcagcaggggaagacgggcgctatcaggctggggacagagcccaagccaagacccaggtgtatgaatggacaggacctgagatgacccggtgggtcaaactgtctgactgtagaagaggagctgggcagagagcagaggtccagggacaggccaaggtttggaatgccaaggtttggaatttaggcttggccctgtgggtaatggagagctatcagtgggtttcaagcaaaagggagataccaagtgctgtggccagccatgtttcaggaagattgttcttgtccacctttgtttatgtcaaccacatttagaagtaacaaatgtctgatagggggtcaggtgcggtggcttgtgcctatagtgccagctactcaggaggctgaggcaggaggatcgctcaagcccagggattcaaggatgctgtgagctacgatcacgtcactgcactccagcctgggaaacagggtgagacccagtttctaaaacaaacgaacaaacaaatgtctgatggggatgcatcctcccaatagaatactattcaaccatggataatgtgggaatagaatatctctgttgatgtgaaaagttgtccaagacagttgagtcaaaaatatcagtaagcatagtaagatcttatttttgttttaaaaatcatatgcataagtccaggcacggtggctcacgcctgtaatcccagcagtttgggaggccaaggcaggcagatcacttgaggtcaggagttcgggaccagcctggccaacatggtgaaaccctgtctctactaaaaatacaaaaattagccgggagtggtggcgggtgcctgcaatcccagacactcaggaggctgaggcaggagaatcgcttgaacctgggaggtggaggttgcagtgagccgagatcatgccactgcacttcagcctgggcaacagagactccatct

SEQ ID NO: 407909 - DNA, 533 bp, Homo Sapiens; identical to SEQ ID NO: 225026

SEQ ID NO: 407910 - DNA, 1000 bp, Homo Sapiens
ggtcttctttaacatctatttagtcatgtgttatttataaacagcttgaattaatactgtaaaatagacggatgtctaagaatctaggctgtagcctaaagctaaatgaacctgagggtagacaagttcactctgtattaaccaaaggataatgaatgagttcaccgctcagttcaataagcttcttctgaaatatgcttcctcctggacttctaagaaacaggccaaaagtttaattatcccttaaaacatgttaagcctaaatagaaaaaggaaattaatcatttatagattttctcttctttattatgattcagttggtgcatctgtagatggctaagaattttccaaaccacgtgaattcagagaggcaacacttttgttgttgttgtttttccaggtaatgagctcgctttgaaaaccagtcactcggaaagggatggcatttttatgcaacttggattgaaatggttttgctttagtattctactctaattagaaagaatacaccacaggccgaaatagtttcatatgataggaaaatctttaaagaaaggaacacagagttattagattatggttggctgtataaatttagctgggcagcgggaggaaggtcataataaatgtatcctgctctctctcatcaattatcagcagcacatcccccaacattctctcctcccaaagactgaaggatgtgcagcaaagcttagatcttgaaggagaaggttcgggaaaaattaatgattttaattagaactttccaatctaagtagaatcattaccttaattagctaaataaggaagtatgaaggatgaaattttgcaaatgaaattttgtaaatgtatggtagcgtagaatacccccattgcttcattttaaaaaaagaaaatataaatgcattttaattaataaatgacttttcatcatgtccctattaggaaaattctgtgtgccaatgctttcagtgtttgatttaatacatcttttgaagtg

SEQ ID NO: 407911 - DNA, 1000 bp, Homo Sapiens
gcagttggacaaagatgtaaatgccttgtttacaaatgctacccagatctcctaattaggaccacacatgcggagaacccaacagcttttggacttatcggccaatggtcttcttgggaaggtctctcctagtcatgggaattgtctttttattgttcaagcttttgcatagacctggaagaggcatccattgctgttacccctgagtttataatcatgctgcaagtccagtggggaactttggcacaaagcattgaatgagatgggactgcacttatgtagcctgcatttcttgagaataaagatttctgttcatttagtgcagtggttatcatctgggggaaaaccagtgagtagaggccagggatgccactaaaatccctacactgtgcaggaaagctgtcagccctttgtcccacaagagattaactggttccaaaagtcagtagtgctgtggttgagaaaccctgtttaccacctgtaggttccagagagctcggatggtggtggtcattgtgctaagtttcaaattcagtatttaggtttggtttttagcttataggcaacaaattggctgactatggggtgaaaaggaagcacctcctttatcaagattggcttcaaaagatgtctgcctccccttctggtgggtcctgtgtccattcacagtgtgagaaatggaaaggaggtcactaagagacttgcaatggatgtaataactggatgcagaaactctggatctgaagggaatgttcatgactatttcatccctcctgctgccttggagaaccaaacgcaggagccacccaaggtgaaaaccatccatttcttggagaagtgccacggtggggttgcaagtcccaggatcaagttttcgatgtgtctctttttcccgtaaagtggctgaaatctgaagctgaatctgcaagtgtcatggagtcattgaatctcacagtctcaactgataaaagttattaaaggtcgtctggttcagccttct

SEQ ID NO: 407912 - DNA, 1000 bp, Homo Sapiens
aagtgaagatcccccatccactccccattttggaaaagtggacatcaaggcccagagaagggacaggaccagcccaatgaccaacagagtcaccagtgactctggggctatgcctaggactctgtctccagtctactgttcattcccaaggacaagcccacaacacagtagcagcacctgcagatggaaagccttcgatctcaatgtcacctgtttgccgctttctgcataagtaatgtcattgttggaatgagtttatgatggtctccatccccatttctatgagctgtgagcaagacatctgctgcatagctcacgtgtgttcaggcctccctggaccagcagctctgactcacacacgcacagaacgataacgcagatgggagcatgcgcctggaaggccaccctgctgcacagcacactgactgagcaagaacaaagaccgtaaatgaagaaggatgtttgcattctgctcctcgcttgcctgaaaacaggaaactttggagacctgttctggcaaggtttccacctcttcctcaccccaaagggaactgtgtgtgttctgatggttcaatggggaaatgaggatcgatcatgagtgattttcccgaaatgcaacctgtgcaggtcttgccttcctcaagcacctgcgaggagaagtcgtcactagtggggaattccagcaggtgacccaatcgagacagctgggcaggctcctggagctgatggcttgggaaggagggagtcagaagtggcaggcccatggagggccttcaactcattggatgaagcccacccttattcccaaggataatctcctttactcaaggtcaactgattgttgatgttaatgacatccacaaaatgtcttcacagcaacgggattgcttcacagtaatgggattgctgggtcaaatggtaattatccttatgattttcttaataccattgtcttttctctaccttactttattgtagtaatacagtatatagtacctat

SEQ ID NO: 407913 - DNA, 1000 bp, Homo Sapiens; identical to SEQ ID NO: 295213

SEQ ID NO: 407914 - DNA, 1000 bp, Homo Sapiens
ggtgacatcatcttcttctgagatctgaggacatggacacccaaccacctgccggtgacatcgtctccttctgagatctgaggacatggacaccaaaccacctgccggtgacatcgtctccttctgagatctgaggacatgaacacccaaccacctgccggtgacatcgtctccttctgagatctgaggatatggacaccaaaccacctgccggtgacatcgtctccttctgagatctgaggacatgaacacccaaccacctgccggtgacatcgtccccttctgagatctgaggacatggatacccaaccacctgccggtgacatcgtctccttctgagatctgaggacatggacacccaacctgctgctggtgacatcgttcccttctgagatctgaggacatggacaccaaaccacctgccagtgacatcgtctccttctgagatctgaggacatggacaccaaacctgctgccggtgacatcgtccccttctgagatctgaggacatggacacccaaccacctgccggtgacatcgtctccttctgaggtctgaggacagacactcacatggacacctaaacacctgccgatgatattgtctccttctgaaatctgaggacatggacacccaaccagctgctggtgacatcatctccttctgagatctgaggacagacactcacatagacgcccaatcagctgctggtgacattgtctccttctgaaatctgagggttggaacacattggcctggctcagtgtttctccatgtggttttgagaccacctgagttggaaccgatatgggttcccagcctcacgcctggagagctggattttgcgagtgtgaggttaggtccagcatctgcatgtgtaacgagctcccaggtgtttcgtagatgcattagggcttgagaagctcctttctagcaccatcttcctttttgcgcatgagggagttcaggtccagagaaataaagcagcaaggttagtggc

SEQ ID NO: 407915 - DNA, 1000 bp, Homo Sapiens
gcgggggaaaagggggaaggtcgggctcggggtggcaggaccccagagggcaggggtgactgccggggtgctcttggggcaaggtgggcgtcaaggcccccagcaaggttgggataaagtttctctccgaggcacagactgccgcctgcgggctcagcatttacctctcccttcctccttcctaacgcaacttcagcggagggctgagggctctactgcgcattacctggaaaacttatttcactccacggccctaagaggtgggccttattattagccacggccagggttagggtgaggccactcctccagggcagaatttcagggggtgcccacccccccgccctaaatcattcagcaatcaacataaattatagttcaacgcaatatatcttatcttgtgggccgcaagccacccaggtgcccaggcaagagcctgaaggcacaagctgttccagtacagcaaagaaaataattagaataagaaaagttttactagagataggaaacggataggattatatctgaccattattaatcattagtttgtagcatcactctttgttctattaccataatgatctctgttctattatgattaccttgggggaaaccaggccacacagagttaggagctgaagggccacagtgagaggtgaccagaagacgagagtgtgagccctcattcacgcccagagaagggccgctggagggctccttggcctagcggtaatgccagtgcctgggaaggccctggttacttagcaggccttggtctagcggtggccccagtgcctgggaaggcacccgttacttagcagacccggaaagggaatctccctctctccaggggagacagagaacgctccgctccaccacctcttgtgggaggtctgacattagccaggccggcccgcagtcatccggaggctccaacgtctgtctccctgtgatgctgtgcttcagtggtcacgctccttgttcactttcatgttcagcc

SEQ ID NO: 407916 - DNA, 1000 bp, Homo Sapiens; identical to SEQ ID NO: 295215

SEQ ID NO: 407917 - DNA, 1000 bp, Homo Sapiens; identical to SEQ ID NO: 225027

SEQ ID NO: 407918 - DNA, 1000 bp, Homo Sapiens
aggtgacttgatcaatgagttggcgagagttctaagatgtgtctttcaggcacatatctcagatttgtaaaattattatttatttatttaattcatttttttttttgagatggagactcactctgtcacccaggctggagtgcagtggcacaatctcggctcactgcaacctccacctcccaggttcaaatgattctcctgcctcagcctcctgagtagccgggattacaggcacctgccaccatgcccagctaatctttgtatttttagtatagacagggtttcaccatattggctgcactggtctccaactcctgacctcaggtgatccacctgcctcagcctcccaaattgctgggattacaggcatgaaccactgtgcctggcctcagatttgtaagataatttaaacaagactcagtgtctctgcatctcacactggttgtatattgcattaaaatggtgataattctcccctaatcaaactgtgcccaatgctggcaaggacactaatgttatgaagacaagaggtagctgaaaaataaagagacaatagccacgagacagacccagaggtcaggcagggcagggttgccgtgaggacatggctcgtcccacaggacctgggaactggtggtcacagcagtgcaaggtcctgttctctcctctgcagggacagacaggccaccagcctgacagagacggcattagtgggcagctgccaggaactagcagggattgcactagactttatagcgccatagttcagaattgctggatttggagacaaaatccaggtttgaattgtgattctatttcttactgctccgtgtcctggggcagccaggtcagctctctgagccctatggtctccatggctgagtgagaatgcccgcctccactcagaaccagccagtgtggtgccagcaacctatctaacacaagcaaagaggatttcttaatgaaaacattttgtcttgcacaaaacaatactcaattt

SEQ ID NO: 407919 - DNA, 1000 bp, Homo Sapiens; identical to SEQ ID NO: 295217

SEQ ID NO: 407920 - DNA, 1000 bp, Homo Sapiens
ccagggtaagaccttaagggcagggacactccacagtgtctggcaaatgatggaatggacagtggcctggtccataggccaagctggaggcaaggtggcctgtggcctggaacagtgactcaggcaggaggaatgtggctcaggctgcctgcagctgcgataaggaggacaggatggggctctgcaaaggacatcctgcagcagccaggggactttccatgcagaagcacatgtggaaacccacagcctgagagaatcctggcctgcatactgcacagagtccttgagggtgagcaagaagaagactggaaatgccatccctctgtcaccaatccacagtgggtttggggaggaggcatggccaacatccactgggctgcacagacagttttattactaccccacctggctcctgccttctggggccctgcagcccatgaattaatccctttccaggctagcctggggtacatccatcccctttggctcctaacccatggagtcaagcctcgggcacatttctcctaccagcctggtttgggccatatctatgtaatgcttttgccttcatttacttaggttgctcccttaaacaggctcacattttaaacataacctctgcctcctaagcaaatacttatattcataaattactcccacctgaaccaccaccactgccaccacccacaggattcctgggcttccttgcagcatagataaaagcttttttgggcatccacttaccaggcactgggtgggagcaggcagcagggcacatcctccctccttggaagcaatatttactcagcaattctccactcagcagtgtaaatcactgtggcttcccagcaggcatatgatctctgcctggtcgggtttctctcccttttccatgactgaatctgaagctcaagcccctttccccacagcctctcccacatatgcctggaaactgaggtctggctcatccttcagggagctccatgcttccctggtaagg

SEQ ID NO: 407921 - DNA, 1000 bp, Homo Sapiens
gattattttacaacactgttaaggtgcagagggttgtccctcatttattacttgactaataaatactttaattacacttaataaataatgtaagcagggctcactgaagtggtaattctttaaattaattattaactgcatgcaaaaggctgcactgccagtaccactaaaagaaaattcaggctttaatctagtgattattcattatctggtataaaggctccatttgcatattattagggaaataaacttcggcctccttggcaatacagatagatctcaaagtccatgcattatgaatctccaaatactaaagcaatgataaacaatatgtaataaaatcctcagtttatagctttatagcagctggtttttgatttttcaaatatattacaatgataaagtgaccagttaatgtataagctctttgtgaaaggtggtgcctacagatggtcgactgataggaaacagtaaatgtgcaaactgctcatttcccttgagattggagtcataaagtgatctcagtaagatatgagaagaaaatacccatttaacccctttctctgcagcaacccaaacatggtagtgcactgaattgttttgtatgtgtctgtttctcctctcctctctggcttcacatcttcactttggaaaagtgaaagcggaatacctggttatccggaggtcactgtctccacacagagtggtgtccttgatgctagcttggggcaaagaagccagagacacgttctgatttccaacaagctggaacagctctgctggtgaggagtgaaaggaaacccagactacccaacttctcatctctatggtcttggagccagcttgtggttgcaataggaatagaagagacttccttactccaatcccaccctaccccctcatcctgcctcaaccagtcatgcagagagatgctgaatggctgcctgctctcaggggaatgatttgtggaggtttaattaaaataatttaatcaatcaaa

SEQ ID NO: 407922 - DNA, 1000 bp, Homo Sapiens; identical to SEQ ID NO: 295218

SEQ ID NO: 407923 - DNA, 1000 bp, Homo Sapiens; identical to SEQ ID NO: 295219

SEQ ID NO: 407924 - DNA, 1000 bp, Homo Sapiens
ttcatccacatctgctcctttactttgcttaatatactatagtatttctcttagatacaggggaagacaaagaatatcaaatgacaagtgaagaaaaattaacttagaattattcacagttaaattgtatctatactcaggttatctaataaaatattaaataaactatgtatcttttttgttgtcctgttatatactttccatgtttctcattacacaaatacacatttagaaagctgaaaatatgtagatgagcaaatacgaggttacctaaaatcctatcatccagagatgataactattgacattctgctatatatacttctaaacattttcttgtaaaacataatttttaaatagattatattcgtatttttgaggaaaatatttttcagttaacaagttgctatttcaaaattaacactgtaaattcctttctatgacagtaaatacacatgtatatttcatgtgaaatagttgtagcaacttttactgtataaacccatgtaacatatttagcaaatcaatacatattgtaggaaacttagtttccaattttcaatatgttaaaattttgacaagaatatttttgtgtaaacatttttataagtatataatgcttcctgaggataaattctaaaaagaggtcttactaagtcaatatatattttttcctataattttgacatgatttgcgaatttgcccttcaaaaaacttatacccatttatactctgtttcacccttcctaaaaagtactagttatcatccttcacttttcatgtttagaatcggttaggtgaaaaatagcatttccatttactattttttattattttcaactactgttgaggttaaatatctttctatgtggttttgggccaattttatttttctactagaatgataatcttttattggtttttcagactattacctatattcctgagtctgacatatcaaagtttttaatccaataaataaaatatcattttaataaa

SEQ ID NO: 407925 - DNA, 1000 bp, Homo Sapiens; identical to SEQ ID NO: 295220

SEQ ID NO: 407926 - DNA, 1000 bp, Homo Sapiens; identical to SEQ ID NO: 119301

SEQ ID NO: 407927 - DNA, 1000 bp, Homo Sapiens; identical to SEQ ID NO: 295221

SEQ ID NO: 407928 - DNA, 1000 bp, Homo Sapiens; identical to SEQ ID NO: 295222

SEQ ID NO: 407929 - DNA, 1000 bp, Homo Sapiens; identical to SEQ ID NO: 119302

SEQ ID NO: 407930 - DNA, 1000 bp, Homo Sapiens
aaaggtttagagtgaggcttccacttcactctccggtccaagagttatactatctggtggaagtgtttctttttccttttttggacagttaagctacagcgatgggccaactggcaccagtgtggagagacaggtattcctcactttgtggcaccaacgtggttctggcaaagtggcctcttttccagtaaaacagtcttctcccctccctcgccttccattttaggaccagtggtttgtccctggggaagcaaccccaattacagccagctttgccatctgtggaaatagcctggtcaccagaggcacagaagccagatgcgtggccatgccggcggcagcacccgcggcagcacccggggcagcccctgcccccgacccatgaatctcagtgtcccccaggccgcccacgtcccactctgcccagcctacaccacctccctcaccgcaaagtgcccgctctgcagctccatgcccctgcccagtggagcctcagccccgtcccacctgcagcatgcccagcccaagtgcccgaaacccagagcctcggactcagggcaaaaggaagccgccccattccaccacatcagggtctccactgtgcttatttagagcagagcacaactctccttgcgtctgagtcccttcacacaggtgactgagaggctcaggacagagcattgcaggggagacagaggaggggctcggcctcgccaagcagctggctctattcatttagcagaaccgctgccccaccccctcccagcccctgcacggagggaggccactggggccggcccgtccccaacttctattttgttttcgccagagccgcctccagactccctcttcacattttatgtcaactctggggccctgctggctgaaagtgagttctgttttccggcagccctgtggcttttggactcggccttgaaattagttcatggcgacccaggcacacatcgcgctgggaagccacgtgggagccgtgcgggtg

SEQ ID NO: 407931 - DNA, 803 bp, Homo Sapiens
atggggacgccaaggcggtgcagccggctcgagaaggactccagacgccctgtccgccccatcacgggggtggggggctacccccaccccaagaagttcagctacaccctggcagggcccacccggccatggttggccccgagcccgccgcgcctacctcagcgccgggacgagcggcccatgggcggcgggctggcggcgggcggctgcgtggcgctcgcggctggctccggcgcccggtggccgcggagcaggcggagaatttatgaatggagagcgcggcgcgggggaggccggcgcgagaggaggggccgcgcacgtcccagggacgcagctgggggtgtcctggaattcacgactctgcagcccgaggtcccctctggcactgtggaggactcgccatgcctctcctgccccctcccctgtgtgacagcgatcacagaccccggcacaaagctgagcagagcccatcggggcccaaacgtgcactcacagaggcctgctcctcgtggggtgacatcagaacgacacccgcagaaacccaaagcccaaagctgcccccgcttctccctcttagaccatcgaacctcatcctgcagatactcaggccacacacctgccaccagcctggcccgagcgccaccccaacccctctgagcccacgcctaacaccccacagcgcctcctctttctcgtcccaaagaaaggctgacaccgctctggcacgtggctggcccagctcagcctccccgcctctgcccttgcaggtgccctgtacccaggcctctgtccatgcagccaga

SEQ ID NO: 407932 - DNA, 789 bp, Homo Sapiens; identical to SEQ ID NO: 295223

SEQ ID NO: 407933 - DNA, 1000 bp, Homo Sapiens; identical to SEQ ID NO: 295224

SEQ ID NO: 407934 - DNA, 1000 bp, Homo Sapiens; identical to SEQ ID NO: 295225

SEQ ID NO: 407935 - DNA, 1000 bp, Homo Sapiens; identical to SEQ ID NO: 295226

SEQ ID NO: 407936 - DNA, 1000 bp, Homo Sapiens; identical to SEQ ID NO: 295227

SEQ ID NO: 407937 - DNA, 1000 bp, Homo Sapiens
gatggttccataatcaaagtcctgtgctgattcattgcaatgatgactgtttagccccagctgcaggaaaaaaaaccgaacagaacaaaactagaccgggtatggtagctcacgcctgttaagtccagcactttgggaggctgaggcaggaggatcacttgaggccaggagtttgggaccagcccgggcaacatagcaagacccctatctctacaaacaacaacaatagcagcagcaaaatcccactaaaataataaaatgctcactgtaagcagagagtacttctctgccctactgacttgctcctcctactgagcaggccacgtgacttgctccaacgaatggaatgtgtgcagatatgtatgtcacatccagccagaggctttcaatatgattgaacctggactcttgccctcttgccttgcacttggagaagaatgtgctccaggatgcttcagtagaaagtggaaatgctgtctcccgaatttgctgaacgatgatgttctgaggagacctgcacttgagaacaaaagtgactactcttttgtcctaatcttaaatcccatcaccttggctgcaactgctgagtgctggtaatgagtgttgagaggcaatccgaggatggtgattaggtattaagcctgggcaggtattaaccgagaggtgtgtggacctttcgctcagcaccacaagagcagatctctgccagcaagcttatctggccatcagccagggacagagctgcactgtggcaaagtgaaatgtgattttaatgattctgagcacatggtttctgcctccagcatgctagatttgtagactggcattttttttcccttgggtagattccagatgttgtataacttgtgcctttctaagttacagcatggtagatggggacttgtctttgttatgagcatgtacaatgtgggtcgcagttaagcactgtcaaatagcctcctaaaagatgagtttgtgtggaataaagcactgaaaaagg

SEQ ID NO: 407938 - DNA, 1000 bp, Homo Sapiens; identical to SEQ ID NO: 295228

SEQ ID NO: 407939 - DNA, 968 bp, Homo Sapiens
atgagggcgcggccgcggagctgcagtggcggggagtggggtgcggatcttgtgtttgcgcacgcagtcgccggccacctcaggccggagctagagatacggctcgggataggagggcccggcggctctgaggcaggttcgcctcgagccgcacggcccggagcagcggctccgcggtggtccccggggcttgagaggggtgcgggcctgggagcccctgagggcctgatttacggaactccccctccttcctcctttctgccgttccctgctctgtggcggatgcgcagggatcagtagggacggcagcagtagggccactcgggcctgccccgcttcccgcattgcccggtttggcgcgccgcctccgggccttggcaaagccccagcgcccgattgtcactgaccagtgcttggaagtcctttaccgactgcccgtcagcgtcccgcggagaggattttgcgtctccaaagacgcccctcttccgaaaacaggctcctctgtgttctcagtcgggtatatttttctgtctccaaactagattggcagccgttttttgagagcagggtcttgctctgttgcccagactggagtgcagtggcgccatctcagctgactgcagattcaaccttctgagctcacgaaatcctcccatctcaacctcctgagtagctgggaccacaggctgagcacagggttgctccaggtgggcccaaatgctgaagagcctcatgttagagtttttcacctctgcgatggaactgtggtggactccagtatcatcattccagggaggcatagccgcaccaactgtgttcccaggtttcacatggagaagggttttagaaagtgcagatagccttgaaaccattggtttcctaccactgtttatttcagcataactttttttgtgtggaatgctagctctggaagagcagaaataaatacagcttaagctttgaaccat

SEQ ID NO: 407940 - DNA, 1000 bp, Homo Sapiens
aagacgaggctgtgcttgccgtgcccaccacagaagcacatttgacctgatcaaaagcaggtggaaaaggtcctgaagcacagatattttctcagtgatgttgttttctccaaaatgaaagagggaaggtaccctggcttaggcccctggtgttctgattgaaggtgagaatggaagtatcttcttcaacatgttctcccatctgactgcaacaagtgtgctccagccaccagtgtcccagttgctctgaatgatggtgagaagggtacccaaacacttgaatggtactgtaccctctacttgccatctgaatcctcacttgtggaacccaggcactctggctgtattcgcgagtaagcataggtgtgggactgtgtcctgccattgcaccatctttaatctggacttgtggacctcaggctctctgactattcatggacagaagtttctgcaggcacaggtggggtgctgtttcctcccattgtacacctgaattcaggacttgtggaccccaggtgttctggctgtgttcatgaacagaagtgtcccccccaaacaaacccatatatggtgccatctcctcccattacaggtatggtgccatctcctcccattgcaggcattgcactgcctatactctggacttatggccctcacatgctctgattgtattcataaacagtagtttcttcagtcacagatatggcaccagcccctccaacagaaacagatgtgctcaagctgagtggtccaaaggcgtttgacagaagtcatgaacagaagtatcttggggcacatgtttcttctctgttgtgcaggcttctccagcagtaacaggtttgcccaggccatatgggccccaagcgctctgaccagacacaagaagagaagacttgcagtcacaggtagtgtgttgtcccctgctactgcaacataggtgcttggaaaggtgcaacagggtgctctgcttgtggtggaaacataaaggcctccaagcata

SEQ ID NO: 407941 - DNA, 1000 bp, Homo Sapiens; identical to SEQ ID NO: 225028

SEQ ID NO: 407942 - DNA, 1000 bp, Homo Sapiens
tattgaatagtagaacatgtgtaatatattaagggggactgaacacccatgttaagaggtagaatgctaatgttagaaatcccatgtgtgctttgatcttcccaatctaaatccccttctttagctgtcagaggtatctgttattccgaatcttgtgtttggcatttccttgtttttctttacagtcttaaccatatgtgtttattttcctgttctaatttgatgtcaagaaatcatactgtttggatttttctgcaactctattacttgtcctccaacgagtgttcaagagatccattcacattgcaaacttatcctactgtatagccatccattgtaagaatacattttttcatttatattgtgtacattactccagtgaacattcttgaactcctctttttgtatcctgtgcaagaatttctgtatgtaactaaaaaaggaattgctagctcataggttatatgcattttcagccttactcaacattgcccagttgttttctaaagtgtttattatactcatttactattccttttacttcgtatcctcaccaacacttggtattattaaattttaaatttttacgcacttgggtatgagttgatatgtattattttgatttcaaatttgcatattttggtactaaatgaggttgagccccccacccccgcaactttcatgctcattggcattcatgttttctcttttctgaagtacaattttatgtcatttctaatttttctattgatttttatatttccagagtttttgttccttttaatgctttgtatgcatttcttaaatattgtggattgtcgtccttgccggttatatgtgctgtgcatgctttcttactttaacctttaaatgatggtagatattctcaattttaatgccttcaaatttaatgctgttttctttaatttatttacatcttgtgtatgaaatctctcctctcctaagagtaaagatattatccctattttctataaatgat

SEQ ID NO: 407943 - DNA, 441 bp, Homo Sapiens
atgggctcatttatttcacttataaagaacctggccaaggaagagatagtgcctaaagtggccagtattctgaccgatatgttagaaaaatggtgtgccgaccaattcatgacatgtgtcccaaaactagcaacggaaattgtattcgccgtgttgaggtctctaatccagatgatgctcatctatgtactggaaaaggcagagtcctttcctgacaagctgctgaaactcttcagaaacatctcatatttcctgaagaagatgatgtctggacaagcagcacaggaggaagagggtaatccggatgagttttctgacctactctgctgctgtgattaaacaaccaccaggaaattttgacgacactgttctcctgagctcctccctttcctccgggaacaaaacaattgaatttacaaaaataaagtgttatttgactgg

SEQ ID NO: 407944 - DNA, 1000 bp, Homo Sapiens; identical to SEQ ID NO: 119303

SEQ ID NO: 407945 - DNA, 1000 bp, Homo Sapiens
cctcagggctggaaaccaccacaggtaggaggctgggcacgggggctcggcctgtcatcccagcactgtgggaggtcgggtgctagaatcccagcactgtgggaggccaggcacgggggctcacgcctgtaatcccagcactatgggaagctgggcgtgggggctcagcctgtaatcccagcactgtaggaggccgggcgccgtggcgcatgcctgtaatcccagcactgtggatggccgaggcaggcggatcacgaggttaggagttcgagaccatcctggctaacacggtgaaatcccatctctgttaaaaatacaaataactagctgggtgtggtggcgggtgcctgtaatcccagctacttggaaggctgaggcaggacaatagcttgaacgcgggaggaggaggctgcagtgagctgagatctcaccactcactgcactccagtttgggtgacagagcgagactctgtctcaaaaaaaaaaaaaaaaacaagaacatctcccacacactcacagtgcctttgtagccccagggaaagcaatcccttaagatcatttgttgggtgaaaagggtaccaagtacacagtgttaggaccgtgcaaaaaaagggtgacaggaagtaccctttgcaaactttccataatgtgtacttaattcactgctcttataaaatgaaattaaataaaacaaaaaaatactactgaaaaataattgggcaacatgcggtggctcacgcctgtaatcccagcactttgggaggccaaggcagacggatcacctgaggtcgggagttcgagaccagcctggccaagatgatgaaaccctgtctccactaaaaatacaaaaattagctgggcatggtggcaggcacctgtaatcccagcttctcgggagactgaggcaggaaaatgtcttgaacctgggaggtggggttgcagtgagccgagatcgcgccactgcactccagcctgggcaacagcgtgagactctggctcc

SEQ ID NO: 407946 - DNA, 1000 bp, Homo Sapiens; identical to SEQ ID NO: 295233

SEQ ID NO: 407947 - DNA, 892 bp, Homo Sapiens
atgtggcgctgcagcctccaagaatcttgcaacggcagcagtccgggatcatgttcggcctctgatttcctgctagatttactggttctggccacagcagacaaggagaaagggacagggtcaccttggcgggtgccaggcggagcccggccagacgggcgcggctggagggcagcgcgcaggcgcaggcggcgcacgtggccccggacacgcagcgctgcggcggggccagcgccccaaccccggagtggggccgaggcgcgcagcctctcaacgactcgacgccaacggggtctctcggatcgcggcgcgaggcaggaggggcggggcaggagggccgcggcaggcccgggccgccaaagttgtcagcaaggtcgagggccggacgtggggccccagagcgacgctgagtgcgtgcgggactcggagtacgtgacggagccccgagctctcatgcccgccacgccgccccgggccatcccccggagccccggctccgcacaccccagttcggctcaccggtcctatctggggccagagtttcgcccgcaccactacagggccgctggggagtcggggccccccagatctgcccgcctcaagtccgcgggacgtcacccccctttccacgctactgcagccgtcgcagtcccacccctttccgggaggtgagggaatgagtgacggctctcccgacgaatggcgaggcggagctgagggggcgtgccccggaggcgggaagtgggtggggctcgccttagctaggcaggaagtcggcgcgggcggcgcggacagtatctgtgggtacccggagcacggagatctcgccggctttacgttcacctcggtgtctgcagcaccctccgcttcctctcctaggcgacgagaccca

SEQ ID NO: 407948 - DNA, 1000 bp, Homo Sapiens
tggcttttaattcgcagactagaatgtttcggattacagaagaaaccggttctcttcacatctttatccctgtgatgcagcattccacttgcaattggaagccgagagaaaccatgtttatgaaagtaaagaggctgctcagatgactgcaaaccagccttccttactggttttatcactggtaatgttataaagacagttgtccagtttcatgaatcttgtaggttttttttttttgattttttttccaaaatcagtattgtagaaaactatgctgccccagaagagatgattggacactctcaagcgtggtgctggactttgtcatctcttgcacagccatctccacaccttagtgcttacctcatgttagttttttatattctgcaaagacgaaatcaaaataatccaaatttgacacaaatacctgggctacatcttatttgagatgtttaacaatgtctggatcatcttttcttatatattacgcaggaaacactgtgaagtaagcaaagttggaatgcccaagtgaaagaccatttgaatatttacaagtagatttcagacaggaatactacagggtggtcacaggataacaaattctaggcagcagatttacatgacttgaggctgtgggctgttaagacgctgaaaaaccagggtgtggaccaagctggctaaggctgagtggacccaatgtggtgctggatttgacggaggttttacctaggccctcattatatgctcattaacatactaaatcacacacccgccagtgccatgacagttctgagaccaatatttgatgtaaaaatggatggcaccacagttccgagaaatctccacctttacccaggaattttcatgaacattccactccttggttaaagaaacccatcaagatgaaaccccagaatccattgttctctcttgggtatgcctgaactcccctttcttgagtgtgtactttttgctttgcaataaatctcttctttcacta

SEQ ID NO: 407949 - DNA, 1000 bp, Homo Sapiens
tgattttgggaaaggtgctgagcccttctgtcccatgaagttcttgcgagacagtgtctcaccagcaacctggatcgtgagaaccacagcgggtgggccagatctagatggagagtgtccattgggcagagctgcttctgtgaaaggaaaggaagtttttcaagaaaccatgaggggggcccaagaatccaagtttctaactctgggatcggttttctgtcttttacctcggtttgcctctccctagctgtgtggtttatggcaagtcactctgtgcctctgtctccacgtgttcaaggaggcagccggtccaaggggccttcatagaaggggctgccgagatgtgagccctgcattggggggatgccccacagaggtgctgtcccccatcccctttccaggtatgagtgtcccccagctctgagtgaatcagtaggaggtgctggacctgggctgattctcacagtgggacctcaactctagccccgggttggctgacattagaggactttgggtcgttgttctggcagctgcaaggaagagccaatgtcagggagggaaaccccacattccctggcactatccaaacaaaggtttggttaaaacaaagaattctcatggagaagagtctgaaggacccaaaacacatatttctgtagacatcccatcccaaaataaacccatggatcaagccagacccaaatacaaggatgctgtgaaccacatggttgaatattccacactttccccatccattaaaccccacccagggtgggaaggggatggatttccctcagttctcagggcctagaagagcagggcttttttccctcaactggttgagttttactttgtgagcaccatgattcctaaaaccagttatattttctttttctcttgggccgccagggaactcacagcgaaatctaccaaccaaagaggatgtccatacctgtctttttctttcttccttcattttttgacttaatttcctcacttg

SEQ ID NO: 407950 - DNA, 1000 bp, Homo Sapiens; identical to SEQ ID NO: 295235

SEQ ID NO: 407951 - DNA, 1000 bp, Homo Sapiens; identical to SEQ ID NO: 295236

SEQ ID NO: 407952 - DNA, 1000 bp, Homo Sapiens
gagggcggggggcccgcttctgcctcaccttgcagtcccaggagcagaagatagtgacggcgtggatgccagaggtgctgcccacccggtattagcattagcttagcattactgtagtggctgtaatacatgatgatgtgggtgaagcagcctgtgtctttgaggagctccaggccagagcagatgcgggcagggcccggcggggcgggcgtgaaggcggcctccgggcccacaatgaaggccacgagcagcagcagcaggaaggcgttgaaggccagcagggtcttaaggaagaggaagtaggagagcacgttggagctgaactagcccctgatgcgcttcaggacgtagcgccacggcttcagggcctgcaggcccaagagcagcgccagccccaggctgtgcaaggccagcacacagacatatctgagccaaccacagcaggagcagactctgccatggccccgcaggctcctccacttcccgctctgggttcggctcttctctcgcaggccgcgtttctcagccaggcttaggggaatccctcgaagcacgtggtcccgctgcgccacagccaggccctggagctccttcaccaggaggctccgcttctcctcctcttcctcccaggacgtggggtccagcttcaggtcgtacagacgcaggctgtgccgggaggagcgcaccaagtctgcgagcaggggccggccaatggtgaggctgggaatgctggccaggacgcagagtgtggccgtgctgtgggtgccctcgggccccaagagtgtctgctggccactcgctgtggccaccacccctctccctctgctacagctccagcccctcctgggcctcccagcggctctgctcttggatgagcaagtggaaggagtagtgcatttcagtctcatcgtaggggctgggctcctggctgggaggcgccaaggtggagggaatgatatcttttcaacaagtggaattcacgttaataaatcaaaggagg

SEQ ID NO: 407953 - DNA, 1000 bp, Homo Sapiens; identical to SEQ ID NO: 295237

SEQ ID NO: 407954 - DNA, 1000 bp, Homo Sapiens; identical to SEQ ID NO: 295238

SEQ ID NO: 407955 - DNA, 1000 bp, Homo Sapiens; identical to SEQ ID NO: 295239

SEQ ID NO: 407956 - DNA, 1000 bp, Homo Sapiens; identical to SEQ ID NO: 295240

SEQ ID NO: 407957 - DNA, 1000 bp, Homo Sapiens; identical to SEQ ID NO: 295241

SEQ ID NO: 407958 - DNA, 1000 bp, Homo Sapiens; identical to SEQ ID NO: 225029

SEQ ID NO: 407959 - DNA, 1000 bp, Homo Sapiens; identical to SEQ ID NO: 295244

SEQ ID NO: 407960 - DNA, 1000 bp, Homo Sapiens
taaaaaaccacctaattctttgcatgcttctctaagtacagtagacatgctgccagggactctttatggaagaaaagttgagactcatagaagtttgcagttttgttttgatcaccccagagggttttgctcaaactcttagactcatttgtatttcttcattgggttataagaactaaaatttaatgttctatacaaatgtgaacaactaatacttggtctcctatctagaacttgtttgccttttaggttttcttaatgtatagaagaaactaggaatattcacaaaggatttatttgaagttacactgggaaacgatttttagaatttgaagctctttgatccctgtgaatctaactttatgactattttattcagctaatctttgagaatatttagagttttgatttgcgtggcactctgcttttaatcccttgttgaataagtgttagaaaccttgatcttggccctatacctgatcacctctaaaaacatgaacagtgttacaaaggcagttgtttagtaagcttttttggattgttttaattggctgactgagggagacaaaattagtttttttttttctttctagaataaagggtaataaacttggactttagagttactgctaagattgacatttccatttggggctttagaaatatattgttatcttaaattcaaaatggtactttatctaattgaattgaaatcttaaaatttatgagaaacaaaagtcactttatgttcttagtaaatatttctaatggggttataggagatctaagtacaaaaaaaatttaaaattttgttattaatctcccctccttaaggaaaattttattaatatacataattataatttagttataagaacaacttaagttgagtacagtggctcaagcctgtaatcctagcactttaggaggccaaggcaggaggatctcatgaagccaggagttccagaccagcctgggcaatagagtgaaaccccacctc

SEQ ID NO: 407961 - DNA, 1000 bp, Homo Sapiens
gcagtggtttgctttccaaatggtaataagaagggcctggcagtggcaacctgtccacgtatcattaaaaatggactctcctgcttcgtttggaattcaacccaatgaacttgaataaactctggacaatgaccagcacagagccctaagcaggatacagcaagattatttgctttactcatccactgagtacctaccatgtgccaaatactatgctatatgccgagtatacactggcaaataaaacagatatggtccctggagcctatgaatcttaccccatctagccacaaataataaaaataagaagaatctgaaggacaagtgggacagaaatactcaagcagaatgagggtgagattgaagtccctgaacatacagtgccctttacacttgatcttagccaaaaggccgagaagagattacagtgctttttaaaggtagcatttcacccagccaataatcaatccctttggccttcttgaggtgcaaggccacacactcaaattctttaatcaaacaataggctagtgcaaatggagctatttcttaaacccagctgtttacacagcagctacaaatctgttcagaaggaatcccccaccatccacaactgtctatcgagcagatgtgcaagagtatttgtctctcaccaccagggttgcagtcaggacaagagagcaggtttgaacgtcttcggctcctagaactgcacaagctgtgtcttcagtgcccagaggcggctgcaacgtctccccagttctcctctcagaacaatggaaattttttttagaggcgtaataggaaggtttgcattgaattattaaacaatgggtattgaaaaatatgttttctttgacctctgtacttctagcttttaccagtcagtgttttcttgtaccaaggctaagatatgtataacactgaaatggatgtcttcttatataatattttacaagcttttgaaaacctgtgccctttaataaattttaaaacgttt

SEQ ID NO: 407962 - DNA, 1000 bp, Homo Sapiens; identical to SEQ ID NO: 295245

SEQ ID NO: 407963 - DNA, 1000 bp, Homo Sapiens; identical to SEQ ID NO: 295246

SEQ ID NO: 407964 - DNA, 951 bp, Homo Sapiens
atgggatttgatgggggtcagcagcagaagacgaccctatttccaaacagaaatcactggcttcagtgttctggtctcctgtggtcatttctgggggacagtgacaaggaaactgtcaatgccctcagagaccagccctttggagaagccctgggaaaggaccggcagtgcctgccactcccccatctgcacgaggttgtccagcgtggccgcgtcttaacctccaacagctcacaagccacgtcgccgcgcccgggcttccccgcgggcccgccggtccggaaggtcggcccggggctcttttctccgctgttctccttctctggcgcccccaggacacgcggccagtggacgcccggaacggccgaccgggagtcgcggctggggatggaagctggaattgggggtgcgggatggagcggagagaggaggccccgcgcgccgtcggccgcctcatttcagactcccctgcgaccccccccccgccgccagccgaagcccgggccgcccagcccctcctgccgctgcgggacgccgaaggtagcgctcacatccgcgccttccgggcctggcgcccacgtgcggagtccccgggttaggaaaggccgcgcatccggaggccacgcagagcctcggggcttgcgcagaggggctgcggtgagtcctgaccctgagtgggggtcacggggctcgttgctcgctgaagtgaacacggttgcagctgtgcacagtggcggagggagaggatgagggactctgacccaaggttatgtggcagtgaggggcaagcagaaatgggggcctccggaccccaccccgagacagggctgctggccgctgcactatgctgaatatagcccaaattcttacatgggtcgtccccggggaatgctcatttttcaggctccagagcttgagagaaagtgcgaacccggtccctgagcaggtctg

SEQ ID NO: 407965 - DNA, 1000 bp, Homo Sapiens; identical to SEQ ID NO: 119307

SEQ ID NO: 407966 - DNA, 1000 bp, Homo Sapiens
taaaccctcaaagattcccacaacttgaccatttgacctagcttttctcactgggtaaaaaaagcaagagggaaaaaaaaaccactgcagctctctcccacccctgctgttcagccttcagtttatctggcctctgctatgagtcacagctgactgaagggtgggggtgggttgtgagtcatggcctaaaacaaagatagaatttgatgggggtggacgagcaggcgagagagaagacacggcaagttcaggcattctctcagtgtttagggtgatgtcttctttcctgcagctggggaagttgggcagagtgcccccgaaggaggagattccacacaggccctgtgtatctgagagttgagttgctgatttcagaggtgtttgtatcattgctctaaatgtgtttctgctcccctcccacccaagatgctggttcaacggaccatttcatcctaccattatacagaacccacaggagctagttacctggtcagtttgagaagttaatatttaaaaagactaatggttgcatatggcttccacaggaaagaaataataagctaatgttatctattgactcaatcccacatatatttacatttgacaacttaaaaaaaaaaccttcggctcaatgatagtttagctcaagtcactatgttaggatatatatttctttcatctatgactatttttgtctgcacagtaacctgcctcaagcacacaaatatttgtgtgtctggcctcaagcaattaacgtgtctcctaacatgagataaagattaaatgaaaattctgtcaccctgaaataaacctggaagcagaattcctgaatgtttgccaaataaggtgactatcagacttaagatgctgaactttgaaatgactgtcatagaaacaaaggcaaggcatggttggcgcccattcaacctggtcaataacatccttaattacaggacatggcatcattttgattcacagtggaataaaaggcatctatttg

SEQ ID NO: 407967 - DNA, 1000 bp, Homo Sapiens; identical to SEQ ID NO: 295247

SEQ ID NO: 407968 - DNA, 1000 bp, Homo Sapiens; identical to SEQ ID NO: 295248

SEQ ID NO: 407969 - DNA, 1000 bp, Homo Sapiens
tcaacacaactagtgtgcctggtgctatgctaggaggcgacagaagaaaaagacacaagacctgccttcagtagctcataatggagaagacagttgtacatacaatttgacatgatggatggtgtggctgggacatatatgtgacactggtgatgggtgccaggaagacagacccagtgctcaggtcattagagggtctggtgggcctccagaacatcagaaaccaaagtggttcttttcagagccagagggtgaaccaggtagtcaggacataaggatattgacagacattgatcaaaatagatcaatggatagatctcaatgtccaacaaccttccccccttcacacccacttctccacgttgacccttcctcagctcagatcttcaggaaggctgccccaaagctttgctgctgcccctgacaagatatatcaggatgtccaaaactaaccacctagaaactgtgtcctttggaaggcctccctccttgtccagactgggctacttgcagttatagttcatttgcactttaggatagtcagtgtccactactatattcaaggctctgagaagtcctgaagaaaaggaagctggatcattttgcttaacactgtgtcctacaggctcctttgtatacagaacactagctaacaccttcctctatctctaatgctttctgatctatgccctccacaagaagacctatgcctggtctggactagccacagttttcctaaggacgacagtatgaggtgagtcacaaagtgcccaacattatcaccaatagtatgtctaagtaatttttaatttaatgtccagatgctgtcagtcctgagagcaaaatgcaacttgataaaggacagctctgatggggaccacataaaaaaggctgcccaagttcaacagaatagtgagaagaaacggagacctatttgaaagatcaaagattgatgctcttattagatttggggaggaaaacagtgaaattcatgtttgat

SEQ ID NO: 407970 - DNA, 1000 bp, Homo Sapiens; identical to SEQ ID NO: 295249

SEQ ID NO: 407971 - DNA, 1000 bp, Homo Sapiens; identical to SEQ ID NO: 225031

SEQ ID NO: 407972 - DNA, 997 bp, Homo Sapiens
ttattgcaggaacagatgaagcatggaaatgctgtgtggagtgagctaagcagccgttctcaggagaaaacagacaaatcctcctgcatcctggcaaaccagctttgtggcctgttttatgtcatctttgctgagctccaccgggtcacccctcctgttggctttgtgatactgacatttcaggcactggcacagatacattggccttcctggctgggatttcacggacggagtgagcagtgctggcttggaggagccgtggcggcacagggcctgtgctctcagctgatcaacgccttgatagccaggaaaggcctgtcctaccccaaagggccctcgcagcactgtttgaaattgctcttgccatctttggaatggattcctcagtacatttcagactcgttgttgtgactttggttttaatccagggacacaccgtggccagtggagtgtctcaacagcatctatgatcgctgtttcccagagacagcatctcagataccgatgctgaaagagaaacagcagcctgtccccaagtggcaggaaatagtccattttaatggcaatttcataagtggcagatgatttttattgtaattttctggtgagctgattaagtggaggcagagtcagttctgaggcgtcaatgtctttaacaattcggggagacggaggccacgctcagcaggaacactgagtccatggaaaacaggccctgggcccgctgatgtgcataattccacgtttgcccctcatgtaaccaggatggtaaattacaggtgtcagataatcacgctctggagtggctacttgaggatgcgatcgaccaatttaagctccgtctgacacatgatcaatagcccgtgatgctgcatggaattgcaggcacagtgtccaaacctgcagagcagtggctcccagctggggcaactttgccccccagaggacatttggcaatgtctggatatgtttgcaattgtcacaactaggaaaggag

SEQ ID NO: 407973 - DNA, 1000 bp, Homo Sapiens; identical to SEQ ID NO: 295250

SEQ ID NO: 407974 - DNA, 618 bp, Homo Sapiens
agagcggcctgcctgttcccggctacagattatgatgtctgtgcagctgcctttcattcacagcttccctgaatggtgccaaagttaattcctccaggaatagccccaccagtcacaaggaaggggggtaatgcccaggatgcccccttcattctcactcctggtgcgggcttgctgccatcaacagccaaagggagaagtcaggcagcagaaaagcttgggaggccctggaaaccccctaagcttctccacaacagtgccggtcttatctgttgcagccacggcgagagtcccacatcatccatcctcaggtgggaaccctgcaagcctgtattccaccatgggaagaccagcatgctgtgcattggctccagggagcaccacgcagtccccggcacttccaactctatgtcctttgcaggtgaagcagctctattagcaggtgtctgaagaaggttgcaggtgcgagcaggtagaaggaaagcacacagaagctgcgggatgcacacacaaaatgggtaaaagggatccctggaggtctgggcagagcaccaggagtgtcctggggtgctcttaccctcctattggacagatgagtaaagtgaggtacagggacat

SEQ ID NO: 407975 - DNA, 1000 bp, Homo Sapiens
gacctcaaggccccccacgctcagctaacgttgccctcgctcatccagagcacagcccgagctgcaggagggccaggagggcagatgctccacagctcggacagcatccataagacccgcgtggagaaaatagcaaaggccagtgtggaacggagaggacgtgaacggcgagtgctcggagaacaagcacgccagcagcgaacccagggggaccagcccgacagccagtgcgctgagacaccggccaacggcaacgccccatcctcaccgcgaacgccactgtgacgcgctgacagtggatgcgaatgcgtgacacagacagcgagtgccagtgtgaccgtcacggctgatgctgagcactgcaccgacacaccacagaatctgcaggcccagggctcagctcctgcttgcggggcgcaggccggccccaccgtccgacgtacagaccagcatgggcaccttaggcctctccaccctcctctgcccagagcctgccaccatccgtgttacacaagagccaggtgctgcacagagaggccacgtgccttgccccaggctgccagctccagagaatggtccggggacgccatggtcatccggccccaggactgctcctgaccctcctgggacggatcctccgggcagagaggggacgccgtggtcatccggccccagggctgctcctgaccctcctgggacggatcctccgggcagagagggaatgaatcacattccggatggtggcttcaggtcagaaagctgtcaggtcacccaggtgccatgcgagctgctccccggagacggctttcggccttgggtttatcacagcggctgttttccgtctgccaagccaagcctggctttcatctcccctcgcacaacggtctgcttcctcagcctctgggcttatagtggttttcttttctactgtctgaaattgaatgtttagttcatctattttctattctctcatttataataaaaacatttcagatgagaa

SEQ ID NO: 407976 - DNA, 1000 bp, Homo Sapiens
caaagtctcaacaaccatcttccgcttgacgagacagatcattctaatttgagcagaagctactatgtcctgccctttgaacgcggcggcccggacagctgacaaggacacactgtgtatttccattccaattctgggagtgctctgaggcctctgggggagaaggacccatgaaatattcaaaacataagtgaataaaatatctaggtgctagatatgggccaggaagagccctcggccctgcaaagtgtgtgtgatggtgagaagctaccggaagagatggtccctgtgcttggttcattccttggacatttatcaagctgacgaatgtagcagaggtgcttcagtcggctgtaattccacgggtggagtgctggctggagagttacctggggctgtcacactgcatgggctccgggacactgtggctgcccttatgtggtgtccccggagggccctgcaggtgtcacaccgctgctccacactgccacctgctgtcagcatctgtgcaacgtatccaggtctctgggggctagaatgaaaaacatgcatctcgtaaccaatgaaatcgggcttgtcctgaagacctcgtgcattcatccattctcacactgctataaagacatacctaagactgggcacttcatgaagaaaagaggtttaattggctcacggttctgcaggctttacaggaagcatagcagcttccacttctagggaggcctcaggaaacttatagtcatggtggaaggtgaaggcgggacaaggcgtctcacatgggagcagtagagagagaaaaagagggggtgccgcacactttgaaacaaccagatctaacgataactcactatcatgagaacagcaccaagaagctggcgctaacccacttgtgaaggaccaccaccatgatccaatcccttcccaccaggtcccacttccaacgttggggattacacttcacggtgagatttgtgcagagaggacacaggtccaaaccata

SEQ ID NO: 407977 - DNA, 1000 bp, Homo Sapiens; identical to SEQ ID NO: 295251

SEQ ID NO: 407978 - DNA, 1000 bp, Homo Sapiens; identical to SEQ ID NO: 225032

SEQ ID NO: 407979 - DNA, 790 bp, Homo Sapiens
atggctggactctgctcttgcagtcttagtgtacaccctggttcttcaagggcagcaagcaggactattccgctcccggaagccctcggacaaggaactgtagcccatgtaccgcgtgacgtgagagcggagcccgggtctgcccgggcgcgggcccgcggccacggcgtttggatcccagatcccagcccccgcgctcagtccgggcttcctgaccggcgctctccgcgtcccttctcgcgcgcccttacctggggctggggaggtggggacagagccgggcgcagtcgggggcacagccctgaggcggggctgagggccaggccgccacgtccctggaccctgaaaacgggctcggacccccgctgcagcgtggactccggtgtggccgcggggcgtgcaacccggaccctggccagctccgtgtcctccagacctttactcatgtccccgcatcgccaggccgagctgcaccttcggtccccgcccgcggcagccgaggagaggagagcaaggcccagaccggggaggaacccacacagcctctgtgctccagcctgcttgaaagacaaggtctacctacaacgcagagatgcacacattaaggacaatgaaacacccaagtgttaggaaccagaataatcagccctaatagaggggaggctgatcagggagggcctcctggaggaggaggcacaacatcagggtgcactgtgatttctggagacccaaggagttctggtaaatgacaggtgagaaaaagaaaatgtaataaaatataattgaaaac

SEQ ID NO: 407980 - DNA, 1000 bp, Homo Sapiens; identical to SEQ ID NO: 295252

SEQ ID NO: 407981 - DNA, 1000 bp, Homo Sapiens; identical to SEQ ID NO: 295253

SEQ ID NO: 407982 - DNA, 1000 bp, Homo Sapiens; identical to SEQ ID NO: 295254

SEQ ID NO: 407983 - DNA, 1000 bp, Homo Sapiens
tctgatcaggtcctttggaaagagcaagggaagctgttcatgttctatcctgcgtgttctcgagaaagttttgatgacagaaaacatcacacagaaaggggaaggcatcgcaagtttccagctccatggatttttgcaaactgagcacatttgtgggccaggagtggggcccacagcgagaatatccttcctgctgctcctgccgtccatccaccagcacagccagttcccagctgtggaacacacagagctgtgcactgttgagttgatcacgatgagaacagtgagtgtctctcacctgtggctgcacttgctggaagcaccgcctgctctggcctctttgctccagaacattccctgctgaacagtgacaccagggaaggccaaggatgggcacacaaggctcagtccttcacctgatggcggcttggccatgttcatctttcccttttctcaaagacctgtgtggggccagagaaagctggggtttccggtggcctgcagtgtggcagaaagcagagccttccactgggaaaaggggaaaaagggaattcttccgaagagaaggatgaagccagcagcaggggtcccggcaggcctgacccccatggagctgatgaggccgagtgtcaggaagcactcccattgtcctcgaaaacagacacaggtcaacctgcgttacggggtctgcgaggtcatcagataaccccacagtgtcgaatactgtaactacatgcctgcctaagatgacctggtatactgtaggtgcacacaagattctccatagtgaaagtacatatacaattgttgctaatttttgatcctagaaaatccactggattgatactttagaagaggataatggataaaatcaatcgatcggaaaattcaaatatttagaaaatactagtttcaatctactgtaaaaatatcataaatttgtactgaactatttttccttattacaaaaatattcgagcaataaaaatgtcggatatta

SEQ ID NO: 407984 - DNA, 763 bp, Homo Sapiens
ttggcggagaacgccgccgcagtgtttgacctctagcggtgaagggggaaggggaagaggaaaggagagaagtgatgtcagggacaggcttgaagattcctgatgtctcagcacccagcacggctgtcagcctcggcaggaggaagaccacggaaaagagagatgaccatgtgaccaggaaaacccctctacaaggaagcatacatagtgggtcaaggagagggtgtggactggaggaaatctaagtccgtggagacgtagccctctggctctaacctgtgaggacggggttccccctgcctcgtggactctgctctccagagcctgggaccctggcaggtgcttcggatgaaggagccgggaggagccgactgcctttccttcccgccgggatccgcgaaaacgtgtggtcgggactccgagcgcggaaccctcaaggggaagaagaggccccgtggggaacgcgcagcgtgtcagggctggcaccagctccgttctggaaaagaaattgcgacgaaaagagacggcagccgtgacctctgctctgtatttccttcctcttcggagaggaagatggaatttagtagtttattgaggggcgggagatcctggctagcgcagagtgtagccatcgttttcggctctggcacactcgagggctgtcattcacatgtgtaatagatacgaattcggaaagatccagtggaaagaatactgcaacaacttctcgcaattacttcgataattcgcaattgctctatta

SEQ ID NO: 407985 - DNA, 1000 bp, Homo Sapiens
cattattctccatgccatggagtgttttgcaaaacataagaatgatcagttccttacatatttggtagaatttaccttataaaacacagtaggttttgtgtctcttctggagtccagatactgctatggactgaatgtttgtaccctctaagattcattaggttgaaatcctagcctcaaagtggtggtattaggaggtgggacttttgggaggtgatcaggccaagagggtggagccctcatgaatgggattagtgcccttatcaaataaggcaaaaggagctctttaacctctcccaccatgtgaggacaaagtgaaaagacaccatctatgaaccaggaagcagggcctcaccggatgccaaacctgccagcacctggcccttggacttccagccaccagaactgtgaagaagaaatttctattgcttataaatacccagtttacggcattctgttatagaagtgcctaataggctaaggcaaatactatatggtatttaggattgcttctgtatatttttaagacttttttattttggaataataataattcacagaaaatttacagagaaagtctccacatgcccctcaccccacttcccctaatgttaacataaccgtggtccatttgtcaaaactaagaaatgaggattggtaccatactattgactgaattacagacattacttggattttgtcaattgttttactaatattctattatttctgtgtcagattccaatctggataacatgttgcatttgttcatcacgtctcctttgtttttcctgggctgtgacagtttcttattcttttcttgtattgcctggctttgaattttgaggaattctggttaagtattttgtaaactgtcactaaattttgcttgtcagatgttttctcctgggttagactgggcttacaggttttggggaagaactctacaaaagggaaatgtctttctcatctcatctaataaatggatataggatatcaa

SEQ ID NO: 407986 - DNA, 1000 bp, Homo Sapiens; identical to SEQ ID NO: 295255

SEQ ID NO: 407987 - DNA, 1000 bp, Homo Sapiens; identical to SEQ ID NO: 225033

SEQ ID NO: 407988 - DNA, 1000 bp, Homo Sapiens; identical to SEQ ID NO: 295257

SEQ ID NO: 407989 - DNA, 1000 bp, Homo Sapiens; identical to SEQ ID NO: 119311

SEQ ID NO: 407990 - DNA, 1000 bp, Homo Sapiens; identical to SEQ ID NO: 295259

SEQ ID NO: 407991 - DNA, 1000 bp, Homo Sapiens; identical to SEQ ID NO: 295260

SEQ ID NO: 407992 - DNA, 1000 bp, Homo Sapiens
ggacacaaggctggaaggttgggacaccagatggcatggacagtgggttgccctgctgtgcagcagccagctctcaactgcaaccgagcactctacagacttagcaggcacctgcagacgtaacttgtgggagtggggagagaggaggaaagcgctgcgctcaacagaaactaggaagatcgatgagaaatggccttgcagcagttccaaaagggtggggaggcaggtgagaccactcacggcagcgatgcacagggccacttaacgccccttgctccatgaggagttgcagggtgttccaccaagacgcaggtcaggttgccgtcgagcccggtggagatgtgcagggttgctgggcacctggcagagctggtccctgacacgcacttttatcatcagtaaaatggggatgttaagaatacctaccgcagagttatgcaaccgtcgccattatctaattcgagaacctcttcaacactccagaaagaaacccagtgcacacgagctgccactccccactctctccttgcccaacccctggcaaccactaatccactttctgtgtccatggatttgcctgttctgggaatttcatttaaatggaatcatatactctgtggcgttttgcgactgacttttttcacttaccatgtttgcaaagttcatccaagttgcagcatgcgtcagtacatcattcttttttatggccgcataatagtccattgtgtagatcatgtttgtttaacctttcatcagtgaatggacatttgggttgtttcctcttttcagttattatgaatgatgctgttctgagcatgaatgtaggaggttttgtgtgaacatatgttttcaattctcttggatatacctgggagtggaattgctgggtcacatggtaattctatgtttaatgttttgaggaactgccaaattgttttccacagggactgagtattttatattggtatgcacttttgaaataataaaaaacactcttaac

SEQ ID NO: 407993 - DNA, 1000 bp, Homo Sapiens; identical to SEQ ID NO: 225035

SEQ ID NO: 407994 - DNA, 1000 bp, Homo Sapiens; identical to SEQ ID NO: 295263

SEQ ID NO: 407995 - DNA, 1000 bp, Homo Sapiens; identical to SEQ ID NO: 295264

SEQ ID NO: 407996 - DNA, 1000 bp, Homo Sapiens; identical to SEQ ID NO: 295266

SEQ ID NO: 407997 - DNA, 1000 bp, Homo Sapiens; identical to SEQ ID NO: 295267

SEQ ID NO: 407998 - DNA, 1000 bp, Homo Sapiens
tctctagcaggagggcactgcatagcagaaacaaagacgttgtaaattgttgctgcctgagtcatttatagaggcttaaacaacctgaatgtcctctgacctacctgtaacatttgatggagttgtatgagtaacttacaaagctgtaggtcccaaggtcggtctgaaaaagaaagttcatatccgggagcactgaccccgtagtgtaatcctggcaccttaaaacgtactgctccctccaccttcacttcaaggttatgaaaacattgagtaaaagggatgatctgttcaaagtccttagtgttctgccaatttaaaacagtaattttcaaagcagttatttgcaaggaaattgcctagaacttctcccagtgtgcggttgttttgtgtgtttgtgtgtgtgttttgtttgtttgttttcagtctgtccacaggcgtacttttataggtctgtgatagtaggtagctcttcaagttggcaaacacctgctggacaacccctgagagattcatctgagtgagagagcactctccagccccatcggagtgggtttgcagggaaatcataaggaagaaatccttatctttccaacactgagatgcttctgccgaagagtagaatgggagtgaggggacacgcaaaacgggctgctgccggaggaagaggaacagtgttgtggctcatgccatatgaatgggctcactggcctggcccagaccctgactgcccacaggatctttgacagagaaacggaggcacagagaaggaagcggcagttaaagctgcgaagaacctaacaaatttcaagattgtaagtgccttttcccaggatgccagcaagtactgagcctgtattttgagctgcatcaaaccctgttggaataaaaaaggacatttctaggagatcagtcttcgagattggccccagtttccccagagtaggaagaggcaggaagccagagcacatgttctctccagaaataaagttgttgcagtggc

SEQ ID NO: 407999 - DNA, 1000 bp, Homo Sapiens
agacatcgggagtgctgccagcctgtgatgcaagagtcctaatcctgaagacattgaatgacctgtcattctgctgtttttaccaaaaaggatcatgaggatcagagaggaaaagtcacttgcccaaagtcacacagctgaacagtggtggagttcaactttgaccatgggctgtctggccccaaggtgtatgcttgcttctctcccaagagactcctttcttatcaggctcaaatgaatgaaaggaggatgttaaagttcctagaagctttaattgaatgaaagttcctagtagatctgtacctactaaaaaccacacttctgaagctacgtggccaccagaagacacagctagtctgccatgtaaaaaaggaaaggtggcgtgtgccctgaaggcgcaggggtgagaggcagggaaatggagaccccaacagccagcatcagtggccctcatcacagccctccaggagatatcaaaggagacaacgccattattgacgagatcactcccaagcggattggagattgtcccaatacttagacctatagcaaggccttgggagaaatggtggtgcagcaggagagcaggaacctaaccattgccatcctaaggccctccattgtgcggagcaacgtcgcaccagcttttcctgggttgggttgataatctaaatggatgtagctgactcattattgcggtatgtatagggatgaggaagtaactgtaatgtagtggaggaatagtaagaaaattcttagtgctggcttagcttcattgatccaaaaacataaatgctactttactatcaattgaagcatattatttcaattattctggttataatatgggggcaggatgaaattgtttttattcttttagaattttttttatcaggaaaacagaggtaaagtgctatcaattactatttaagagttctattttgaaaagtgagaattaaggatttttcttttctttttaaaaaaaacttttttaaaaatt

SEQ ID NO: 408000 - DNA, 1000 bp, Homo Sapiens; identical to SEQ ID NO: 295268

SEQ ID NO: 408001 - DNA, 1000 bp, Homo Sapiens
aatggcgtgaacagatgccctctttctagggactggtcctttagacttgatagttttgcagaatgagggagaagttgtgctctctggatgtaggatggttttccccgccttgaagaacgactcaaagggaagcggtgcccaagatgtgacatttctgatccacataacaaccttcagagtgttcattggcaacgaggagatgctgcttgttcggcggaatagggtttgcaaatcagaaaggacagttgaagcttttaatacatgttttcctgaaaaagaaaagtgtgtttcctgcttcttgagatgaggttcccaagctcctctgcatccaggcgtagaagcagtgcgcggtaccttatccgcactgcgcggtgcaagccggccgcacagctcacggtcccgcagcgcccgccacacacccgcgccagaggtccagcgcatgtgcagtgaaatggcctagcccgggaattcgatcggcaaagcacgggtgtgggggcgggggggtgggggggggcgagtggactcgagcaggaagatacacccgatctttccattctccctccgtcaaggctcgctactcatcttgcctttatctcagccttccctgtatagctgaacagttctacctttggctacatttccaatcattatgacttatcacctcaccccagtttaaatctgtacgctagacataggctgaaaatacgagacgagggccaaaggaaacactcttctttccagtttatatatatatatagcatatatttgcccctcggggaaggctgtagatttttttttttcagcctgctgctactactttgggaaaaggccttttctcctggcgcctgttcaaaccgccacacttcaggccaatccttcggcctgaccattcccggatcttgttatgccagcacagcacattcgagggctctggggggcagcagctcggcgaagagcagtcaaataaataaataaataaacaaataaatgaacggacata

SEQ ID NO: 408002 - DNA, 1000 bp, Homo Sapiens
ccaccaggccagactggctcacctgcttgatgaatgcaccagcccactctcccatccggggaggcctgtcgggcataatgatgtggaacatacttgttttctattcagctacgaaagcagggtattatcaaattttaaaaggcatcggccaggcactgtggcacatacctgtaaaaccaggcactttgggaggccaaagtgggtggatcgcttgagcccaggagttcaagaccagcctgggcaacatggcaaaaccccgtcccctctgcaaaacacacaaaaattagctggggatggtggcacaggcctgtagtctcagtttctcgggaagttgaagtggaaggatcacttgagcccgagaggcggaggttgcagtgagctgaaatcccaccactgcactcggcctggcagcctgggcaacagagagagacactgcctcaaaaaaaataaataaaaggcatcgagaaaagaaagggaggaagggaggattttgacaaaaaattatcaatagtaacagtggcgtctgtgtaacaggactataggtttggcttttttatttatttatttatttatttttttgatggaatcttgctctgtcgcccaggctggagtgcagtggtgcgatctcggctcactgcaacctctgcctcccggttcaagcgattctcctgcctcagcctcccaagtagctgggactacaggcgcccgccaccacgctcggctaattttttgtattcttagtagagacggggtttcactgtgttagccaggagggtctcgatctcctgacctcctgatccgcctgcctcggcctcccaaagtgctgagattacaggcgtgagccaccgcgcctggccccttcatgcgtttttacacgcttcatccaaccaatagttcatggaggccttaggtgtgtgtttccaaattttctatgctgagtgtgtgttctttggaaaaccagaaaaaataaagcgaaaaataaaatgaaaatgaataaaga

SEQ ID NO: 408003 - DNA, 1000 bp, Homo Sapiens; identical to SEQ ID NO: 295269

SEQ ID NO: 408004 - DNA, 887 bp, Homo Sapiens
atggttactgggaggggcgtcctgcgaggctttcaggctgctgagcctgttccttggctggggtcggtagggcttggagccagccgttcaaagtcacccctgggaagcgcccgcaacccttggggacgcctctcctccggctgccccccttccctggaatccaggtgtcactggggccggggaggggctaggagctcggatttctgctttgggaagtttttacaagcccaccctccccctgccttggttccccgagccaagaatttcagaaatccggggcacaaaaacgccagtgtttgcggtcaaggattaaaggcgcgaggtgtctttatttaatctgctccgccctgctcgggtttgcacgagaaaccaagcctgggagcgacggtccacgcaagcggagacacagcattatcccctggtcactggacgctggggtctagtgcctaatacgttaagctgcttctccccatcatcaagaaactgccgcatctgccatataaaggagatgtttctcattcgcccccactcatctcttcccccatgaaaacctcttccattttcaaaggatcttcggctctacttttcaagcaaattcaacaaatcagtgtatgcctgtgtaactggtaaatagtgaagggtaattatttcatgtgcttctaactcagaaacaatggaatattaacagcggttttctgaagatccagttggacaattttcattttcatcatataatggacatttatctcctacctgcattatccactgtcttccctcggagaccacaaatttcactgaaggcagcatctatgtcttattcatgcttgtgctctctacctcccctgacccagaaggacttattcttctttctgcacattttagtagat

SEQ ID NO: 408005 - DNA, 1000 bp, Homo Sapiens; identical to SEQ ID NO: 119313

SEQ ID NO: 408006 - DNA, 1000 bp, Homo Sapiens
ccctaaggccctccacagttgcattgaaaatgtcacttgatgcagctgactcatctgggcctgaactctggatgggctggacgactgccattaggttcctttgactggaagcacactgggagaggtgcatgggcctcccttggtgatgtcccttgtccctttgcatggacactaccagaaggccgtctgtcccttcgtcaggtggtcgcaggcatagccagtccagctgcccacaggaacgaccgtgattgcaacctttatgctggctttcctcatgcctggtgtcacctccccactcctcccctgctgctccccgcgttcgctcccaaataaactcccgcacctaggtctctgctccaggctctgctctcaggggagctcaagatgagcctccacagggaggtcttccctgaccacttagaggaggctgggtcaccctgttggacactctagccactccctgcacttcccgttctcagcacttaatggccttgtgattaagaaacttttggtatagttatttattcctatctcactcctgactaggctataaactccccaggcagagaagagtctgtcctctgaaccacttttgctcagagtgcatagtaggtgctgagaactaaaaatcaaatcctaagccccacaacggactgaacagacccactcttggccaaggggacccaggagaaaccttaaaaaccaagttcctggccatgatgggacaggaggccaaacacatctcagtatgccccttacttactgacttttaaccagaattccttcgtaaggagtaagcagatttggaaaacaagaaacagacgactcattcctttattaccttcagccaatcgtgaccatgccaatgaggccatgaccagactccctcttcccctttgcagttttgacatgaaagctcaccagcttcataatggtatcccttcctaaaaactgaccaccctccagctttaaaaaaaaaaaaaagaaagaaaaaaaaaaa

SEQ ID NO: 408007 - DNA, 1000 bp, Homo Sapiens; identical to SEQ ID NO: 295273

SEQ ID NO: 408008 - DNA, 1000 bp, Homo Sapiens; identical to SEQ ID NO: 295274

SEQ ID NO: 408009 - DNA, 1000 bp, Homo Sapiens; identical to SEQ ID NO: 295275

SEQ ID NO: 408010 - DNA, 1000 bp, Homo Sapiens; identical to SEQ ID NO: 225038

SEQ ID NO: 408011 - DNA, 1000 bp, Homo Sapiens; identical to SEQ ID NO: 225039

SEQ ID NO: 408012 - DNA, 1000 bp, Homo Sapiens; identical to SEQ ID NO: 295278

SEQ ID NO: 408013 - DNA, 1000 bp, Homo Sapiens; identical to SEQ ID NO: 295279

SEQ ID NO: 408014 - DNA, 1000 bp, Homo Sapiens
ttctttacctctttgagaaaaatgggtcagcttgacacatctggatgaaagaatccgttaggtgattatgattgaagacagattaagccttgttatgaggggaatatttgggggcttaccctgaggtgatatttgatgatttagctgtgggagaatttccctcccaagatcagcgtgactgacactgaaattgctacaggggaaccggacctttccaagaggtgacaaggacatttacctggtacaacacaatggttctggactggaagtctagtcccattgatgaagttcccaaaagatgtccaggtcctaatccctggaatctgtgaatatgtcatcttacacatcaaaagaactttgaaaatgtgattgaggttaaggaccttggaatgaggagattaccttggattatctggttgggtccaagctaatcacatgagtccttaaaggagaagaaccttttttagctgggtcagagagagatgtgatgatgaaaacaggctcagggagatgcactgtaagaagggcttgaccagttgtttttgactttgaagatggagggaagggccaggagccaaggaaggtgggtggcttttggaaggtggaaaaagcaagggaacattctctccagagcctccagaaaggagctcagccctgttgacatctttgtttttattttttatttttagtagcattgaggtctcactatgttgcacaggctggtcttgaactcttgagctcaagcactcctcccgccttggcttcccaaagtgctgggattataggcatgtgccaccacatctggcttcctactgacatcttaactttagtgcagtgagactcatatttgaatttctgaccttatattatagaaccataagacattatagaattatatagaattatagaaccataagacaataactttgtgttgttttaagatactaaatttttggtaatttgttatggcagcacaataaaaccaatatagcattatatt

SEQ ID NO: 408015 - DNA, 1000 bp, Homo Sapiens
taaggataatagccttcctccaaacctcacacacttttggaggagatcactttttttaaagtgcatggaaatgttttgaaacagtgaaatctataatgataggtttcataattctaacatccacaccatatgaatcacatccttcctgagataatgagcacacaattgcctggatacctgaaggaatggagacagcggcagaaaacactgcagagaggtggaaacatccgttaatattttaaaatcccattactgctaccaacaataataatggatgcatagaaatagatctggattagctgagcttgaaacagtccatctcacacacacacaaaagaatttcagatacagtgaacccacatgttgaagctttctagtataataaaaatttcaactgttctgttgaatcatctgcctgattggaggctacagaaaagatgtcatcttaggagtgcttgctctgagtgaggctcatcttcaaatctgaatgaccacaaggagatttgattatacatgtgaacacctcagaaggcacagcccacccagaaggcagacaggtcaggctgctttttcttcattgcttggattcaatcctccgggcggctcaggctcaaacataacttaagcatgattaaactttagaagaagctgccaggaagactgtgaaatcttcatgcccaaggatccctaaaattaggagcaacaaccacttggctcagacggtttatggaggcaaaggtttggatgggattagagatttctaaatgtgagttcgtgtcctctgccagaccaccttacttccaccattcctcagcaaatcaagaaaaacaggagaaaagacatgcctttccataagttaaatctattctgttttaattctatattatatctgctgtacaacttcttttgtttgtaacaccatattgttgctagtaactggaaattaattttcacatgcctcagcttagaaaaataaaaagcagccctgcatcaatcccaa

SEQ ID NO: 408016 - DNA, 1000 bp, Homo Sapiens
atgatctccctcttacaatttagcaatttaggaaacaaagttgtataatgaatgaatgaattctttcacttattctttctttctttccacatatctcaggatctgattatcatcaggcatgaggattgtataaagtcataaaaagttgaatgtccttgttttcatggggccttgatcttgtccgtactccacataactgggtcttaaccggtctaccaggatctgcttgttttgcacttgctgatgaaaactactaactgaataatgcatccagttttatggctgtttttgtccaataggcattatttagcattattaaaacaagacatttgtttatttggtcaattaagtgattaagtaggctggtagactgtgtcttctttatagaatgttgacattttcaggtactctcctgcctctacttgtagaccagatttgtaccaactgacaggcactatgtaatgtagcaagactctgctacattggtttatactgtggccccacaaatactgtaaaatatctgagtattgaaataaacagataattaaaagtatgaaaaccaaattctatttggtataattcttccattatatttttctcatcttttaggaatatctgtatgataatcagaataactgatgcaagatgtgttctacacactcagagatcatgacttgtgtttccttttcttgaaggctcgtgaaacatggattgctttgaaaacaacagcacagtattatttggatatgaataccttcacctttgacatgtctactgcccagtaaatatgttttcctggttaaagcaggaggatgaagatggcagaggttggaatggcattgtgccaaaaccatgggttttagagatctgagggtatatccatgctgtttactacattatttattatgtctgtctcaaagttgttgaaaacagtagttatgaaaacccatgtaggaaactggaataagacattctcaataaatggtagttctcaaaaaaa

SEQ ID NO: 408017 - DNA, 1000 bp, Homo Sapiens; identical to SEQ ID NO: 295280

SEQ ID NO: 408018 - DNA, 1000 bp, Homo Sapiens; identical to SEQ ID NO: 295281

SEQ ID NO: 408019 - DNA, 1000 bp, Homo Sapiens; identical to SEQ ID NO: 295282

SEQ ID NO: 408020 - DNA, 1000 bp, Homo Sapiens; identical to SEQ ID NO: 295283

SEQ ID NO: 408021 - DNA, 1000 bp, Homo Sapiens
atctggtggcttaaacctagctgtccacatttcactatctgaagagcagaaaatgtgttaataggagcctggtgagtggaggagactgaagatggagagagagcctggacctcaacatgagcatctggagccatttggcagcattaggctgtgaccgcttagagaaccgaaaggtgcagagctttaaaggattatggagtctgaagaccaaatgggatgatggagaacagctattcagtggtacaaatgtaaatgctcccaggcccgggcagaaaagagaaaacatttccatggaagaggaaacaggaaattccaacagatcagcaacagttggagtgctaacctgtcactggaatgggaaaaaaaatgctgtcgttgacacatcttttccttgtttttgacacaaattagaaacaccacctggaacacagctgtgacttgataaacaagtgaaacattctttggtgtggtgaggggaaaacaaatttctcaaaggacacgcaccatggtgtatgagaggacactggagcccagccagcatctgacatgctgaattcaaagtgcaggtgaaagtaggacaactgattcacaagctgggatgcctgtgttgttgtttgccagtgtgcgtgtgtgtgttttcctggcacccttcattcattccccagcacagttgacatcaggttggaagcagtgagttctgagggagactgctagaggacccaacttggagaatcaacgatctgcgatgaagataatgaagataaagacaatgtcaatgtcagcgtccaaaatcataaggaccctttaagaagcttccagagcagaagtgactgtgcaagaagggccaataaagtctaggcaatgcacgaccaggcgcggtcgctcacgcctgtaatcccagcactttgggaggccgaggtggttggattacctgaggttaggagtttgagaccagcctgaccaacatagtttcaccccatctctactaaaaaaaaaaaaa

SEQ ID NO: 408022 - DNA, 1000 bp, Homo Sapiens
gcccctgctcttgtgtcagtctaagccagtgagaactgttcacgctagagaatttattcatggtggagaacagaagtgagctattaagtttttcagaatggagcacccaccagaaaagcaaacctcttgcttgctaattttaaaccattttcctaaaagcacgagcctaatgtgtttcaaagtaaaatttactttaaaattaacaaagttcagaagattattttaatatttgaaataattcttgcctgctatagtttatctgtcatctgtatttccaagaaactttacttttaaactcttttaaaaatatgccgttattgctcctttttatgactgagagtatatggaaagattggcgatacatctgcaaaacctttcctgtgcctgtaataaaacatatggtttagacctctgttctctccctcctccacctctagttttagtcacctagaaatagcttctctatttgtccaaattaccaagtatttaccttctctgttctcctctagagcctgatttagttacaatatatttatatcagttttttttttctgaggatattaaccttagactttaggaagtatgcttctaatctcccctgcttatacacacatgctttaggagggcaagaaaagtgttttattcagatttataacacttgtgcctagaggggcctggcatgtagtaatatactcaataaaaacatgttgagttgactctaatagaaataattcttaaaattcctttcttcttttcttccttccttctttccttcctttcatcatgcaataaacatttattgaatttctcttatgagccagacgccatgttaagtaagtcccaagtttgtagatattatcaactctgacctcaagaagcctagaacgggcaaagccgtacagttggaaaggtaggtagtgttcccaccttttgggttttcaagacaatttggggaggttttattaaggttgtatcctgagcacacatttctcttgttgcc

SEQ ID NO: 408023 - DNA, 1000 bp, Homo Sapiens
ttccaccgctctgaccagtcccccacaatatatagccttgtatgcaaagccaggcctgtccatgcagggtgaccatccaaggtagacagtggcaaaatctggtggaggcatcagagatagtgccatcagtttgctggaacaagcatatcaaggagcctggcagatctacacttcaccagacggtgcctgtagccaacagggcaggcccttgctccagggaaacactcagaaatcaaaactccttgctctgctgccagggaactctccaggagatcctcagtgtcatcagaagctgaaaaaaacagtgctgagaaacgtggcctgccgtctttccagctaagggagatggcccattcgaccctgggttgtcctctgcaaacgcgctgctgcaggttgcatggcaccatctcctgattgcaatttgctttcctgagggagtgaactgactgaaattggatggtaataagttgctaggttattttccactttttagtttatgaggcttattcattttgctttaacattaaccactgccttccttttaaggagctggtgaggcagcgcatggcaacaggttcagggtgaggagtggcaccacctcctttcagtgaggatttgggaagggtgaaaagcaccctaatcttctcagccgcatgtgaacaaaccacctgtcaaggtgggtccttcctatagggaggttgatgtcagcccttcagggaggtctcagttttcttcctccacttcctaatcccttcattataattccttccacaacagaataagtttcttgagcaatgcagcaatatccagcaattttagatagacatttaccttttgacctagaaatctcacttctacgaatccatcctaaagacacactttcagctggatgtggtcgctcatgcctgcgatcctaacactctgggaggctaaagtggaagaatctcttgggctcaggagctcaagaccagcctgggcaacataggaagaccctatctct

SEQ ID NO: 408024 - DNA, 1000 bp, Homo Sapiens
cgctcctggacatctgcgtgggatttacttcaactgctatcgctgcgaggaggacgagcatgtttcactgtatttttagcagagagtgcagattttagaacctcgcgaacggtcctgtatctcctgcacgatgactctccagaacaggaatagtgacccttcctttgcatttatggtgcataggttttcaaaggacagtgtgtaaatcagcttgtgtaataattgtggcacccacgcgcgcaagcagacttaccatgagctgacttccactgattatttcagtttccagggaaacgagatgctcgcttcaccccactgagatgtaactcagttttgtgggatcccactgccctccaggtgccgctccgagtgctctacacagattttcattcagtccttgcggcacacgaagcctgttaatatgatgaattacactgattcagtttcaaatgtccaaccaagcttgcactccagagatgaagcccacttgatcacatggattattcttttaatatatgatggatacgacttggctgttcttttgttgaggatttttgtgtttatgttaatgaggatattatttgtagttttcttttcttgtaatgtttttgtctttgttcagtgtcagagtaatgccaacttcataaagtgagctgggaagtactccctcattttctgttttctgtgaaagaattgtatagaattgatgttatttcttccttaagtgttgagtagaattcacttgcaaagccatctgaggttgacatcttctttgggaatgactttagctataaattcaatttatttaacagatatagggctattaaggttatttaatttttttcttgaatgagctttagtgtcctgtgtttttcaaggaatttttccattttatttaagtttttagatttgttggcataaagttatcccaatatttccttagaagttgtgacttttactgcatataaaacatacctcaataaagctaatacatacatat

SEQ ID NO: 408025 - DNA, 1000 bp, Homo Sapiens; identical to SEQ ID NO: 295286

SEQ ID NO: 408026 - DNA, 1000 bp, Homo Sapiens
tgtgaggactaggcgtctggagagaggaagggagagggcccggcgggaggaagtgctgccccaagcggcaggacagggctctgaaaaaccacaagatgcttgtgaacagccagtgctgctgctggtccaagccgttaccctgtgcgatgcctgaggagcgccctgaagttttgaaaggcggaagatgagctccctgcaaggagggttttcctgcggtgggatagaggcctcgcccagagcccgagggcagcacagcacccctcgcaggccacctgtctgcatagttcaccctcctcggcctcctctctccctcctcccaccaaggtgggccctttgttctccatctgactcaccagggctccttccccactcccaccccacaccagccctgcctcaagctggagggggaatgctgggggagctggggagttggtttgggtcctgcttctgagaggcgagagctccaaaggacccctccctgcccagcgtgtttcatccccagattcttagagctgaccaccgccccccccccccacccacccacccacccacacacacactggctccagctgtcctcagggtcccagtgccctctggacactatgccaggacagcccctctgagtctgccagtagctaccatacccctccctccttctccaagctaaatggcctctgttccctcaaaaacaaagaactaaaggcaagcactagaatgatcaagctcttagaagaagcagagggccgtgtctccaggacctcatggaggcaacagcttcttagccttgacaccaaagcatgagcaacaaaaggaagaataaataaattggatttcagcaaattcaaaacagttgtgctctaaaggacactatcaagaaaataggctgggtgcagtggctcacgcctgtaatcccagcacttggggaggccaaagcggttcgatcacttgaggccaggagttcgagatcagcctggccaacatggcaaaaccctgcctctac

SEQ ID NO: 408027 - DNA, 1000 bp, Homo Sapiens; identical to SEQ ID NO: 295287

SEQ ID NO: 408028 - DNA, 1000 bp, Homo Sapiens; identical to SEQ ID NO: 295288

SEQ ID NO: 408029 - DNA, 626 bp, Homo Sapiens; identical to SEQ ID NO: 295289

SEQ ID NO: 408030 - DNA, 1000 bp, Homo Sapiens
ggctgccacgcgttacactctgactcagcggctccgcccctaccgcgagcggcgctgggcggggctgcgtgcgtggcgtgtccgctggaccaggggacgggggcgcgccgcaggtgtaggagctttgcgcgcctacctggcggtcgtgggtcgaggaggggtcaagaattgttgtctagcagccctctccccgctgccctgtcctggccgaggcaaaggccgcgtgcgctccgcgtctgccaggctttagggctgcgcggacactgggtgggtggtgggccgaggcgaccggaaggtcctggccgcctttccggtctcctcagcaccctggagcgccgccctcgggtttcggtctcctggatctgcgggtcggtctcggcgggcggattactcctcgcccacaacctcgaggccccggggtcaaccgcgccctccgggccggcaacccagggtttagtcagattcctcctgacccaccgcttctgggaaagaggcgcctcccgtcaggaggatgctgagttcctcatgactggaccagtgagtgtccactccctggtccctggcgagagaggcgggacccccacgccctcctggcgctctttgcagagatgttcctcaggcccaatccgggatttgggatgtctgtgcgtgctgtggagcagagagtttgcaacatggtctcactttgtcacccaggctggaatgcattggcatgaacacgtctcactgcagcctcaacctcccaggctgaagtgaccctccaactctgctttcacagtagctgtgatatggtttggctgtgtccccacccacatctcatcttaaaacccagtgggaggtaattgaatcatgggggcaagtctttcctgtgctgttcttgtgatagtgaataagtctcatgagatctgatggtttttaaaagagttctggctgggcatggtggtgggcacctgtaatccaaactactagggaggctgaggcagagtgaattgcttgaacc

SEQ ID NO: 408031 - DNA, 1000 bp, Homo Sapiens; identical to SEQ ID NO: 295290

SEQ ID NO: 408032 - DNA, 1000 bp, Homo Sapiens; identical to SEQ ID NO: 295291

SEQ ID NO: 408033 - DNA, 1000 bp, Homo Sapiens; identical to SEQ ID NO: 225040

SEQ ID NO: 408034 - DNA, 1000 bp, Homo Sapiens; identical to SEQ ID NO: 295294

SEQ ID NO: 408035 - DNA, 803 bp, Homo Sapiens
atggcatggacttatgtagtaatagtagtaagagttcctgaagatagtttcaatctattgccagcattctggctttgttttgtggtcagtacaggctttggtccacagagacaacaatactttcaatactcttttgttctgccccagaggagctcaacacagaattgcctagaacaagaaactggtgagagaagctgcagcctgttgagactccacaagactgaagatatgaaaagaggaaatatgcatgaatgcccgcacggagaaccacccccacctgctgctcccgctctaatgatcacgcccattatcaactgggggatggctctgtgccttgtccttgcattacatggaccaagaacacttcacaggactcagagagtaacactgaagaatgcagtttacttacatctttttctgtttgacagaagacagttattagttacccttgggacatcaaaatgaccaaggcagtgtctgctaagtatttgctgagactctgctatgattctttcaagtctaaagacagttatctgaatgatatccccgtgacagtggactcctgcacattcacagtcctggaaggagcctgtccacattggcattctggaagtccataaaagacaaacgcatatgcagtccccgagaaagcattgttgtaaacaaatctgcactagatggaaactctgttatgtggtgccggcatgcatggaagagaacccgaaaggaagaagctatacgactggggacacatgtcttagaagcacactcattagataaagtgtcgcatactctttgataag

SEQ ID NO: 408036 - DNA, 1000 bp, Homo Sapiens
gtaattccttgaaggaagagaaattctatttccaggggaatgactgcttgacagataaaaagagacacaagtatccccacatcttggaatttgacctctagccgccacaattgactatatttgtcatcaccttcttcttgtccagctgaactcctaaacctgccaccccacccctagctaagctaataacatgaaactgtgccccaaaagatagtgaatatttactgaaatgcaaaaccaagagttataaactatagccacagacaagacttcttaaatgcaggaagttttgaataagtgggcacaagttaatacaatcaaagaaaaacaatatttgatattttggacatgagcccaatgtgctggcgtatatgtgtgtgtgagtgggcaggtggatgggggaaatctcactaatgatgggtgtcatcaggaaagaaaatccaaaaacaaaactaccattcatttgtacaattaacaattagaaagtgacaaatgtttaataatacacttggagtgatacatggttgtacctgacctcagaaaactcatggcacaactaagaagacagagacatagacataaacatgtcacatagcttgagttctagttggaggattaaaagtattatacaagtacagagatctaagagttctgcagaagaaagatgatgttttataagaaagttcctcggagtgggtcatttgagctgggatttgaaggctaaataggagtatgtcaggtgtgcttcatatcagcaactaacaaaatcaaagagacagagaaactgctgtagttgttaaagtgaccccatctctacaaaaactacaaaagttatccacgggtggtgacacacccctgtggtcccagctacttaggggtgctgaggtgggaggatgacttgagcccaggaggttgagtgttcagtgagctgtgattgtaccactgcactccagcctgagtgacagagtgagaccctgtgtcaaagaaaaaaaaaaaaaaa

SEQ ID NO: 408037 - DNA, 1000 bp, Homo Sapiens; identical to SEQ ID NO: 119315

SEQ ID NO: 408038 - DNA, 1000 bp, Homo Sapiens
acccttcaatgtgcccgtgtgcctaaatattcctggtcgtgtgaaaagaacccaggtattagctgaactaaggagcacaattctgcaacattttggcacccaaacacggggcttgagaaatgaatgcaattggagaaactggttgttttaccaggcgttgattggaaatgtgtgcttccctttaagcagtcaagctcaacttgcagaactgatgggaaccccttgggaaaactggcctcaaatgtttgtctacacagtccacatacagggttcttaacctgcgatgagggaaacttcccagggcttgtctgggtatgcccacagtggactggagcccaaaatgcacactggaggaagtggatggagccacgtggatgtcatgccttatgcaggggaggagcctgctctcttcagctcctgtggtaatgtgggaatcgatctgtgagcatatttaactatccggctattttggagattgaaaaaagaagacctgatttatcatgtgcaatatctcacacatctgtcatttctattctaccgcaattcgatggagtcttgttctgtggtccaggctagagggcagtggcatgatctcggctcactacaagctctgcctcccgggttcacgccattctcctgcctcagcctcctgagtagctgggactacaggcgcccgccaccacgcctggctaattttttgtatatttactagagatggctagtgttagccaagatggtctcgatctcctgacctcgtgatctgcccacctcagcctgccaaagtgctgggattactggcgtgagccaccgtgcctggccagcatcctctaattattattcatagtttgtgaatttaggcctacgtgaataataatataatatttactatgatgttactatctaccaaccttatttttcttttctataaaataggagccaaaataatatttatgtcataccttatgaagttaaaataaaatataacgaatgaggggcttaa

SEQ ID NO: 408039 - DNA, 852 bp, Homo Sapiens; identical to SEQ ID NO: 295299

SEQ ID NO: 408040 - DNA, 1000 bp, Homo Sapiens; identical to SEQ ID NO: 295300

SEQ ID NO: 408041 - DNA, 1000 bp, Homo Sapiens; identical to SEQ ID NO: 295301

SEQ ID NO: 408042 - DNA, 1000 bp, Homo Sapiens; identical to SEQ ID NO: 295302

SEQ ID NO: 408043 - DNA, 1000 bp, Homo Sapiens
cacagccccgggctgcgctcccctaaggtgggtccctcagatccggggctgtccattaaccaggctggcccaaagaggcgcagacactcgaacccgggaaaacttattttattctcggttcccggggttgcagctgccagcggctgagacacggggcgcacggcggcggggcgcagactgctctggcagccggagaggaggcggtgcggcggtggcgctgcggagacccggtccagacgcctggcggccgccggcacacaaggcgctttctagctccctcccccgagcgcacagcccgcctccttccgcggcgcctgcagtggcaggcttgctctgccctaccgtgacgcgctccggagacgctctgcgggtcctggacaccgggtccgcggcgtggggacgacagacggaggcgaacgccatcggtagccggtccgcgagccatcgttcggggcgcagtcctctccccggctggccctcctttctccggggcattcgccaccgcttccctgggctgagacgaccggttcgtcgcctccttgcccgtgaccgtcgctagaactcagttgtgcgttgcggccagtcgccactgctgtgtcagcatttgcaggtatacaggaacagtcctagtgatgcactatttaatcaaaagacggatggatcttttgttcttgcagctggttttccaagaattgatataaagcgggaagaacagaaaacagcagtcataagtatgctactcaaaatattcttctttttatgtgccaaatcctcacattggaagctgtcccgagcaagacaggtagttggtgattatggccagaatttattctgtgctttgactaaaggcttgctgatcaatatatggttaatgttgaaattggggtgcttttaggactcttcagtggtagagctgtctggttagaaattaatctttaagttgggatgccgaggtgggaggatcaggtgaggccaggagtttgagacccggtctctacaa

SEQ ID NO: 408044 - DNA, 1000 bp, Homo Sapiens
ctggctttagagccttagcctgtgctgttgtgttgcctgggattcctttccctccaccctttgtacactggctcctcctaacccttctggtctaagtataaaggcactaccccagagaagtcttccctgactaccccatctgagtcactggccactctcaccaaagcaccctgtctgctatttgttaccccttcttcaactgtggttcacctgttcgtattccttctccccagccggcatacagtcaccaccaagtcaggtacccaacatagtacctgggatggattagacactcagtcaacacttgatgaagaaaacaataaagccttatagactcatgtccccctcatgaggggtgccctagccaactgacaccaagtcaatcatttacaccattttttttcaatttgtgttattaaccacagaactcttttccaccctaaaataatcttatcccacaagaccccatacctagtgatttctgtggatgctgttgccaaacacctcagggcaagggccaggcacaggacagggttcccgctattgtctctactccatcttcccataaattggttagctgggacctcctcactgagtcgcatggctccaacaagaatccaaagctggcaacaggaactctgcagggctctcccagagggaagctgggaagttaaggctgcaggctccaagcccttgttcctggaagagaactaaggaactggtaccataaccggtgtccaggctgctggtttgccccagttctgggcagccacaggcccccaggggcataatgaccagctagtgccttgtcttctcctgcctcttccatgcttttactgtgattctcatccacaggcaccagaagaaggggactttctaagcactgtttacattcttgtcattttgcctgtgtttagacttacaaaaaaatgcatcttaatcatttacaagcaatcataggccctcatggatttcaagtaaactttcctataaaccagtc

SEQ ID NO: 408045 - DNA, 1000 bp, Homo Sapiens; identical to SEQ ID NO: 225041

SEQ ID NO: 408046 - DNA, 1000 bp, Homo Sapiens; identical to SEQ ID NO: 295304

SEQ ID NO: 408047 - DNA, 1000 bp, Homo Sapiens; identical to SEQ ID NO: 295305

SEQ ID NO: 408048 - DNA, 1000 bp, Homo Sapiens; identical to SEQ ID NO: 295306

SEQ ID NO: 408049 - DNA, 1000 bp, Homo Sapiens; identical to SEQ ID NO: 295308

SEQ ID NO: 408050 - DNA, 1000 bp, Homo Sapiens
gaaatgtgctctagcaacttatttgcagcaagaagtgcaatatgaccatttacttaaaagaaggaggatcaaccacaagtcggtagctcttctatttaaaaaatcaggtgactctttgaacatgagccagtggggccagctgaccacttcacaaaagccaggcacagttgggcacctctgtctaggtcaaccacaaattaagaccctagcaaatcggccacagctgccagctcagggtgtttttcccatgtggagtacaggtggaatgtgtgttcatttggcacctctttttcccatgcagagccaccatcaccatcactgatgtcacctttgaatgcaagggacactatatttcttcaacttcaggcaatcacagttgtcctgaagtaggtcaccatttacgtggacagcacccagaactcctcgatagtggggtctctttacttaaaaataaagatcaagaatttatagtatttcaggattgaaaggaatcttgcagattattctcaccaattgattcagttacaaataaagaacactgacaatgacccataacgactattctatcacattttgtctccattttctcactgatggcctgagagggcctatggctgctttcacgttacaatggcagggctaagttgttgccacatctgaccaccgaagcttaaaatgttttccatctggcctttaccagagaaggtttgctgaccctctcctctgtatctacggatgtcccttgtataccactgtgcttgcactacatcaagacagcgattgtggacttgataccattttacaactttttgctttattttcaagatttcctcgtgaatgccagaatgacacgatatttggtagcaaagcatgagcttcaaagagaggtttgcgtgggtctagatcctggctttgctagttcctagttgtgtgacgttgggcaaatcacttttcctatctgtcttaatttctttgtcagtaaaataaagataataccagt

SEQ ID NO: 408051 - DNA, 1000 bp, Homo Sapiens; identical to SEQ ID NO: 225042

SEQ ID NO: 408052 - DNA, 1000 bp, Homo Sapiens; identical to SEQ ID NO: 295309

SEQ ID NO: 408053 - DNA, 1000 bp, Homo Sapiens; identical to SEQ ID NO: 295310

SEQ ID NO: 408054 - DNA, 1000 bp, Homo Sapiens; identical to SEQ ID NO: 295311

SEQ ID NO: 408055 - DNA, 1000 bp, Homo Sapiens; identical to SEQ ID NO: 295312

SEQ ID NO: 408056 - DNA, 1000 bp, Homo Sapiens; identical to SEQ ID NO: 119316

SEQ ID NO: 408057 - DNA, 1000 bp, Homo Sapiens
tcctctgcggatccccgcgagaccctggcgcggggagggggccgagtacggccgcgggtactcaccccgcccctgagcggcgccgcccgccgcaggatgagcggagcccgggccgccgagggaagccgcgccggtggatgtgtgcgaccgcgcgtagccccggtgcccccgggcgcaaagtctccagccctggccgggccccgctcctcagctccgcggtcccggcgcccaccgcccctggcccctggccccagaagccagtacccgcccgccgccgcctcttctgccagcgccgccgcgtctctctagcgctccgagctgcgtccccatccccgcccccacctcagctgtggctcctccgacgagtcaggcgagggggcgcctcgcgcaagcatccccggcaagccggcggggagaagaaggaggcggggaggccgacacccacccagccagcggctctccgctgggcgccgggccgcccctccgctgctggcgccgcacccggcacgcactgggctcgcgcaccacgcacacctgcccgccgactgcggggggagccctgggcgttgggggcgttggccaagacgggcgagtgggcttctcgggttctactctgtgaaggccaaggcaagggcgtcgtcgcgcgctgcctggcggagcccagccccttccccacactgtcgctgacacgcccgcctgtcaaaggctccgaggcccagatgagcagggcgattttaaatgtcagatcctgccggccatccgcgaccgtcacctgtgcgtcttcagctcctcaggctcctccgcttgtctcagttacaactgggagcccgggtgggcagatgattgcaagagaattctttggagtgagaagattttgctgtgagaaaggagaagattaatcaggaaagtctgtctgaagaaggaagtttcccaaggaaacttctaactcaagggcataggagagccgaagcagtgtgcctcaccttcaactgtgtatctc

SEQ ID NO: 408058 - DNA, 1000 bp, Homo Sapiens; identical to SEQ ID NO: 119317

SEQ ID NO: 408059 - DNA, 1000 bp, Homo Sapiens
gagtagtttccatttgcacttcttgcataatataaaacttattgctagaataaagacactcacttctgcattttactgcacttgattacaatgaaaatgtctgccggggttttcagactgaactaattcagagtaacagtgctcttgccatatggaaggaataacaatattctttcagttttgggagagatctctttttagcccctgggggaaatcagcttatgtaaaaatgctttctttaacagaaagtgtgaaaggacagatcgtattcctatctcaggcagctgccagccacatttgtggctcagctatcaaggtttgctccatcttcctccaataatgggcacttcagaaggccagttccagctctggtgggtgctggtccaccatctcagctattgtgataacacatgagctctatatagacatgttttcagcaccaagcactaccaagtactttagaacaaggcctgtttcttttctgccatccaatgagagcagagaatctccaatgaaactgactagatttatgaatgttttttatatgtagagaggggcagaaacatgttcattttcccatgaaggaacaagtcccaagggtttatcatctgcctgaaggcactgctaacgaatttgtcaaatcctttatccagcacagctttaccaagcagctgcacagtcaggcctttgcacttctcattctcataggtccagtttaagatctcattcagtcctgaactgcttcggtcctttgcattcctgctgtcttggcctccacctagaccaagtcggcagtctccctacattaccctacattcagctgcatcctatgctccaaggcctttcaccaggggccagaaatgctcccacaaccctcaatggtctcactacaacagttccgaatcttattccaaatgctatagtatctgaaacggttcaccaatagggataatgtttctccaactggagaccttcaataaaacacttcaataggtgcttt

SEQ ID NO: 408060 - DNA, 1000 bp, Homo Sapiens; identical to SEQ ID NO: 295315

SEQ ID NO: 408061 - DNA, 1000 bp, Homo Sapiens
gcgtacagccccgatgaccacaaggccttcttgggtcaagttctgccatctctggttaagatgggctcaccctctaggaccctgattgagtcctcggaccaccaagagtgccccaccaagagcctccctcttctggtgactcgtgcctgcttcccgtggagagctccagaagggaggaaactgtgaggaggtggagaacgtggcagggatcctaactttcttactgaaggaagttcttcacaagtacccatctgccttcagggaagaaaacataactcattttggtctttcaaattcagttctcaaaaccaaatcctgttgtcagcaatctgtgtcccaacgccttcttcagcaacagcattttccctgtggaattagtttccaatgttctttcttaaataaaccactgaagattaaaaggaatccagatacccaccacattttgtttccttaatgagtaattatcacatttctttggctacttaaatgcattctctgagtcaggtaaaggagatcgtaatagttaatcaacaagaagtaattcttgggtacttaacaatagtctaagcacttaatcatacttaaaattgactattaatgaaccttataaaccattttgcaattctgaaagtgaatttctctgcaggcttagagattactaagccatttagatcttaccaaacaaatattattcatgctttaattcctgggaaaagaaatttagaaaatgaggttaatgttcagttgtcctttcctgagtttaacaattatatattccatctgggatgctctgaactcaggttaaacattcttcaagttattcccacatttttcaagttattcccacgttagtgacctactttattagtattattactaaagaaaagggctgggtgcggtggcccacatctgtaatcccagcactttgggaggctgaagcaggaggatcacttgagcttgggagttcaagaccagcctgagagggagactccgtctctac

SEQ ID NO: 408062 - DNA, 1000 bp, Homo Sapiens; identical to SEQ ID NO: 295317

SEQ ID NO: 408063 - DNA, 1000 bp, Homo Sapiens
acctcacatatgcatgagaagagaagctatttttgtctctgggttccagttacacagccacagcctggaagctttgttctcagaattcatgctgtcatcaaaaggactcaatacaaacactgcagccagcctgccatggcttagctgtgaccgcagctgcaaactcttctgtcatgtgaaaacttttggctttttccgggtgtggaatgcctgttggtcccagctccgcctgcctttcctccttctggaatcgtgtccatcctttcagtcaactcagtttgtccgcatcttccaggcctcatacctccgcctgatctgcatggcagtggtgggcttgctctttgtgctattacactgactgtgatcgtgtttagtgagtcagcttctacaaagttgacctgcacctgtgtgatgtctctccctagctggatgcagcttctccatgggctaagttcatcatgttaacagtgcctgccccacaggccctcaggggatcttagtgggtggtctatggagagactttagtgggtatatgaatccccaaaattgtaggcaaagtttgtgtatgctgtggcctatcgacagcggggactctgccgctgatttctcctaagaagcctcctgggggtttgagcgaatcgtggtggtctccttccctctggagtgattagttttggctttggctcaacatggtgcagacccatgggatccaaagggaagttggccgggcatttctgggaaggatgtctcttcttctgatttctgagtgagggtaggaagccctcttcttcatcagacgccatggctcttacacgaatgatgcctagagcagacacagcccttccaggaccagaggccaaggctgacaatgggacaagagggcggaggaagaagtggggagcacctaagccttcctctgaccaagcactgtcctaaccaattctgattggttcacttctagttacatgatataataaacgtcctatttcttaaggcactt

SEQ ID NO: 408064 - DNA, 1000 bp, Homo Sapiens; identical to SEQ ID NO: 119318

SEQ ID NO: 408065 - DNA, 1000 bp, Homo Sapiens; identical to SEQ ID NO: 295319

SEQ ID NO: 408066 - DNA, 1000 bp, Homo Sapiens
agtaccttgattttggacttctggcttccagaactgagcaacaataactttctgttgaagccgtccagttttgaagccacccagtctgtggtgcttggttaccgcggccctagcaaacttgcctgaggctttccaaatcacagccccgttttgtcacaggggaagaattctaagaagttctttatttggccaagtgagggatagaagaataatgagcatttccctcatcacagctctgacaactgcctcagccacacacggcttaggagattggccacttcctccgccttcagcttgcagggggcttcagtaataaatgtgtagaagtgtttggtcttctcaatgctgggaatccagggagtatggcctggcatacatggaaaccagtcccctaaagacctcattgacacaggcctcatttgggggtctcctcaggcacttcccccttggctcctgaggccagaacccgaccctgctgtgtctctcttccatgcatctttttgccatctctgctctctggaatctgcaacaatatgagggtgctcaggactttgatgttgctactgacctcagcatgccccagtccaaacctaccttcttcctcctgggcccacatccgcttctgctccccacttccccagtgtcttcattcttttcatcacatgctgaccaaagactcatctttaggcactctctatgtcccttctgctacatccactctgttgccacatctcctgaattcttctgtctgatttcttctcactcttcctttccaccctggatcagtccattggggccgcatgtcaggacaccggatgacactgtttggacacctggaaggatcgggtaaaagatacagagaagtctaaggagggatagggtgagtctgggatgggctgtggattaggcaccaggtaaagctaattggggggtgggtgaggaatggggtgagggtatctattgcatctattttatggtaataaaaggaagttgaaagttc

SEQ ID NO: 408067 - DNA, 1000 bp, Homo Sapiens; identical to SEQ ID NO: 295320

SEQ ID NO: 408068 - DNA, 1000 bp, Homo Sapiens
gccgccgcgccgcgcgcctggagggatgctaacgtggagccggcgccgagtccgcccggcgtgcgtgcgtgtgtgggagcgcgcgagtcccctgacgcggggaccagttatgaatcgggggtgtgtgtttgcctccagagacctggcaaggtgcggagccctccagaagtgcggtcaagcggcagcggagacggcgagccaggaacctccccccgcgtccccagcttcccagcgtggcggcggaacccccggagaaagtttgcaaacttccagcgggcgcggcgaggacgccgggtcacctagggggcgggtgggcgcgcgcgcagggggctcgctctccccggtgcggagctgcagctgccacctctcccgccgggctgccggctgcagcgggtgggcgcgcgcccggggaggggaggtcgccctcggagggcgcttggctttcgctccaggcgctccgggctggagagcggcgaggctccgtccgctccagtccactcctccggccgcctcctgcctccgctgctttcttgctggcatcgttacctcttcccggccgctgccccaaatgacagctccggctcgagctttggcggcgcccaggcaattcccaagacctggcggcggagtctccccctgcggcagattctcggcagaatcacttgaacttttcacgaagttcttagaggggcaagatgcgaaggaaggaaccaaggagatgttttctctcagcagctgcatcccgcttcttctttgccatagatttatttttaaggggcgtctggtagataaagccctagaccttgtccacactctcacccccatccccaactttccctggaccggtgccgcccccacttgatgcttgctcaaggccggggactggagcgggctacttgtatatttcgttgtcagtctgcagaatgtgtttgatttttatttttccctccttctctgacatgtgtcaaggaataaagactggatacaggtccattacgtc

SEQ ID NO: 408069 - DNA, 1000 bp, Homo Sapiens; identical to SEQ ID NO: 119319

SEQ ID NO: 408070 - DNA, 1000 bp, Homo Sapiens; identical to SEQ ID NO: 295322

SEQ ID NO: 408071 - DNA, 1000 bp, Homo Sapiens; identical to SEQ ID NO: 119320

SEQ ID NO: 408072 - DNA, 1000 bp, Homo Sapiens; identical to SEQ ID NO: 295324

SEQ ID NO: 408073 - DNA, 1000 bp, Homo Sapiens; identical to SEQ ID NO: 119321

SEQ ID NO: 408074 - DNA, 1000 bp, Homo Sapiens; identical to SEQ ID NO: 119322

SEQ ID NO: 408075 - DNA, 663 bp, Homo Sapiens; identical to SEQ ID NO: 295326

SEQ ID NO: 408076 - DNA, 1000 bp, Homo Sapiens; identical to SEQ ID NO: 119323

SEQ ID NO: 408077 - DNA, 1000 bp, Homo Sapiens; identical to SEQ ID NO: 225044

SEQ ID NO: 408078 - DNA, 986 bp, Homo Sapiens; identical to SEQ ID NO: 295329

SEQ ID NO: 408079 - DNA, 1000 bp, Homo Sapiens
atgcccctgcctgctctgtctctagaagcctcaagcccagcatccccatgccgacgtgctcatctctagcaaaacaccagcctctcagccctctctccataaaggccactagaaagtactgtgatgccaggctgctccacatccaggcagcctgggtgaccactgccctttatgagaatcagaaaaagctgtctcccgagtagttggaattacaggtgcatgccaccatgcctggctaatttttgtatttttagtagagatggagtttcactatgttggccaggctgctcttgaactcctgacctcaaatgatccacccgactcggcctcccaaagagctggaattacaggagaagctaaacgttttaaaataagtatattatttctgaattactataacagacatggactccatttgaacaagatacttaattccatcaaaaacttgtcaaaatatacaaatttagtcacaagacactttactaccatctaccaaagctgtagtaaacacacacattttccatctttgaaatgaaataacgtataataatgttttccaaaataacaaagatgtctgcagtgaatagcactccctttgatgtggcaactgggtcaatcgtgttaacaactgtgaattcatctttttaagaaattcttttattgtttcttttcttttccgcgacagtctcactcgtgttgccccggctggagtgcagtggcgctatcttggctcactgcagcctccgcctcccgggttcaagcaattctcatgcctcagcctcctgagtagctgggattataggcacgtgccaccacacccagctaatttttttgtatttttagtagagacggggtttgaccatgttggtcagggtggtctcgaattcctgacctcagttgagccgccggcctcggcctcccaggaagtgctgggattacaggcatgagccaccaggcccggccttattgtttctatttgtaataaatctgttccccttgc

SEQ ID NO: 408080 - DNA, 1000 bp, Homo Sapiens; identical to SEQ ID NO: 225045

SEQ ID NO: 408081 - DNA, 1000 bp, Homo Sapiens
gcagttgggaaataacccggtacctcggcgtagcccgagggagtccaggaggctctccaaggagccttcccccgggtcgcgaagctgcgctaaaccccggccccagcgcaccttggaaggcgcattttggcctgaggtgaacgcaccttacaccattttcattttacttccttttctctgagaaaggtaatagataaccaaggccaaaaatggcgaaatgatgaaaaaatggtaattcttggcaggtcaagttgttactctgggtttaaaaaaatgtcattaatcaggattttccagtagccaaattgtcttgtgccggcagctgggtgactcacagatttggctccaatagtaattgtagagtgtgcgtaccatttccttctggatggtgtgactttttcattgcttggaagagaacacattagaatattttatcccctacatctggcagcatgtggagcaggctgtaggcaatactctgtccaagcacatctgggcggggaggccgtggagggaccgaggtgacacagagccggccctgtcctcggttctgtctcgggtcacctgaggcatcttcaccgcggcagctcgggcgcgtgggatctgctctcagtgatgacctgggacgcatcctgcctctgtgcgccattcctgccccttcactgtcactccttggtgatcgcccgtgttcttgggtaagcagtggagaggcacagaatggcttcctctgttgatctaccgcgtcaaatctgtatattataatttcaggttaaagggtaagagttgtaagcaaaatgagtactacgtcaaataattcaaaggaacgaagtaattaaaagtaaagctttctcagcacgaagatgttttctcagataagcattctaagtcaacttttcatagtattcaatgtctatttgttattcttcgaaagaactttgcacttatgattgtccaaagtggtacagcttgagacagaaataaacatgtatttatttaccaa

SEQ ID NO: 408082 - DNA, 1000 bp, Homo Sapiens; identical to SEQ ID NO: 295331

SEQ ID NO: 408083 - DNA, 1000 bp, Homo Sapiens
ctggaagctggccatgttctcacactcctcctcctctaatacacgagggacatggtccaagggaaccagaactgagaatgaggacttgacagaaggaatatgcttgtggccaagacacacttgctctattagagagctggaggggcaattatactgaatcccagctggagttgccaactcacctggagacaggcttagggagccaggaaggaaccctactgtttgttatcaaaggtggttgatttagagacccagaggtggcagctgtgtgatttggccttttggtctttttattccttttcatctaggaataaaaagtttggcagatactactatatattccacttattttgtcttcagcatatcttacaagctactaaattactctctatataatatgtctcatgaatcctttccatattcacatggcagtttatttacttaccatctatacataatattttatttcatcctggtttgttttcctgttttctgtagtagaattgcattttctcaaataacatagaaaactcatattagtgatatgaaggcaaaaaggaagaggattgatataaactataacttaatatttatcaagttccaaacactgttaaaaggcacattgtgtctgctagctcagttctgtcttgccagtagggacataggggtattcccattgtagggatgaagcttaatgatcagagaaggtaggtaatttgttcaatgtcatgcagctatgctgttgtggaacctggatgagatccaaatctctctgcatcatagtctcaacaagctgctgcttgaaacactacttactggagaggaatttgtgtgtgtctgtgttttgtttttgttttgcctagaatagcaaacagtgattaagtaagggtaaaaacatctcagaataatacaatgtttctctaggtccttcaaagaacatttaatgtataaatgttttattgtatcccatgaaaagtaaaataaacaattctctttctca

SEQ ID NO: 408084 - DNA, 1000 bp, Homo Sapiens; identical to SEQ ID NO: 295332

SEQ ID NO: 408085 - DNA, 1000 bp, Homo Sapiens; identical to SEQ ID NO: 295333

SEQ ID NO: 408086 - DNA, 1000 bp, Homo Sapiens
agaaagaaactgaaaatttcagcgcggctttgggaatttttagctttgcgatttaaaacccacagcgccatctcctggtaatgaggagaatatagcgatggatgacaatactgaaatgctgactatgaaatactcaaatatgagaaacgcctcaaaaattatttcagtgataggttgattatgattacaaaatatgatctgacatggacatttattatcattaaaagttatcagacacaatcctggaagctaattatttgtaaatagaagtttgtatatttatacatacatgtattttatagattcagacgcttatgctgtgaatttacaagatatgattctataatttatcataaatacataattttacaaaacagttccctgttttactttttgtgaatgattttaccatatatggtagaaaaagaataataggatgtggtgatctatggagacataaaatcttctagatcctcattgtattttactagtcaacattaataaatactttagccccattgtctcaataacttctcactttatctatgtcttctcatcatgcaatcttacagaatgtcttactgtcttaatgttaagacatcatgacaaaaatgtgttaacattattcagacattctgatcctgaaatatcatctgaagttaaattattttccaaaagtttaatgcacataatagaatcataaatacttaatacttttctattaaaatgtttctgaagtattctttcaagcttttctcccttttataaataagattgaaacacactaaaatttagagatgatatccctattaaaaacatttctcctctatgattgtatacacaggccagctgcttgaaataaaaataaaagtagatatgctttttgtagtgtacaaaatattatgaatatccttcaaaattgtagatcaaacagacaaatgtaaacttcagttgaaagattcattttatttgattaattaaagtgaagatctattaagcc

SEQ ID NO: 408087 - DNA, 1000 bp, Homo Sapiens; identical to SEQ ID NO: 295334

SEQ ID NO: 408088 - DNA, 1000 bp, Homo Sapiens
cttccacccactcacagctgtaacaaggcagtccctccacctccctgctggggtggtgtcagaggaggccaagtggagagtcaggactttcaccatagcccagtgacaatgaagccacctccctatggtgtcagtggaggccataaggaacagtaacgaggtctagtgggaatccagaactgccaccctgcccagcagtaaccaggagcccctcccctccgtgtggacagaggccaagtgctgaagctggactttgctccccctagccctgctaggtggctattagaacagccagctaaaactggtttcaccaagacagatttaggaagacagtgccccgggcaggaaaatgaaggcacggagaggttaaatataataacttgctagtggtcaatcagtaggcagtagaggagccagcatataaacccaagctgcccagctgcagaaccacattcttgtcccatatgctatgcctctcaaaaaaggaggccctctccttgggacacaaaggtaataaaaatgcctgccctgagctgtgtctctgtctaggtacacagttcatgagtgaaggagctcctggagtcatgaataatggaagtccagattggtcaagtaacttgtcccagccccagcccatgcatctggtatgtggttggacaggtttctaactcattacgtaacatcaagaacattttaaactgctttgagacatttgtgaattaagatctcaataaatagtcctccctggcaccagctccatccacattaaatgagacttgaaaatttctttgaatggatattagtttagaaggagctaagttattagttggcctcacattcctcagttgggccctgggcccagcatgccacttctcctggttattatggttcacatctgaggtaacccatcgggaaactggatgggacaacaaactaaaaatgttttagtttggacctgtccaaaaccaagagaataaaaacaaaatggatagtcaagatg

SEQ ID NO: 408089 - DNA, 1000 bp, Homo Sapiens; identical to SEQ ID NO: 295335

SEQ ID NO: 408090 - DNA, 1000 bp, Homo Sapiens; identical to SEQ ID NO: 119325

SEQ ID NO: 408091 - DNA, 1000 bp, Homo Sapiens; identical to SEQ ID NO: 295337

SEQ ID NO: 408092 - DNA, 1000 bp, Homo Sapiens; identical to SEQ ID NO: 295338

SEQ ID NO: 408093 - DNA, 1000 bp, Homo Sapiens; identical to SEQ ID NO: 295339

SEQ ID NO: 408094 - DNA, 1000 bp, Homo Sapiens
tgatcctggcagatgtgatagattctacaaggttggacaggttaaattcttgcaaggaagtcctttctggaacacccaagaattacagaaagtttagctatctttcagatgagatttcattctcagttttacttgttccatgacccttccaaactacacacgggattcttttcattcagttgccttggccagcattttatcaccaatagtcctattttatgtaactgagtttgccttgccctttactgcatttaggtaaatggaatggtgttttttagacttccgaaactatttgtagaccttttccttcacaagtttgaaatagatgtgaggcattcattttactcagacaacattgagcccaattcacttgggaaaatgcatcttgatgtgtaattcatcatccagagcctgtccactattctgttcctccctgagagtaaattaggcactttgaaaggtgcattaaactcttcctggctactaggtaccatttagaactgtggggcaataatttacttcatggtaccttggtgacctcaaaaagtttatattgttttgaaagttcttaattttctcccactaaataatttatgcattcagaggttgggtgtgcttatgtttccagagagacaacagctattgaatagcataaataagataaaatagtcatgctagtgtagaaattaaatgttcacaaatgtgttatcgagtctatccatagaataaaagtgtagcttataaaacaattattgctttggatttcatgttttaaatttacaagactgtgttacattttgttgtaattagtaatgcttcatagctacaaggattaccagatccatatcactgcatttttccatagcacaaaacacatttatccaaagtaaaaatagtgtgctaaacatactgaagtttctgacagacacttatatttctcttcattctttcattcacagcagagtttcatccatattaaataaattggttaagttttgat

SEQ ID NO: 408095 - DNA, 645 bp, Homo Sapiens
atggcgccagccaggggactaggggcagcgcgagggctcaaactcaccgcgttctggaaagttccgcccggcgcgccgcagccgtcctcttttgtagccgaacccgggcgcgtcacccgccggaagtcccgcccttctcggccgctgccaccgccccgccgttacctgggcaacggcgcgggggcgcacgggtcgggaggagctgcgccgaaaggccttgtgggtgttggagcactgcaagtcctagggttcccaaacctgtggggtggccgcctgggcccgcgagggcgggaagggctcgagtacagtgacccagcgggagctgtgtgtgaacgggaaagctcttggaacagtcttgcccccccccccccccctcttacgggcgcctcttctctttttgggaacgtggcgagcaaaaaatgcttgagccagtttacaaagaaaaggagtcggagccagggcggttatgtgggacgtggatgcagacgcaggcggaggcgccaactgcggggatggctagggtgatcacagctgccccgggggcgcggacaccccggcagctccggccagcggagctcccccaccgcacgtgtcaggtcctagcagaaacgcagcgtctgtggccaagggccaggaatgcggccg

SEQ ID NO: 408096 - DNA, 1000 bp, Homo Sapiens
ccaagtggttaatattaaatccatgtgtcagtgttggtggctttcaaccttggctgcgcataatcattttgatgcttaggctacacccagccgagttatacagaatccctggagggtgggacctgatgagtgttttaatgtttcccgggtaattccaatggtagccaaggttaagaaccagtaccgtacgtacaaaaaagttgagaagctaatttcacgtacagaaaatttgccactgttccaagagcactctcaagcgacataattggcctctactcctattccctacaagtatgaatgggcaggagaagcatcacagagaaagcagagttagtgctggaacttgtatttttgtggatgatgaccttggttaatgttttttcataggctctgtttcataggctttgttttttcataggctctccctcattacattgttctgagaattaaatatggctgcttacatagtaatgaagggttcaacagaggctgttagtggtagtaataatacaagctgaaaaactacacagacaaacctatcagtttctgcctcttcaggatataactattaggttagtgcaaaagtaattgcggtttttgccattaaaagtaatggcacattacttttgcaccaaccgacctaatatgactttcttttagtgttcttaggatttttaattgtaaaacatgtaacaaattttcctaaacaattgtgcaattcagtggcattatttacgatgttacgcaaccactattgtatttccaaaatgtcatcaccctaaacagaagccctgtaacattgtcaattaacttctccttcccttcccctcagcctttggtactgtttctgcctcaatgcatttgtctaagtttagttcatataagtgaaattatacaatacttgtccttttttatctggcttatttcatttagcatgttttaaaggttcatccatgtatcaaacagtaaagtgcttcatatttgggggaagtataaaaag

SEQ ID NO: 408097 - DNA, 1000 bp, Homo Sapiens; identical to SEQ ID NO: 295340

SEQ ID NO: 408098 - DNA, 1000 bp, Homo Sapiens; identical to SEQ ID NO: 295341

SEQ ID NO: 408099 - DNA, 1000 bp, Homo Sapiens
cattgtcggttttaggggccttgtcggttctgcggggcgagcgccttcgcggaaaactccaaagtaccctctgtggagccttgttgagtatcttcaaaccttcagagggaccttttatcagcgacccatgccgcagtttacagaagaacgctttgtgcgtgctttgggacgagtctttggaaatgatggttctgactctgagttggaaactggaacgcacacaacagatgggaggcgttgaaggaaacagaaaggtcggcctgaggggagaggcgtttcaggaggcttgcggatgtgtgaagtgtgcgcactgtgcttggggcgagcccaagcagtaaccccacccgagtgaagcgttcttggggggatcggctccgggtgggcgacgttccccgcgtgcccccttcccccgagagcactttgtagacactgactccaaaagcgggtctggtctctgcccagccccactttggctggcgtgcttaggtgcctctcgggaagctggagaccaccctcccccattccagcaaacgctccattgaggaacctactgcgtgccaggtcctggggagcttagcgtctgatgaaggatacaacaacaaaagactggaaattcagaagcatgaggggacctcccccctcgagggagaaccagagatggcttcacagagcagacgtttgaactgggccttggaggatggatgagtggaatttggcccagtggagaaagtcatagcagcaggagataagattgtaagggtcaggtggtggggctggataatgcgaatcttgactgtcagacacagacacctgccatctaattagtacgcgagggataaattttggactccgcaggataaggacaaggctacacaatggcttagaacagttaatcgggcaacagttggaaagggcctttgcctcaaaattatgtttgccctgtcttgtgtgaatgcctattcagatgcattatttgaaaaataaataaaccaggcaggca

SEQ ID NO: 408100 - DNA, 1000 bp, Homo Sapiens; identical to SEQ ID NO: 119326

SEQ ID NO: 408101 - DNA, 1000 bp, Homo Sapiens
gaggaggtacctgaaggagggtgtggtaaaccaacacgtgcatgggaagggggccgtggctacggagatagctggggagtgggggaacggggtccaggagtggacaccggcagttggaacatccagtacagctgttgggagatgcctctcccgccctcaatctccctgtctgtggttccagagggaagaagagtggggaaaaaaggatgaagagaattgtttcagtgctgggggaggttttggagagaagggattctttatgtattttcctttccttgcaagctcggaggagttgaggcgccttgaattttccttcgcgagtttggagaccagccgatttttcacgaagcaagcaaagaccgcggtcccggatcctgcaacatatacctcattttctccaggcctctccacttgcccgagctctcagccaccaggagacagacggaaggggcttctgggctgtgttgggagcgggcattgtcccctacccactcctgcacagtttcccaaagtccagccacctccgaccctccttgggggaaaaaataccagtacccagacacctctgcaccctgttatatgactgggcttgcttcaggaatatcttacaaagaagaaggaggaggaggaggaacggcttggagtcatgtttacatctagttctactgatccgttcacatctggagagtttatttataactccctctataactctctgtttggaggcactggtggctctactgacagactgatgtctaggaaatattgctctatgtctaatggtacctaaatgtgctgtggttgtatttacagatttacgtttgagggaaatataattatttccattgtatttgtgcatatacagtagttataggagcagatttatatatgggaaaatatgcgactcccttacagccatccggctttatgtacatttgatatcctgacagatttatatctctgaacagctatatagataaaaacgtatattgttagaatt

SEQ ID NO: 408102 - DNA, 1000 bp, Homo Sapiens
aggaagaggatgatattactcccaatacagacgggtgtacaccctctgtacaccgagggtgtacacctgtctgtgaaagagttcttaatctccagagggggagatgatattactcacaatatggtaaagaggctgtgagtccacggaggatcctcagagccagcgggggaagaggggctggctctcagtccccgcctcgcgggggtgactccccccagtgcgatgggggtcctaagagccagtgggggaagaggggctggctctgagaccccgcctcgcggggggtgcctccccgccctgtgatgggggtcccaagagccagaaggcttagaggggctggctctcagtccccgcctcgcggggggtgcctcctccccctgcgatgggggtcgtaagagccactgggggaataggggcttgctctcagtcaccgcctcgcggggggtgcctcctttcctttctacatagacacagtgacagtctgatctctctttcttttccctacagatggacacgcccccactgatattgtttttaatgcagcgtgggaggggaggatatgacacgcgatatcgcagctgagtgccacgtgctgacgtcactaagatcaatacagcaaactctgaaagatggacagagagacaggagatggtcctttataatgcagtgtgatctgtgctgcaatagagttttggaagctagaagttcaaaacgaggtgttggcagcaccatgctctctctgaagatgctaggaagaatctgctccatgcctttccattcgctcctggggtttcctgcaagccctgacattccttggcttgtagatgcatcaccccagtttccgcccccatcatcacatggcctcctctctgtgtgtgcctctgcgttccctctattcttcttctaaggacaccgacaccagtcatagtggattaagggtccactcctaaccaattacatctgcaacaaccctatttccaaataaagtcacattctaaga

SEQ ID NO: 408103 - DNA, 1000 bp, Homo Sapiens; identical to SEQ ID NO: 225046

SEQ ID NO: 408104 - DNA, 1000 bp, Homo Sapiens; identical to SEQ ID NO: 119327

SEQ ID NO: 408105 - DNA, 1000 bp, Homo Sapiens
atactcagcccatgctcgggctggactccagtgtgactttgcttcttttcctgctcagcttcttcgaggttggccttggtgagctcccgtggtgggttcccagctcctgtgtgcctctgacaggtgctcatcacttggctttttgggcatctccttaatttctgctactaaagatgctcctggcttatcttctgcatgtcctgcctttgcccttgaatcagtcaattctccaagaagctctggctcctttcctagaacagtgttagaaaccaagatctgggcactggtgtgttcattgctagtgaggtgttgttgcttctagactctctcagctgatagagcaagggaatgtttaagccatttagaacataaatgcattcatttaaaaacatggactatgtattcactgtgccttgggccccaagctgggtgttgaggatcttgagaaaataaatcaaggaagcccatggtctagggtagtgctggtgaggagataacagactcttgagatggcactagggccatggcggagacagacctggacactagtgggacccagcaaagacccacagcagcctggggaggcggcttccagagtgctgcgactttggaacatgaatactcctgagggttcacaaacgagcctggggggtattccaggaccagctggtaggggggcaaaggttgggtcatgaactatggggaatgcaagaattgcaagaggttgaacatgcctgggggtgcagagacagaggctgaggtgcagggcagtctgagacatggttaggagcctgggcattctcttgagagacaggggagaagaaaattcagatggagcgttcatttcaggaaggccaccctgggatctgggcaggagatgaatacctggcagggtcagggaagggaaggtaattgaaagtttacaaaaacaaaaccccattcacattcttaaagtattcttcatagaggtactatttcaataaacacatgctttatttgt

SEQ ID NO: 408106 - DNA, 1000 bp, Homo Sapiens
gtgaaactagcgcgttttcttggatcctacactttatagtgagtcataaatactttaaatacaaagccaacaacatttgctgcaaataaacgtaaaaatactgttaaagtgtaaagtgttttcctccgtaccatctgacgtttctggcggttcgttgaacgcgagagaacgctgagccgtctgcactgagcccgggagcatcttcagggcagcgccgcccacgcgcgaggtgaatgaaggacacggcctcttgacactcccaggcagcacagatagacggatcctctaccgctgattgcagctggaaaagattctgagggctcacctgagtaatccaggatcatcttcccatttccaggtctctgcccttgatcacatcagcagaatccttttgccattggctagaagtgaccccaggatttttttattatcaagagagactagaagaatcatgagacttttcctagttgcctttcaagaatatgaagaaaaaaatggttctcaaagtgggtttgaatgagtattgttccaataaatgaacttatattcatatttcatcccctgagtcctggtgtttcaacatccattagaactgaataatcatactgcatatcaaagtttgtgggaaattgctaaagtgtaaaaaatgctcatattgaaaaagaagaaaagctgaaaattaattgtgcttccaactttaaaaaaggacaacaagctaatcctaaagaaactagaataaaaggaaaaaataaacagaagttaaagagtaattttaaaaaatacaatagaaattatcaacgaagccaaaagttgattctttgaaaagattaatgaagtaggcaaaccactggtgagatgaatcaagaaaaatagagaaaagactcaaataaacattaggaatggaaaatagggcaatgctaaagagaattcaaagatcagaaaaatatgggagtatactaaaaacgatttcatgcccaagtgttcaaatctatattgcctt

SEQ ID NO: 408107 - DNA, 1000 bp, Homo Sapiens; identical to SEQ ID NO: 220462

SEQ ID NO: 408108 - DNA, 1000 bp, Homo Sapiens; identical to SEQ ID NO: 225047

SEQ ID NO: 408109 - DNA, 1000 bp, Homo Sapiens; identical to SEQ ID NO: 295347

SEQ ID NO: 408110 - DNA, 1000 bp, Homo Sapiens
atggtgcttaatccaaccccttactcactgctgagacctggaaatgtgttcatcagctacaaaacaggagagatgataactcattatgtatatgtgatgataaacagagacaatatattgaagagcttatatgagtggcagacacgggacatgcttccctgtggctggccagcgtgtcatcttctccatgtgtccagagaaaagctttgcaaatcaacctctcgatgaatgatgacggcaccagtgaaatcaggggaggcagaaaatcatgttagtttggtttataatgcaagaagttacagaacacagagtgctcaaaactaagaatgtgctagttgtataacagggtccttcttgggactcagccaggattcaaactataaaggaaaatcgggtgagcaggtgggatagtcaagtgattctatttgcatgaataattttgtgagatgataccttcttgtccaggaacattgagcagtgctcgtgctgggtggattgtgatgtggaaaccctgggagatgtcacgtctgacatcaactttctcccaggtgacagctgcaccctctaaaggcttctcaaatgacagagctcaatgaatatagaagggaaaagtatgaggatgacctatgagcacagggtggacagtctctgcggtgggcaggcattagcaaaggagagaccttctgtattatgcagagtggaattttccagaggctacatgatgagtgacgtcacgacagattgagtacagagccaactatgagaatccagctgccttctattaaggtaccctttctgtggataccttcaagttccagcaccaaatatgaaggcgactgccatcaccagctcccacccctacatgaggtcaaatccctggatggcatataacacactagagcaattaagaggatctaactaaaggtggggaaggaaaaatgtgtgtacagagacaggaagtcatggacacagttatattgaaagatacaatgacctcctc

SEQ ID NO: 408111 - DNA, 686 bp, Homo Sapiens
ccgagtgcagagccagggcccagcacgaaggccttgggctccagtccgtgtgccccacatccctacatgagtgagggtggagggatggtgcctctgccacggccacggtgccgccgtccacgtcagctcactctcagcacaggtgctgtgtgacggcctcgggccacaccgcttgttctgaggcccctagcaggtcgggcttgtgctggctgcacattggctggtgagcttggcgggtctgtgggcacggagagaccagaacgtgcgtaacaggcccgatgagggtgccaggctgtggcgacccccgagcttcagaggagaggggcaccagccgggggccctgcacaggcagcctcagagagaggaaagctcacgatctgggagaactccaggcctggcccagtgaagacgtccttatcttcagcagacattgcccagtgcaaggggagccccagactgactttctgaggtcacagacggagcctcaccccatccaaggcggtgtcctggactcccactgtgctccccagagggcagggtacctggggcccagcccgggcggcaggagggactcagcccctcgcccaggcaggaagggtcccaagcagaggcccctccctcaggcactccccagcccacacctgcagcactgggaccaagactaataaaacaccagcctcacggaa

SEQ ID NO: 408112 - DNA, 1000 bp, Homo Sapiens
ggaggaggacacactttttacacaaagttctgctaatttaacccttatgtgaaacagttaaatagcaactcctagtgagacagcaggcggaaagatttgaaggaaaactgttgctgccacaagggaagtttgatggcaggacttggagtgtgtatgcatgatgtactaattgaagcattagtacagtttctttgggggggtgtcagatgagtgtagaggaaccccctactctccacctttgcctagggcaatgtctgcatcagagattggtgccaacgtaataatcagcctcacagaaagttggattcagagtctggaaagatggaagatacaatctttacagcctatggatagaccctcctttccaaacttcagcgtttggaatcttagtacaatttctataccaaaggtgcttgccaaatgaaactctggatttacaacaaattgtgttttgaaaaatactgtatttgccaggcgcgcagcggctcatgcctgtaatcccagcactttgggaagccaaggcgggtggattacgaggtcaggagttcaaaaccagcctgaccaatatggtgaaaccccttctctactaaaaatacaaaaattaccgtggtggcaggcgcctgtaatcccagctacttgggaggctgaggcaggagaatcgcttgaacccacagggcagaggtcacagtgagccaagatcgtgacactgcactccagcctgggcgacagagtgaggctccgtcagagagagagagagacagagagaaagaaatatttaaattgctccagttcaaataagccggtaataagccaaaccacctgtctcatagagagctggagagagagaagggtcagcaagggaaatgataaaataaacaaatcactgctatgaaaatttatatggctcaccccgcctctgaaatgagagttcaaaatagaaatgcttgctccttaacacgggttatcataacgagatgcatttaatacatgagtttgctgg

SEQ ID NO: 408113 - DNA, 1000 bp, Homo Sapiens; identical to SEQ ID NO: 225048

SEQ ID NO: 408114 - DNA, 1000 bp, Homo Sapiens; identical to SEQ ID NO: 295348

SEQ ID NO: 408115 - DNA, 1000 bp, Homo Sapiens
caagactggataatttataaagtaaagaggtttaattgactcataggtccacaggatgtatagaaggcatggctggggaagcctcaggaaatgtacagtcatagctgaaggtgaagaagaagcaagacatgtcttcacaaggccaacaggagagagacagtgagtgaaaggagaagtgctacacactttcaaacagacctcatgagaactctgtcatgagactgcactagggggatggtgctaaaccattagaaaccagccccatgattcagtcaccccccaccatgccctacctccaacaattgggatcacaatacaacatgagattttggtagggacacagacaaaccatatcactatgtatctatctttcactggttctacttctcaggctggacactgactgatataggagttattctgaagccaggccctttcctctgtgtactgtcctttttttgttctgggcctgccttcaccccctcatttccccagtgaccatagccagtaggtgtattaaacatggtttcaaaaattgcctatattttatgatgctttgaccttttggggccttgatggatgaggagagacttcccttcccagggctagctaattcctagagatagaaaacaactgccatctgagcacacctgtcatatgcaaacaaaccaacccagagcccatgcctgctaactatctaatttattgagtcactatcctcctgtcttagtattatcccaggaccaggcactaggcaaccaggggtagtacctacagctctgagcctactgacattgtttaaactactcaatcctaagttacttcccttgaactgccttgtctttgtcatggaagccacaacatagtcctgtacctgtgctttcccctggctgcttctgcctcctaatagaacctcgtgcttcctcatgtggctctgtgaggagcatcgtcccctcttttcttgggaattgtaagtaataaattcctcttgccaaggtgg

SEQ ID NO: 408116 - DNA, 1000 bp, Homo Sapiens; identical to SEQ ID NO: 119328

SEQ ID NO: 408117 - DNA, 1000 bp, Homo Sapiens; identical to SEQ ID NO: 295349

SEQ ID NO: 408118 - DNA, 1000 bp, Homo Sapiens
cgtgggggaggttccgtcccgccgccttcgcccgcgcgctgcactcgcggacgatctctgctcgccttgggcgcgccgtggcgcgcggggccgtgctggcgctgcggctcctcggcctgctccgccgtctggtggccgccccgggctgactttgacttagcgatgcctttcctgatggaggaaacagtgacccagcaccacctaatgcccccaaaccaaagccagatccaaaccccaaccgacctggtttcactggtgacccagcaccacctaatccccccaaaccaaagccagatccaaatcccaactgacctggtttcactgataagagcctctaaccctacggggtggtctctatgttgtttacctggcagtgatgtccgtgtcatctgagaagaggagatttcaggggctgactttgacttagcagatgcctttcgtgatggaggaaataacgacccagcacctcttaattcacccaagctgaagccaaatgcgaaccctgagcagcctggattcattgacgagccagcaccactgaacccacccaaaccaaagccaaatccaaaccccaagcagcctgattccaccggggatgactttgatttcacagatgtttcttcatggtgaacgaaacagggagttgcctcgattctgatgtgtttgcttcggtgctctgtgtattgtattcatcccactcttcaattcataaactctggagattcttcaattcactgggcaaaccatatgcctaagtctatcctctgatggaggctcgtacatgcaaaatccaatagcaacctgggaagatttcagtcaagacccaagaggaggctggcatcaggctctcggtcaccgatcttcacattcaggtttcctgatgcactttgcgactctttgggcaacctctggactccttgttcccagggtccacatttagttttatctttactgcattgcttttatgaaaaagaataaaattggatgaaacagatacaga

SEQ ID NO: 408119 - DNA, 1000 bp, Homo Sapiens; identical to SEQ ID NO: 295350

SEQ ID NO: 408120 - DNA, 1000 bp, Homo Sapiens
tgctgctcaccttcatcctctttttctgggcccctgtgcctcaggtcctgcaacacagctggatcctctgtgtggcagccgccctttggggtgtgggcagcgccctgaacaagactggactcagcacactcctgggaatcttgtacgaagacaaggagagacaggacttcatcttcaccatctaccactggtggcaggctgtggccatcttcaccgtgtacctgggctccagcctgcacatgaaggctaagctggcggtgctgctggtgacgctggtggtggccgcggtctcctacctgcggatggagcagaagctgcggcggggcgtggccccgcgccagccccgcatcccgcggccccagcacaaggtgcgcggtgacggctacttggaggaggacaactcggacgagagcgacgcggagggcgagcatggggacggcgcggaggaggaggcgccgcccccggggcccaggcctggccccgagcccgctggactcggccgccggccctgcccgtacgaacaggcgcaggggggcgacgggccggaggagcagtgaggggccgcctggtccccggactcagcctcgctcctcgccggcctcagtttaccacgtcttaggtcggggggaccccctccgagtctcgcgctgtcttcgaaggcccctgtctcccttcccccacgttggggacgcccctcccagagcccgggtcacctccgggcttccgcagccccctccaaggcggagtggagccttgggaactccccggccaagcacaggggttcgaaaatacagctgataccccgcgggcccttagcacgcgccccagcgccggagcagggtcagggtcttcttgcgacccggccccgctccagatccccccagctctcggccgcggacccgggccgcgtgtgagcgccctttgcacctcctatctccagggtccgccgagagccacgattttttacagaaaatgagcgataaagagattttgtactgtc

SEQ ID NO: 408121 - DNA, 1000 bp, Homo Sapiens; identical to SEQ ID NO: 119281

SEQ ID NO: 408122 - DNA, 1000 bp, Homo Sapiens
caatgaaacagttcaagctcatattggcaacttattaacatcaaaattcttcagttataaggattttgatactttattatatacctgtgcagcagagtttgactttatggaaaaagagactccactgagatacacaaagacattattgtttccagttgttcttgtagtgtttgttgctattgttagaaagctggtttaccatgcattgcaattgttagcatatacagcccttggtattttaattatgagactaaaactcttcttgacaccacacatgtgtgttatggcatcactgatctgctcaagacagctatttggatggctcttttgcaaagtacatcctggtgctgttgtttttgctatattagcagcaatgtcaataccaggttcagcaaatctgcaaacccagtggaatactgtaggggagttcagcaacttgccacaagaatttatagaatggatcaaatatagtactaaaccagatgcaatgtttgcaggtgccacgcccaggatggcaagtgttaagctctctgtgcttcagcccattgtgaatcatccacattatgaagatgcaggcttgagatcaaaccttccatgcaaacagacattgggactgttgcagcttcagagtagtcctgtagttgtatttcttgtagttcatccctgttcacacacaggtgccagaacaaaaatagtatactcaatgtatagtcagaaagcagctgaagaagtgaagcgagaactgatagttaaaagtgaactattacattctagaaaagtcatggtgtgtaagaagatccaactgttgaactcaggaaaactgtgggtcgttctctactttctgcctggttgcagtatgcctgaaatttgggatgtagaagatcctgccaatgctgggaaaactcccttatgtaacctcttggtgaaggattccaaacctcacttcaccactgtattccagaacagtgtttacaaagtcctagaagttgtaaaagaatga

SEQ ID NO: 408123 - DNA, 1000 bp, Homo Sapiens; identical to SEQ ID NO: 119329

SEQ ID NO: 408124 - DNA, 1000 bp, Homo Sapiens
atcacaaggtcaggggttcgagattagcctgaccaacatggtgaaatcccgtctctactaaaaatacaaaaattagccgggcgtggtggcatacacctgtaatcccagctactcaggaggctgaggcaggagaattgcatgaacatgggaggcagaggttgcagtgagccgagactgcgccactgcaccccaggctgggtgacagagctagactcagtctcaaaaaaaaaaaaaagttctatagccttcttccagtttctccccccaattaaatgtaataacaatctaatcagtgcactgaaagttaagataatagaaaaaatttcatccagaatcccatcacccacatgttaccgagggagaaattttaccacctcttgtttcaggccagttcaggcaggtgtacattgtctcagaagggagatatttctttcgtctgatactggagagtcaccagagtcgccagacaacaggacaggacactcatcttgcccacaggctaggtttgctggatgtcactaggtttgccagacaccaactcttgtcagagttattccatttgcctgtttggaaaaggcagccttcacccctgcattcctagctcctgggctgacggcctgcctgacatctgagggtagtggagtgaggttggcacttgccctgcgctgagagtggaggggagataatggtttaggtgggaaagtacagcccctccagcttcagggatcagctcacagcagggggaaaagtcctagaggaagactggggtggggcatgtctgctcactcacaaaagcagattcattattacagggcctttaaagagggatgtgtgtgggtagatgggatcctcaccgaggtgtgacctgctttttctagtgtttgcgaggatgtctcattaacctgcaggaaagtgctggtttcaattcgatggtttgttttctgttctgtttcctttctgttacaaacacaaagggtacattaaagagcctttccccatc

SEQ ID NO: 408125 - DNA, 445 bp, Homo Sapiens; identical to SEQ ID NO: 119330

SEQ ID NO: 408126 - DNA, 1000 bp, Homo Sapiens
ccgactcctgaattttcccatggtgttctgacttcaagggctggcagccagggagaatgggcccaggggaagcaaagacctcttccctctgcggtttctgtcccacttaactgacctcactggaggctacgtcacccaaagtagatgttagaaaacctaaattaatgaaccatatttttaaaatcctatttttcccaaacagggccctctgcagcccatcctttccttccgtccttctgaaaccacataccccaggcccaagcgccttgctgtcacgcccaacctctttgggagaagtatgaatgcgtgtgtctaaattaaaagaaaaaaatatttaaacgttttttaacaaaaatttatttttgtatttaagctaaattgccttttaaattccttcaagcttggttcattgaggtggttaagtataaatgctattaactaggaattagctgtatagttaagttatgcctgtgcaaagaagaggctcaaatgctgtccccggcagctttcctgggggactagagctccttctggccatgttatatgaaatgtaattcttattttataaataatgtgatgtagatgtaaccggtgccccctccccgttgtgactgagggcgagtgttatacctggctgcgtgtgcagctgaggagggagtgaacctcaagcctaaatacctgttaggattggagggtctgggtgggcctgggcctagcaatcaatcaagcttctacctgtaccttatgtaaggtagaccctcctagtgtcagtacctgagcttgtttacctcagttccgcaggcaggacagccggtccgggaaccctgagtgagagtgagtgtggatgtgtacagtacacacactggacggcagcgggaggctgggactttccattacaaatagagacttcattcctgttgagtctagttggaatttttagtatgaatgtgagatttttctcctgcttgtgacattaagaataaaaaactgtgatctatcg

SEQ ID NO: 408127 - DNA, 1000 bp, Homo Sapiens; identical to SEQ ID NO: 225050

SEQ ID NO: 408128 - DNA, 1000 bp, Homo Sapiens; identical to SEQ ID NO: 225051

SEQ ID NO: 408129 - DNA, 1000 bp, Homo Sapiens; identical to SEQ ID NO: 119331

SEQ ID NO: 408130 - DNA, 1000 bp, Homo Sapiens; identical to SEQ ID NO: 295353

SEQ ID NO: 408131 - DNA, 1000 bp, Homo Sapiens; identical to SEQ ID NO: 225052

SEQ ID NO: 408132 - DNA, 1000 bp, Homo Sapiens
caaggacttcaggcagggagccctcagctccttccgggaacctcccccaccggggactgcagggccctgggctgggttaccccaccagctccacggaagacctccagcctggccactcctcggcctctctcatcaaagcaatccgcgaggagctcctccggctctcccagaaacagagcaccgtgcagaacttccacagctgatcggcctcgcctcgcagatttgccaagtatccgcttcctgtggaagcaagaccaaaaggaaatcaactgagtgggtgtttggaagaggaaggagcaactctcgggcagcctgcccaagggagggagcaagttgcaatttagaagatgccatacgtcgtgtgacagctcatgagcctttcactgggctggcaattgtctgaacacttgggttcagttgaaatatatgtattttggccaaaagccagcagcacttcacaaaaacaaaacacaaacctaagctaacaaaatgactgcattcgtctcttttttaaaggtagagattaaactgtatagacagcatagggatgaaaggaaccaagcgtttctgtgggattgagactggtacgtgtacgatgaacctgctgctttgttttctgagaagaggtttgaagacattttattaacagcttaatttttctcttttactccataggaacttattttaatagtaacattaacaacaagaatactaagactgtttgggaattttaaaaagctactagtgagaaaccaaatgataggttgtagagcctgatgactccaaacaaagccatcacccgcattcttcctccttcttctggtgctacagctccaagggcccttcaccttcatgtctgaaatggaactttggctttttcagtggaagaatatgttgaaggtttcattttgttctagaaaaaaaaaatccctcccaaagtggggcaaaaagctttatatttatttgattatccaaaatacagatcaaagtttagatctac

SEQ ID NO: 408133 - DNA, 1000 bp, Homo Sapiens; identical to SEQ ID NO: 225053

SEQ ID NO: 408134 - DNA, 1000 bp, Homo Sapiens; identical to SEQ ID NO: 225054

SEQ ID NO: 408135 - DNA, 1000 bp, Homo Sapiens; identical to SEQ ID NO: 225055

SEQ ID NO: 408136 - DNA, 990 bp, Homo Sapiens
atggaactccacatcctggagcaccggctgcaagttgccagcgtcgccaaggagagtatcccgctgttcacctacggcctgatcaaacttgccttcctgtcctccaagaccaggtgcaagttcttcagtctgactgagacgccagaggattacactatcattgtcgatgaggaaggattcctagagctgccctcctcggagcacctgagtgtggcagatgccacctggctggccctgaacgtggtgtccggcggtggcagcttctccagctcccagcccatcggcgtgaccaagatcgccaagtcagtcatcgccccactggctgaccagaacatatccgtgttcatgctgtccacgtatcagacagacttcatcctggtgcgcgagcgggacctgccctttgtcacccacacattgtcatcagagttcaccatcctgcgggtcgtcaatggcgagaccgtggcagccgagaacctcggcatcaccaatggcttcgtgaagcccaagctggtccagaggccagtcatccacccactgtccagcccgagcaacaggttctgtgtcaccagcctggaccctgacacgctgcctgctgttgccacactcctcatggatgtcatgttctactccaatggagtgaaggaccccatggccactggggatgactgcggccacatccgcttcttctccttctccctcatcgagggctacatctccctggtgatggacgtgcagacgcagcagaggtttcctagtaacttgctgttcacaagcgcatccggagagctctggaagatggtccggattggaggacagcccctggggtttgatgagtgtggcatcgtggcccagatctcagagcccttggctgctgcagacatcccagcctactacatcagtactttcaagtttgatcatgcacttgtccccgaagagaacatcaatggtgtcatcagtgccctgaaggtcagccaagcagagaagcactag

SEQ ID NO: 408137 - DNA, 1000 bp, Homo Sapiens; identical to SEQ ID NO: 119332

SEQ ID NO: 408138 - DNA, 1000 bp, Homo Sapiens; identical to SEQ ID NO: 295360

SEQ ID NO: 408139 - DNA, 1000 bp, Homo Sapiens
ttacatctctgtatcccatgttcccctgtcttcatgaataagtggtttgattgttttgaggccaacttgagtttatagagcttgtctaataaaaagatggatgtccttggggaaaaaaagctgaggctaataaggtgagagagaaacggaatcctttcaatgagctaagaaattacttcaattgaaaagcctgggaagtgaccctatcttggtcaacatatttcatgggcaaggtctggggatgtctggtgtcttcccaacccatgaaggcacccatcccacctgggtttgccctttctagatggtggcccatctcaaggatatttttctttctttctctgatccaaatccaaggactatgttctagtccttcagaaatctatactaacaaactggataagtgattctgcctcaaagttgcataactacagaatcattggtcaagttcttactgcctgctcacttattcatcaggaacttattgtgtacctgccatgtatcaggtactctactaggtgtgggggttacaaagatgaatgtagtgcagtccctgaactgaagaacatagtctcatcatggatgaaagtactccactaacataagatacattattattgtctaacatatgtgatgttattatgggtatggtacaagatacagtggaaacagagatgagaaagctgatcttttacttggagtggttggctaagaattctcatttcagtatggctttaaagaattcaagatacggctgggtgtggtggctcacacctgtaatcccagcactttgtgaggctgaggcaggacgatagggataaattgtttctataaaaaaagtaaaaatgttagctgggattacaggtgcctgccaccatgcctggcaaattattttttgtatttttagtagagatggggtttcaccatgttggccaggctggtcttgaactcccgatctcaggtgatctgcctgcctcggcctccgaaagtgctgggattacag

SEQ ID NO: 408140 - DNA, 1000 bp, Homo Sapiens; identical to SEQ ID NO: 119333

SEQ ID NO: 408141 - DNA, 1000 bp, Homo Sapiens; identical to SEQ ID NO: 295362

SEQ ID NO: 408142 - DNA, 1000 bp, Homo Sapiens; identical to SEQ ID NO: 295363

SEQ ID NO: 408143 - DNA, 1000 bp, Homo Sapiens; identical to SEQ ID NO: 295365

SEQ ID NO: 408144 - DNA, 1000 bp, Homo Sapiens; identical to SEQ ID NO: 295366

SEQ ID NO: 408145 - DNA, 1000 bp, Homo Sapiens; identical to SEQ ID NO: 295367

SEQ ID NO: 408146 - DNA, 1000 bp, Homo Sapiens; identical to SEQ ID NO: 225056

SEQ ID NO: 408147 - DNA, 1000 bp, Homo Sapiens; identical to SEQ ID NO: 220463

SEQ ID NO: 408148 - DNA, 1000 bp, Homo Sapiens
aggctgcgatatacaggagcagaggcacccagaacacgctgcccctgctgccagttgcaagtggggtctgctcagaatgcggagggtgaagctgtcctgcagctttgagatccacgaggtggtggtggccctagcgccagactccactgctatggaacctgcccagttgaatttgggagccagtgagggacctgacagcagcaccaggagacgcccaaagctcagggtgcggtgggtgaagctttcctgcagctctgagatccacgaagtggaggtggtagtagcgcaggaccccactgctttggaggctgcccaatcgaatttgggagccagtgagtgtcctgacagcggcaccagaagaccccgaaagggttcacagagccagcctgtggctctgacgtctaccagcatgcagactgtgaagatgcaggccgcgatatacgggagcagaggtgcccagaacatgctgtcccccaatgccagccacaaggagaggagcggaagaccttctggtgtgggctgggcagcaattcacttgaaggagaaacagccccggtgtggagaggcggccatccttggcgggatcctttctaaggagccgagaaatcaacgacctataaaaggcatcaccaagcccaatggacagatgccccaggctgcacattctgtcagtgctgttctggaaaaggcccaaacacatgctgaaacatcgaagtccagcctgccccgcctcctctggtgcagaggtccagggataccagcagcagccccgccacgcccctccaaggccaagaacacaggcggcaggggcttcccctccctgccagactacttcctgccgccacagccaccacccttggacgacccagagctcccgccgcccctggacttcgtgctccctccccccgcggtcgccaagaggcctcctaatgccccacccccgcaagagacacgaagcatcaatgttcagaagcagcaaataaataaaataaatgaataa

SEQ ID NO: 408149 - DNA, 567 bp, Homo Sapiens
ccagagtatccaggtccttctcagagaattaaaaaacctgtacaggtctagatattggtatttttaattgatgataagctggaataatattaatacacacaaagcatgtgttgtaacttttattatgcttccttagagatggaacaatccaaagttttaatcaaagaaggtggtgttcagttgctgcttacaatagttgataccccaggatttggagatgcagtggataatagtaattgctggcagcctgctatcaattatattgatagtaaatttgaggactacctaaatgcagaatcgcgagtgaacagatgtcagatgcctggtaacagggtgcagtgttgtttatacttcattgctccttcaggacatggaccattacataactgaagactcccaccttcaggcaggattgggtagtacatgtttgtaactacctggcattgccttttgttgaggtaatttcagtttttattagtagtagtagtagtagtatactttaagttctacggtatatgttcacaatgtgcaggtttgttacatatgtatacatgtgccatgtttgtt

SEQ ID NO: 408150 - DNA, 1000 bp, Homo Sapiens; identical to SEQ ID NO: 295369

SEQ ID NO: 408151 - DNA, 1000 bp, Homo Sapiens; identical to SEQ ID NO: 295370

SEQ ID NO: 408152 - DNA, 1000 bp, Homo Sapiens
catctccagctctaaaagcaatggcctatccaaggacatggacaccgggctgggtgactccatatgcttcagccccagtatctccagcaccaccagccccaagctcaacctgcccccttctcctcatgccaataaaaagaaacacctaaagaagaaaagcaccaacaactttatgattgtgtctgccactggccaaacgtggcactttgaagccacgacatatgaggagcgggatgcctgggtccaagccatccagagccagatcgtggccagcctgcagtcatgcgagagcagtaaaagcaagtcccagctgaccagccagagcgaggccatggccctgcagtcgatccaaaacatgcgtgggaatgcccactgtgtggactgtgagacccagaatcctaagtgggccagtttgaacttgggagtcctcatgtgtattgaatgctcaggaatccactgcagtcttggcacccgcctttcccgtgtgcgatctctggagctggatgactggccagttgagctcaggaaggttatgtcatctattggcaatgacctagccaacagcatctgggaagggagcagccaggggcagacaaaaccctcagtaaagtccacgagggaagagaaggaacggtggatccgttccaaatatgagaagaagctctttctggccccactaccctgcactgagctgtccctgggccagcacctgctgcgggccaccgctgatgaggacctgcagacagccatcctgctgctggcacatggctcccgtgaggaggtgaacgagacctgtggggagggagacggctgcacggcgctccatctggcctgccgcaaggggaatgtggtcctggcgcagctcctgatctggtacagggtggacgtcatggcccgagatgcccacgggaacacagcgctgacctacgcccggcaggcctccagccaggagtgcatcaacgtgcttctgcagtacggctgccccgatgagtgcgtgtag

SEQ ID NO: 408153 - DNA, 1000 bp, Homo Sapiens; identical to SEQ ID NO: 119334

SEQ ID NO: 408154 - DNA, 475 bp, Homo Sapiens; identical to SEQ ID NO: 295372

SEQ ID NO: 408155 - DNA, 1000 bp, Homo Sapiens; identical to SEQ ID NO: 295373

SEQ ID NO: 408156 - DNA, 1000 bp, Homo Sapiens
acgtatcaaggaagccacatcggaaagcagcgaggtggtagcaggggatgcccggggaattcggagaaaggagttgcttgctgtccatgtcggtgatgagctgcctagcaagatgctgtcagccactcggggagaagaaggggcacgggcggcacgggcaggcgccgtgtccccggcgcatactagtccccgttcattcaggcgggccttgtggctctctgagcagcaccacggtggttggcaagaacaagcaccttacaaaaggcagcaaaaagggagccaagaagaaagtacaatgattgaagctcacgttgatgttaagactactcatggttacttgctttgtctgttctgtattggttttactaaaaaaagcaacaatcagatacggaagacctcttatgctcagcaccaacagatccgccaaatccagaagatgatggaaatcatgacccaagaggtgcagacaaatgacttgaaagaagtggtcaataaattgattctagacagcattggaaaagacatagaaaaggcttgccaatctatttaccttctccacgatgtctttgttagaaaagtaaaaatgctgaagaagctcaagtttgaattgggaaaactcatggagcttcatggtgaaggcagtagttctggaaaagccactggggacaagacaggtgctaaagtcgaatgagctgatggatatgaatgaccagtccaagaatctgtttaaagttcagacttataatagtggcaaataaaaagtcctatttgtgatgaaaaaaaataatgataatctccagttccatccatgttgctgcaaatgacatgatttcattctttttatggctaaacagtattccattgtgtatatataccacatgttctttattctaccattgatggacacttaggctgattccgtatcttagctattgtgcatagtgctgcaataaacatgcaagtttgcagatatccttttgatatattgatttcttttcct

SEQ ID NO: 408157 - DNA, 987 bp, Homo Sapiens
gtgagcgtgtgagttgtagcgtaccctggggtctgttctggaggaggcctgagagcggggttgcctggggcgtgggtctctcatccctctcgtcctggtgaagaagaagagtatacccagcggcagctggcttggctttttcagaggaaacagagactctcagacatgaatactgtgacactgaccaccaggccaacttaacatcagcagatatcctgtctcagatgaagagaatggcctgtccagaagacagccaaatacatccttcaaacagacttcactgcaggagacagagtggattcatcctgtattctccatgtagacttccatcttcatgagtactccaagaagatggttcagttgactattgcaaagtctcaggtatgtctttatcagcagcatgaaaatggactaatagtaccagtagagtggggcattgctgaaaagatacccgaaaatgtggaagcaactttggaactgggtgttgaaataatctggagggctcagaagaagataggaaaatgtaggaaagtttggaacctcctagagactgtgaatggcattgacaaaaatactgatagtgatatgaacaataaggtccaggctgaggtggtctcagatggagatgaagaccttgttgggaactgaagtaaaggtgacccttgttatgttttagcaaggagactggcagcatttcacccttgccctagagatttgtggaacttagagcttgagagagatgacttagggtatctggtggaataaatttctaagcagcaaagcattcaaaaggtgacttgggtgctgttaaaaacattctgttttaaaagggaaacaagagcataaatgtggaaaatctgcagcctgatgatgcagtagaaaagaaaaacccattttttttaaggagaaattcaagctggctgcagaaatttgcataagcagcaaggagcctaatgttaatccccaagaccatggggaaaatgtctc

SEQ ID NO: 408158 - DNA, 1000 bp, Homo Sapiens
aatctcccttttactggaaaacaggaatattgactaccaaatcatcatgaaattgaagctgtactgcttttttgagcagttattcattccagtgattaaaactgattgtgcagaatattctaagaggtcagaaattggtgtgtataactacatttttagtgatgcaatttaatgattagtgagtaagatactgtttttattgagagacttgatttttataaagagtaaaaatacggctgcattaaggttacaaacagaaaagtgtcttaatgcctaaggagggcatattagctacactacaaaaacaaattttgtctgtacttctgaaaagaattttgttgtttctcagctgttttccaaaagcaaaggaagtctttatggcttttttctatttcatgttatttgtgatttgtttataagtttgggtgggatggcataccatattcttggttcttaaaatctatcacttttcaccttacacttaatgtgtaaaaactataaaaacaatgcgtgaaacccaggggttctaaaatacaagcatagattttatcagggtgtttttgtcaaagcaggttattcagtgattcctccccaccattcttaaggacgttaaataatgctgttgtgttagctctgagtagaaaggaaaaagtaaaaacctctgtatggaagtaatattgggttgaattctgactgcccttttctagctggacctttaacaaatcacccagtcttttttgtgtttctctgaagtcatttatacattaaatgtaattataacaactgtggggttgtgttgagaattaagaggtaacactatatatgtaaagtttctagtactagtcccagaatttagaatatgctcaatacaaagtagatagcattatataagtttatatttttgtgagttataaagtactttgatatattctcattaaatctgtaaatcacctctataagtaagtggtaataataaagcagatatttttgtccccattta

SEQ ID NO: 408159 - DNA, 1000 bp, Homo Sapiens; identical to SEQ ID NO: 295375

SEQ ID NO: 408160 - DNA, 1000 bp, Homo Sapiens
taagctcactcctgcagtctccactactatatgggaggacatgacctttaaaattgcgggggacatgcgagctacctgccctgcgttcaatggaaacaggactaacctggagaaacacattctcttctctctggcagaagaagaaaactttgataattactgggaataccttcataattcaaaatcgttttttaggagttacatcaaaaatcatattaaaagatattgttcagacaatggaggtgaaaaaatgaagactttttttgaaaaaagcttaattgatatcaagaataccatcctctctgccatccatgaatccacatcagtagctaaagataaaagcagcactgcttctgagtggttggatttattctgtgattgcctggggtgcaacttgatctttccacgaagggacttgataagcattgaacaccaggagataaaacatactgaatttcttaaagaagccatgagtgcagctttggatctcacaatgaagaaaatagaacagaattattcaagtaagcctatagaagcaatggtttctaaaattgagaaaatgctctctgaacatctctgtggctgctggaaacagtgtcccagctgtggagcaatttgtacaaacacaattcctacacatgaaggagaccatagtgttcccttccaccgtcctcaggctgtcaatggggaggaatggtatgaaacagatgattttgtcattgattgctgtactagtttggttgcaagtgattgtttgttggttttgagggatggcaggaatttcccatttaagaactatcgacaagcaggaggggattatgccatgtggagcatcaccccagatacctccatccagctatactggaaatggtttgtctctcacttcagatcaaatctagaagaaaaatatcagaaaaaatttgcaggtaaaggtaaaatccccaatgcatgggccaaaatcacaaagcaagatgtgcttgaagacttgaaaaaacagtaa

SEQ ID NO: 408161 - DNA, 1000 bp, Homo Sapiens
cttgcccaaggcccgggtggtggcctacttctgtgagggcatgacggtgagaggtctgctgatggccatgaggcgcctgggtctagtgggagaatttctgcttctgggcagggaaccagatgccatctttattgagatctcaaagaacagcatcctatgggaagacagaagaaaatgccaaggtcgcttccttcagggttttggagacatattacacagaagtgagtccgtgctgctgcacatgccccagcctctgaatctagagctcagtgcagggcccatcactggactgagggacaggctcatctaattctgagtggatattactctgcattataatgaagccaacagtcatatcttctgatgtggagatttgagaagcatttgtattggatgtgaccgtcaaaatgcgccccatatcactgcaacacctacaagttttcttgcatggggtgctcagactttcacctctggcaagtattactgggaggtccatgtgggggactcttggaattgggctttcggtgtttgtaataagtactggaaagggaagaatcagaatggcaatatatatggagaggagggactctttagtcttgggattgttaagaacgacattcagtgcagtctctttaccacctccccagttacactgcagtatgtcccaagacctaccaaccatgtaggattattcctggattgtgaagctagaactgtgagcttcgttgatgttaatcaaagctcccctatatacaccatccctaattgctccttctcacctcctctcaggcctatcttttgctgtattcatctctgaccagagacaaatcagaaatgtgtttatctgctgtgggaacccctttatcccataaagccctcttccttgtgccttatcaaacaggacaaataggttctgttttatgtcttgaattgcattctaatgttattaaaactcatttattgtgttactattaaatgtggtaaaaacactaaaagtata

SEQ ID NO: 408162 - DNA, 1000 bp, Homo Sapiens; identical to SEQ ID NO: 119335

SEQ ID NO: 408163 - DNA, 839 bp, Homo Sapiens; identical to SEQ ID NO: 119336

SEQ ID NO: 408164 - DNA, 1000 bp, Homo Sapiens
ggggagcgcctctgccccgccaccccatctgggatgtgaggagcgcctctgcccggccgcgaccccgtctgggaggtgaggagcgtctctgcccggccgccccgtctaagaagtgaggagaccctctgcctggcaaccaccccgtctgagaagtgaggagcccctccgcccggcagctgccccgtctgagaagtgaggagcctctccgcccggcagccaccccatctgggaaggtcaaagaaggctcttccaagaaacatgtagaagagaagagtgaagaaatttctcttcagcagctgagagcatctcccctcaaagagaccatctaagctgcctggaacctggtgcttgctagcagcacctgagccgatgtccagacggccccctgggggcttctcccaggagcccctggggacactggtgctgaactggaggaaaggtcgctgaaaacatcatggctcctatagacagccacccacaagccagggctgcttggagggaaaccccaccagaaacagccaatctgtgttacaaatgcatagaaagccaggagaagccagtcccagggaccaaaggagagactgttttcctttcccatccccaatctgccccttaaaatgtctctgtattagtccattcttgcactcctataaagaactacctgagactgggtcatttacaaggaaaagaggtttaattgactcacagttctgcagattgtacaggaagcatggctgggaggcctcaggaaacttacaatcattgcagaaggcaaagaggaagcaagcacgtcttcacatggctggcaggagagagagaaagtgaaggggaaggtgccgcacactttacaacagccagatctcgtgagaactctttatcacgagacagcactaggggggtggtgccaaaccattagaaaccatccgcagtatccaagcaccttgcactaggccccacctccaacaccggggattacaattaaacatgagatttgggtggg

SEQ ID NO: 408165 - DNA, 534 bp, Homo Sapiens
ctttccctcctgccgccgagtcgcgcggaggcggaggcttgggtgcgttcaagattcaggttcacccgtaacccactgccatggccgaggaaggcattgctgctggaggtgtaatggaggttaatactgctttacaagaggtgctgaagaccgccctcatccacgatggcctagcacgtggaattcgcgaagctgccaaagtcttagacaagcgccaagcccatctttgtgtgcttgcatccaactgtgatgagcctatgtatgtcaagttggtggaggccctttgtgctgaacaccaaatcaacctaattaaggttgatgacaacaagaaactaggagaatgggtaggcctctgtaaaattgacagagaggggaaaccccataaagtggttggttacagttgtgtagtagttaaggactatggcaaggagtctcaggccaaggatgtcatcgaagagtatttcaaatgcaagaaatgaagaaataaatctttggctcacaaaaaaaaaaaaaaaaaaaaaaaagaaaaaaccc

SEQ ID NO: 408166 - DNA, 1000 bp, Homo Sapiens; identical to SEQ ID NO: 295379

SEQ ID NO: 408167 - DNA, 451 bp, Homo Sapiens; identical to SEQ ID NO: 295380

SEQ ID NO: 408168 - DNA, 1000 bp, Homo Sapiens; identical to SEQ ID NO: 295381

SEQ ID NO: 408169 - DNA, 1000 bp, Homo Sapiens
atcactattcaatatcaaaagatgcctatatttctcgatgaggaggagcaacggcatctgcaggcactggaaagagaagcagaagagcttttccaacaactacaagacagtcaagtgagaatgacccaacatttagaaaggatgaaagacatgtacagagagctgtgggagacatgccacatgcctgacgtggtgctgctccaggatgtgagaaatgtatcagcaaggactgatttggcacagatgcaaaagccccagccagtgaacccagagctcacttcatggtgcataactggagtcctagacatgctcaacaacttcagagtggatagtgctctgagcacggaaatgattccttgctatataagcctttctgaggatgtgagatatgtgatatttggagatgaccatctcagtgctcccacggatccccagggagtggacagctttgctgtgtggggagcgcaagcattcacctccggcaagcattactgggaggtggatgtgaccctctcctccaactggattctgggagtctgtcgagattccaggactgcagatgccaatttcgttattgattctgatgaaagattttttttaatttcctcaaagaggagcaatcactatagtctctccaccaactctccacctttaattcagtatgtgcaaaggcctctgggtcgagttggggtgtttctggattatgataatggatctgtgagtttttttgatgtttctaaaggttctcttatctatggttttcctccttcctccttctcttcccctctgaggcctttcttttgctttggttgtacatgaaaagttggtttcacgatgatttattgtgacctcccacatatgaggcaaatactgtcctaagacactatgtgcgagagcctgtgagctcattgtaacttcatggaatgtaattactatgtggttatgaatgggataaccaccttgaatgtgtacttttgttaattaaattattttaattaat

SEQ ID NO: 408170 - DNA, 933 bp, Homo Sapiens
atgcacctgcatcacctgcattgtgcaaggaaaaagagtttagggtcaaatcagtcactcagtgctgtgaagattttgaaggactggaagaacaaccagttgggttgtaatcatgagcctcttctaatcctaaactcaaaaaaggttggaccacctgaggcaagagaatctacagatgccctcaagctttgccctcatgaataactcctgagactatgtaaagaaagagctgaaaagatctatccaataaaggagagaaaggaccgcatacgcctggttctcatcatatgcaataaagagtttgaccatctgcctccaagaaatggggctgactttgccatcatggagatgaagaagctgcttgaggatctgggttacagtgtggatgtagaagagaatctgacagccaggcctccgtggggagataacacaggggttggactggactaccagaaggagacaaccttggagagacatgaatgcagtgccttcaaagtacgagaagctacctgtgaaagagctgagctgaaaatgaaactggcacatgagaagcacaaagagaagaccaagcacaagtcctccgacagcacgttcttggtgctcatgtctcatggcatcctggggggaatctatgcttttattaaaaaaaaatcctcaaaacaaaaatgtaaacaaaaaatagtgaaggtcatagcccaaggcatacccatctgtatcatcatagataacgtgtccaggagagacagcacaaggggctccatcttcatcacacaactcatcgcatgcttccagagatattcctggcgctgccacctagaggaagtattttggaaggttcagcaagcatttgaaagtccggaggcaacagtccaaatgcccaccatagaacgagtgtccatgacaagatatttctacctctttcctggcaattga

SEQ ID NO: 408171 - DNA, 1000 bp, Homo Sapiens; identical to SEQ ID NO: 119337

SEQ ID NO: 408172 - DNA, 1000 bp, Homo Sapiens; identical to SEQ ID NO: 225059

SEQ ID NO: 408173 - DNA, 1000 bp, Homo Sapiens; identical to SEQ ID NO: 295382

SEQ ID NO: 408174 - DNA, 1000 bp, Homo Sapiens
atctcccacctctccatccatgggaagtttgtgagccctgcaccttgtggaagacctgcgtggattattagagatgatggaaacagatgagaaagaagacttgagctgccagttcccagattcaacagtagaaatgctaattgaatggtttcaaagtcaaatgagttcagccacgggacatgctctctgcaggggtgctggctgttctccctgcgtccccgactcccagtcccatgaagcagtccccgtcctaccaccctccgatccctgctgctttctgaccagctttgcttttcatctgtgcctccaggaaatattttctcaggccttggcaaaccagacaaatggacacctacctgggaacggagatgtgtatcaagaaaggctgtcacttttagaaaatgataaagaatccctccttcttcagctaagcatgttaacagaccaggtggaggatgagggagagaagattagagatttggagttttgtcttgaagagcacagagagaaggtgaatgccacagaagaaatgctgcagcaggagcttctaagtagggcatccttagaaactcagaagttggatctgatggctgaaatatctaacttgaagttgaaactgacagctgtagagaaggacagattggattatgaagataagttcagagacacagaggggctgattcaggagatcaatgatttgaggttaaaagttagtgaaatgggcagtgagagacttcagtatgaaaaaaagcatgaatcaaccaaagatgaactgacatctttaaaagaacaactagaagaaaaggaatctgaagtaaaaaggctacaagaaaaattgatttgcaagatgaaaggagaaggggttgaaattgttgatagaggattgtcttcaatctggaaatgacagaacaatcaccctttaaaataaggaagtgcaattcagtgaagacaggtttatgattcttagtatgagagaggaaggataatcttcaacatagtt

SEQ ID NO: 408175 - DNA, 691 bp, Homo Sapiens
gcgcaattagctgctgccgcgccttggagtccgtagtaacttggccaggctggccccgaacggaactagagaaagctgaggctgtaaccatggaatactgggaatgtcccattctatgaaggaagtttgccggctacaacaggaatattcatgaacgtggaggggttgggcatgttccaggatctgtttatagacttctctcaggaggaatgggagtgcctggacactgctcagaaggacttatacagaaatgtaatgatggagaactatagcagcctggtctcactaggtctctctatcacaaagcctgatgtgatttccttactggagcaagggaaagagccctggatggtttcaagggacgtaccgggagggtggtgcccagatttgtaccaggtgctggagaccctcccacctggtccatacccggtgagccccgagacccaaccttgtgcaccgccagtcttgttatcaacaaacaggctagtaaattataaaaagtaaaataaaggaaatgtagctgggcgtggtggcatgcgcctgtaatcccagctactccggaggctgatgcaggagaatcacttgaacccaggaggtgaaggttgcagtgagccgagatcgtgccactgcactccagcctggagggcaagagctaaactccttcttgaaataataaataaaataaatgaaa

SEQ ID NO: 408176 - DNA, 1000 bp, Homo Sapiens; identical to SEQ ID NO: 225061

SEQ ID NO: 408177 - DNA, 1000 bp, Homo Sapiens; identical to SEQ ID NO: 295386

SEQ ID NO: 408178 - DNA, 1000 bp, Homo Sapiens; identical to SEQ ID NO: 119338

SEQ ID NO: 408179 - DNA, 782 bp, Homo Sapiens
cagatataagaaattcctggaaatgacaataaatatgttaagtgtatttggaaatgaagacttcgattgccatggagacttaaaaacagatcaactgaaaatgaatattctgattaagaagctaaaacataagtttgatgatcttacagtagagaaggaagctgtatcttcaaaatgtgtcaatttggctaaagacaatcaagttcttcaacaggagttattatcgatgaaaaaagtacaacaggaatgtgaaaaacttgaggaggataaaaagatgttggaagaagaaatattaaatcttaagacacatatggaaaacaatatggtagaacttagtaaactacaagaatataaatcggagctagatgaaagggcaatgccggcagtagaaaaattagaagaaatccatttacaggtggagctggactgtgtagaacaaataattagagaaacaaagagaactgttgctgtgttggacacttgctcccatctattttcttctctagaatccactgcgctggaatgagtcattttttttagaagcagaggtggagccactgaggaagcacaggcgagccctccccagcgtgtactcactggtccccaacagaagaacagctgccgcatccactgagggcctcagtgcatgggcgctgtccaacctctggtgctgaagcagccaagagacccaagactgcgtggctgcctcttaggatatgacagcacagccactggcctctactgaatcctatgcaacctcagaagacacccaggagtgatgc

SEQ ID NO: 408180 - DNA, 1000 bp, Homo Sapiens; identical to SEQ ID NO: 295388

SEQ ID NO: 408181 - DNA, 1000 bp, Homo Sapiens; identical to SEQ ID NO: 119339

SEQ ID NO: 408182 - DNA, 1000 bp, Homo Sapiens; identical to SEQ ID NO: 295390

SEQ ID NO: 408183 - DNA, 1000 bp, Homo Sapiens; identical to SEQ ID NO: 225063

SEQ ID NO: 408184 - DNA, 1000 bp, Homo Sapiens; identical to SEQ ID NO: 295394

SEQ ID NO: 408185 - DNA, 1000 bp, Homo Sapiens
gagtgcgccaggcgcggggagcctaggacctggagcgagagccgcctacctgcagccgccgcccacggcacggcagccaccgtggcgctcctgctgcgcttcgtgctcctgtgcagagtcgcggatttcatcagaggttggagtatcactactcctgagcagatgattgaaaaagccaaaggggaaactgcctatctgccatgcaaatttacgcttagtcctgaagaccagggaccactggacatcgagtggctgatatcaccagctgataatcagaaggtggatcaagtgattattttatattctggagacaaaaattatgatgactactatccagatctgaaaggccgagtacattttaagagtaatgatctcaaatctggtgatgcatcaataaatgtaacgaattttcagctgtcagatattggcacagatcagtgcaaagtgaaaagagctcctggtgttgcaaataggaagattcagctggtagttcttggtaagccttcaggtacaagatgttacgttgatggatcagaagaaattggaagtgactttaaattaaaatgtgaaccaaaagaaggttcacttccattacagtatgagtggcaaaaattgtctgactcacagaaaatgcccacttcatggttagcagggaagatgtgccgcctccaaagagccacacgtccactgccagaagctacataggcagtaatcattcatccctgggatccatatctccttccaacatggaaggatattccaagactcagtataaacaagtaccaagtgaagactttgaacgcactcctcagagtccgactctcccacctgctaaggtagctgcccctaatctaagtcgaatgggcgcgattcctgtgatgattcccgcacagagcaaggatgggtctatagtatagagcctccatacatctcatctgtgctctccgtgttcctttcctttttttgatatatgaaaacctattctggtctaaattttgtt

SEQ ID NO: 408186 - DNA, 1000 bp, Homo Sapiens
ctttggcctatcaaaatgttgggattacaggcattagccaccacgcctggcctatttatttacttattaatggtgttttttttttttttttttttttgagatggagtcttgctctatcgtccaggctggagtgcagtgtcacgatcttggctcactgcaacccccgcctcctgggttcaagctattctcctgcctcagcctcccgagtagctgggactacaggcgtctgcaaccacacctggctgatttttgtatttttagtagagatggggttttaccatattggtcaggctggtctcaaattcctgacgtcaggtgacccacctgccttggcctctcaaaatgttgggattacaggtgttagccactgtgcctggcctgtattgtattttaataggtgattattggttttcatattaagatagtgaaatctagcgcaaggatctcaaaaatttgtttgatgattgaaggaatattctgaaaattacctagtatagatgttaggataaagagcagacccttttcaatataggtgagaggagaagttggagggtgtgatgatactcaaaagtttttcactgaagagaaattggggcgtgcagtaaacatgtaaaaagattcttactaataagcaggtggatgcaaatgaaaatcatcatggaaggttatttttaaaactgattgtatcattgcctcactttatatattacagagttatacatactactttgtaagataacttttcttttcaaaactgaagtcaatgtgatagaatggtgagcattattttggaaggccagactaggaggaggtgggaggaagaagtcagactcagcctgtgaacagacgctaaccttggcagaagccaaaacagtcagacagtgttgtgtaaaaatgatcattcaagaagagcgaaacagcaaggtgatttgtgaaagagatttattagaaaatgaaacacatttatacctctgttcaataaaaatctgcttttcgtcaa

SEQ ID NO: 408187 - DNA, 631 bp, Homo Sapiens; identical to SEQ ID NO: 119340

SEQ ID NO: 408188 - DNA, 1000 bp, Homo Sapiens
cccagtaaagcaggtacggagtggaagttagagcagtccatgcgggaggaggcactactgaaagtgcagctgacacagttgaaggagtcatttcaacaagtccaattagaaagagatgagtattctgaacatctaaaaggagagagggcccggtggcagcagaggatgagaaaaatgtcgcaggagatttgcacattaaagaaagagaagcagcaagatatgcgtcgggtagagaagctggagaggagcttgtccaaactcaaaaaccagatggctgaacccttgcccccggagcccccagcagtgccctctgaggtggagctgcagcacctgaggaaggaactagagagagtggcaggagagctccaggcccaggtcaaaaacaatcagcgcataagtctcctgaaccagcgacaagaagagaggattcgggagcaggaagagaggcttcggaagcaggaggagaggattcaggagcagcacaagagccttcagcagctggccaagccacagagcgtcttcgaggagccgaacaatgagaacaagagcacactgcagttggagcagcaagtaaaggagctacaggagaagcttggcgaggtgaaggagtcggaaacctccaccccatccaagaagggctgggaggcgggcagcagcctctggggaggggaggtaccaggccagaggcagcttccagcctgggggctggtgaccacagcaccccccagggcagtcctgtttcttgcttcctgcctctgacttttaaaggtgggtagccctgggctcctctcaggtctggacatcatcatcctagctagaggcatggagcccccaatcacaggggaagagacagtgctataacaggctccttatgccaggtgcagtggctcatgcctataatcccagcactttgggaggctgaggcaggagaatcacttgaggtcgggagtttgagatcagcctggccaatgtggtaaaacctcatctctactaaaattac

SEQ ID NO: 408189 - DNA, 1000 bp, Homo Sapiens; identical to SEQ ID NO: 295397

SEQ ID NO: 408190 - DNA, 1000 bp, Homo Sapiens
cccagctcagactctgccgtggtaggctccagggtcactgataccagatcccatggtattttcactatatcccactctttctttgcatgtggctcttttttagctgcattgcgggtaaacaggtgtggctcttttcaaaccaattccatgcatatgtgaagaaaattgatcctgaagttccttttgccaaagatgcttatggagaagtgtctgtgtctggacagacaaaagtgtccatttttgcctcgaagcttggcaaaattgaaattgatgatggggaagctagaaatacttcagtctacatttcgaatcccagctgcggggaggctggttgaggattgcccatccctcagtctgggctggattctccctccagtctctggggttctcttttctattcacaagagggtgctaatgagatggtttaatctctataccctgtggtccacaaatacaagatgccagcgtggccaatggggcttccataagagtggcaatcaggggtctcaagcttaccatgacgttttgggccctggaatcagatcatagttctacagttgtcctggcactagaactcatgacaaggttgtgactagacagaaggagagaaggctggaggctgacaggaagcaatgtgaacaaatgccttcgcaggatgcatgggtttgggcaacagatggtcaggggaggtgctggtgcagacgggctcagtagcaaagcaataactgtggatggccattttatggctgcagatcacagcacatttataaaagatgtgtgtttcatgaaaatgtgcatttcatcgtggaaatactgtggttggaggagatttctcaaagctgataaataagtgtaggtgacttaacttgcaaaagatgatcatatgtgagaacggatgtctcaaattaggaaataacttgttaagtaaaaaagcctcatgtattgatttgaagaaaaagatattttggtgctcatcaaaataaaagtataataagctgaa

SEQ ID NO: 408191 - DNA, 1000 bp, Homo Sapiens; identical to SEQ ID NO: 295398

SEQ ID NO: 408192 - DNA, 1000 bp, Homo Sapiens; identical to SEQ ID NO: 295399

SEQ ID NO: 408193 - DNA, 1000 bp, Homo Sapiens; identical to SEQ ID NO: 295400

SEQ ID NO: 408194 - DNA, 1000 bp, Homo Sapiens; identical to SEQ ID NO: 295401

SEQ ID NO: 408195 - DNA, 1000 bp, Homo Sapiens; identical to SEQ ID NO: 295402

SEQ ID NO: 408196 - DNA, 1000 bp, Homo Sapiens; identical to SEQ ID NO: 295404

SEQ ID NO: 408197 - DNA, 1000 bp, Homo Sapiens
gacggagtctcactctgtctcccaggctggagtgtgatggcgtgatctcggctcactgcaagctctgcctctcgggttcacgctatcctcccgcctcagcctcccgagtagctgggactacaggcgtccaccaccacgcccggctaattttttgtatttttagtagagacagggttttaccgtgttagccatgatggtctcgatctcctgacctcgtgatctgcccacctcagcctcccaaagtgccgggattacaggcgtgagccaccgcgcccagccctgaataattcattcttgctaagcttcatgttgactctatatatcatctaagaaagtattgttttgtggtccaaacctgttgccgtggttagtaaggctttcttaggtgtgaaatatttagatgaaattttctcttttaaagttctgtatagggttagggtgttggaaaatgctatattaataaatctgtagtgttttgtgtttataggttcagaaccagagtaactggattgaaagatggactgatagattagatatatcagtctaatttatcatgactgatagatctggttaagttgtgtactaaaggattaggagagcccttcctgtcacaaaagtgccactaaaacagcctaaggagaaaaatggcttgcttttctaaacttcagatgtatctgggctctaatcatatagacaggcttctgatagattgcaactgtaagtagaaacctacatatagttaaaatcctggtctttcttggtaaacagatttaaaatgtctgatgtaaaacatgccacaggagaattcagggatttgagtttccctgaatagcatatatatgatgcatcaaatgggttattactattttttaccatttccacttacataatgaaaaacaattcattttaaatatcacattattattttgtaagtcatggaaaagggcaattgaagttttcattatgaagttttcccaataaaccaggaattctaaacttg

SEQ ID NO: 408198 - DNA, 678 bp, Homo Sapiens
gtatgatctcatgaaaccttgagagaaactgaatgacgaatgaaactattgttcctgtttcacacagaagaaaactgaggttggcactcatcatgagcccctgttctcattctgcaaatggtgaagctctctattgtcctgaccccacagttcctgtcccatgaccagggccagctcaccaaggagctgcagcagcatgtaaagtcagtgacatgcccatgcgagtacctgaggaagatgatcctacacctgccacctccgatggatccactgcctctgtgcctgactgtactgctgatgctccagtggataactcagcatcccagcctaggcccaatgccactgaagatggacctgcaccctggggacccaggagtcctaccactcagctatccccaggagtgcccagaccctcattcttatccaggacctaggagccctaccttctggccttccctcatcagccgtaaatgatgatttactgctgttaccatcatcactgccttcagtgaccaagggccttccaaggtgccagctctggaacgaaagatgcccttgggaggtgatgacactcaggttgatggacggatggctacatggatgtgatggagatggtttactatcgggaccttccgcatcctgctgatgttttgttgcttaggatatgaatggctgagc

SEQ ID NO: 408199 - DNA, 918 bp, Homo Sapiens
atgcggctgcgcttttggctcctcatttggctcctgctgggatttatcagccatcagcccacccctgtgtctctcctgaagactatcttctggtctcgaaatggacatgatggatccacggatgtacagcagagagcctggaggtccaaccgcagtagacagaaagggctgaggtccatttgtatgcacacaaagaaaagagtttcttcctttcgaggaaataaaattggcctgaaagacgtcattactctacggaggcatgtggaaacaaaagttagagctaaaatccgtaagaggaaggtgacaacgaaaatcaaccgtcatgacaaaatcaatggaaagaggaagaccgccagaaaacagaaaatgtttcaacgtgcgcaagagttgcggcggcgggcagaggactaccacaaatgcaaaatccccccttctgcaagaaaggctctttgcaactgggtcagaatggcggcagcggagcatcgtcattcttcaggattgccctactggccctacctcacagctgaaactttaaaaaacaggatgggccgccagccacctcctccaactcaacaacattctataactgataactccctgagcctcaagacacctcccgagtgtctgctcactccccttccaccctcagcggatgataatatcaaggagttggatgataatctgaaggaatgtctctttgtcccgcttccaccctctcctcttccaccctcagtggatgataatctcaagactcctcccttagctactcaggaggccgaggcggaaaaaccacccaaacccaagaggtggagggtggatgaggtggaacaatcgcccaagcccaagaggcctcagcccaggcacaagcccctgcctccggaggtcatccaggcctcaccaggttacaccctctcgtaa

SEQ ID NO: 408200 - DNA, 1000 bp, Homo Sapiens; identical to SEQ ID NO: 295407

SEQ ID NO: 408201 - DNA, 864 bp, Homo Sapiens
atgacctgttcatatgtgtcttcattgtgcccagctcagagcttcaaagctgtcttcatccaggcctgcaaaggtgttcacagtggtcctcatctaagccagccaagttgttctcttctcatccacatgagagccagcccagatgtccatagccgtcctcaacgaggccagccagttaattcacactcatgcttattggggccatccaccttcatagaggccatcccagcctgccagcttctgcctctggaagtaacaactgttaagtttctgcacatctttccagatttattaattgaacaatcatatagcactgacagcatggcaaagccttataaaagggctttggctaccagtatcacgatgagcacgtggcacaggaaacttcttctgaggatgtcccagccgttcacatggctttattttgggaccatcgcctcaaccactgtctcccatctgtttttaacccggtcaagaaatgtgaccgttgactctagtgcctggaaggaactgtgccatttgtatagaggaaggtgctgtgcattagggttgggagttctgatgaaggatctactacaggagctgtccagttacaacggagaggaggaggacccagaggatgtgaagaaatcctcaggagttatacaaagggacactctgatgcttgcttcacagaattggaagactccaccattacaggcggccaccagcagatgtcagcaagtccttcctctgcacctgcagaagaagcaacagaaaagacaaaagtggaagcggaagtgtgaggggaagtggaagcaggcagaatgatgagggaagcacagacatgcccatgttcttcatggctacactcacattcttgtt

SEQ ID NO: 408202 - DNA, 1000 bp, Homo Sapiens; identical to SEQ ID NO: 295409

SEQ ID NO: 408203 - DNA, 1000 bp, Homo Sapiens
cttgggggaaatcagctgcggggggcgcacagaacccactgatcagagtcatccccagaggcactgtttgtgcttcctgtaaagtggggatgtggttcttgctgccaaagctcgaggtctcaagcccattccctgcagctgaggtggggctcaggctgtggctcctgcagccatatgggagaggctgataggactttcctctctcccattgctcagcaccctccagtgtgtcatgtggagactcacctgggaatgcaagtggccaacagtagtgaagaggatgagcttgtgtggtcaaaatgggatgtggatgtgaaatttatcctgtgctgtgcaaagtaccacagagtgagtcaccttcctcaccagtagtgttagaaagaggctgtgaaagttgtcagaatcaaaatagatccacttgtgttaaaaccctgacaaatggaactaggaatgaccatgaaggaggtttcccatgcacatactcctgataacaagaacgaccatgaatggattctgcttaaccacaacctttgatagaagccaccatgaccttataaaaatcacttctacaaggacatcttcccagaaaatcactgtttaaccctatattgatgccaaccttggtattgactctacaagcaaggaaaatactctcaaaacaatttatgtaacccacctcattttcactcataaacctatggattgacatcctggagtcactgctgcatttgttgttaattaagtcctatgtgaagttcactggtggagtctgagggggaaaaattgtacagcccagcggttcactgagcccctcctgcaaagactctggattcaccttcacagattgcagcatcagcttgggccagcagactccaggcctggggttggtgtgggtggcaacagggagaaattcaagaggaagtttttacatgcacccttacgtgcacggtctcactgacatctttacttcttttatcatgtttgttttgtaaatcacaaa

SEQ ID NO: 408204 - DNA, 1000 bp, Homo Sapiens
atgctgtatcgaggctcttcccagcccccaggctcctgcttccagcccctcccagagctgagggtggccgttgggcacagtggcagaggacagctcctgggctccaccttttccctcacgctgccagcaccaggttggcggcttctcgctcagctgccttggcaagagggcagatgcctggtgactctcatcttgcagcaggccacactgttggcctccaatgaagcctttaaaaagcagatggagagtgctagtgaggcggccaagaagtacacggagaatgaccagctcaagaaggtgactgctgttgacggaggcaagttggatgtcgggaatgctgaggtgaagttggaggaagagaacaggagcctgaaggctgagctgcagaagctaaaggatgagctggccagcactaagcaaaaactagagaaagctgaaaaccaggttctggccatgcggaagcagtctgagggcctcaccaaggagtacgaccgcttgcagtaggagcacgcaaagctgcaggctacagtagttggtcccatggacaagaagaaagagtaagggcctccttcctccctggcctgcagctggcttccacctggcacgtgcctgctgcttcctgagagcccagcctctccctccagtacttctgtttgtgcccttcacttcccccattcccttccacagctcatagctcgtcatcttggcccttgtccacactctccaagcacattacagggtacctgattgctacacgttcagaatgcatttgctgttatcctgcttggcctggccaggcctggcacagccctggcttccacgcctgagcgtggaggacacgagttagttgtagtttggcttgcggtggggctgacttcctgttggtttgagcccttttttgttttgccctctgggtgttttctttggtcccgcaggagggtgggtggagcaggtggactggagtttctcttgagggcaataaaagttgtcatggtgtgta

SEQ ID NO: 408205 - DNA, 1000 bp, Homo Sapiens; identical to SEQ ID NO: 295413

SEQ ID NO: 408206 - DNA, 840 bp, Homo Sapiens
atggactggggaaacaccagccatagggcacagtgggaagctcagaacaaaatcaaaaacagcgcagatgacatgactcttatgggagccagatctgaagataaaatctggtatctggtgacggaggaagaggaacatcatccatacaagatgaaattagcctctgcaccccaggaggtcctgcacgtaggaagggcccatgtccgaagcgccatgcccttcaccacctcaccggcctccagcactgccaccagggttatcacgagtcagtgcaaccacccagctggcctctgctccatcgaaaaatctccggctttatccacgccttgcagtcaaagacactgccaggggcagggtgtgtcatgcaacttgcccccccagccctccccttctaaggaacccccacacctgctctgtcttcctgctacagtctctgagaaaagccctttcatctgtcaagaactacaaaagtcattctttaagcctgtgagcagaaccagaagggacactctcacagcctgttcgccacggaatccaggaggcaggtccattttggtggctgtctccacaacatggctttttccccttgaagaccatcagaagagcctgtatctccgcatctgcggaaatcgtctttgccatgtaatgtgccataaccatgggagtgacatcgcatcacatcccagggccaccgctgaggaggagggtgaggatcttgacccttatcttagaattctgccctgcctggcttccacttgtcctcttctaaatctatcttaactcattcctttggtgcctgtttttactgccttaattttggcaataaagggaggaataaaa

SEQ ID NO: 408207 - DNA, 1000 bp, Homo Sapiens
gctatcagagctgtcccagggctcccgtcccaatccctctcaagctctggctctgggccaggataagccggctcctggcactaaatcattattctccaagccgctgaaggagatgagcataattcatgagccttcagtgcacttcctgcaaaggagcagccctcccaagggcacgtgctactcagccaaggatttggagtcaacccatgtaaaggggctggtgcaaggcctggcagagtcagggtccggacccagcagcaccctttgcccccgctactcgcagagggccccaatccctgaaggtggtgatgccataacgcagaacggcagacgccgaagtcctgcggccccgcaaactggaaatggggtgggggcggagaaggggggaaaggggatgtccgcgcgcagcccaccccgcacgggcccctcgagcctccatcccagttcccacgacgcacccgccccacaaatcctgcccaagatgagggctggtcccgggtcctccggctgccgcatcagcgagtgcaggagggaggggaagcctccaaggggggcgacgcgggctcaaggatgcaactcggccaggagtactggggcccggagggaggtgtccgggcccgctcctcgagcccagcctggtccccgacccacttacctccagggtccgtatctcctgctgggtgaggtcgttggacacagcgcacttggtgcgcagcccgcgcaggctgccgatggagatgtcgatgagcttctggagctgcccgcactgctgcagcgcccggctggccgcggcccctgcgcctccctccgcggccgccgcatcccccccgccaccgccctccttcttctctcccatcgccgccgcgcgcagcgctgctctatccatgcctcgccgcggcagcaaagcgaaagccgcggcgacccgacggctgcggctcccggagcctttaagcggcggcgggggctgggtcagggcggccgggcatgctgggacttgtag

SEQ ID NO: 408208 - DNA, 1000 bp, Homo Sapiens; identical to SEQ ID NO: 295415

SEQ ID NO: 408209 - DNA, 702 bp, Homo Sapiens
atggagaactcaaatcaacttccagaaccacctacggaggttgtagctcaacttccacctcgttatgaggtgacaattccaacacaaggtcaggatcaagctcagctttcaacactggccagtgtcacacttcaacctttggacctggggtttatcatcactccagaatccactacagaaattgaactttctccaaccatgcaggagaccccaactcagcctcctaaggaatttgtaccccaacctccagtatatcaagagggtgaggatcaagctcattataccttgccgagcattacagttaaacctgcagatgtagagattagcataacttcagagcctaccacggacactgactcttctccagcccagcaggcggccccaaaccagcatccagagcagctcaccatagcaacacagcctactgcagaggtgggaacttcgccagtccatcaggaggctacagctcagctctcagggccagttaatgatgtggaacattctgacatccagcatggggccccgcctctgcctacagagtcatcggaagagactggacctttaccagttcaacaggagacttcagctgaatctccagaacctactaaagatgagaacccctctccaatacaaacgggaaaggccacattctatggaacagtaaagagaaaatccagccaccctgatacccagtgtgtctag

SEQ ID NO: 408210 - DNA, 1000 bp, Homo Sapiens; identical to SEQ ID NO: 119342

SEQ ID NO: 408211 - DNA, 1000 bp, Homo Sapiens; identical to SEQ ID NO: 225066

SEQ ID NO: 408212 - DNA, 1000 bp, Homo Sapiens; identical to SEQ ID NO: 225067

SEQ ID NO: 408213 - DNA, 1000 bp, Homo Sapiens; identical to SEQ ID NO: 225068

SEQ ID NO: 408214 - DNA, 1000 bp, Homo Sapiens
  misc_feature (66)..(66): n is a, c, g, or t
  misc_feature (72)..(72): n is a, c, g, or t
  misc_feature (460)..(461): n is a, c, g, or t
  misc_feature (463)..(463): n is a, c, g, or t
  misc_feature (469)..(469): n is a, c, g, or t
  misc_feature (471)..(471): n is a, c, g, or t
  misc_feature (473)..(474): n is a, c, g, or t
tcggcaggtccagctcctgcctgccagtggcctctttaggcccagctcattcctcacgtcggccanttccanggccccgtttttcccttccggcagcctcttggcctctaatttgtttatcttttgtgtataaatcccaaaatattgaattttggaatatttccaccattatgtaaatattttggtaggtaatttatttggagtgagtttctgcgccaagcccgaattttttattttattttccttattatttggtgttaaacaggtttaatgacggtcatggcaactttttggcacaatgaaaaatatcgcccacgatcaacgtgttctgttctggggaagggggcaaaggcagggtgaatcactttcttaaaaagtatagctcaagttgggagtgcagagggaatggggagaaaaccctcccgctgcctgtgtcgaagtgtaggagcccccacccccnnantactcnancnngagtccagcccctctggggaaagaaggggtgcatgaactccccctagtccacaggcgcctccctgtggcccaaggccctcttcacactccatcttgtagccccagcaggagctattttctgaaaagtgaaaagctctgaaggtcccacaattcatggtatgtacaggggctcggaggagggaaactgcccagctttcccccggcacagctgcaggggtagggggtatagataagaggagcaggccttggccaggcgtggtggctcacgcctgtaatcccagcactttgggagggggaggcaggcagatcacgatgtcaggagatcgaaatcagcctggccaagatgatgaagccccgtctgtactaaaaatacaaaaattagccggacgtggtagcgtccacctgtaatcccagctactcaggaggctgaggcaggagaatggcatgaacccgggaggcggagcttacagtgagttgcaattgggccactgcattccagcctgggcaacagagcgagactctgtct

SEQ ID NO: 408215 - DNA, 1000 bp, Homo Sapiens; identical to SEQ ID NO: 225069

SEQ ID NO: 408216 - DNA, 982 bp, Homo Sapiens; identical to SEQ ID NO: 295421

SEQ ID NO: 408217 - DNA, 1000 bp, Homo Sapiens; identical to SEQ ID NO: 295422

SEQ ID NO: 408218 - DNA, 1000 bp, Homo Sapiens; identical to SEQ ID NO: 225070

SEQ ID NO: 408219 - DNA, 1000 bp, Homo Sapiens; identical to SEQ ID NO: 295423

SEQ ID NO: 408220 - DNA, 1000 bp, Homo Sapiens
gggcgtgccctccaaaaagttcctgccctacggtctcggtgcctgcaccgccatagacaccaccaggtacagcaactggggcgggagctacgaggaggtccccggagggcactggggacgctgggtgcactggagcccgagacccctcttcctggccatggctgtcctggtcgccagtactgtgggctgtgattctgagtatcctattgtccaaggtgtgcgctatatgcctgcctgcccgcccgctctgtggtcccgagtcgggggaccccgcaccccccgggcaagggaaggatttccgagtccctggccttgcctgcaggagcctctctccgcagcctccacggagcgcgcggcgctgctcggctgccaggacctgctgaggacaaacgcctcgaagcagacggcggcgctgggtgccctggaggaggaggtgggagcctgccacagctgctgctcggggacgcaggcgctgctgcagaccacgagcgcggagcttggggaggcgcaggcgaagctgatggagcaggagagagccctgcgggaactgcgtgagcgcgtgacccatggcttggctgaagccggcagggaccgcgaggacgtcagcaccgagctgtaccgggcgctggaggccgtgaggctgcagaacagtgagggttcctgtgagccgtgccctacgtcgtggctgcccttcgggggctcctgctactatttctctgtgccgaagaccacgtgggcagaggcgcagggccactgcgccgatgccagcgcacatctggacttcctgagtcgtgacactagtgcccgtgaatactggatcggccgcagggccgtgcaacacctgcgcaaggttcagggctactcccactggttacagggggaacgcaatgaattttgggggtgcgaggcctgtgtcatgattctgggcatggggctgtggatagacccaccacgtgatgagaaggctggccggatctgtcagcagaggcacgtggtctga

SEQ ID NO: 408221 - DNA, 1000 bp, Homo Sapiens
ctcccccagtccagacctgcagaagcagtgctgtaatgaccaggacattttgaagaggcatcacaacgtagctaagaagcccttggagaccagctcttccaaagtcaaagccaagaccattgtgatgattcccgactcccagaagctcctgcgatgtgaacttgagtcactcaagagccagttacaggcccagaccaaggctttcgagttcctgaaccactcagtgaccatgttggagaaggagagctgcttgcagcaaatcaagattcagcagcttgaagaggtgctgagccccacaggccgccagggagagaaggaggagcacaagtggggcatggagcagggccggcaggagctgtatggggccctgacccaaggccttcaggggctggagaagaccctgcgtgacagtgaggagatgcagcgggcccgcaccactcgctgcctgcagctgctggcccaggagatccgggacagcaagaagttcctgtgggaggagctggaactggtgcgggaggaggtgaccttcatctatcagaagctccaagcgcaggaggatgagatctcagagaacttggtgaacattcagaaaatgcagaaaacgcaggtgaaatgccgcaaaatcctgaccaagatgaagcagcagggtcatgagacagccgcctgtccggagactgaagagataccgcagggagccagtggctgctggaaggatgacctccagaaggaactgagtgatatatggtctgctgtgcacgtgctgcagaactccatagacagcctcactttgtgctcgggggcctgtcccaaggcctcgagcctaagaggccacaaggggcaccagtgcctgagccctccactcccctcctgggactctgactccgactgtgaccaggacctctcccagccacctttcagcaagagcggccgctccttcccacccggtgcagatcctccccagtccccccctccacccatttccctcctgacctgcccttga

SEQ ID NO: 408222 - DNA, 848 bp, Homo Sapiens; identical to SEQ ID NO: 295424

SEQ ID NO: 408223 - DNA, 1000 bp, Homo Sapiens
ggatgccctcagtctgaaacggcaccagcacatcttcctgctcacggacttcttgtacttcctcactcccaatgggcgacgcttctgcagggcctgtgacatagtgcacaacttcacagatgctgtcatccaggagcggcgtcgcaccctcactagccagggtgtcgatgacttcctgcaggccaaggccaagtccaagactttggacttcattgacgtgctcttgctggccaaggatgaaaatggaaagaagttgtcagatgagaacataagagcggaggctgacaccttcatgtctgggggccatgacacctcggccagtggtctctcctgggtcctgtacaacctcgcgaggtacccagaataccaggagcactgccgacaggaggtgcaagagctcctgaagaacggtgatcctaaagagattgaatgggatgacctggcccagttgcccttcctgaccatgtgcctgaaggagagcctgcggctgcattccccagtctccaggatccaccgctgctgcccccaggacggggtgctcccggatggccgggtcatccccaaagggaacacttgcaccatcagcatctttgggatccatcacaacccttcagtctggccggacccggaggtgctaccccttccgccttctccatcccggggcctggtctatgacccctttcgcttcgacccagaaaatctccagaagacatcacctctggcttttattcccttctcagcagtgcccagacgaggttcccggcgcgatggggccgggatgggggtcctgggcacagtcagagtccccaccccctcccccgggaactgcatcggccagacgttcgccatggctgagatgaaggtggtcctggcgctcacgctgctgcgcttccgcgtcctgccggaccacgcggagccccgcaggaagctggagctgatcgtgcgcgcggaggatggactttggctacgggtggagcccctgagcgcggatctgcagtga

SEQ ID NO: 408224 - DNA, 1000 bp, Homo Sapiens; identical to SEQ ID NO: 295425

SEQ ID NO: 408225 - DNA, 1000 bp, Homo Sapiens; identical to SEQ ID NO: 295427

SEQ ID NO: 408226 - DNA, 1000 bp, Homo Sapiens
ggagaacttcagaaacctgctatcagtggggcatcaactttcccaccgagatacttttcacttccaaagagaagaaaagttttggatcatggagacagcaacccaaagagaagggaattcaggaggcaagatccaaactgagttggagtctgttccagaaacaggaccacatgaagagtggtcttgccagcaaatctgggaacaaactgcaagtgagttaactagacctcaagactccataagtagctctcagttctccacacaaggtgatgtcccctcccaggttgacgcaggactatctataattcacataggagagacaccttctgagcatgggaagtgtaaaaaattcttcagtgatgtctccatccttgatcttcatcaacaattacactcaggaaagatatcccatacatgtaatgagtacaggaagagattctgttatagctcagctctttgtcttcatcagaaagttcacatgggagagaaacgctataagtgtgatgtgtgtagtaaggcatttagtcagaactcacaactgcaaactcatcagagaatccacactggagagaaaccattcaaatgtgagcagtgtgggaaaagtttcagccgtagatcaggaatacatcagcgggtccacaatggagaaacaacattcaagtgcgacggatgtgggaagagattttatatgaattcacagggccattcacatcagagagcctatagagaagaagaactgtataaatgtcagaagtgtgggaagggctacattagtaagtttaatcttgacttgcaccagagggtccacacgggagagagaccttataattgtaaggaatgtggaaagagcttcagatgtagcattgtcatggactccttaataaacgtgaagactttaatccatctgaaggtgcatcacatttctgaagtttccaacactgacaaggtgatgggcttatggatgaaaactcatgaatgggaaaaactcagctatcgttaa

SEQ ID NO: 408227 - DNA, 1000 bp, Homo Sapiens
atgtgggaaagcttttaatcaacaatcacatctttcacgtcatcgtagacttcatactggagagaaaccttacaaatgtgaagcatgtgacaaagtttttggtcagaaatcagctcttgagtcacataagagaattcatactggagagaaaccatacagatgtcaggtttgtgacacagctttcacgtggaattcacagctggcacgacatacaagaattcacactggagaaaaaacttacaagtgtaatgagtgtgggaagaccttcagttacaagtcatcacttgtatggcatcgtagacttcatggtggagagaaatcttacaaatgtaaggtttgtgacaaggctttcgtgtgtcgttcctatgtggcaaaacatactagaattcacagtggaatgaaaccttacaagtgtaatgagtgcagcaagaccttcagtaacaggtcatcccttgtatgccatcgtagaattcatagtggtgagaaaccttacaagtgtagtgagtgcagcaagacgttcagtcagaaggcaacccttctatgccatcgtagacttcatagtggtgagaaaccttacaagtgtaacgactgtggcaataccttccgtcactggtcatcccttgtataccatcgtagacttcatactggagagaaatcttacaaatgtacggtttgtgacaaggctttcgtgcgtaattcatacctggcaagacatattagaattcacactgcagagaaaccttacaagtgtaatgaatgtggaaaggcttttaatgaacaatcacacctttcacgtcatcatagaattcatactggagagaaaccttacaaatgtgaagcatgtgacaaagttttcagtcgcaaatcacaccttaaaagacataggataattcatactggagagaaaccttacaagtgtaatgagtgtggcaaagcctttagtgaccggtcaacacttattcaccatcaggcaattcatggtatagggaaatttgattaa

SEQ ID NO: 408228 - DNA, 582 bp, Homo Sapiens
atgttctacatcgatgttggtgaccttgagacaaagaccaacgagccaccacagccaccagtcccagaacctgccaatgctggggaacggaaaatgagggagttcaactctgagaaatggaatcatcgtatcgctgatctacgtaaacaaactgaagaattgtctgaaagaaaatatggtatgtctaaactggaaaagtcttgtaatcttaggttcatgggcgtttacacagtggagttactgttcatcatgggggtaccgtggacaatcccagggctgccggcgagtcatgccatccttacatgtttctccttacatgaacttatgaattcaacaggtgaagatttacaacttgataaatcaactttgtcagctcgagctgtaaaagccaaaggtccggtgatgatcccatacccttttttccagtctcatgttgaagatttttatcttaaaattggtgccttattcagacacaagcaaaaggacattagcccagctttggaaatagacatttttacttgtcttggaagagtaggtgaagagctgtttttaggactctttgaaagggtacagtatgggtga

SEQ ID NO: 408229 - DNA, 1000 bp, Homo Sapiens
gcagcgccgcctgctggccacagagaacccgcgtgcgccggccgccaggcctgggcatctcctctcctgcagcgccgcctgctggccacagagaacccgcgtgcgccggccgccaggcctgggcatctcctctcctgcagcgccgcctgctggccacagagaacccgcgtgcgccggccgccaggcctgggcatctcctctcctgcagcgccgcctgctggccacagagaacccgcgtgtgccgccaggcctgggcatctcctctcctgcagcgccgcctgctggccacagagaacccgcgtgcgccggccgccaggcctgggcatctcctctcctgcagcgccgcctgctggccacagagaacccgcgtgcgccggccgcctggcctgggcatctcctctcctgcagcgccgcctgctggccacagagaacccgcctctcgtggtgctctacaagaaaaatctgctttatagatgaggaaaggcccttggggcagacaagacagtccctgtttgacataattcctttatctcttctcccccagctctgctgccccctgccccatacacgtgatggagcagaaaacgtgctgtgtgaacctgtgacttcagggcctgttgacgtggtcgtgcttgcatactctctggactggacctcactgtgggaacaacaagatcaacaagaggagcaagaacaacatcaagagtcagggcccgggggtcctgacgggtacaggatgggtacagacccacacaggaatcccagagtgtgttccacagcaggacacgcctgcgctgaaagagtgggcagaaaggagctgacctgggattatgatccaaactcagctgggcctcccctacctgccccaggattgtggagtgagaacgttgcagcaggggagaacaacgcactcctcttggcctcctgcccttcctggagggagatgcgctccctggagctgctgactaggtggaagcagactggctccttcagtgggtag

SEQ ID NO: 408230 - DNA, 1000 bp, Homo Sapiens; identical to SEQ ID NO: 225072

SEQ ID NO: 408231 - DNA, 519 bp, Homo Sapiens
atgtttaaacctgtcaaatataatcacacggggcccaaatataatcacggggcccgggcccggcgtgggggttgtaggccggcgccacagcctgaggacaccgcgacctctgccccgcggagcgcgccgaatgccgggaaactttgcggaatgtgtccaggtgttgaagctcttgatggcgaaaggaacagcaagaggaccttgtgcatgaataatttgtttccatactacagaaagaatcccagacttcttagagaacccagtgactttttgcaccttaaatctgtgaaatcctcatgttttcttctgccgtatccatagttcaaacaaagatgaggcaaagctagacgcattcctgaaggaacccaagaaattcctctctttctctctctggaatgaaatgaattctctagaccaccagttctaaccttcaaaaaccaaacctgtttgtgagctgtccttcaaatactactgtagaccccagtgtttattcattaaattttttaaatatttgtttta

SEQ ID NO: 408232 - DNA, 1000 bp, Homo Sapiens; identical to SEQ ID NO: 225073

SEQ ID NO: 408233 - DNA, 633 bp, Homo Sapiens
atggacggtgatgttgaaaccagactggggaatgaccgccccatccggagagaaaagcaccaaggattctcttttgttgaatttgagttggcagagaatgaatctgagctctttgggtggacaatttctgtcaatttggccaaaccaatgagagttaaggaaggcttttccagaccagtttggtcagatgaagactgggtggagaagtttgctgggaagaggataaagaggaaggtggttgagacttcccaaagcagaaagccaggagccctgtcagggcccaaggccttcctcatcagcacttgctccagcctactcactggagttgtgttctgggtgtacatggacatcaagattgggaacaagccggctggctgcatccaaaccctcctgcgttccgacgtcgtgcccatgaccacaggactcggcttcaagggaagcagcttccaccgcattatcccccagttcatttgccagggcagtgatttcacaaaccacggtggcaccaggggtaagtccatctacaagaagaaatttgatgatgaaaactttatcttcaaacacacaggaccaggcaaggatgggaagccaaggcagaaggtgatcattggcaactgtggggagtatgtgtga

SEQ ID NO: 408234 - DNA, 1000 bp, Homo Sapiens; identical to SEQ ID NO: 119345

SEQ ID NO: 408235 - DNA, 1000 bp, Homo Sapiens; identical to SEQ ID NO: 295431

SEQ ID NO: 408236 - DNA, 1000 bp, Homo Sapiens; identical to SEQ ID NO: 295432

SEQ ID NO: 408237 - DNA, 1000 bp, Homo Sapiens
tggactgcatcctaccaccaactcgtccaactgacaagcccttgcgcctgcctctccaggatgtctacaaaattggtggtattggtactgttcttgttggccgagtggagactggtattctcaaacctggtatggtggtcacctttgctccagtcagcgttacaacagaagtaaaatctgtcgaaatgcaccatgaagctttgaatgaagctcttcctggggacaatatgggcttcaatgtcaagaatgtgtctgtcaaggatgttcatcgtggcaacgttgctggtgacagcaaaaatgacccaccaatggaagcagctggcttcactgctcaggtgattatcctgaaccatccgggccaaataagctctggctatgcacctgtattggattgccacacagctcacattgcatgcaagtttgctgagctgaaggaaaagattgatcgccgttctggtaaaaagctggaagatggccctaaattcttgaagtctggtgatgctgccattgctgatatggttcctggcaagcccatgtgtgttgagagcttctcagactatccacctttgggtcgctttactgttcatgatatgagacagacacttgcggtgggtgtcatcaaagcagtggacaagaaggctgctggagctggcaaggtcaccaagtctgcccagaaagctcagaaggctaaatgaatattatccctaatacctgccaccccactcttaatcagtggtggaagaacggtctcagaactgtttgtttcaattggccatttaagtttagtagtaaaagactggttaatgataataatgcaacataaaaccttcagaaggaaaggagaatgttttgtggaccactttggttttctttttcgcatgcagcagttttaagttattagtttttaaaatcagtactttttaaatggaaacaacttgaccaaaaatttgtcacagaattttgagacccattaaaaaagtttaatgagaaaaaaaaaaaa

SEQ ID NO: 408238 - DNA, 956 bp, Homo Sapiens
atggactgctctggaattccgagtgtgaactttcagccaagaaggacacagattaaatactcgcttcattgcgggagacgaggggcggggacaggagagaaagaagggacaggcataagtcacttctcccgccggctccgacagcgggttgctccgctgaggggcgttggcgcaggggctgctgcttcgccacctgctgcttcgccacgaaagagttcccgtgccgtgggagtaagtctgggacctctggtcggaccggagagtcgcagctgtgtgttagggctaggatggctcctggatgcgcgtgacgcaagtgaccttgcgtgtaaagggatacatgatcccttaattcaggctcaggctgaagaactgacccacttacaacagaagatacaggaagggagaggtgtctgctaccttttcacccagcatgtgaagaacacagtcaagtcttttgagggccttctcaggaacactgacattgcctactaccagagacagagattctgtgagcaaatggtacaaggaagccagctgacagagatccttgtcagaaaacttgccacagaatcaaccccaatgctcactaacaaactgagaagaaaaaaaataattacccccaacaacatctgaggaagcacaacagggacagacttgaagaaaatcacactggctcaagagggaagtccaggaggaagaaatggatgaagtcctggagtactcactagatgaacagtatttgactcattccagctgccatgactcccaccagcttcccagcagcaatgccttcctctttgatgcacaggaaggcccctcggctgtggaaacagccaaagatgagatccagagccagtggcagcacctgaaggagacccttttcatcaacaactgcctgtgagaaaagctagaacgtcatcacagcagctttgatgaagaaaatggtaggagaggcc

SEQ ID NO: 408239 - DNA, 1000 bp, Homo Sapiens
cgctaggctcctttggttagagaagccacagtccttcagcctccaattggtgtcagtacttaggaagaccacagctagatggacaaacagcattgggaggccttagccctgctcctctcaattccatcctgtagagaacaggagtcaggagccgctggcaggagacagcatgtcacccaggactctgccggtgcagaatatgaacaatgccatgttcttgcagaaaacgcttagcctgagtttcataggaggtaatcaccagacaactgcagaatgtagaacactgagcaggacaactgacctgtctccttcacatagtccttatcaccacaaatcacacaacaaaaaggagaagagatattttgggttcaaaaaaagtaaaaagataatgtagctgcatttctttagttattttgaaccccaaatatttcctcatctttttgttgttgtcatggatggtggtgacatggacttgtttatagaggacaggtcagctgtctggctcaatgatctacattctgaagttgtctgaaaatgtcttcatgattaaattcagcctaaacgttttgccgggaacactgcagagacaatgctgtgagtttccaacctcagcccatctgcgggcagagaaggtctagtttgtccatcaccattatgatatcaggactggttacttggttaaggaggggtctaggagatctgtcccttttagagacaccttacttataatgaagtacttgggaaagcggttttcaagagtataaatatcctgtattctaatgatcatcctctaaacattttatcatttattaatcctccctgcctgtgtctattattatattcatatctctacgctgcaaattttgggtctcaatttttactgtgcctttgtttttactagtgtctgctgttgcaaaaagaagaaaacattctctgcctgagttttaatttttgtccaaagttaattttaatctatacaattaaaaccttttgcctatca

SEQ ID NO: 408240 - DNA, 528 bp, Homo Sapiens
gcgccctggcagtcccggaagacaccaggaaaacaagcaggaaccgtagctaggactggggtggccaggcccaggaaatccatgaagggcacagacagcgggtcctgctgccgccgccgatgcgactttggctgctgctgtcgcgcgtcccgccgggctcactacacgccttaccggtccggggacgcgacgcgaacccctcagtccccacggcagaccccgagccgggaaagacggcgcccggagccagccgggagctgggcagcagcggccgaggaggaagaagcagctgcggcggccacaccctggatgagagctggagccctgcctgatggctggatggaggccatgcaggacaagttccttctaaaatcaatcctttgctttggcctggaagaccgaacatattaggctcaattttcttcgtgtagcagcagtaacataaaaatctgtcatacatacgatttttgggagaagagatagattgtgctgcaggctttttagaaataaacatgtcctcatcacagc

SEQ ID NO: 408241 - DNA, 1000 bp, Homo Sapiens
acccgctagactcctttggttagagaagccacagtccttcagcctccaattggtgtcagtacttaggaagaccacagctagatggacaaacagcattgggaggccttagccctgctcctctcaattccatcctgtagagaacaggagtcaggagccgctggcaggagacagcatgtcacccaggactctgccggtgcagaatatgaacaatgccatgttcttgcagaaaacgcttagcctgagtttcataggaggtaatcaccagacaactgcagaatgtagaacactgagcaggacaactgacctgtctccttcacatagtccatatcaccacaaatcacacaacaaaaaggagaagagatattttgggttcaaaaaaagtaaaaagataatgtagctgcatttctttagttattttgaaccccaaatatttcctcatctttttgttgttgtcatggatggtggtgacatggacttgtttatagaagacaggtcagctgtctggctcaatgatctacattctgaagttgtctgaaaatgtcttcatgattaaattcagcctaaacgttttgccaggaacactgcagagacaatgctgtgagtttccaacctcagcccatctgcgggcagagaaggtctagtttgtccatcaccattatgatatcaggactggttacttggttaaggaggggtctaggagatctgtcccttttagagacaccttacttacaatgaagtacttgggaaagtggttttcaagagtataaatatcctgtattctaatgatcatcctctaaacattttatcatttattaatcctccctgcctgtgtctattattatattcatatctctacactgcaaatttggggtctcaatttttactgtgcctttgtttttactagtgtctgctgttgcaaaaagaagacattctctgcctgagttttaatttttgtccaaagttaattttaatctatacaattaaaaccttttgcctatca

SEQ ID NO: 408242 - DNA, 1000 bp, Homo Sapiens
tagccctgctcctctcaattccatcctgtagagaacaggagtcaggagccgctggcaggagacagcatgtcacccaggactctgccggtgcagaatatgagcaatgccatgttcttgcagaaaacgcttagcctgagtttcataggaggtaatcaccagacaactgcagaatgtagaacactgagcaggacaactgacctgtctccttcacatagtccatatcaccacaaatcacacaacaaaaaggagaagagatattttgggttgaaaaaaagtaaaaagataattagctgcatttctttagttattttgaaccccaaatatttcctcatctttttgttgttgtcattgatggtggtgacatggacttgtttatagaggacaggtcagctctctggctcaatgatctacattctgaagttgtctgaaaatgtcttcatgattaaattcagcctaaactttttgctgggaacactgcagagacaatgctgtgagtttccaacctcagcccatctgcgggcagagaaggtctagtttgtccatcaccattatgatatcaggactggttacttggttaaggaggggtctaggagatctgtcccttttagagacaccttacttataatgaagtacttgggaaagcggttttcaagagtataaatatcctgtattctaatgatcatcctctaaacattttatcatttattaatcctccctgcctgtgtctattattatatacatatctctacgctgcaaattttgggtctcaatttttactgtgcctttgtttttactagtgtctgctgttgcaaaaagaagaaaacattctctgcctgagttttaatttttgtccaaagttaattttaatctatacaattaaaaccttttgcctatcactctggacttttggattgttttttacattcagtgttataatatttgattatgctgattggttttggtgggtactgatgtgaattaataaaaacatttcatttcc

SEQ ID NO: 408243 - DNA, 1000 bp, Homo Sapiens
agggaagactcagttacagagcctcacagttacagttccaagaagaaaactgtcaaaaccaaaactgaaattgaagattataaatcagaatagcgtggccatccttcagacccctccagacatccaatcagaacattcaagggatggtgatatggatgatagtcgagcgtggctagggctagggctccagggctacgccaagcacccttcggtcttcccgggaagaattttccccggcccggggctagggtctggcgctggggcgctcctgggacctgcgggatcaccactacactctggcgcgccgagcgcgactggaggggcgcaccacggccaccgagccagaggcgcttcaggaagcaagagaagtccccgcgcgctccgggacccggcgcagctcatggtgagcgccctctggggctcgagggtcccttggctgagggggcgcatcctcggggtgcccgatggggctgcctgggggtcgcagggctgtagttgggatcgcgcacaaaccgactctgcggcccagcccgaaatgctgccgccaaggagcaacggcaccgcgtacccggggcagttagcgctgtaccagcagctggcgcaggggaatgccgtggggggctcggcgggggcaccgccactggggcccgtgcaggtggtcaccgcctgcctgctggccctactcatcatctggaccttgctgggcaacgtgctggtgtccgcagccatcgtgcggagccgccacctgcgcgccaagatgaccaacgtcttcatcgtgtctctacctgtgtcagacctcttcgtggcgctgctggtcatgtcctggaaggcagtcgccgaggtggccggttactggccctttgaagcgttctgcgacgtctgggtggccttcgacatcatgtgctccaccgcctccatcctgaacctgtgcgtcagcaggtcatcagcgtggcccgctactgggccatctccaggcccttccgctacgagcgcaagatga

SEQ ID NO: 408244 - DNA, 1000 bp, Homo Sapiens
tgctggctgcccttcttcatccttaactgcatggtccctttctgcagtggacaccccaaaggccctccggccggcttcccctgcgtgtttgcccagctgctggggtgcagccacgtctgctcccgcacgccggtggagacgatgaacatcagcaatgagctcatctcctacaaccaagacacggtcttccacaaggaaatcgcagctgcctacatccacatgatgcccaacgccgttccccccggggaccgggaggtggacaacgatgaggagaaggagagtcctttcgatcgcatgtcccagatctatcagacatccccagatggtgaccctgttgcagagtctcgcgggcgcaggcgcccagaggcgcacaggagacctcaggcccagactccactccccagctgtgaaaggactgctggccagacccccaagctagcccgccaggcctccatagagctgcccagcatggctgcatccagtaccaagagttggtgggagacgggtgaggtacaggctcagtctgcggccaagactccgtcctgcaaggatattgtggctggagacatgagcaagaaaagcctctgggagcagaagggaggctccaagacctcatcaacaattaagactctttggcagttgcactgggtactggctgagttctggaaaacaggaatgtgagcagagtgctgcagatctccttgtcaggagcacctaagaactggcatgactctacaccctctctccttctgcaatgacctcgtgtcaagatggcagacccgcagagatgaatgtgcctggatacctgagtcaccaggtggaggaaactcccattgacatgcatcacactccacatatgaaacccttctttttctgcactgtcactggggttagggattattactcactgcaacttagcctagcattaagttgcttgactaatacaagtttcaataaatgtcgcttcatttcccatgaaaaaaaaaaaaaaaaaaaaaaa

SEQ ID NO: 408245 - DNA, 1000 bp, Homo Sapiens
gggatcattcacagaacatgataaagaagtcagagatgatgaagctgaagaaaaggaagataaagaagaagaaaatgaaaaagaagagaaagagtccgaagacaaacctgaaattgaagatgttggttctgatgaagaagaagaagaaaagaaggatggtgacaaaaagaataagaagattaaggaaaagtacatcgatcaagaaaaactcaacaaaacaaagcccatctggaccagaaatcctgatgatattactaatgaggacaaaattttggaagttatcaggaaaaatttggtcaaaaaatgcttagaactctttaccaaactggcagaagataaagagaactacaagaaattctatgagcagttctctaaaagcgtaaagcttgaaatatatgaagactctcaacattggaagaagttttcagagctgttaagatactacacatctgcttctggtgatgagatggtttctctcaaggactactgcaccagaatgaaggaaaactagaaacatatctattacatcacaggtgagaccaaggaccaggtagctaaatttgtggaatgtcttcggaaacatggcttagaagtgaactatatgatcaagccaattgatgacatatatggctggacagcaaacatggaaagaatcatgaaagctcaagtcctaagagacaactcaacaatgggttacatggcagcaaagaaacacctggagataaaccctgaccattccattattgagaccttaaggcaaaaggcagaggcagataagtacaagtctgtgcaggatctggtcgtcttgctttacaaaactgctcttttgtcttccggctttggtctggaagatccccagacacatgctaacaggatctacaggatgatcaaacttggtgtgggtattgatgaaaatgaccctactgctgatgatactgctgaagaaatgtcaccccttgaaggagacaacgacacatcatgcatggaagaaacagactaa

SEQ ID NO: 408246 - DNA, 1000 bp, Homo Sapiens
agctgtagcccagaactatgtgggcaccgcatccctggtgggttggcaggaacaggaagcccgcagccagaaaaaacattgttccatggtgccctctagtgagccaaggcgccaccagccggctccacctccagagaggcccaacagggagctcgcgcggtcgtttggtctcggcggccgtagaagccgggcgcactggaccggagctgccccgccggggttgggtcgtggctgccagggcgcgtcgccaggaggcctcgcgggccgcccttccgctctcccggggctgggcggcgctgtccggctcttcctgccgcgctctggccactccccctcgcccctcgctgggcttggccttggcggccgtgctctgcaggcagtgcctccctcgggcgtgggtctgcaggtgcaaccccgactcctccctgagccccgcaaggcagtcccagggtgctcccggcggggctgcccgactgacccttcccttgttttgtgttgcaggagagccggacagggcagcggccggcactaccgcgctgcgatttgcgcagagctgaagaagcccctgaccattgaagaggtggcccccgccccgtcgggcctcacgagagctgttgccttagaaacagagaattctgatttgcacacgactttgtatgtgcaagttattggtttaacacaggtcagagttgatgtccatttctgtggagttaactttggtgatattttgatctgccgtgatcaatatcaggaaaggccccatcttcccttcacacctggtaatatagctgctgctggaagtgacgagaagtgcaagctggcgatgcagaggggtgcgcagtccagcgtgaactacagtcagggcagcctgaaggatgcagtaaggaagctggtgggcgagggcggggtgaatgtggccatcgacatggtgggaggagacatctgcctggaggctctccgcaggcatcagcatcaacgagaacagcaagtgggtgggtga

SEQ ID NO: 408247 - DNA, 1000 bp, Homo Sapiens; identical to SEQ ID NO: 295435

SEQ ID NO: 408248 - DNA, 1000 bp, Homo Sapiens
ctttaaccactgctcagacctcaataccttcaagatggatgaactcctggctgagatgcagcagactgaagagtcaaacttcctccaggctccccagagagcccctggtgtggccgacttggccttgtctgagaactgggcccagagtgacttgcagctggagatgctgtggatggagtttgaacgcgccaagtcagctgtagagttgcagacagagttggaggagaaggcaaaacgggatgctgacactcacccctggctttctggctatgatgacctcgcatcagcttcctatgataaggggtacccgttggaggaggagaaccccctgcgtgatcaccctcagcctttcaaagaagggctgcagcgacttcaggagagggccctcccaaatgctgtgctgctttttgaggcagctatgcagcaggatcctaagcacatggaagcttggccgtatctgggtaccaaccaggctttaccaatgagcctctgcagtgacaggcctgtgaaaccctgccacacaccagcctgtggctatctggtgacacctgctgaagaaggggctggcggggcaggactgggcgccagcaagcatatcttgggatctctgttgtctgactccctgtttcttgaaatgaaagagctcttcctagcaactgtgcaactggaccctacatccatggaccctgatgtgcagtgtggcttgcaggtccttttcaacctgagtggagaatacgacaaggccatgaactgcttcacagctaccttcagtgttcatcccaatgactatttgctgtggaaggaaaaccagagtgaagaagcagtaacttcatactgccaggcccttgagctccagcctggctatatccagtcccgctataacctgggcatcagctgcagggctcactgggaggctataacctggggctcactgggaggctgcagagcactttctggaggccctgaacatgtggaagaaaagccggggccctcggggtga

SEQ ID NO: 408249 - DNA, 1000 bp, Homo Sapiens; identical to SEQ ID NO: 295437

SEQ ID NO: 408250 - DNA, 786 bp, Homo Sapiens
atgcatcgtgtgcctacgtgtaatgaaaatagactcagagagatggcaaaatttgcccagggtaacccagagaacacagccgaagtggaatgtggggacgtctgcgacaccggggacagagcaactgtggatgaagagggctacatctggttcctggggaggagtcatgacactatcaatgcctctggcacaggatgtcacagaacaaacatagtacggcattgggctacagaggtgcagcgtgctttggtggaccacccagtggtggcagagtcagccacggtgagcagcccagacccgattcaaggggaagtggtgaaggcattgattgtcctgaccccacagtttctgtcccatgacaaggaccagctgactaaggagctgcagcagcatgtaaagtcagtgacagccccattggcttcccggttccctttgggtcctggtacagattccttagcatggccagggaggacagccctccatgatcctcccctccctgagatgttcctcctgccccagcaccctgtgtttgagcccaagcccgccctgtggtgtcacgggaggcccagctcctctgcctggggtgccttgcctggcctaggaactgggaaaacttacctgcttccaagactcagctctagcacctcttcctgctgggtgttttccgatgccccccctctcgccacctcatggggaccccacagtcccctgaagagccttctgccccagtgcctcaccccactctttagacctgtttctgtttccatggctgccttgccttcttag

SEQ ID NO: 408251 - DNA, 1000 bp, Homo Sapiens
gcctctgatgctgccacctcccttacagctggggtctggggtcactgctgaagacctggacctggagaagaaggtggcactctggtgcaaaagcgcactgcgggagccatgtgatgtccagcccagctgccaggtccagggctctcggcaccatctagtttgggagttcacccagaagcagcctcggttgcccaaagcagctggtctcccttccaatctggtcccgtttgagagatgcaaccgggccgtcttccaggaaaccatttcagtcgctctgtcactcgcgcccgttctttgcatgcgcacccactcgctcaggtttaaaaggcgtgttgcccggcaacagaagaaactgctcgcttctcctttggccgagttggcagctccacgaggacgctcagagcccagctctcgaaagttcgagcatctgacagttccccactgttcccaggagcggttacctgggcactctgtgcccctcactccagttccggcccagggggtaccacagcaagccagcactgtgtgcttcgaattccaggatatcttgcagcacagccagtgcactgagcacaaggactctctgtggggcccaggagcaaggagtcaaccctttggagcccacaacacccggctatccccagactcgtgtccagagaagatcgtgttgagggccctgaaggacagcagggcagggatgcctgagcaggacaaggaccccggagtccaagagaatcctgatgatcagagaagggttccccagggcaccggggatgcaccgtctgcatttcggcccctgtgggacaatggaggcctctctcccttcgtgtccaggcctgggcctctggagagagacctccatgcccagaggtcagaagtcacatataaccagagatcccagtcctcctggatgagctccttccccaaacgaaatgccttcgtaagcccctacagttccatggggcaggctcagcctgtctacccaaaaccaaccccatag

SEQ ID NO: 408252 - DNA, 1000 bp, Homo Sapiens
cctcatcgacagcaggaccaagctgtccaagcacctggtagtccccaatggacagccaggggtcttcctcctgggccctcttcctgctctgggtggagcccttctgtttgacgattgggtgggcccgcgtagggcagtgcactggctgcgttggaggttccggggctctgtgctgcttgtccagacaggacagctggagcccctgctgtcccggtttgctgaggaggaggagctacagatgacgaggatgctacagcggatggatgtcctgcccaagaaagccacagagatgggcgtgcggctgatggtggatgccgagcagacctacttccagccggccatcagtcgcctgacgctggagatgcagcggaagttcaatgtggagaagctgctcatcttcaacacataccagtgctacctcaaggatgcctatgacaatgtgaccctggacatggagctggctcaccgtgagggctggtgttttggggccaagccggtgcggggcgcatacctggcccaggagcgagcctgtgcagcagagatcggatatgaggaccccatcaaccccatgtacgaggccaccaacaccatgtaccacaggtgcctggactacgtgctggaggagctgaagcacaacgccaaggccaaggtgatggtggcctcccacaatgaggacacagtgcgcttcgcactgcgcagtaccatgctcacatccctgcctgagaggctggacccctgcaggcttcagctctgcccctgctgtgggtggctggggagctctggggagctggggtcccctcccatgggatggaggagctgcgcttgcatcctactgtactttggacagctgctaggcatgtgtgaccagatcagcttcccgctgggtgaatggggccctccctgcagcctcgtgaagggtgcccgtcgggagcggcagctgctgtggctggagctcttgaggtggctccgaactggcaacctcttccattgccccacctag

SEQ ID NO: 408253 - DNA, 1000 bp, Homo Sapiens
gcagctctccctcctccagttcctgggaactgtctcagacgaaccacccggagcctcacctacaggaggatggacacctgcacccagtgctgtagggagcaacctcagccctgggcctgggatgaatgccctcgccagcctggggccaggagacaggctctccgtggctcagcgcctgagcatccacttacaggacactcacctgcagaggtaccctgagcaccgttgtgggttaagggactttctcccctctggaaacagtcctgagaagctgaagcccatcagtcagggcaacagccagatggtctatgctaagattcatcccatccccacgggccctgtgactttctaccatatcaacgtggtggcctatgcccaagagagctgctccatgcgctgtggcgccctggacaggccatgttcctgccacccgacgtgctccggccttggtacctgctgcttggatttccaggacttctgcctggagatattgccctactcagtctccatgatgggcggcaaggactttgtggtgcggcacttcaagatgtccagccccacagacaccagtgagagcatccagaccctcggccatgtggactcctccgggcaagtgcacttcgtgtcgcccctgctctatgagagcggccacgtccccttcaccatctcactggacgatggccactccttccctcgtgcgggcacttggctggctgtgcaccccaacaaagtgttgatgaaggagaagagtgagttgatgaacgagatgcattggcaatactacggcaccgccaacacctcaggaatgccctactcacaggagtggactgcaaagtggtcgcacctgtaccccccagccacacacatccccaactccggctctttcaccttcacccaaaaacctgctcctcccagctaccagagatggcgaagcagtgctaacatgttccatttgataggagagaaaactgtggccctgggagaagtggcccattactag

SEQ ID NO: 408254 - DNA, 992 bp, Homo Sapiens
ccagggtgcacccccttgttagtggctggggtcagtggctgaccaagtaggaggggagaggggtaagaaaagtagctttcagggagaagaagctgtgcgtgaatgtggacatgttcagcatgagatgcccaagaatcgtccccagtggtcatttggatgtgggtctggagctgaagggccacccgggctctccagccgcgctcgctcgtagagatcctagacaagttcgacagcgaggtcccgcagagcaagacctgccagcagatctccgaggaggacttggagaggcaggcggacacctacactgggcgcgcgctgcgcctcctcttccgcagccccgtccgcaacccgtcgctggcggagagggtggtacaattggaacagcgcgggctctcttttttccggatgcggccgcggggcatgggaccggctgggcgggaactgtcactacccgggcgaagttcttctgtgttgtgcaggcggagctgaaccattgcaacagcatgggcgccctggagatgcacgagcaggtggagcagctgaagcagagcatccaccgcgtgcacctctactcccggggcgaggatcaacctctccccgtgctgggccctgggcgggggtctgagcccagtgcagccaggccgagggctagttgggccacctttccgagagagagagccctcactgctcaccttgacaccaagaagacgagaaagaagccaagacagaagaaaccagaacccaacctcttgtgggaccggttgacctccccatgcctgccaccaaccctgctgccacctctgccgctaccaccaccatggtctccgtggtgacctcatcaccccctggcacctggggctgccttgcttgcctaaagccaacattgaataatattccattgcctggatatgccacattttatcattcgcccaatgaaggatatcctggttgcctccaagttttgcaattatgaataaagcagtataaacatc

SEQ ID NO: 408255 - DNA, 1000 bp, Homo Sapiens; identical to SEQ ID NO: 295440

SEQ ID NO: 408256 - DNA, 1000 bp, Homo Sapiens; identical to SEQ ID NO: 225076

SEQ ID NO: 408257 - DNA, 940 bp, Homo Sapiens; identical to SEQ ID NO: 295441

SEQ ID NO: 408258 - DNA, 1000 bp, Homo Sapiens; identical to SEQ ID NO: 295442

SEQ ID NO: 408259 - DNA, 1000 bp, Homo Sapiens
tggagtagatcacagatttgggatcgcggattgggggttgatcgcggatttggggttggatcagggatttcggccggaggttgggggtctgagaagtcaccactgtgaagttattcggctttgggagccgcaggggccagacggcccagggctccatagaacatgtctacacgggttcggataccgaatccgggactccgaactgcagaagatccacagggcagctgtcaagggcgacgccgcgggggtggagcgctgcctggcgcgcaggagtggagacctagacgccctgaacaagcagcatagaactgctctacatttggcctgtgccagtgaccaggtgaaagtggtcactctcctggttagcagaaaatgccagattgatatctgtgacaaagaaaatagaacgcctttgatacaggctgtccattgccaggaagaggcttgcactgttattctgctggaacatggcaccaatccaaaccttaaggatatctaccgcaacactgctctccattatgctgtgtatagtgagagcacctcactggcagaaaaactgcatttccatggtgcaaatattgaagcactggacaagttaatccggggagacggaggaggattgttgcaaggcaaagcgcagcacatcagaaagcacagaggagtgagaaggaagcggctgcttttcatttacttcctttctatattgtcagccctcatgattgctatacactatgactcaccaggtattgtcaatatccttcttaagcaaaatattgatgtcttcactaaagacgtgtggacgagatgcagaagattacactatttctcatcatttgacaaagtaagtgtttatgttaaaaggccagttgatactaaattgaagtttaaaataattgcaactactccatcttacacattagttggagaggaccatggagatccagcagccaagcacaaatctgctggctcagagtttgaggaggtagagaaggagtggtag

SEQ ID NO: 408260 - DNA, 1000 bp, Homo Sapiens; identical to SEQ ID NO: 295443

SEQ ID NO: 408261 - DNA, 1000 bp, Homo Sapiens; identical to SEQ ID NO: 295444

SEQ ID NO: 408262 - DNA, 1000 bp, Homo Sapiens; identical to SEQ ID NO: 225077

SEQ ID NO: 408263 - DNA, 1000 bp, Homo Sapiens; identical to SEQ ID NO: 225078

SEQ ID NO: 408264 - DNA, 1000 bp, Homo Sapiens; identical to SEQ ID NO: 295447

SEQ ID NO: 408265 - DNA, 1000 bp, Homo Sapiens; identical to SEQ ID NO: 295448

SEQ ID NO: 408266 - DNA, 1000 bp, Homo Sapiens
atctaatacagacactggtaaagttactgggaccctggagaccaaatacaagtggtgtgagtatggtctgactttcacagaaaagtggaacactgataacactctgggaacagaaatcgcaattgaagaccagatttgtcaaggtttgaaactgacatttgatactaccttctcaccaaacacaggaaagaaaagtggtaaaatcaagtcttacaagagggagtgtataaaccttggttgtgatgttgactttgattttgctggacctgcaatccatggttcagctgtctttggttatgagggctggcttgctggctaccagatgacctttgacagtgccaaatcaaagctgacaaggaataactttgcagtgggctacaggactggggacttccagctacacactaatgtcaatgatgggacagaatttggaggatcaatttatcagaaagtttgtgaagatcttgacacttcagtaaaccttgcttggacatcaggtaccaactgcactcgttttggcattgcagctaaatatcagttggatcccactgcttccatttctgcaaaagtcaacaactctagcttaattggagtaggctatactcagactctgaggcctggtgtgaagcttacactctctgctctggtagacgggaagagcattaatgctggaggccacaaggttgggctcgccctggagttggaggcttaatccagctgaaagaaacctttgggaatggatatcagaagatttggccttaatatatttccattgtgaccagcagcaggcttttttcccccaagaagatgatcaaaacaaaggatgatctcaacaagagctgtattttaagtatttagacagttctttgttagctggtttctagttgaattggttatctagttaccaatgctgcagtcctgcagtcacctatacattatttaaatgtatttaactgttaaatgcgctacccaccaataatgaaatagacctttatgaaaa

SEQ ID NO: 408267 - DNA, 1000 bp, Homo Sapiens; identical to SEQ ID NO: 295449

SEQ ID NO: 408268 - DNA, 982 bp, Homo Sapiens
atgggtagctgggagtgctgggccgaagatgggcattgtcaggccctcagtggggactgggaggtagaggtggggaggtctgtggaggaaggagaagaagggccagtgtcccgagtcgggggtggttggcagtggacgaggccgacaggaacagacctgagcttggggagctccactcagaacgaggcatccttcagggttctgtgcatactggtgtccctggctgggggccaggccccgaagtggagcctgggactgcccctagccagggagagctcagtcagagtgatcctccaggggcccagctctgcatggatgatgttcccagagtacacacctgggcctcgtgccagggccggcaccgccgttgtcggggccatggcaaggcaaacagtcaatgtttgcctcactaaagtgaggctgcagcaccctgaagggatccctggagggggacgtggtccccttgttcccaagcctgtctgcacatgcacgtggatgtcaagggttcccgtgtgggtggacctaaggaaacgtgtgcacacgggcttctggggtctctgtgccaatgtgtgcttccaagccacgcccccccatggcttggtggagggggtctgtggagctggagtgagggccctggacccattggaagcccagactgctggccagacccccaagctagcccgccaggcctccatagagctgcccagcatggctgcgtccagtaccaagagttggtgggagacgggtgaagtacaggctcagtctgcggccaagactccatcctgcaaggaaggagtgattggctgctggtcctgccctgtccgaggaggaggacggaacccacccaccaagctgtggagaggtggaccccacaaatcccctcgcaagccacgtctgagagcgagcagagggaagaaactcaagcgtttgtagtcctctttcttaacaacaaggcttaaagcgccatcttgtgtcttgaagg

SEQ ID NO: 408269 - DNA, 1000 bp, Homo Sapiens; identical to SEQ ID NO: 295451

SEQ ID NO: 408270 - DNA, 1000 bp, Homo Sapiens; identical to SEQ ID NO: 225079

SEQ ID NO: 408271 - DNA, 1000 bp, Homo Sapiens
ggtggccccggctccacttccacagagcgtgtgtcccagggaagggcaggactggtcccagctcacagagattcagggaaaactgcccaaccttgacctgctcaatctcttccagaccttctgccagaaagtgggcctgctgtgcacgcttcagggtaagctgcagccccaggactggacattgttggacgaactgctgcagggcctgcaaacactgctgctcatgattttgtggcaggcttcccgtggcctcttcctgcactaccatgtggaggccctaaccctgcgtcgcatcagtagcttccgccagtacaagtatgacctggtggcagcgggcaaggctttggagggcatgttctgcaagctcaaccacctcctggaacacccgcaccagctgttcttcctctacctgctccccactctgtcccgcttcgtctccatcggcctctacatgcccgccaccagcttcttgctcctggtccttggtttcaaggctctgcaactgtggatgcagctgcatgaggccggagtgggccttgaggagctcaggggggtccctgaccctagtgtccccgccccccagcacaggatggtaagcacacaggtcccagacaggggctggatggctctgaagctggtagccctgatctacctaatactgcagctgggctgcatcgccctcaccaacttctgactggacttcctgctggccgccactatggtgctgccgctgtgccgccgagcctttgggccctggaccctctgtgctgccctgctggtgttgacaagcccagcagccacgctccttggcagcccattcctgtggcgggagctgcaggaggcaccactgtcactggccaagggctggcagctcttcctggcagcactggcccagggtgcgctggagcaccacacctaaggcgccctgctcttcccactgctgtccctgggcctctgcccttgctgactacttttctggaatgtgctcttctggaagtga

SEQ ID NO: 408272 - DNA, 1000 bp, Homo Sapiens; identical to SEQ ID NO: 295456

SEQ ID NO: 408273 - DNA, 636 bp, Homo Sapiens
gatgtctctgtggcaccttccctccagggatgcagctctgttttccaaacaccccgcttaatcctcttaggagggaggatgcaccggggtgctcaccctgtccgtcagggccggcagagacggacgctttacaggtgtttgttaacctggaccatgctggacgggaggcttggaggcaccaagatgccaaatctcttacccatccctccagccaggcgtctcaagtggctaaagaataaatgcatgaaaattaagagccagctctgcctgcgaaagagaacaggagcaagctggctgttggctgtcatctggagtcacctactgggaagtgccgaatcaccccacctcagcctaagagaaactcttggaacggaaaaccaaataccacatatcctcagttataagtgggagctaaatgatgagaacacgtggacacaaagaggggaacagcagacaccgaggcctacttgagggtggaagttgggaggagggagaggagcagaaaagataacttttgggtactgggcttaatacccgggtgatgaaataatctgtacaacaaacccccatgagatgagttttcctgtgtaacaccgaacctaaaataaaagctaaaaataaaattaagttaaaaga

SEQ ID NO: 408274 - DNA, 1000 bp, Homo Sapiens; identical to SEQ ID NO: 295458

SEQ ID NO: 408275 - DNA, 714 bp, Homo Sapiens
aatcatggacgccgccgaagaagtatcgttaaagtttctcttctccctggcgtcatgtctaagtcagagtctcctaaagagcccgaacagctgaggaagctcttcattgaaggcttgagctttgaaacaaccaatgagagcctgaggggccattttgagcaacacggaatgctcacgggctgtgtggtaatgagagatccaaacaccaagcgctccaggggctgtggatttgtcacatgtgccactgtggaggaggtggatgcagccatgaatgcaaggccacacaaggtggatggaagagttgtggagacaaagacagctgtctcaggagattctcaaagaccaggtgcccacttaactatgaagaagatatttgttgggggctttaaagaagacactgaagaacatcacccaagagattatcctgaacagtgtggaaaaaatgaagtgattgaaatcatgactgactgaggcatggcagaatattttaattaggacacaaagcttagcaggagaggagagccagagaagtgacaggaaagccacaggttacaacagatttgtgaactcagccaagcacggtggtggcaggggctagctgctacaaagaatacatgttttagacaaatactcttgtgtatgggcaaaaaaactcgaggactgtatttgtgactaatggtataacaggttattttagtttctgttcttgaaagt

SEQ ID NO: 408276 - DNA, 1000 bp, Homo Sapiens
ctttggaagatcgggtatgggaactcttgcaggaagcagacaagacagctgaagagaacaaggatcagagtcaggtctatgatgccatggccgagactctgggtgaagcatgggcagctctggtgtccatgcttgaaagaagaacagagctccttaggttgacttctgaattttttgaaaatgccttagagtttgctattaaaatagaccaagctgaagatttcctccagaatactcatgagtttgagagtgctgagtccttaaaatcacttcttcagcttcatgaacatcatactaaagaactcttggaacggtctttagcccttttaaacaaaagtcaacaactcactgacttcatagaaaaattcaagtgtgaaggacctaatgtgaatcctgagttgactcagggagctcatagcagctgtctgaaggttgaccgccttcttgaacttctacaagacaggagaagacaactagacaagtacttgaagcaacagtggcaagaattgagtcaagttctgcagatatgtcagtgggaccaacaagaaaaccaggttacttgttggtttcagaaaactataagaaatttacaggaacaaagtctaggttcatcactttcagacaatgaggatcgaattcataagcaagaggaactgataataaaagcaaaggaatggaattctgctgttgagaagctgaagagtgaggcactgagaattctgctgtcaaaggactacgtggagaaagaacacctccagctctctcaccagaaactcagtcagcttcaagaagaatttggtcaactcatggtggaaaggaatacctggttaaagaaggcgaatgaattttttaacagtgctaacaaggtcagtgtgaggtcaagttgataattttcggtaatcaggcagaccagtaaaagacccattacttcaactgactggagcacatcacagaagtcaaaacgccatgtaaaatttcaaaactgatagcagcaaagaga

SEQ ID NO: 408277 - DNA, 519 bp, Homo Sapiens
atgattgagttggggggtggactggcagtcagccttcaggaggatcctgccaggtctgctggagtttgctgggggtctattccagacgctgttggcctggatatcaccaacggatgctgcagaacagcaaagattgctgcctgctccttcctctggaagctttgtcccagaagggctcctgccaaatgccagccggagctctcccgtaagagatggggcctccacgtgaaaagtaactacaaaacagaaccagaaaatagtcatgctgttcaagtgagttggcatatcacttcatgctactttgaaataaaatttcctcttattttcttatggataaaggtctcgaaaggatttaaggagtcgctaaccaatgccaagcatgggctcatcgggtgcagctggggaggcaattacttcaactcaggagttttcaaaaactttccttatgcctgctcacaggatttcatggtgtttttcttctttgttgttacttttgtggaaaaggaaagttaccagtga

SEQ ID NO: 408278 - DNA, 1000 bp, Homo Sapiens
acctgattgaaaagctgccccagcaggaagctggatctcttatgtctaaagcagctcctgccaaaaagccagtggctgtggccccagctcctggatgtaccctggacatcaatgacccacaggtccagagtgcggccattcgtatccaggcctcttaccggggccacaggtcccggaaggagctgcgcgagaaggggccgccgcgggtgctggagccgctgaaggacgtggtgctgatcgaaggcagcgcggccaagctcacttgccgcatttcggctttcccggacccattcatccgctggagtaaggacggcaaggagctacgtgacggtcccaagtaccgctacgtcttcgaggaccctgacgtggtggcactggtggtgcgcgacggcgagctggcagacctgggccagtacagcatcaacgtcaccaaccccttcggccagtgctccgactcggcgcgcatcctcgtggaagctacagggtccccgccagcccagctctgggcacggcctggggcgcatcgccgcgccagccaatgccgggtattagccggtgaggtgatgccctgcctcatctccgggtccttcacggggtttcgctcccctttccttccgctagtcccgacgaagattcaaaagggacccgacaacactaaggcgcgcaaaggcaccaccgtgacgctgactgcggagatcctgggagagcctgcgcccgacgtaggctggaccaaggacggggaggacatcgaggaggatgacagggtgttcttcgagatcggcagcaccaccacgacgctgaccattcgccgggccacgcctcaggacagcggcaagtacgaggtgtacgtggagaacagcctgggcatggaccagagcttcgctcgcgtcgacgtggcctgaacggcacccccggaccttccgccctggcgccgagcccgggggtggtgggacccacagccctccaccagcttgcttaataaagctgctctctgaccctc

SEQ ID NO: 408279 - DNA, 1000 bp, Homo Sapiens
ttcaggcggggcggtggggctccccctccccttgcttcgtctctgcagatctttgtgctctagggagggatggccgcacattctgacgaggacgagggtggtgcataacgcggaggtcaattttgcacagtccaggcaaaagagaccccccccccccaccaacatcccttcctgttcagtttccctctctggcccagcgcgaagggcgaggggcgacagaagcccgagggacagaaaaccgaggctcctcagtggccgagttgggagagagtgtgagtccaggagagcccgggggcagcagggagagggtgcagaagctcgagcgcaccgagccagaggccccctcttctcccgccacgcggggctggaggtgcaggcgccggttccgcggcgtggcccggctatgtgtcgctcctccgcgcgccgcccgccgcagcccgtgccctcgggccgccgccgccgccgctgccccccgtcgagcccgcggccgcaccctcgggccgatacttgagccagcagatgacccaggtgacaacgaccgagaagagtgccaggatgctggccaccgacaggcagatgggccccacgggcgagggcgagggcgacccggtggccggtgcctcgccagggggcgccccgcctccgggggttcccccgccgccgtagtggttgacgaagatgaggccggtgaagagcagcaccaccatggagaggaaggagaagaccacgcacacgcagccagcgtttctctgcagaagacagcaagatgccccagggaatgtttgtgaaaaaggatgactggatgggaagcaagctgaagaaaaagaaggaaagaaagagagaaatcagtaaatcaccacacaagaggtggagaagaggacttataaatattgtttctatgacatttgaaaataaatgttttactccatgctaatagtgaatgtgatgtcttcagtttgaagggctttaagtgaagctcattaaaacccactattttcca

SEQ ID NO: 408280 - DNA, 747 bp, Homo Sapiens
atctacaagtagtccaggaagagggggagaagatccctttaggtgtgaaggaagaatggactggaaagtagagaccctgagatccaggacggaaggagggaagaggctcgcttgactgtcataagcttcattttgctgaaacagaccccagaaagggcagtgatgagagatgaggccacaatacagatatccaattatttcagcatcacttgctaaaaatactttcctttcgtctttggattccactggcaactttattgaaaaatcagataactatatggagtctttctctgtcacccaggctggagtattgtggaatctggtcagcagcccacagtgcaacgtggctctctctttgctctcagggacatggatgaagctggaaaccatcattctcagcaaactatcgcaaggacaaaaaaacagacaccgcatgttctcactcacaggtatgatggcatattcctgtggtaccagctacttaggagactgaggtgagagatacagcttgagccagggaggttgagcctgcagtgagccgtgaatatgccacttcactccagcctgggcaacagagccagatcccatctccaagggaaaaaaaaaaccactcctagatgattactctagaatagaatctatgtcctcaaggagccatgaaagggaactcaaaggatttcaggattggcaggtgtgcaggttttggcttaataaaacaaatctcagggcttgaccctgtacacatta

SEQ ID NO: 408281 - DNA, 1000 bp, Homo Sapiens
ttcttcaaaaaggccacgtgaaaagatattctcaagaagcccgtataaactcgattcctatacagagagttgtgtatcaggttctctgccacctggagaaggtgtttgattgttcagttctgtcagtcctgttcagcaggattaacctgaaggagtatcccgatttaattgagattcataaaagcttcaaaaagggaggcaggaaccagagcacgagcagtagctgggtgggcactgtggctgagatcaccaccatcgaggcagtgaagtgcaagatccaggttctgcagcagcaggcagatgatgcagaggagcgagctgagcacctccagcgagaagttgagggagaaaggcaggcccgggaagaggctgaggctgaggtggcctccttgaaccgtaggatccagctggttgaagaagagctggaccatgctcaggagtacctggccactgccttgcaaaagctggaagaagcggaaaaagctgctgatgagagtgagagaggtatgaaggttgttgaaaatcgggccttaaaagatgaagaaaagatggaactccaggaaatctaactccaagaagctaagcacattgcagaagaggcagataggaagtatgaagaggtggctcataagttggtgatcattgaaggagacttggaaggcacggaggaacgagctgagctgggagagtcccgttgccaagagatggatgagcagattagactgatggaccagaacctgaagtgtctgagtgctgctgaagaaaaggcagagaccagtgctgagtttgctgagagatcggtagccaagctggaaaagacaattgatgacttggaagataaactgaaacgcaccaaagaggagcacctctgtacacaaaggatgctggaccagactctgattgacctgaatgagatgtagaacgccccagtcccaccctgctgctgctcctccctctgacccagactccgcctgaggccagcctcctggaagctgacctt

SEQ ID NO: 408282 - DNA, 1000 bp, Homo Sapiens; identical to SEQ ID NO: 225080

SEQ ID NO: 408283 - DNA, 1000 bp, Homo Sapiens
gcagagtgacaagggtgtcaatggcaagaagaggagcaggggcaaggccaagaagctgaagttcggcttgccagggccccctgggcctcccggtccccagggccccccaggccccatcatcccacccgaggcgctgctgaaggagttccagctgctgctgaaagcaccttctgcgctgaagaacctccttgtacttccagtaaagctgcaatcgcttattttacccccagcgtctttggaaaatgtgggtggggtagagcacctgtcgttcagggctggacccacgcggcgggcgggtgaggggtccctggcgcgcggccaccgctcgctctgtgccaggtgcggtgcggcagcgggagcgcgcggagcccgaaccctgtacgtgtggccccgccgggccggtcgctgcgagcctcgccccggtctcggccaccgccggggaggacgacgacgacgtggtgggggacgtgctggcactgctggccgcgcccctggccccggggccgcgggcgccgcgcgtggaggccgctttcctctgccgcctgcgccgggacgcgttggtggagcggcgcgcgctgcacgagcttggcgtctactacctgcgctcggggagccgccgaggagggggccgccgcgcccccgggaccacctgcgcctgctcatctgcatccagtcccggtgccagcgcaacgcctccctggaggccatcatgggcctggagagcagcagtgagctcttcaccatctctgtgaatggcgtcctgtacctgcagatggggcagtggacctccgtgttcttggacaacgccagcggctgctccctcacagtgcgcagtggctcccacttcagtgctgtcctcctgggcgtgtgagcggccaccacaggcccttcctctcaggggcaaatggagcacagatctagacaatgtgtggacagtgtcagagtagcagtggccacatggaggaggaggcccacccggaactctgcccacactggccac

SEQ ID NO: 408284 - DNA, 651 bp, Homo Sapiens; identical to SEQ ID NO: 295460

SEQ ID NO: 408285 - DNA, 1000 bp, Homo Sapiens; identical to SEQ ID NO: 119347

SEQ ID NO: 408286 - DNA, 1000 bp, Homo Sapiens; identical to SEQ ID NO: 295463

SEQ ID NO: 408287 - DNA, 1000 bp, Homo Sapiens
tttgccacagcttcaggttcttcagactgccctttgttgttttacaacagccagtgcatcattcccagatgaatgtgagcatgtacaatatgttttgagtagccttgctgtgagtttctttgagttgctgctgttctttggaagagatgagttttatgaagagcccttaaaggatattcttggatcattccaggaatgccagaatcacctccgcagatatggaaatgtgaatctggaactggtgactcgaatcattagagatggtggcccatgggaagatccagtgttgcaagctgtccttaaagctcagccagcatctcaggagatagtgaacaaatatttaagttctgaaaatccactgttctttgaactacgtgccagatacctaattgcttgtgaacgcatacccgaagcaatggctcttattaaatcttgtataaatcacccagaaatcagtaaagacttatacttccatcaagcactcttcacatgtctgtttatgtcacctgtagaagatcagctattccgggagcatttattgaaaactgattgtaagagtggaattgatatcatctgtaatgctgaaaaagaaggcaaaactatgttagccttgcaactctgtgaatcctttcttattccacagctccagaatggggatatgtactgtatctgggagttgattttcatatggagtaaactacagcttaaatctaatccttcaaaacaagtttttgtagatcaatgctaccagcttttaagaacagcaactaatgtgagagtcatatttcctttcatgaaaatcatcaaagatgaggtaaataggatatatttgtcccttaaatttaaaattgagtgacagttcactgaaacttgaatctcttttgataaaatttatttgattttaaaactgaaggaaaggaggattttaaggccacattctccatacattacattctcctctgccctaactccaaactctcaacatgggaggctgatttat

SEQ ID NO: 408288 - DNA, 1000 bp, Homo Sapiens; identical to SEQ ID NO: 295465

SEQ ID NO: 408289 - DNA, 932 bp, Homo Sapiens
atgaccaatgtggagtcggccgtacacaattacatgcagacctgcaggacatcgagtccctgctatggtccctccgcagtcaggcccccattgcctgggctgcagccagaagcattcaggcacaaggagaacgaggcccctgaggtcttcctggactccgaggtgaggaaggatgccctgggagcaagaggattttcaggagagaagggcaaccctggtgagggagttgatggcttgcatggagaacagggtaatcacggaatcccagggtcatctggagaaaaaggaaataggggaaatcggggcttgacgggactgccaggacaacctggagagcgtggagagcctgggttaaggggagatcctggggatcctggaactaatagctatatccaaggccctaagggagaaaaaggaaggcgtgggcgtcagggaagttctaatgttgatggacctcagggagaaactggaaatgtcggcccttgggggacaataggaaggcgaggtctgccaggattaaagggaccaagaggaaggcaaggaccaccaggaacttctggacaaaaaggcttagtgggtgctcaggggaatcctgggcctccagggccaaatggttcaaaaggaaaagctggaccaagaggagtgaagggagagattggtgatgtaggagaaagaggcccacagagtcgacaaggaccaagagggcaacctggtcttcctggttctgatggataaggacatccaggaacaaaaggaacaaagggtgaacatggattccctggctatcctggtgcacaaggagaagatggtgacccgggccatcaaggagaaaagggggcaaagggaataagagggaagaggggtaatgctggctttcctggatttgttggaacttcgggtgaccaaggcccaccaggacaaatggtaatatg

SEQ ID NO: 408290 - DNA, 779 bp, Homo Sapiens
atgaatgatgtgaatgaagttctctcagagaaactcctcatggaggtgccagccagaatgggtagaaaaagcacttacataatccagtttatggctatttatgacctacgaccctggttgtctacaccagagacaataaccagctgtccacttggattagagtatttgcatcagataaatcagttaacagtgtgtcaacattttgatcctctgggagtcctcagaaaatttgaaactagtaaaacgtatgaaatcttgaacaatcaaggacagagaatttattttgcagaagagagaaataattgcttccttcgacacctttgtggattttcaagcccttttactatgacaatttatgataatgtaggtagagatgtacttgctctgcataaggctctgaaatgtagcttacaaaagttattgactctggatgaggaaatggttattggaaagatttcaaaacagtactctggatttgtaaggggaatattaaccaatggtgagaaatttgggatccagtttccatttgatcttgatgttaaaattaaagcattgatgcttggagcaactttcctcattgaatacatgtattttgaactgtggccataagaattaccctgaaagaatatgtcagagattactggcatttatttttgccagccctcaacaaaactaagcaactttcactgaaaatatctaaataaagttttattttactaaaactattcatatatattctttctgcctaataaactacatcaaaaatgtttaacttcaaa

SEQ ID NO: 408291 - DNA, 1000 bp, Homo Sapiens
actccaggtcccaacaacgtctttggactcagctcctgcccagctcccagcggccctggtaggcccacaacttccctaagccaagctccccaggcccagctcaggcctcgcggtggcctctccaggctcagctcctggccctccgatgacatctgcaggccccaaatggcctccggtcggtgggctcctctaggcccagcttgggcctcccggcggcctccgcaggcccaaatcgtcccgaagtcagtctctccaggcttagctccagcctcccggcggcctctgcaggcccaagtcgtcctcaagtcggcctggaagtgggcctggaagagcagcaagtcggcctccctgggcccagctccgtcctctcgacggcctctccaggtgcaaaacttcctcgagtcagcctctccaggcccagctcctcctgcctcccagtggcctctttcagcccagcccagctcatggctctcggcggccttcgcaggccctgcttttgacttttggcagcctcttcaggcgcagaacttgatctccagtcggcctttgcaggcccggcctcctgcctctcgaaggcctgcacgggcccggcctcggcctcggcctcacagcggactctccacgcccagctagctctcgcctcactgcggcctccccagtccaaagctcctgcctttcggccacttcggcaggtccagctcctgcctgccagtggcctctttaggcccagctcattcctcacgtcggccattccaggccccgtttttcccttccggcagcctcttggcctctaatttgtttatcttttgtgtataaatcccaaaatattgaattttggaatatttccaccattatgtaaatgttttggtaggtaatttatttggagtgagtttctgcgtcaagcccgagttttttattttattttccttattatttggtgttaaacaggtttaatgacggtcatggcaactttttggcacaatgaaaaatgtcgcccacg

SEQ ID NO: 408292 - DNA, 1000 bp, Homo Sapiens; identical to SEQ ID NO: 295467

SEQ ID NO: 408293 - DNA, 1000 bp, Homo Sapiens; identical to SEQ ID NO: 225081

SEQ ID NO: 408294 - DNA, 1000 bp, Homo Sapiens; identical to SEQ ID NO: 119348

SEQ ID NO: 408295 - DNA, 679 bp, Homo Sapiens; identical to SEQ ID NO: 295473

SEQ ID NO: 408296 - DNA, 938 bp, Homo Sapiens
gatcccttgttcactagaaacaaggagccccctgtcaccttcttttaaaacagatctttctgtctctgtcttcatttctccattcatcccccttcattcaatcctgtagcaactggcagtgacaagtggtgcccaggacagggacatgagcaaagaaggtctgctggagcagagaaagtgaaactgaccagatgagcaagaaaccttgggacaagtctactggcagctaatataagcacataccaaggttaccagcactcggggaagcaaggacggaagaagaaaagaggatgctctttctccctcatgtaccccaggtatctgctagaaagagaagagaactagggacacctgccaccctcttcctaggttctgtggatggaaagagaccaaatactttagcatccaatactcagctgtacaagtggatatcccagaatgaccttcttggtcatccaaaaactaaatcttttatgactcatggtgaaaccagtggcatctatgaggcaatctaccatgggatccctatggtgggcattcctttgtttgcagatcaacctgataacattgctcacatgaaggccctcaatgtggacatcaggaccatgtcaagtacagatttgctcaatgcactgaagacagtcattaatgaccctgtctacaaagagaatgctatgaagttatcaataattcgccatgatttgccaattaagcccctggatcaagcagccttctggattgagtttgtcatgcagcacaaaggagccaagcaccttcgggttgcagcccacgacctcacctggttccaataccacaacttgcatgtgattaggttcctgctggcctatgtgtcaactgtgatcttcatcatcacaagatgttgcctgttttctttctgaaagtttgctaaaacaggaaagaaggagaaaagggattag

SEQ ID NO: 408297 - DNA, 866 bp, Homo Sapiens; identical to SEQ ID NO: 295474

SEQ ID NO: 408298 - DNA, 1000 bp, Homo Sapiens; identical to SEQ ID NO: 295475

SEQ ID NO: 408299 - DNA, 919 bp, Homo Sapiens
atgggagccaggaatgaactggatgactggaatatcaattccacggcgggggcgggggctcaggcatggcgggctgcaggtcccgagccctgcccctcaggaaggcagctaaggcccgagcgcagcgccggtgggccggcagtgctgggggacccagtacaccctccgcagccgctggcctgggtgttaagcccctcattgccggggccggcagggcccgccgctgctccgagtgcggggtccgccaagcccacgcccacccggaaccccagctggcccacaagcgccccgggcagccccggttcccgctcgcgcctctctctccacaactccctgcgagctgagggagccggctccggccttggccagcccagaaaggggcttccacagtgcagcggtgggctgaagggctcctcaagtgccaacaaagtgggagcccaggcagaggaggcgcccagagcgagcgagggctgcgaggactgccagaatgctgtcacttctcaccaggaatcaaagtactaccagagacacagaggcccagaattagttttgcaacttggtaagaacacataaccattttttccactaagagaatattaagacatttttattcatatattatgataaaactcttatgaaattctttctgacaactttgtttggctactgtctcttaagttttgaaagtttcatgggaaatttcacatgaaaattgttttgctgggaacaccttttcatattgtgaattttttctcttgtctcttcctttagcctgtagacattatttagctttctatttaattttgttggtctacttattaattgtttcctattttagtctactgaattctgctgtgagaaataatactcataaaatactattgtgagaaaagtactcataaaatattataatgagaaa

SEQ ID NO: 408300 - DNA, 1000 bp, Homo Sapiens; identical to SEQ ID NO: 295478

SEQ ID NO: 408301 - DNA, 1000 bp, Homo Sapiens; identical to SEQ ID NO: 295479

SEQ ID NO: 408302 - DNA, 1000 bp, Homo Sapiens; identical to SEQ ID NO: 225083

SEQ ID NO: 408303 - DNA, 836 bp, Homo Sapiens
cctaaaatgtaggagttcctccaggtactcacttcatagttcagatggatcttaccagattattagcaacaagaattcagtgcctatatcacagttaaaattatagttaaaatatttaatagagggacacccaccctcaatgcgggtgggcaccatccaattggtcaggggtatggataaaacaaaaatgggacatccaaactccaggctgtctggccttgggattccaggagttgcaaagtggctgtctgagttctcaggcctttggcctctgactgagagttataccatcagtttccctagttctgaagcttcaggacttggagaaagctactctactctcttccctggttctccagcttgcagacaacctatcctggaacttctcggcccgcataatcgcatgatccaattcctataataaatgtacatctctctctctctctctgtatgtgtaggtatatgcatgtgtgtatatatatatgtatacgtgtaggttctgtctgagagaacccagcctaatacatcatgcagcatattatcagaataaaatttgataatgtatgtacaatgctgaacacagcatctggtatttaaaaacatattcagcatcgagttactgtaactgctgtcattgatgcctcttcttctaaaatgagatgccatcacttgtaaaattatttttaaaagatatatttttaaatgaagaagtctttttatatgtcaaataatttactttagatgtttaaaatagtatagctcacaaaaaatgttggcttataacaacttctactgagtatgtaagaaaatggttttgaagttcaatctttttttaa

SEQ ID NO: 408304 - DNA, 721 bp, Homo Sapiens; identical to SEQ ID NO: 119349

SEQ ID NO: 408305 - DNA, 1000 bp, Homo Sapiens
cagcccaggtcacctcgctgattcctgccaccttcacagctgcaagcagggatgccggcatgagaagaacaaggcctggcacctcggctcctgcagctgccgcagcagcccttcccccctccacattgaaccccacgtcggggtcgctactcaatgcagtggatggaggcccctcacatttcttggcctcagccacagctgcagcacgtgcccagaggtcagaagtgagatataaccagagatcccagacctcccggaccagatcctgcctcaaacgaaatgccagctccagctcccacagctctacggaaggcctccaggaagtaaagcggaggagggggccagcctcatcccactgccagctggcccacagttcctcaaacacagtgagtgaggacggacctcaggctgtctcttcgggtcaccgctgtgaaaacaaggcaggtacagcaccagggcagacactcgcccccaggggtggctcccccagatcccaggcctctaggccccgcatcaacagtgcactgcacgttgaggacaaggccatctcggactgcagaccctcacggccttcccacactttgtcctcacttgcaacaggggcttcgggtgggcctcccgtttctaaagcacccactatggatgcacagcagcacagacccaagtcccaagactgcctgggcctactggcccccctagcatctgctgcagaagtctcctctacagctcccgtgtctgggaagaagcacagaccaccaggacccctgttctcctcctcagatccccttcctgccacctcttcccactccggggactcagcccaggacacctcgctgattcctgcccccttcacacctgcaagcagggatgccggcatcagaagaatgtttcgtgttcgaaattgtttgaggggtttgggtttatttttgttggttttttcttttttttttttgcttacgtgggcatccttcagcttttaataatctgaaaaattctattt

SEQ ID NO: 408306 - DNA, 1000 bp, Homo Sapiens
cccaggtcacctcgctgattcccgcgcccttcacagctgcaagcagcgatgccggcatgagaagaacaaggcctggcacctcggctcctgcagctgcagcagcagcccctcccccctccacattgaaccccacgtcggggtcactactcaatgcagtggatggaagcccctcacatttcttggcctcagccacagctgcagcacgtgtccagaggtcagaagtgagatataaccagagatcccagacctcccggaccagatcctgcctccaaggaaatgccagctccagctcccacagctctacggaaggcctcccgcaactaaagcggaggagggggccagcctcatcccactgccagctggcccacagttcctcaaacacagtgagtgaggacggacctcaggctgtctcttcgggtcacacccgctgtgagaagaaggcaggtacagcaccagggcagacacttgcccccaggggtggctcccccagatcccaggcctctaggccccgcatcaacactgcactgcacgttgaggacaaggccatctcggactgcagaccctcacggccttcccacactttgtcctcacttgcaacaggggcttcgggtgggcctcccgtttctaaagcacccactatggatgcacagcaggacagacccaagtcccaagactgcctgggcctactggcccccctagcatctgctgcagaggtctcctctacagctcccatgtctgggaagaagcacagaccaccaggacccctgttctcctcctcagatccccttcctgccacctcttcccactccggggactcagcccaggacacctcgctgattcctgcccccttcacacctgcaagcagggatgccggcatcagaagaatgtttcgtgttcgaaattgtttgaggggtttgggtttatttttgttggttttttcttttttttttttgcttacgtgggcatccttcagcttttaataatctgaaaaattctattt

SEQ ID NO: 408307 - DNA, 1000 bp, Homo Sapiens
gagctcagaaatcagatataaccacacatcccagacatcctggacgagctcgagcaccaaacgaaatgccatctccagctcctacagctccacgggaggcttgccggggctaaagcagaggagggggccagcctcatcccgctgccagctgaccctcagttactcaaagacagtgagtgaggacaggcctcaggctgtctcttcgggtcacacacggtgtgaaaagggggcagatacagcaccagggcagacaatcgccccaacgggtggctcccccagatcccaggactctaggccccgtagacgcaagattcccctgctgccacgcaggcgaggggagcctttgatgctgccacctcccttagagctggggtaccgggtcacggctgaagacctgcacctggaaaaagagacggcattccagcgcatcaacagtgcactgcacgttgaggacaaggccatcccggactgcagaccctcacggccttcccacactttgtcctcacttgcaacaggggcttcgggtgggcctcccgtttctaaagcacccactatggatgcacagcaggacagacccaagtcccaagactgcctgggcctactggcccccctagcatctgctgcagaggtctcctctacagctcccgtgtctgggaagaagcacagaccaccaggacccctgttctcctcctcagatccccttcctgccacctcttcccactccggggactcagcccaggacacctcgctgattcctgcccccttcacacctgcaagcagggatgccggcatcagaagaatgtttcgtgctcgagaacaacaggatgctttggtcctgtatcagcaggacgctttttgggtagatcctactgccaccctactatcgggtagatcctactgtcaccctagctatgggcacatgtcagagtcccatgtaataaaggagacaaaaggaaaccaccacgagtataaactaagaaaagtactccaaggtttctaa

SEQ ID NO: 408308 - DNA, 1000 bp, Homo Sapiens
gagctcagaaatcagatataaccacacatcccagacatcctggacgagctcgaacaccaaacgaaatgccatctccagctcctacagctccacgggaggcttgccggggctaaagcagaggagggggccagcctcatcccgctgccagctgaccctcagttactcaaagacagtgagtgaggacaggcctcaggctgtctcttcgggtcacacacggtgtgaaaagggggcagatacagcaccagggcagacaatcgccccaacgggtggctcccccagatcccaggactctaggccccgtagacgcaagattcccctgctgccacgcaggcgaggggagcctttgatgctgccacctcccttagagctggggtaccgggtcacggctgaagacctgcacctggaaaaagagacggcattccagcgcatcaacagtgcactgcacgttgaggacaaggccatcccggactgcagaccctcacggccttcccacactttgtcctcacttgcaacaggggcttcgggtgggcctcccgtttctaaagcacccactatggatgcacagcaggacagacccaagtcccaagactgcctgggcctactggcccccctagcatctgctgcagaggtctcctctacagctcccgtgtctgggaagaagcacagaccaccaggacccctgttctcctcctcagatccccttcctgccacctcttcccactccggggactcagcccaggacacctcgctgattcctgcccccttcacacctgcaagcagggatgccggcatcagaagaatgtttcgtgctcgagaacaacaggatgctttggtcctgtatcagcaggatgctttttgggtagatcctactgccaccctactatcgggtagatcctactgtcaccctagctatgggcacatgtcagagtcccatgtaataaaggagacaaaaggaaaccaccacgagtataaactaagaaaagtactccaaggtttctaa

SEQ ID NO: 408309 - DNA, 1000 bp, Homo Sapiens
ggtgaattaccagatctccgtcaagtgcagtaaccagttcaagttggaagtgtgtcttttgaatgcagaaaacaaggtcgtggacaaccaggctgggacccagggccagctgaaggtgctgggtgccaacctctggtggccatacctgatgcacgaacaccccgcctacctgtactcgtgggagggcaggccagatggggctcaggctgtcggggcgctcacacctggcactttggctgtcgtaggtgtggctgactgcacagaagtcactggggcctttgacttctacacactccctgtggggctccgcactgtggccgtcaccgagagccagttcctcatcagcgggaaacctttctatttccacggcgtcaagcatgaggatgcggacatccaagggaagggcttcgactgtccgctgctggtgaaggacttcaacctgctttgctggcttggcgccaacaccttctgcaccagccactatccctacacggaggagatgctgcagatatgttaccggtatgggattgtggtcatcgatgagtgtcctgctgaaccggtgctcagagacaagaaccaccccgccatggtgatgtggtccgtggccaacgagcctgcgtccttcctggaatctgccggctactccttcaagatggtgattgctcacaccaaagccttggacccctcccagcctgtgacctttgtgaccaactccacctacgcagcagacaaggggcagcagcagcattttgtggtattcaaccagaaaataaggctctgtgtttactttaccctcctacaagcctcagagtatttcgaaacgccctttaccatctctgacgacggcatctatggctcaacattttttgtagccacaggctttcacggactccacgtcatcattggatcaactttcctcactatttgcctcatccgccaactaacatttcactttacatctaaacatcacttcggctttgaagccgccgcctggtactga

SEQ ID NO: 408310 - DNA, 863 bp, Homo Sapiens
gacgtctgtcccagggacaggggatcccagtgggtctggcttgagatgggacaatgctatagcaagaaatctgtggtcccagagtctgacacctcagagagaagcagcatgacgtctggaagttcagagtcagatataccacaagaaaacaaagtatcggatgctaatcaaccagcaccctagaggtaaccctctcatggacggtatctacactgaaaaggacaaggtgccaattacctactacctttaggatttctgccaagggcttcaattagcttcctggagttcagaatccatccccttccaatttacaatggaaagcgtccctggatactggacagatggcgtttaccttggcccaacttgagtccttggagatttgcctgaaagaagcagaagaaaaggctaaagctttatctgaacagctttcagtctctgaaggaacaaaatcaaaactgcttgaacaagtatcccggctggaggaaaaactggaggctgtggaccacaaggaagccagtgggggaccatatgaaaaaatggttcttgtgaaagaccagtgcatccagaaattgcaagctgaagtaaaagcttcccaggagcaacttatagcccagaaactaaagcatgaaaagaaagtgaaaaaactacagactgatttggcaacagctaatgccatcacagttctggaactcaatgagaagataaagactctatatgaaggaaagccagcccctagaggtcagtattaccacgtgacagatccacactggcccgtcagctgggtgatgtatgtagttgtattggcaacgaagcaaaaaaaacgaggctacaggcctggtctgacctctgtgtggcaccagtag

SEQ ID NO: 408311 - DNA, 1000 bp, Homo Sapiens; identical to SEQ ID NO: 295483

SEQ ID NO: 408312 - DNA, 804 bp, Homo Sapiens; identical to SEQ ID NO: 119351

SEQ ID NO: 408313 - DNA, 1000 bp, Homo Sapiens; identical to SEQ ID NO: 295484

SEQ ID NO: 408314 - DNA, 833 bp, Homo Sapiens
ccatggaggattacatcgtgatctcggacgacagcggctctgagagctccgggggcgcccgcccgggccggtcgcggaggctgcgccgggccctgtcgcgaacctccggcgcgctgccccgccggaccgtgaacaagggtcaaaaattagaacccatccctcatcgaagactaagaatgcattacccaccaagagaaatcgtggctcacatcatccagaaaatcttgctcagtggctctgagactgtggatgtcctaaaggaggcctacatgcttctcatgaaaattcaacggctacatccagccaatgccaagacagtggagtgggactggaaactgctcacctatgtcatggaggaagaggttttgggggaacaggtggtgtttgggtgcatagaacccagcaccgagagggaccatcagaggatgttccatgagaacttggtgagggttgtggagaggttggctggtgcttctccgtcttcatacagatgtccagacaggggaccagaagtctcaggtctgagctctacctggaagcccctcacgtctgtagccatcaaacctccagataagacgagccctgaagcattttggttgcatcagaaaacagatggaaggccagtcttcacagatgcatatacttcatcctggcttccacccacagaggttgcatctgtgcagaaattcatcccagagcaccaggcaggtagccactgtgtctttatctccctccagagaagcaacgcgctccagactctgatgcactggaggcaggagacagctgcaggtggtggtgtgctctggaagagtagaaacagagacccctcatag

SEQ ID NO: 408315 - DNA, 719 bp, Homo Sapiens; identical to SEQ ID NO: 295485

SEQ ID NO: 408316 - DNA, 1000 bp, Homo Sapiens; identical to SEQ ID NO: 119352

SEQ ID NO: 408317 - DNA, 1000 bp, Homo Sapiens
agagcaggacgccgccgcccgagtcccccagctcagccaggtgcgggcgggaggagccccgtccttgcttagccccgcgctggaagcgccgtccgagacactgcacggggcagactggtgggtgtcccggccctggcaccgcggggttgccctagccaaccggagcccagctcccccacgcgggccggacgtttccccagacgttgcgaagtccgactctggttcacagatgccgacctggtcggtctatgcggaccacccttttctccaacgtgaccgccgactattggaagttttttgtgatctgtcaggccctgatggcttaaggaacatagccagatcttcccgagtccgaggctcgttatggttgtccactgatgatctgccatttcgtttatgttacagaataaacagggaaagtgtttgtagtctgcctttctccaaacctgctccagaagtccctgaattaatccttagagcccaggaagtgaagatgtctttcaaagatgccgattgggagactcctgggccctgtgaggccttgagccagctctggaagctctgctgtgagtggttaaggcctgagattcacaccaaggagcagatgttagacttgctgttgcttgagctgttcctggccattctgcccgaggagctcctggcctggatgcatgagtatcatccaaagaatggagaggaggcagtggttttgctggagaaaatccacagtggaaagaaactatatgaatgtgacaagcgtggaaaggccttcagatacagttcagctcttgttggacaccagcgaatccacggtagagagaagccctatgagtgtgatgtgtgtgggaaagctttcagtaacagctcacatcttttgagacaccaaagaacccacactggagaaaagccctgcaaatgtgatgcatatggaaaagctttcaggcagagctcacacctcattttacatgagcaaatccacactggaaagaagccccggtga

SEQ ID NO: 408318 - DNA, 1000 bp, Homo Sapiens
gttcgactacgcgcgctgcggcgttcgcgacgtgtccaagacgctggtggggctggagggcgcgccggccacgcggctgcgcttcaccaagtgcttcagtttcgccagcgtggaggccgagaacgcgtacctgtgccagcgcgcgcgcttcttcgcagagaacgagggcctagacgactacatggaggcacgcgagggcatgcacctcaagaacgtggacttccgtgagttcatggtggccttcccggacccggcccggccgccctggtacgcctgctcgtcggccttctgggccgcggcgctgctcacgctgtcgtggccgctgcgagtgctggccgagtaccgcacggcctacgcgcactaccacgtggagaagctatttggcctggagggcccgggctcggccagcagcgcaggcggtggcctcagccccagcgatgagctgctgcccccgctcacccaccgcctgccgcgggtcaacacagtagacagcacggagctcgagtggcacatccgctccaaccagcagctggtgcccagctactctgaggcggtgctcatggacctggcggggctcgggacgcgctgcggcggggcaggcggcggctacgcgccctcccgcttctcgctgggccgtctctacggctcccggcgcagctgcctgtggcgcagccgcagcgggagcgtcaacgaggccagctgccccacggagcagacgcggctgtccagccaggccagcatgggggacgacgaggacgacgacgaggaggaggccgggccgccgccgccctaccacgacgccctctactttccggtcctcatcgtccaccggcaggaggggtgtctgggccacagccaccggccgctgcaccgccacggctcctgcggtcttcaaaggggcatcctgccaccaccccagggcgctggccccacgtcctgttcccctaaagctctgacaccgccttctctccgtgtgctccccccaccacctccaccctga

SEQ ID NO: 408319 - DNA, 1000 bp, Homo Sapiens
tgacatgattagaggaattcttttttagtatgaaaattgtcccttttcttcttcagtacttgcctccttgctggcattgaattaacacagggacaaaatatggttaattttttatttctaattctcccaacaaacccctgttgcccagtatttatgtggtggcctttaaccacctgagggaaaaaatgagcttattcaagctgccaatatttatctatgggctgtagcagtacactgaattgtactgtgccagggatattgagatgctctgggggtatattgtatacctgccagttttcttcatttctgaattgagttttcttttcttgatgttggtttccttcatatcacctcaaggtttagatttgtgaaggaataagcatgatggaaataatagtcttgaaaggagatatgttgtatataatcaggaggaagaggaaggaaggacttacccattttgatattttgctgtaggtggccagttttgtttctcatagggaaatctgacccccacctgtcatgttggctcctaaggaactgctgttgtaagcggctcatcaagagttgaacttcacgtagccttgttgggaatatggaaaaggaagaaagccacaggactgcccattcagtcttgttaagattgggatgattctgcacaagcaaaaatgacttgaaatttatgtatcgacacacctctaccaatccatcttcagctgactgaatgttgtatgatagcccttctccaaagcaggggtagaatgttcaggtttcaccacggattttctacttatttcgcttttggaatcagcttacagattccaggtcccttttgtagatattctttattcttttgcttttttaaaaaataaactggtattagtcaatgtttcgtgttccgcattatttgaaccatttgcccttacagaaagagaaatacttgtttgtgttttaaataaaactgatgtaggatactcaaaaaaaaaaaaaaaaaaaaaaaaaa

SEQ ID NO: 408320 - DNA, 1000 bp, Homo Sapiens
agagaacccgcgtgcgccggccgccaggcctgggcatctcctctcctgcagcgccgcctgctggccacagagaacccgcgtgcgccggccgccaggcctgggcatctcctctcctgcagcgccgcctgctggccacagagaacccgcgtgcgccggccgccaggcctgggcatctcctctcctgcagcgccgcctgctggccacagagaacccgcgtgcgccggccgcctggcctgggcatctcctctcctgcagcgccgcctgctggccacagagaacccgcgtgcgccggccgccaggcctgggcatctccccgggccctagttccccccctcacctaaggggagggactcccgtctttccatccaccccctccttgcctctgcagagctccagggaaggctggcacccgctcactgcatttagactccatcaggttcagacactctcgtcgtgctctacaagaaaaatctgctttatagatgaggaaaggcccttggggcagacaagacagtccctgtttgacataattcctttatctcttctcccccagctctgctgccccctgccccatacacgtgatggagcagaaaacgtgctgtgtgaacctgtgacttcagggcctgttgacgtggtcgtgcttgcatactctctggactggacctcactgtgggaacaacaagatcaacaagaggagcaagaacaacatcaagagtcagggcccgggggtcctgacgggtacaggatgggtacagacccacacaggaatcccagagtgtgttccacagcaggacacgcctgcgctgaaagagtgggcagaaaggagctgacctgggattatgatccaaactcagctgggcctcccctccctgccccaggattgtggagtgagaacgttgcagcaggagagaacaacgcaattccttcctacaaccagtgtagagcagagtaccaggacgggccattgagcaccctggtgttgagagcaagtggcctctag

SEQ ID NO: 408321 - DNA, 1000 bp, Homo Sapiens; identical to SEQ ID NO: 295488

SEQ ID NO: 408322 - DNA, 744 bp, Homo Sapiens; identical to SEQ ID NO: 119353

SEQ ID NO: 408323 - DNA, 1000 bp, Homo Sapiens; identical to SEQ ID NO: 295490

SEQ ID NO: 408324 - DNA, 1000 bp, Homo Sapiens
cacaaggtgcagatccgccgccacgagcgccagctgcacggcgcgggccgctccaggggcctcggcctgctgcgcgcctcgcggccggcggccctcggtggcccagcccgcgcggagcaggccgctacagccactgcgcccgcagacaaggcgctgtgagggccgtgatcggggctgcctggccgggaggggaccccccacccgcctccacctgaaaagctccttgacccgggttcatgggcgctggaggcgtcctggaatatccctggagtaaaaggcttccaccatcatcatcatcatcatcttccggattccctgagaaaataccaggttcacagatttcaccgccagaaaaatccatccgccaaaagagaagtggaccggggctgaaacagcacacgggacacgtttgtctgccctttgaggggtctgccaaaggttttccctccgggaaaactggacttactacgaacgaggaaaaacccccagtggcgagacgattaatgacactggccgaggactggacacccaccagggaatcaagacgtggtgagacacacgtggaaaatcttcgatcctggtgaaaatgatcgcaaggagaaattcggggaggaagcaaacttgtttgcactatgtagaaactgaccaaggcatcgaatcgtcctcagacactgtgccattgctggggctggggaaagaatatctgagacgacgtttgggagcaatgctctttaccacgttcaccaagtcgtctggggcaggggttgtgagctgcagcagttgctggtgccttgtgggaaggtggggcagggaggaggctgcccgccacctctgcccccagtcacttcctgcttgacctgactcttcacatgtggctgcttaattcctgcccctctccccccagctgcttctcctttactaacacacctgctacattttacacatgtgttggtaagtgagaaacagaaacgaaaaataaattaaaatgcagaaatacaat

SEQ ID NO: 408325 - DNA, 1000 bp, Homo Sapiens; identical to SEQ ID NO: 295491

SEQ ID NO: 408326 - DNA, 1000 bp, Homo Sapiens
ccagaggccccacggagaagggacccacaggcgcggggctagggggcggctacggaatcctagggtccacccggaggtggccagcgcgggcgggggacacttcatcagttcttacgagttggagaaaaaagcctcctatgtccttttcaggacacgagctataatcgggccaatcatacctgaatggagactacagaaggggtggcggtcacggggacaaagggcaggcggatcggcggggagggagcggggcgcggccaggccctgcccgggggctccgcatgctgcagctgcccccgggtgcccccgccgctgccctcgccgccgagcagcatggagaggagccggggacctaaccagagccagccggccggcctcccgaaggcggcggcgcagggaacggcccgacgcgtgctcgtggtcccggcggccgccaaggcggacagcggcaccgcgcgggggcgctgcgttggcggccctggcccccgggccgggcagtggcggcccaggaccacgcgtctactttcagagcccctctggggccgcaggagacagcccagtgaggcgccaagggaaggtcaccgtcaagtatgacggcaaggagctacggaagcgcctcaacctagaggagtggatcctggagcagctcacgtgcctctgcgactgccaggaagagtagatcccagaactggagattgatgtggatgagctcctggacatggagactgacgatgcctgggctgccagggtcaaggagctgctggttgactgttacacacccacagaggccttcgtctctggcctcctggacaagatctggggcatgcagaagctgagcacaccccagaagaaatgagggtccccgacccaggcaaacggtggctgccacaggacaatagctgccccccgacctcgtagcaacagcaatacccggggtctcttcctctgccccctcagttttcacttttggggtttttgttactaaactggtgggactttt

SEQ ID NO: 408327 - DNA, 1000 bp, Homo Sapiens; identical to SEQ ID NO: 295492

SEQ ID NO: 408328 - DNA, 874 bp, Homo Sapiens
gaggtctccagcgacctggcgtccggcgaggacacagcccccaggaggggttagaccacgggagccggagcccgagtcccagggccgccgagccagtttagagtggtctccaggccctagtgggaaggggctccgcgcttctgggcgtccacaggagctgcatggccctgcccgctgacgcccggtcgggacgctccacaccctgtgtgggggcggaggggacgcggtgggtgcggcctgggcgcgggtgggctagagcctggagaccgccgggagcccgacttcctggcgctttgccctttggggagcggagccaaggaacagcgccaacctctctccacaagccagggaccctacgacccaccgccgcaggccagaaccagcagctgatttagataccatcaagacacctaaaaccttatcatgagccagatgctgtggaagagattctgggagaatcctgaggaccccccagttgcagccatgtcaagactgatgctgaggaggaccccaactgtcacgagcaacacccgtcgaacacagccacctacttggggaaagatcaagaagctgtcacagatggtggaagaaaacctgaggaaagcgggacaaccagtcacaatgagtaatttaatgatagctatgagagcggtgatcaccattgcttctgcagatgcagatcctgactcctgcgagaagtagctcaccgtgataaagctgcctttgcttttattgccctgcaaaaacaagaagggggatatgctggggaataggcccccaaatctggacataaactggccccaaaactggccataaacaaaatctctgcagcgctgtgacatgttcatggtggccataacgcccatgctggaag

SEQ ID NO: 408329 - DNA, 1000 bp, Homo Sapiens
tggctgtgtggttccgggtgctggtgctgtggaagtggcaatggcagaagccctgaataaatataagctcagtgtaaagggcaaggcacagcttggagtccaagcatttgctgatgcgttgctcgttattcccaaggttcttgctcagaattctggttttgaccttcaggaaacattagttaaaatttaagcagaacattcagaatcaggtcagctcgtgggtgtggacctgaacacagcactgattgccaccaacattctcttggttgatgagatcatgcgagctggaatgtcttctctgaaagctttgctaaaatgctccccctacaaagttgtaggaaatgggaagaggagtaaactagaggcaagggagttgagagagctggaaggcatggtggctaagggctacggttatcagccttgcaggtggtatggccagtcctacacctcgtgtccgtcagtttcccccgctgaaccgttgggtgaggggcggtggtggagcagcatgcgcatgtgtggaggaggcgactgccaccgtggaaatggacaggctactagcatggtcccactgccaggtgggagattcctgatgggaacaaattctccagatgacagagatggtgaaggccctgtgtgggaggcaacagtgaaaccctatgctatcgacatatttcctgtcaccaacaaagatttcagcttatgggtggtggcggctgggctgaagacggcggacaggacatcccgcccggccgcctgtggtcaccctcccgcgcaggcgctctcctggaagacccagcacctggagttccgattggctctgcgtgaggggcgggcctttgcgacatcttggggggcgccttcggtgacgtcacaggggcgggccttctgtcacgtcacaagggctgtacagtgcctggagctgggcagtcttctcagagtggagcctggtaaccgcgacctccccgccagttcctgtgtgttgctggctggaaaggggtag

SEQ ID NO: 408330 - DNA, 1000 bp, Homo Sapiens
gttcaacattagcggggcgcggggtctgcaggacgtgctgaggaccaacctggggcccaaagggaccataaagatccccaccgttgcgtccatttcttcctgcgtcgatgccgtctccatggagaaaaaagcggctctagtgtgcggcgttccccgccttcttgggcttccagacaccctgaggactctgcacaatctctgcggggacgggcaaattcaacacccaacagcttccttaatagcaaaggtagcaacagcccaggatgatataactggtgatgaagtcaaagtaagcagagagatggacaaggaaacacttaaagatgtggccagggcatctctttgtactaaagttcatgctgaacttgcagatgtcttaacagagcatcttgataggaagaaaagggtggaggatgcatatatcctcatttgtaacgtgctgactcttgcttgtggtggggtggccctgaattcttttgaggacctaagtcctgactgcttgagacatgcaggacttgtatatgagtatacattgtccctcttctctctttgcacacatcgtgtttttgaaaatcatgtttcttctacacaaagggagaagttcacctttattgagaagtgtaacaaccctcgttctgtcacattattgatcaaaggaccaaataagcccacacttagatcaaagatgcagctgtgtggttccggtgctggtgccgtggaagtggcaatggcagaagccctgaataaatataagctcagtgtaaagggcaaggcacagcttggagtccaagcatttgctgatgtgttgctcgttattcccaaggttcttgcgcagaattctggttttgaccttcaggaaacattagttaaaatttaagcagaacattcagaatcaggtcagctcgtgggtgtggacctgaacacagcactggttgccaccaacattctcttggttgatgagatcatgcgagctggaatcttctctgaaaggttgaattga

SEQ ID NO: 408331 - DNA, 1000 bp, Homo Sapiens
ccccaggctgggccggggcgcacgtggggtcccgggggcagccgatggcgctcagcagctaggtgggcaggtcggccacaaagcgctcgaaggtcaggcagccactggccgaggccacctggcgcaggccctccagcatcccacggggcagctcccgcgtgtcggccccccgccagcgggactggctctggcgcaggtgcacgcagccgccccgcgggtcgtccaggatgtccaacagggtgcgcaggctctgcaggaaggcgcacggcagcccctccgtgctgggcgcgggcgcgggcgcgagggggaggcacgtggccccgctcagccatggcagccccagccatgggcgcccgggctcggtcccagcgtccacccgcgtccgtccccgtgcggccccacggcggggccagcccagcccacagcagtctcaacctctcgggctcaagccatttttctgcctcagcttttcgagtagttgggactacagccacgcacccctacgtgggctaatttttgtattctcgcatccagtacaaagatgctttttgtagtagccacatttctaaaaagcggtatgcaaattgagattgtcgaaaacattctaaaatgtaacagaggcacagaagcaataaaaagattcttttatcagacaacttcttccttctccgtggagctcagaggcagcttacgttgtgattagaaatgtgggcttggccaggcgtagtggcttacacctgtaatcccagcactttgggaggccaaggcgggcagatcacctgaggtcaagagttcaagaccagcctggccaacatggtgaaacactgtctgtactaaaaatacaaaaattaactgggcgtggtggtaggcgcctgtaatctcagctacttgaaaggctgaggcaggagaatcgcttgaacctaggaggcagaagttgcagtgagcagagatcaggccactgcactccagcctgaacaacaaagagtgaaactccatctcc

SEQ ID NO: 408332 - DNA, 710 bp, Homo Sapiens; identical to SEQ ID NO: 119354

SEQ ID NO: 408333 - DNA, 1000 bp, Homo Sapiens; identical to SEQ ID NO: 225086

SEQ ID NO: 408334 - DNA, 982 bp, Homo Sapiens
cgccgctttgttccgggtgcggcgagggaaggcgaggctgcggcggatcatgcccatggtgtagccgccaagcggaggcatggctgccggaaggttactgctctacactggcctctcgctagcgctctgcgccctcggcatgctggccgtggccatctgctcggaccactggtacgagacggacgccaggaagcacagggacaggtgcaaggccttcaacacccgccgggtcgaccccggcttcatttacaacaataacaacaacttgccgctccgggcgagccgctcgcgcctggaccgctgggagggcaaactcctccgggcccggaatcgccggcagctgttcgccatgagccccgcggacgagtgcagccggcagtacaactccaccaacatgggcctctggaggaagtgccaccggcagggcttcgaccccgagatcgccgccctcattcggaaaggagaaattgagcgatgtacgtacatcaaataccactactcctcagcaaccatccccaggaacctcactttcaatatcacgaagaccatccgtcaggatgagtggcatgccctacgcattgccctttcagcacaggtggggcctgggcctttcccagtgtggcacaacaaggggaggtggctgatagggagtggggggtctgcgacaggacctgggcagccagggtgggctatatcagaggaagctgagaaaacaggggatgggaagatgtcgctgagaggggaactgtcccagttccaggtgctgaaaagggagcttaatatggcagctttcttctcctgccagaaagctttccctggctccatggtgttcatggatctccagccaccctacttttaccagcaggcagggctgtgtcccattaggagccctgagccccctgctacaaagcccttggggatccagcagtcatgccccaaactcaggaagcaggagattagtaatggaggcaccacagcctga

SEQ ID NO: 408335 - DNA, 911 bp, Homo Sapiens
atggcgaccattgctgctgctgcgtttgaggccctcatggatggagtgacatgctgggatgtccccagaggccccatccccagtgaactccttcttattggagaagccgccttccccgtgatggtgaatgacaagggccaggtgctcattgctgcctcctcctacggccgaggccgcctcgtggttgtgtcccatgagggctacctgtcgcatgctggcttggctccgtttctcctcaatgcagtgagctggctctgtccctgtcctggggctcccgtgggagtgcatccatccctggcacctctagtaaacatcctacaggatgctgggcttgaggcacaggtcaagccagaaccaggagagcccctaggggtttactgtatcaatgcctacaatgacaccttgactgcaacgctgatccagtttgtgaaacatggagggggcttgttaatcgggggccaggcctggtactgggccagccagcacggccctgacaaggtgctctccaggttccctgggaacaaggtgacaagtgtagccggagtgtacttcactgacacctatggggacagagaccggttcaaggtctctaagaaggtgcccaagatcccactccatgtcagttttgttgctgttgttgaagacaccagctactctttgttgaacagtttacttcagtctggactttgaaagtagacctcaaggaagtcagggaatgagccatgtgtgcatctgtgggaggaggattccaggcacagtgaagcgcaatggtgaaaacctggaaaggcaaattgattgccttcctgtggtatcatttaatatgggggtaccagtccatggcctgttaggaaccagaacacacagcaggatgtgagcagcgggtgagcaaataaagcttcatctgtatttac

SEQ ID NO: 408336 - DNA, 1000 bp, Homo Sapiens; identical to SEQ ID NO: 295495

SEQ ID NO: 408337 - DNA, 1000 bp, Homo Sapiens; identical to SEQ ID NO: 295496

SEQ ID NO: 408338 - DNA, 1000 bp, Homo Sapiens
tgcactacccagtcatcgtgaatcctcacctctgtgtcttcttcgttttggtgtcctttttccttagcctgttggattcccagctgcacagttggattgtgttacaattaaccatcatcaagaatgtggaaatctctaatttgttggagctatggcggcggcagctgtcactgggcctagcccggggtgtggacctggggactccccagaagggcccgagggggaggctcaaggagcgtcggtggaaggcggacaggatgctgaagttttacaacggcctctcggaagtggaggcggtgggactccccgcggggaccgaacccctggaccccactgatctgaacggggtgcacttcgacccggaagtttacctagacaagcttcctagagagtgccctctggcccagctgatggatagtgagacggacatggtgcagcagatcagggctctagacagcaacatgcaaaccctggtctatgagaactacaataaacctcccagtgccaagtgtataagtgtgtccagaattggtgggttcttggtctcactgacttcaagaatgaagctgtggaccctcctggaggaattctccacgagttttgagcagcctcgggtttcccaccacctccaaatcatggaagacacagggcagagcccccgagccatggccagcccttccggcagctccgaagccactggcaagccccgaggcagggatggccggcccaggagggaggaggacgacgtccctcccgaagagaagaggctggggctgtagctggaggggggaagcgcacagcccgaggactgcgagaacggggaggacgcgccgcggccaggcagggaggagaccggcacccagacaggtggcgaccgcagaggatgatgttttgttctggagtacttcacaagagacaaggtccttggctgggcatggtggctgaagccaataatcccagcactttgagaggccgaagggggaggatcgcttgagcccag

SEQ ID NO: 408339 - DNA, 1000 bp, Homo Sapiens
ggaggtgagctgggggccccggagaatctccaacctccgccagccgcaaccgaacttggaccaagtacgtcgccccagatgggcaggaggacaccggcccaggtgcccagcgtcgaccggcagcctccgcacagcagaccttgcctgcctactgcccaggcctgcaccatgtcccatcactcagcggccggccatgatggggcccagcctctcagagtgctcttccggagactggaaaacggacgctggagctccagcctcctggcggccccctcatttcactctcctgagaagccgggagcctttctcgctcagagccctcatgtgtcagagaagtctgaggctccctgtgttcgtgtcccaccgagcgtcctctatgaggaccttcaggtttcctcctcctcagaggacagcgattctgacctggagtgagactgcaggtggcaggggctccttggcctccagttcccgtgacttggaggggactgtgggactgaggagcgcagagcagagagcacactctgtgcggtgactccgaagctccccggctgtggcgcttctgtggatgtgggagcccaggccaggcagggagcagatgcagggactctgcctcattgaattctggtgagggacgttgtagttggcgtggttctcccgaaacgcgccaggaaaagcttccgtgccagagattcgttgcctcagaaactgcgtgacgcgcaggagtcagacttccgctgggacgtcaataggaaactggggaattactgtgtatttgctgtctagatgactgaataagggaaaagttagggaaccctgagaggtgcagcccttccgctgtgccccgccctgagagcagtgtttcggacgctgggaagcgtgctgtgcgaagcgctctcggggtctttcctcagcctcgaaaactgggctctggaatgcctttgtacatatgtgtgtttaatgtgttttgaagtgaataaaattctcaaaaagatgacatatt

SEQ ID NO: 408340 - DNA, 1000 bp, Homo Sapiens; identical to SEQ ID NO: 295498

SEQ ID NO: 408341 - DNA, 627 bp, Homo Sapiens
ccacccaggtgttcgactgctagagctgagctaagcgatgcctaaatcaaaggaacttgtttcttcaagctcttctggcagtgatcctgacagtgaggttgacaaaaagttaaagaggaaaaagcaagttgctccagaaaaacctgtaaagaagcaaaagacaggtgaaacttcgagagctctgtcatcttctaaacagagcggcagcagcagagatgataacaagtttcagattgggaaaatgaggtacgttagcgttggagattttaaagggaaagtgctaattgatactagagaatattggatggatcctgaaggcgaaatgaaaccaggaagaaaaggtattgctttaaatccagaacaatggagccagctgaaggaacagatttctgtcattgatgatgcagtaagaaaactgtaaaatccgagtcatacaaacaaaacctgtacttttctagttgttttaatctgtctttttacattggcttttgttttctaaatgttgttctccaagcaattgtatgtttggattgcagaagaatttgtaagatgaacttttttttaatgtgcattattaaaaatgttgagtgaagcaattgtcacctttattaaggaggattgctttgt

SEQ ID NO: 408342 - DNA, 1000 bp, Homo Sapiens; identical to SEQ ID NO: 295500

SEQ ID NO: 408343 - DNA, 1000 bp, Homo Sapiens
tcaagccaatgatcagaaagatatgaaggactgggttgaagccctgaaccaagccagcaagatcaccgttcccaaaggtgggggcctacccatgaccactgaagttctcaagagcttagcagctcctccagccctggagaagaagccacaggtggcctacaagacggagatcattggaggggtggtggtccacacacccatcagccagaacggtggggatgggcaggaagggagtgagcccgggtcccacaccatccttcgaaggtctcagagttacatccccacgtcaggctgccgtgcttccactgggcctcccctcattaagagtggttactgcgtgaagcaagggaatgtgcggaagagctggaaacgtcgcttctttgcacttgatgactttaccatctgctacttcaagtgtgagcaggaccgagaaccactgcgcaccatatttcttaaggatgttctgaagacccatgaatgtctggtcaagtctggtgatctcttaatgagggacaacctgtttgaaataataacaagctccaggaccttctacgtacaggcagacagtccagaagacatgcacagctggattaaggagattggcgcagctgtccaggccctcaagtgccaccccagagaaacgtccttttctagatccatttctttgacccgacctggaagctccagcctttcaagtgggcccaactctatcctgtgcagggggcggccacctttggaggaaaagaaagccctctgcaaagccccctctgtggcctcctcctggcagccctggacacctgtcccccaggctggggagaagctgcttccacctggagacacttcagaggactccttgttcacgcctcgtcctggggagggcgcgcctcctggggtgctgcccagctcccggataaggcacagatcggagccccagcaccccaaggagaagccgtttatgttcaaccttgatgatgaaaacatacggacctctgatgtgtga

SEQ ID NO: 408344 - DNA, 387 bp, Homo Sapiens
atggccaagtctaagacccatgccacacacaaccagtcccgaaaatggcacagaaatggtatgaagaaaccccgatgacaaagatacaaatctcttaaggaggtggaccccaagttcccgaggaacatacgctttgccaagaggcacaagaagggcctaaagaagatgcaggccaacaatgccaaggccatgagcataggtgccaaggctatcaaggccctccttgggaagcatggtcatgcctgcatggccaagaggctcaggctgtgccggccaaaggccaaggccaagcccaaggatcaaaccaaggccgacgctgcagctccagcttcagttccagctcaggctcccaaaggtgcccaggcccctacaaaggcttcagagtag

SEQ ID NO: 408345 - DNA, 543 bp, Homo Sapiens
tataacattttatttttttcttctcagcaaggcagtttacttctatagaagggggcgccctcacagatggagcaatgccgtgaagaggatgccctgcagactcactgcccaccggctccctcccccgcatccctgcaaccccagaggcgaagatggcctcaggagtgcaagtagctgatgaagtatgtcgcattttttatgacatgaaagttcgtaaatgctccacaccagaagaaatcaagaaaagaaagaaggctgtcattttttgtctcggtgcagacgaaaagtgcatcattgtagaagaaggcaaagagatcttggttggagatgttggtgtaaccataactggtcctttcaagcattttgtgggaatgcttcctgaaaaagattgtcgctgtgctttgtatgatgcaagctttgaaacaaaagaatccagtacagaagagttgattttttttttgtaggcatgagaactagcacctctgaaaagtaaaatgatctgtgcaacatccaaggatgcaatgaaaaagaaatttcaaggca

SEQ ID NO: 408346 - DNA, 1000 bp, Homo Sapiens; identical to SEQ ID NO: 119356

SEQ ID NO: 408347 - DNA, 1000 bp, Homo Sapiens
gcagctggagcagctggcccggatccgggcgctggagcgcgagctgctgcatatgcgcgtggagcacacgcagctgctccaccgcgtgaagcggcgcttcctggaggacaaggcggccttcgagcgcgaggcgcgtcagcgcgtgcagtcactggcgcggcgcgcggagcgggaggcggtgcgcgcgcttgtggcgcacacgcaggccatcaaagcggacaacggacgcctgcggcaggagctgctgctgctgctccgccggacccagctgctgcaccacacgcggcgccagctgctggaacagcgcgagcaactgcaccgcgagcacgaggacacgcgggacctggcgcgtgtgcacggctggctgcgcaggggccccggaggcccgccgctctgggagcggccggccttctcccagcccacctcgcgccccgggtcattagccgcccccataagcccgtcgcgcgcggcctcccagaccccgtctgtggtaccgtcgcgcgcggccccccgggcctcgtccgtggtcccgtcgcgcgaggcttcccgggtcccctcgttggtgctatcgagcatggactccagggtcccatcgctggccacttcaaaggtgggatcccggatgccatccctgaccgcttcgcgcgcaggctcccgggccctgtcgctggtgcagtcactcgagggctctgggatctcttcggggtcctcaccgagggtgtcctcacaggacactctccgctccacgaagtctggccccaagcttctctctggcctgtcccgggatcgggatccggctcttctccccccacagtcggaggacagcgtgaacgctgaagctgcggcagaagcctccccggtggggccctaccgcgagccggcaggctcagagcaagcccgggcactggcgggcgcggacgtgcgacgaagcggcagctggcagctgggccgctacggtctgtggcgctcagcccgggcttccctctccccggggccctga

SEQ ID NO: 408348 - DNA, 960 bp, Homo Sapiens; identical to SEQ ID NO: 295502

SEQ ID NO: 408349 - DNA, 1000 bp, Homo Sapiens; identical to SEQ ID NO: 295503

SEQ ID NO: 408350 - DNA, 1000 bp, Homo Sapiens
tcacctgacctctcaccaaccaactaccacttcttcagtttgtctcttccagaatcaaagctataaaactacaaatggttctccaaatggagccccagatgcagtccatgactaagatctactgcggacctctggaccggcctgctagcccagctcccacattaatgacatcaaaggcacccctcccgaggaaatctcaactgcatgacacctactacgccccaattcagcaggaagcagttagagtggtcgttggccaacctccccaacagcacttgggttttctgttgagatgggggactgagagacaggactagctggatttcctaggccaactaagaatccctaagcctagctgggaaggtgactacacccacctttaaccactaggcttgcaacttagctcacacccgaccaatcaggtagtaaagagagcttgctaaaatgctaattaggcaaaaacaggaggtaaagaaatagccagtcatctatcgcctgacagcacaaggggcgggacaatgatcaggatataaactcaggcattcaagccagcaatggctacccactttgggtcccctcccattttatgggagctctgttttcactctattaaatctttcaactaccaaaaaaaaaaaaaaagaaaagaaaaacaattaacttttttatatatcagttaaattcatccatgatgttttttatgttttctgtattcttactggtcatttttctatttgttctatcaagtatccaggaatatgtgttaaagatgtccacttcaattgtgaatttcttgagttgttctttcagttttgttctttttttaccttatgcattttgaagttgtattatttcctgcatacaaatgtagaattgtggtgtcattcttttggagtaaaccatgatcattactggcatgacttacttacttactatctatctagacatgttgattgcttcaatttctactttaatcttaataaaaatacaccaacttttt

SEQ ID NO: 408351 - DNA, 1000 bp, Homo Sapiens; identical to SEQ ID NO: 295505

SEQ ID NO: 408352 - DNA, 1000 bp, Homo Sapiens
caaccctgcagtgggagcaggggcccatcgcacatcctaggcacagatgctaatgtaggcactgcagaccataaaggagaacagcaagaggcccccagcaaacatccacagatggccctggacatcagccacattctgagaaacatgtcatgttctgggagggctaaggcatcaaccttaccctgtaggaattctagtgactatgttgccaccatcttggagctccatgccctcatagtgtaatggcaccagcagatctgcctgtgcatggacttcctgtactacctcactcctgaggggagatgtttctgcagggcctatgacctggtgcacaactttagacaccatcatcctggagcagcactgcaccctcactagccagagtgttgacatcctcaaggccagggccacattcaagactttggacttcattgatgcacttgtgctgagcaagcttatctgatctcctgggatctctactaggatgctggcagcccagccagctggtctggccctggacgtgccttcaggtgctggttatgctttatgacctgtgttgtggtgagtgataagcagcacctgcttctagcttcacttttgggccagatttcatccccaccgtggttcttcattgcagctgctttctgctccctctatggaccctgcatggaattgccccatgtttctgtttgggcaccactgaggaaggaagcatgaaggatgcacagatcctggtcagagtaaaacattccatgggaactcgggctgtgagaaacatcctaaccacctgactgcagaaacatccttatcacatcctgctgggcaagggcccaacagcctgacttcaggaacatccttatcatcttctactgagcagcaagctatactgtccagagccctccctcccagccccatgattaccccagcctgtaagtggcagtgggcgctgacactaagctggtttccccctccgcagggttttgctagtaataaacctgtg

SEQ ID NO: 408353 - DNA, 846 bp, Homo Sapiens; identical to SEQ ID NO: 295506

SEQ ID NO: 408354 - DNA, 1000 bp, Homo Sapiens
caaggtgcactccctgatgacctccaccaccaacggcattaagaaagtcctgaagaagcacagtgatgactttgagatgacgtcattcctgttatccaacacctgccaccttcttcactgtctgaagcggtacagcggggatgagggcttcatgactcagaatacagcaaagcacaacgaacactgccttaagaactttgacctcaccgaataccgtcaggtactgagcgacctttccattcagatctaccagcagctctttaaaattgccgagggtgtgttacagccgatgatagtttctgccatgttggaaaatgacagcattcagggtctatctggtgtgaagcccactggctcccagaagcactcctccagcatggcagatggggataactcataccgcctggaagctatcatccgccagatgaatgcctttcatacagtcatgtgtgaccagggcttggaccctgagatcatcctgcaggtattcaaacagctcttctacatgatcaacgcagtgactcttaatgacctgctcctgcggaaggacgtctgctcttggagcacaggcatgcaactcaggtacaatataagtcagcttgaggagtggctttggggaagaaaccttcaccagagtggagtagttcagaccatggaacctctgatccaagcagcccagctcctgcaattaaagaagaaaacccaggaggatgcagaggccatctgctccctgtgtgcctctctcagcacccagcagattgtcaaaattttaaacctttagcctcccctgaatgaatttgaagaacaggtaacagtggcctttatacaaatgatccaggcacaactacaagagcagaatggccctcagcaactgctattagatgccaagcaaatgtttcctgttttgtttccatttcatccatcttccctaaccatggagtcaatcccagcatgtctcaatctggagttcctcaatgaagtagacgcatgtttagtctga

SEQ ID NO: 408355 - DNA, 1000 bp, Homo Sapiens
acagctgaatcacgtagaatttgaagatcaagatgatgaagccagagttcagtatgagggttttcgacctgggatgtatgtccgtgttgagattgaaaatgttccctgtgaatttgtgcagaactttgacccccattaccccattatcctgggtggcttgggcaacagtgagggaaatgttggacacgtgcagatgcgtctgaagaatcatcgctggtataagaaaatcctcaagtcccaagatccaatcatattttctgtagggtggaggaggtttcagaccatcctgctctattatatcgaagaccacaatggaagacaaaggcttctaaagtatacgccacagcacatccattgtggagcagccttttgggaccctatcactccacagggaactggtttcttggcaatacagtctgtcagtggcataatgcctgattttcggatagctgccacaggagttgtccttgatctggataaatccataaaagttgtgaagaaattaaagctaactggttttccatataaaattttcaagaacacttcatttattaaggtctgtatatctggaatgtttaattctgccttggaagtggccaaatttgaagatgctgtgattcgaactgtcagtgggataagggggcagatcaagagagcactctgagctccagaaggagctttccaggatagctttgaggataagctgcggatgagcgatattgtctccatgcgaacttggtatcctgtttccatcccagccttctataacccagtaacatctttgttgaaaccagtgggtgagaaagacacctggtcaggaatgtggaccacgggccaactcaggctcgcccatggtgtcagactaaagacaaacaaggactctctgtataagggagaaaagatcttctacacaatggattggacctacataaccttatgtaccagagaggaaaacatcattctcatgagtcgcaaagctttcttcctcttgtcaatatga

SEQ ID NO: 408356 - DNA, 741 bp, Homo Sapiens
atgaagctgagcatctccttcccagccactgacagccggaaactcattgaagaggaactcaaacttcgtactttttatgagaagcctatggccacagaagtagctgctgattctctgggtgaagaatggaaggattatgtggcccaaatcagtggtgagaactacaaacaaggtttccccatgaagaagggtgtcatgacccatggccgtgtccgcctgctactgagtaaggtcctcttacagaccaaggagaactggagaaagaaagaaagaaaatcagtttgtgattgcattgtggatgccaatcttagcattctcaacttggttattgtaaaaaagggagagaaagatattcctggacagactgatactacggtgcctcattgcctggggctccaaagagctagcagaatcctcaaacttttcaatctctctaaagaaaatgatgtccaccagtatgttgtaagaaagcccttaaacaaagaaggtaagaaacctaggaccaaagcacccaagattcagcatcttgttactccacatgtcctgcagcacaatcggcggtgtattgctctgaagaagcagcgtactaagaaaaataaggaagaggctgcagaatacactaaacttttggccaagagcatgaaggaggctaaagagaagccccagaaacaaattgccaagagatgcagactttcctctctgtgagtttctgcttccaagcctgaatccagtcagaaataa

SEQ ID NO: 408357 - DNA, 1000 bp, Homo Sapiens
ccaggctggcaccgcccagagggacttccatctccttgtgctcacccctccttccgtgcttggagccggggccgctcaggaggtgctaggattggccggtgcagacgtggagctgcagtgttggacctcaggggtccccacgccccaggtggagtggaccaaggacaggcagcctgtccttccgggaggccctcacctgcaggtccaggaggatggccaggttctcaggatcaccggcagtcacgtgggggatgagggacgataccagtgcgtggccttcagcccagctggtcagcaggccagggacttccagctccgagttcatgcgccccccactatctggggctccaacgagacaggcgaggtggccgtcatggaggaccacctagtgcagctcctgtgtgaggctcgaggagtgcccaccccaaacatcacctggttcaaggacggggccctgctccccaccagcaccaaggtggtctacactaggggcggtcggcagttgcagctggggagggcccagagctccgatgccggcgtctacacctgcaaggccagcaatgctgtgggggccgcagagaaggccaccaggctggatgtttatgtcccacctaccatcgagggcgccggtggaagaccatacgtggtgaaggctgtggctgggaggcctgtggcgctggagtgcgtggccagaggccacccgtcccccaccctctcctggcaccacgaggggctgcccgtggcagagagcaacgagtcgcggctggagacagacgggagtgtgctgaggctggagagcccgggggaggcatccagtggcctgtacagctgtgtggccagcagtcctgccggggaagccgtcctgcagtactccgtggaggttcaggtgcccccacagctcctggtggctgaaggcttgggacaggtgaccaccatcgtgggacagcccctggaacttccctgccaggcctcaggctccccagtacccactatccagtga

SEQ ID NO: 408358 - DNA, 1000 bp, Homo Sapiens; identical to SEQ ID NO: 119357

SEQ ID NO: 408359 - DNA, 1000 bp, Homo Sapiens; identical to SEQ ID NO: 295509

SEQ ID NO: 408360 - DNA, 923 bp, Homo Sapiens
acagtgcttgttcggggcgctccgctggcttcttggacaattgcgccatgtgtgctgctcggccagcggcggcggcggcccagtcggtgtatgccttctcggcgcgcccgctggccggcggggagcctgtgagcctgggctccctgcggtgcaaggtactacttatagagaatgtggcgtccctctgaggctccacggtccgggactacacccagatgaacgagctgcagcggcgcctcggaccccggggcctggtggtgctcggcttcccgtgcaaccagtttgggcatcaggagaacgccaagaacgaagagattctgaattccctcaagtacgtccgacctggtggtgggttcgagcccaacttcatgctcttcgagaagggcgaggtgaacggtgcgggggcgcacactctctttgccttcctgcgggaggccctgccagcccccagcgacgacgccactgcgcttatgaccgaccccaagctcatcacctggtctccggtgtgtcgcaacgatgttgcctagaactttgagaagttcctggtgggccctgacggtgtgcccctacgcaggtacagccgccgcttccagaccattgacatcgagcctgacatcgaagccctgctgtctcaagggcccagctgtgcctagggcgcccctcctaccccggctgcttggcagttgcagtgctgctctctggggggttttcatctatgagggtgtttcctctaaacctacaagggaggaacacctgatcttccagaaaataccccctcgagatgggcgccggtcctgtccatcccagtctctgccagaccaaggcgagtttccccactaataaagtgctgggtgtcagcagaaaaaaaaaaaagaaaaaaaacaaaacaaaacaaaaacaaacaaacaagcaaaaaaccaaaa

SEQ ID NO: 408361 - DNA, 1000 bp, Homo Sapiens
gacgccgcagtttccaccgcagggagagttaccttcaggttcagggacctctcctgatctctcctccccgcagactcaccccagtcgtggagaggccggctgtgggagagctggacgtgccttccttgaagaaaatgcagagcatggtgtggggaaagaggggggtcaggcccagctgctcaggagctgccgttagagggcccctaccccggggcactctgggaaggaaggtggcccaggagaagaaatccctagagggtgcaccagaactggccctgcggggagcctttcctgcctgggggcagagactttcagcagttccacctgatccggctagcttcccgccagtgtctggcgtggggctcctggggaagtccgtgagacccaaggagcccaagcacagcagccctgggaagaaacctgcaggaaggaagaccagggagtcccaggctgcggccagagaagataatgacccaaatagagatgaggtcccaagggcccaacttcccacacagaagccagagctgatttctctgtccgtgcgtcgtggagaatacagcagtggtgatcccaacatcagagctccccaagtactaggaacctcacagccctcggcctttaccttgagacgcctggtgcccagatgccatgcatcctccggtgactggcagccacctgtccatcccccaagaccggaaaggcagcagcagcccccgggagcccagggctgtcctcggtgcatccggctgcagagggaaattgaggaccttacacagcagctagcggccatgcagttcctcactgacaagttccaggacctttgaagttggagccagcatcttcctacaagatgaacagctgccacctttggagctccggagctgcagccaagcgggttccctccatatcctgttcagccagggcttcctctcttccgctgcatttgcccccttcccaacgcagttcaaagcaatttgaaataaagtcgttctcatattct

SEQ ID NO: 408362 - DNA, 1000 bp, Homo Sapiens; identical to SEQ ID NO: 295513
  misc_feature (1)..(57): n is a, c, g, or t

SEQ ID NO: 408363 - DNA, 852 bp, Homo Sapiens; identical to SEQ ID NO: 295515

SEQ ID NO: 408364 - DNA, 939 bp, Homo Sapiens; identical to SEQ ID NO: 295516

SEQ ID NO: 408365 - DNA, 1000 bp, Homo Sapiens
ctttgaggaatccattctctttgaacatcagaatcccttcatttacaacagagaacacatccaggggaaaaaccttatgaatgtcatgaatgtggaaaaaccttcacccagaagtcagcccacacaagacatcagagaacacacacagggaaaaccctatgaatgtcacggatgtgggaagaccttctataagaattcagacctcattagaaatcaaagaattcacacaggggagagaccttacagatgtcatgaatggagaaatccttcagtgaaaagtcatcccttactcaaaatcagagaacacacaaaatccgacctcattaaacatcagagaattcacacaggagaaaaaccttatgaatatgggaaatcttatgcatgtattcaatgtggaaaatttttctgctgctactacagtttcacagaacatctgagaagacacacaggggagaaaccttttggatgtaatgaatgtgggaaaaccttccatcagaagttggccctaattgttcaccagagaactcatataagacagaaaccctatggatgtaatgaatgtggaaaatcattctgtgtgaagtcaaaactcattgcacatcatagaacatacacaggggagaaaccctatgaatacacacgggagaaactttttgggtgtaatgaatgtgggaaaacctttcaccagaagtgggccctaattgttcaccacagaactcatataagacagaaaccctatggatgtaatgaatgtggaaaatcattctgtagtggaggagttagacctgcattgtgggatgagaggagttgtggctatgtgtctgctggcaccaagagggctgagggctgctgtgatcaggcagttcactgtgcagtgaaaaacctccagagcaacatgcagcagccctgtcatcaccctgtgatcacccagatgacagttcgcacacctgtgaagccaactataaccataactggagcccaggccgaagctttttgctga

SEQ ID NO: 408366 - DNA, 1000 bp, Homo Sapiens; identical to SEQ ID NO: 295519

SEQ ID NO: 408367 - DNA, 1000 bp, Homo Sapiens; identical to SEQ ID NO: 295520

SEQ ID NO: 408368 - DNA, 1000 bp, Homo Sapiens
cagctttggagcttaccgtggggatcaggaaggtcaatgcccagccctcagcaagaactgccagcttcttttggattcctctctaggctgcccaccaggtcccctggagcattcacaagactgctggattgaccacctgatccccgtgcgcccaggcaagagccattgcagtacattgagctccatagagacagcaccggggaaagtgagagtttcagtcaacttctcagagttttctaagaagtgctcagagagaggaaaatttgaagatatggcaaaggcggacaaggcccattataagagagaaatgaaaacctatatccctcccaaaggggagacaaaaaagaagttcaaggatcccaatgcgcccaagaggcctccttcagccttcttcctgtacttctctgagtatggcccaaaaatcaaaggagaacgtcctggcctgtcctttggtgatgttgcgaagaagctgggagagatgtggaataacactgctgcagatgacaagcagccttatgaaaagaggtcggcgaagctgaaagaaaaatacgaaaaggatattgctgcatatcgagctaaaggaaagcatgatgctgcaaacaatggatcgcactggcagctctttcttgcatgctgccctgaggaccagaggaggctggtgccacagtgccccgctaacgccagagcaatagcttgtaaaacaccggtatctttccctcctctctccttccttagtgcaaaggagggcagcgacttgaatgcggtaggccgccctctgggccctctcctgtctgggttgcagctggcgtttcgtgtcttggcagtaacactggcgtcaggactgtcaccggatggcctgtttttcagaaggctacccccatacaaccgagtggacacgagttttcaaaaatatttatttgcttatctgcaaggcaggagaggagggaacaaagtgatcgaggacaaaatcaattactatttttcatctttgacaaagtaa

SEQ ID NO: 408369 - DNA, 1000 bp, Homo Sapiens
tgtattggtggggatggaagaggaagactggttcattggagaggaggttcagaaaaaatgagggaaactcaacctgcaataccccatttctcgggcaataacaaccaactgggacaacatggagaagatttggcaccactccttctaccaggtgctccacgtcgccccagagcagtaccccatgttggtgacggagccgtctttgaacccaacacccagcaaagagaaagtcacacaggtgctgtttgagattttcaacatacctgccctgtatttagctaaccgaggagtcctttctctgtacgcctctggccagaccttcggcatgactgttgaatctggagaaggaatgacacacttcgtgcccatcgctgatggctgtcctttgcatcagtcaaccttccaggtggacatagcgggccaggacctaacctcgtacctcctgcaactgttgaaagacaatgtgcaattattggtgggcacaggggatcgagagtacatccgggacatgaaggagaaatgctgctatgtggctttggactttgacaaggaaaagatgaaaactgattcaccttcatgccaacagaaatatcagctgcctgatggccaagagatcaccgttgggcaggagagcttcttctgccccgaggtgctcttctagtcaaaactcatagggaaaaacacccctggcatccacacgaaggccatccagagcatcacttcctgcaaccccgacctccagaaggttctctttggccacatgctactgtccggagggacgggctcctgccccggcttgcgattccggatgcagagagaaatatctgagctggtgtcccctacagtttatgtgaaggtggccacctgtccgtattctgtctatggagcttgggtaggtggctccatcttgtgctcactctccacgttcaaggatatgtgggtcaccagcaaggagtacaaggagatgggctcttccatcatcagtagaaaaagcttctga

SEQ ID NO: 408370 - DNA, 525 bp, Homo Sapiens; identical to SEQ ID NO: 119358

SEQ ID NO: 408371 - DNA, 1000 bp, Homo Sapiens
ggccgcgatggccccgcgcgcgggacagccggggctccaggggctgctgctcgtggcggcggcgctgagccagcccgcggcaccctgccccttccagtgctactgcttcggcggccccaagctgctgctgcgctgcgcgtcgggagccgagctccgccagcctccgcgggacgtgccgcccgacgcgcgcaacctcaccatcgtaggcgccaacctgacggtgctgcgcgcggccgccttcgccggcggggacggggacggcgaccaggcggcgggcgtgcgcctgccgctcctgagcgcgctgcgcctcacgcacaaccacatcgaggtggtggaggacggcgccttcgacgggctgcccagcctggcgcttcgcctgctgggcctagcgggcaacgcgctgagccgtctgccgccagccgccctgcgcctggcgcgcctggagcagctggacgtgcgcctcaacgcgctggccggcctggaccccgacgagctgcgcgcgctggagcgcgatggcggcctccccgggccgcgcctgctgctcgccgacaaccccctgcgctgcggctgtgccgcacgccccctgctggcctggctgcgcaacgccacggagcgcgtgcccgactcgcggcgcctgcgctgcgccgccccgcgggcgctgctagaccggccgctactggacctggacggggcgcggcttcgctgcgcggacagcggcgccgacgctcgcggagaggaggcggaggccgccggcccggagctggaagcctcctacgtgttcttcgggctggtgctggcactcatcggcctcatcttcctcatggtgctctacctaaaccgccgcggcatccagcgctggatgcgcaacctgcgcgaggcgtgccgggaccagatggagggctaccactaccgctacgagcaggacgccgacccgcgccgcgcgcccgcgcccgccgcgcccgcgggctcccgcgccacctccccgggctcggggctctga

SEQ ID NO: 408372 - DNA, 312 bp, Homo Sapiens
atgttattcacaaaagaaaattactttttcaaagaagacactgaacctgcccttgcaaaggtgatgcttccagtttgtgaagaccgccgccgcgccgccatcatggacaccagccgtgtgcagcctatcaagctggccagggtcaccaaggtcctgggcaggaccggttctcagggacagtgcacgcaggtgcgcgtggaattcatggacgacacgagccgatccatcatccgcaatgtaaaaggccccgtgcgcgagggcgacgtgctcacccttttggagtcagagcgagaagcccggaggttgcgctga

SEQ ID NO: 408373 - DNA, 1000 bp, Homo Sapiens
gtgcgggatccagatgagcagggctcttggcctgcttcctggggctgtcacaccaggagccgtgactcagggcctcccccacccaggttctgggcggcagcagggagtcggcctgtgcaccacagtgggaggggagggcaatttggagccagcgggaaaggcacccatgtcagagaggagctgtggggcccagcagtgcgggggtctgggagagcccctgggtgcgggtggaagcagccacactctgtctgatgggccaggcggctcccaggaggtgctcctcggttgcctgaacttatctggcttcatccccctctccctgccccctccagcccaagtgggactgacatgcgtttcagacctgttggctgctgcaagaacacgccaggtatttctgcctgtcacttattatctggttgagctggtggcgggagtcccggcccatgtgtgttaccagaggctgagtgatgaacagaagcagcacttgagccagactctgaccaagaactgcgggcaggctagagccacacagatccccgcctcagtagaccggctgcagcaggagacctaccctgcccccaggacacccagcataatctccttaaaggacctgggtgactgcagttcaagtgctacggatgcaatagctcagcgactggcagcgcagcacgtacctgctgtcgtgggaggtgagagccaccagtgcccgacagcggctgcaaggcagtggtggcgctctgcagccagccggcccacccctccaacatctgcaagggggtgggaggctgcctcaccaagctacctgctactcatgggggcgatgggcatcagggtggcctgcctggagtctctgctcctccatggtcactgtggaatggctcctgatggcgctcaaccccttgccctgttttctcccctgcggtccactgagccagccctgcggccgccaagtctcagccaggagctgactcagaaacctcataagaagctgaaggcatga

SEQ ID NO: 408374 - DNA, 813 bp, Homo Sapiens; identical to SEQ ID NO: 119359

SEQ ID NO: 408375 - DNA, 1000 bp, Homo Sapiens
ggagggaggctgcctcaccaagctggagcagttcctggccgaccacctgctgcttatgggggcagtgggcatcggggtggcctgcctgcagctcctgcgaatccaccgagtgcctgagaccatagcttctgtgcccacccaggcagagaccctcggccccctctcctccatttctgagcccccatggccagatcctgggcagggaaatgatcctttcaggagacaaccagagcccctcaccaggaacgggggcacccgtggactacgggagggtggcgccccaacagccaacaagagccttgtcagccaggcaggcagcatgatgccattgctgaagctgtgcctttggtggctgctggctggcctgccagctgccactacttcccagcaagtgctgatgcctcatgtcagccccaaagaccaagttgtcattgctgcctctggatgccaggactggcaggacccctgtgtcctctccacgcattctgagcgaaggctgggaccccacagctccttcattctcacagccatagaggcgggggccagggaggagggagaactggatggtgcttccacttccacatggagagacatgaaggggcagaggcatcttggtcaaagctacccatttccccagagaaacatgtccacagtcacagagctccttgtgggccttcaaggccagctgaagccccacctcctcctccaggcctgccgaccccctattgctctgcagtggctgcaactgtctgtacccctcatcagccttagagcattctcccaccctgccagcacttcccatgatctgagatgtccgtcctccttcctcttcaactttttctccagcagtgagttcctcctcctaactcaggcttccaggaaggatatccttggcttctcagacctgaacctgcctcgaatactcatgaggacccaggagctactcctcacctcccacttctcttctatcctgtcagataaccaaggcacggccaactga

SEQ ID NO: 408376 - DNA, 1000 bp, Homo Sapiens
tgaggaagaaaacaggactttgggctgcggaaagtgtaagtccttgcttctagccatgtggtttctcatcagagttgttggggcgttctccctacaggtgtcacttaaggagatcgtgcaggagatttacccggtactcatggtccatgaagacatgtgtcactgcacctgcttctcactgcacctggacagcaacatgccaaaccacttcccagggctgcgaagcactgaggagctgcaggagggctcagggctgtgccactttcagtgcctaaaagtgcctagcatgagcaactggaacccacttcctggtaactgcaagatgcaaggggacctcatgtacctctttgcaattacagacaaagaccagaagggcagcatcactgcatccacgtggggctcttactggatccatgcccacttcctccttgtaggtctacagcctatcactcaaccccaagcccaccagcccctgcttcctaagccattccccactggagctgctcaagtacagcagactgaatgtcacaaaacactttgtcatgccatgaaagaaaaggtccagcaccacccattctcccaggtcaccactccattccaggtgtgcagctggacagcttcccaggcagaggctgtcatggactccatgcacacagagaatgcctaaaccttgaggctggactatgaggagaacattcctgaacaggtgcatgcagcctggtcctgccctcagtgggaacccccttcctcttggttggtaagaaaaattgctcgaagatgccctaaactaactcctaacatccaaacacagcctgacagtgtagctgcaaactttactcttgatccatgggtaaaagtagctctcggctttgcagaagccttctcttggtgctgcctgccatgggacagaaaagaagcacctgtgagcaagagccatgcactcaatataccactgctgactcctaagtgcccagaatttcatctagagaagtacctttag

SEQ ID NO: 408377 - DNA, 1000 bp, Homo Sapiens; identical to SEQ ID NO: 295521

SEQ ID NO: 408378 - DNA, 1000 bp, Homo Sapiens; identical to SEQ ID NO: 225088

SEQ ID NO: 408379 - DNA, 1000 bp, Homo Sapiens
aattaaaatggaggctggagtgaagatgaagacagaggctggagtgaagatgaagatagaggctggagtgaagatgaaaatagaggctggagtaaggatgaagatggatgctggagtgaagatggatggtggagtgaagatgaagatggaggctggagtaaggatgaagatagaagctggagtgcagatgaagacagaggctggcgtgaggataaagatagaggctggagcaaagatgaagatggaggctggagtgaaaatgaagatggaggctcgagtgaagatgaagatagaggctggagtgaagatgaagaaggaggctggactgaagatgaagatagaggctggagtgaagatgaagacggaggctggagagaagatgaagataggggttggagtgaggatgaagatagacgctggagtaaggacaaagatggaggctggagtgaagatgaagatagtggctggagtgaagatgaagatggaggctggagtgaagatgaagatagtggctggagtgaagatgaagatggaggctggagtgaagatgaagacagagattgtctggaagcccaataggatagcccaagcagcagcccccggaggagccagcactctggctcttgggaccgacaggtcccatcctggcagcactggacaaagctgtgatttggagaactcgaaaactaagacgacacttaaatgggctaaagaacgtggaagcaagaaggcagaattcggggtctcttctgctaatgaggagtctgggaacagtcagcttgctcctgaggaatccactcgatcctgcagatttattatgcccagtaggaaagaaagagccaacgatcatgcagggcaagccaggtatgtggacaatgccttcgagggtttctcatatcctcagatatcaaataggactttgatctgtgatggcaaagatcggaagggagggaatacggctgctgcgctccacggcaccaagcagtaccctttaatgtga

SEQ ID NO: 408380 - DNA, 912 bp, Homo Sapiens
atgggcatctatgagcccctctgtgcactgggcttcctggcactaccctccctgtggaacctggccggctgccaggagaagctcagacagcccagctgcagcccctcctcaccagcgacccctgggccctttgcctcggggccaggcaagcggagagcagagagcaacagcccagatgacacacatgtggagcaggggcagaggagagctgggcagtggctgcaccagccaggaagcagatcctgctccgccgggatatcagactatgtgggctctgcagcattcacgatcctacactcccactctggggtctgccccgctcctcctgtgcccaagaacctcctcctcgtctcctcctctgtcacgcagctggtgcagcacaccaggcctgcactgaaatgcatcggggagcaaaagggaggctcctactggactcatgtacagaccatgtggacatccaagaagggtctgcgagtctatgccaatgggaccctgagcacctgtgacatgagaaggcaagtgtctcatgcctatggggaccctgatgtcaatcttttgagccctcacgggggccacaggggcagctttgggaagggccgttcagatgtgctccatgtggactcctggctccgtgtgctgcagccgctgattgaggctgggagaggcggtctgagacgcgctttagaagttgacctgctgctctgcggggactcggtgcgggagacgagtggaggctgctgcgtcatccaggtcgggtggcctctcgtgccctgcccatgtagcgatggagcttttgcaggggatgtcctggagaatcaaggggttctcggagacatcgcagctgctaaatgccaaatgcagaacctgggctgtgggtcccggcctggcttcgtgtgccgcgctttccactga

SEQ ID NO: 408381 - DNA, 372 bp, Homo Sapiens
atgagacaggtgcacctcgagagcagccgccgcccacactgcaggccaggcattggccggagccctgcgccagagacttcggctactttggggtggcgcatcctgaactcctgtcactggggcgcctgtgacccacccgggacccgtgacccactcgggacccgtgacccacccgggacccgtgacccacccggggcccgtgacccacccgggacccgtgacccacccgggacccgtgactcacccggggcctgtgactcacccggggcctgtgacccactcgggacctgtgacccacccgggatgcctgtgacccacccgggacctgtgacccactcaggacctgtgacccacctgagacctgtcctgtga

SEQ ID NO: 408382 - DNA, 1000 bp, Homo Sapiens; identical to SEQ ID NO: 295523

SEQ ID NO: 408383 - DNA, 1000 bp, Homo Sapiens
ccctcctaacaaagatacgggtcaggaggatgtcctgctgcacgctcaggcggtcgctcctcctttccacaagacccaggcccgcaccgttcgccccggggctcccatggcccccgacctccagtctccagcaacgatggatccccacagaccaggcagggggcgaagggcgcacacccacctcccgggagtcagtgggaataaccccgggcgctcccaggatacgtcccacacccggagccgcacgggcccatccccgccaggtctgggcaggcagccggagcccgggaccccgcctcccccgcacctagggtcccggccgagctcgaccgctgaggtcccgttcccactcccactcccagcgcctccccctggcggcggcggccgcccgggacgcccctcccctggcgctgcctcctcagagggtgacagccgcctggccggggccgctccctgccaggcccggcgcagggcagcgactgagctactagggcgtctggtccggctgctactccgccgccgccgccgccttctcacaaccacaacaacactgcagcagcggccacacagagtgcactcccgacgccgagccgggcgacgagcggagacgcgcgcgcacgctcgggcgctgaagccggtgtccgggaaagggggcgggtctccgggaaagggggcgggtctccgcctgttggacgggggcggggcctggacaggtggtcacgccccaggagataggcggggctgcagcccagacgaataccagcggctggggagaggctcgcgaaaaagaccagcggaggcagaagggctagacagatgggaattgggcgcaggaaaagcgatgacaaaaaaaaatctggaagataaccaaagtaagtcaattaccagtgcccacggcaggaagagctctgatgccagggttgacagcacgctggaaaaccggaggagtgtttgcatttctggggcctcaagtaatgagaagttcttccaagaacactga

SEQ ID NO: 408384 - DNA, 840 bp, Homo Sapiens
atgtgtgccccacctctccaagcctccaccgtacatccgaagtccccaccccgtgtcccaagcccccatcctaagcccgcactcctcaccctaagtctgcacttcaagccccaagaccgcaccgcggccctgagcccacaccctcagtctcctctgcgtgccccaaagcctccagatctccgcctcgcgccccttgggcaggagcggctgcaggggccctgggtccgaggatccgcgggagcggtgcgggagacgtccgcgataacacacattgcggcgccttggtttccccaaatctggtatttattactagaaaaggaaggagccgtggccatgccagaagccgcgggtgaggtgaacattgcaaggcaccggccttcgccttctgagctgctcactccatacaggtggaggccctgcttggggcctgtgttgctgggggcctgcgcgcgggacgtggctgtccgtgctctttatcttcatccccgtgcactgtgcctaacacttagagcatcctctgtggaccgctggcgtacgtgtcggtgcagggctgtcctgagggctcctgttccacctggaggagccaaaaattatgctgagagtgatcacagtgaagacgaggacaatgacaacaatagtgccaccacagaggagtccacgaagaagaacaagaagaaaccaccgaagaaaacgtctcgttatgaaaggacagataccggcgagataacatcctacatcactgaagatgatgttgtctacagaccaggagttccattggctatctcttattgttactccatcgctgttgacgtggttaccagttcaccttttgagtgctaa

SEQ ID NO: 408385 - DNA, 1000 bp, Homo Sapiens
cagcagcccccaagccagccccgcgctaggagccgccacccggcgactcaccttaatgttgcggtggggcgtgagccgcggctgtggctcctggttctcctggaagatagaagccagtaacttcggtttggccttgaacccggacatggacatcttcccctcacctccggcgggaggggcgcggaaaaggagcctgtcccgagccgctgtcatggccgcgaccaccaggcggggcccccggccgagctctcgcggctccacctctccccgccgccgtgaccctcgtgggagcgcggctggaaaatggcaaggggcaccgaggacttggcgggagctatgtggcggcctgcggggctgctccctttataaccgactccaccgacaggaggcgcggctcccgtcaagccgcagtttaaaagggcaacagcaccactgcccccgctaccgcctgggaaagggctgcccctaccccgccccgctggagcggcaaatggaaaccacccagaaccttgtggactcctacatggccattgtcaacaagaccgtgtgggacctcatggttggtgtcatgcccaagaccatcatgcacgtcatgatcaacaacaccaaggagttcatcttctcggagctgctgtccaacctgtactcacgtggggaccagaaaacgctgatggaagagtcggcagagcaggcacagtggcgcgacgagatgctgcgcatgtaccacgtgctgaaggaggcactcggcatcatcggcgacatcaacacgaccaccatcagcacgcacatgggggcccgtggacaactcctgcctgcaggtgcagagcgtccttgccggatgcagcttcatcatcctggttcaagcagtgtttcttctctatcaggcctggtggctgttgttttgggctccccaaggcgagaggcggccctggacaagtgggttggaagacacggtgaccagagaagagggaagcccaaaggggctgagcatcagtcttaa

SEQ ID NO: 408386 - DNA, 1000 bp, Homo Sapiens
gggccctacccgcagccctgactccagcccagtgcccgccccgcgctttggtcaagacttggccttcatcgggagtcaccttcccccagatccccagttcaaaggttttggggggccgccaacccagctcctcctcgccccaccatgtcccctcccccagtgctggggcaccctcccctcctaccgtgggcaggccaggtggactatcgtggaagcctttctaaggctggctgaggcggctgggtctggccaggtggttggctgctgccccctcattagcggcccgctggggttgccgtcacttagggctggttaccaggcaaccgcgtccaaggagggcttggctctggctcagggctggcacagcggcgctgctgctgaggcgggaggtgagcagccaagcaggcccatctccaagaccacccagtgccacgtctgctggctgcagcaggcctggaatcctcaggacaggccaaccttccagaggcccacagggccttcctgtgacccacacccccagtgccatgtgctgacatctgactgcagccaccagggcctactgaaggctgagccacctctcatccactcctgcaagccctctggcccccagtgcaccaatggatttgaggggctccatgactggctggccctgtgctgcagacagaacagccgtgctgcaaagatggtcaatgtacctaaaacccgaagagccttcggtaagaagtgtggcaagcatcagcctcacaaagtgacacagtataagaagagcaaggattccttgtatgcccagggaaagaggtgctatgatcggaagcagagtagccatggtgggcagacatagccaattttctggaagaaggctaagaccacaaagaaggttgtgctaaggctggaatgtgttgagcctaactgcagatccaagaggatgctggccattaagagatgcaagcattttgaactggaaggagataagagaaagggccaagtgatccagttctaa

SEQ ID NO: 408387 - DNA, 1000 bp, Homo Sapiens
gcaggacgagaggctccgagagcaggaggagtggaggaaccacaagctcgacaagcagctggccgagccacagtgcagcttcgaggatctgaataacgagaacaagagcgcactgcagttggagcagcaagtaaaggagctgcaggagaggctgggcgagaaggagacagaaccagctgccagccaccagaaccaacagctagagacccagctaagcctcgtggctctccctggagaaggagatggaggacaacatctggacagtgaggaggaggaggcgcctcggcccacgccaaacatcccagaggacctggagagccgggaggccacggagccagaggcagaggccccagccccagggactgggggtgactttgtgtgtggggagagctaccaggccctcaaggaggctatggagaaggtgaagagcggctttatggacctcccgaaggagaaggtgggcaggaaggagcaggtggaaaaactagagcttggattcatccagctctctggagcgacagacggcatgagagagtacatcactgaatatgagagccagggggcagtgccaaacacgcggcaccaggagaaggaagacatcatcaggctggcccagaaggaggaggagatgaaggtgaagctgctggagctgcaggagctggtgttgccccttgtgggcgaccacgaggggcatggcaaattcctcaccgctgcccagaaccctgccgatgagcccgctccaggggccccagccccccaggaacttggggctgccgatgagcagggtgatttttatgaagtgagcctggacgatagcgaggagcctgcaccgggagcggccggggagggttctccccatgacaaccccactgcacagcagatcgtgcagctgcctcctgtaatgcaggacacccaggagcacccaggcttgcccggcaacccctgtgtgtcattcttttaccaggcagccgagaacagggagataaacatcatcatctaa

SEQ ID NO: 408388 - DNA, 1000 bp, Homo Sapiens
tggaggcgtcggcagagcaggcagaccaaggagttcatcttctcagagctgctgtccaacctgtactcgcgtgggaacgagaagacactcgtggaggcgtcggcagagtaggcagaccaaggagttcatcttctcagagctgctgtccaacctgcactcgcgtgggaacgagaagacactcatggaggagtcggccgagcaggcacagcggcgtgacgagactcgcgtgggaagaagaagacactcctggaggagtcggcagagcaggcagaccaaggagttcatcttctcggagctgctgtccaacctgtactcgcgtcggaacctgcagacacttgtggaggagtcggcagagcaggcacagcggtgcgacgagatgctgcttctcagagctgctgtccaacctgcactggcgtgggaacgagaagacactcgtggaggcgtcggcagagcaggcagaccaaggagttcatcttctcagagctgctgtccaacctgtactcgcgtgggaacgagaagacactcgtggaggcgtcggcagagcaggcagaccaaggagttcatcttctcagagctgctgtccaacctgcactcgcgtgggaacgagaagacactcgtggaggcgtcggcagagcaggcagaccaaggagttcatcttctcagagctgctgtccaaactgcacttgcgtgggaacgagaagacactcatggaggagtcggcagagcagacacttgtggaggggtcggcagagcaggcacagcgacactcgtggaggagtcggcagagcaggcacagcggcgtgacgagactcgcgtgggaagaagaagacactcctggaggagtcggcagagtaggcagaacaaggagttcatcttctcggagctgctgtccaacctgtactcgcgtgggaacgagaagacactcctggaggagtcggcagagcaggcagaccaaggagttcatcttctcagagctgctgtccaacctgcactcgcgtag

SEQ ID NO: 408389 - DNA, 465 bp, Homo Sapiens
atggacccagctgtagcctggggctacagactggcttccggggtactcaagcagctggcctctggggtagcagccccaggggactgccgcatggcccatgccgagcagaaactgatggacgaccttctgaacaaaacctgttacaacaacctgatccgcccagccaccagctcctcacagctcatctccatccagacggcgctctccctggcccagtgcatcagcgtggtaggtgcagaggggaataagaaccagactgggggaactgacgggtacagaggcccaggtgtaggcgcaggaccacaggcagtgaagcgtctactgacccaggcggctgggcagtgcctccttctcagaggccagctgctgataggcggccacgtactgctgcaggtgacccaggtaatggtctcgctgctgctgcagactcagcctcttggctcttcagctccacctgcaggatag

SEQ ID NO: 408390 - DNA, 471 bp, Homo Sapiens
atggcgctgaaagcaaagaaggaagctcctgcctctcctgaagccgaagccaaagcgaaggctttaaaggccaagaaggcagcgttgaaaggtgtccacagccacataaaaaagaagacccgcacgtcactcaccttccagcggcccaagacactgcgacgccggaggcggcctgaatatccttggaagagcacccccaggagaaacaagcttggccactatgctgtcatcaagtttccgctgaccacggagtcggccgtgaagaggacagaagaaaacaacacgcttttgttcactgtggatgttaaagccaacaagcaccagatcaaacaggctgtgaagaagctctatgacggtgatgtggccgaggtcaccaccctgattccgcctgatggagagaagaaggcatgtgttcgactggctcctgattacgatgcgttggatgttgccaacaaaattgggatcatctaa

SEQ ID NO: 408391 - DNA, 1000 bp, Homo Sapiens
tgcagatgcgggcccagtggccccgggattggtgtgcttccaaagtcctttctccactgtagcactagacccatccaagaaagggaaggggaagccactgaacatctcctcagtggatgttaaacccaaagacgaggtgatcctctacaaggacaagtgtaaggttggtggcttccaagaaagtgggacccctgaaccagggtcagagaccctgaaattgcagcagctggtggagtacatcgacatgaccaccactgaccccaacaaatgcctcatttgccaccgaaagaagttcaccggtgctgtgatgttgtggcagcatattcagatggacctggccagtcagattcccaaccttcccctgccagagaattcctgtgactttatgggtcctgagccaatgacggtggatgagaatggcagcaccagtgccatgtgccatgatgatgtttttgaaagcaccagtgtagatgaaccatgccaacaggccaagcaacacagctgcacgtggtgtgggaagaacttcttacccattagctttcttcagattcatgagcacactcacactggagagaagccttttgcatgcaacatttgtgggtgcagatggaaagagtctcaaatatttcccagggaaattctggccactttagtgaacatgggccctgttttgtggaaccaggacaccagcatgctcaatggtggtctggccaagaagaccaatgagatctctgtgatccagagtggcggtgttcctaccctcctggtttccttgggagtcagcttcaatataaataacgccactgtctccaacgcggatggcttccaattaggtatcagtgcagatatggaaaaagcaggtgctactgggagcattcccaaataccagttttctcacttcctggaagaagatgagcttgtggtcagccaaactcaaggagaacttgcatggaaggagaaatgcaaacagagtgaaatctctagaatctgctctttttaa

SEQ ID NO: 408392 - DNA, 813 bp, Homo Sapiens
atggccctagggggcagtactacctcactgagaaccactgttcagggagttagctgggtcgcagaggcaaaatgttggactacagcgtgtggggccacactgagcgatgatgaagaggagaggcatcccaacacccaccgggctaacctcttccgctggcagcaccaagcccgggtggagctcatggagcagttccagaaggagaaggaggaactggacaggggctgctgggagtacaagtgcaagatggccgagtgccagaggaagctgaaggagctggaggtgtcagagggtgccagggtggaggtggagtggctacacgaggagctgagctgggagcaaaagctggaggagatgcccaagaaaaagagcatgacctggaacgtggacacgctcagcaaaagcagtttcaggctggtgcatggagagcttcaaggacgagctggaagcctccacggagcctgtgcggggctgcgccaagctgcgcgtctagaaagcagggcttcaatgcgaaggacgcgcaaatgcagcaagatggaccccaccaaggccaagttccccatgcagcagtgtatcgacgccggcctccgggtccccaactctgaggtcagcgaggccaaggagggagaggaggagtgttcagggaccggctgctggaagctgttcccaagacaggcggggatgtcagtgcgtgacccaccccagctgcagctgccacctgtgtgcaagcccctaggcgccccttttcagaaaacaaaaatagacaccatctccccagctcctggcttcctccacttccgctgctccccctag

SEQ ID NO: 408393 - DNA, 1000 bp, Homo Sapiens
ctgccccaacgccgtggagccgctgtgggtggagggcgccgggcacaaagacatccagctctacagccagtacctggagcgcctgcccgcttcatctcccaggagctgcgcagccagagcgcctagcggccgccagggccccaaccggccggacctcagcaataaggcagcccccggacctcaccccgcgccggcccccccagggactgcattacgcttgccaggaatgcccgagatctggcacctgagcatgttgcgtggcaggcgggggagcaagcgggacaagggcggcgatgtgtcctgcacaaaggcccaggctgcagaccaactcgcctcgcagcagtcgggcgcccggctcctcgagacgcaggaccacctcagatctccagtcctgcacctgccggctgagcaaacgaggagacggggagaaaagctgtctgtcgttcctgaaggaacaggacctccgcactccaagaaggaatccggcgcccagtgggggctgcaggagcagaggaccgtggcggcagtagcaggagaggcaggaatcaagcctatggacagatctaaaaacatgaggtttccctcttctggggccccactttttggactgctgtatgatctctggaggtttgatgagtccacaccaagcaaaagtggacagcagtgttccacctgtgaacacttgtttcttggtactggtgaacgtgacattttcacgaagccacagcccatggtcactccctgcaaagctctgaacttgcgcattcccaggccaggccgtggttgtctttccaaggcggctcagcttgtgctttgcttggagagagcggagggcagcagcacagtgacagcgtctgggacctcagaccagtttccacagccacttatgaaagcagacggctccatgggctggaggaggtgggacgctctggaaagaactcgggtgcgagtgggaaagaaaatcgagctgagcagctggaagtcgaagtcgcgtgagtga

SEQ ID NO: 408394 - DNA, 1000 bp, Homo Sapiens
tcgctggtataagaaaatcctcaagtcccgagatccaatcatattttctgtagggtggaggaggtttcagaccatcccgctctattatatcgaagaccataatggaagacaaaggcttctaaagtataccccacagcacatgcattgcggagcagccttttgggaccctgtcactccacagggaactggtttcttggcaatacagtctgtcagtggcataatgcctgattttcggatagctgccacaggagttgtccttgatctggataaatccataaaaattgtgaagaaattaaagctaactggttttccatataaaattttcaagaacacttcatttattaagacagcagtgatgagcatgcccatgaactcacatgattattttggggaaaatgaaagagttgtattctttttgagtgggataagggggcagatcaagaaagcactctgtgctccagaaggagctttccgggccagctttgaggataagctgctgatgagcgatattgtcttcatgcgaacttggtatcctgtttccatcccagccttctataacccagtaacatctttgttgaaaccagtgggtgagaaagacacctggtcaggaatgtggaccacgggccaactcaggctcgcctatggtgtcagactaaaggcaaataaggactctctgtataagccaatcctgaggcaaaagaaacattttaattcactgcacattccaaaagccttgcagaaggccctgccatttaagaacaagcccaagatcctcacactgctggatgctctgagtatggtgcacagtcagaagatgaagaaggccaaggagcagcggcacctgcacaataaagagcacttcagagccaagcagaaggaggaggaggagaagctgaagtggcagaaggacctcaggaagaagctcttccaaattcaggggcagaaggaaagaagaaaccagaagtccagtttgaagggggctgagggccagtttcagtga

SEQ ID NO: 408395 - DNA, 552 bp, Homo Sapiens
atgatcaagctgttctcgctgaagcagcagaagaaggaggagtagtcggcgggaggcaccaagcgcagcagcaagaaggcgtcggcggcgcagctgcggatccagaaggacataaacgagctgaacctgcccaagacgtgtgatatcagcttctcagatccagacgacctcctcaacttcaagttggtcatctgtcctgatgagggcttctacaagagtgggaagtttgtgttcagttttaaggtgggccagggttacccgcatgatccccccaaggtgaagtgtgagacaatggtctatcaccccaacattgaaatcgagggcaacgtctgcctcaacatcctcagagagaactggaagccagtccttacgataaactccataatttatggcctgcagtatctctacttggagcccaaccccgaggacccactgaacaagaaggccgcagaggtcctgcagaacaaccggcagctgttggagcagaacgtgcagccatccatgcgggatggctacataggctccacctacttcgagcgctgcctgaaatag

SEQ ID NO: 408396 - DNA, 921 bp, Homo Sapiens
atggcattgcacactagaaatggaccttataaaagtactgtatgtgaaaaagcctttgattttcccaatgtaccttatatacgtcagagaaatcacaccaaacagaaagcctgtaagtgtaaacaatgtggtagagccttcagccacttggattcttttgagaaacataaaataactcacactgggacaaaactctgtaaatggaaggtatgtggtaaggccttcagatatttcagttatctttgtaaccatgaaaccactcatactggagagaaacactatgaatgtagacaatttggtgaagcctttagttattccaaaacacgaaaatctcatactggagagaaaccctttagatgtaagaagtgtggtcatggtttcagttattcctcttacctttgatatcatgagagaactcacactggagaaaaaccctatgaatgtaaaaaatgtggtaaagccttcggatataccatcaaagaactcacaccagagagaaaccctatcagtaaagactgtgggaaagccttcagatcttccagtttttgtcaacaacataaaagcactcacactggagaaaaaccctatgaatgtaagaaatgtggcccaaacctgatcagaattgggttcaaacagctcgtcctccaggaagttgttcttgactctagtcacatacccaggctggctctagcaatggtgctgtcactggtgctgactctagagctggccctggccctaactctagagaaggtggtgttcagaagcataaaggaggttcaagatcccatttctgttctcagcaactctgccttcagcaactctgccttcagcattcactctgtgctaggtgccctggtgggccaagcatgtggtgctaaaaatgaccaagtggtctctgacccccagagactcacagtgtga

SEQ ID NO: 408397 - DNA, 1000 bp, Homo Sapiens
tgaggtgacatccagtacccaggagaacagggatcagcttcgggagggtgccaacatcaatcactctctgctggcgctcatcaacatcctcaatgccctggctgatgcaaagactaaggccacaagacccatgtgccctgcaaggacagcaaactggcctgccttctcagactccctcaggggtaactgccacatggtgatgattgttgccatcagcacctccagcctggcctacaagaacacataaaacaccctcacatatgctgactgggccaaggggattgggttccccagtgtgtgccatcaagggccagcttggattttctactccctttcccactgtaccctcccactcagccctgcacccaagagctccctgcaggacctcaaacccttcaagagaagaacctgggacagaagcccaatacctgcagccatcacggccagccttggctttaatgaagtgtatggcagtgcagtagccatggctaagagggtggtgagtctggccagcaagtctgggttggccctgaaggtgctgtgcttggcccataaacaatatttcctgctccaagaagctaacctcctgacctatatgatcacagaatttgagaccatgcagcagctagtgcaggaggaaaaaattcagcctgggtcagaggcctgcagaacttctggcctggccagggcagcaactttggatcaggacctgtgttcagagtcaaggagttatctggccccaaagtgggtcaccaaatgctaataccaaggtctgcgcacatattgctgccctcgcagcgcccgtcagacttcagcacatcctaacattcgtgtgggatttattgaaactgaggtagaagacgacgcacggcaccgtgatgtaggtggccgtgctgatggcgccgctgtccccgcgtccgcagacaccgagggcccggcttgcctggctcacccttctttcagagcagccccaaagggcctggaggactcgggtccctag

SEQ ID NO: 408398 - DNA, 1000 bp, Homo Sapiens
ccctggagtcataatgatgaaggtcatgtacatgttgaagggccagagcccggtgcagggcaccatccactttgagcagaaggaaaatgaaccatttatggtgtcagaatgcattacaggattgactgaacgccagcacagattccatgttcatcagtttggagataatacaccaggctatgtttctatctatcgaatgttccctggtcattggttgaaggccatcaagtcggcggtgaaagtcttacccagtacttacacagtacttcagcttagctgcgaaaatatcaatgagctgccgaactgtccctgtcaatcaccaaactgctcttccaagtatattttccaggaagaaggaagcccgtggcggggggaaaccgctggaaggtgggaggttagtgatgagagggaaagggaacacagcgcccccgctcccctctccccactgcctgcctcttggaaatggacgcgcagcccaaggtggtgcagggcggtgaccttcgcgcccggcccggagtgcgggagccccggggacttggcggcggcggccattggagagcggggtccagctgctggcagacgctcggtggaaagtgtcgcggcgcagcccctggacacctttggagagggccggcgaggcgccgggcatgtgcggcagggtggcgctgtcgaagcctgcccctctcggtgggcggcagccccccggatcacttccctcagatgtccccaggccctgtccctgggcgtaaagggcgcgcagcccggggcagcccctcctcgccacgcccagcgatgggaagttgtggacgtcgtctgtgcaacggaaacagctccatctggcccgcgcagaaccagagttctggctggaactccggccttcaatccgtgtccccactcttggggaaaaaatgtcactcctggagcggaggggacgggacaggagagaggagagcgagaaatctgtccctctaaatgttcgggtgccaagccttcggggtga

SEQ ID NO: 408399 - DNA, 1000 bp, Homo Sapiens; identical to SEQ ID NO: 295529

SEQ ID NO: 408400 - DNA, 1000 bp, Homo Sapiens
ggccaacctgaagcagtgtgacctgctgatgctgaagttttcccagcggcagaagcagctctgctggagggacccctacctggctgagaccctgcgggacgctgcacacctgggcctgctccagtttcagtcccatcctgagttccatcctgagttccagctccgtcgtgagcgctggaactgtagcctagagggcaggatgggcccgctcaggagaggtcatgacacagggggaggaaaagaaggctgcgctggaagtggaactttagcgggaaagggggcatggatccttaggaatataaagggactcaggctgcccacggcgcggaacacccgcaagctaccgtcagggatcgcgccgaccccagccgtggggtcacgtgaccgcccgcggctctgtccgccctgccccctccagacgcgggctctgcgctgctcatgcgctctggtcgtggccggcctcgtgtgggtgctgctgccgccggagggcgccctgggcgaggggctgcaggtgccgcagcagtccagggccgccagctggctgaatttaggctcgatcaagaacacaaagaaatctaaaaaccacaagaaaattgcaaacgccacgaacacctccccaccgaaagccacgaaaccccctccatggaccaccacgaaaccccagtggctgaacacctcggaaccccgaccaccaacctcctggggccccaggacctggttctacttccaggtcatttgcacacaccagattgagtcaggacttgaggggaaacacaattgtggagtcacttccatggggtctgtgcaaggcttggtcagcatgttgatgtatctacggagctcagctgtgtactgggccatctgctccggtgtggtattgtcccctgggtacaatggctccaacggggctccccgggcacccagcagtggctacagcaacagagccacacaggtggacaggagcaggagggagaggcagcggcatgcggcagccatctga

SEQ ID NO: 408401 - DNA, 444 bp, Homo Sapiens
atgaccattggttcagtgcaattttacccttttgcacagatagagaagaaatattgtgctgtggctgagttccacatggagttggagtggctgcctgccacggacacacagaccaatgcctacatcaagcgccctgtgtccctggagccatacctgatggagggcggctacaacaaggtgttcctggccaagggtaacatccctgccaagagctacaccttcatccacatcctgcttgacactatcagggatgagatggctgggtgcattgagaaggcctatgagaaaatccttttcaccaaggccacctggatcctcttcctcaacacacccaaacagatgatggacaacaccaagaagtgagggtgggtcctgggccccaacaactactacagttttgccagccagcagcagaagctggaagacaccaccattccaagttga

SEQ ID NO: 408402 - DNA, 621 bp, Homo Sapiens
atggttttaaagcatgttcggagtcattcctgctgcctgctgtccaggggtcagtcactggacttcccgaatcctgttggtgtctgctcgaagcaaggacccctcgagctgtccttgtccaggttccttctttattcttccaagccctccccgaggacacaggtattacactcctttctcaagagtattcctgtggctgtagctgccccaacagctcagctgggcagtgaggaagggacagggtttcgatccaagcatcattcactgtcgcacatgtttggcagcaagacccagcccactgtcttaggtaagcccaaggctccccgtttggtcactctgttcccgccctcctctgaggagttccaagctaacaaggccaccctagtgtgtctcatgaatgacttctacctgggcaccgtgacagtggcctggaaggcagacggcatcatcatcacccaggacgtggagaccactaagcctcccaaacagagcaagaaacaggccagcagctacctgagcctgatgcctgaacagtggagatcccgcagcagctacaactgctgggccatgcataaaaggagcaccctggagaagacaatggcccatacagaatgttcttag

SEQ ID NO: 408403 - DNA, 1000 bp, Homo Sapiens; identical to SEQ ID NO: 295532

SEQ ID NO: 408404 - DNA, 315 bp, Homo Sapiens; identical to SEQ ID NO: 295533

SEQ ID NO: 408405 - DNA, 1000 bp, Homo Sapiens
gtggtcttcaaaccttactatacacaagagaattcatatgggagagaaaccctgcaaatgtgaagaatgtggcaaagcttgtaagcagtctttggggcttactatacaaaagagaattcatactgaagagaaaccctacaaatgtgaagaatgtgggtcttcaaatcttactatatataagacaattcatactggagagaaaccatacaattgtgaaaaatgtggcaaagcgttttactgttcctcaaaccttattcaaaataatatagttcatgctgaagagaaacactacaaatgtcaagaatgtggcaaagcttttaagaagtctttagaccttaatgtatataagataattcatagtggagagaaaccctacagatatgaagaatgtggcaaagtctttaaactatcctcaaaactgaatgaacattagataagtcatagtggagaggaatcctacaaatgtgaagaatgtggcaaaggcttttactattcctcaagccttactaagcatatgatagttcatactgaagagaaactgtacaaatgtgaagaatatggcaaagcttttaagtggtcctctgagcttactatacatcagagaattcatactgaagagaaaccctataaatgtgaagaatgtgtcagagtctttaaacactcctcaaaactgaatgaacataagagaaatcatactggagagaaaacctacaaatgtgaagcatgtggcaaagctttttaagcagtcttcaggcctcactatacataagagaattcatactggagaggaatccataaatgtgaagaatgttgcaaagccttttaccggtccttaagctttactaaacataagagagttcatactggagagataccctacaaatgtcaagaatgtgaatgtgggaaagcctttaaccagtcctttagccttactaaacttatgagaattcatactggaaaaaaatcatacaaatcagaagaccgtggcaaaatcttttaa

SEQ ID NO: 408406 - DNA, 369 bp, Homo Sapiens; identical to SEQ ID NO: 295535

SEQ ID NO: 408407 - DNA, 702 bp, Homo Sapiens
atggagagcgagcgcgacatgtaccgccagttccaggactggtgcctcaggacttacggggactcaggcaagaccaagacggtgacccgtaaaaaatacgaacggatcgtccagctcctcaatggctccgagtcgagctccacggacaacgccaaatttaaattctgggtcaaatcgaagggcttccagctgggccagccggacgaggtccgcgggggaggcggcggcgccaagcaagtgctctacgtgcctgtcaagaccacggtgagtgactcgccttcctctgttatttgtctgccggagcagcccggcggggagggaggaaggagagaggcgggagagagggggagccgtgagccgccgttggctcgtgtgccccctaccttcctcaaccccctccccaagtcgtccccactcgcattagccaggcgcgttttccccactgtacagtctttgtggtcctttattttaaagcggcagcgcacctccagagctggcctccctccccgcctcgggttcccggaccggctgcaggagcttccttccccgggtcgggcggcggcgtctggcgtcctcgggctgggccattgtcccatgtccttctctgggcgcctggcgcgtgtcccaccgccgccaccgcgcctaaaggccaggctggaagcccggccgcacgctctgagagcagacgagtctgatcgatag

SEQ ID NO: 408408 - DNA, 645 bp, Homo Sapiens; identical to SEQ ID NO: 295537

SEQ ID NO: 408409 - DNA, 1000 bp, Homo Sapiens; identical to SEQ ID NO: 295538

SEQ ID NO: 408410 - DNA, 1000 bp, Homo Sapiens
tgtctgtgccacagccggaagcacagtgtacggagccttcgaccctctccctgacatcgctgatatttgtgagaagcacaaactctggatgcatgtggatgcagcttggggaggtggactgctgctatccagaaactattcctataaactcagtggtattgaaagtgcattatcagctctgctgactggaactgttaacattatctctgcttcagctcctgctaagttggctgcatggcagcaatatcccatccacaaaatggcagatgctcaaagcctgcagggccttctagatgcatgtaatcagatgcaagctgaatatcttttccagtcaggtaaactctacaatgttgactttgacacggcggataaaactattcagtgtggccgacatgttgatatcttcaagcagtggttaatgtggaaagcaaagggaacccttggctttgaggaacaaatcaacaaatatatggaacttgcaaaatacttctataaggttttaaagaaaaaagataactttaagcttgtgtttgatgcagagcctgagttcactaatgtctgcttctggtatttcccagcaaggcttaaacatattccaaaaggttttgaaagagatcaagaactccgaaagattgctccaaagattaaagcacagatgatgatggaaggcacaatcatgataagctaccagccatgtggagacaaaaagaaaagaaaattagaagaaagtaaaaaacgtggtgctggaccagccagctcggacccaaggtggcgggggtccagccagacggcccctcatgccagcgaggtctccggtgcccctctggtcagcggggccccagcaggggaggagctgcgagaccacacgggacaccggggtgggacccagcccgcgccagtggctcggagcaggggcagggacctggcagcaccgggccagagctgcctccacccccagcagtcgcggactccgggcgctccagacctggggtggtggtga

SEQ ID NO: 408411 - DNA, 1000 bp, Homo Sapiens
cctggagagaagcaaaccagccagccggctcccgcctcaacctggttcaggactgcgctgtcggaacaccaccctcgcgatgctgtgtctccctgttcacaccttctcgcatgctaggacttcaccccaccagactcatgtcatgaatcaccaagtcattcttcttggacactccaatcgccgggccacgcagcgtattcctccacagaccatgcttcatttcatctccgggatgaaggcggataaaaggcttttctgtcctgtgctgctgtttgctgctgcctcaaaacaattctgcaaaactggacttgctgctggggtgcaggacattccccatgagtttggagcctggcagtctagagatttatggcctgagcagctagaagaggaagctgccctggcaatggcctgggcgccaaggcctcagtgtggactccgtggatctaggagggtacctgggcagagacagccatttccccttcacgtgaccatcacttccgggtcacgtgacgaccgctctctaagccacgtgacactgcggggcatggcagaatttgaggttgtggtgggatatttggaggacgctatcatggatgaggagttccagctactacagagacgtttcatggacaggtactaccaggagtttgaagacacagaagcggataagttcacctacatgctatttttaatgaattcatttgatagaaaaatccaaatagacccctctctcctctctcggtgcttccgaggcagacttcttgggagcaagcccatgccaagcattccacccagggctcctacccccagcatgcatgttggtgtgccaacagtgtggaacaaccctccaccacgaccctccaccacgaccctccgtcccggcgtggaacgaccctccaccacgaccctccgtcccggcgtggaacgaccctccaccacgaccctccgtcccggcgtggaacgaccctccaccacgaccctctgtcccggtgtggaataa

SEQ ID NO: 408412 - DNA, 1000 bp, Homo Sapiens
ggacctcctgcccaggtcaggccttctccagtaccagacccagaattcacccagaaatactgagtgcaaggaggcctttcacattggagaagggtatcacaggtgcagtgaatgtgggaaagcctttagccacagaaataggctttgtgagcaccagagagtccacagcagagaaagaccttacaaatgcagtgaatgtgggaaattcttcagtcataactctagccttactgtacaccagagagttcacatgggtttaaagccttacgggtgcagcgaatgtgggaaagcctacagaaaaagctcccatcttgttcaacacaagaaagttcacgctggagagaggccttatgggtgcagtgaatgtggaaaagcctacagcagaagcacccaccttgttaggcataaaaaccttcacactggagaaagggcttacagatgcagtgaatgtgggaaagcctatagcagcaaacacacactcattcagcaccagagagtccacactggagaaagtccacactggagtgcagcaaatagaattcacactggggcaaagccttataagtgtagtgaatgtgggaaatgcttcagctgcaaaatcacacttgctcggcattggagaatccacactggagaaaggccttataagtgcactgaatgtgggaaggtttttagccaaatctctggccttactgcacatcagagagttcacactggtgaaaggctcgaatgtgggaaagccttcagcgttaaatctatacttgttcaacacctgagagtccatactagaaaaagaccttatgagtgtagtgaatgtaggaaattatttagccacaagtccaacctcattaaatataaaaaaaaaatcacactggagaaaaggcttaaaccaacagcctatgtggtgccagaaagttcaccctggaggaaggccttggaacgcagggaggatgctgtctgcttggtccacatagtgggtgacaccggacagaagctctga

SEQ ID NO: 408413 - DNA, 1000 bp, Homo Sapiens
ctcatgggtgatgaagccgtttctgaaagccagtgtggttcctgtggccacaaaagtgcttatggatcatacacagttcttgcattatccaggtactattctcagctgggagcagggggaagagctatgggtgcttcttagtggggacatgcggctcagaggggtcctggccctattaagtggcagatacacatttgtgatgtcagtgccccttctcaccaaagtccacgtgcacttcactggcatgtctttgcttttagggtattggcatgaagtgaaagatgaggaagcatcttctcagccaagattttctgtaaaagaattgtcacagcaccaaagagtccacagtggagaagggctttatgagtgtatcacatatgtgaaagctatcaaatacaaacccttacttgtcaaacaccaaagagtccaaattggggaaagggcttatgagttctgtgaatgtgggaaaaccttcagctgcaaatatggacttgttcctcaccaggaggatggggactttctagccacagcaggctttctccagcatcagcaacagagagtccacactggggaaaggccttatgggtgtagagaatatggggaattctttagacaggcctccactctcaatatgcatcgagttcacactaaagaaaagtctgtgcagcaaattaaaccctttcaacagcaaccgcgatcccacccccacaagcgtctgcaaaacccttcctggggccttggcgacagccctgtgtcctcacggcgcgcagaggcggcgccgcgaaccttgtgtgcattttacacgacggcggggactgaggtccctcgcagcccagagccggagcccggggtcggccgagcccgcaggaccggcttcctcgccgactctcacggcctcacccagccccctgggcccatggcggcgccggcgttggtgagtggagggttccgcagcccgcgcgagctcgggtcaccgcccgcatgcacccatccgctgtaa

SEQ ID NO: 408414 - DNA, 837 bp, Homo Sapiens; identical to SEQ ID NO: 225090

SEQ ID NO: 408415 - DNA, 672 bp, Homo Sapiens; identical to SEQ ID NO: 295543

SEQ ID NO: 408416 - DNA, 1000 bp, Homo Sapiens; identical to SEQ ID NO: 295544

SEQ ID NO: 408417 - DNA, 1000 bp, Homo Sapiens
ctgggggcacctgctccaggccgtgtggaggggccctgcaggcctggtgacgcagctgctgcggcaaggtgccagcgtggaggagagggaccacgcaggccggaccccgctccacctggccgtgctgcggggccacgcgcccctggtgcgtctcctgctgcagcgaggggccccggtgggcgcggtggaccgggcggggcgcaccgcgctgcacgaggccgcctggcacggacactcgcgggtggccgagctgctgctgcagcgcggggcctcggcggcggctcgctccgggacgggcctcacgccgctgcactgggccgctgccctgggccacacgctgctggccgcgcgcctgctggaggctccgggcccgggacccgcgctgctggcggccggcggcgcgggcctggacggcgccctgctcgtggctgccgctgcggggcgcggggcggcgctgcgcttcctcctggcgcgcggggcgcgggtggacgcccgggatggcgcgggggccacagcgctgggtctggcggccgccctaggccgctcccaggacattgaggtgctgctgggccacggggcagacccaggcatcagggacaggcatggccgctctgcgctgcacagggctgccgcccgaggacacctgcttgccgtccagttgctggtcacccagggggccgaggtggatgcgcgggacaccctgggcctcacacccctgcatcacgcctctcgggaaggccacgtggaggttgccggctgcctgctggacaggggtgcccaggtggatgctaccggctggctccgaaagacccccctacacctggctgcagagcgagggcatgggcctaccgtggggcttctgctgagccgaggggccagccccactctgcggacgcagtgggccgaggtggcccagatgcctgagggggacctgccccaggcgctgcctgaacttggagggggggagaaggagtgtgagggcatagagtccacgggctga

SEQ ID NO: 408418 - DNA, 459 bp, Homo Sapiens; identical to SEQ ID NO: 295546

SEQ ID NO: 408419 - DNA, 1000 bp, Homo Sapiens; identical to SEQ ID NO: 295547

SEQ ID NO: 408420 - DNA, 849 bp, Homo Sapiens
atggcaggtggcagtccagcagccaagagggtagtggtgtaccggaatggggacccattcttcccaggctcccagctggtggtgactcaacgccgcttccccaccatggaggccttcctctgcgaggtgacatcagctgtgcaggccccactggctgtgcgtgccctctacacaccttgtcatggccaccctgtcaccaacctggcagacttgaagaacagagggcagtatgtggccgctggatttgaacgattccacaagctccatgtgttcaggaatggggacctggtaagtcccccatttagtctgaagctgtcccaggctgccagccaggactgggaaactgtgttgaagctcctgactgagaaggtcaagttgcagagtggggctgtgtgcaaactctgcaccctagaggggctcccactgtcagcagggaaggagctggtaactggccattactatgtggctgtcggagaggatgagttcaaggaccttccctatctggagctgctggcccaaggccacagggcccaggtaacccagccctctccaaaggaaccagaccgaattaagccatctgctttctatgccagaccccagcagaccattcagccaagaagcaagctccccacactctcattcccatcaggagttataggagtatatggagctccccaccgaaggaaggagacagcgggggccctggaagtagcagatgatgaagacactcagacagaggagcccttggatcagagggcagcacagatagtggaagaggccttgtccctggaaaaccagcctggggctggggctgctatctcagcctcagccccagctctgccatcttga

SEQ ID NO: 408421 - DNA, 1000 bp, Homo Sapiens
cctgcgcgaggagttcaaagacggggatgaatggaaaaaacgatgggtgcagtctaaacatcagccggattatggtaaatttcagctcgctgcaggataattttatggagacaaagaaaaagataaaggtaaatactggaactcagttgaagcattcagcaatgagaatgagaccttggtgtttcagttttcagtaaaacacaagcaaaggaagtattgtggtggcggatatgtaaaactctttcctgccaccctgaaccaggaggatatgcactcaggatccaagtatcacatcatgtttggccctgacatttgtggctttggcaacaacaaaatcaataaagaccctcacctgtacactctgattattcgccccaatgctacttatgaggttaaaattgacaaccagcaggtgtactgggaagactttgaatacatcctggatccagaagccaagaagccagataactggaaggaggctatggatggggagtgggaaaggcctctgatgccaaatccgaagtataagggagaatggaaaccttggatcattgaaaatcccaattaccagggggagtagattcatcccaaaatagacaaccctaaatataagcctgacgccaccatttgtcactattataacattagtgttctcagcctggacctttggcagatgttaggggtgattgccccagccatgatgataagtcctgacccagcttccctctctctgccagtcttctttcctttaattggaaggtcctactccaccatcccccgcaacccccacccccacactcagccagcccagaacatccaggttaccatggggtccctgccctttattggaaatccaagtgactctcagtatggagatgggtgggaattccctcaccttcccctgccccaatttccagccttcagatgctctggcagcccagatcccctccccatccctccttggtcccagcctagtaagatggtcaactttcctgcctaa

SEQ ID NO: 408422 - DNA, 1000 bp, Homo Sapiens; identical to SEQ ID NO: 295550

SEQ ID NO: 408423 - DNA, 417 bp, Homo Sapiens
atggagcttccagaaactcttccgaggcaccagctgagaggtttaagaaacccgcacaacgcctgggaaaatggtgcgtggacgcgtcttccgagcgcaaagcccaccaaggcgcaaagtgccgatgcggcgcccagagtttcaaccgaagatgaagatgcttacaagaaacagttctctcaatacataaagaacagtgtaactccagacatgatggaggagatgtataagaaagctcatgctgctgtaccagagaatccggtctatgaaaagaagcccaagaaagaagttaaaaagaagaggtggaaccgttccaaaatgtcccttgctcagaagaaggattggacagaagatggatgtacaaaaagtcaaggtggaggagacctctatcttcgtaggatagaggatagtccttga

SEQ ID NO: 408424 - DNA, 414 bp, Homo Sapiens
atggcacttgtcttcactaccatggagaaggttggggcttgctttcagaggggagccaaaagggccatcatctctgccccagctgctaacgtccccaggtttctgatggatgtgagccatgagaagtatgacaacaggttcaagatcatcagcaatgactcctgtaccaccaactgtttagcacccctgtccaaggtcatccatgacaattttggtatcgtggaaggactcgtgatcatggtgcacaccatcactgccagccagaagactttggatagcccctctgggaagctgtggcatgacgatcacaggtctctccagaatatcatccccgcatctactggtgctgccaaggctgtgggtgaggtcatccttgcccaaatgcaaggaccctataaatccccaatggaataa

SEQ ID NO: 408425 - DNA, 1000 bp, Homo Sapiens
ggatgggcagcccagctccaataggtaccaggaccttaaagaaaacttcctagccagatccagaaatcattgcaatgacctgacccatgttcatgcaaagctccaaaacaagaccaagctaacagtgttggaaggagacattctgaatgagtcatgccttaaaagagcctgccaggacatcttggtcatcatccacactgcctctatcattgacgtcttcggtgtcactcacagacagtctatcatgaaagccaatgtgaaaggtacccaacttctgttgggaacctgtgtccaagctagtatgccaggcttcatccacaccagcatcatagaagtatccaggcccaactcctgcaatgagatcatccagaatggccacgaataagaactcatgtatatctatgaggaaggaagccctatactttctgccactacaaatgaggccccattacaatgggatcctgtcaagtgtcagcaagttatccacatcaacacagtctatgttggcaatgtggcctgggcccacattctggtcttgtggtccctgcaggaccccaagaaggccctaagcatccgaggacagttctactatatctcagatgacatgtcttaccaaagctatgactaccttagttacaccctgaacaaagaatttggcctctgccttgattccagatggagccttcctctagccctgatatgctggattggcttcctgctggaaatagtgagattcctgctcaggccaatttatacctgtcaactccccttcaatcgctacaggagatatcatcaagcttcatcctcctggcttcatacagaaggtgacaagggcacaagcccagatcctgctgcctccctttcacacaatggccaacttattgtcttcctcgtgtcatcaaaacctgtgcagtcactggcccaaccagaagctttctgtgctaaccatataccaaaggacagacaatgtgatttgccgttaccaaatatcagtggctaa

SEQ ID NO: 408426 - DNA, 1000 bp, Homo Sapiens; identical to SEQ ID NO: 295552

SEQ ID NO: 408427 - DNA, 1000 bp, Homo Sapiens
cagctctgctaaggacttgaattttgagggagccaaggtgacacttcactgtgaagcccagagaggttcactccccatcgtgtaccagtttcaacatgaggatgtcaccctggggagtaggtgagcccactctgcaggaggagtggccatcagcttccctctgactgcagagcattcagggaactactactgcacagctgacaatggctttggcccccagcacagtgaggtggtgagtctctctgtcactggacattcagagaattactactgcacagctgacaatggctttggtccccagcgcagtgaggtggtgagcctctttgtcactgcttcgctgatcctgcaagctccactttctgtgtttgaaggagacttcgtggttctgaggtgccgggcaaaggcggaagtaacactgaatactatgtacaagaatggtaacgtcctgacattccttaataaaagctctgacttccatattcatcacgcaagtctcaaagacaatggtgcatatcactttactggatttaacggaagtaatttctctgtttcttccaacatagtcaaaatccaagtccaagagctgttttcacgtccagtgctgagagccagctcctcccagcccaccaaagggagcccagtgaccctgatctgtgagacccggctctctctagagagatcagaagtccagctccagttctgcttcttcggagatggccagaccctgggatcaggctggagcagctccccgaagttccagatcagtgccatgcggagtgaagattcatggtccttctggtgtgagatagatactgtggctcacacggtcccgtgtccagcagatgaaaagcagtttcatttgactcctcaatttggatgcagtttccccactggtagtcctgactctgcggccataggctcagatgtgagtcaagcacctgtccagtgcatccccaagctgcaggggacacacatcaagttctctgaatggtcttattga

SEQ ID NO: 408428 - DNA, 606 bp, Homo Sapiens
atggagagtgtgatggagaggcatcttccgggtatcctgctcctcaccactctctcgagaggtgtgacagtgaagaagcccctgaagaacttcaagctttgcctgaaaaccttcacagacttcacctgcccttatagcctcttctacagcactcggtcccaggacaatgagctgcttctccttgtcaacaaaatgggaatgtatctgctgcacattggaaatgctgcagtcactttcaatggccccaccccctgccctcgatctccttatgcttcgacccatgtcaatgtgagctgggagtctgcctctggaattgctacactctgggcaaatgggaagctggtggggaggaagggtgtgtggaaggggtactctgtgggagaagaggctaagatcatcctgggacaagagcaggattcctttgggggacattttgatgaaaatcaatcctttgttggggtgatatgggatgtgtttttgtgggatcatgtgctccctccaaaggagatgtgtgactcctgttacagcggcagcctcctgaatcggcataccctgacttatgaagataatggctatgtggtaactaagcccaaggtgtgggcttaa

SEQ ID NO: 408429 - DNA, 1000 bp, Homo Sapiens
ccagctgcagtatgccagggtccagagggaccggctgaaggaaatcaactgtttcaccgccacgtttgagatctgggtggagggccccttgggcgtcatcaataacttcaggttgggccgcctccccactgtccgtgtgggctggaatgagattaacactgcctggggacaggcggccttgctgctccttaccctggccaatacaattggactgcagtttcagaggtatcgactcatcccctgcggaaaccattcgtatctgaagtctttaacagatgaccgcactgagctgccgttgttctgttatggggggcaggatgttttcctcaataacaagtatgaccgcgcgatggtggccttcctggactgcatgcagcagttcaaggaagaggctgagaagggtgagctgggcctctctctgccctacgggatccaggtggagacaggcctgatggaggacgttggcggccgaggggaatgctattccatcagaacccatctgaacacgcaggagctgtggacaaaggcactcaagttcatgcttataaatttcaagtggagtctcatctgggttgcctcaagagaaggtgaagaggcacagaagacggtgctcttctgcctgagtgaggacaagaacatcatcctgggggaaggcaatgagatcctggtgggtgacgtgggccagaccatccatgacccctacaccgcctttgtcaagatgctgccagataagaactgccactgtgccctctacgacacaatctatgagaccaaggagagcaagaaggaggacctggtgtttatcttctgggccactgaatgggcaccccttacgagcaaaatgatctatgccagctccaaaaatgccatcaagaagaagctgacagggatcaagcaagaattacaagcaaactgctacgaggaggtcaaggaccgctgcaccctggcagagaaggtggggggcagtgccttcatccccctggagggcaagcctttgtga

SEQ ID NO: 408430 - DNA, 1000 bp, Homo Sapiens
gtggtcagtcctgctaaacattgaggaaaccaagcctgagaaccctgggaaatatgaggtcatgaaagaaaagggcaagaggtcctctgaacctatccaccagattgacctggaggaggtgggctaccgcagggacctgagccacgctgctgccttgtttctcctttatgggcctggggaggatgcattctgggcactggcccagctgttggcttgtgagaggcactccccacaggcagagggcatctcatcctcgccgtggccgccctctatgtcctggagccacgctctccagctcgaattctatgcagctgactctcccctccctgagagtcctcctggcctccagctggctgggcttcagctgcccttggttcccacaggattctacagcccaaatagcacaagggtccaggggctacaagaccaccaggaacacgtgatctctctcaggctcaacctgcacctgtgggatgtgtatttggtagaaggggaacaggtgttgatgccgatggcatgcactgcctttaagggggaggtctggctggggcccttgacggcactggaggagccagacccatttgtgggaccccccccacccctccctgcaagcactgacagcctcagagagcagcagaggcccctcactcctgaacatccctccaaggccaaacccaggcaagggtcctcagcagccagggctgtgctggcttcacgtggcaggaaggccctctgcaagggggatgggcaggtgccccctggcccaccagcctggttccagcggcccatttggacttatggtgtgcccagcctggccttggctcaaggaggacctcggggttcctggaggtacctgcagcggaactccatgtcccgactcccagtggacttggatgacaccccattcacagctggggatgtgcagcattgcgctcccacctcagggccttggctctgccacctcgacttggaatgttctcagctccctccaggcttctag

SEQ ID NO: 408431 - DNA, 1000 bp, Homo Sapiens
tcaaagggataaggatggtgtccttatttcagctgatcctagtcgtaaatttgcaggccagagagacgtcttccatgaccttggcaggggaattctggacagtgcttggcaaggctataatgcaactctcctagcctatggccaaactggctctgggaaaagctattccatgattgggtttggtgcaaacagggtattattccaactgtgtgtgaggagctctttcgagcaatcgagaaccaggggagaaatcaagaacaccagccccggtcatcagaaagctgtgtccctgaagccttccatctcccgtgcaattcccacaacacgcatgcgcgcgtacactgtcatgacgcagcgttctgggcagggcagagctggagccggcggaataagggaagatcaacagctgggattttacgtggaaggcctgaagtcggtgccctgtgagaactatgcccaaattgaaaggctgatggaacaaggaacaaaaataaggaccacagcttccaccaacatgaatgccagcagcagccggtctcacttggtcatcaccatccagttcaagcaggtgagagctgagtggatgccactgtcccgatctccagacaaggccactctgcagaaggctacccctggtataatgggctggtgggatctccacacaaggccgctctgtgaaaggctccccctgcgggaggctccccctggtgggatctccacacaaggccgctctgcagaaggctccccctgcagaaggctccccttgaactgtatcagcagcacatctgtacattaccaccatgagaccagccttcagacccacgagcctgaggaccaccaggttttcctagacagagatctcaccaaacaatccagtattaatttggtggacctggcaagaagtgagaggcagaaatcttcaggatctgaaggagacagactgagggaaggatcgtgcgttaacttaagtttaaccaatttgggaagtgttatcaggtaa

SEQ ID NO: 408432 - DNA, 825 bp, Homo Sapiens
atgaggtcaggaaatgattgcgggagaagagcattcgtgtacacagaggacacgcaggcctccacgacccgcgtgctgaattcggagacggcagtcccctccaaaggcctggtgtccctgcagctgcccaggctggtggggaacggcagaatcatggaatttcagaggatagaatgtgggagggagcgagggaagaaggcgggcaaggcgctggcatggagcagcatggagctgattgatgagacggtggggagacattttacttgtgcattgaaaagaaaaaccacgaggttacctggtggacccgtttgcggccacagtgccgccgtggggattggaggccagaagggaggcgcgtcggatggggacacaggcgcccttgccaccttggcagtgtgggaaggcagggagatggcaaaggagaagggcctggggcggtgtccggctctgcgagctgaagccaaggctgactccaagatgctctgtgcatctcaaaacccagccctcagagccatgagctgtaccagcacctccatatctgttcccgtcgaaggggagggtatcaccatcgcccgagtcacccacatcacaagcccaggccccatctcggacccctccaccatgttctgccacttcttcagcgagatctcacactccatcacactggaggagctgccatgcagggaccacatcctcaagctctgccaggacatcttcctggcgtgcgagacccatgagctggagctggaggaggagctgtctgccaagctcatcttcctctatcgctcactggagaccatgatcaagtggactcgtgaggagtag

SEQ ID NO: 408433 - DNA, 1000 bp, Homo Sapiens
ggggctgcccccttggtgcatgcacggtgctgggacactgtcagacactcctgtctttgccccgaagcagaggccaagagaggcacaagggccgcacacctgcctgctcctcttggacgcgggtgcccgagcataccctgcaagtgcaagcactcactaccttcactcctggagtgaggacattgagggtgctttccctaatgagctgtcccttcagcaggccttctctgactaccagatccagcagatgacggccaactttgtggatcagtttggcttcaatgatgaggagtttgcagaccatgacaacaacatcaagtgtttccagttgcatgagggtgctgaggcccccagtgagaaccaggggaggagcactgaggcctcagatgagcaccgggggaggagccctgaggccccagatgagcaccaggggaggagcactgaggccccagatgagcaccgggggaggagcgttgaagccccagatgagcaccagaggaggagagctgaggccccagatgagccccgggggaggagctctgaggccccagacgagcaccgggggaggagcgccgaggccccagatgagcaccgggggaggagcgccgaggccccagatgagcagatcgcggagatcaacttcaacatcgacactgacgaggacagtgtgagcgagcggggctcccagcgcggctctgaggcctgctgcagcgaccgcatccagcactttgatgagaacgaggacatctcggaggacagcgacacttgctgtgctgcccaggtgaaggccagagccagagcaagcacaccggtcctgcaagcactggcgcccaacgcagcgggtgaccctcaggagctcggagctgaggcctggagcgactcgtttggagccccccatgcttcagaaagctgctcaaagaatggcccggagtgcggaggccaggatgggaaggcgagcttggaagcagaccatgatgcgcctggggcaggtgccccctag

SEQ ID NO: 408434 - DNA, 1000 bp, Homo Sapiens
ctccaccctcttggaagctgcactcgctcttgcagatgacttggtagatgactcttatgccgtgaatcacccgtatcctccaagagcacgtggaagttcagatacagcttttctccctgagagtgctacaagcatcctaaggggccttaccttgagtccaggtgctggggcccaatctcagctgaagatcccagagatctggggaagtgatgaagagatctggggaactgactcagcagggggaagcctgtgtacaacccacacctgcaggctacgtgctcctgtgctggctgagccggttggaatagacatgaaggataactcaggaaataagaaagcaagattcagggagctgaccttgtattttttggcaaagaggtctaagatgaagcaagatatcaatctgcaaatatttgaaaatgtaaacatcattgacaacctgtgggaactgagcagtggtcacaaacatcaaagttgtaaaataaatgtcaaatcaaagagatttctggttgaatccttagagaggacattcctcctagagtttaaaacattacagtctccagagcccagcgccaattccgtgtcagcccacaacccgctctggttgcacagcttcacgagtcacaaggactggatggacaagtgtgtgtgcctagtgactgccttctcccagcacatgcaccatgtcccggtggcattgccggagatggtccgtgccctctcagcccagcagcagaccctcaggcagatcaccatctgtggagaccgccaggccaaggacaccaaagttctggtgcagtgcgtccaccctgtctacattcctaacatggtgctgattctggctgatggggacccctcgagtttcctgtcccactggctgcctttcctgagtaccctccgaaggcaggaagaccaggccactgcgtatgtgtgtgagaatcaagcctgctcaatgctcatcatggatccctgtgaattacgaaaactgctacatccgtga

SEQ ID NO: 408435 - DNA, 1000 bp, Homo Sapiens
ctcctggctcctggactgctattggatggtgtggctggaaatcataggccaggtggtcatgtcctgtggaggcctgcatggggccatggctttcatcctggtcatacttctgaatggaaacaaggtcaaggagaagaacctgtttgtcagcaccaccgtcaacatcttcaaggtcatcttctggggtctgaccatctagtccctggtgcagtggctgaaggtgaagaggagtgagcactgggagcctaagttccatgagaagctgcaatgccaccctctcgaccacatcctcttggccatcaaggacatatcgaggcatatcaggcacaatgatctcaaagacatgtggtcccactttgacaggaatttcctcagtggagtcctcatgagaaggctggcccagaagtctccagaagggatcctcaatgtcttccatgcactgaacctgaaggatgccatcagctaagtgaccaaaggagagtgcctgagatccctggccttcatcggctccccaagtactgataacgtggtaaacgtggacttcacaccacgatcgtccaccatggtggcctctgtctcctaccacctgagggagaacatcagcaccgtctgtctagacattcagtccctggagcagcatggcagagcattcggtacggggaggacacggtcatgcaccacatgctgcagcaatacctgtgcaagctggggaaggagtatatgcatcgctacagccacaccagctgaggacaagaagcaggaccgagatatcttccacaggtctatgaggaagcacctggaatccttcaagtagaccaagctcaggatcacccagaacaagaaggcggccaagctgtacaagccaaagcgtgcccagaaacagagaactcccaaagctctgtacccgctccagcacagctgcactaatgccaacccaggccagggcctgggcctgagcggccatcctacactgctgaacaaaatgaatttgcaaaagtga

SEQ ID NO: 408436 - DNA, 1000 bp, Homo Sapiens
gaaagcctgcagaaatacctttggaaatacctatgggaatacctatggaaatatctgtaagaatacctgtggaaatatcggtgggaatgcctgtgagaatacctgtgcgatcaccagtgagaatacctcctatagaaatacctttggaaatacctatgggaatacctatggaaatagctgtaggaatatctgtggaaatatctgtgggaatgcctgtgagaatacctgtgcgattaccagtgagaatacctgtgtgaataccagtgagaatgcctgtggggatacctgagagaatgcttgtgagaatgcccgtgtgattaccagtgagaatacctatgagaatgcatgtggggataccagtgagaatacctgtgagaatgcctgtggggatacttgtgggaaagcctatagaaatacctttggaaatacctatgggaatacctatggaaatatctgtaggaatacctgtggaaatacctgtgggaatgccagtgagaatacctgtgtgaataccagtgagaatgcctgtggggatacctgtgagaatgcctgtaggaatacctgagagaatgcctgtgagaatgcccgtgtggttaccagtgagaatatctgtgagaatgcctgtggggatacctgtgagaatgcctgtaggaatacctgagagaatgcctgtgagaatgcctgtgtgattacccgtgagaatacttatgagaatgcatgtggggataccagtgagaatacctgtgagaatgcctgtggggatacctgagagaatgcttgtgagaatgcccgtgggattacccgtgagtatacctacgagaatgcatgtggggataccagtgagaatacctgtgagaatgcctgtgagaacccctgtggggatacctgtgagaataccatgggaatgcccgtggcaatacctatgggatgcctgtggaaagctgttttcctagagaagatggctatggatctgctcccacacaagaaaaaaatgtcctag

SEQ ID NO: 408437 - DNA, 1000 bp, Homo Sapiens
taatgtaaaaggaatgatgggtcctggagtgaacccaacaactccagaagcagaagaaaacctcaagtcttgcctctcggctgatatccagtccaagggccatctcccatctggcatgtggaggcagcctaaggatggtaaagaatggggtgaagaatacgtcacaaaagaccacccagataaactcaaggaggctggccagggtagacacagctccttggaaaacgttttatgtgaaacctccttagctgctaaaagacagactgtggccctggaactgcttgaatctgaaagaaaatatgtcattaacatctctctgatcttgaagataaaagccacattccaggggtcagatggaaagaggaattccaaagagagaagcctcttccctggctctttacggtacctcgtccagcagcacctggatctgcttcacgcactgcaggaaagggtcctgaagtggccacgccaaggcgttcttggagatttattccttaagttaacaaatgacgagaataatttcttggattattatgttgcctacctaagggacctgcctgagtgcatctcattggttcatgttgtagtcctgaaagagggtgatgaagagattaaatctgacatctacacgttgttttttcacatagtccagcgcatccctgaatatctgatacatctgcagaacgtcctgaagttcacagagcaggagcaccctgactattatctactactggtgtgtgtccagcgcctccgagtatttatctcacactacaccctgctgtttcaatgcaatgaagatttgcttattcagaaacggaaaaagctcaagaagtcatccatggcgaagctgtacaaagggctggcttcccagtgtgccaatgctgggcaagatgcttcccccactgcaggtcctgaggctgtccgtgacactgggatccactcagaagagttgctgcaaccctacccttctgctcccagttctggccctgccatcacgtaa

SEQ ID NO: 408438 - DNA, 1000 bp, Homo Sapiens; identical to SEQ ID NO: 295558

SEQ ID NO: 408439 - DNA, 1000 bp, Homo Sapiens
ggccagattcagcggcaattcctccgggaggcccaccgggaagatctttggaggccagagggctgagccttagcggtggccatggcaggccagtctcctctacctaggcgggcacatctgtggagctgccctcatcgacagcaactgggtggcctctgctgctcactgcttccaaagatgcatcttccctccacgggccccgctgtgggagtgcatgcaagagggaagcccaaagtccactaacccatctgattaccggatcctgcttgggtatgaccagcaaagccatcccacagagcacagcaagcagatgacagtgaataagatcatggtgcacgctgactataacgagttgcaccgcatggggagtgacatcaccctgctgcagctgcaccatcatgtggaattcagctcccacatcctccccgcctgccttccggaaccaaccacgtggctggcccctgacagctcctgctggatatctggttggggaatggtcaccgaggatgtcttcctgcctgagcccttccaacttcaggaggcagaggtcggtgtcatggacaacactgtctgcggatcctttttccagccccagtaccccggccagccaagcagcagtgactacaccatccacgaggacatgctgtgcgctggggacctcataacaggaaaggccatttgccgacgagactccaggggtcccctcgtctgcccattaaatggcacctggttcctgatggggctgtctagttggagcctcgactgctgctcacccgtcggtcccagggtcttcaccaggctcccctacttcaccaactggatcagccagaagaagagggagagcacccctccagatcccgccttggctcctcctcaggaaacacccccagccctggacagcatgacctctcagggcatcgtccacaagcccgggctctgcgcagcccttctggctgctcacatgttcctcctgctgctgattctcctggggagcctgtga

SEQ ID NO: 408440 - DNA, 798 bp, Homo Sapiens
atggtgattacagtgtggggtgttcagaagcagttgggggtagggcgaatggtgttcaggagcagtggggggatatttggggatagtggttacagtgggggatattccggagcactgagaggaacagtgggggatatagcaggggtgttcaggagcagtgggaagtacagtggggtgttcaggagcagtgggaagtacagtggggtgttcaggagcagtgggaagtacagtggggtgttcaggagcagtgggaagtacagtggggtgttcaggagcagtgggaagtacagtggggtgttcaggagcagtgggaagtacagtggggtgttcaggagcagtgggaagtacagtggggtgttcaggagcagtgggaagtacagtggggtgttcaggagcagtgggaagtacagtggggtgttcaggagcagtgggaagtacagtggggtgttcaggagcagtgggaagtacagtggggtgttcaggagcagtgggaagtacagtggggtgttcaggagcagtgggaagtacagtggggtgttcaggagcagtgggaagtacagtgggggtgttcaggagcagtgggaagtacagtggggtgttcaggagcagtgggaagtacagtgggttgttcaggagcagtgggaaacaccaggcttccttcagctggggcttatcgagcaccaggcaagcacaatagatgccgatgcccatgctgccgggtgcacaagtggcatcaagtcaaggctgcagaaaacagaggaagccaaacagactagagtggccacagacctgtgctga

SEQ ID NO: 408441 - DNA, 1000 bp, Homo Sapiens
tgtctctcactgtttttatttaaaggaactagacacaaacctggctgctttaaccacggcctctgggagggctacagctgagaaaatccgctgtcaggaagaagtgaatagaactaacaagactattgagcgcgccaacagattagtgaaaggtctggagaaggaaaatgatttgaaaatcgagttgaaaattcagctaggagatgagttcttcatctgcctttcctctgtgcaaggcacccaaagtgagagcagcagggcgcagcagtgcccagagctgactgatggcatcaggaaatctagctcatcccaaccacaggcagtttttaaaattggggttgtggctccccctgctaaagcgacattacccacggaccttgttaccaaccttggcgaccagagaacgctgatctccaaaggtctagacccggtgaaacagcgttcggtggccactgaccggtttccagagtcagagctccccctgctggaatccaaagcacgtcgccaggtgagggcttcccaatgtcttggaaagcaccaagttggtgagtggcataacctgatcatgtcattcccactgatcaacaaagacacactagtggaatttgtcttcctgtttcttgtagccctcccatcatcaattgggaacccagagcccactctgaatttcatggaggagaaagatgtacctaaggtttgctccacatcacggcgtgtcttctttcgcatgctctcggtggtcgtgttaaagcaactagaggaaagggaaggggagaaagaacgtagagcctcaaatgccctaagtttggatcaagagcaccttgttagaattaggaatgctggatttggtgtgaacttggtgctgagttacatcatcagccataagcttccagccactggaaatcttcctatagacaacagtcctcacttcccagatgcagagcaagccagagaacctgtaggagaaaaccaggaatatagagccagaaacatacaatga

SEQ ID NO: 408442 - DNA, 1000 bp, Homo Sapiens
cactcactattccagggtcctggactcctccattcactattccagggtcctgaacccctccactcactattccagggtcctgaacccctccactcactattccagggtcctgaacccctccactcactattccagggtcctgaacccctccactcactattccagggccctgagcccctccactccctattccagggccctggactcctccactccctattccagggctctgaactcctccactccctattccagggccctgaactcctccattcagtgttccaaggccctgaacccctccactcactattccagggtcctgaacccctccactcactattccagggtcctgaacccctccactcactattccagggtcctgaactcctccactccctattccagggccctgagcccctccactccctattccagggccctggactcctccactcactattccagggccctgaacccctccactcgctattccagggcccttaacccctccactcaatattccagggtcctgaactcctctactcactattccagggccctgaactcctgcgttcactattccaggggccgtggactcctcagttcaccaatccagacccctggactcctctactcagtattccaggggcctgaactccactcactagtggtcggccctggacacccccactcactattccaggggtctggacaccccgttcactattccaggggcctggactcctccgtttcctgttccagggccctggacttgagtgtccttctgctgcaggtctgccagatcaaacctctgagcctgatcaacctcctggcccgtggctgggtctgtgctggagaggggagaaaactgcccaggagcaggcccgtgatggccgacctcagccccagtcatcctcctgggactctttccaccagcattgatggagcgccgccagagctacgccgcgaggaggaggagagctggacttgctggtgctga

SEQ ID NO: 408443 - DNA, 1000 bp, Homo Sapiens; identical to SEQ ID NO: 295559

SEQ ID NO: 408444 - DNA, 774 bp, Homo Sapiens
atgcctcccaggccacctcagtctcacctgccggctctgggctggctgctcctaacctacctcgccgagctgtcggagggctggacatttgtggcagtgctgaagggggcattgccgtgtgggacacggtttaactgtcccagcgacatttctccaagtggaaatcctatttttgtagatctccatgctttgctctcaaggcttggagaggtgaggaacctgattcagaaggatgaagtcagttgtcctcaactgtcccgcactgacaagtggaaagatgattatgtgggaccccaagtttccccagcagcctccctgcccactgctggcatccaaacattggcccagtcatgccatgtagacccagagatgcggcaggcactctccctatcccagattaaagaagatgaagaagtcttcaggagagattgctactgtgggcaggtgtttgagaagtgccccctgcgggtgaagaacttcggcatctggctgcactgtgacgcccagagcagcacccacaacatgtgccgggaatatggggacctgaccaccgcgggtgctgtcacccagtgctaccaagacatgggcgcctggcaccacgcccgggcccactccgtccagatcatgaaggtggaggagaccacagccagcaagtgccgccggccagccgtcaagcagttccatgactccaagatcaacttcctgctgccccactaggtactgcactatccgcacaagccacacttcaccaagaggcccaacaccttcttctag

SEQ ID NO: 408445 - DNA, 1000 bp, Homo Sapiens
gcgtcccttcccccaagttatcaaatccaagggcaatgttgtgagcatcaaggtagacaagggggtggtacccctggaaagggcaaatggtgagaccaccacccaagggctggatgggctgtctgagcgctgtgccccatacaagaaggatggagcccactttgccaagtggcatcattactgccagtatgtaaccgagaaggtgtggctgctctacaaggctctgagtgaccatgacatctacctggaaggcaccttgctgaagtccaatatggtcaccccaggccatgcctgcatccagaagttttctcatgaggagattgccatggcctctgccctgaaggcctggggcaggaagaaggagaacctgaaggctgtgcagaaggagtatgtcaagtgagccctggcagatagccacgcctgtcaaggaaagtatactccaagcggtcaggctggggctgctgccagtgagtccctcttcatctttaaccatgcctaccagctgggtgctcagagacagaaatgcaaagtacctggacacaccctggtcaccatcattctggactttgtccctcttgttaatgctcagctgggaaaggaataccctcaaaggccctttcctcaagaatggaggagagtacctctgagcctggcacaggcccagcccaacacagcccaagccaagctgggaagggcgagccggggaatccccggcagcaccgatatccgcagagcccaagaagtgggcctctctgccccgcccccccggctcgccgagggctacgcggcgcgcctgcgcagaagaaggcagcgcccaaggcgcatgcgcagcggtcactcccgctttatgcccagttcttcccgctgtggggacacgaccacggaggaatccttgcttcagggactcgggaccctgctggaccccttcctcgggtttaggggatgtggggaccaggagaaagtcaggatccctaagagtcttccctgcctggatggatga

SEQ ID NO: 408446 - DNA, 1000 bp, Homo Sapiens
ccatgaagctgaaggtgaagaacgtgtttctcgcctacttcctggtgtcgatcgccggcctcctctacgcgctggccagccatgtgactgccttcctcccctgcgggcagcagctgagcagctacggcagaaggatctgaggatttcccagctgcaagcggaactccgacggccaccccctgcccctgcccagccccctgaacccgaggccctgcctactatctatgttgttacccccacctatgccaggctggtacagaaggcagagttggtacggctgtcccagacactgagcctggtgccccggctgcattgactgctggtggaggatgctgagggtcccaccccgctggtctcagggctgctggctgcctctggcctcctcttcacacacctggtggtcctcacgcccaaagcccagcggcttcgggagggcaagcctggctgggttcatccccatggtgtcgagcagcggaacaaggccctggactggctccggggcagagggagtgctgtgggtgggaagaaggacccatcaccaccagggacccaaggagtcgtgtactttgctgacagtggcaacacctacagctgggagctgtttgaggagatgcgctggacccgtggtgtctcagtgtggcctgtggggctggtgggtggcctgcgagtcaagggccctcaggtacaggacagccgggtagtgggcttccacacagcatgggagcccaacgggcccttccctgtggatatggccggatttgctgtggccctgcccttgctgttagctaagcccaatgcccagtttgattccactgctccccggagccacctggagagcagtcttctaagccaccttgtggatcccaaggacctggagccacgggctgccaactgcactcgggtactggtgtgacatacacggacagcgaagcccaagatgaagcagaaggagcagctgcagcggcagggccagggctcagacccagcaattgaggtgtga

SEQ ID NO: 408447 - DNA, 1000 bp, Homo Sapiens
cttcaagaataaaatcacagttctttctgagaaacagttctctaaaaggtatttgaaataccttaccaagaaataccttaagaagagcagtcttcatgattggcttcgagtggttgcatctgacaggagacttacaaactttgttacttccagattagtcaagaagatgaagcagagtcggaggactagggcaaacggacctgaattcttcaaggaaagtagaattggcggtggagctggggggcagaggaggagaagacacaaaaagccaactcagtgggaagcgccctcaaagccaaaggtgtggcgctcggagctgtggccgccctcgcccgggagtcggggccaggagaacgggccctggaggcagggcagggcacggcgagattttgcttttgtttttagtgaccattttgatctggttgtaaaaagtttacgaggccttctttttgaaatgagaagcacaagaaggggagaaaagacccgcagcccgcctcaggagggcaaggtttctagccccctgcggctccgggaccacccaggacccggggcgtcgtgggaccgatctcgaaggatcttagaacgacactgggagagcgcggcaagaactagccccaccttcccccgacgccccggactgactgccgggcgcagacccgacttctcccgaaccagcctcggaccagccttagaaggcggaaaacaggattcaaacccgcctatgagcagtggtaggggcgggggctgtgggggcaggactcggtttaaggaaccaaccgcctcgttaccatttgtgggcggagagcgctggggccctgcggacggaagaccctggcttgaccggactaacagtgtcgccgaagcaaagcagcccctctggcattccgaacaaggggctgttcatatatttgccttcaatgatttcctgaagggacatgtggaagtaatagcgagcggtgcagtcacccaagctgaagatgcacgagagcgggtcgcgtag

SEQ ID NO: 408448 - DNA, 471 bp, Homo Sapiens
atgactttccagctccacatgtccactggggcccatcatatgtttggccatggaagagttcaggaccgcataagagggactcccaccgaaggtgcccagcttctggcctacagtgaacctggtatcaaatccaaagtctgttatttttatgttgtgatggaccacaaggaaattcttgggcttcaggtccctatggatatcccccttctgttggtggatgatgttcagactgtgcaaggacattgtaaaggtcagcaaattggccacgtactcaaggtttacaggaagaaagatgtcatctacactgaatgggtgcagcagcaaaaggctaatggtacaactgtccgtgtaggcattcaccccagcaaagtggttatcactaggctaaaagtggacaaagaccataaaaagatccatgaacagaaagccaaatcttgccaaacttcaggaaaacacctggatttggaataa

SEQ ID NO: 408449 - DNA, 771 bp, Homo Sapiens
atggggtttgttaaaattgttaagaataaggcctactttaagagttaccaagtgaaatttagaagatgatgaaagggtaaaactgattactatgctcagaaatgcttggccggcctgacaaattatgctgcagcgtattgtactggcctgctgctggcccgcaggcttctcaataggttaggcatggacaagatctatgaaggccaagtggaggtgactggcaatgaatacaatgtggaaagcattgatggtcagccaggtgcctttacctgctatttggtcgcagaccttgccagaactaccactggcaataaagtgtttggtgccccgaagggagctgtggatggaggtttgtctaaccctcacagtagcaaacgattccttggtttgtctatccctcacagtaccaaatgaatccttggttatgattctgaaaacaaggaatttaatgcagaagtacaccggaagcacatcatgggccagaagtttgcagatgacctgcgctacttaatagaagaagatgaaaatgcttccaaaaaacagttctctcaatacacaaagaacagcgtaactccagacttgatggaggagatgtataagaaagctcatgctgctgtacgagagaatccagtctatgaaaagaagcccaagaaagaaattaaaaagaagaggtagaactgtcccaaaatatcccttgctcagaagaaagattgggtagctcaagagaaggcaagctccctcagagctcaggagcgggctgccgagagctaa

SEQ ID NO: 408450 - DNA, 1000 bp, Homo Sapiens
ctggacgcgccgggccctgcggccgccctcgggcttccacatccgctgcctgggtgagtgcgaccgccgcgcgcccgtcccgtcccttcccaccggatcgcgtccgtgccgtgcggtcgcgggtgccccgccctgccccagcccgccgcgggcaccgccgaggctcccctgggtgcccgcgtccctgccgggggaggagccgggggccctctgcgagcgtgggattggggaacttcctggcaccgaaaggagggagccgtcccattcccggacggtagggcccaggacatgcccttgtaaggcaagtggtcttcagagattccagactcccccgcatgcactgcccccacggccccacagctcgaagcccccatgcctggagggggcctttcccatcacattccttaggctcatagacctggaagatgagggaatgtggagctgtgctctctgccctaatcgtagtagctctggggatacccaggcagcctctggctccagcgactccctgtccccgtcactggccttcgaggcacagttcgtcttccctgtgaaagctgccactctgacctccctgctgagtatgagtgatggggtagaatcggcgaatcctttagatctttactgcattgttgctgaagttatgctgattgtgactatttctgggctgtcaatggatttttatgtggccctgagcacagtgtctcagggaggtggcttaaggtcctggaaatgccgaaaggagattgtcttcattgtcaggcttttcccttgcgtttcaagtcaggtgacagtgtttggagactgtgctgagcggattcagggcccagccccgtgggtccttaatgacttcaataacgacatctttggcaccaaaggaaatcgagagaataaaagcagcagtcgtcaggatttgaaggaagccacagattattaccatctgtacattttacagacctcttacaaaaaccagaaacccaggacccagactggagtgtaa

SEQ ID NO: 408451 - DNA, 1000 bp, Homo Sapiens
cacaggatcagccaaaccccctctccacagagacaaaggacacagaatcagccaaactctctctccacggaggcgaaggacacagaatcagccaaactccctctccacggaggcgaaggacacagaatcagccaaactccctctccacagagacaaaggacacagaatcagccacatcccctctccgtggaggcgaaggacacagaatcagccaaactccctctccgtggaggcgaaggagctgctgcaactgacggagggaccgtccaattgcttggaggcttcagcagacactatgtcaaaggctgcttagagaagacatccaggagacactatgtcagaggctgttcagaggagacacccagcagacactatgtcagaggctgttcagaggagacacccagcagacactatgtcagaggctgctcagagaagacacccagcagacactacgtcagaggctgctcagaggagacacccagcagacactacgtcagagcctgttcagaggagacacccagcagacactatgtcagaggctgctcagagaagacacccagcagacactatgtcagaggctgctcagaggagacacccagcagacactatgtcagaggctgctcagagaagggacccagcagacactatgtcagaggctgctcagagaagggacccagcagacactatgtcagaggctgctcagagaagacacccagcagacactacgtcagaggctgttcagaggagacacccagcagaccctatgtcagaggctgctcagagaagagacctagcagacactatgtcagaggctgctcagagaagagacccagaagacactatgtcagaggctgctcagagaagggacccagcagacgctatgtcagaagctgctcagagaagagacccagaagacactataagtcaggcctacgatggagcggtagaagccaaaggcaagaggaaagaactggaacagagctgggcgcagggtggctaa

SEQ ID NO: 408452 - DNA, 1000 bp, Homo Sapiens
aggctgttttggaagttcggtggactgccttggggacggcccccagaagcagggccaggaagcacttccccacttctctgagggctctgcgtcagatgagagcatgaaggtgggattggagctgcgctctgcttgtcaggctgtcacaccagcaccttctaacttcacaacccagctacacacactgctcaaagcctgtatccacatgttccatgtccaagacgagctcaagagcctggacccatctgccactttcagcagggttaactgcagctgcttgttcttcctgagcatcttctccaatggtgacctgagagttgagggaggcattggcgccaggattgaacagaggaaaagggagcacggacactcaggtggtgaggaccaggccatctcacctggaggctggaacccactccctgagagcttcaagatgcatgggtacctcatgtacctgtttgtaattacagccaaggaccagcaggcagcattactgcatccacatggggcttttactggaaccagtaagtctctgccagcccctcacaggctcctgggatgccactcattctgcgtctatggacagacaaccaggacacttgctcagtgcccacccactccttgtggcccacagcccatcactcaaccccagccccaccatcccctgcttcctaagccattcctcatgccagaagaaaagggagctgtcagtgggggagagagcagccctggaagagaggcccacgtgcttctgtttgacttcagggcagcctctcagggcaagaacccagagaagatggtggcctcacagaagcctgtggcagggctctgggcttggtggctgaacatctccctctttgctgccagccatggggcccagaaccacccattcatgagggtcaccaccacattgcaggtgtgcagctggacggctccccaggcagagcctgccatggactccatgcacacagaggatgcacaccttgaggctggactatga

SEQ ID NO: 408453 - DNA, 1000 bp, Homo Sapiens; identical to SEQ ID NO: 295562

SEQ ID NO: 408454 - DNA, 969 bp, Homo Sapiens
atgaatgctttaactaaggtgaagctgatcaacaagctgaatgagggagaggtccagcttggggtggccgataaggtgtcctggcactccgagtacaaggacagcgcctggatcttcctgggagggcttccttatgaactgactgaaggggacatcatctgtgtattctcacaatatggggagattgttaacattaatcttgtgcgggacaagaagactgggaaatccaaaggattctgtttcctctgctatgaagaccagaggagcacaattctggccgttgacaattttaatgggatcaagatcaaaggaagaactatccgagtggatcatgtgtctaactatcgggctcctaagaactcggaagaaatggatgatgcgaccaaagagctccagaagggctcctgtgggcctcatacctactcatcaagttcgtctgagagctctgaagatgaaaaaccaataaaaaagcacaagaaagagaaaaaggaaaaaaagaaaagaaagaaagaaaaagagaaaactgatcggttggtacaggcagagcaaccatcctcttcgtcacccacaagcaagacagtaaaggaaaaagatgaccctggccctaagaagcacagcagcaagaactcggagagagctcagaagtcacagcccagggagaggcggaagctccccgaagccaggactgcctgctacggtggagcagaggacctagagagggagctgaagaaggagaaacccaagcacgagcacaagtcctcaagcaggaaggaggcaagagaagaaacaaccggggatagggacagagggcagagctcagacacactttctagcccgtacaactggcgttccgaagggcgtagtcacagaactcgaagtaggagccgagataaatcccataggcataaaaaagcccgtcgctcctgggagtgagagtcttcgaatcccagcgaccgtaggcgtcactga

SEQ ID NO: 408455 - DNA, 1000 bp, Homo Sapiens
catggccttggggttcctcgccagcaaaatcctcaaggagggggcttgccctggggagccaggcaaggagggcagatgcattgtcctggcactgacctatgggcaggggccagccagtggcagtggcagcgacgagggcctgctgttgctcacttgtcaagtccgcaggtttcaggggctaacttgtgagcaagccaggggctttctggatggagactcatccctccagagggcagggctgggtgttggtgtgggcagtattctggaggaggcaagcggggaaacccgtgggaaatccgggcgcctctgggaagctgggtgtggtgggtcgtccttcccggagcggggggcggggcgtcccaggctccgcctctgcccatcgcccctcctcctcgtcctgctccgagggggccgcggagcttccttgcggccggcgggagctgagtcacggcggccctgcaagcggttggccttatctccggacttcgctgctcccgaaagccctcagcccgcctgccaggctacacctaacttgcgccaagttcctccagcagttctggaaatactcccaggggcccatcggcttggggtcccagggaaggagggaggtctccttcctggctggctggagcagttccagaaagcccgagcttgtgggcccctggcggcacggaggccagtccttctccttcctcgagagaaggtgagctcggcgggcgcagcgggttgggtgggtgtggcccgcggctccgggaacagacccaaggccccgccaccgccggctagcagcccgacagcccgcccgcctggcgagcgcaggctcttcttccagaaactgcgaggatccgagcgtactgtttgtgcaccacaaggtcaagtcgggaagtggagccggaggaggaggggcgaggaggcgaagggtggggagaggggcgccccgcttcctcgccatgtgccagcctttggaagttacccctcggtttttaacctttcggggtaa

SEQ ID NO: 408456 - DNA, 912 bp, Homo Sapiens
atgttgtcatcccagatttcctcttccagatactgcttggctgttggattctcctcaaggagcctcatatggaaggaaaggggcaggcaccttcatggtgaaatcccggagcatggcagaactccaaaggctcagaaaatgaggggctccaaagcagctggccccagtgaggtgcagctttcaggagccccctgccagagaaaacccaaagcagacgggagccagaagcccatgcagatgaagacccccatggaggctatagcctctgcaaccccaagccccccacctgacccaggtgtagggaaggcccgattcccgaaggagtatcgggccatccccatcgcctgcccgtcccgcccctaccatctgtctttcagaatcaagcacttcagccagtgcagccagctgctgctggtgaactcctctggcgcagacaccggggaatatagctgttgggctccgcactgtcaggacggcgcatgcgctgaatgcctggcctaccagagaaagactttcatcttcttcacagataactactatgaggtggtacagctgcgcactcatcatccagccttgcttcccttccaagttaaaaaccccctggcccagatggcactacactgggagctccccactgaggaggtcccagagatgaacgttagcaactgtttccttggcatctgctgtgagatcagaccttcccaagtggtgttggagagtgaacaggcccatgtggtacacggggagagccaggtacagcaggaggcagagggcaccctgtatgtggaggggacctgggctagggatgctggtgtctacacctgctgggccaccaaccttcagggcactggtttggccaccacccatgtccacgtgactcgaggtcctcgtgtctcctctaccccttcctag

SEQ ID NO: 408457 - DNA, 1000 bp, Homo Sapiens
gactggttacacgatccctgagcagtcggcatcccccaacttcttagaaggacaagtggtgttcagtgacccaagattgggcaataacaggtctgtgacgctcatagatatctggggctgcacgtgcactacaccaactggctcagtgtgtgcctcccctacaccagcaggcgctgcgaacgagcgggtgggcctgtttgacgcagcaaaattcagattctgtgtcagctgcagagaggaagcggccctagcgctgctccttactcctgcggctggcgcgcaaagcgggagagccgtttccatggagaccgggacccgggcgatgcgctttggacttgctccttggggctcagtaacacatagaaacattagcatgcagaggcctaaatatagctgcattcagggcgattcatccagcctgaaacttggccgaggctttagaatgagtgcactgagcacgactcaagaagagtctatcgcctccattcctcccatggaccacacgtgggttgtgaagtggagacgcagcacagagccccttctcaggggcacactgatgtcagggttttcttgtttctcctctgatccctcctccttgagaacagggaaggaagaaacccagagggctcaccagccccagccccctgcatctggacagagtgtctacctgctaaggcagtgcgtccaccccatctgcagcacagatgtcaacctggcccaaggctttcttgcatgtaattgtcctacaggatggacgcctgctaattttggctgtggctcagctgcacgatcacaccttcccctgcagcccactccccacaagcagcgagcggcctcagctgtgggtcccgggccccttcacacagttgaagcccctcaggatgaagctggagcggcgcatgtgagaatcaggattgcttggccctgcactggatggagaatgaaggagagagactgtggcctgagctccgagtcccttgatagtctggactcgctgtaa

SEQ ID NO: 408458 - DNA, 1000 bp, Homo Sapiens
gcaggccgacagtgccaaggccgtgagtacatgtgccaaggctatcgaggccctcgtaaagcccaaagaggttaagcccaagatcccaaagggtgtcagctggctcaggctgtgccagccaaaggccaaggcccaggaccaaaccaaggcccaggtccaaatcaaggcccaggctgcagctccagcttcagttccaactcaggctcccaaaggaccgtttgctgctgcctttttctgtacatttctccctgcagagctcttccgctgtgtttttgctcaacaccctaaaggtgaggacagtagatccaagcacctctgcttcataggacagcagccacggggctgccaagatcccattttagggactaagaatcaccaggcttatcttgtaaccctcactccaccaactgtagatgtagcccatttaagcaaaatcctagaattcatggaagaagagaatttgaggagtaatgaggtaaaagccaaaggggaacctctagaagagcaggactgtggagcagctgatctgctctctttggcccacttcacaattcatacctgtttcgaggcggctggatccgcctgcgggctacatccatcacaaggcggctgctgtggtgactcagccgggctgaaatccggttcttccggccgcatgtccctggacatctgcctgctggaaagccaagacaagcaggttcacacacctatgttcactgatacatgcttgatcaacaacccaaaacaaaccaccaggtcagacaacacccgcccgcggccgggccaggcgccgagcaggcagctgcggccctcgggaagcccggagaggggacccactccggcgccctgcccgcgtccccctttgtgggtgacagactgcacgggaggacaccggggcagctcccatgcccacgagggtgccctccctcgggaactagggaaggcagaagagcccgctgaccaccagaaaaaacacggggacggcggggacaagggctga

SEQ ID NO: 408459 - DNA, 834 bp, Homo Sapiens
atggaactcagggccgaatacctcagggagaagctgcagcgggacctggcggcggagcatgtggcggtggaggacaacacgaccctcaaccattgcgcctgtagcttctggcggtgtcggccaagttcgaggggaagccgctgcttcagagacaccgcctgtttcaattcagggcagttggtttatggggcgactgactgcccaagagacccagggctccgcaaggagacggcgcaggtgtcggggctccccgcaggtgaggaggccgacgttccaggaggtccgcccgggcggtccctgagtcctgcctcgcggctgctcgctgggatccgagggcggaacgggacgcgcaggaacccggcccgacgggcgcggctcacacccgtgctcttcctgcgctctcggcctcactttgcggccagagccgcggccctgcgcgtggccggcggccgcttctttatctccgaccccactgcccagtactgtgggcgcgatgctggagctgggaattcttcctcggagcccctggaccgagttgcgctgcgcctgcagcaacaggtagccccgagggatgggcggaggccccggccgaacccggagctggcctttgtcctgccaattagagggctctccagagggacagcgtgggtgggggtaggtggggaagggcgggagaggagtttcctaacacttggagcccctttgagttgttctgtgtattgggtggaggagggtgaatccgagaggagggaggagggtgaatccgagaggaggaaggaggatgaagagcctagcctgcgccccacctctgattgtgtaagcgcctttatctag

SEQ ID NO: 408460 - DNA, 936 bp, Homo Sapiens
atgaatgatgatggaaaagtcaatgctagctctgaggggtactttattttagttggattttctaattggccttatctggaagtagttctctttgtggttattttgatcttctgcttgatgacactgataggaaacctgttcatcatcatcctgacatacctggactcccatctccatactcccttgtatttcttcctttcaaatctctcatttctggatctctgctacaccaccagctctatccctcagttgctggtcagtctctggggtgtgggaaagaccatttcttatgctggttgcatggttcaactttactttgttctcacactgggaaccacagagtgtttcctactggtggcgatgtcctatgaccgttatgcagctgtgtgtagacctttgcattacactgtcctcatgcactctcgtttctgccacttgttggctgtggcttcttgggtaagtggttttacaaacccagcacttcattcctccttcaccttctgggtacctctgtgtggacaccgccaaatagatcactttttctgtgaagttccggcacttttatgattatcatttgtcaatacccgtgaaaataaactgaccctcatgatcacaagctccatttttgttctgctacttctcaccctcattttcacttcctatggtgctattgcccaggctgtactgaggatgcagtcaaccactgggcttcagaaagtatttggaacatgtggagctcatcatatggttgtatctctctttttcattccggccatgtgcatgtatctccagccaccatcagggaattctcaagatcaaggcaagttcattgctctcttttatactgttgttacacctagtcttaaccctctaatctacaccctcagaaacaaagatgtaagaggggtagtgaagagactaagggggtgggagtga

SEQ ID NO: 408461 - DNA, 1000 bp, Homo Sapiens
cagcgcagagaccaggacgcgcagcctcgcctgcagcactcggccctacctctaccccgccgctacctctaccccgccgcggcgccgacagcgagggccccgcctcccccagctggctccagagccaagccacccacagcaggaaagccacgaagaaaacataatgttagactcagaaatggtggcctccatgttcttccgcccgctgttggtggccgccacccttcggaccacactgcgggctgctgctcaggttctgggaagttctggattgtttaataaccatggactccaagtacagcagcaacagcaaaggaatctctcactacatgaatacatgacagcagaaaacatgatcaagctttacagcctttttctgaaatacgatgcaaccatgatagaaataaattcaatggtggaagattcagatggagctgcattgtgtaaggatgcaaagatcaattttgactctaattcagcctatcgccaaaagaaaatgtttgatctacaggactggacccaggaagatgaaaggaacaaagatgctgctaaggcagatctcaactacactggcctcgatggaagtataggctgcctagtaaatggtgctggtttggctatggccacaatggatataataaaacttcatggagagactccagctaatttccttgttggtggtggtgctacagtccatcaagtaacagaagcatttaagcctatcacttcagataaaaaggtactggctattctggtcaacatttgtggaggaatcatgcactgtgatattacagcaaagggtatagtcatggcagtaaaaagtttggaaattaaaatacctgttgtggtacagttacaaggtacacaagttgatgatgttaaggcactaaaagcagacagtggacttaaaatacttgcttgtgatgatttggtggaagctgctagagtgcttgtaaagctctctgaaatagtgaagcaaagcaagcgcatgtggatgtga

SEQ ID NO: 408462 - DNA, 819 bp, Homo Sapiens; identical to SEQ ID NO: 225092

SEQ ID NO: 408463 - DNA, 306 bp, Homo Sapiens
atggcagatcaagggatcaagggatggctgaacagacttcccactgctggtgtgggtgacacggtgatggccacagtcaagaaaggcaaaccagagctcagaaaaaaggtacatccagcagtggttattcgacaacgaaagtcataccgcagaaaagatggcgtgtttctttattttgaagataatgcaggggtcacagtgaacaataaaggcgagatgaaaggttctgccattacaggaccagtagcaaaggagtgtgcagacttgtggccctggattgcgtccagtgctggcagcattgcatga

SEQ ID NO: 408464 - DNA, 1000 bp, Homo Sapiens
gagttctctggacacaaatacagacttctatattggaggagtatcttctttaaatcttgtaaatcccatggcaatagaaaatgaacctgtaggttttcaaggctgtatccgacaagttatcataaataatcaagaattacaattaactgaatttggagcaaaaggtggctcaaatgtaggtgactgtgatgggacagcctgtgggtacaacacatgcagaaatggaggtgaatgtacagtaaatggcacaactttttcttgcagatgtttgccagattgggctggaaatacatgtaaccagtctgtgtcctgtttgaataatctttgcctccaccaatctttatgtatacctgaccaatcattttcttacagttgcctgtgtactttgggttgggtgggaaggtattgtgaaaacaaaacttcattttcaactgcaaaatttatgggtaattcttacattaaatacattgatccaaattatagaatgagaaacctccagttcactactatatccttaaatttcagtaccactaaaacagaaggtctaattgtatggatgggaatagctcaaaatgaagaaaatgattttctggcaattggtctccataatcagaccttgaaaatagcagttaacttgggagaaagaatctctgtgcctatgagctataacaatggcacattctgttgtaataaatggcaccatgtagttgtaattcaaaatcagactcttatcaaggcctacataaataacagtctaattctttccgaggatattgatccacataaaaactttgtggctctaaactatgatggcatttgttatctagggggctttgaatatggtagaaaggtaaatatcgttactcaagagatttttaaaaccaattttgttggcaaaattaaagatgttgtattttttcaggaaccaaaaaacattgaactaattaaattagaaggatacaatgtttatgatggagatgaacaaaatgaggttacataa

SEQ ID NO: 408465 - DNA, 1000 bp, Homo Sapiens
gaatgagatgacagtaataagaggccaccgagatcgcagactcattgaaacacgttctttagttgaagtggagaaaggcttggagaggcgccttctgaaagagcgtcggtcctcctcggcatcttgctcagtggagcactgttggctgggaggaaacatggccttcgatgttgcccacttggcagtttccaccattgttgactcacttaggctgatggcagctgcctctgctgggaaggaagcgtttttcccacaacatattaaatgcggcactggaggatggctggctggtccaggggccggatctggctctgttgctcacaatgattctgtttggcaagcgtttttaaaaagccttgctgggaaaggtggacgatgtttgtcttccacattccagtgccggggagaaagctccttttcagagagagcggacctggcatgcttgcaccgcagccacgtcaccccgggccgttcaacaaagcaagcggcccgtgcaccggggtccaggctgatcaccggcggccggccgcctggaagggggcgctgggccagtctctgtgggcttgggtgtggtcagcctgtccccagctcctgggttcggaagcacattcacaatcgtgatgccatcggagcccagggccttgtccgcacgtggcagcacagcacggcagaggctgcagggctgaagcctgcgcagcggcgctggtgtccgaaggcgcaggggaagggcagcccctctggcagccgccgcacaggccgtcccggggcagcaggacccgagcagagaccacgaggccaacgccagcagctcgggaactcaccgagacgagacttagatgccaagggttgtgtgggcaggaacaacctgctgtttgcagacttcgatgcccctccgccccagctaattagaggcgagcaggtcactagcactccaggcctctgttgcccagcagattttacagtggatggatttggccttgacctgctgcggaagctttag

SEQ ID NO: 408466 - DNA, 1000 bp, Homo Sapiens
ccccgatgcagggcagccacacagagccacacgtggccgagcacccagggaggggccccacgggccgccagaaccaccagggccgttctcaaagaagtggaggatagccatctatgtagtcaaagaaaaactaaacctcaactcaaaaccaaatcgacagcatcgactcaccacggccccaaacgagttctacttctgcctgccgatgacagaccgcctccccgccaaaccccgcccggcaaccatgagaaagactccaacgctttgcatccctgacagacagcatcaacttccacagcagccaggttcttccccacctgatccagaggaacagcgagaactagagcccctgataagaactcggaggaaaaatatccctgctccttctcggtatcttcataaagaactgcatatgctattctggactgaatgcagcttcctggatatttgttattgcagtcctatggatgagagcctgcatgtggaggagaagagcctgcaggtggaggaggggagcctgcaggtggaggaggggagcctgcaggtggaggagaagagcctgcaggtggaggaggggagcctgcaggtggagaagaagagcctgcaggtggaggagaggagcctgcaggtggaggagaggagcctgcaggtggaggagaagagcctgcaggtggaggagaggagcctgcaggtggaggagaggagcctgcaggtggaggaggggagcctgcaggtggagaagagggacctgcaggtggaggaggggagcctgcaggtggaggaggggagcctgcaggtggaggaggggagcctgcaggtggaggaggggagcctgcaggtggaggagggggacctgcaggtggaggaggggggcctgcaggtggaggaggggagcctgcaggtggaggaggggagggaagcagaaactcggaaagaacgcgaggacagctcatttgcagtgcttcctgttgagggagcaggaagtgtgcaggagttgtga

SEQ ID NO: 408467 - DNA, 1000 bp, Homo Sapiens
cactgtggcccctgccaccctcctatgtgacttcagtgtccacacagacagcaccccaaccctgacctccgagggagaagctccctttcagtgcaaagcagcgagcagcgccctcaatgctgtggaaaggagccacgccaggggactggccatggggctgccaggaaatccagcagcatcccggggacaggacctcggggagcccacatggcctcatcccacaggcaacagcccatgtgctcctgagcccagctgcctctctccatcaccctctgaggctcagccagtgctgaatgatcagacatcaaacttctgtgagggggatggtgcctgtggacaggctttctcacattgtcctcagcgtcagtggcccaactgctcagacagccagacaccccacactctgggtcctcttacaaccaacgtcacagggaccgaaaatgacctcactctgcagacaaccaaagcaacagggaccaaaaatgacctcactctgcaggtaaccaaagtcacagggaccaaaaatgacctcactctgaagacaaccaaagccacagggaacgaaaatgacctcactctgcaggtaaccaaagtcacagggaccgaaaatgacctcactctgcagacaaccaaagcgacagggaccaaaaatgacctcactctgaagacaaccaaagccacagggaatgaaaatgacctcaccctgcaggtaaccaaagtcacagggaccgaaaatgacctcactctgcaggtaaccaaagtcacagggaccaaaaatgacctcaccctgcagacaaccaaagtcacagggaccaaaaatgatctcacactgcagacaaccaaagtcacagggactgaaaatgacctcactctgcaggtaaccaaagtcacagggaccgaaaatgacctcaccctgcagacaaccaaagtcacagggagtgaagactccacaggagactggaggaggggagccacagctcttgccacccagcgagtctaa

SEQ ID NO: 408468 - DNA, 1000 bp, Homo Sapiens
tgagtcctacacccacaagatgggccactgcagctccatcctggggctggactccaggcctcttctcccatggtcaggggctctgggggcagaagcaggggcagcaggtgcttccgtgggagaggggggctataaaaatgaactgacatcaccagagatgaagatttctgatggtgataggaggaagacttgccagtggccaatcaccgagaagcatcttaactgtttacatggtgtagacaggcctgtggttgaccaccacactgagtaccatgctcggtgggctctgtccatgctgtcgggtttgtgcacacacatcattgcgatcctcttctacaggctgccgttcagatcaagggagcaccatagaaatgacagtggcttccgcattgtcaccaggacccctgcatggcctccccagaaccaccacctttacacactgagacgatggcataacagcgaggacgagaacaaccgcccctcagagaaggatgaaatgaggaagcccttttctacggcccactcagactccagggttgacctctggggatcccttggtgttatttatctttatcacctcaagtctgtgaaatgtgtaagggtatgggcaggtgacactgggtccgcaggtccccaggcccctccagctcctgtctctacaatgcaccagggacgggagcgctggagatgctctgaatcaaacctaagcagatctatgagacaacccggttcactcctcaaaggcatggccctcctttttacatgcttaagacagcaaccagccccttcatcagtgagaagaaactgccctttgaggtttgaagagcagggtcagggtcttccaccctcagcgcacccattgggcgagttcagtgtctgcagtgcagcgcgccgccggcagggggcggcagacgccaatccacggcgttcgggacgcgccagagatattgggtccgtgcaggtggcttggtttggggacctcaaagatgcatcctgctaa

SEQ ID NO: 408469 - DNA, 1000 bp, Homo Sapiens
gagaaccccagaagcagcatatagaatattaatctttggagatacaccctatattcctttcagagatgctgcctatggaagctgcaatttctacattacacttcttgactgttttcatgcagtaaagaaggcaatgcagtatggcttccttaatttcaactcatttaaccttgatgaatatgaacactatgaaaaagcagaaaacggagatttaaattggataataccagaccgatttattgccttctgtggacctcattcaagagccagacttgaaagtggttaccaccaacattctcccgagacttatattcaatattttaagaatcacaatgttactaccattattcgtctgaataaaaggatgtatgatgccaaacgctttacggatgctggcttcgatcaccatgatcttttctttgcggatggcagcacccctactgatgccattgtcaaaagatttctggatatctgtgaaaatgctgagggtgccattgcagtacattgtaaagctggccttggtcgcacaggcactctgatagcctgctacatcatgaagcattacaggatgacagcagccgagaccattgcgtgggtaaggatctgcagacctggcttggtgatcgggcctcagcagcagtttttggtgatgaagcaaacaagcctctggctggaaggggactattttcgtcagaggttaaaggggcaggagaatggacaacacagagcagccttctccaaacttctctctggtgttgatgacatttccataaatggggtcgagaatcaagaccagcaagaacccaaaccttacagtgatgacgacgaaatcaatggagtgacacaaggtgatagaagtcgggccctgaaaaggcgaagacaatcaaaaacaaacgatattcttctcccatctcccctggctgtgctgacctttacactgtgtagtgttgtcatctggtggattgtttgtgactacattcttcccatcctgctattctga

SEQ ID NO: 408470 - DNA, 1000 bp, Homo Sapiens
tagtgtagagaagccctacaaatgtcaagaatgtgacaaagccttgaaccagtgctcacaccttattggacatgagagaattcatactggagagaaatcttacaaatgtgaagaatgtggcaaagccttcaaccagggcttacatctcactggacacaagagaactcatactggaaggaaacaatacacatgtgaagaatgtggcaaaacttttaactggttgtcatacttttctcaacataagagaattcatactggagagaaacactacaattataaaaaatgtggaaaagcttttatgcatggctgaattcttactaaaaataagataattcatactggagagaaatgctacaaatgtgaagaatgtggcaaaacctttaaccagagctcacatcttattggacacaagagaattcatatgggaaggaaatcctacaattgtgaaaaatgtggaaaagcttttatgcatggctcaatccttactaaaaataagagaattcatactggagagaaatgctacaaatgtgaagaatgtggaaaacctttaaccagagctcacaccttattggacataagagaattcatactgaaaggaaaccctacacgtgaagaatgtggcaaaacttttaactggttctcatacttttctcaacataagagaattcatactggagagaaaccctacaattgtgaagaatgtggaaaagcttttatgcatggctcaatcctgactaaaaataggagaattcatactggagagaaatgctacaaatgtgaagaatgtggcaaaacctttaaccagagctcacatcttattggacacaagagaattcatactggagagcaatgctacaaatgtgaaaaacgtggcaaagcctttaactgggtttcaaaccttactaaatataagggaattcatactggagagaaatcctagaaatgtgaagaatgtggtaagtatttgatcaatggtcaatccttactgaatataagataa

SEQ ID NO: 408471 - DNA, 480 bp, Homo Sapiens
atggtccttgtgggtatcttggatcatccccagaaagctgtaatacttggaccaggaaaacacaggagagtgactgaggacacatcaccctgcaaaggatccaaagacattctgggaaggcgcgcgtgcctagagaagatgagaggagatgcgcagtgtcagctgcaggagatcaaagtcctccaggagatgcagctgcttcagctggctgtagacaattatcaccttcagtctgtgaagcaattttggctgcaggagatcaaagttctccaggagatgcagctgcttcagctggctgtagacaattatcaccttcagcctgtggagcaattttgggtctgcctccagttaacggagtggctcagtgagactgagagtggcaggcgcatccctgcgagaggcctgacccaggtgtgtaggccaagcagccagcccggaaatccaatggggtgttcttggggtacagaggaggatctgtga

SEQ ID NO: 408472 - DNA, 1000 bp, Homo Sapiens
ctacacggtggagactgtcctgtttctcctctgtgctgagtctgtctacatggtggaaaccgtcgtgtttctcctctatgctgagcctgtctacacggtggagactgtcctgtttctcctgtatgctgagcctgtctgcatggtggaaactgtcctgtttctcctctatgctgagtctgtctacctggtggagactgtcctgtttctcctctatgctgagcctgtctacatggtggagactgtcctgtttctcctctgtgctgagtctgtctacctggtggatactgtcctgtttctcctctatgctcagtctgtcaacctggtggagactgtcctgtttctcctctatgctgagtctgtctacacggtggagactgtcctgtttctcctctatgctgagcctgtctacacggtggagactgtcctgtttctcctctgtgctgagtctgtctacacggtggagactgtcctgtttctcctctatgctgagcctgtctacatggtggagattgtcctgtttctcctctgtgctgagtctgtctacacggtggagactgtcctgtttctcctctatgctgagcctgtctacctggtggagactgtcctgtttctcctctatgctgagcctgtctacatggtggagactgtcctgtttctcctctgtgctgagtctgtctacacggtggagaccatattgtttctcctctatgctgagtctgtctacatgatggagactgtcctgtttctcctctatgctgagtctgtctacacggtggagactgtcctgtttctcctgtatgctgagcctgtctgcatggtggaaactgtcctgtttctcctctatgctgagtctgtctacatggtgtagaccatattgtttctcctctatgctgagcctgtctacatggtggagactgtcctgtttctcctatatgctgagtctgtctacatggtggagaccatattgtttctcctctatgctgagtctcctctatgctga

SEQ ID NO: 408473 - DNA, 603 bp, Homo Sapiens
atgaccgacatgaaagtagaatgtcatcatgtcaggctgtaccagcgttggaagactaaacactgtggggaagaacctcccttatggaatattatcaacagctatggcctaggtatgaacatgacaggtacacaagagttccaacacccgacaatctacttcagtccaagaagagtgccctccctcttgctccccatccaactcatgcatgttggcaagtcaagttcccccactgagttctccacacataaggagggagtcaacaccattgctaagtcggatcagctcaagggtctccagtatcagttttatcagatcccagggacctgcctgctcccagaggtgacagagaaaaatcaaggaacgatctgtatggtcactgacatggatgaaacccttgtgcatagctccattaagccaatcagcaatgctgactgcctagtgactggctgctatgtcaatgacctcagccatctggggagggacctgaggaaaactctcatcctggacaactcgcctgcttcttacgtcttccacacagagaatgcagtgcctgtgcagtcctggtttgataacattccagacagcagctgctgcacctga

SEQ ID NO: 408474 - DNA, 1000 bp, Homo Sapiens
caggttgctggtgttttctgagctctccctctcctcggcctgtttgctgttgaaaacgtacaatgtggccacaggcctgcttttccaaactcgtcatggttaccatttcatgaacggcttcaagtccagaatggtgagtgcccgtggcaaattagacatggccgtggtaaatgtcactgtggtcatgggaacgagaacattcagcaacatccactcggagagaaagcaagtgcagaaggtcattattcacaaagattacaaaccgccccagctcgacagtgacctctctctgcttctacttgccacaccagtgcaattcagcaatttcaaaatgcctgtctgcctgcaggaggaggagaggacctgggactggtgttggatggcacagtgggtaacgaccaatgggtatgaccaatatgatgacttaaacatgcacctggaaaagctgagagtggtgcagattagccggaaagaatgtgccaagaggataaaccagctgtccaggaacatgatttgtgcttggaacgaaccaggcaccaatggtatcttcaagggagacagtggggcacctctggtttgtgctatttatggaacccagagactcttccaagtgggtgtcttcagtgggggcataagatctggctccagggggagacctgacctgctggtttcggagccatcgacctcctcatttccaccgcagagggctggaggagattcagaaaatcagggcagggcccaggagaaggttctttcagagcatggcttcagcctggttacttctgacaccagccaggaggaacagacttcttccccatacagcaggtaccaccagaagtacctgagcaagatcaccctcagctcctgcagcctcagggcaccggagtgtcctgtccacggggcatttgttacggacaaagatttgtgtggcctttcactttgcacgctgaagcttaaccctggctgcaacgggacggggggccaccaaggaagtcattaa

SEQ ID NO: 408475 - DNA, 1000 bp, Homo Sapiens
tccttctaaagctggtcaaacccctctggtgaatctcatagtggatgcttttacttccttcgctctggcaactgaaaagactatggcatcacttctgctttactgcagatccctgtctcatgaactaagagaggagaggacaagcctaccccggactaccgcagctcggggacagcgcgcgggccaggcggcccgagatgcgcaggccacgcagcctcgccgacgagtggccctggagagcctccaggcgcccgggggccagagcgggcgggcggaagcctcacccccgcctccaccccttcgcggcgcccggggcgggctcaggtgcggggttgggcggcgagagcggccgcggcgggtgtccggtgtccggtgtccggtgtccggtgtctggagccgctggctaggtgagcggcggtccccggggcctgggggcttgcagggggtggcgggggaacttcgagggagagggtctgccggggctgaggaccttcggggaagttctggaatccggcagggacacgcggcgcgtgcttccacccgcggggagtgcaggccccgggagggtccgggctggcctagagtttctagactcctagcaggagcacgtcctcgacttgcgcatggaaatcttccaggagggaagtcccgggaaacggtggcagctggcgcagcacccccgcagcacgttccccgcgcaccggcacccaggggcgcccccacgtggggtctgggagcgcgcggaggccagtgcagcgccgcctccctcgggctgcagcggcggggctggcccagacccagaccgggtgcccagtgcgctcagccaagcggcgcccctgcccgctcctggactcgggggtcacgcgggcaccggaaggagctacagtttgtaggttttctgagttgtctctcccttcccagggagcttagagaagcagcaagcgtggcacctccccctttcaaacagatgctcctcatcgctccaaaggctttcgtttga

SEQ ID NO: 408476 - DNA, 1000 bp, Homo Sapiens; identical to SEQ ID NO: 295570

SEQ ID NO: 408477 - DNA, 930 bp, Homo Sapiens
atgcagaaataaaagaaactggagaagattggggaaggcacctatgggacagtgttcaaggccaaaaactgggagactcatgagattgtggctctgaaatgggtgaggctggatgacaatgatgacggtgtgccgagttctgccctccgggagatctgcctactcaaggagctgaagcacaagaacatcgtcaggcttcatgacctcctgcacagcgacaagaagctgactttggttttcaaattctgtcaccagcacctgaaaaagtattttgacagttgcaatggtgatctcgatcctgagattgtaaagtcatttctcttccagctgctaaaaggcctcggattctgtcacagccgcaatgtgctacgcagggacctgaagccccagaacctgctaataaacaggaatggggagctgaaattggctgactttggcctgtctcgagcctttgggatccccatctgctgttactgagctggagtggtcacactgtggtaccacccaccagatgtcttctttggggccaagctgtactccacgtccattgacttgtggtcagctggctgcatctttgcagagctggccaatgctggatggcctctttttccaggcaatgacgtcgatgaccagttgaagaggatcttctggctgctagggatgctcaccaaggagcagtggccctccatgaccaagctgccagactataagctgtacccattgtacccggccacaacatccctggtgaacatcgtgcccaaactcagtgccacagggagggatctgctgcagaatcttctgaagtgtaacccctgccaatgtatctcagcagaagaggccctgcagtacccctacttttccgacttctgtccgccctgggcccagggacccccagccaccaggctggggcctggcctatttaagccttag

SEQ ID NO: 408478 - DNA, 1000 bp, Homo Sapiens
aacctccggggaataccagcgcgtccagtcccaactgtctgcagcgaggctgcctgctttcaaccacacccgaacagcttcacagaggacaacattgaggcctggaggccggagcgggctgggggtccagcatgagggctgggggatctgtggatccagccggcagggctgcgtgtcccaccagcagcagctatgcagacaggaaggaggagacaagggcctcatcactgacaaccatggcagtcactgtgctgtcgctcacagcctaggaggtcagctgagctgcaatccccgggaaggccctgaatcccaggtatgctggagggagcggagagtggacccctgcccagaagggaagatgcgtgcctgtccaccggtcagcagctggcccctgctgagagaacccatccacgacctccgccagggagccaacttgcagcgggccacatcccggggtgcgcaccaccctcggcacctgaaggccctcgcctccttccacagccctggagttgacgtctttgcccaatccccaccagcatccctgggtgcgcaccaccctcggcacctgaaggcccctcgcctccttccacagccctgccctggtgttgacgtctttgcccaatccccaccagcgctccggggcgcccaccaccctcggcacctgaaggccctcgcctccttccacagccctggtgttgacgtctttgcccaatccccaccagcatcccgggcgctccggggcgcccaccaccctcggcacctgaaggccctcgcctccttccacagccttcgtgatgacgtcttttcccaggattgcttttctcagggtgccctagggtccacagtgcacgcccctccgacatcaggcaggagcgagggccagggcactccctgcctcaatgctaccaccgcagttccacagtgcacagaaaaaccaccctacacagaagctctcacccgctccctgctctctgatgggcgatcctgcacacccccatga

SEQ ID NO: 408479 - DNA, 1000 bp, Homo Sapiens
tgtagtgaccaattggcagccccgtgaggctgaccctgtgggactggggtgcaggctgcctgccacactgctggttcttgcccaacacaagtcccaagaacaaaccagaaatgcggacccacaggaggtcctcagcttgacagacctgcgctccccttgcggctttgtcagggctcagcgtccctgcagctgccgggagaggaggagacagggcggctgcctgtgggtgccgcggaccttcggggcgggccagggaggcgggaccgctcctcagaaccccaggggcttcagtcctgggctgattggcgcgggaagcacagcccggccctccaggtccccaaggagaccccagcctcctgctgcccactgtgagcgacctccccggggctcctctggaagcggctccggcaagtatcgagtttgcctgtgcggagctgggggagcctccggctttcctgtttgctttgttaattattttcgtccccagaggaaggcgggcttctccagggggcgggctggtgagacccttctgcagaaggaggaggtgactgcctggtttgggctcctaggggactgcaggcttcttcaagcccatcgtggtactggcttttctctggacaccccagagagggggtcacacatgatctgggggaggtcagagcaggatgcatcctcctgtcaccatgaagcacatgtgctgagggactggtgcctggaaaggggagcagtgtggaaggaaatctggcctcatcccgtggaccagtgcctcagtttctccatttgtaaatggggctatgtgtcacccactggtggcttgctgttgggtgaaagagctgaggactgcatttttgctgtgtgtgacctatatggaagcctgtcatccatgacagtgtctgacaagcgcctgccagtctgcagcggggcgtccgtccactctggctatggggacatgtgggcccatttcctcatcatccctgcgtgtcccttcccaagctcatga

SEQ ID NO: 408480 - DNA, 1000 bp, Homo Sapiens
atccatggccttctacagggctaatgaggctggtgaggtggacctggagcaggctccggcatttggaggtgactacatgggggtacatccaatgggcctcttttggtctctgaagcctgagaggcctttccggaggctgctcaagcaggatgtgatgaacagccccttttgggtcagtctggacctatatgactccatttgttttcaagattcagccactgttcagcccaaggccagccagaccgtgcagcactggttctcaggccctggggtgcagaggcagcagatccaagaaggtccagtgcaaggagccctttttctccctccaggggaaggccctttcccaggagtcattgatttgtttgggggcattgggagcctagtagaatttcgggccagtcttttggcttcccatggttttgcagtgctggcattagcatattttgcctacaaagacttgcctgacaaactgcaggaggtggacttggaatattttgaggaagctgccaacttgctactagctcatcccaagatccaaaggccaggaattggagtgatctccgtgtgcaaaggtgccgagattggcttggctatggcctgctacctgaagcaggtggtggccaccgtctgcattaacgggcccaacgccagctttgaagttccactcagatacggggatctgattgctaggggttggattcttttcattgctggggagagtgacgaatgcctggatagcaaagcgtacgctgagcaggccgtggaccagctgcagagccatggcagaagcagcgggaggatgctggtgcacctcggggcaggccacctcctagaaccgccctatgctcccttgtgcttcgcgtgctggaacccgggcatttccaggcctttgctctggggaggagacgctgctgctcatgcggcagcccaggagcacgccttgggggagatccagaaattcttcaggcaacacctcattaagaccagaagcaaactctga

SEQ ID NO: 408481 - DNA, 558 bp, Homo Sapiens
atggccaccatcagacccctcatgaagcccaagatcatcaaaaagaggagcaagaagttcattcaccaccagtcagaacaatatagaagcaatgaaaacacaaagcacatgctgcccagcggcttctggaagtttctggtacgcattgtcaaggacttggaagggctgctgacatgcagaaaatcttactgtcctgagatagctcacaatgtgtcctctggaactgcaaagccatcatggaaagggcagcccagctggccatcagagtcaccagtcgcaatgccagaagtagaaacttctgcaagttcagcttttgactatgaattcttcagcgcgacttttgcagagagctctgttccaagaagctggcgccttaacacaagctatctaccgatgcacaagggaaggctggcttgggtccagattcggcgggagagtggaaacgcgacgctggccgacttcagccacaaaggcaatttctgcccagggctagcgttcctaagagggggccgagagaacgccaggctcgggcgtaggggcaagaagacccagagctaa

SEQ ID NO: 408482 - DNA, 1000 bp, Homo Sapiens
actggggagggggggcggtctcctgtgcatccttgccccatcaattgagtgctgtgggaagcacattaaggtggcagtctgggcagggaaagccatcagagcccagctcacctgtggagcccaggtcactatctatccgggatttgtgactggccccttccaccctctcaggactgactttccctccagctgggacagacatgaagttgagaagagcgacctcagagcacacagaaacacaggacatgatgaacacagtgtgaaaatcaccataagggagaccggcccctcgcctgagcagtgcgtctcccctctcctcctttcagctgtccttctcctgatctcatctgccattccacagcagacagctgtccctcagggtcgggcagcttggtcggtgactctgagggagaagggctttgatgttgtcgtccttctcatgtggccctgccactatgggccttcttgtcttgctggagtgcgaacgaaagaagaaggagggcctcggagtggggcgatgctggggtgctgctggcggtattcgagtcccagaaacccctggaacccccaacagaggacagattctgaactcctcaaggaggatcagggctgggaggtgtgggcggagcctagtgtgccagagcctcaacaagaagaaccaccagctgaaagtcaggatagtacatctggtcagaagacagaagaagatcagggtgcagctgagattcaaagtggtgggaagagaaagaaagaatgtctacggggggaggaggcctatgtgtgcatcatgccttatgccatgaccatgcctgacctggaagctgatctccaggagctgtctcagtcaaagactggggatgaatgcggagatgatcctgatatccaggggaagattctgccaaaatcagagcaatttaaaatgccagaaggagctgtccttctcctgatctcatctgccatcccacagcagacaggtgtccctggtagcctgacgacctag

SEQ ID NO: 408483 - DNA, 996 bp, Homo Sapiens
atggggtttgatttctcacacttcttcatcaagcatggcttgaagaaggaagacattatgacagacccatttgaaaatctgcaaagctgtggactcagaagaatgtacggagtccagattctttgcatacagttccaggaaggaccgcggcaaccgcggctgcccggaggtccgaactggagggtggccgcagccgtgacttccttgggaaccgcgctgcctcgactcggctacctctctgcgaagcactcgctaagccgggcagccccggggtcgcttagcggcccaggaggcgccagcgatcctgttcccctgcagagctatggggaccggaaggcgaaacagagctgtcgacgcgggagcatacgctgcccaccagtggagcgcaggtcatcaaagccgaatccgaatttgaattctgtgcggctgattgcagagctggtaggccgacggtttcccgcaggaaatgtctcctactactaccaaatctgtatcagcaacagcagcagctccaaggacagtatgtgtggcaatgcaagtacctgctgtcatgacatcagaaaatttcaactatggcggttgactgcctccaagatggctgagccttcctctgagatgacctccaacaaaggcctgagcaccaaggagcccaaagcggccaatgccacgatggcccacaagcagaagaggcatgggcactctcaccccagccgctgcagggacagcttcaccacctattttccccgggtgctgaagcaggttcacgcgggcctcagcctttcccccgaggcagtggatgtcatagattccttcgttcacgacatcttggagcacatcgccaccaaggccggccacttggcccactataccaagtgcaccaccatcacctcctgcgagatgcagaccaccattcgcctgatgttcccggggcagatgggcaagcacgccatatccaggggctccaagactctgctccactacaccaggagcaagtga

SEQ ID NO: 408484 - DNA, 738 bp, Homo Sapiens
atgaaggaggcgctgagggccaccatcatggacgtcaccatggtcctgcccagcaagctggagaagaggagcgtgctcaatgggagccatgcaatgatggacctactagttgaactttgccttcagaaccacctgaatccatcccaccacgcccttgacatttggtcttcagaaacccaacaacctttgagttttaagccaaatactttgattgggaccctgaatgtgcatactgtgtttctgaaagaaaaatttcctgaagaaaaaattaagcctgttccccctaaggtgcctgagaaatctgtgtgtttggtcgtgaattacttgcagacacaaaaagctgttgtgcatgtgagccctgaggttcctctccagaatattctcccagccatttgtgcaaagtgtgaggtcagcccagagcacatggttctcctcagggacaacattgccagggaggagctggagctgtccaagtccctgaatgagcttgggataaaggagctctactcgtgagacaacagaagagaaacctttagaaaatcatcgcttggcaatgatgagacagataaagagaagaaaaaatttctgggatttttcaaagttaataaaagaagcaatagtaaggctgagcagctcgtgctgtcgggtgcagacagcgatgagggcacctcccggctgcccctgggaaggggtttgaatggctgtttaacaacacccaactctccatccatgcactga

SEQ ID NO: 408485 - DNA, 1000 bp, Homo Sapiens; identical to SEQ ID NO: 295576

SEQ ID NO: 408486 - DNA, 645 bp, Homo Sapiens; identical to SEQ ID NO: 295578

SEQ ID NO: 408487 - DNA, 751 bp, Homo Sapiens; identical to SEQ ID NO: 295582

SEQ ID NO: 408488 - DNA, 1000 bp, Homo Sapiens
gatgaggatgtccacgatctggaacctagaaaggacagccccatcagcacccagatgagtgggagagacacccagggccacatggcagtgcgctccggcagcgtcggaaaccaacatgcaagacgcagcttgaaggactgtccttgctgcattcatccagctcaccccagcaaggacgggcggcaagaggaggaatattcaccaagccgcctccacagtgccggtgggcgtggtgcccaagggcagctaccccttctcagctccagcctcacactgacctcagcagtgtagactgctgtctattagtgtatgaagaaaccaagtgtagtggcttgaatagtgtcctctaagaatccgtgtcctccctggacctcagaatgggaccttattggggaaaagggtctttatacagaataggagaggacacagagacacagagaaggaagcagagactggagggatgcccacaccaaggacaccaggagcccccaaggagttggaagagacggagtttcgctcttcttcccatgctggagtgcaatggcgcaatctcagctcaccccaacctccgcctcctgggttcaagcgattctcctgcctcagcctcctgattacctgggattacaggcatgtgccaccacacctggctaattttgtgtttttagtagagatggggtttctccatgtcggtcaggctggtctggaactcctgacctcaggtgatccgcccacctcagcctcctaaaatgctgggattacaggcgtgagccaccgcgcccagcctataaaattgattctttaaaaaaaattagaacatttaccgatgctggacccaccttccccaccttcagggtccactttctaggtggccacagtgcctgcttggcccctgtagcatttgagtttgcaactctgcttttggagttaaacatgttttaggagtcctgggattctgattgatgctattgtcaatttgatgaaagaaaaattactcctggga

SEQ ID NO: 408489 - DNA, 1000 bp, Homo Sapiens
agcttgctggagcagctctgttgaccgctgacccttggcctgctaactgaaacaagattcacaagtgaggctgctgccccagtttcatggatgctggcagaagacttaagatttctgaatcagagacagaagacttcatttatttgtcacagctaaagcaatggccagtgtcagtgtatttgcactggtgcctcaagccctgatgcccacggggtgatgcagagaccctatgactcccgcacatgcattgggtcaagtcacagtagaggaccactgagctgggcaccatgtggacctatagcaggcagcaggcaagccctctcctttgaggttcctccctgcaactacgaccccgaaaaatggatccagtaaagaagagtcaaggctttatagtcttggtgcacccagtaagacctgtaggagaacaggaagcctgtggaggactgtttcttccaaaagtttccaagtgttagctcttacacatgtataaacaacactgcaatttgtctccttgcaccgtacatccacgaagcagatttgcttcttgccaaattatttccctcagtgatttcaggaactgacaattcccagtcgcatataggaattttcttgcgtcttcttttcctgactaactcttgcgttgtcagacactttcatttgtgctaagctgataagtatcaaacgatgatgcaggctattcattatgtgtgtccttgattactgatgagtttgagcaattgtcatttgttggactgatcgttcaatttcctcttcggtccttggccttttcatatattttgccttttcttgtaggtgtgtccttttcaaattgatttttttggtgtttttggtatatcctgtgtactaattctttgtcatttatatgcattaataatatctcctttcactgtgtggcttgtcttctcaatttgtttttgggtttttgtttcagagaacattttataagctttaaataataaagtttatttatttttaatta

SEQ ID NO: 408490 - DNA, 1000 bp, Homo Sapiens
ccatcatacggcggtcaggtctgtaactcttgacaggaaggtgcagtagcagaatggcgagatgcactgagggtaaccagatgatctcatgggacttacccagtgttagcaccaaagtcccatgaactgaggtgttaaaacagaaaggcctgtgtcctcagaacccctccaagtcactggccaactatgactcatgtttggtgatgttggatgccagttaataaagtccagaacttaagcccaagaagagagctcagaagtgtttgtgttactctttattgaggaataatttacagatagtaaaatttaccccttatatctgtacagttttgtgaattatgacaaacttactcaggttgtgtaaccaccagtgcagtcaaggcatagattatttccatccttccagagaagtctctgggaccttttgtagtcagtcccctcatggaatgttttgatcaacgtagaaatgcctggaggctgctgggtgggaggctgatcactcagccatcagagcgtcctgtgtctctgagccgtgcaccccattgtggcatggcactggttgctggacattcttctgcgggcccactcacacatctgcctgcctgcggcctgtctgtgtttgtcttactcatgctcttggagccgtagcgaatgtgtctaatattccttccacgtggtagattgaaacttcaccaaaatagccctgtgcgcctactttgctcctgaacatctctgatttctccggctgtccctgtgtggagttctggcagatctcaccagtctacatgacctattggaaatgccagtgggtcattgtggcattcagacacataattcaaaactgcaaatggtgggaccgcactaaagaatttttagtaattaaagtacaggaggctgaggtgggaggatcacttcagcccaggaggtcaggtcaaggcttcagtgagccatggttgcaccactacactgtagcctgggtgacaaagtgagaccctgtctc

SEQ ID NO: 408491 - DNA, 1000 bp, Homo Sapiens; identical to SEQ ID NO: 295584

SEQ ID NO: 408492 - DNA, 1000 bp, Homo Sapiens
agccacgctgtgtcttgcatgagactcctggggcctgggcacagagagaaaagaattgagactcaggaggctcagtgggtgagaaaatgcaaagtggcttcacagacacagggctgtgggagcagatcgacggggaacttgggagatgaacttcagggccttccgacgccttgtctcaggaacatgctttgagaaaaatggtagcatcctttccataactcagtctctcttccctagtttccctgaagtgtgacgttttagtatctggagctcagtgatccccatgaatgagggataaagtttcactcttggtattttctaactagtgctagggaaagtcctgagacacgatcacagccactgcttggcatacagggcctccacccaataagcaaactggagattcctcagcctctcgtggacacccacatctcattcttctcacagcagagaagctctcccttcagcctgagctgtcttctttctgctgcagtgcagcctgctccctcctaccctggcctcaaggaaggtaggaaacatcttctgcatttcaaagtcctcactttgacttatttggccttcatcttggcatggaaggtggcaggcagaatggaaatactccccccaaacagaacagatattcttgcgtgtgtaagggcagaagggacaagctctctatcccatgagactaggggccggagcccacctgcctttccccacaacttttcctgctcaaacccactcctcttgacacactggaatctgtattatatatatttttaagaaaatacaatgatggttgtctggttttgttgtttttacaggtgttgtggaataaaaactgtaagaaaattaagtatttaaaatgttccaataaagtggggttttttgttattctaatatattattgtgtacctattgtaaatatgaaacactcctattttgcaagctgaggacacaatttgtactgttgttatatataaataaagtttactgaatt

SEQ ID NO: 408493 - DNA, 1000 bp, Homo Sapiens; identical to SEQ ID NO: 295585

SEQ ID NO: 408494 - DNA, 1000 bp, Homo Sapiens; identical to SEQ ID NO: 295586

SEQ ID NO: 408495 - DNA, 1000 bp, Homo Sapiens; identical to SEQ ID NO: 295587

SEQ ID NO: 408496 - DNA, 1000 bp, Homo Sapiens
cgggtaaccccagggctgaagctgccagaagtttttcctttaactcatgaaagacttgctgttgttaggatccccattccaaaggttcccggtccccgccccctttgtgacctcatacaaaggcttggcttatattgcaaagtttgggatccacagtctacaaaaccccacagctcctgagaattctctcgcctgcctttggcccttaggctctggtagattgcaaataacatgctttctttctgttcccgggtggcttcggacccctgtcggatcggaaatcccaaggaggcgtcggaccccgtccgatagtaaatcccaagtaaggtacctgccgtcggcagatttgagctttctgcctggacacctaatacccacagtcctccagtcaatcccaattaaggtacccgccgtcggcagatttgagctttcttcttggacacctaatacccacagtcctccaggctctggtagattgcaaatgacctgcttactttctgttcccgggctgcgttctgacacctgttggacagtaaatcccaagtaaggtacctgccttcggcagatttgagctttcttcttggacacctatacccacagtcctccaggagggtcctaaggataacttcaggaagtgggtattaattctcactgtataagtgaagacattaagcaccagagtttaagtagcttgatccactgaaagagattcaactgtgtggaacctatgccgcggagaattgctttctgccattgttattgtccagcagttgccgaatagctctgacctgagcaaagcagtgaaacgcggtgctgttgagtgggttgccactgcacctttttcaactactctagtcttgtggagaaaacaccccttctaaattttttcttcattgaatactctccctcagctccagggtaccatatagagttttcttgtattttagagttactgttttatcaaagtgtaccagtcttttgtattacatttctcctgtct

SEQ ID NO: 408497 - DNA, 1000 bp, Homo Sapiens; identical to SEQ ID NO: 295588

SEQ ID NO: 408498 - DNA, 1000 bp, Homo Sapiens; identical to SEQ ID NO: 225095

SEQ ID NO: 408499 - DNA, 1000 bp, Homo Sapiens
atgtgctttgcatgccagggaccaagagggattaacaagcagaggagtggtgggagcaagccagcagggaccagccgggtctagagaatgttcctagatgtggactctgaaggttctagatcaagggaggctgcatagtagctggagactggagagttaattagtacagaaagactccctaacccctaaaaaggccctgggaagattctaatatgttgcttgggagggttctttttttttgagacagaatttctctctgtcgcccaggctggagtacagtggtgcgatcttggctctgcaacctccacttcccaggttcaagcgatcctcctgtctcagcctcccgagtacctgggattacaggcatgcaccaccatgcccagataatgtattgttttttttttttttagtggagatgggattttgccatgttggccaggctggtctcgaactcttgacctcaagtgatctgtccaccttggcctcccaaagtgctgggattacaggtgtgagccacagtgcccagcacttgaggcagttcttgaaagcttggaagaagtgatagtgcataggcgatgaagtggagatgtcagaacagccctggaggaaggtatgcaaagtctcagagaagtggacacgccagaatggctcttctattgtaggttgtacaggaaaacagtgtgacaagagtgatgccatcttaaaaccgccatatgatgatgaatgtttcacccccatataccaagctgctctgcagtaagctctttaaacaatgcctgtaccatacataaccctttgtaaagatgcttagctaaccccctccccaagtggctatgagttttgcattaaaatcggagatatggccacctgcacatgttttaccctaaaagcttgctacataaaagtactttctgcagggcagatgtggggatctaccattttgtggcagcccggaacatcgcttctgctcctaagtccctattaaatatttctttacaag

SEQ ID NO: 408500 - DNA, 1000 bp, Homo Sapiens; identical to SEQ ID NO: 295590

SEQ ID NO: 408501 - DNA, 1000 bp, Homo Sapiens
gggcccgctcaccaaggagctgcagcagcacgtaaagtcagtgacatgcccatgcgagtacctgaggaaggtgaccttgaggaaccctgggagctcaggaaggaaggagcgcccagaagcagggacagggagctggttggggaggaccagaaatcaggttatcaatactctggctgaccatcgtcatcgtgagactgactttggtggaagtccttggataattatcattattgtgtttctgggacgttacaaatttaccattctcttctgcacaatttacctttgtgtgcctttcctgaagactatcttctggtctcgaaatggacatgatagatccagggatgtacagcagagagctaggaggtccaaccgccgtagacaggaaggaattaaaattggcctggaagacatctgtactttatggaaacaggcggaaacaaaagttcaagctaaaatccgtaagatgaaggtcacaaagaaagtcaaccatcattacaaaatcaatggaaagaggaagaccgccaaagaacagaaaatgtttcaacgtgcgcaagagttgcggtggcgggcagaggactaccacaaatgcaaaatcaccccctctgcaagaaagcctctttgcaactgggtcagaatggcggcagcggagcatcgtcattcttcaggattgccctactggccctacctcacagctgaaactttaaaaaacaggatgggccgccagccacctcctccaactcaacaacattctataactgataactccctgagcctcaagacacctcccgaatgtcttcttattccccttccaccctctcctcttccaccctccgtggatgataatctcaagactcctcccttagctactcaggaggccgaggcagaaaaatcactgaaacccaagaggcagaggttgagtaagctgagaacaggtcattgcactcaagcctgggcaataagaagaaatctgtgagtggaacaaaagaaaaaaatcaaaaaa

SEQ ID NO: 408502 - DNA, 1000 bp, Homo Sapiens
cagagtcaggaaaaggggcgagaggccacatgtctccctctcgcccaactgaaaacgaaacggcgctccagcagattgggtggaaagagctgggtctcttttctctgtttttcacgctagaaagggcttgtaaacattgttccttttaaaatgacctaccccaggcatttgtttgggcacacttctgtcctggggtcatcgttcctaggtggcttcggacctgggacttttcctgtatctgcacattgtcgttttatacacaattgccaaggtgggactgctttcaactttactgtgcttgaagctgcaaagcggatcctgttacagtgcaaagaagaaatggcaaacggataacagctactgtgcctagaagatggttctgccctgatgtttcctggaataatgctgaggactgcctttcgggtagccgccctattcagttcacttcatctcggaaatacctgacccctgccttggatccagcggccctcctgagagctgaggaaggaggaaatcctatgtgtctgctcccggagctgccacaacccatcttcccacaactcggaacttggaaaaaggaacccaggacacgactttgcttttcttttggacctagttggtgattatactctgtctcccatggagaccacgtcttgcatccttccttctatatgggatttaggatagaaattaaaaagaaaacatattattttgagtcttgatttggagaaaggtagtattcaggaggaagtaggctatgatacacatagaaaatttgaggacagtgttacttaacaaggacatttctgtctctgcagaagtcacagcttggaggaaaccagtttgcactatttgatgaggaatttggccaccaaaccactgatactttcccaaaggtttggcagaaattgttttttgagtggctcaccagagtacccagaagaatcagtatggaattagaggacagtggcctaccctaaataaagacatgagtgatgta

SEQ ID NO: 408503 - DNA, 1000 bp, Homo Sapiens; identical to SEQ ID NO: 295591

SEQ ID NO: 408504 - DNA, 804 bp, Homo Sapiens; identical to SEQ ID NO: 295592

SEQ ID NO: 408505 - DNA, 1000 bp, Homo Sapiens; identical to SEQ ID NO: 295593

SEQ ID NO: 408506 - DNA, 616 bp, Homo Sapiens
gtctcactatgttgcccaagctggttttgaactcctggactcaagcagtcctctcaacttggcctcccaaagtgctgggattacaggcatgagatactgtacctggtcttattttttcttttcttaagatacagggtctcaccatctggcccaagctggactcaaactgctgagctcaagtaattcccccacctcagcctccgaagtagctaggactaaaggcatgaaaccaccatgcttggcttgtccaatttcattctacacactttctcggtatttaaacagctgctgttgctcttcattctgtagctctacatcagattcatgctctagtcctgtatatccaaatgatgactacaggctgccggctctgctctttcaaaggcacaatgagcgtagcccatctacaaaactctcccttttccaatccagctttccctcctgcatcacctatctctctacatctggaaccatcggcagctgccttcataaggcacgtcggtctggcattcggaaaaccaccctgtcttgccagagcctcttggtcttgggtagcaaaagctgtatgcaatctaaatcaagctttcaatcatgagaaatcacattccttcttttc

SEQ ID NO: 408507 - DNA, 588 bp, Homo Sapiens; identical to SEQ ID NO: 295594

SEQ ID NO: 408508 - DNA, 1000 bp, Homo Sapiens; identical to SEQ ID NO: 225096

SEQ ID NO: 408509 - DNA, 1000 bp, Homo Sapiens
tgcaaaattaccctgcccagcagggagtgatttgtgtgtctcagaagattttgttgctgtgctctgagttctcactcctcatctcctttgaccagtttcttctaatactccccttgttcacaacacagaacatgagtgctctttcctatcattttgatactaataaacggacagtgattctcagtgtggaaatgagaatgaagctttttttaaagacaggctacaataattcccatgcagagaaccacatgccatgacactggattccaaacagcaagaacgtatggtgaagacgaggccaacagtgagctgagagaggccagccagggtgtgtttcagtgaagatgagaaacaatcagataacacctgtttcctccaggaaagaaaatgtggccagggaaaagagatgggaggaaggctggtcattgcctattccactgtgcacagtttgaatttggagccatgaaaagtattgcttggttaaattaaaatcattcaaaagataaaacataaacatttaacaccagcacaatatgctgggaaacaaaatgaaaggatttctggtctcggtgctgtaggtcacatagccactctttcctggattgaggctttccagcaaaggggctgggacgtaaggctggcctgctggtgtggacagagattccagcaacatgcatgacctgggggtacaaggattgcttcctaaacaatgataagcacacagccacctaatagtctggatcggctgagaccatcctgatttcaaacacccagtccccttgccttcctaagaacccctgtgtttctcagactgaaaatgtgttttgaactttgttcacgaagtgaggccgctgttgaaattcgtcaagactgggaaagagccaaagtgggaaggagcatgggttgattggcacaaaagtaggtctgctgataaagaatggaagtaaaggggccatcaggtagaagcttttgctgtgagtcagaaggacaatttaaaagt

SEQ ID NO: 408510 - DNA, 1000 bp, Homo Sapiens; identical to SEQ ID NO: 225097

SEQ ID NO: 408511 - DNA, 1000 bp, Homo Sapiens; identical to SEQ ID NO: 225098

SEQ ID NO: 408512 - DNA, 768 bp, Homo Sapiens; identical to SEQ ID NO: 295597

SEQ ID NO: 408513 - DNA, 1000 bp, Homo Sapiens; identical to SEQ ID NO: 119369

SEQ ID NO: 408514 - DNA, 1000 bp, Homo Sapiens
gggagttccaggaggactgaggcccatcttggagatgaaatacttcctggcgaaggcaagcatagcctttattttgcacacttcaagtcagaagcctcaaatcaccttctgcccttgaccctccaagcccactttcacactccctccccgcttcgctccccgaccccaccccatcaccactctgctactcgcaacgctgcctgccagggatcttcatcttgccgcggagttccatgctgccgtcgcccccagtcttcagggactttgcgctcccgcaggctcctgctcacctctcccatcgttgggcgctggtggcaccccaggaggagagaggagcagcaggagcccggtctcgcagtgccggcacggacagtactctgggggtctgggccgcgtgccacgaggagcagaggagccaccggagccgcttccgcagacgccctgacacggaggacccagagcgccgcgccgcgccgccgaggaacgcgctcaccggcgccaaattttcccatcccgggagcgagggcggcggcgaagggtccgggacccgaggtggcggcgcggggctctgcgcgggcggctgtgggtgctggagctcaggaccctaactttagcgaagtcgggccgcggcggggcgggtggaggcggcgtgggcaggggctgccgcaggtgcggagtgaggcgccgccacacgggcgggggcaggagtctcaggaactcggcagccgccagcagagcccggtgcgggaccgggagctgccggggcctcagctccgctctccccacagctctccgtggctgcaggttgaggtcgaactgcaagcgccacggaccctgcctgctgtttactgcgttttcactggagactccagcaaatgtcctggagaggagagggattcctgctctgtccattttagtctctacattggcaccttggtgtaaacccacagcagaggctgcgtgtcctggctgagaaacacagaagggcagcggggacgga

SEQ ID NO: 408515 - DNA, 548 bp, Homo Sapiens; identical to SEQ ID NO: 295599

SEQ ID NO: 408516 - DNA, 1000 bp, Homo Sapiens
taaaatttgcaagcttcttgggagcggagtgaggcggttaaaaaaaaaagaataaaatttgcaagcttctgagacctagtatgctcctactccagagcggattcattgatagaggagatgacactaagtccatatggtatttctggttattaaacaccccatttgtatggacataatcttttctcttttgtttttattgaagtaaagtttacataacacaaaattaaccgttttaagtgaataattcagtggcatttagtacattgactatgttacgtaaaccatcacctctatctaggtccaaaatatagatatatgtatcttttgagaaagagtttcgctcttgttgcccaggctggagtgcagtggcatgatctcagctctccacaacctctgcctcccaggttcaagcaattctcctgcctcagcctcccgagtagctgggattataggcgcatgccaccacgcccggctaatttttttgtatttttattagagacggggtttctccatgttggtcaggctggtctcgaaatctcaacctcaggtgatccgcctgtttctgtctcccaaagtgctgggattacagacgtgagccaccatgcccggccaaatattttttgtcactccagaataaaaccctgtacccaggatgcaggtagaccccattcccaatacttcatgcacctggcagacaccaatttgctttctgtctgtatgggtttacctattttgggtatgtaatagaaatacatatactttctgtccatttgtgtttgtttctttcacttaacataaggcttttgaggttcatacacatcgtgacatgtaacaatacttcattcctttttatggttgaataatattctgttacgtgtatattccacattttgtttttccattcgtccactgatagacatttgggttgtttctactttttggcaattgtgaacaatactgctatgaacattcatatacaagtatttgagttcctgttctc

SEQ ID NO: 408517 - DNA, 1000 bp, Homo Sapiens
gcacaggccaaggctctggaggctacgcccgctacccccggataatggtgctcagaagaagtccaggaaacttaactctcgcttgccttccagtgaacgggagcatggggaccctcggaaggggagaatgttctcagcggtttatgctttctcggatgagctgtgcattgctgctcctttggggctgcaaatcttttcagccacgaagacaaaacagttcctcccgctttgttcttctcaaccctcaaagaagcccctttcaggcatcaatcatgcagagatctgtgcctctgcagagcgcctgcttgacaccagcccctgctccacccatggaggcctttcctggggcttccgggccttgaggggccaggcctatagcacttttcagagcaccagtcgcaggtccatctggagacacctgttaaagacggcctcgtgtgaacctctcaccctccttatttgtcaaactgtgtccctgctctctgaagctctccaaaacaaggaaaccgtatgcttaattaccaaacatctgttgccgagaacaccccctcgcctttgcagctctgatctcacgaaatgcagaagcgcagccagttgcgaaatcacagcgacttgctcaatttgcagtgtgcgatcttctcctgcagggctccaacctgaatatgccaacagagagggcagaaaattccctggccaggctgtggaaggggaaatcatttggatctgtttaaaaggggaaagaattaagagagctgacatttccggaagaaacaacgttcaggcatgcaactggaatttaaatgagtatctgctttcgatgctgacagcaggagccttccctcccatatgcccgcaactgcacactcaaacctcaggtagcacagaaaagaccagcgctccgactcctggggccagtggtgctggattttatttgcacttttctgggtttaaatattttgagaatttttttaaaaagcatttctctcttctctgtttatga

SEQ ID NO: 408518 - DNA, 1000 bp, Homo Sapiens; identical to SEQ ID NO: 295601

SEQ ID NO: 408519 - DNA, 1000 bp, Homo Sapiens; identical to SEQ ID NO: 295603

SEQ ID NO: 408520 - DNA, 1000 bp, Homo Sapiens; identical to SEQ ID NO: 225100

SEQ ID NO: 408521 - DNA, 1000 bp, Homo Sapiens; identical to SEQ ID NO: 295605

SEQ ID NO: 408522 - DNA, 1000 bp, Homo Sapiens
cccacccctccggagcgagttcggtcctggcgttcatttcattcctgtcctcattccgaacattcttagcatcgctcgcgccgcgccgcgccgcctgagccgagccgagcctctgctgccgccgccgcggccccgccgcccgccgcgggcgcccaccaagcactttgcagactcgcttccaccctgcgggccattccgcgcggcggggcccgggcccggggcggccgcgtccaggcacaggccatgcagtgacgcccccccacccctccacctttgcccggagcgcgggcagcagcccagcgcgccagccggccccggggcaggagcggtgctaggcaggggtggggtggccgggcccagggaccgggagccggggagggagccgggcaccgagcagagggcgggggaagcggcgccgaagtttgcctcggactcgccgggcgctgcggtggctccctgggccgaggtaaatgaaaaagggcacggtcgtctttgccgcttctccaggactgttgctgccgctgccgccgccgcttcattgcacattcaagtggaaaattttcaggagtcagcagaaacattgtgtccaaaaaagactgagtcgcagttaccaccaaacccaggaggagactctccctggaaaacttcccttccctttcgttttgtagtggtacagaatagggtagctttgaaatatgtgttttattttagtcaaagtaaaaatgggatgccctggtgggtgggttttcaggatgatgtttcttacaaggcttttcaaagaaaaaaactaaatgaagcccaagcgcctaatcctccaggaatcaattttaattgtaagaaagaacaacttagatgggccttccgactttcgtccagcctgactccttctgctgagatgcggagagcccgcggaaaccaaatgacttcatttgctctggcacttaagaaccgaattcacttccgtggtggtgaaataaaaggagccaagtgttttaaatag

SEQ ID NO: 408523 - DNA, 1000 bp, Homo Sapiens; identical to SEQ ID NO: 295606

SEQ ID NO: 408524 - DNA, 1000 bp, Homo Sapiens; identical to SEQ ID NO: 295607

SEQ ID NO: 408525 - DNA, 1000 bp, Homo Sapiens; identical to SEQ ID NO: 295608

SEQ ID NO: 408526 - DNA, 556 bp, Homo Sapiens
tgggctgaaggcagcagtagggcgatggaaagcctggccaagggcttctagaacttgaagctcaccatttttggatgacattctgtgaacgaagtgttctctatgagatactaagagcaatatagggtaatcactggtgacagaaacatctgctcatgcaggttcatgtcaaagtccagggttgaaggagaacccctcatcccaggtgtggcagaattgatgccctataacttctgagtgtaggtcataaaaggcaatgtggctcccccagctctctccctctgtcaagatgcttttccttggaatccagctgccatgttgtgagaaagcccagggcaccgcagagaccacatgtgggtgttccagccaacagccccagctaggtccccatggagagcccacaccaaccaccagatatgagggttcagactccagcccacagtcttcaagtcttccagctgcagtcccagacatcatgaaaccattctgctgtgacctgtcagaatttctgaccccagaaactgttggagataataaataattactgttgttttaa

SEQ ID NO: 408527 - DNA, 1000 bp, Homo Sapiens; identical to SEQ ID NO: 225101

SEQ ID NO: 408528 - DNA, 471 bp, Homo Sapiens
atgcgttaccttctaatgctggccacctctgaagggcacgtggcagctgagacgaaattgattttcttcatcactgatcccgtggcctttacacaggctcagagggtggggtcggggtatactttaaatctccatggtctcagaaaggtttcttcatcgcggaccctgggaggctggttcccagagggaacttgtcctcagcgtctcctggacagtgcagcctcctgccgggcctacttctggaaggccattacagaggtcctttcaccacctgtgagaggtttgattttgggggagctccgggactctcaaggctacagtgtggactgctggcccaaggagaaggtaattggcgtccgtggtaaccaatcaggaagaggatctgagggaacgccggccttttactttcttgagtggccaatccggttgtaggctcacctcccccttctactcagagcactgctgcggccg

SEQ ID NO: 408529 - DNA, 1000 bp, Homo Sapiens
aggagcgagtccacggtctgccgactcggggccatggtcgggccccaggatccggagcttcgggcggggccgagtccgggtttggggcccaggaggcggggccgttagggctagggtccccgggatcgtcgggtcaggccttgggccaacgtaggcactctcacagttcctccgccttcaggaaggtctttttggcaggggccttatgggtgcgcgcttcggtcctggaggccttatcctagcctcctctccatcagcgccacccgtctggggcccgataggagggagctttccctctgtcccctagcctttggactgtcaccaaacaagccattcgttcaccaaatacttattaagcgtctaccatgtgtctggcaagggatatgtaacagtgagaaaaactaggtgtggtccaggccctccaggggctcaggggctcgtggaagaagtggacattgaagtacttatcacacaaatgagtataaaagtacaatagtgatatctgccacgaagctgttgttccccaccagaaccaaatgagcgcaagatctgacaaagaaaaaaaaaaggttcatcttttattcccccaaacactttcatttaaatcaagagggtgggatgtggttattgctgtgtttttagacagaatcaacagtttctgggtctgagatgttgcatacaccctctcagtccctgtatcctgagatggagtcacctgagaatccacagcaagtcctaaccagggatgggtctgggtggttaaggaaggttggcttcagaactgggccagaggcactgctttgcttttgctgttttgatcagctctctgcctgcaggagacaaggaaaaccaacgggaacagatagtgtttctctctctgccacccaggccagagcgcagttgatacagggcaggggagcccccaagcggagcatagtgtttctggaactggtgggttcttggtctcactgacttcaagaatgaagccacggaccctcgc

SEQ ID NO: 408530 - DNA, 768 bp, Homo Sapiens
atgtcagccagaggggaggggttagcgttaaccccctcctggcctcgatgcgcgcccgccggggcccggtcggagcccgagcgcacgcgccttcccgaccgaagcagaggcggatcgcgagcgcgggctgcggggtccggctcaggaccctcgctcgggagctacccctcggccgccttccagctggggagccggctggagcgcgggctgccctcctcctccgctgacaaaggcaggcaaatcccggctagcagcgtgggagctggcagggcttctgcaagccctctgctcccaccctggccccatttcacagacgaggaaacaaaggcccaaagaagagttccgcccgggacggaacgtggcatagctcgcaacagaacccagtctccggagatccctctcctctgcaccacttggacgttccacggagaggcagcggtgcgcggggcgacggggagctgccagagaagcagtggggagccatggaaagtttctgaacagagaagcacttattgggaactgtcagagctatgcttcaggagatgaatctggcaacaacgtgggttaatattaatgccctgtacatcctgagtacatgtttccagaaagaggtgatccaggaggctgccaagtggcctgcaggtgacatccagagggcagaaaatgcccatgcaggtccacgtgtgggtccttaagccccttgaggaaaagggaggagaaaaggacaaagaaggctctccctttcccttggatccccttctactccca

SEQ ID NO: 408531 - DNA, 1000 bp, Homo Sapiens; identical to SEQ ID NO: 295611

SEQ ID NO: 408532 - DNA, 777 bp, Homo Sapiens
atggcagcagaaacagaggaaagaagtggggcttctaataggtcctggaccagtggccttcttgccaagtccaccagatctgggaatgtccagttgggggagggggctgacaatgatcatgaccttcacctgtcctcacatgtcctctgtgtatctgcaaagcctctgcctcagtctcctcttctggaaagtgggattggaaaccacatctgcttctctcccaggactgctaggaagacaagattagatggcaggtctgttttccccctggattgtaaactccctgatgtctgggtcatctcagctcatgagctgagctttcagtgggtgctcagtggaacaggtgctgaatggagtcaggctttagggaggccagcgtgtgttggaaggaaaatacccgtacagccaacttccttgagggttcgttcttttgcatcagggtgtctcaaactcctgcccttaaaacacctgcaagagaatcatctaggtggcttgctcgctctgcatgcagaccctttagaatcagagtcagaatacctggggctggagccacaaaatgaaatgacatttcaacaagtttgtcatcacgtaagagagaatagataacttcactcttctctgcaacgaatcccaaaagtatataattgagctgactgcaaggtacttgacacgcaagagactccacaaatgggattcagcctctggaaagtggtggtagttccagatttatgtggatgttactttgtttttccctataaaatatattatttaaactat

SEQ ID NO: 408533 - DNA, 1000 bp, Homo Sapiens; identical to SEQ ID NO: 220467

SEQ ID NO: 408534 - DNA, 1000 bp, Homo Sapiens; identical to SEQ ID NO: 119370

SEQ ID NO: 408535 - DNA, 680 bp, Homo Sapiens
ctgagatatggggagcgcctctgccccgccgccccatctgggatgcgaggagcgcctctgcccggccgcgaccccgtctgggagttgttcatgtattctagaggaaaagaaaggaatatcattatatactgcttatggtatctgagcatgagatctttaggagaggacctgcatcacagctaaaatgatcaatggcattggagtcacagaattcgagctggaggcctaagctaagtggtggaacaatgatcatcaagccagccacccaacagcagagaactaataagggattctgtgctgcggagatcattacggaagcaacagtagcaggtggcctggccatacagggattccttactcgcagcagagaatgttgctgccactcaaagtcaccaggggctgaagagctcctgtggagacccacatcatctaacaacacacatactcaaaacagggaaatgtgcattttcgggagaggaagagacaaaccttttgtttagctaactggcatgacagagtgtgacatacatgtgctcctggaagaacggtgttgggtgtctgcactcaaaatcttgagcataggcaactggatgaagggctctgtggcattgattttcattgtgtgtgtgttaatatttacatttataattaaataaataatcgaaattatgctgaactga

SEQ ID NO: 408536 - DNA, 1000 bp, Homo Sapiens; identical to SEQ ID NO: 295614

SEQ ID NO: 408537 - DNA, 937 bp, Homo Sapiens
atgaagtacaaagcactctaccttcacaaacaactggtcctggacagttttctcagcagtggagaattacagcagcagaactgcacagaaccactcttcaacaatgacaccatctggcagtatggaagtggcggcggggtctggggaagagttgtcttgggggcagcgccagccaccagagcccgagtcagcgcggccaggactctgcaggggcaggtagcgacccttagagacgcaacgtggcgcagcggactcggctgcgtggggcaagggccggggccggacacaggagcagcggggatgccgggtgcgctccgagggtgtggcccccgggctgtgcggggctcagagctgcttgctgggcgcggtgcccgacaaagttatcctggatcctatctttggtaccaatgtgacccatcctgagtgaaggctccatttctggcctttggtctctttctcggaaagcaggcctcagtggcctcagtttcttcccagaacctgcaatgccccaccaaggtgacaagaagtgcaaggagtcggttttcactgccaaccaaagaggtgacccccgcaaagcaaccatgttgggacagtccatttgctgcgttttgattatttgctaagagcaaataccttttctgtttgggttttgcttttagaaaaaaaatgtggcagatggtggtggctttccccgtcattgaaagaagaaaggtagtaactctactggtgcactcctctgagttgtgctaacaaagaagaatgctgaaagaaaagggaaatgaacaccattttcaggcagcttctccaagtttttttgacagtgttataattttcctttagcgactgttgaagcaaatatctgtatttatgttcagattaaaccgagagagcaaagactgctaaagccagtaatttctgggctgcaaatgcaggatag

SEQ ID NO: 408538 - DNA, 1000 bp, Homo Sapiens
ctgactttcaacccagcctgcatggggtcagagaacccactttccccgtggggcctgcggcctatgctaaggatgcttgttcatctctcctgggcccgggagtggttcttctggcctagaaggcaagagaagccagtctttcggtttcaaggtttcccattagtggagtcaagcaaaaatggtgtgttgcgcttcttcctgagctcagcctgggagcacggccttaacatgctcagtggatcccaagacggcagcatggcggtgccagcctggcagccttagctccttgcagctgtgcttgtgaagggagcagtgagtggcttccctctgtgaccaccttgggtcctaagtttcactggggctgggatccatgcgtcttgcaattggctaggaatttcccgggctttccctcccttccctgttcagggcactgggtgtgaggcattgcatccgttcttctgctcacctgcttccccctaagagtgtgagctgtataaaggcaggaaccaaacaggagcctccacgtgttcccagttcaagggcagtgtcccttgtgtgtttcttcaataattcagtggatgacttattctgcacggacactgcacacactcggccctgccgtctccggagctgggaggtgtggagctggctcctgacctatttacacactgaggagggatgtggaaaacaggaggagtcccagggctccaatgcaaagaggagcctcttcattccctctgccgtggccgtgcaagggacagcgccttgtgggattgtgtcctccacccaattatccttagcattagtttgctaaggataatggcctccagctccacccatgtccctgcaaaggacatgatctcattcctttctgtgtctgcatagtattccatggtgtatatgtaccgcgttttctttatcgagtctatcattgatgggcgcttcagttgattccatgtctttgctactgtgactcgtgctgcaatgagcattcgcgtgc

SEQ ID NO: 408539 - DNA, 1000 bp, Homo Sapiens; identical to SEQ ID NO: 295616

SEQ ID NO: 408540 - DNA, 1000 bp, Homo Sapiens; identical to SEQ ID NO: 119371

SEQ ID NO: 408541 - DNA, 1000 bp, Homo Sapiens
cttcaccaacagcctgcagtactcgttaacgagatttcgccaggccccttggactaacgccaggattctcggtgcccgcagtcagcgctctgggattagacaacgccccacaggccgcggctctctgctgaccctcagcagcgatgagaccggcgcgcacaagccagcagccactagctctcccacaaggccgagcgcggccaaagggcagccccgcccgctccgcctcccccagctctattggctagtgcacctgccactcagccgcgcgccggactccggcttcgggcctggaggagggatcccaagcctcctcggctcggctcggctcggctcggctcggctcggctcggctcggctcggctcggctcggctcggctcggctcggctcggctcggctcggctcggctcggctcggctcggctcggctcgcttgtccttgaggtttactgtgtttggcatcgcagttccgacggcagccgccgtttcgcgacccacggcggacttgcataaacactttctagttggaatctcaccctgtgaggtgggcaaggtagtgatattcctgtttgacgccgacagaaataagagagattgactctcagaaccatgtggcgggattttaaaggaggatcttaacagtggctcggacagacccgtgttttctgctcctagcattaactacgtcgttaaacccttctgaatttatttcgtctgtgaaatggggaaaagatagccaccttgcataactggtgaagaattcgtaaactgacagcagaatctagtaagaggactggcccgtggtcggctcttaatggtgtgtatggggctatgaacattcccaggtcttctgacctctagtctgggactctttctgctaaactagggattcttagaggtccagagacttcgggagatccaggggcatcttcaagggggtccctgagttctaaactgcagaggaacactcttaagagagataataaatatttccaccaca

SEQ ID NO: 408542 - DNA, 611 bp, Homo Sapiens; identical to SEQ ID NO: 119372

SEQ ID NO: 408543 - DNA, 1000 bp, Homo Sapiens; identical to SEQ ID NO: 225103

SEQ ID NO: 408544 - DNA, 1000 bp, Homo Sapiens
acctaactgtatgtgaggatgaccacggcagcggctccctgaggatgaccacggcagcggctccctgctgtgcacaggtgctcatggcggcatacgatcgccgacagcctctgaaaacacaccagctgccaaccagtgccccccatgtcacagctaccacggctagaaaggaacacgagggcggcttacaaaaatcagacgcatttccccacatttcagcccatgatgtcaagcttaagcacagatcactgacggccagcagctcctcctacccgtcccctgggagccccgcgggtgccgcacaagtgcccccgcccttccccccggttccgggtctccacgccctcctggtttgcgggcagccgcgaagccgcgagtggaccgagcgagtgcagctgcctccgcggggccgcgcctggccgccgcctccctttacctccggccgccccgtggcaggtgtagaagctgcagaggccgcagcagcccagcgcgccccttccgtgtggccgcatgccacccgcgccgcgcccagcattccagcgtccaacagagcatgcgtgcaccattccagcatccggcaacaatgcaccagcattccagcgtccaacagagcatccgtgtaccattccggcatttggcaacaatgcaccagcattccagagtccaacagggcatgcgtgcaccattccagcatccggcaacaatgcaccagcattccagcgtccaacagagcgtgcgtgcaccattccagcatccggcaacaatgcaccagcattccagcgtccaaaagagcatccggcaacatcccggtgtccagtggcacatgtgcacctggacgttccagtgtggtgagctttcaggcacggagcaaggccaaagggataaaaagatgaaggtgacgcagtactcccccttatagtgcctacaggccttataggccagacagatctggaaataaataattcataataaaaaataattacagaataagaggcataat

SEQ ID NO: 408545 - DNA, 1000 bp, Homo Sapiens; identical to SEQ ID NO: 295621

SEQ ID NO: 408546 - DNA, 1000 bp, Homo Sapiens; identical to SEQ ID NO: 225104

SEQ ID NO: 408547 - DNA, 1000 bp, Homo Sapiens; identical to SEQ ID NO: 225105

SEQ ID NO: 408548 - DNA, 641 bp, Homo Sapiens; identical to SEQ ID NO: 295627

SEQ ID NO: 408549 - DNA, 1000 bp, Homo Sapiens; identical to SEQ ID NO: 295628

SEQ ID NO: 408550 - DNA, 779 bp, Homo Sapiens
catgcagcagaaataattgttctcggttgggataaaccaggagggcttcccaggggaggtgacatgtgagggagatcagaatggaggcgtcccaggacataacttttctaactaacttagctagagtggggaccacaggggatccagagtatgttattgtctcactttgctgatttttctcatctcagtaaatgcagaggacagttgcagagccatgacaccctgttgacttgggagatgaaggtgaccttgcagccccagcaaccagataccggactcccaggctcccaaagggacattgtccataggagcttaaaaagtgaagtcatcagtttcctagcttcaaaattcaaaagcctcattccaggcacagatgggctggaagaagttacactcagagcccagtctgcaatttcaaacctacggcagaagaattgcacttgaccatgtgatgacaacaattgagccacccagcttagagccagagatggggagcctcacatcgaggatggcagagacatctcaccagcttgggcactccagggagagatgcagagctccctcctgctctggactgcgatgtatcttgcatgagcacctctcattgaagaacctactgtgtaaccccgctggtcacagaggctgagaaatgcagcatccacatttccagtctctgcagtagaggagatggtacagaaaagagcaagagattgtctagcacacattgtctactctggatgccacattgacatttctcccagcgttttcatataaaatta

SEQ ID NO: 408551 - DNA, 1000 bp, Homo Sapiens
aaacggtccaggaggacacctgccaccacaacacagccctgggcctgcagtgtagcatcatcagtgaacacaccaccacgcacatcaccgtcacctcttgcaggcatctccgagccacagccacagcaatcgagactccctctcctctccgagctctctccacagcagagaaatcgcctgactgggagatggagaagaggggccaccttctcatgccaccccgccgccaatcctccaggcacactcgggcgcttgacctgctgaagcctgtagcctcaggtccagtgaggagctcacgggacagagggccctaccagagccacgaaaaccggagggggggacctccgcccaaggcaggcgtctctgcgcgcccgctggggccctggtcctgcagttggcttctcccgacacgttccttcgctgccgaaagcgattcgcccgcgctctaccgagcccagccagctcctacctcggcccgggcggcgagcgctgtctccgtcccgagaagaagtttcgcggctggtcccggggcggcaggcgcacgggacgctggcggcggcggcggcttccgacttgggctcagaccccgccgctccagacaagtccccgcgactgcgacagtgtctcgggcagttcagctccccagacgggagacagaccctcgcgacctggttcaggccttgccctgggggacactgcagtccaaggcgaaaggagacttgctcccggcctctgggtccctaggtcaaggcacctccccgccccgccgcccctgagcccaagtcgccaaccccgcgccgcgcgcagcgagggatcagaaggtctcggacgccgcggcagggccggccagggccccacgagttagggagttgccccgcacccctaaacgctcagcacccatttacggttgaaagtacgcacttgacgcgtccgggcgcctccgcggtgagtcgcgccgccgctctcggggtccgcgaaggtggctcagttcggcggacgc

SEQ ID NO: 408552 - DNA, 595 bp, Homo Sapiens
ttttccagggtgggacaatccgtttaaaccttcatcatgttatcaaggctctctatgaccctaaagttaagaatcactggcatgaacatgggaaaaagttattttggggttggatttttacaaaacagcctttctgcaaaagtgcaggaattctacaatggcaaggttcctctcaccagaacgaccacacacaggaggagggatgcctgggcccaccacttctctcctctgaagggaaaaattcagaccgccagatgggaaatggctgaaatcaccgcacttctattgggtggaagggttcaaacatcggggactcagaacctatgaaattttcttcaacacctctatgtagcatttagaatgtaagctcctgatccaccagaatctgcaagaatggagtcaggagcctcagaaaaggagccacggccacaggcgagcagctcggggacaacgctggctccacagggcagctcctgggccaggcacccgctggcgactacacggagcttgtcttgtggaaacaaacgcgctttcacaaacacagcagtcctgcgacatgaggcgggatgaaactttgaaaggtattttaaagtct

SEQ ID NO: 408553 - DNA, 1000 bp, Homo Sapiens; identical to SEQ ID NO: 295629

SEQ ID NO: 408554 - DNA, 1000 bp, Homo Sapiens; identical to SEQ ID NO: 295630

SEQ ID NO: 408555 - DNA, 910 bp, Homo Sapiens
atgtgctccgcagactcttgtgccccaggccaccagccactcttgcctgtactcccccagccccagcggagctgccacaggcgccttctgctcaccaggtggaatttaccttttatcctgtgcagcaggctgcagaacgcgcccctccgctccctccatgtgggactgcaaggggtcgggtccaccaccgaggctgcctttatggagaaccctgcacttgtcccgagcctgaaacccccgaattgcagggtccaggaagactggagccttccccacctgaaccttcacttgagacctcgtccttggccatcctctacatctggattcatgatacagagaaacttgagtaatgatgacaatagcagtccagtgtgcatggatgctgacgtggatgctgtctcccattcttaccactggatgggaagaaatgatagatgcaatccagccattgtgttctcgactctcagttccatcttctcaactgacattgtcttccaaagtccgtgccacaccacagcctggaacatctcccaaagtggtatcttgatgcaatggtagagctcatgtcacagtattgtatgtctcaggtttgaataactcaccagtgaagtcatcttgacctggacagaaattgaatcctcccgagaatcccaggagctgggtaggtgatccttccccagatgagccttcccttgaaatctctgccaggcatctgacccagagaaactgtaagtactatgtagggctgggttggaaagtctaaactatgtagtaatatgttatacaacaatcggtcagttatatgcctgacagtaaatgtaatgtggtatcttggattagatcctagaacagaaaaatgacactagtggaaaagctggtaaaatatgaagaaaatcttttccagttaata

SEQ ID NO: 408556 - DNA, 695 bp, Homo Sapiens; identical to SEQ ID NO: 295632

SEQ ID NO: 408557 - DNA, 1000 bp, Homo Sapiens
aatggcgtctggaagtccagtgtggcaaggaaaaacagttattcatcgaatctactaattccattccttttattgacacagaaaatgttgagaatcccaaatttgattgatttgaagaacatgtgagaggtttgactagatgatgcatgccaatattaaatctgctggagtttcatgtacaagttgaaggagaggcaacatccaaaatagttaagacatgatttccttgaatgtggcttgataaatatggacacttaatactaccttgaaaataagaatagaaataaaggatgtgatggtggaatggagattcagttttcatttggttcattaattctataatgccataaaacaggtaatataaaaagcttccatgattctatttataagtacattagaaggaactttcaggtgttactgtaattcctcaacgtattgtttcgacagcactaatttaatgccgatgtattctagatgaagttttacattgttgagctatcactgttctcttgggaactgaactcactttcctcttgagactttggatttgacattgcatttgaccttttatgtagtaattgacatgtgccagggcaatgatgaatgagaatctacccccagatacaagcattctcagcaactcttgattatccatatagagtcaaatggtaggcatttcctatcacctatttccgttcaacaagagcactacattcatttagttaaacggattccaaagagtagaattgcattgaccacgactaatttcaaaatgctttttattattattattattattattattattttttagacagagtctcactttgtcgcccaggctggagtgcagtggtgcaatctcagctcagtataccctctgcctcccaggctcaagcaattctcctgcctcagcctcccaagtagctgggattttacagacacccgacaccatgcccagctaatttttgtaattttactagagatagggtttcaccatgtt

SEQ ID NO: 408558 - DNA, 1000 bp, Homo Sapiens; identical to SEQ ID NO: 295635

SEQ ID NO: 408559 - DNA, 400 bp, Homo Sapiens
atggggccaaggctgagctgggagcatgggacagggctgtgggcgggcacttggagcccagggcagggttcacagagctattttcagttctcttgcaggatctccttcccagccttcagaaattgccggtctgggagttgggggcaaggagaagatcctgaattagacctttacgagaagcacagttttgtcttcagtttcctctccccccacccggaatggcctgagccgaagccagctccctccgagaagtcattaccgcctgacttgcgtttgatatttagacaccttggtcacaacatcttgcattctctcgggatgctgatttctaactgctctttggcctttcctgcattggtcctcctcaggcaggggatccctgctcttctatattagtgag

SEQ ID NO: 408560 - DNA, 1000 bp, Homo Sapiens; identical to SEQ ID NO: 295636

SEQ ID NO: 408561 - DNA, 1000 bp, Homo Sapiens; identical to SEQ ID NO: 295638

SEQ ID NO: 408562 - DNA, 1000 bp, Homo Sapiens; identical to SEQ ID NO: 295639

SEQ ID NO: 408563 - DNA, 1000 bp, Homo Sapiens
aattgatatcagtttgttgccagacttctacaattttcctgaaaaatagatttcaactagtttatatcccttctataagtgaaacattgaaggctgtcaccgaaatggtggaacagatctttgatgttgagtttgaaggttagatgtaaatatgggtaaggatcgggaggacatttttataaagtacagtttgaagtttttccccgagagttcttacagtagtgattctaaatctagtgtctccaaattctaaagagcctatgaggtggtagttggggggaagctgtccatgagatatttttattatttcaaacaacatatggagtcttgtctatatatgtcagaaggcttcaaggctaattaaaatgttaaatgttaagtatttgtttttaactcactatcatgacacctattatctcatattaatccaaaggtctgattggcaattatatgtctctaataaaaaatggaaggcattcagagagtcagagggtctgaaatagcttctaacttgttaactggtctctgcttctcctcttgtcccattctaatccagtctccgtgtggaggcagaaagatcttcaaaagctcaataggatccagctagtctctagcttaaaccccttcagtggcttcccattgccctgaaagaaaaccagctcttctccaggttctgaccctgcttttttcccagtcttatctagtttggctctttattgtgctcccacacactggtcatgttggtcttttacttcctagaaagcagctacatgaggttttctcccaatagggcctttgcagcaggtgttccttctgacagtgctttgccctcagccttccctgtgcattgctccctcttagtcttcacgtttcagctgaactgatgcctaggaaagcagctaaatcggttttaggtttctcacctctgccttattctctgtcacagaaccctgttttatactttctatcaaaaagggaattttaataaatgtttacatat

SEQ ID NO: 408564 - DNA, 510 bp, Homo Sapiens
atggcgtccacactgtcgctgcccagggcgcgagccgcagcctctcctcccgtctcgcttcctccgacaggcgcccgactcggacacacggcgcccctgtggttaccacatccactgctttttggtctcctcacccaaccccttaacataaactcgacaccagggaaggcatcttggacgattttggtccctgagggtcctagtgcgaagggcagggagagagggagcggtgtggtgcagggggatacagaacgcggaggacatctaggggctgaggatgcggggacgaggagcgcgcggaagagccgaggttccggggttggggggtgcggatttcagaggaaccgccggggatgtggacggactcggaaggaaggggtcccagagaggacgcgggcggctgcaggacacaagaggtgcgggacgcaggaggccgtggggtcgtgcgggagcccagggcacctcgacatggacccgccagacctgtggctcctccagcggccgctttag

SEQ ID NO: 408565 - DNA, 1000 bp, Homo Sapiens
agccaaggctggcccgaggaacggagagggcacatggcctagccacaagtggagcttctgctccgcccgaagggatgcgctggagcggcctcttccttctgccacggtctttctttgccaactagtagagatggggtttcaccaggttagccaggctggtcttgaactccagacctcaagggatccgcctgcctcagctttccaaagtgctgggattacaggtggagactggacctcagaagagggagtgggtgccccgagaactcacagctagcggacagtggaaagggcaggagccggaccaaggctccggcatgacgggtgacttcttccgagtctggcttctgcagcacacagggcttcgccagcacccagctcctgcagcatgggcagctcctgtgacagcaggcgcccgcagcctgcaaagcgtctccagtgccgccgcctcagtgaacctcaaccagcggcacctagcagctttctctgccaccctcttcaggtctggatctaagcccagggaccaggaaacctcttgcttgagtgctggaactcaggccagaaggcaggaagcccgcctgaccccatgtctcaggctgccagaggagcgtgcgatgaggaaggctggactgtcttcacaggacaccagggagaagcctcaagccactgccccctgacaagtcgcagctctccagcctgtctcctcactcccctcccctccacatgggggggttggggtgggggcggggaaggttcggggcaggggtcatttcagctactgggcaccagtctcctcctcatgtttatcctgttccctttgcttgaaaggttcgtactccagatccttgtaaaaccgcttctcaccctttgagtctcagcttaaatgtcccctccttggaggggtcttccctgacaatgaagctccgaccgtcctctcctgttttacccagttcatttctttctggcatttgtaactacttgaagttaaagtgtgtgccatgta

SEQ ID NO: 408566 - DNA, 958 bp, Homo Sapiens; identical to SEQ ID NO: 225107

SEQ ID NO: 408567 - DNA, 579 bp, Homo Sapiens
atgtggctcaagttcgggaggcgttacctgtggaggggcgagggtccctgggatcgtcgggtcaggccttgggccaacgtaggcactctcgcagttcctccgccttcaggaaggtctttttggcaggggccctacgggtgcgcgcttcggtcctggaggccttatccaagcctcctctccatcagcgccacccgtctggggtccgaaaggagggagctttccctctgtcccccagcctttggactgtcaccaaacaagccattcgttcaccaaatacttattaagcgcctaccaggtactatcctcaattgtcttgtgatatttacaatctagaaggcaggagagagaactaagaacagagagcgtgttctgagatgtctgctgtgattgcagaaagaggcttctccccaggaccaggattccacgaaggcagcccttttctagatggagaaaatagaacctgaaggcagccgtttccctaaactgctctcgctcatgtctctcagagaaaggaaatgaagcagtgaaagcatcctcccaaaagggacttttaaatccttctacctgggctgaactaca

SEQ ID NO: 408568 - DNA, 466 bp, Homo Sapiens; identical to SEQ ID NO: 225108

SEQ ID NO: 408569 - DNA, 858 bp, Homo Sapiens; identical to SEQ ID NO: 295641

SEQ ID NO: 408570 - DNA, 1000 bp, Homo Sapiens
atttttacccttcaaaggaaaaaaaagaataaaattccccaacttaacaattattaatgtgcatatgaatcatatgggaatattattaatgtgtcagaggttgaagaagtggccagaaaaagaaaagtattttgatggcaggctggagaacatcatgagagtaaactttaggcctgttgactgtcattttggcaatgtattgggccctggccaaagtgcttggatgcaacgtggggccaatcaataaatccatcccccatgcttttcctggccatgaggtaatcggcagcctagttcatgtcttgatgggaacctttgccatgtggaaggatcacatctcaggtttcttgacaactggatgacttttgagaacaaagatctaggacagatctattcttggattgtggacaggcatcagcctactaacatcatatggaacaggtctcctttacagaaaggggcttggataaggaggaaagaccatcagaagaaaagataagacactgtcttctcattccagtaagagccacatgcaaggcaagaatcagagtccagctcagatgggggaactctaggaagagagaaatccattccatggacagctgccaagatagagcaggacagcatcaaggacatgagccgaaagtgcaaaaggactgcttgactttggaaaagaaaccaaaggcctctctgacactgtacacatcagtgaaatgaggagacccatgatgcctgctgtgggggacccccagaggcccacaccgggcacagcaagcggcccagatctcagtctctaggagaccacccactgccacttcagaaaagcctggtgacctctctgcacactccatctgaagccatttatcacaacacagcccaggtgtgggaacagtaggcctattctctgctgacctgggagcagctgtctgagctcaccctggctccagggggactctgtgctatggtacaaacctgtgccgtggccgcccagatggcctat

SEQ ID NO: 408571 - DNA, 787 bp, Homo Sapiens
cgtgcctacctgcatgttagcgtgagaggagctttgtgtgtgagaacatgtgtaatgtgtgtgcagacatgccgagcgccagagacttgtgtgtgggccacgtacatgtggacagagacgcatacatggaggtgcatgtaatctgtgtctccgagtgtgtgtgtgcacgtatgtgtgctggtgcagacccaggtgtgtgggtgtgcctctgtgtgcgtgtgttccatcatccctgcaccactggctccagatctcttcctgagcccccgtccccactggccctctcacagcctgcaacacatcagtgcccccagctgcatgcgcctcgctgctctgtccatcagtgtgtgcttgaccaagagaaaactaagacgtctcggggggcccctgtacctggtcctctcagcccccgcccactgtgctgtgttacttgcatgggggatttcctgccccttccacaatatgctgtttcccccaggagcctcaggcctgaggctcggagtggggtccccagagggccccctggggtgagccccggctccacaccctgccccatccaccctgtagggcccatgttggtgtagcggtgatggcttctgtggatattctgtgacctctgtcggtgtaacttgacaatttctaaatggaaaagggttgctgcgttttctctgtctctttttttaatgtccttttttcttctccccacctccctgctctctttccttttcagtttttctagccaagtgtttggggctttaataaaacttgtttctttttcctctcctgg

SEQ ID NO: 408572 - DNA, 1000 bp, Homo Sapiens
ttatcttacaattgttatgggttggacgtcctgtgggcttgagtgggtatctgcttagagtctcacaaggctgaactcagggcgtggcaggggagagtccattttcttgctcattcagactgttgggaaaattaatttccttgcaattgctgggctgttttcttgctggcagtactccaatgaagaggcagcctgcatcccttggcttggagccccattcctccattttcaaaggtagccacagcaggtcgagcctctcttccttttaagtctcttctgccctttctgattacatctctctgcccctccaattctgtttgccagctgtctggcagctgaggaaatgttctttgcttgtataagggctcatgtgcttagatagggcccacctgtgtaatccaggctgccctccccacctcaagctccacaccctaaattccatctgccagctctgcttgccatgtgatgtagcagattcacaggttccaggaattagggcatggaaatctttgtgagacgggagggggcattattctgctgggtgctggactcatttgaaggctcattcatacacgtggctgtgggtaatcttggctgttggctgaaaccttggctggggcagccaactggacccatatggtctgtccatgtgactgggcttccttacaatgtggagcctttagacctgaaggctgcttactgcaaagtccagcagctctgcacagtgcgacagagggggacccagctccttagccgctcaggtctgagatggctgctccactctgtctccccaaagttctcagcaggagtaagctgctccccacatggaagtcctgtgccttctccatggacagagcgcttccgcaacgtttgcagagcttgtccttctctcacctccacctgcccctggctttgggcacccatcaggcaagcgtgctgctccctcaagacctttcctcccctgctcacccccatctatttggcccaaacactgttctaa

SEQ ID NO: 408573 - DNA, 1000 bp, Homo Sapiens
agtgtccccatggttgctgggatgggcaagcaggctcaacttgttctttcccccttgccttctcctgagggacacactgcatggcaggtcaggggtcgctctgactctttgcttctctgtgttcctgttactagtggacattccaaggtggtgaaaggatatgtgaaaggactggttcactggatgtctttatctgaaaaggggaaacaatagacatattagtccgctgctctgcaaaggtactgactgcctataatcccagcactttgggaggccaaggtatgtggatcacctgaggtcaggagttcaagaccagcctggccaacatggcaatgaaaccccatctctactaaaaatgcaaaagttagctgggcgtggcagtgcacatctgtagtcccagctacttaggaggctgaggcagaagaatcacttgaacctgggaggcggaggttgcagcgagccaagattgtgccactgaactccagcttgggtgacagagcgagtctctgtctcaaaaaaaaaaaaaaaagaaaaaaaaaggaatagtttcttaaaattcacagtcatggggggaatacatatatatatatatatatatatatatgtatatatgtgtgtgtgtatatatatagctatatatatgtgtgtatatatatagctatatatatgtgtgtgtacatatatattgctatatatatatgtgtgtgtatatatgtatagctacttagagcaacctggatgaatctcatagtattgaccaaaagaaactagactccagtgagcaaatactgtataatttaatttatatgaagttcatgaactggcaaaactaatctatggtgacatcagccagactagtggttgccttttctagagggggatattacctgggatacaagagaggcttctgagatgctggaaacattctgtatcaatctgagtggtggttgcatgtatgtataaacacttgtaaaaatttcaattaaaatttattacatgt

SEQ ID NO: 408574 - DNA, 1000 bp, Homo Sapiens; identical to SEQ ID NO: 295642

SEQ ID NO: 408575 - DNA, 1000 bp, Homo Sapiens; identical to SEQ ID NO: 295643

SEQ ID NO: 408576 - DNA, 941 bp, Homo Sapiens
ttttttttttttttttttaatggtggaaatattccaaaattcaatattttgggatttatacacaaaagataaacaaattagaggccaagaggctgccggaagggaaaaacggggcctggaatggccgacgtgaggaatgagctgggcctaaagaggccactggcaggcaggagctggacctgccgaagtggccgaaagccaggagctttggactggggagaccgcagtgaggcgagagctagctgggcgtggagagtccgctgtgaggccgaggccgaggccgggcccgtgcaggccttcgagaggcaggaggccgggcctgcaaaggccgcctggagatcaagttctgcgcctgaagaggctgccaaaagtcaaaagcggggcctgggaaggccgccgagagccatgagctgggctgggccgaaagaggccactgggaggcaggaggagctgggcctggagaggctgactcgaggaagttttgcacctggagaggccgccgagaggacggagctgggcccggggaggccgacttgctgctcttccaggcccacttccaggccgacttgaggacgacttgggcctgcagaggccgccgggaggctggagctaagcctggagagactgacttcgggacgatttgggcctgcggaggccgccgggaggcccaagctgggcctagaggagcccaccgaccggaggccgtttggggcctgcagatgtcatcggagggccaggagctgagcctggagaggccaccgcgaggcctgagctgggcctggggagcttggcttagggaagttgtgggcctaccagggccgctgggagctgggcaggagctgagtccaaagacgttgttgggacctggagtcgggccagagtccgccctggagatgcagccgggaggaagagctgggcccggagggggcgccgggaggctg

SEQ ID NO: 408577 - DNA, 1000 bp, Homo Sapiens; identical to SEQ ID NO: 295645

SEQ ID NO: 408578 - DNA, 908 bp, Homo Sapiens
atgtcaacaaagtcagagaagaggggtcttcagccgtgcgcgtgtggagcagggccacggcgcctgcgcagcggaggctgtggaccacatttcccaagaacactgcgttcctgggcccgcccagtgtcccagagtccctttcgaggcggaagctgggctcctccctgcgtctctttctgggccgtggagctgtccgctctgaaacctgaggaagtcgtagttcagggaggggtagctcttgcacctaggccgttaggaacgagttttaggttcgaatcccatcttatggaaggtggtattggtcccttgggtgtcccacccgtctcagccaaactgcgggccatttcccggggcgagcaaggggagttaccgcgccagtgggtggactcgccgcctctcggagtcgggaggaagtcgagctggggtgcagttacgagtctcagttaataatgaatagggtggccaatggtgggccaggcacagtggctcacgcctgtaatcccagcactttgggaggccgaggcgggcggatcacgaggttaggagataagagaccagcctggctaatatggtgaaacctcgtctttactaaaaataaaaaaattagctgggcatggtggcgggcgcctgtagtcccggctactcgggaggctgaggcaggagaatcgcttgaacctgggaggcggaggttgcagtgagctgagatcatgcccttgcactctagcctgtgcaacaagaatgaaactccatctcaaaaaaaaaagaaaaaaaaagatttcacctcatggtcaaattggttaggatttgatggaataatctataaggtttcgtgtaaacaaattggggttaacattaataaactaatgcaagggtaaaattttgctttgaacaagattttcatttcataa

SEQ ID NO: 408579 - DNA, 532 bp, Homo Sapiens; identical to SEQ ID NO: 295646

SEQ ID NO: 408580 - DNA, 1000 bp, Homo Sapiens; identical to SEQ ID NO: 119377

SEQ ID NO: 408581 - DNA, 1000 bp, Homo Sapiens; identical to SEQ ID NO: 295648

SEQ ID NO: 408582 - DNA, 1000 bp, Homo Sapiens
ctgcttccatgcaggagggagggaagcctgctcagtgggaaaagatgaagctggtccccccgcgtgtcagtgaacaaattgggccaatttggtgtgattagtgaagaattcacatctggccagcagagtcctccccccagccccagcccagcctggctcctgctccccattagaagctattttctctgacggctccatttgtctctgtagtgggggatttgacagctccctggccagcctgggaggcctggctctgagtgagaggcccaaggccaggctgtgtgcccacacccttgacctgatgccacgggggatgccatgctccaaacagggcccaggcacctgtatgggccctgtaggtcccatccctcttctgtgtgcacagatccatagttgaatgggggcctggggagcacagttcactaggctccctgacctgggccccccttgggccttggtcatcttgcacaatgattattgtgttttaagatcaacagagacttgtatgtgtgtgcatggtggtagaggaagcaggggtctggtgtttcctaaaagaaaacagctgggcatgtaataggcgggcctgcaccccacttccttcaccccttcctcacccctcccagagacctgttgctgcagctacccctcaggaatgcctgtagatggctgtcgcacagctggaaggctcgccccgagaagcggcttcaagcagcaactggcctccaggagacggaacccgaagaagtcaagatttttaaatgtctgaaaggacttttggaggaaaaggggaccagcatcagatctctgctcctgctgtcctgggagcctggagctgctggggctggttccccatctgtcctgccctcactctacctctcctccaaaggccccttccctacctcagcctctcccttccccttctctgcccatgtacccagaggctggaggccgggtgcagtggctcacgcctgtaatcccagaactttgggaggccgaggca

SEQ ID NO: 408583 - DNA, 1000 bp, Homo Sapiens
aaacacggccctcccgggtacttaggagggtctgagggtaagtgccaagatggagaaaacacgccggcccctcacagagtatctcctgaggaatgagaactatctagcgggcaaggagggcttcctgcatagcagagggcaccccctctgatcccccaaggccaagggaaaaaaatcactcttcaccggcgcccctgagccaggacaggctccagtgcagccacccaccttataattttccgcggatgctgccttgatcagatgtctgaagatgactttaaggactacaagcaaatctcaagggaaaaattcagaccttgaacaacagccttgaactttttcagggttagacaagtactccccagtggagtttctgcccttatttcttcgttcttctcttaattcttccatattttaacagaacacagacctgccgaaacgacacaggatggctctttgctttttgttagttctccaaccttccaaacccttggggcacatgcaagcactgtggaaaaacttcattaaaccaagagtcatcttactccagatcccagactgcttgggaagttggacatgcatattcccaaagagaacagtgttggaagaagacaggagagcagctcgcgggttgggggtagagggtaggaaaagagggcaagatggaggactaccactcgaggccagcctccactgcctgttagggcggtagaacctaagagccggtccaaggcaacacaaaagacagtgaggctaggtctttaattgcagccaacgatcaagaaagcaactccatcaaatgacactgtctttttaaaaaaaattttttttttttgagacagaagcgagactccgtctcaaaaaaaataattattatttaaaataatcattgggcctggcgcggtggctcacacctgtaatcctagcactttgggaggccaaggcgggtggatcacgaggtcaggagattgagatccagcctggccaacatggtgaaacc

SEQ ID NO: 408584 - DNA, 1000 bp, Homo Sapiens; identical to SEQ ID NO: 225110

SEQ ID NO: 408585 - DNA, 1000 bp, Homo Sapiens
cttgcggaccttgctcaaaaaatacgacaagttcccggcgggtagcagacttggttctaattttcctcgccccagcctcttggagcgccctgcatgctgggtcacagctgccgctcccgccgccactttgctccttgcctgctcccttcccgcgttccgcctgggaccctcggcggcagctcacaccttccctcagtgccggcctcgcctagaggagggaaaggccgtggcgtccgctccctccgcggctcatggcgacgacgcttggcacatccgggaccctcaggccgctgcagtcgcgtcgccggctgctcgggccccagccccggccgctgtggtgactccgccgcgcctcgccgtcgcccccgtcccgcccgccgccccagccgccagggacatgtctaacctcggaggccgtaggaacgggcctgtcgaagtgcgcctgacaggaatcatattgacaggtcatgaaaatgagaccaaaagatctctggaagcgattaatgataaaatttcatggagaagaaggccttgactacggaggggttgccagggtctccctctgtcacccaggctggagtgtagtggcgcgatctcgggtcactgcaacctccccaagctgggctcaagagatcctcccacctcagcctcctgagcagctgggactacaggtacaagccaccacagccagctaatttttgtaatttttttgtagagatggggtttcgccatgttgcctaggctgatctcgaactcctgagctcaagtagtctgcctgccccggcctcccaaagtgctgggattacaggtgtgagccaccgcacccagccagtgatttatttctgatattatatttactataagaattcttttctaaatatgaaaattagttttatataaatgtaggataaacactgtagctctctactgaaatgttttaaggatcattgtaattctgctttccctaatcttaaatccaaccaaaattaaattatgtttt

SEQ ID NO: 408586 - DNA, 1000 bp, Homo Sapiens; identical to SEQ ID NO: 295651

SEQ ID NO: 408587 - DNA, 1000 bp, Homo Sapiens; identical to SEQ ID NO: 295652

SEQ ID NO: 408588 - DNA, 1000 bp, Homo Sapiens; identical to SEQ ID NO: 295653

SEQ ID NO: 408589 - DNA, 1000 bp, Homo Sapiens; identical to SEQ ID NO: 295654

SEQ ID NO: 408590 - DNA, 1000 bp, Homo Sapiens; identical to SEQ ID NO: 295655

SEQ ID NO: 408591 - DNA, 1000 bp, Homo Sapiens
gctaggagcccaggcttttccagagttcccctccctcaagtcattcttggaatcactaaagaggcttatctatgtcgagaatccaccagccagatcaagatcatccacagccttcaggccccagtggctccccagagtggcctctctgagttggatgaggctctggcgcctgatgctgccggaggacatgtgggaatgtgcccagccccaatgcttctggacctagaatacgcgcggagcccgcggcgatccccgcggccgctcagtcttcgcggcggactccggcgcgcaggagccactgggccgcaagggcgccggggagcgggaggggcgctgggggcggcaaggggtcccagatcccaggccacgaactgttttccttttccccgggcaagagccccgctcccttcaactgacagaaattcactggggcaggggggcgagtggggagagaggtcgctcagggctcgctactggctgcgcctcccccggctctggtctgggaagcggctctgggccctccgggcgagcagcttgggcgccggcgccccctgcgaggaagatcgcggggtgacggtcggtacccgttcggctgggccgcgctgccgctccgatccacctcccttccgcgcccgcgccctcccccttcctttcactaggagtccgggattcggagagggcgcgggaggcaggcacacgggcccgaccccactccagcgctcaccggggacgcgggcgggcggcgacgggacgcggcgggggcgcggggcgggcgcggccatggagcagcagcggcggcggcggcggcggcggcggcaacactagcgaccgcgggcggacgagcgggcgggcagggccgccgggctcagcggaccgaactgcacagctcagcaaaagcgccctcgccctccgcgcgccgcctcctgcgagcccaaacccaccaacattttttaacgctccaacccatcctttgaagaaaagcaaaaaaaaaaaaaaaaaa

SEQ ID NO: 408592 - DNA, 761 bp, Homo Sapiens
ggttggctgcctctcgggagctaggctgagatcatcaagttcattgcatttcacgctcagtttggagtcgaatttgaatccctcagaatcctggaatggctgttcccaggcttttttcaaagcaagtggatctgagcggggcaaaggctctagtccacagccttcctccccaggacatgtgattcaagcctgaagcatacaatgggagcacaaaggaggaggggacagagaaaagaaatgagcatcagccttgggaatgtctcctctgactgtagagtcaggagacattaagataaacatttgcccgggtgcagtggctcatgcttgtaatcccagcaccttgagaggctgaggcaggcagatcacttgaggtcaggagttcaagactagcctggccaatatgtcaggaacaccagctccaggagtgagacgcacctctacgaactgtatttacgttaaccctcagaacaccatcccacatgacaagccacagggaaaaaggaatcggatccagggaaaacgctgtaccactggggcccgggtgccttaagtggttttctgatcaactccatagaatcagaatgtcaggactacaagtcatccgtgtccctgcaaaggacatctcatcttcattgatcatccatggtgctgagcatttaagaggcaccagggatgtaactttgaatcagaagagacctggttcctgcccttgtggagcttacattcccgtggattgggagctgaagtcaactcatttgtaa

SEQ ID NO: 408593 - DNA, 1000 bp, Homo Sapiens; identical to SEQ ID NO: 119379

SEQ ID NO: 408594 - DNA, 502 bp, Homo Sapiens
cgaaaagctggacggggcgaaaacgttttgagctgggagaacgccccgccggtttccaaggatgcaactatgaagagacacagtgggggctacgattgggtcgtgactgtggcccacgccaggcgagcgtccccgccccagcccctctgccatctgcgtgcctgttctcccgctacctgcccccgcgccaggatccaggcttgcaaacgtccccatgccatgcgcaggcacatctcgggcggccagccaggcacacgctgcggggtgtcattagctgcagtgccgcctaaacgcggcggcccgtgcagaaccacggccaggccacctgcacgggccagggaggtgatggggacagcgagagacatgccaaaccccactggggggttgggaggggaggcgctttcatcctaaggtgacttccgtttttttttctaataaaaaaatattttaaacatggggataaatagagaaaaagacaaaatagaccccatcatagcaatgc

SEQ ID NO: 408595 - DNA, 727 bp, Homo Sapiens
gatcagccaagcaggctgctgagaaagatgacctgaattgcagggatgcagaaagtgctgaagatgctttgtcagctgagaactggttaagagaaagtggctgatacagcaaccccgttcagtgtctgcttttgtggggagccctctgctcagaaaactgctcttcttggcacccacttttctccctcctgtctctgggccacccttcttctttccactgggtgggccatggatgcatggacttcagatagctcggacccctgggtgctgacgagatgggaccctcgggacccctggaggactcgcagtgctgaccactagccgcgtcgcctgagccccagcgctgatgcgatacagtttccccctcactgtgctggagggagaagaccctgggatttctgagcgaggcccgtggatgttgaagtcttcctgggtccccgactccatgctctcgcgccccagttactatgacgccctgcacaaccgcagctcggggcacgcccagcgccctgcaggacactcggcctccccggctcagcatctgcttcgagggcccccctctgaggcggcggggcggcgtggtggatcaccgagatgtcatcttggcccaccaggcccacaaaatccacagcaccccccaggccaggaggaaagaatgggagtgatgaccccaaaagtgggtcttctggtgggagacactgggggtggaactggctctgtcatgtag

SEQ ID NO: 408596 - DNA, 1000 bp, Homo Sapiens; identical to SEQ ID NO: 295656

SEQ ID NO: 408597 - DNA, 495 bp, Homo Sapiens
atttatttatttattttagaaataagacctgggtgacaagagtgagactctgtctccaaaaaaaaaaaaaaaaaaaaaaaaaactggattgcctggctctactccgggcacagcatgcaggcccagttctgctgctctgctgtttgttctgctttcctccacatattggcatcaccctctggtgccaagatggctgctgcattccaggcatcacatccagactcagacccagagaagctgcccatccctacctgggtgagcctttgtaggaacgagaaaccgcatccagcagcagaaacctcacccagcagcgtcttttccggtctcattcaccagcgccgcccaccgctcaaccaatccctggccaaaagaatgggaccgcctggaaggctggaccaaacaggacctgccctctggggctggggagaggcccagatgaaggctgcaggacaggatggactcctagacctctgttaccagcagtgactacctctg

SEQ ID NO: 408598 - DNA, 770 bp, Homo Sapiens
cggggcatctgcagatcccctcggtcaggggctgccccgcctgggctgttcggagcagctcctctgtagggcagggcctgacctcaccccacaccccagtggcttcagctccctgcccagcgcacgggctgcctccatcagggcacttaagtagagtcaaggtttgcgccgactccgtctcccagaaatcaacgtggaccaggcccacttaaaaaatatgcattagtcgaagacagacgtctcgtccataggtccccagactgtttgtccacaacgcagggcttctctttgtgggcctgaaggagcacacgtcaggcaagacacgagggcaacttcagagacactgttcagggccacggagaattctcgaagtctgtgagttgtctccaaaacagcctccaggaaatgcaatcccagagacaccgcaaagctcaaaacagacttttcattcctccccatttccactcccagaaaaagcctgggcccctgaaagagctccaagagatctccaggggtccagaaataacacctcacagccttccaagcttcccaaggatccggagactccttatctcgcagcgcaaacctcaggcaactacaggtcctccctgcacctttgaggtgcccctccccccactcaaggttccagaaaaatccatgccctcggaaaccccagaatcttactttcccgaggcaccccaggaccccagggtcatcagttcacagggctgttagtgctcccataaaactctagcctcccagagggaccc

SEQ ID NO: 408599 - DNA, 1000 bp, Homo Sapiens
ggtctcagatggagatgaggaactttattggaactggagcagaggtgagctgcaggggcggagccctcatggagaacctctgctagagcagtgcagaagtaaaatgtggggttggagcccccacacagactactcactactcgcctagtgcagccgtgagaaaagggccaccctcctatagaccccagaatggtagattcaccgacagcttgcaccatgtgcctggaaaagtagcagacacaacaccagcctgtgaaagcagccaggagaggagctgtaccctgcaaagtcacaggggcagacatgggttccctgcaagaccactggaaccaacctcttgcataagtgtgacctggatgtgagacacggagtcaaaagagatcattttggagctttgactgccctgctggatttcagactggcatggggcctgtgacctgttttggccaatttctcccatttgcaacgggcgttatttatccaatacctgtgcctccattgtacctaggaaataactaacttgctttttattttacaggctcataaacagaagagacttgcttgtctcagatgaaactttggactgtggacttttgagttaatgctgaaataagactttgggggactgttggggaggcatgattggttttgaaatgtgaggacatgagatttgggagggaccaggggcaaaatgatatggtttggctgtgtccccaccaaatctcatcttgaattgcagctcccatgatccccacatgtgggagggacccggggggaggtaactgaatcatgggggtgggattttcccatgctgttctcatgatagtgaataaatctcatgagatcttatggttttataaagggcagtttccctgcacgggctctctcttgcccgccaccacgtaagacatgtgtttgctcctccttcaccttctgccatgattgtgaggtctctctagccgtgtgaaactgtgagtccattaaacttctttttctttat

SEQ ID NO: 408600 - DNA, 1000 bp, Homo Sapiens
ttgtcactgtgattggcatatgatgggcgctcaacaaacatttgttttatgaatgaactggtgaatgcgtgaactatataagcctagccccggcacctttggatatttccggtcttcgtaagccctcgcggtgatggccaatgagggcgccgaggcccgctcgggtattttcggaaccctccggaaacgctcttgggagaggtgtgtatgttcggaaatactccgtcttcattcggaatccctcggctaatcctggcagccctcttgcagttcgccctccccagggttttcttgaaataaaactcttaaactgtttaagcctggggagaacctacacggaaacttctcgctgactgccaccccaggggagcgcggatgccctctaagggagaattgtttggagggagggagatttgcatgtggcttctcttggctccctttaggattctatagatttgccggtcctcttccctgccctccacctgtgcctccagcctatggtgtgcctgtcacaccccatcagctccctgggaggttatgatccgttgtcagggccaccctaagggggcaggagccttgcctgatatttctctgtgtcctcggcctcacccacgcggcatggtgctggggaggcctcagagactcctactgaacaaaaggaatgagggtgcctgtgtcacctccccagggctccttaacttgcggttacacccgggcactccttggggcaggggcttcgtctggtccataggactatcctccataggacagtcggggttcgcccagcttcctccacgggtgcgctctggacctgatgggtctcgtccgtccttgtgcccgtggcttcattcgctgaacacaggagaccccagaagacacgcgctgagtgaaggaaactcagcttccgcggaacccggagcttcccctcttagatcaccccgactactggttctcgcgtcccagagctccttggtgtctaaaggccttgtctgatctgcac

SEQ ID NO: 408601 - DNA, 1000 bp, Homo Sapiens; identical to SEQ ID NO: 295658

SEQ ID NO: 408602 - DNA, 747 bp, Homo Sapiens; identical to SEQ ID NO: 295659

SEQ ID NO: 408603 - DNA, 1000 bp, Homo Sapiens; identical to SEQ ID NO: 295660

SEQ ID NO: 408604 - DNA, 564 bp, Homo Sapiens
atggaggcagtgtctggagtcccttgtgcaggggctgaagaagtgggcttctcacacttgcagcccccactccctgggtgctcagagtggctgccctgtgataacccttcttatgggcatgcgtgggtggtggtggtgaagccactccgggttgagcaaaacaaaaatgtttgcagcatttgtgagaagaagctgctcactcgcgcccagcgcagtcgctccgagcggccgcgagcagagccgcccagccctgccagctgcgccgggacgattggcatctttgcaaacgaggcattgttcaccttggaactgctagccaccaccccagcagctctcgtttggtcagggagagttgtttgttgggcgctacagaatccagctgctcatcatagtgccagagtcagtcctaggggaaaagaggatccctgctcatataaggagtcaggccagggcgggatgacactcattgattctaaagcatctttaatctgccaggcggagggggctttgctggtctttcttggactattccagagagatggcagcacagagatcggagtttga

SEQ ID NO: 408605 - DNA, 1000 bp, Homo Sapiens
ctgcggtcttacaactgcgaaaccttgggggtcgtggttcgttcctgtggaatcctccttcgtgcgtgcaggaggagcctagcttgcccggcggaggccgctcgcctgggggcgggctggagccatgtcccggggctaggggcgctgtgggcgccgcgcccgccgctgcccggcaccggaagccaagagggcgttcccgacgggctccgcagatgcccctccgcgtcctgccgcccatcctgcccggattgtcgcgggccgggggcgcgacaggaggccgaggcctgcccgggcgcagaggcctgcctgggcgcagcggcctgcagggcgcagccgtccctccgccggtcggggtcccctcgctccgcgggcggccgtgggaggccctcgcgacggccgctacccctcgcagatgccctctgcagctcctgcgtgcgggccccgccctgcactgccctcctagtgtgggacgcggtttcgtcttcattgcaaccctgccgagtcggaagcatctccattgtgcggatgggtaaactgaggcccagagcgcgcggttgggctggccacggaggcagggccgccggatgctgtgcggggatggggccctgcaccccttgcgcctctcaccatggggcctcaggcccctgtgcccggcagcgtctctggagtgggcattttgaacgagctccctcctgattttcacacagacttaagcctgacgaccgtgctggggcggatgtctgcccctctggtgaccaggtcacagctcccttgggaagacgattgactggggaatggggaccctggggagggggccttcagggtgccatctgtctgtttacgccagaaaacagagatttctgttttctttcgctgggctcacagcaggtgcttaataaacagatcttgtggcgggagcagaggacagcgaggttcaggcacgactccaggagtcaacccctggatctcggaggctccccacccgcgcacatttccctga

SEQ ID NO: 408606 - DNA, 1000 bp, Homo Sapiens; identical to SEQ ID NO: 295661

SEQ ID NO: 408607 - DNA, 1000 bp, Homo Sapiens
tgctcctgctgtgtgtctgtggttgcccactttctgctggtctccgagagactgattcaggtgttcaggagtctgttcgctattacatcacctccttgtgagaaataaagtggagcagcctcatccagacagcaaagcaaggagggagcgtgaggagcagccaggtgagctggtggcatggggccgcctgtgcagaggccggcctcgctgcttcatgtggctcagggaggctcagcacgtccgtcatcacacctcagggcagcgagagtggacctggtgccttcagaagcccacccgaggcctgctgctctggcctgcaaaggtggagtcaccaaagctcattacaaagtgtttgcttatttttgtctgccctgcatttttttatttcttgcaaaggcctcagaggatgtgggccccagcccaaacacatcttgttttcactagtagagcttttcctagtgtctgcacaggggtgcttccagtggctctgccatagccccagacaagctgctgacacggcagccatgaggtctgggacaggttccagggggtgcttttggcctgctccagcaggagtggaggctggactggtctccagcaggagtggaggctggactggtctccagcaggagtggaggctggtctgggctccagcaggagtggaggctggtctgggctccaggagtggaggctggtctgggctccagcaggagtggaggctggtctggggagagagctacacctccccaggcccaggtctcacgaaaggagcatcgaagggcaccgaggaaaaagccacttagccctctcctgtcctgcaccattatctgggcccattggttcttgggtccctgtctttctcaacaggcagccccagttggggaattaagttgattctggactggctatgcctaatgatagctgcaatttgaaacccataaagttcgagttcagcaataaagttggggaggcagtgtcaacaccttccttgtagaacggc

SEQ ID NO: 408608 - DNA, 1000 bp, Homo Sapiens
ggccctggatctggggttgctggacttggtgcgtgggtggtctggatgcttctaggatgaattcataattgggagattctaggtgatgctcagatggaaatgagggcaactgctgcttgatggcagaacaacagagcttggcagagctaggctggactcgacttggcattttctctccgtttcagaccaggatacggattaattgagcccagcggagctcaggtttcccggggcggggggcaagcagtgccttggagggagtggggtactgtgggacggaggacccaggagacccagaatcctgaactgtcgggctgacttcgtctcctacagagttctttaacccaggagccccgagaacctgctttcctcaatgtgttcttcacccgtgagggactaggacatcctaattgccatcccagcaggacacacacacagacacacacacacacacacacacacacacacacacacacacacacaaaactggcctttacaggatgcacagtggaggaaaagaacaaagaagcacgtgtcttacaaagggagaggcagtgccaggctcatagaagtcagtgaggtactacaaaggggacgtcaggtccccccagcagcctagagccatggtgagggccagggagagggcttgtctatcacagtgacagtccattatccagctgaacatcacctaggagggccatgcatgtgaacagggtttctgtttaccatgtcagcttcagcctgggggctcctccaatttttcccattaggagcccttagcacatcgctgcaatgtttctggcttattgggaattcctattatagtccattgtcctccctcaaatctgaaaagggatgattgattttgaggaaacaaggcaagttgctgaaggatttctaaatgagccttatgtttgattttggggtcagtctgtgtgggttccaagacaagatggtggctggtaatgattttcaaataaatatattttgtgatcacgaa

SEQ ID NO: 408609 - DNA, 1000 bp, Homo Sapiens; identical to SEQ ID NO: 295662

SEQ ID NO: 408610 - DNA, 1000 bp, Homo Sapiens
agactgctctgctgaacaacccagttattgaaatacctcctgggtggcagagacggagagacccgggcgccctgcagcagcagcctcccggcccagagccgggatgccggcaggacttctggaagggaaacctggaccagggccaccccgggcacagggaacgcggctggcaaggcgcatcctcgccgctcagtctccgtctccccgcatctctcagacgtcaacaaacccctgaccacaaagtgaaactttcccggcccccgctgtcgcgccaggtctctgccctctgcctgggagcgcgttgcggggacaggtgtggggcccgggctgaggaggggcccccgccccaggaccggaggttgtgtaatcggcccgggaaggggggctcgggacagctccctgcgccggagctgcggaggccagacgggggaccccagctgagggggccggcgcccggaggcggaagaggcgcgtgcgccgtggctggggagggtagcggttacgctgagcgccggcgttgctggtccccgacccctggtacccgggcatcgttttttcatcccgggcagctgggaccccgggatgacctaaggaacaaggattcagacgcagactccacggtgaattggccttattcacgtgtgaacgaacgtccaggagaaaaccaaacccgaatgggccaggctctaaccagaggagaccccaaaactgtgatctgcatcagaaaacgaaccagccagccggttcccggctctgccaggtctaggggtgctttattcaagccctgggttcgctccctggtcagcaagtatgaggtatttgcagagggtctagaagatgtgaagggagattagcccgcatttaggactgtgccaaacagagagtgatgactgcttaatgagtacaaagcctctttggggggtgattaaaatgttaaggaattagacggtggtgatgactgtacaactttgtgaatataataaaaaaccacataactgta

SEQ ID NO: 408611 - DNA, 1000 bp, Homo Sapiens; identical to SEQ ID NO: 295664

SEQ ID NO: 408612 - DNA, 886 bp, Homo Sapiens
atggggccggccggagaagtccagtcagctcggcttgtctgggcgctcccgccggggtgtaagaaccaacccgaccgcaccaactgccctcaagctctgcccggactccagccactagagtttcattttaacggcgcggaggggacaccctccccgccccatgctgcccacccgctgaggcgccacccaaccgcgccgggaggggggacagcaggcatcaccaccgccccttccacgccgtcccgcctcgatccatccgcgctctcccccagcctcaatcagaatggtacgatccgggcgctggccgcactccaggagtcagtgccgggagcacgcgagccaggcgaggagggagtggggcgagggaagagaggcaaggtgggtggtgattggctgaggccggttgccggagcctggagcctgcgtcttttgtctgccttgctcctgcgaaggagcgggagacggctgcgcgccccaagcgggccaatcaggagacagccggcgccggccggagaggagccagggaggacctgctggcgtgagacgcctctgcccggtagaagatactggaagatcaactctaatttgtggctgccttcccagcagtctctacttcagcatatctgggagccagaagcactcaagtttgataactcaaaagacagaacaatcagtcaaggggtagaggctaccttccattctgctcatcttacacttcttggaaaggagacattcggtgaagatcactactattctccaaacttcattcgggaccctattccttccctgttgatgtcagtgtgtgaaattctaaattatgtcatgggtgtatacgttcaaaagcaatatattttcaaataaacaaaaaatataattggccatcaca

SEQ ID NO: 408613 - DNA, 1000 bp, Homo Sapiens; identical to SEQ ID NO: 295665

SEQ ID NO: 408614 - DNA, 1000 bp, Homo Sapiens; identical to SEQ ID NO: 295666

SEQ ID NO: 408615 - DNA, 753 bp, Homo Sapiens
atggttgccaagagacgaagggggctgcgtcgacacccacttaacttcggagttagtgggacacctttctttttgcttagtacgcttttctgctattcctgccgcataactctctcttccccaggcttttcccatctccatcctattctctcgcaggcaggtttttcttccgcctctctggggattttcgcgttggttctccctgcccccaggagtgaggcgggtaacgcccacgcctacctccggtgctgggggaaaagattacttcccagatgcagtatttacatctcctccgccctactcttccaaccctgcctgaaataagtgtggttctcctgtctgtcagactatgaagagttctcaaatatgtctttcccagcgagggagaggagatgcgtctatgagattcatccatattgttgtgtgtaacaatggtccattctttttcactactgtgtattacttcattatataaatattcaacgatttgtgtactcatcctactgttggtggacatttgagttgcttcatgtttctgcctttgatgaagctgctgcagacattcttacacatgtcttttggtggacatagcattcatttatgttggatatatatatatacctaggattggattcctggttcatagagtgttcacatattaaactttaaatacactgccagtttttaaattcgtataacaatttaggttccaaccagtgatatgagatttccggttgtttcacatctttgcca

SEQ ID NO: 408616 - DNA, 649 bp, Homo Sapiens
atgtttctcttcagttatgtgaggtttatcccgtttccaacgaaattctcagagaagtccaaatatccacttggagattctacaaaaaattctaccaaaagtgtgtttccaaacggctccatcaaagggaatgttcaactcggtgacttgaatgcaatcatcccaaagcagcttctgagaatgcttccatgtagctttgatgagaagatatttccttttccaccccaggcctcgaagccctccaaatgtccccttgcagatgctagaaagagggtgtttcaaagctgctctatcaaaaggaaagtacaacgctgtgagttgaatgcaaacatcacaaggaagttcctgagcatgcttccgtttagcttttacgggaagattatcccttttccatcgaaatgttcaaagaggtccacatatccgcttgcagattccaccgaaagagtgtttccaaactgctgcatcaaaaggaatcctcagctccgtgagttgaatgcaatcatcaccaagaagtttctgacaatgcttctctctagtttttatgtgaagatatttccttttccaccacaggcctgaaagcgctccaaatgtccacttggaggctctacgaaaagaatgtttcaaaactgctctatgaaaagcaatgtta

SEQ ID NO: 408617 - DNA, 1000 bp, Homo Sapiens
gccccatcaaaggggatgttcaactcggtgacttgaatgcaatcatcacaaagcagcttctgagaatgcttccatgtaggtttgatgagaagatatttccttttccaccccaggcctcgaagccctccaaatgtccccttgcagatgctagaaagagggggtttcaaagctgctctatcaaaaggaaagtacaactctgtgagttgaatgcaaacatcacaaggaagttcctgagcatgcttccgtttagcttttacgggaagattatcccttttccatcgaaatgttcaaagaggtccacatatccgcttgcagattccaccgaaagagtgtttccaaactgctgcatccaaaggaatcctcagctccgtgagttgaatgcaatcatcaccaagaagtttctgacaatgcttctctctagtttttatgtgaagatatttccttttccaccgcaggcctgaaagcgctccaaatgtccacttggaggctctacgaaaagaatgtttcaaaactgctctatgaaaagcaatgttatactctgggagttgaacacaagcctcacaaaggagtttctgagaatgcttctgtttactttttacgtgaggatattcccgttttcaaagcagtcttcacagagttccacctatccatttgcagatgctagcaaaagagagtttcaaaactgctccatcaaaaggaatgttcaactctgtgagttgcatgcaatcatcacagagaagtttctgagaatgcttctgtctagattttatgtgaagatatggccgtttcgaacgaaggccacaaagtgctcccaatatccacttgcaggtcctccaaaaagagtgtttcaaacgtgaactaccaaaggaaggctcaactctggactttgaaggccaacgtcagaaggatgtttctgcgaaagcttctgtttagttaggtgacgttatcccgtttccaacgaaatcctcagagaggtccaaatatccacctgcagagtcta

SEQ ID NO: 408618 - DNA, 946 bp, Homo Sapiens
atgttcctcttcagttacgtgaggtttatcccgtttcaaacgaaattctcagagaagtcccaaaatccacttgcatattctacaaaaggtgtgtttggaaaatgcgccatcaaaagatatgctcagctctgcctgaaagcgctccaaatgtccacttggaggctctacgaaaagaatgtttcaaaactgctctatgaaaagcaatgttatactctgggagttgaagacaagcctcacaaaggagtttctgagaatgcttcggtttactttctacatgaagttctttcctttactacgacaggcctcaaagaggtccaaatctccacttgcagattctgcagaaggagtgtttcaaacctgaactatcagagaaaggttcaacactattctaccaaaagtgtgtttccaaacggctccatcaaagggaaagttcaactcggtgacttgaatgcaatcatcacaaagcagcttctgagaatgcttccatgtagctttgatgagaagatatttccttttccaccccgggcctcgaagccctccaaatgtccccttgcagatgctagaaagagagggtttcaaagctgctctatcaaaaggaaagtacaactctgcgagttgaatgcaaacatcacaaagaagttcctgagcatgcttccgtttagcttttacgggaagattatcccttttccatcgaaatgttcaaagaggtccacatatccgcttgcagattccaccgaaagagtgtttccaaactgctgcatcaaaaggaatcctcagctccgtgagttgaatgcaatcatcaccaagaagtttctgacaatgcttctctctagtttttatgtgaagatatttccttttccaccacaggcctgaaagcgctccaaatgtccacttggaggctctacgaaaggaatgtttcaaaactgctctatgaaaagcaatgtta

SEQ ID NO: 408619 - DNA, 811 bp, Homo Sapiens
atgctacgaaaggagcgtttcaacctgaactcacaagggaaggttcacctctatgaagttctttcctttactacgacaggcctcaaagaggtccaaatctccacttgcagattctgcagaaggagtgtttcaaacctgaaccgtcagaggaaggttcaacactgtgagttgaatgcaagcatcacgaagaaggttctgagaatgcttctgtttacgcaggcctcaaagcggtccaaatatcccctttcagattctaccaaaagtgtgtttccaaacggctccatcaaagggaatgttcaactcggtgacttgaatgcaatcatcacaaagcagcttctgagaatgcttccatgtagctttgatgagaagatatttccttttccaccccaggcctcgaagccctccaaatgtccccttgcagatgctagaaagagagggtttcaaagctgctctatcaaaaggaaagtacaactctgcgagttgaatgcaaacatcacaaagaagttcctgagcatgcttccgtttagcttttatgggaagattatcccttttccatcggaatgttcaaagaggtccacgtatccgcttgcagattccaccgaaagagtgtttccaaactgctgcatcaaaaggaatcctcagctccgtgagttgaatgcaatcatcaccaagaagtttctgacaatgcttctctctagtttttatgtgaagatatttccttatccaccacaggcctgaaagggctccaaatgtccacttggaggctctacgaaaagaatgtttcaaaactgctccatgaaaagcaatgtta

SEQ ID NO: 408620 - DNA, 830 bp, Homo Sapiens; identical to SEQ ID NO: 225113

SEQ ID NO: 408621 - DNA, 727 bp, Homo Sapiens
ctggtactgcacatgaagatgtcccgctctcccctgctcaaggagagagtgcctgacctgagctgggcccatcagatccagtacttacctggaataggaaaaagatggggagagtgaccaaagactacaaaaatctctgaagcttatctacttgagagagagtccctgaagatactggcctctcattcctgctatgtatatccaatgtgactgaactctgaataaaatatacaagttataacaatgtagcaattgacccagcaaacgaggacacaaacgtgttgaagggatttgagtttgatgtcttgcatacaatgtgatcccactgtatgactacacaaatgttggcaaaagtaagttcagaggaaatggtaggcaagtacttcccagttttgaccagaagatggagaaaaaagaattctcaaaaaatattaaaagtgtctacggagaaatagacaagcgatgcacgacagatacatgtgtcagtctggtccctgcagttgtatttgtaataatacacattggagcaatttcatggccatcggttagagaatgtttgaggaatgatcctttcatatcaagaaggacatttcaaagatcaaaacctgatggaaatgctggagaccatggcgctgataggagctcatgcgtgttgtccaattactacgtgacaggcattggctccatgcttttcctgcactgctcatttaaacactggacaacctaa

SEQ ID NO: 408622 - DNA, 1000 bp, Homo Sapiens
cttctgcttctcaagaggctgtgtgtgcaggccaaatggagggacctgctggccatgggggaccaacgcccaagactgaagcggagcccacaccccgctctgtctcctctctgtatgaataatgtgttgttctcccgtccagtctctgactgccttgtatttccttggcgactctgataccaagaggctagggccagaagtgttcagactcctgctgataggaaaccgatgccacttgctggacaagatgaacgaaaattcttcttgtataggtctttttgtggacacgtgcattcatttcccttgaggaataccaagtactggaattgttggatcataggatcggccctttcttcaaataagagcagttggaataacaaagctgttcagttgtacccttggaatccactgaaatcctgggtagggaagctccagtaccaccaactggaaagactgggaatgcctaatagctggtactggccattgtcgtaggctttgtccactctgacaaactgaagatggggactcgactcaccttcgccagccacaggaggacctccagacgaggacaggactcgctgcctttctttcccgtcagaaagggatcccttgcggacaggacctaagtgagtagctggtttcccctacttgtccttccgggcctgggtgtctcgggggctcaggctgacgggagacctaactaccggcgagtgagaccagcaggagcctggaggggcgcgcaccagggtggaggtttggtgccgggggttgagaacaacagtcaaaccctcttcttcccctggcaccacgcacctgccccccgggatgccgaacgaagtggtccctaaagctcctctgcaggcccaaccgaaacaggcctgaagctccaggatgggcgagaggatcctctttgagcgaaaccagccttctgcctggctggccctggtcaacaccctgggaagaggccgatttggcggacagaacggaagaaaagacctaa

SEQ ID NO: 408623 - DNA, 1000 bp, Homo Sapiens
tgccctggccctgtgcccttggcgctggactgacctcggcagccgcgatcttggtcaggaccagcaggcacagccctgggggctcgggacccactgcagcctgtgaaggccccatggctctgcacacagagaggcggagcagcagactttgggacttggcccctcacaaccaggacttcagagaggattggggcgggctttttgcccgccgctgctttgtgccccccggcgccagggcttttagcccgccgcggctttttgacccctcgccgctgcgaattttgccgccgcggctttttgtcccccgctgctgcggcattttgcccccctccgctttttgcccccccgccgccaccccaccccgcctcgggtttttgcccgccggggctttgtgcccctcgccgccgcggctttttgcccgccgtggcttccccaccccccgccgcggctttttgtcccccctgcgccacggctttttgcccgccgcgcctttttgtccccgccgccgcgactttttgcccgcagcgactttttacccccgccgccgtggctttttgccgccgcggcgttttgcccccgccgccgaggatttttgtccccgccgccacggctctgagggcgggagcggcagactcggctgccagctctactggcgtcctggcaagggcagctctgaggggtgctcctggtccagctctcctggctcagggattccttgcctaggcgccggcgccccaggctccttgcctaggcccctgtggcctgcatagagtggcgctgcctgtggaggcgatgggagagaagaaggagggcggtggtgggggtgatgcggcggccacggagggtggcacaggggctgcggccagccgggcgctgcagcagtgcgggcagctccagaagctcatcgtcatcttcattggcagcctgtgcgggctgtgcaccaagtgcgctgtgtccaacgacctcacccagcaggagatacagaccctggaggtaaggg

SEQ ID NO: 408624 - DNA, 1000 bp, Homo Sapiens
ccccagcccggctcgcggcagcgaaagcaaaatccgatctctctcctgggggagcaaaatggacgaaaggcgaccccccaggcaggggcgctgggtgccttgggaatccgaggaatcccttctctttgccagtcggaggggactagatggagccgaaggggccggagatgggccgagcgctgccccccgggggtcctcggcgccgggcgcagcttacgagcgcagcgcagcaggctccattcccggccgccgccgctcagcccattacgcaaacctggtgggtccaaccaaccccgctctgccgccgctgctggaacccaggaggcgtgcttgcaggctttgggcactacgtggggctggaaataccacgcactgccccttcgcctagacccccgctcgggccacgcgggttctgccctcaaagctggtagctgccccagacttgggggtggggggaggggaaggggcgaggctggcgccccctcccgcttttggctcccgcgttcgttgcagcagctgttgccaaatgaaccccggaatgcggacgtgcaaaccctccaccccacccccagccacacacgtcgcggtcagagaactgggaagggggcgctgggtccgaggttctggaaaagcaagaactcacctgcaaacaggcagtcctcagctctggacttctggatcacgacgtcgatatccttctgaattcggtcttgccttgaacacatccccattaaataaatccttggaaaagaagcagccgctatttccaccccacccccctcgcacgctttcagctttcgtaaatattcagttaaaaatgaaacctctggccgaggcaggggctgaaggccaagtggtttcggaagtgatcctgggtgagaggaggaggaggaggaggaggaggaggaggaggtggaggaggagggggaggtcggctttccatttccagatgtgaccgcccagctgctgctcgccgctgctggattccaatttcctcccc

SEQ ID NO: 408625 - DNA, 1000 bp, Homo Sapiens; identical to SEQ ID NO: 295672

SEQ ID NO: 408626 - DNA, 1000 bp, Homo Sapiens; identical to SEQ ID NO: 295673

SEQ ID NO: 408627 - DNA, 1000 bp, Homo Sapiens; identical to SEQ ID NO: 295674

SEQ ID NO: 408628 - DNA, 1000 bp, Homo Sapiens
cctggggctttttgagaccctattgaaggctgaggaagaatctggaagctaaagagtaacccattccaccacctgctctgaagatagaagaagcaaaaaaagattaaattgtacaaaaagcacttaaattagacaacagaagaatttcctgatacaaagtgggtgtctaagatgtgttaaacaagatgcctgctccagccaggactcagacactcctggatggagagcatcttcacagtttgggataaaagtgactatacagagtggtggagtgaaggctgcaggcccctccccaaggtggcatctaaccccggaggtatcaggacctcagaggctacccacatgatttccagctgatgagcagaaatagctgtggcaggtgcaggcttcacttgctgccaccaacatgggagctcaccaaacacccagtggccaaaagaaccagggtctctctaagccctgggctcaccgccaggcaagcttgggtgcttgggagggccgtcgttcttcacagtgcagcccctggatttcttctcaatttactcaactctctctcttgaatcccatctgtgcagcttagaagtcacaaattagaaccccccaaggcaaagctgaccatagatacaaatggttttgtctgtatagtgtttaagcacttaaaaaattcattgtgaacatttaataattagaaagtgtcaaaatgaaaatatctatagtttctctctaaaaaccagaagatctgttaacactgatcccacacttctatttggcaatgactggcccctaagacagggggtatgtcctctagctcaccacagtctccacctttacctactgcatccctgctgagacaaagtggtacatgccatttattaaggatgaatgctgttttttttaattatacttaatcctcatttgcattacctgccttcattctggaggtatttgagtttgcatctcctgataaagaataaatctcaaaattgtcatctctaacttc

SEQ ID NO: 408629 - DNA, 1000 bp, Homo Sapiens; identical to SEQ ID NO: 295675

SEQ ID NO: 408630 - DNA, 1000 bp, Homo Sapiens; identical to SEQ ID NO: 295676

SEQ ID NO: 408631 - DNA, 591 bp, Homo Sapiens
ttccagggacgtgaagccggaaagccaggcgcccttcttgactgcgcctaggtggaactggccctccagcagcttgaacgtagcctcttttcacactggtagttcctgaacctcttgtgaaatgaaagatgttcctcattccaagctgaggacggagaaaagccgtaaagctgacactggagctagaatgacttgtcagccacctttgagcaagaacttgcctggagtccaaatgtatggctattgaaggatagtaagcagacagcactaaaagtcatccattcgttatggatttagtcttaagaccctcatttgagagatgccttccctgtacctggaggaaagaaacatctttatctctgaagacacagggccacagagaagagtctgaacaaacaggctttaccaatttcccccagttgttaccgttagatcagacctttgtccagtcatatccttccacaagttgtccactcatcaaccctaagcataaaaatgcacaagtttccttgtttgtttgggtcttcatttccaagggctcctatgtcatgttaaacttttaaataaatttgcatgcttttctcttgtgaa

SEQ ID NO: 408632 - DNA, 1000 bp, Homo Sapiens; identical to SEQ ID NO: 295678

SEQ ID NO: 408633 - DNA, 526 bp, Homo Sapiens
ttaagccaatttgagttgaaattttttgtcatttgcaacggaatgagacatgttcctctcccccaagagctagcgtgtggtatagtgataccaggttgtgtttgatatatggggcgatagagacacatgtggggtggaagctgtccctgtgagtatggagtgtctgaaggcttcacatcgtcaaggatgtggaattccagccaagccttggagtatgacgatggtttgggaagccagagagggtcctcatgtgaatatctgtgcctcgttccactcctttcagatggattcggtctcctctgggtgtcttctctctctgtttatccattcttgcatccttttctcgggatttcgtccttggatgactttctattctattctcaagctgttgtttcaatccacgccatatgcaaataattctgaatgcaaataattcacctctgtctcaaaaaaaagaaagaaagaaaaaatgaggcattctcatgaccactatcccttctgcactggggaatcaaaaaaaaaaaaa

SEQ ID NO: 408634 - DNA, 1000 bp, Homo Sapiens; identical to SEQ ID NO: 295680

SEQ ID NO: 408635 - DNA, 832 bp, Homo Sapiens; identical to SEQ ID NO: 295681

SEQ ID NO: 408636 - DNA, 834 bp, Homo Sapiens
atgaggctggaacaacagcgcgccagtcaaaagcgggtgcgcagcccaccccggcggccgcgctgctcacctcccgcagcagcaacagtgcccggggtcccgcagcgtaagttctgccggcaagtcggatcccctcacaggtccgccgctgcgttcatacacaagcgacttccgttccgccgctacttcaggccgggtcatgctaacggaagtgcttcctttttacagtccgggtggacccaaagctccgtggcggtgctgaactttagggcagccactagccacggacttaagcggcaattgagctcctcaaagtgggtagggagtcataaccactgcccactcacatccagccagcacatcgcagtttccgaagtaccaaacacattccactccacctcccttctgcaggaaagggtcctgaagctctctaagatggctttgacatgggtccacaaattctttgacattcctttcttcaagaggtggagcctaattcccctccctttgagtgtggactgaacttagtgactcatttctaatgaatagaacaaagcagaagcaacagtgtaaggcttccaagaccgggtcataagaggcactgtttgtggcttcctccttgccctctcttctgtctcactgtggggaaagccaactgccatatcatgagaaaactcaagcagcagctctagggttagccctacatggtgaggaactgagacctcctacccacagccatgtgcatgagcagtattggaatggatcctccagccccagtcaagccttcagatgactgcagccctagccgacaacttgactgcaacctcatgagcg

SEQ ID NO: 408637 - DNA, 1000 bp, Homo Sapiens; identical to SEQ ID NO: 295682

SEQ ID NO: 408638 - DNA, 1000 bp, Homo Sapiens; identical to SEQ ID NO: 295683

SEQ ID NO: 408639 - DNA, 696 bp, Homo Sapiens
atgcaggaaggacctcactggctgctgggaacaactgcccttttgaatgaattcttttatggttaccagtcaaaaagtcaccgtcagctggaactggaagggaggtgtgtatctgtagtggacactgtcaatgcactcatcctccagttacttaggcatcccagcttctcagctcaatgggggccgcttgcccatccccccacctcccagggcagcccagaattcacctaccagggttcaaaggctggctcccttgactcaaggtcaaactatctgggtggtgcaattcatgctccagttgaaaccaacccttgcccaactcttttcttgccctcttctttttctcttactccctttccctcggagcccactctcagtatatcctatgcgtccaaatccccatctcaggctctgctccaagcaacctggcctaagacagcactattctatacatgcatgtgtgtgtacatgcaaacatacaactgcacacatttgtgtgtgtgtgtgcccatatacaaggaaatccgggaagatctgggagagaatgatcttccaaagaagataatggagaaagagtatggattttataatgtagaagttagagtcatctcagatatagagtgggactgctttgaagttgaaaattaaaagatactttagaagtaaatgtattttttattaaatcagaaaaagaaa

SEQ ID NO: 408640 - DNA, 557 bp, Homo Sapiens
atgcggccccaagcctgtggaggatgccaccaggccagactgcaacttctctgcgtgactcccccgtgctgggcctctgtttccccttctgtcaaatggggagtcacagcgtctaccctgcagggcagaaatagggtcttgctgccacccctgcgtgcagtagtccaatcacagctcattgcagcctccaactcctgggctcaagtgatcctcccgcctctgcctccacctccccaggagctggaactacaagacccaatattggtccgtgatctgatgatgttcacggtcaagacggaagcaaaaaaagcacacaccgcgcgccctcggtcactaatcacgcggagtatacgcgaggagggcccgcagctaagcgacggcgggcggccgagcttcctccacggccggggaggtgggcaaggcctccgggccgcagccccgggtacgagcggaggctccgaggcccccggtagccagtcagaatttattttaagggaaatggaaagctgcggcaggctttgggaggaggggcaggattaaaagagaaagtgtgctca

SEQ ID NO: 408641 - DNA, 1000 bp, Homo Sapiens; identical to SEQ ID NO: 295684

SEQ ID NO: 408642 - DNA, 1000 bp, Homo Sapiens
ctgagtacctctcggtgtgtctcctatgcctccccaccccgtcccaggaataactagaaattagatcccggtgcccaagcttgccctggtgcgtcctggaggcgtccccaggacttgtccgggtcctgcgcccggcgcccggggtgggcgacctgggcgggtcccaggcactgcggttcccaccagcgcgcgcagctggggccccttcctggggaatggagtgctcatttgcagaggctaatgggccccggctccgggagttcctggttggcccccgcgtcctggtgctgttggcctcctccgtgtttttccctcttctttgtgtttctctcccacaaaagaccgggtgcgtgtcggggccggcctttgttggaccgccgggcggcccgggaggagcccgtgccaaaccggcgggctctcgcggggctccagggcgcagacctcccactgcttcccgggtccctcccgggccttctttctgattctctcccttcccttctccgagttcctgctcacattcaggctgcgtctcggcctggctgccaaacagaacgacgttcttgcgcagagctgaccaggggtggcggcgggaggcaaggctcccggcaccggaaagcaaagcaaagaaaaaggcattgcagccatcgctcctggtcgtgaatgacagcgtttggctaccaaacatgtgctacatgacccctcagaagtcagaactctgcaaacaaatggcgtgtctttctcacaaaacagctcatggagtcgtccagggtcagcacggctggtcagaaccgcggctcccgggactggtccaggacagttcacgccgggtgcggaggacaggccctggcacttggcaggtgcttggtaaatactgccgaatgcacacacgtgcagatgtgcatgcggactgatgtgaaacatggtccgtaaaatacatgtaaatgtgggcaaaggtgtgttatgtgttttttcgctgtatataataaactgtgagagctgt

SEQ ID NO: 408643 - DNA, 739 bp, Homo Sapiens
atgcagatgagggaacggctgtggacattcagtccttcagaccacaaaaggactttggaaggagaagaaccctggaagaatgccatgttactggcaaagctgggaggggagggggccgtgggggcggctcggctgaaccagccccggctgggcagcagcggggacgccgggggccggggccagggctttccgggcttaggtgaggccgccgtgggccccatcttccggcggtcgccggagtttgtggtgattgttgctgccgccgccacccccccggctgccatctcctcctcctgggccgccgcctcctcctcttcctcctcctcctgggccgggctgatcccctccccgctgccgcctcctcctgggctgggcccgcggtgtctcgtcccctcgcggagccgctcctgccgccgccgccgccgcctcctcattcatcctcgtgcaccataggcggcacaggcaccaagatgtccaaccgagtggtctgccgagaagccagtcacgccgggagctggtacacagcctcaggaccgcagctgaatgcacagctagaaggttggctttcacaagtacagtctacaaaaagacctgctagagccattattgccccccggagaattttcatccttgggccttctcatcatgtgcccctctctcgatgtgcactttccagtgtggatatatataggacacccctgtatgaccttcgtattgaccaaaagatttacggagaact

SEQ ID NO: 408644 - DNA, 424 bp, Homo Sapiens
agttccttcttaggtatggggatctcagcagtttcatttcagtggccacagcttgggaaacagacttctcccaatatcaaagggaatcaagtccccctttttttctccaggcctcggtctgcagcatctgtgatgcatcagactgcaattgagccatccaaggatacaatcatagcaatcaaaaagagtgactggaggaagaaggaaatgaacatagaagaggaaaaaaaagaaatcttgattttccctcatgctatagaagggaatggtgctgttatatttttggcctatccagaaaaccaattatgaaaataaacataaatggttttctgcctcatggtttagaagcacctctgtgtgtttgctcactgaattgttgtgatgttttgctctccatgatttggaagccaaaccaataaagcaa

SEQ ID NO: 408645 - DNA, 663 bp, Homo Sapiens
gtgcttagtaaatgctagctgctatcactactgctgccactactatcaaaactactaccattactactactaataacataactactattgtcactactattaccactaccattagtactaccaccactatcatcactaccatcactactaatactatcattaccactactattaccattaccacgactatcattactactactaccacctccaccattactactactaatgctatcattactactactgcttctataattactactcctactcctaccattactactactagtagtatcaccattactactactactatcattactattaccaccaccattactactatcattactactactaccaccaccattactactactgctgtcattactactactgctactatttactcctaccgttactactactaccaccaccaccattactactactatcattgctactattactactgccatcattactattactactattagtttagtcattattatcagaggcgaggagaagcaggcagcataaccaagaacataagtattatttctcaatatgagacagaatctctatattaaattaatagccaaagccatacccaggaatgaaatatttacatgttctcactgaaaccaagaaccaaat

SEQ ID NO: 408646 - DNA, 734 bp, Homo Sapiens; identical to SEQ ID NO: 295686

SEQ ID NO: 408647 - DNA, 1000 bp, Homo Sapiens; identical to SEQ ID NO: 225116

SEQ ID NO: 408648 - DNA, 450 bp, Homo Sapiens
atggggtgtggctggacagaagccatcctcttccttctgctctgtccaactggcttctaccgctctgcagggcatgcatgccacgcggactgtgacagtgagctcttccaggcccccagtgagcctgagagggggtctgggaagagtcaagagacacccagacagtgccatgtggcagtgaagcctctggtcccaatctgccagggtgcaaagccccaggactgctggtgggatgttggcactaccccgttttccttttccagctacaacagaatggcagagaggaaaggaccctccgggatcttccagttcagccagcccattttacagaggtggagactgaggccagaggcaggtctggtccagacagctgtgagaagtcccctggaggcagcgtcccagtggagctgggaggaaagaggggcccagaaaaaggaatttgacctctga

SEQ ID NO: 408649 - DNA, 886 bp, Homo Sapiens; identical to SEQ ID NO: 225117

SEQ ID NO: 408650 - DNA, 1000 bp, Homo Sapiens; identical to SEQ ID NO: 295689

SEQ ID NO: 408651 - DNA, 1000 bp, Homo Sapiens
gacaacgcagggggaggatgccccccaggtccacagctctgcagaggtcctggaccccactctgccagtgtggcgggtatcagagctgggtggggctctgtgaagttagggtcatggagatggtatgtaaaccatgggacctgaagggaagaccccaccccagggtgcacaccccagacaccatgacacaccctggctgacagctctggccaacggagcacttgggagcaggtggtctctgcagcccaccctgctgtcctgctgagcacccaggtacccatggcactggcacatgaccaaggacagacatccatggtgtgggctgcctggagccccccaggcccctgggagctcctcggcttatcagagaccaactccagccctgaaagccatcattttctggggtcttctggagccccacaaggggatcacccatgcctctccaggtggagaatgagggtcaaatggagagttatcttggaagcccggatgccccgcctggagggaagctgcctgctggggcagacacctggcctgtccagagcctaactgaatgccacaggtcccagagatactcagcctggagcagcctctgcactgagcaggcctggagtcagtgggctctgcccgagcagggacacagtcccccaggaagttgagaacacagcaagccagagcggggaggcctccagtgaggtgcagccatctccactgcagcaaggataatatctcctctccagactgcggtcagcagcgggcctgaggtgtcctgctctgtcatggcgggagggttccatgagcagcagcgagggtccccccgtaggaggttgcccctaccccgccaaggccagaccagcagggaggctctccttggaggcaaggcccccaccacctgctgttcctgggtgacatttcctccagagagtggccggaaaggtcacctcccctccactcgggcctgcttcattgccgtgattacactttacgatccttttatgaa

SEQ ID NO: 408652 - DNA, 689 bp, Homo Sapiens
ttcggcactcggctttttcttctttaaatttacattgaataaaatctccaggctaccaacaagttcagaacaagtgctgaacgtgggggacagcgcggccacagacacccagtgagggtgagtcttgtctggcagagaagggcgaggctgggacgtggcagccggactcagcttgaccacaaatctctgcccagtgaaggccgccatgccactgaatcctgggaagaaagcaacacaaacgcctaaactggaaggagtaaaggtgccctgcaaggtaggtcaaggcttcaacgggtaaatctaggtggaaatggatcccaaccatagcacggacctcacagggcagcatgtggggttcagcccagcctccaccgatgggcagggacatggggctccggcagccccggggcagaggagaaatgcagccagcccagggccacgtgctggctgagcctgagagcaccacggggacagcctcagccaggcactgcagcttccggcagagaagcccaccggcacaggtggtaaaaataaagactgaagaaccagaaagagaaagtattaacaaaaatgccagtgatcaacaaagtggaaaaattgaatttgtgttcaaagtaatgatattaaaaggcatttgaaaaatgcaactgtcaaaaataagtttataaaataaaggacataatagaaaa

SEQ ID NO: 408653 - DNA, 1000 bp, Homo Sapiens; identical to SEQ ID NO: 295690

SEQ ID NO: 408654 - DNA, 683 bp, Homo Sapiens
agtgaggggagcgtgctagaacaggagggtggtttgggagggctctgcacttcctcgtcccccacctcgcgtttgaggaacgcgaggaggggacctcatggaacattccggcttgctagtccaagctccgtccgttctgacccccaaacagtcatctctttgccacgccttggacctaggagtgagtaccccgtgacccaatcagccattaggagcatagaccctggaagcaagctctgagccatactgggaacatcaggagagcctgagaataaaattcactgaaggtggcagaacagaaagacagaagaaatctgggcccatgccgatgtcattaaactgcttaattaaccagccctggaactgccccacttctggacttattatttttaaggacaggatcccggtccagtctcctgactgcgtagagatccctcttcttcccgaaaggcagtggatgtacttgaaaggagacttcacggacattcccaaggagacctgcattttaagcccagctctgtctgcacttgctgtgtattggactagtcaagtcacccacttcatcacggtgagccagtatatggtatttctcggtggatgttccatgtgtacttgaaaagaatgtgtttcctcctgttgttgggtgaagtactctataactctataaatgtcatttagctcca

SEQ ID NO: 408655 - DNA, 1000 bp, Homo Sapiens; identical to SEQ ID NO: 295691

SEQ ID NO: 408656 - DNA, 600 bp, Homo Sapiens
tgatgggaagcccttggaagctcttgagcggaggagggacatgctctcctgggcttactcctagctgcataggagagtctgagccgggcagggacagagctgtcggggagtcactacggtgatgcagctcccgtggaggaaggggctggcagcacccaagaacacaagcacagatggaggcgtccctctccagtggctggggcaggctctgattccgcctcctgcatttggagcagctgtaagctatcagggcctggctggctggctccaggcctcccaacgtaaccagcctgccctgctatcctggcctgaggctggcattcctcccatggtctctgcagcactcatcatcggcgctcctgccacagcatggggacctgggcagcctgatggacaaatattgggcagggaggtagggagatgcagtttcctggattcccttccctttattgaataggaatctttgcacctaaacaagtctgtgtagagtccagattgtgctctttgtccttggtccaggaggtccatctctttgagcatcagtttcctctaatgccaagtggagacaataaattgccctttccagggtcccaacaagga

SEQ ID NO: 408657 - DNA, 832 bp, Homo Sapiens; identical to SEQ ID NO: 295693

SEQ ID NO: 408658 - DNA, 1000 bp, Homo Sapiens; identical to SEQ ID NO: 225118

SEQ ID NO: 408659 - DNA, 1000 bp, Homo Sapiens; identical to SEQ ID NO: 295694

SEQ ID NO: 408660 - DNA, 1000 bp, Homo Sapiens
gccagagtctcagccccacttgcctcagttctccctgagtggcgatggttttttatttcagcgctttcggcagagcccgcagcacctgcccagcctccctccggggctggccgggcagtggcagggagaggccaggtcgccaccacccggaggcgggggtttcggggacggggaggggactgaccgggttcacccgcccgcccggcgcctgggtccccggctccgggggatgcagtttcggggtcacgagctgctttcaaaaagttgaacacaatattcggaaacccacccgtaggaattctccccccacacgcggcacaatacccactcccctcccctttttcattccttcctcccccgcttcctcctcctgccccttccccctcccacccttcagcctataatccttcccctacgagagaaagggatcgggaagaaaacatgaagtgtctgtttttgtgtcccaacctttgggctctttctgggccctcagtgaatgaccgcccagagctttcagctgcgtggagaaggactcatggccaggaggagaggaaatatatatggagtggagagagcactgaaatggggcttggcaggtcttccctttggaggaatatttttctgccccagtcgtcgtgttgaagacctgctaccccacggctgtctctggctaagtgagccagtattggcccctcgccggacccagggcctccctgccgcccggaatcctccaaggaggcttgcacttgtcggcttgctcttctccccggccctcagaggcctggcactgcgggagtcaaggcctaagcagggctccagctcggggtttaggggctgggacactcacagccccagtcacgttaggtttcccatttaaattctctctcaacctctctttctctcttccctcattgagatcaccaaagtggtgtggacacggcgccttgcccccagatctgcatcggaatgcagaaaagatctttaaaaaaaaaaaaaaaaa

SEQ ID NO: 408661 - DNA, 1000 bp, Homo Sapiens; identical to SEQ ID NO: 295696

SEQ ID NO: 408662 - DNA, 1000 bp, Homo Sapiens; identical to SEQ ID NO: 225119

SEQ ID NO: 408663 - DNA, 556 bp, Homo Sapiens
atgttggctgattgggcagggagtggagaggcggtgagcgtgcaagagtgcgcgctctgcggagtcgtggcgaggaagcgcggactagggcgcgcttgctgctctccaacaacgtctggacccggggatcgagggcagcggaaccccctcccgtccctccatctccaccttctctgtgcttgggtgcaccctgtggatacagccggcctgagggaccgcagactcgtcgggctgctttctgatgagaggattaacaaacaattgccggctgcgaccattttgcaggacaggcatcttctgcgcgcaggccacgtcgggcctgcccgggctctggctgcctggaagtgctcccgctgttcaccccgcggaattaggggttggggggcagttccccgcaaatggtaagatgaagaggcctgagcagtttcgtggaggggaagaaacaggaaaacctcttcaaaagacaaaaagctggcactgcattctctctctgtagcaggacagaactgtctaaagacaagacccctttggccaaaataaaggaacctgaaacatt

SEQ ID NO: 408664 - DNA, 945 bp, Homo Sapiens
atgccggggacagggcggccttgtaacgccctcggtgttggaagggaagaccgtacagcgcgatggggaccagggcggcgggccgcagccagggtgtgggtgggcgacggtcaaggtgccttgaagcggattctgtcctcgggagctgcggttcttcctcctccgccctcaccggcgggcgaccttaggcagggcgtgaaatgcaacgggagccctggagggagggtgaagccgcgcgtgcaggaggaacctccttttggcgagttcaggccccgcagctgcggagatatttacgtaatttcgaagcagctcttcacaaaatattcatcagttacagaaggaagtcacttcacagtggaaaaatctggcaggtgccaccttaatcaagtaaccaaaatgaacatcatcagtaataggacaaattgcaatcgtgtgcctcctgatagtctagcaagaagaacacagcatcacttctatgatgctcctgccaataatatataattggaatctaatcctaaagcaacaaattcaaattaaggaaaattctacaaaataattggcctgtaatagaagtgttaaaggtcatgaaagttaaggaaagactgaagaactgttccagactgaagatgaaagagatgtgagaaataagtgcagtggtgattctgaactggatcctgacttggcaaaacttgaataggtctgttggttggatggtagaaatatagtaatgttgatttcctgatttttgctagctatattacaattttattggattcagtccttgtttacagaagacacacagtatgtaggggttataagaagtcagctcaggaactttcaaatcatttagcaaaacaaaagttcttcgtactttaattccaagacttctataaatttgagattatttttaaaatacttaaaaaaaactcctttaaagtctctcaa

SEQ ID NO: 408665 - DNA, 1000 bp, Homo Sapiens; identical to SEQ ID NO: 295699

SEQ ID NO: 408666 - DNA, 1000 bp, Homo Sapiens
gaatttgggaacctctgtgctataagcatggaaaattgggactcaggtaaaaaggctggttcctggtcgcacagctggtcatgggtgagtgtggtttttgaactctgatatttggattctgagtacagaacatgttatattgtggcccatgccctcctcctgagttcttcagttttaatcatttcattttctactctttttaggcactttggcaaaggagtgtgagttttggggaagctcaaggaagaggtaccaggtagagagagggccagggctgagttcacgggctctttctaaatggaaatgtctcacattcagctgttgtctgcctttgagtcacacagaaccacttgcaggaagaactctagagaatttgggaagaaagggggagaggacagacaaaagatgcatttttctttcaagaagcaggaaaatgtaaggaaaattgaaggtgttctcaagtgtgtctgctgctgcctgacacaggttaaccccgtcgcaggtcactccgctctgttaattgcatcctaaccttcctcggctcttcggcagcgaaatcgcagcagaggagatggagcagcttcgtgcgcattgctcatttgcgccaacgtgaaaagaactgccaggatgcccaggacaccagctccctggcttctgcggtgcttgcacagtcctgaatcagcccgagagctgtggatctgcgtcccctggctgcatagccgactgccggctccatggaggggcctgtgccggagaacgcacatgttgacttatttcttcagtctaggcctttcttggcccccttggttattcattctagatgatacaactcttatttcagttcaaatgtctcacggaagaggcattgaagacagagtggatgcccgtgtttgttggcagtaggtagtatttaccactccggttgtagtaaaagaacaaaaggagaaattacacctatttctcatatttaagggaaaagcaattaaatcaccaaagtcag

SEQ ID NO: 408667 - DNA, 1000 bp, Homo Sapiens; identical to SEQ ID NO: 295700

SEQ ID NO: 408668 - DNA, 1000 bp, Homo Sapiens
tcaacaacgataacaatgctgtatccttccttaccttgatgttgaactgcgaatcctcctccggatcaatgtccaggaacttagaagaattggtgatattaggagttcagtacttctggaaaaaaatgcaaatggtttagccaggatctttcctgtctgattcgtcactattattatatctgatgatgcgaatggttggagcgattcaatcctaagtcattaatgagctattttataaacaccactgtctgaagatcttcatttacattttgctaaggatcacttcgctaacctcacaggcttgtgtcaacagcatgatttgcaggacttcagttacactcttataaacaacacggctgtattgttaatcggttaatattttataaagtgtaaatattttattatgttttgaagggaactattgattctaaattattaaacccctgagaaggactatttaaatgaaatatacaattaagtacaattaaatgtacattgtggttagtttgttttcagattctgcacccttttaaattcattgcttttctctttactggagtttcctcttgtccatttctgatactgaaaaaaatctatcatgttaggaaaaagcctaaattatttaaagttgcattaaacttagaggaaaatgtcaaatacgattaattatgaccagaaatgtattttggatgtttgtagagttgtatttcatatcacattttacaaatttcttccgatttaaaggagagttctaggaagttttgtgatctatgtccggtgtgggtttttgtcctctcgagttttgtctctaataaaggccttttttgtttcaaattacatacgctttttactgcacaatttttgtattgaccttatttcaactgaagcgattatttccagcaggtttaatttcgacaataagatatattttaatagttttacctttcgctagaattttgtattgtttaaaacagtaaatgaataaatttgctgatgattc

SEQ ID NO: 408669 - DNA, 1000 bp, Homo Sapiens
agccggtgtcccagggaccggtccccaacgccactcggtgcatttccccaggcgctggcaggggcactgattcctagcaatgaggcctcccttccccttcccaggccgcccctcctctgactccctccagagcagggccgagttttcctggggagcctgggtcccggcggccgggcggccgctgggaggtggaggagcctctccagccccggccgcagctcatcgtgagccaaccgcgccacctgccggccagatgcgggagtgtgcggccccggaggaagggcgagcggacaaagaccgcaacccgcaatccgcaaccccgcagagaggtggtgcgtgcgtttgggcgagcttttcagccaccgccaagtctcgtgcactagggctactcctaccgtggggctgcggacagcgctcaagaggtcctggagtctgtcgtgactctcgcctgctggatttcaaaagatggaatcggaaagcgtttcaaggagaaactcctaacaaaccttccgggggttgcctgagtggctgctctcggaaaagcggatcctaaataaagcgggagggttatagggcgacgtcgaggagaggacaggtctcgagtcactgctacagtttcaggtcactgggctccgcagcagatcgtgttttctcccgtggctcgagagctgcgctggtttctcatgcaaactcagagccgagctaatgacatgagcaacttttacttttacacaagatgagcacgcgtgccgaggcgctgggcggcggctgtgtgagttggtggcccagacgaacagcttgtgcgagactctgggcatttcggtttctagatacaagatttgcttaaatgtcacagtccaaagaagtggatttcagtcattgtagctactgattgcacacaagtaaaaagggaaaaaatatgtactcgggggatatatgtatgtgtgtgtgcgtgcataaattatttaaaataactgcactaaatccctttaagaaatgc

SEQ ID NO: 408670 - DNA, 1000 bp, Homo Sapiens; identical to SEQ ID NO: 295704

SEQ ID NO: 408671 - DNA, 1000 bp, Homo Sapiens; identical to SEQ ID NO: 295705

SEQ ID NO: 408672 - DNA, 1000 bp, Homo Sapiens
gtgagctataatcgcgccactcactacacttcagcttgggcgacagagcgaaaccctgtttcagaaacataaaaagtatgactggccataatggagttgtgaacataatgctatatgatcgcagagaagcaagtaactaattgcttgtgagaacgtgactaactgctggtaagtttctgagatcttttaaaaatgagggtgtgtacatgttttcaggatctcctgagggctgtgtcacggacagtaaaatatattaaataaaaaagttaatagaatgtgatcaagagggccaggcgagatagctcacgcctgtaatcccaacactttgggaggccaaggcagactgatcacgaggtcaggagttccagaccaccctggccaacatggtgaaaccccgtctctactaaaactacaaaaattggccaggtgtggtggtgcatgcctgtaatcccagctactcgggaggctgaggcaggagaattgcttgaacccaggaggaggtggagatcgcagtgagctgagatcacgccactgcactccagcctaggcgacagagccaaactcgtctgaaaaaaaaagtttttaatttgaaactttctcagatttaacagaaaagttgcaaatataatacaaagaacttttcctgaatcatctaagagtaagttgctgacataatacccatcactatcaaaaagtttaatgtgtattttctacagacaagtatagtctatatattctcttacataatcacaatacaatcatttataccaggaaattaacactgatgccatccccagaccccattcaggtttttcctattgcaccatgaagtcctttatagcaaaagtttccagttcaaaatcacactttgcatttaataaagtttcatctccttcaatatggaacagttccttagtccttaaaccttaacaacattgatacctatgaagattacaaggcatttattttgtagaatgaccctcaatttaagtttgtctga

SEQ ID NO: 408673 - DNA, 529 bp, Homo Sapiens; identical to SEQ ID NO: 295708

SEQ ID NO: 408674 - DNA, 1000 bp, Homo Sapiens; identical to SEQ ID NO: 295709

SEQ ID NO: 408675 - DNA, 518 bp, Homo Sapiens
atggcgcatgtggccgcacaaggcatatccacagctctgctcctgcgaactcgtttctggcgtggggcttgtgcgcaccccagaccgggaggagcctcgagcctgctcattagtagcacgggcagctcgcgcgctggaggagggaggcggaaggacagcgctgcgccaccacccggaggagggagcgcggtagctgcaggcaggggagggagaggaaagaaaaggaaggacggctcccagacagagagtgggagaaaccggggagcagcgggagcagcaggtccggggggagctgttccgctgcgctgccctcgttattcacacggacgctgcggagcttcccagggctgcttccctgtccccctgggtggaggctgccgtctaaacctgactccagagtttaagatgcaatggccagaagacatgaacgtgtcactagaaggatgtggacatgggctccgggactgttgatgatgactgtggtgttttggggtcatcaggggaatggacaaggccaa

SEQ ID NO: 408676 - DNA, 590 bp, Homo Sapiens
acatctttccggtcaccttgttttctgagctcctgattccatgctggctctctgtgttctacacgacaccaacctggacccatgagtgctctcaaccctggagacggcagaaccaagtctctctacaccctttcccagcaaggggccagggccacagaggaagaatcgcccctgaactctcagaatcctaaagcttcaatggttctggaaatcagaagtcccagaatgaaggtgccatcggtggcgctggttcctcctggaggctctaagggaaactccgtctcctgtgcttccccagcttccagaggtgacctgcattccccagctccttgccccctcttccatcctcagagccacagcttggcatcctccagtctctgtctctgacctcttcttcggtcctcgttcctcctactgcccctcgcataaggacccttgtgattacgctggatccaccagataacccaggatcctccccccatctccagacccttaacttaatcacatccacgaaggaagtccctgctgccttgtaaagtaacatcttcccaggttctggggattcatatgtggacagctttgaggagcca

SEQ ID NO: 408677 - DNA, 1000 bp, Homo Sapiens; identical to SEQ ID NO: 295712

SEQ ID NO: 408678 - DNA, 1000 bp, Homo Sapiens; identical to SEQ ID NO: 295713

SEQ ID NO: 408679 - DNA, 1000 bp, Homo Sapiens
aaatcttttgtttccttcccactccttagtagaccctttcaacccctttcccacctttttcacctggaaaatttctactcatccttcacaaatcaatttgagcatcatcgctgcctccaggcaaggtggccacataatttgggtggcccagtgcaaaataaaaaacgaaaatctcacaggtggaattcaacatatcccttccacaggaggtcatcccaatccaaaatatttagactttgcacagggaaacacttggcatctgatttgggaacaggcgagaagtccctgctgatccaaacacggctgttgctctgccagccaaggcagaaacaactgctgccttgcgttgccccggacactgtggcgcacaaacctgagcttgaccctccatgcttctacactgtggcccctgctggggaaaaagagtgatggccaaacctgaccttgaacctccatgcttctatgctgtggcctctgctgggaaaaaggaggatgatggcctcctcctgccctagagttctagcaggctgtaaatgggccagggaggagggaggcagccaaaagtgaatagcacaagatgagcagaggcttcaagtgcccatcatgtgctccattgtcccattggacttcatttacaaaacacaaattcaaagatgaaactaaaaatttcaaaagggggccacagagcattaagccccaagcactaacaattctgagggtaaggccctaagctacctgattgcatgcctctgtagttggtcctgcctccagaaaattttccctgaccaggcccctcaaaccaagctagctgcccctttctgttcttcctatttaacccatgcttgcctttgtcgctgcacttagtacattatattaatattatctatttatgtgtatgtttcacaaaatattttataacttcataaggtcaaggaattcggttaaatcttttttctccaatttctaaatcttaatactatattaaaattgcttcttcata

SEQ ID NO: 408680 - DNA, 768 bp, Homo Sapiens
atgcccaccgcccctccgtctcctcacccggccccgcacccgctgggcctggggacccctcactccccgtgcccgcccctccgcgaggcagcagaaagcgcccggccggggcctctctctactccatcttgccacagttgtctgagaagccagaaaaagtttccagaactggcagcccttaaaaaaaatgaagaggaagagaagaaatgggagcaggcagccctcgtcagcagaccgggagccgcgtgggcgcggagccatttgcattccggtctgcgggggctcggggatgctggtgacaggcccggttcccggtggctcgcccccacctgcgggcgtcgggaaggatcccttccatctctcagccgcagaggaggccctggcagcgccccggctgtagccatgcaaccccgaggagtcccgggcaccttcaccccaccgggaggggccacaaggacctgggcctcggccaccaagctttgtcccctctcgctgtggggggctagtgattctcctccgacctgacgattgcttggttttttcaaaagggagttttgtgcggtgagaagtgtgtttctgtgtggctaactctgggctagcgtgccgtggccattgaaggtgtggcctgcgtgggtgcagtgtaagtgacgctggattgtcaggtggcagcaggggacccctgctgtgtcagtgctaatgaaacatgttggttggtttctaaaataaagccaaacaagccagcacatgcagaggcttggaccctgatag

SEQ ID NO: 408681 - DNA, 1000 bp, Homo Sapiens; identical to SEQ ID NO: 295716

SEQ ID NO: 408682 - DNA, 1000 bp, Homo Sapiens; identical to SEQ ID NO: 119381

SEQ ID NO: 408683 - DNA, 1000 bp, Homo Sapiens
tgtcattctcaggcatctggcccagggcttctcctccaggaaggtggctgctcagctccgggcactgccaggggccacggaccccgcctcctttccaggctgttccacagcatctgccttcatactcacagccaccgcggcgtgcgtcccagggattctcagaatagaattctgtgcctctctcgcctctggaagtgaccgcgctctgtaggaaaatatcacagcacgccggcctcgaaaggccacgacgtggctctaaactgctctaagtatgtcagttacttagaacaatcagaaaggggcagaacaagctggggtgtggagtcaggggtcagggcacagacagcacctcttgtcttgcagagagaatgctagcaatttgcaagttacttgaaaaggtttgtgattttccaacgccctgagtaattctagccaaaatgcgtgactcgcctcacactagatgcttgctgtaattgtgtctctgtattaaactgaccgttctttggagcttcagaatggaccaggaggaaaaggtaaataccaacctcgctacaacctcagaggcatcaacgccctcctgctacagacgcatctgttctcgcctggctcctgccggctgccctgggagaggccacaaaatgccctccacggagacaaggcctgagaaccttcgggacgcccgctgccgctcactgtgttgaagaactgcccgttccgcaccccgggccctagacacacggctctgtggaggacgaggaagtgccgtcaggtgagacttcaccgtgaaatatcttctgagacacaacaatctccctgaattaaaactacagactctaatttataaaaactgtgtgtttcaaaagctccaagtgtttacattctccgattcatcattccttcttctaatttattttaggaaataatgcaaagtactcacaaaaatttatatagaaagatgttcattgcagaattcattataataaaaacctttaaatgctct

SEQ ID NO: 408684 - DNA, 1000 bp, Homo Sapiens; identical to SEQ ID NO: 295718

SEQ ID NO: 408685 - DNA, 650 bp, Homo Sapiens; identical to SEQ ID NO: 295719

SEQ ID NO: 408686 - DNA, 721 bp, Homo Sapiens
atgggtgcgcgcttcggtcctggaggccttatcccagccgcctctccatcagcgccacccgtctggggcccgacaggagggagctttccctctgtcctccagcctttggactgtcaccaaacaagccattcgttcaccaaatacttactaagcgcctaccatgcgcctggcaaggcagatgtaacaacagaatcaacggtttctgggtctgagatattgcatataccctctcagtccctgtatcctgagatggagtcacctgagaatccacagcaagtcctaaccagggatgggtctgcgtggttaaggaaggttggcttcagaactgggccaggggcactgctttgcttttgctgttttgatcagctctctgcctgtaggagacaaggaaaaccaatgggaacagaaattgcctgtctgctccgctctggttgaagaaaccagtccgactgtctctgaggctatggagcagtccatcaagaatgaaagccctctgtcaggcacgttttctcacacctgtaataccagcgttttgggaggccaaggcaggtggatcacttgaagtgaggagtttgacaccagcatggccaacatggtgaaaccctgtctctacaagaaataatactttgcaaggcctcagaagctctgctatccacaggcaggtcttacagtcatggctggctgcctctctctgagaactgggactcctgaacttggtgaa

SEQ ID NO: 408687 - DNA, 517 bp, Homo Sapiens
atgtcagagccaaatttcaaaaccaaccagatctgtatgaccttagagccttttaaaaaatctttgcaagattgctacatggagccagggcccagggagggagaggacagcacccctgtgcatggtgtgggctttcagagcccaagcgttgcaaggaggccatccacgacggagaactgcctggaaaggagagtgagagccaagcaggaaaacatgggcatctgggccggagtgggtgtggtagcagaaattggagattgtttccatagaagattgatcaaactagtaattatcttaaggaaaatgaaagacaaggttttcactgttggagaaggaagttacaaatacagcagaggaaaaaacaaggatgacccccgtggtgttgaattggaattcggcatattgttgtaaactcacggttttcaagatagagataatagattaataaatacatatgcaaatgcaaaaaaaaaaaaaaaaaaaaaaacaactaaacaaaaacaaacaaacaaaaaaa

SEQ ID NO: 408688 - DNA, 1000 bp, Homo Sapiens; identical to SEQ ID NO: 295720

SEQ ID NO: 408689 - DNA, 1000 bp, Homo Sapiens
tcgcgcggggttggtgaggttccgctgagggcggccggggctctgggagcgtggtaacgtggctgcaaccttagcgacatcaggaagaacagggtcgaggatcgaggtaacgggacgctcgtctcccctcagtcccctcgtctcccctcagtcccctcttcctttgtgcggtgccgtccgctcgcgccgagccctccctcaccccagcccccaagtcgcaacaccgtcccgtcttgggtctccggtgtgcggaggaaattcgagccctcgtgcaccaaccgaaactccacagctgagagggcttggggcccggacagcaggagatccagcccctgagcaaccttccacggcttttgtcgcccccattggcgggaggagcagggttatgctcccggctcccgtaggggagctccagcctctggctctgtcagcctccccggcagctccttgactccttcctcccagtctttcgaagaggggcccaggcaggtgcttcgcggggtccaggaagagggcaggcgcggtgcggctggcgcgggttcggggccccgggagggcggccggacgccccctggagccgcggcctgcgggggcggggcgagtgggccacctccgggccacgccgcgcggggacgaggcgaggaaggcactgcctgtccccactcggggggcttgctggccgccctggaggtgccttcccgggagcggcggtgtagaccttgtggagagtgcctcctgatgtggaaccaggaaccgcagcctctttctagacgctcagccgcccggtggagttgttaccgccacgatgacagctctttacgccttccactccgtgctgggttcagttggcttgctgttttcttcagagagagcgatttggctacatagcttgaattttctacgtgtctcgtgctttactggacttgcactgtttttccctcttggcagtgtttaatcgggtgacttttcatagaaaacgttcagtattttcatctgtgtt

SEQ ID NO: 408690 - DNA, 773 bp, Homo Sapiens; identical to SEQ ID NO: 295721

SEQ ID NO: 408691 - DNA, 954 bp, Homo Sapiens
atggacaagatttttggaacaaatgatagcatgaaagctagcgtcagtagctcagtgacccacccagggaaggagagtaacagcaagatggtctacaagaacctgaataatggtaatgtagataatgtgctaagaacgctcaagccatggagagagatgcatttggagttgtttacattcagacaaagctcatctggttgtttgcagctagtcacaaggtggcccattgtcctgccttgcttttctccattatctctgggtcaagttgtttctttgataaatccaaatcatgaaaatagcctgctgaaagaattcactttgaaaatgccacaaaacagacaatggaaaaatgagatgaacaagtgcgaatccatcattcttctcaggttctggaaaaatgctggttttcagctcctggaaaattctcacaagacatctgttttgttttatatcttcatttgtttccattcatctttcctactgtagacactgtctatgatttttttgtgtgggggttttggcaaagtgcatacgattactttgaatttagagaattaaattgtatttatccactgaaagctgtttttaagatctagctgtgttgtcacttggatatctagtttattacttctacttgcaaagtagtacaatgagataccaaaccaccatattttttccatctattttctcaattatggacacttttcaacttattactacagtagggaagttaaaggctatttgaattattggagaatagagatacctaggatcagaattaccaagtcatagaccgaaactttggctaagacctaaacttaatatgggtaaatattgttacattgctccctagaatattgatatggtttggatttgtgtccccacgcaaatctcatgttgaattgtaatcctcaatgttggaggtggggaatggtaaggggtgattagatcctg

SEQ ID NO: 408692 - DNA, 1000 bp, Homo Sapiens; identical to SEQ ID NO: 295722

SEQ ID NO: 408693 - DNA, 1000 bp, Homo Sapiens
gacgctggaccgctcctcaactccctgctcagggggagactagctcctcgtattatgttcagtctctacgtttctctacagaaagccctcccaagtcccacggcagctgggtcttcatctctccactgcacccagaatcacacgctgacccagataaagctcaatgcagtgaacactcttggtctggaggtccaacatcagggagttgccgggactggtttcagacacacggaggaggagacacacagagaaaaggaggcagtgatgtgaccacagaggcagagattgacatgatgcagccgcaagaggcagagttatgcaggcctcacgatgcaactgcttctggaaaatgcaactgcgtgcatggtgaatcttcagctgccagaacaatcacttctcctggagacagattcattatgaaaggactttaattctggtctgacagactgcttgacattggagtgaattctcaaggcttatcaaaatcatctcgtggaatgatgagttgacttgcacccactgaaacgggggcaaatctccttcaaaagatcatgccaaagactgtgtgggtaccggaaaggctgtgtggcagggaaaaggtttgctctaacctagaagcctgcaaggtcccctctgcacgcccaagcagcgggcccgagttcattatggccagcaaagccaactgacaccacaggaaacagagctcgtgggacaccccatgacacgaagttttcaacctcattgcttccccctgaagtcaagtttagtcacctgtgctgtgctggaccagccatgaaagtaatgagggaactggatcactccagggaagcccaggtggaataataggtgtcactcaaaagtacagctttcaacttaaaaaggaaggaaattctgatacatgctacgtggatgaacattgaaggcatgatgctaagtgaaataagccagtcacaaaacaacaaatattgtatgattccatttatatgcggtacttagacta

SEQ ID NO: 408694 - DNA, 371 bp, Homo Sapiens
ttcaagtaatatttcagccattgtcaaatgccagtccttactggtgtgtttttttttcaaactccctacttttgtctgttacaattcgcaacaattgtgataattttgcaagaatccttgattcccaaaggttctacagctgtgattctagaagctctgccccaggtcatcagcagtggggtcacctggcacctgcaggggttgacagacacttcatacaggaaagctccagctggcatctggcaggtgccaccctcggatgaagcttccagaggaaggagcaggcagcaatctttgctgttctgcagccactgctgctgatacccaggcaagcatggtctagagtggacctccagcaaactccagcagac

SEQ ID NO: 408695 - DNA, 1000 bp, Homo Sapiens
ggacacaatcccactcaacaagaacttgctgactctgtcagcactgagctggctgttggaatccaaatattgaaaaacataggctcaaagagatcaaatacttactcaagtttacatgttttgctacattccttccatttgacccactctctgcatccttcatatgctctgtatccctggacatcacatcagtaagatttctagccttctggtttccagttgagattagccttctgtctgccacttttctcctctctatgtcccatcttgcaatggagagagggacacatgcttctagtcttgacagcaccttcctcacctctgaggacggcttgatgcagtacataagtgatggagtatcaatgctggtggttgaggtggagaaggaatttagttccttgaattttctttgttctcctctgtacttaccttcttggccaggtaacccctgctatatcataagatttcatctgcgagaaaaggaggaattcttctacagctcccctgctcaactttcaggagattttgacccatgtgctgcttgttaatcaccgaaattttttaaggaggcttctcctggcatgaaagagttggtattgtgtcccgaattggttggttcttggtctcactgacttcaaaaatgaagccgcggaccctcgcggtgagtgttaacagctcttaaggtggcacgtctggagtttgttccttctgatgttcggatgtgttcagagtttcttccttctggtgggttcgtggcctcgctggctcaggagtgaagctgcagaccttctcggtgagtgttacagctcttaaggcagcgcgtctggagttgttcgttcctccctggggctcgtggtcttgctggcttcaggagtcaagttgcaaaccttcagggtgagtgttacagctcataaaagcagtgtggacccgaagagtaagcagtagaaagagcgaaacaacagagcctccacagcatggaaggacaccggagcgggttgcc

SEQ ID NO: 408696 - DNA, 1000 bp, Homo Sapiens
ccttacatccccaacccggcaccccggtccccgcccgagccactcaccaacaagccaccggctcagccgccaccggctgggccgcgaatccccggggagccgcgctggggtcagcaaactgaacgcgagtgggcggcccacgggccgcgcggagccccagctgcgtccttatcagcgccgggcagaagggcgtcgcggcgcgagggtggggcgccggtgcgcgctgagatcgacgcccacacgcgccgcgccagctctgcggcggggagagaagccgcggcctgcggggcggggactgcggggcgggcgcccagcgcgggcgttgcacgaccctcggccttccgcagcgccgaccgctctcccgtccggcggctgcagctgctgggtcggccgccgcacccgctcgcccattcccggcccctccagttggagggggtctcggccccgcccccctccccgaggggcccacgctggaaagcccacgctccccacgccacgccccccagggcgccagcccctctgcgggggtttagcacgctgcgcccagaagttgggtgggagacggctaactaggggaggtgtccgtgtgaatgaaacgaaagggggggtcttccggctcgcagacaccgggtctgcggcggccgcgcgctcccaacccacccggagcctccgccgcgacatcttcccacgtcccccatccaggtcgcaggcgcgggggaaaagcctcacggccgcactgcggctctgccaaaagggagccgggcgcggggcgcaacttgcaatccgaacttcgcgcggccggagcaagtttgtcggggcgagaagcgcctggtcctcggtccgcaccaccgcactaggtccccgccaccgccccaccactgtgtcaggggccaggcgtggcccccggctggctagggaaccgagcgcggcgccgcggctgcgcattccgtgcgggacgccgctgtctcccaagggtcgggataaactagggggcggttga

SEQ ID NO: 408697 - DNA, 1000 bp, Homo Sapiens
ggggaaaagtcgccggctgcaggcggttgtcccaggaattcctccatggtgccggcgggagcgcggcgagccggggcgcggcggctgcgggaggtggaggcgacccgggacagggccggtcccagggagaggggatcccccgagccgcgcgttccgccgttcaggccaggtagggggtggggaaggaggaggaagaggatcccgaagcaagacagagctgaggctcagagttctcaggcagcagcttctggaggacaccgtggagacccaaggcggctttatttgggtctgcaaacacccggggccccggttaagattcggcagggccaccccgctcctcccccgccttgcacgaccgcactccgcgcgccttgtcactgcgagggctacctgtcctcgcacactcctccgcgatggccagaaaacgtgggactcgagataagactctggcagatggtactcctccctccgcctaacgtatcaatgcaccaacgcccctgaccgcacactcaggaacctgtggcagcctcgccaagggacagcgtgcccagcaccgtgcactgggcactcttggatctggagctcacaactccggaaggaatggggacttagatgaggtgacagacatgcatgcatgcaatgcaggctgaatccgcctgtctggagccaaaaataaacgccatggtcacctctttgttacaacctggatatgatgcccacatgcgtggggtagacatgcttgggatagataagcctgtggacttcagacggtattttctctttcccttttttcttctttctcgtcctcatctctgtccctccctccttttcttctcgccctatctcttcctccctttctactctctctagtgtctcacttgagaaagacctagatttgagtgggaagagttatgccttaaactgttctcattataaattcaaaatgtacttgaagaatacagatcgactgtatgatggcatgaataaagcgctatgctgt

SEQ ID NO: 408698 - DNA, 879 bp, Homo Sapiens
gatggcagagctgagtcccgagagctcagccctgagctgcctttcatctggtcaccgtgttcaggggttcttctccgtgtaaataaacatctgcgatgaaaacctccacaggtctcatcagcaaagaggaagatctattaaggatctagtgagtaaatgacacttttggaatgtttagaacttcgagggggaaaccacatgttttcacatcccactatatcatttccataaggatgaggcaaagcactacccctatttgcagaagagagactgccgtgaagtcagtggacactatctccaggtcagaatccaacctaaaggcctttaatcaatgcctcctgtctttcagcagggcagatgcctcccagaaggaaaccagatgccaggactgtgggggactcttgagcagcatcagccaaactgtaggagctgagaagaggaagctttgctcagggtaagcgccctgggataatgtctttaatgtcaagaggatgcacgctgtgaacgtggaaagccctccaggctgaaagagggaataacacaggcggggagtgttgccaagcatttgcgagcactctgttcggtggacagacagccggcttgctcatgattccgccttctctgttattggcaacaagccgtcactggaactttgtatccttaagctttgaggccttgactcaggtgggggtcccggaataagctcatgaagtttttgcctcgttacccccaggctccaaatcactggtacaaatttctcagtctgatttaatgcttagggaaatgtcgtatttttggatccttcattttaaaaaaacatatatatttaccagtgctatctccgccaattccgaataaaccttagacttcagatcatga

SEQ ID NO: 408699 - DNA, 874 bp, Homo Sapiens
atgatacattttggagaagtgtgcctaaaatgtaggagttcctccaggtactcacttcatagttcagatggatcttaccagattattagcaacaagaattcagtgcctatatcacagttaaaattaaagttaaaatatttaatagagggacacccaccctcaatgcaggtgggcaccatccaattggtcaggggtatggataaaacaaaaatgggacatccaaactccaggctctctggccttgggattccaggagttgcaaagtggctgtctgagttctcaggcctttggcctctgactgagagttataccatcagttccctagttctgaagcttcaggacttggagaaagctactctactctcttccctggttctccagcttgcagacaacctatcctggaacttctcagcccccataatcgcatgatccaattcctctaataaatgtagagatctctctctctctctctttctctctctctctgtatgtgtatgtatatgcatgtgtgtatatatatatgtatacgtgtaggttctgtctgagagaacccagcctaatacatcatgcagcatattatcagaataaaatttgataatgtatgtacaatgctgaacacagcatcttgtatttaaaaacatattcagcattgagttactgtaactgctgtcattgatgcctcttcttctaaaatgagatgccatcacttgtaaaattatttttaaaagatatatttttaaatgaagaagtctttttatatgtcaaataatttactttagatgtttaaaatagtatagctcacaaaaaatgttggctcataacaacttctactgagtatgtaagaaaatggttttgaagttcaatctttttttta

SEQ ID NO: 408700 - DNA, 1000 bp, Homo Sapiens
cccatataccacgggacctgaaccgagagcaagcctgggcctgggcactggataacttccctgtgctgagccgccactcctgccaatgccatcagctctacgggagctctgctgggagctggcggctgcaccgcgcctccaccgggcacggagcccttcccggagatgagaggggccaaaaacggcctcgagactcccatgtcgaggaatcaaaggctgaaaccacagacgggctccagtcacctcaagaagacgcaaatgctaccgacggcgaagtccaaagctgcctgatgcagcctggagatgccagcgcctgcggaggtggaaggacacaagcccatggcgccctctgcagttcaggccgcccccggaagctgctgaaaacccagggttccatcaggaaggaacccggaaacgagaggaaccccagcctttctgcaagcctgcgacactacccgcttcaaggaacactgtgctggaaggagcctgaggcacaccagtggggaccctcattctgtccctgcggacttttacactggaactgtgccctgcacccacaagagcctggaggtctctgctgtggagatcattccttaattggttcttcctctcctgaatgtcctaaacatttttcatttagagaaactctcttcatgagccaaatccgtcccattctggatccttattccagctcctttccctctgcgaatcgcacttggtgggtcgcggggccctcagtaattagggatcacggatcagccaagaaaaatacaggttttcttaagcctgaagccactgacttgaggagggagcgtgggagtaatgtcagtagcagttttttatttcgttttcgtttttattttctagtcactaggccaccaaagaaagttccacccaacggccagtcgatccgtcgcagcgactctcttttccctgaacggagggtttagcgatgaccagtttagcagtgcctgggagctcttacaccaaggctagctgc

SEQ ID NO: 408701 - DNA, 766 bp, Homo Sapiens; identical to SEQ ID NO: 295725

SEQ ID NO: 408702 - DNA, 1000 bp, Homo Sapiens; identical to SEQ ID NO: 295726

SEQ ID NO: 408703 - DNA, 1000 bp, Homo Sapiens; identical to SEQ ID NO: 295727

SEQ ID NO: 408704 - DNA, 1000 bp, Homo Sapiens
acagctcgcggctgccagggcgagtgcggctgcctcccgctcgccccggacgcccggctcctcgtcgcgggtcggccgcggcccaccgtgccctccgacgacgtgacgcactagcgccgcagcgcctccagccttcgcttccgctccgcgcccgcgcccaccgcgaatccccccgcccgccagcgcggagcggcccctcctcggagcctgggacgccgccctgcctccctccagccccggctttcaggcgccggcccggcaggtgcgggcttggccagcccgggggcgtcacgcggcccccgcctcgccacccgcgccccctctctccgccccggccgccgtcacccggcagcgcgacgcccagctcagggcaatggcctggtattaaagagtgaccttggcttagatataaaaatagatgcggttaagccgcgggggctgcaacgctgattttgcgtattcctttaatgccgaccttcgcaggattctgttcgcatagcccggtggagttctccagccccgcgtaggccctcctgaaatttacccagagtgggcgcggccatcccggcctcgggacaggggtgcagagggcacgggcgaggaccgccggcctccgccccaccactttcatcctaaacctactgccacttaggtgcatgcaagttagaatcgtgggctgctttcacagtctacagaagtcctagagcccggactttcatctggagatgtcagggaaataccacattcctgcgctgaccttttctctttcaccgtttaaccggtacagaataaccctgacccagaaagacaacagggttccatccggctttcctcccgtgcctctcccagctctattctaccgtcttatggcctctggcgcctttgctaattacacactcctactgaaaattagccctccagcatttaaaacatgataaattgtctttaaggtaatgcgtattgtagtctaaatatatttaataactgtattgagaaacaa

SEQ ID NO: 408705 - DNA, 1000 bp, Homo Sapiens; identical to SEQ ID NO: 225126

SEQ ID NO: 408706 - DNA, 1000 bp, Homo Sapiens; identical to SEQ ID NO: 225127

SEQ ID NO: 408707 - DNA, 944 bp, Homo Sapiens
atggagatcgctgccttatatggagctcgtgtcaaggagccaagagaagggctgctggcaactgataatcaaaggcgactgactgaaacaagtagaaacaggggagagggagagggagagggggagagagagagagagagagagagagagagagagagagagagagagagagagagagagagagagagaccgagaccccgattcctgaatcctgaaggtgattggtcgcgggaggaggggcaggcgggaggagcgggtcccgcggcggggcttgcaggaatcgctggctccggctgccacctagcggacgggagccgctcccgggcggcacacagccgagtccctcctcccctccccgcaggcagcctgtgccttttctccaaacgaagacagcactttgaaaattctttcaatggatttttttttccttgaaagatcgtactgggggaaaatgatacttctattagttacatattctccaatcgcatactcgcacccccctcgttttgagatcgctcccctaggcaggctcaggcgggcgcggagccgcgcggagtgacaaagccgccgctgccgccgccgggggtgggagccgcgctcgcccgcccgcccctcgactcgcgagggcgtaaaagtttgtctcagctcgagcattcctagcgccaacacgccctcaggtaaaggtggaagtaaatggccacgctgtattgacagagtcagaggcagggagtcgagggcagaggcagcaggcggagagagggagatagggcgagggaaggagaacgcggagagagacgaagggagtgggagaccagcgacagcgagcgccagggcaccgcaggcacactggatgcccagtccgccggcccagccgccctcggaccctggaccgtgcgtcgtgggcaccagaaacgagactcggccaaatcctgcctcaccaggca

SEQ ID NO: 408708 - DNA, 874 bp, Homo Sapiens
gcctgctgccatccagttaagatatgacttgctcctccttgccttctgccatgatgtgaggcttccctagccacatggaactatatgaacaaaaagagccaaatagaaaggaaaaattatatctacaacaaaagcagcagacagctaaattccacatcactgactactgaagaatatctcctagaagcaagatcacttgaaccaaattaattgaagatggatgttcagacctttctcctatatcctctgatattgggaaagaagcaaatttcaaatcagtggattaaaaagagtcttactactaatctttaacctgatgcagtaaggattaactctatggatggattaaggagaaacagagagaacattgactggggcaccattcggtttcaaagaatgacaagaaaggatgaagaattggctggaggtaaaaatctcattgaaaatctttgtcagtggctgggagtgaactccgccctcgaagtatcttcagctggggagagagttctggcggtgcctaggttgtgtcagaattcggcccttgaagcttctaaggaaatatatgaccagctaagtgggcatggtgtgagtgtaagaaacatccagggtctttatgacctgtaccttgtgatatcaaccctgccaacctcctgtctcatcctgagactaagaatgcctaaactcccgggaacgcagctcagtaggtctcaccttgtttcatccagcccctattcaagatggagttactctggttcaaacgcctctgacagaggagtagacacgttcctgcctcagagacttggctctcgctgtccttcttctggaatgtgcttccctcagataactggttgactcaattcatcacttgcagtaa

SEQ ID NO: 408709 - DNA, 1000 bp, Homo Sapiens; identical to SEQ ID NO: 295730

SEQ ID NO: 408710 - DNA, 662 bp, Homo Sapiens
actgtattagcagagttgaagggacaaaagatgccctgtagaatgctaaaatggctactcaggaagatcagtagtgctcaggatggaccgaaaaaagttttgccaagagagatgaagtctctcttcgaagcctgtgtcttcatgtgtgcaggattgagggagggccacggccccagcaggcagcttgagctggatggccagagtccagttggcactgtgtctgcccaggtgaatactcacccagaggactgccaatcaacagcagcaggtgccagccacagccaaaggccggcttctacagggcagatggaagctgaggaatgatgaagacaatggaatcaaaggcaattgatcccgccacatttgaagaaccacaaaaggaggctgagtgagctgaaagaaatacacaagtggatcagcaacatgacagctgctgcagtgaaatctggattgtaatatgtcagtttccaacccatcacatacaatccagacagagacatagctttttgtctgcctcgttgtgatttccctgtctggtgcggtttgggtcacatctgttggctgcattctcatcttcatgagatctgcattgactgatagtttaaaccccatgtttatctatgtctgcggctcttatttctctcacagggaagtctccagag

SEQ ID NO: 408711 - DNA, 1000 bp, Homo Sapiens; identical to SEQ ID NO: 295731

SEQ ID NO: 408712 - DNA, 1000 bp, Homo Sapiens; identical to SEQ ID NO: 295732

SEQ ID NO: 408713 - DNA, 765 bp, Homo Sapiens; identical to SEQ ID NO: 225128

SEQ ID NO: 408714 - DNA, 1000 bp, Homo Sapiens; identical to SEQ ID NO: 225129

SEQ ID NO: 408715 - DNA, 682 bp, Homo Sapiens
atgaggcctgcagccatcataccagctgctgtgggtctgggaatggcctctgagaacaagaccaaggttgaccaggagcaactcaaactgcagaaaacagaactgtggataagcttgtctttcaggcatgaacttcattacttcaagtatgcaaatgtgaaacagataagggccttgccttgcagaatttatctgataagggatagtgttaaaaagtcagcaggtcctgggtatgtgaaactgagtaccaagaggagactggatatcgtgaagtcaaacttctcaaattccacaaattggcctcagatggtatctcagtttggacatgaagagaagaccgctcctgtgtccacgcatggagaagaaccgctggccctccctggtcgtctgtccactagggcatctgcctctgcgttcttgtgccctggtttctgagtgcagaaccactaaaatcctggcttctttcctcagcatcctggcgaggtatcctcagcctctgaacccgtcagccacattcacacccagaggaaccaggaagcatccacagcttcccctacaccctacagctctgcctcaggtcctcccaaagctatatccaaataaggttacattctgaggtactaggattaggatttcaacatatgaattttgggggacacaaaactgaatccataaaaaggtg

SEQ ID NO: 408716 - DNA, 829 bp, Homo Sapiens
atgcgcgtgttgagtgtataccgccctcgtatcgttttctgccaatcgggaccggaccgggagcggattctgcccgaaagggggcgcgatctggcgggtgctcctcttcctcgctccccagtccgcgcctcgctgggctcagcaccccggcccccggcgggacggaggctcgggtccaaagcagtggctgcaccgacacgaacccgtctgcgtttctccacctgtcttccctcgccacctgcatctactatggtctctaaatgcctcgctttgtactttgtggctttctggcagccctttaaagcagcggtgaaagaaaggagagagtcaagacacgggagaaaatgtttcatcccgggttcttctagtggtgcccgccttgacacgactcgggggactgcctaagcaaaaggtggaaaagatggagctggaagacaaagacggctccggattccaaaacttcaatggcgtcgccaaattgacgagctcattaacctttggagtattgttatttaaaaagtaggaaataaaagataaatgtggaaatatttaataaaagaaaaacgtaagctctcaattttctttattacttttttttttttgagacggagtctctcgctctgtcgcccagtggcacgatcttggctcactgcaagctccgcctcccgggtttacgccattcttctgcctcagcctcccgagtagccgggactacaggcgcccgtcaccacgcccggctaattttttctatttttttggtagagacagggtttcaccgtgttagccaggatggtcgcgatctcctgacctcgtgatcctcccgcctcgg

SEQ ID NO: 408717 - DNA, 876 bp, Homo Sapiens
atgtctgagcccctaaatcgagaaacatttgggcaccgtttgtgggactggtgcgtcgccgctttcagtttcacccaagtgactgtcgcccctttccagtcctttcattcccattcccacatcaccataagcccttccctcaggccccttcttcagcattccttgcttctcagcatagcccgagaacccccgatccctgacactttgcttcttctcagctcccagatggatcctggacaggatgctgcaggtggtgcaggaggggaatcctgccccatttatcatcaacacagtaaaaaggggtcgaagagaccgagagcgccagaggacgccatgggctccacatccacttggattccagggagtaagcctctcgacttcaggagtaagcaaggccaaccgtttggtttgagcctgttgcttctaagaaaagcgaggaaaaatcctgagacctcctcccctcgcccttcatccacttcaggggaccgagtgtctccacggaacttcacaagggaggaaaagagtgaactcattattatttgtcttgtcttcgtttcagaggcggtacatctacgaaagccctaatcatagagggaaagactcctcgttcctggcccagaaatgagatgagaaatccagggccccgtacaggaaggcctttcgcaaagtccagactcaattgccttcgcagcccttaaagtttccttaggaaggtctgtgggagaacgaggttggtttaggaattggcccctgccttgtactacgtagttttgtcatccaaagtgttttagaagtgaattgaatcatagttacgccttattttgaaacactgtaattcagagaacgtaaaaccttattaaaatgcctcataatcat

SEQ ID NO: 408718 - DNA, 592 bp, Homo Sapiens
gcaactgatagaggatcttcttacatttgctttatttcatggtgctgcccaaattcatgctgtaccctcagcagcaaggagtgggaccattactcctggcgttcccagatggaacagacaccaagcctggctttgccactgaacacaatacaggactgataaaggaaatagaggctgcccatctctcagtgccacatatgagaaagggaagttgtcattttatatatccactgtcaagcatcttggtaaaacagaagaaagcaggctgggcctggtggctcatgcctataatcccagcactttgggaggccaaggagggcagatagcttgaccagcatgggcaacatggcaaaatcctgtctctacaaaaaaataaaaaaaaacaaaaaataaatgtagtcccaggtactgaggaagctgaggcaggaggaacacttgagcctgggaggtaaaggcttcagtgagccgtgataatgccactgcactccagcctagacaacagagtgagaccctgtctcaagaaaaagaaaaacaagagggaggcaatctactttatacccagagaattttacatgcaaggaatttgactatg

SEQ ID NO: 408719 - DNA, 604 bp, Homo Sapiens
atgccaaacgcggaagtggagctctggcttcccgggggcgtcggagtcaaggtccctggagctgccgctctggctcctgggcgattccggggagccattctccccaatttgccaactccctgggcatctctctctctcttcctggtcccgccacacccaaacaactcttatagttccacccggtatactggtctcttgacaggaacttttgggaaatgcccctcccccagccccttgtctggggcaacttccttgtctcttctcccccaccggtgttggggagttccttgtctccactcccaaccacagagccacaagtacattatctatgcccaggcgagtccctatgcccaggctaggagagccgcacttcttcctacagctgacacgtttggtttttggaggggaaaggggagctgtagctgaatcagtaatggaaattggttcttccatctctgcttctctctacaaagctgctttataatctcggcagagctgttttcactgcttttttgggaacgtaatccaggtttacccagcctcacttcaagaacaaacagagactaattagtatctatgaatcccaatccccaggagaaagaaa

SEQ ID NO: 408720 - DNA, 667 bp, Homo Sapiens; identical to SEQ ID NO: 220468

SEQ ID NO: 408721 - DNA, 486 bp, Homo Sapiens
atgcccagcgaggagggaggcgcgagagggagcgagatactgcggtgcgccccgccgcccgccagaggctcggctcgcgcggcgcggccgctgcgacttcctggagttctgcctgccgggggcgcgggcgggtgtgtgagagagaaggcgaagggagccgcggggtgggagaggagggagtcccggcgggagggcgggggagaggctggcgggaggggggctccacggagctccagccagggccgcggttcgcctgcacgtcacggctactcaaacccaagcacgtcccgaaagcggtattttctgcgtctgggaggtttttgcatcctcagttcccaccgctggggctggcggcgaccaactcgcagacctgtcgcagccagagagctgtcatttcagtaccgggattcagaattgatccagtccgcagcggagggggcacatcccagctaccgagctgctgagtgtctctggctggaacaatag

SEQ ID NO: 408722 - DNA, 673 bp, Homo Sapiens; identical to SEQ ID NO: 295735

SEQ ID NO: 408723 - DNA, 944 bp, Homo Sapiens
agcttggtgcagaaccaggagagccagccgcctcagttagagcctcggaatgaagattcagagcactctggacccactgagagacttgctcattttctgggcaccaaataatcctcccaatttttagaaattctgtcaatgggacatgcatataaactagaagatttggtgcccagcatgaagaatagttcctttcaagtacctgtatgtcctgaatgtattccttccagtgggttcttggtctcgctgacttcaagaatgaagccttggaccctcgtgatatgtgctcacccttctctgctcagctctgtgcctgggaggctgacctctacaaactgcatcaccaggcttccgccctctggcttccagatggatttggccaatgggcagcaccagtgggaaaggagaggacaggaggagagacaggctgaggcctccctcctcctgtgtccctgacatacagtgacagtgctgccctgcagctcaggatggatgcagtcaaggacgacagcgcatgtccaaaaaagctgtctgctgaacatttgcccagcagattttagaaagaaaggaaacatcttagtgattttcttgcctccagaagattccctgatccaatctttccttggcacaaacttttagttattgtgtttacatatacattttatatatgtgtggtcattattgtatctgttttatttggggactttatcttgatgtgtgttatacctaatacactgcaatataaattatgtaattatgtgctttttttttttgagatggagtctcgttctgtcaccattgcacaccagcctgggcaacaagagtgaaactccatctcaaaaaacaaaacaaaaactgtttcgtgaacatgggacactcttgtaactccatcctactcattcaaatacaggccatcacccatgaaaataaaaagaaaataaaag

SEQ ID NO: 408724 - DNA, 637 bp, Homo Sapiens; identical to SEQ ID NO: 225130

SEQ ID NO: 408725 - DNA, 559 bp, Homo Sapiens
tttttttgactcctaggagatttgggcatgtggagaataatgggacaggagatgacggtaatgaattaaaacagaatggaatggaatggaaagcctagcgcagggcttggtttggaaggagacggtccagtattatagcaggaaaaaggaagactctcatctttgcctcggtgacaaagctatgtatgacattactcaaaatctcaaggatgcacctccaacaaaacaattcttacatggaatcctagagtctttggaacgtggtttgaacaccaccagctttgagaaggaagagaaaatccagaagtcagaagtggaccatgttgatcaggatcctacaccttccaggcttgagagctctccaaagacagatcatacttttctaagcactccgtatattggacataaagaaatgctgaaggtaatcagagattaaattaagattatttttaaaactcacaggcaagctttcaactataaacttcaaatttgtgagcttttacactttcttgagtgacttcaatttgcaaagttgtttaatctcattatacacataaaa

SEQ ID NO: 408726 - DNA, 575 bp, Homo Sapiens
cctaaatgacattttatttgtgcttaagttctccataagtagtaacttgaattgggcctggaagagtaggtagaatttaaaagacacaaaagggaatttaaggttcaaaagaggaggtcaggggagaaaaagtatgagtaagcatataacaaaagactatagagttttagagctatttttgtggattttttcgttctctttccccccttttattggtatccttttatggaatctcatttcattttttagctgttacctgtgccaaaataataaacatgctcatgatgtcatgtcactttaaatctctaagaatcttggtttactattcagctgttgctttgaaagtgcacaattctggaattaattctggggagctgtgtttgcagaagtgcttatatttaggagaattgagagtttatattcctagagacaacatcaaattgctaaggaaaagctgcattccacgaaccaggaaacacaatctagtgttcatgatggctgttcgtccatgtattaaggaatttgtactgagtggtcaactgcagtaagtgctactggaatgcttcgtccctgcg

SEQ ID NO: 408727 - DNA, 1000 bp, Homo Sapiens
ccatgggaaacacaattgatcacattccaattgagcaacagtaggccactagggcttttttccctcaaaagctgtacacagatctagtatagtctcaaagacctcatgcttctagtagagaagcaaagaaatgtgtgagcatttgtcacacagggagatccggatacgctccatcactgtggatccaggcctcagggagcaggagggtgttccttcatgtgggaagatgagggacacacatgggagggggtatttgtgcgcggcttggaaggatggctggtccttgcccagggggaacaggcccaaagcaagcgctggcagttagtagctatggggagctttcatttgaacctgctctgctgagtcccctgggccatccccacacctggtggggcactgttctaaggggagctcagggtcaatctctctgatgtgctttctaaatcagcaaggtgcctcacaggttgtgattttagagacaaggttttcaatgctttgcattaaaatgcaaagattttaatgagcagagtctttttgccaatccgaattgggcagatcccagcaagacacatatttttaagataatttttaaagctgtttaattttggtaaaaaagtagaacataaaatttactatcttaaccaattgtttagtgtacaatatcttctttgaagcttctgaagacctggtgcttctgtaataaaatctagccccgggccaggcgtggtggctcacccttgtgatctcagcactttgagaggccgtgtcgggccgatcacttgagcccaggagtccaaagccagcctgggcaacatggtgaaaccccgtccccactgaaatacaaaacttaaccgggcttggtggcgcgcacctgtggtcccagctacttgggaggctgaagcaggagaatcgtttgaattcgcgaggcagaggttgcagcgaacccagatcgcgccgctgcactccagcctgggcggcagagcgagactctgtcacgaag

SEQ ID NO: 408728 - DNA, 1000 bp, Homo Sapiens; identical to SEQ ID NO: 295738

SEQ ID NO: 408729 - DNA, 1000 bp, Homo Sapiens; identical to SEQ ID NO: 295739

SEQ ID NO: 408730 - DNA, 1000 bp, Homo Sapiens; identical to SEQ ID NO: 119385

SEQ ID NO: 408731 - DNA, 432 bp, Homo Sapiens; identical to SEQ ID NO: 119386

SEQ ID NO: 408732 - DNA, 1000 bp, Homo Sapiens; identical to SEQ ID NO: 295742

SEQ ID NO: 408733 - DNA, 539 bp, Homo Sapiens
gtattacacgaggatgaggccatgaatgccagaaggcaaggaccgttggaggtcatcttacaacctacccaccaaagctttgtcttcagtttggagaagttttgagttactattcgcagcataccaagaacagtatctgcaatcagtaactgccatgcaagtatttgttaataaaggaaatgtgaagcccctgaatgatttcatcagagaggagtggcaccatcaggtttacattctgaaaagatggctttggctgcagtatgaagaatgggttgaggagctcatgagacaaccagctctattggcaatacccaatatggaaacaaccagatgcccttcaatgggtgaacggttaaacaaattatggtacattcacaccatggaatagtattcagcaataaaaaggaaaaaatgattgatacaacaacctagacaaatcttcagggagttatgttctcgcctgtcatgactgtaagtttcctgaggcctcaccagaagctgagcagatgccagcaccatgctctctgtactgcctgcag

SEQ ID NO: 408734 - DNA, 1000 bp, Homo Sapiens; identical to SEQ ID NO: 295744

SEQ ID NO: 408735 - DNA, 740 bp, Homo Sapiens; identical to SEQ ID NO: 295745

SEQ ID NO: 408736 - DNA, 757 bp, Homo Sapiens; identical to SEQ ID NO: 119387

SEQ ID NO: 408737 - DNA, 541 bp, Homo Sapiens; identical to SEQ ID NO: 295748

SEQ ID NO: 408738 - DNA, 725 bp, Homo Sapiens
tgggttttggacagcttctttacgcatgctgttttatcagcaaggtctttgtgacctgtatcttgtgccgacctcctatctcatcctgtgactaggaatgccttaacctcctggaatgcagctcacatgccagaaactatacaatccaccccctctgaaggagtttgttcatttaaaaaaaaaaaaagggaaatttgggtgcagacaggcacacagggagaacaccatgtcaacacgaaggcagaagttggagtgatgagtctacaagccaaggattgccagcaattcatcagaggccaggacagcagcctggggcagccccctacatggtaccaactccatcaacaccttgatctcagacttccaacctccagaactgtatcacagtctggaagtctgctcacagtctcaaggttggcatatcccctagagcccccagactcctcatcccatggagaccaacatggccaggggagggccagagcagggccttctaaatcacagaccccagggcaggagcccctccggtctggatctaaggatggtattttcaacaattcctaaatttttatcctaggctctccaaatgggagtctaaaggtctcaaaacatggtccagaagaagtatgcaaaaatgtaaattcctaggccccaacccagacctatgaatcagatgatctgtatgggggttcaaggaatctatattattaaacaatcttcctaaa

SEQ ID NO: 408739 - DNA, 1000 bp, Homo Sapiens; identical to SEQ ID NO: 225131

SEQ ID NO: 408740 - DNA, 1000 bp, Homo Sapiens; identical to SEQ ID NO: 295750

SEQ ID NO: 408741 - DNA, 1000 bp, Homo Sapiens
tatctctagaagtaatgcgtttgtatgtacttgtcactcagatatgtaatcccttaatttgtgcggggttttggggtgtgaaaaattcttggtttatatcctacacttttaaataacctcgtcaaaacttacatgtatttaacacctttttttgtgagcacatggtaaggttggaagtaaaaatggaaggtttatccctgtggcccatgttttccagtgtacctatgtggggttttaaaaaaatgtcccaatttcttccttttactggagactgcgttttttagacaacagcttatcttcctattccctaaccagtcttctccaatcttaccattcaatatagcctccttttctgtgacttcctccagctgaatagaagggctgagtgggtcaaccttccctgtattgtttgtttcctccaccctctctttttccttaatagcagtatttggtccacccacaccaccctctctcttctcactgcctccattcctggttcttaactcctttctattctttactctccacctgcctacacgatcattcttagcagcaaatttattccatcgacttttacgtccacttaacatccagattgcatttactttgcgcagataaccttgccgcctacctcacaagtcaaggccacctgctgctctctttctactttaaaacatccttcctccatctttaccccccaactcagcaaaattgatgtctctctcggatgacccaaagtttggagggataattaatttgatagatgtcagaatcaaagttcaaaacagtctcaacaggctacaacattaggccaaaagcaatgaaataaaatataactttcaaatctaaatatgatgtactagctggaaaagcccaagttttagattttagaccttggtttgtatctagttacccaaatttgagtcatatccagtaactcaaattactatcttttgctctagtaaggtcaactgttaatttgagataaaaatacctactt

SEQ ID NO: 408742 - DNA, 1000 bp, Homo Sapiens
aggcccttctgcagattcttctcagctcagccccgcagcccactaatgaattgggtgtcttatgcactcccagcccctctcagtgagacctgaatctcctctcctgccagtgccgcagcttgggccaccctccccaccggacacctgcaggtgtgggatccgtctcccccgcaggcatctggcccgggagcagggcaacgaatccttcaacagcagcccagatgctcacagcagtaagcgttgcgctcaagggggccacctaacaccccaaaagcaaggctctgaagacctgttctccaacaccgatgccgacgaaggcagccactcacccgtgtcctcttcccgataatccggattcaggcttgtggtcgcgcaggcgcactccaaatgctcctctaacctcacctggacttcttttaattttggcttcttcctgacgtattccaccttggccacctgccagagagaacagagcccggccatgaatgcctgcatggagcttcggacatcacgacgtgctgggagccggggacaggctgagagggaggagagagcagcctgacccctgacctcctcccagaaacactaccttgtggtggggagtgtagcagtaccaggtgaaaaacctacaagctgcagtgcagttttgtgtgtgtgtgttttagttttttctgagtagggtctcaccctgtcacctaggccaatcatagcctctgcagcctcaagctcttgggctcaagtgatccttccacctcagcctcccacctgtaagcacaggccaccatgcccagctaattttaaatattttttttgtgtggaagagatgagatctcgctatgttgccgaggttgatgttgaactcctggactcaagtgatcctcctgcctcagcctcccaaagtgctggaacttcaagtgagagccgccgcgcctggtgttggagcatggtatttagcagactcatcctatttttgtttaaaataaacccaaaggttcacgtg

SEQ ID NO: 408743 - DNA, 1000 bp, Homo Sapiens; identical to SEQ ID NO: 295751

SEQ ID NO: 408744 - DNA, 823 bp, Homo Sapiens; identical to SEQ ID NO: 295752

SEQ ID NO: 408745 - DNA, 1000 bp, Homo Sapiens
ggaattccaaggccatgggtctattcccagccttgccactatgaatgtgacctccagcagttagatcccctgcctgcagcacgtgctgatctccaagggtgaggctggatgaagccaggggctatggaaagggagactgtttcagaggacttgacaccatcttcagtaatttctctggttcttggcagctccatttggctgcgtccctaccctgcataaccctcccagctagtctactccagggcagcatccagctggtgacctgagagggcagtggcgcaccagtctccatgaaggttgagctccgatggccaacagccatttccaccttgtggtctacaactcttcatcccgactgcatggaggttggtctctctcttcagctggatttaggccaccatctgagcccccggggtacgttttgtctgaccctggcgccattcgaacggttcttctacagcatcagttctctttcctgccaccatgtgaagaaggacatgtttgcttccccttctgccatgaatggacagggtcctgctgtgttgcccaggctggccttgaactcctggcttcaaacagtcttcccacttgggctcccaaagtgctgggattaaaggggcgagttacagcaccaggacctgaaatgttatacaccccatcttgatgacaatgcattaatggggataaatactccccagaagagcttcggcctgtcctgagatctgcaacacaaggagtttttaacctggaaagtgtgcttaattcttctactgcctcttcttgagggctgcctaagtacagaatgtttggtgtcctggagggtgcccaggctaacagtgagaattggatagctccatcagggccttgggcactgggcctatggagtagcctgtacttcttgctcttttcaacacttgaagggagagggggccgagttctctcgcagagttgctctatggcagtggcagcagccagctggatatcacgggaaaatgcccgc

SEQ ID NO: 408746 - DNA, 1000 bp, Homo Sapiens; identical to SEQ ID NO: 295753

SEQ ID NO: 408747 - DNA, 1000 bp, Homo Sapiens; identical to SEQ ID NO: 225132

SEQ ID NO: 408748 - DNA, 1000 bp, Homo Sapiens
gtaattctttctctcatcgatcgtttcgattctcttgccggtcttgcagtttgcagggtcctaaacgaagaggggtggagattcgagagtgcgggtctggcgtgtggtccaagggagggggtgaggctgggaaagggggtgcagaatgcgggaacggctgggactgcacagaaggaccatctgcggactcgttttcactgctccagctcccgaaatcgtttctctggacgcggcagtatccgcagcgcatgcaccctcctctggacttccgcagcccagacctgcgcttacagtcatcgcgccaccccctccccccgggctgcgggccccgcgctccgtgggctcagggtcccctccgcgtccccctgaagcctggggacggaggtcgcgaccggccgactggggtcctgtcctcttgtcaccttgtatccctcgcatgctccctcccgcctcgtgtccctctccccaccctccccctcctctctcccgcctccctaacactgcgctttgattctgtttttcaggggcgcattctggggtctctgcgcaagaccagctctcagctctctctcctttcctcggactctggagcgggagcgggcctttccctcgggtcgaccacgccgtaggggacgccgtgaaaagagccgtcgcgcccgctgcctcctgcccgctgcgcagagggctccgcccgtagaggtcaacttccctcacccttttctctctcctgcttgccctccctccgcccggcccaggcgcttccagccccagactgtggccactggctgaggagtgcgagtcggctgcgctgccctgagcctaatccctcttccgggcccagacccgaggtccgcgctcctgggcagtggggaagctttagtgagcaggcttttctctccgcagcaaacttgtagccagaccagatgggccgcccagctctctcgggactaggcaggtgcggatgagttaatttttccgcattacaaagaaagatgaccca

SEQ ID NO: 408749 - DNA, 1000 bp, Homo Sapiens; identical to SEQ ID NO: 295755

SEQ ID NO: 408750 - DNA, 749 bp, Homo Sapiens
actatttgttgaagctcagcatgtccatctccctgctttgaagaaggatgttgggaactgactgtaaggaagacaggattggagaaccaggtttagaagagaaaaggcagtgccagaagtttttgattggagaaaactacagggtaatgttgcacaagaaccattgctggactgcatcattgcttacccaacatgactcagcctcggtattgccactgactcacggagctcctaatagaggagaattagtgtcacagatcgactggaaaaccaatccacatgaagccaggaagagaaatgaagctgctgttgctgaatccatagctggccttaatgatgctggctaggaaagacggcccattctgggggagataagtcaattttgcagtgtctgttattatcatagtgactattgtcttcctgttttatatttatttacctaaattgttttggaaagactcagaggtatagagacatgcctactttttgcaaaaatcatcacactgtcatggaggtagtccaggctatggggctcttatttgttggtgtcttgggcaagttgcttgacctctgatcattgtttgcttattcttatatggcccctgtatttcagactcactctgtgtcaggcatttgtttacctttgtagcaagctcaggaggaaaataccattgcccttgttttacaggtgatgaaactgtacgttttccaaggacacagtgctagtaagtaatgaatgtgaaatttta

SEQ ID NO: 408751 - DNA, 1000 bp, Homo Sapiens
atcattagtgagagcagcttgagcttggagcagtactttcccaagtctgtttctccaacagcatccttagaacccttagaacctggatatcacattttagtgggaggagacagacaataaataaaacaaagtatagtaagtgctctggagaaaagtaatgcaaagaagagggccagaaagtatcaaaaagtttgaaattacaaataaggtactcttggaagacctcactaaggtcacatttgagcagagatctgaacagcatgagagacaactgggggtgggggggggcagaataatgtttcagatatgtacattgcaactgcaaaggcctgagacaggaatttgcctggcctgttccagcttagcaaagaaagaggcctgtgttaatgatactcagagaggaaggaggcaatagtagaacatgaagccagaaaagtgaccagatgcaggagtgactaaggctttgtagactgctgtatagactctgagggaaatgagcagtcattgatgggtttttcgcacagaaggatcttggtgtgttttaaaaggaacattctgtattctatgttgaaaacagactgaaaagcacaagagaaagaacaggaagagcaattaggaggctgtggtagattattattcagcaaatattcaccctactgtcctccccataagatttccccaggccaccatcactggatttggctatttgacttgctgtagtcaatggaatgtgagtgaaaagtgactctgtaccagtggggaggcaaagccttaaaagacccagcaaatttcttccagcccttttgtgcttctgccaaaagaatactgtgagcaatcagtgcccttaagcctgggcctcagaacgagagatatggagcaaacctgaacctgaacagcagcctacaatcaagccaggatgaccctgcaaagcccagccaacgatagcaaagccacagcagacttgtagaccaatgagcatgaaataaattgcattgaaagc

SEQ ID NO: 408752 - DNA, 989 bp, Homo Sapiens; identical to SEQ ID NO: 119389

SEQ ID NO: 408753 - DNA, 1000 bp, Homo Sapiens
agtcaaggagcccttgccacctccaaagcatcacgtgtggatgcaggaaccatattaacaacatgggtagtcaaggagaaagcagatagaataaagctgtacccagcaatataaagggacatgcaagtgtgtgttgtgcttaagagtaaacttagggaaaaaagctccccataacctcgagaaacgtttctggatctgagatatccattagcacatttagaaggtacctatttccattattgtgaaggagttgtaaatgaaataaacaactttaaataatacctcccttggtcaaactgcattaagtattccctgatggaattcattcatcatcattcaaacagaatggtttgcaactcaacctgcctagtgtggggtctggaattcccaccacagtcactgtgccttaagcactgttgcagcagaaggacttgaagtaacacatgaatatataatgccaatttgcatgtcagcatggattgttgaaattgaagttagttaattgtcacattgtaacaggaaaagaatccaagttttggagctggttggaactgagttttcatcttctttctctgctacttaactgtgttatcctgaacaagatactcaacctccatgagacacagtgaccatgtgaaatatatatgtaaaatgtctggcaaacatctgattcatgtaggtacccaaaattagatcattttcattttcttttgcttccttggaagttcaaaacaaaattctgaggtaagtttcaattaaaatgggtcaggcagacagattccagcaaggtcaaagcatccttttttctttaataaaatatctgaatatctgaacaagaaacaacttctgtttctcaaggttgaaatgatgaattattgaacttctgttgctgtttgttttctctcttatctccttactactacatataaatgagatatcttgctatcccactgatatctcaaattcagtatttcccaaataaaacgtaatcttttccaac

SEQ ID NO: 408754 - DNA, 910 bp, Homo Sapiens
gtaggatcagctactggggaggctgaggtgtgaagaccgcttgagcccaggaggtcaaggttgcagtgagccatgatctccactatattccagcctgggagatacagtgaaaccctttccaccgtaggatgatacagcaagaaggccctcatcagatgccagcacttgctcttgaacttctcagccttcagaacccgacgctcaggcccttcaggtccgggacccctgcttcttaattatgtttctattactcccagtgtctaacacaatctcttccacgaagtcggaacttgatacatatttgctgaataaacgaaaagttaaagatgaggcagaaagcacagctccttccaagggcagctctcaagagcccacgttttcagattcagcagtgaagcggacgcgtctggtacgagactacaagtcgcacaggcggagagggggcccccgggcctctggtttcacgtctccctcctggtccccggcggaccggcgtcttttctcccctgctcggagtagcctagcagcgctggaggctggctgtctggtaagcgcggctgttagagaggatggaggcgccgtagccccgcggtgcttctcacagccttcgccggcagggacgcgcgggacaaccgcgcaggcggctctgcaggggtgggcgcgccatcacccctctcggtccctgcctgcttggcgctttccgagccccagccgcgctcaggctgcctcgggcattgaccgcgggggcgcgcgccccgtttccatagaaacgcccggcctgccgcggcggcgcgaggggcgggctttcaggctcccggcggctgcttgcgccccagcgcgcgcccaggcgccttggaatccccgtccttgggcccccgcaaggtccccggccgtgcgcgaggcagcatga

SEQ ID NO: 408755 - DNA, 1000 bp, Homo Sapiens; identical to SEQ ID NO: 295758

SEQ ID NO: 408756 - DNA, 702 bp, Homo Sapiens
ctctgaagggagctttcatgtggccgaccaactctactccttgactcctcccttctctcattgaaaaaaaatgtttaaggggacatttctctctcctaaactttttatgttccattgaagacctggaaaacatgttaaataaaaatgctttgccacagctgacctatgtcttctggcttgtaccccacaacatcttatctaatggagccagtcttggtgctctgtgttcacctggttcatctgaggagctgcatctaccctgcccatgccatagatcctgccctgtttgcttctcctgttgctgctagtggacatgagaaggacagaataacgggctcccagattcacaagccccaccaagaggatcaccccaggaacgcttggaggctgaggagttcactgaggctactgcatcttgagactcaggatgaagacccagcttggggctgtcaaaggttttttgcatgtctgacacccatgactccacctggaccttatggctccacccagaagcaattcagcccaacaggaggacagcttcaacccattacgatttcatctctgccccaaccactcagcagcaagcacctgttacctgtccacccccaccccttcccccaaactgcctttgaaaaatccctaacctatgagctttgaataagatgagtacgaacttcatcgcccacgtggcgtggccggcct

SEQ ID NO: 408757 - DNA, 1000 bp, Homo Sapiens; identical to SEQ ID NO: 295761

SEQ ID NO: 408758 - DNA, 1000 bp, Homo Sapiens; identical to SEQ ID NO: 295762

SEQ ID NO: 408759 - DNA, 1000 bp, Homo Sapiens; identical to SEQ ID NO: 295763

SEQ ID NO: 408760 - DNA, 968 bp, Homo Sapiens; identical to SEQ ID NO: 295764

SEQ ID NO: 408761 - DNA, 701 bp, Homo Sapiens
cggctcagccaatgcgcatgcgcgaggcgggagcggtttctcccgtcacagtggttcccatggttgtcttagaaaccagtccccgaggcttggcaaagcaggagccctctgtggcagtgcttgggtgtcggggctctgaggatccggcctcacctctccacggggtcgacgggaacgtctccggatgccaggagtcgcaaagggccgaccacgatgaggaaaccccaggctgggacgggggaagcagcacgggatcccagcctcaggcctgcccggacggtgttggttggggatcaagatgagtacactgcagccgagaacaagagccccagaggaactctttgtcccacaggagagcagcggatccacgccagagaagatgcttgtatcttttcacggctcttctctgagaaatgaagccacaccacgatacagtcagcaagaggaagccgggaatgggagatggcaacagtccctgtcactggaacgctggcctccctggacaagccaccctttaggaaccccaccccttatgtctgtggcggtggcacggtgctgtatcctgcctgggctctggcctctactctctcctccctctggctctgcctcccctgtttctcaggggcctggatgcctctcgctctggccaaatgccttcaaaaaagatgacttcccagtccgtcagggagacacttcctgga

SEQ ID NO: 408762 - DNA, 683 bp, Homo Sapiens; identical to SEQ ID NO: 295765

SEQ ID NO: 408763 - DNA, 1000 bp, Homo Sapiens; identical to SEQ ID NO: 225133

SEQ ID NO: 408764 - DNA, 1000 bp, Homo Sapiens
ggcacagccccgagtgacccgcgcacgagtggcctgcgctcccagacgcgccgccgcaggccggcgagggcaccctgagccgcttcccgcccccacgggaccgtcgccagcccgcagctctagcgggaggcagttccacagcgtgcccggcagccccgccaccgtcagcaccggcgcctcgggcgggctttccccacctctgggaggcacgaatcctcaggggctcctcgagagggcgccagggagcagatgcgcacggaggcgggttctggacagacctacgctgtcggggagtgtttacttcgcctccacttctgttcctccccgccctggtgctgctccaggtcacatactcttcctgagccggcttcagcctctccgcgcagaagtctcccggagccatggcctagtattcttatgtgaagtctaccaagcttgtgctcaagggaaccgaggtgaagagctgggtcctgcagctccggcgggagcctcctcagttcttttcggacgcactccacccccgcgaatccggtggaagccgtgatgcggagagccggcttcgtggcctcccaggcttcgctctgaccctgtctgggctggatggaggccggaccgcccttcctggcgcctgtgcagagaggggcagcctcctgcgcggacgaccctggaaacaggatagacgggcgggtgacccgtgaccccgtacccacgagtttgggtcccttgaggcatctctccaggcctctgcctgatttgcctgaggttgactgtacatgcaaatattgagctttcctcctggcctccgtgataaacagaagttttgatattgttaggcgagatggaaagaaagtatcaaggagtgagctgaagccactgcccttgagaaccctctcgaggagtctggcctcatgaagatgccagaataaatggcagtaagaagaaaaagagcaaagataagaagagaaaaagagaagatgaagaaacccagcttgatatgttg

SEQ ID NO: 408765 - DNA, 1000 bp, Homo Sapiens; identical to SEQ ID NO: 295767

SEQ ID NO: 408766 - DNA, 617 bp, Homo Sapiens
atgcggacgctgctgagaacagcgaaagcctttttcaaaagtgatattgatttacgttatggggttgtgactcgagccaagaggagagagacgcacaaacgctctttaggtctgcttgcatacagattctctctcctcaccacgcggctgctgctggaggatggaggaggggtggtgtcagcaattcaagactgtctttcctaccctcttcagtgcccttccttgataagctgtttaaaccagaaccgactgtttctggaaaaggtaaacatctattctccaaagggcagtgactttctacctgtgaaaataaaaagtaaacttcagaagaaaattctgaaagaggaatttagagatgttccaaataaaggcaatatagtttcactggaactgaaatgttgccttccaattctactacagaaggcagagtggcacatgtggcacctggtcaggatggactcactaaaggatttaacccagacttctgatcaacaaatattgctgctacattaactgattcgcaacaaagaaagaaaatatcatccagttgattttattatttaaatatgggctcaaatcttaaatctgacaaactaataaataaatatgtctgaaaa

SEQ ID NO: 408767 - DNA, 869 bp, Homo Sapiens; identical to SEQ ID NO: 295770

SEQ ID NO: 408768 - DNA, 1000 bp, Homo Sapiens
tcctcctgggaacacccagcagggggtcctggctccctatcaaagcccgccggctgcgcccaaccggccatttccccgcttgcgctgctcaggctgccagagggtagagcctcctcgccgggaacacagagctctttcctggatggggaagctgtcccttgaggagacgggagaagacagacctccctgtggaaagcaggggaagatggagacccgcaagaaccgggagggttctgagagaggacgagcttccagcgggcacagccgggaggcctctgcgtccaggcacaaacggtggagaagccccgacggctcccctcgcagtcccggcagagaaaccggaaaccgagggcggaaggtcaagccacgaccagccccagccggagagcgaggccacgacaagcccgagtccggcagagcacgacgcccccacgagcgcagaggaggcaggcttaggggctgggagcttggagggatgagatgtgcttcaagtttgaatgggcggaggggagggcaccccggacggggcaccggagtccccaggatgcagggaggggccgagaggatggggcgcggaggttctgttcccagcccgaggcgcctggaggagccaaagcaccggcctagatcgccagggaggacgagcggcccgcaacgccgcgttgacgtccgggaggagcgacccacctccccaaagcgccgccgacgccactccccagaagcctgggtctccctcccgtgcccgctctcgcgagtcgtcaaccacctgggcgggctggacgtggccctgggcgagcttcgggccccggggggcgccttcctcccggggcccgccggcggcacgcagcccagcgcctcgcagcgcgcctggctcacctggcagctggcgcacgccggggccgccctgcactgggcgctggccacgctcgacagcctgctggctgcggggccctggcccgcgggcccgccgccctttgcgcccgctcctgggggcccttag

SEQ ID NO: 408769 - DNA, 1000 bp, Homo Sapiens; identical to SEQ ID NO: 295771

SEQ ID NO: 408770 - DNA, 1000 bp, Homo Sapiens
ttttcacctcttttattcccatttttgcatgatcttttgcgaacttgtagacagtcttcatggccggatttgctttggtctttacagtattcagaattgctccacttcctttccggacagtggagagccactgatggtacagtttgtcactgccagcgtactcgcccatgttgatttcctcttcaaaaacatcactgaaaccttcgccggaattgagaagatctaatcgaccatcaataaactgcttgaagagctgcagctgtgtggcgttctgcaggaactgcctcatggctccggagcggtagtgggacacgaaggcttcctcacagaaagtgatcggctcctccggctcgattttcagagcgtttcggtagctaccgaagaaagcagcctgggccttgaggaacgctctggccacaccatccccagtggttgtggagacctttttcagcctgttcttcagggaagagatcacgtcgtttgggaggctctggaggtcatcgaagggggtttccagggtgttggtgtccacattcaggatcacgacatcatccagggccatgtttctgactttctccattaaacttaaatggattcctatgaggtagggcatgggagcacagcagtagtccagcagatgcggcggcagcacggggatgtacacgtgctgccagtacatggggtagagcatcgccgcagacccgtggatgcaggcagtcagagtgctgagtttgctgcaaatgatgagtatccggcgttcgtacagcatactggcgtacagatgcaacatgttgttaacatccacagccacaaaatattctgtcagatttctattctcaggtatgctgggaagttctctggtatcaggcacagtaaaataagaatgcacgctgagatggacagacactcctgggtcagggatgggaagtttgtgcagagtttcaagaagctcattccactgattttcctgtctttttgtcgtgtaatctgccaggatgtt

SEQ ID NO: 408771 - DNA, 1000 bp, Homo Sapiens
gcgcccatcctccctgcgggtcccaggcacccacagcgcggccaagcccacctgcccgccggctccccaggacgcagggtctcggaggctggggcggcggccggcccgaagcctcgcagccctgagcgcccccaccccggcccggctgtcgggtgcaccccgcattccctgcggtagcggctccctcgcgggcacccggggccgaggcctgcactcaccggccagcgtccgcaacacctcggccatggctccgcgtctggtctcggcctccgccttccgcccggcggccctggggcggggtgagcccgaggcgccccctcccggcccgcgccgcccgccgccccgacttcccgaggccgaacacgggaggggacagaggggcgcgggaggcggccgcgggtccccagggacccctgctaggaagggacggcgcctcctcgcgcgcatccccaagggacccccccgtccccgggggccccttgacaccctgtctcccgggcgggggcgaccccctgacatcctgctcccccggggaggcgggggagacgaacccgtgaagctgcggccccagaacccacgatccccggccttccggctcgcgcgcgccgcagcctgtagccctccagccccgcaggaccctgtgccccgcgcccgcgacgtccccctaggcagagtcgcttccccggccccggctcgcggccccacggagctctgcgtcccgcagactgaggaaccttcgcgttccccctgcgagcaagtccccctccggcgcccgcgccgggccctgaggcctcttcgcgcggtccgtggacaaagccccgctccgccccgctacgacccccgcccttgcctggcgtccgctcgaggaagctcaggagagggcggcggcggctgcagggactgggagagcgcgccccgctgcgaagaggagttacctcccgaagggtcccagaggcttcttcctgcttttcctgatatctctcagaggagtttacactga

SEQ ID NO: 408772 - DNA, 892 bp, Homo Sapiens; identical to SEQ ID NO: 295773

SEQ ID NO: 408773 - DNA, 1000 bp, Homo Sapiens; identical to SEQ ID NO: 295774

SEQ ID NO: 408774 - DNA, 717 bp, Homo Sapiens; identical to SEQ ID NO: 295775

SEQ ID NO: 408775 - DNA, 676 bp, Homo Sapiens; identical to SEQ ID NO: 295776

SEQ ID NO: 408776 - DNA, 1000 bp, Homo Sapiens; identical to SEQ ID NO: 119390

SEQ ID NO: 408777 - DNA, 1000 bp, Homo Sapiens; identical to SEQ ID NO: 295779

SEQ ID NO: 408778 - DNA, 638 bp, Homo Sapiens
gtagtgaggatttgtccaatttggtttctccatgtttgactagtcctccccaccctcctgtgaagatccttcagatgagtctaggtcttcgtcctcctgtgaagatccttcaggtgggtccaggtcttcgtcctcctgtgaagatccttcagatgagtccaggtcttcgtcctcctgtgaagatccttcagatgagtccaggtcttcgtcctcctgtgaagatccttcagatgagtccaggtcttcgtcctcctgtgaagatccttcagatgagtccaggtcttcgtcctcctgtgaagatccttcagctgagtctaggccttcgtcctcctcctcttggacgggattgatggagttctctcgggactggtccttctccagttgatttgaatttattttcgtatgcttcctgtagtaatacactattattgttagatattctattgtttttgtcttttgcaagctctgtttgggggctaagaccctgttcggtgcctcctgctacctcatcattttttttgttattggattcacaggggctcttcctcttctccccattggtgcttgaagtcggctgttccatgattctgcttggttgtagaatgtctatagtaggctcttgtagactgcagacttcc

SEQ ID NO: 408779 - DNA, 1000 bp, Homo Sapiens; identical to SEQ ID NO: 225135

SEQ ID NO: 408780 - DNA, 1000 bp, Homo Sapiens
ctgcagggagccccctaacacacacaccacacaccagacacacaccacacaggctgccgtgactcccctctccggcctcaccactcacccgctcatgggggagcgtggggactgctgggagctccagaggcatttgcagcacgggagagccagttcccacttcagagtgactgccactgtcacgggcaccgccccctcggtgccaggtgcattactgaagaagagtaccagggagattcagctggatggagcagcgtccacagggtggtctctacagttggaatccacacaggtcccagtacctgggcctgggaaccaggactctgagctgtcgagaggtgaacttgacgacggcacgaagagcatgggccacgcccgagtccgcctggaggactcacctggagaggcccctctcctcggccgggcggcctgttctcctcagatcagtgcccaccatgatcgctccgcacactccgggaccccggcctatggtgaagacaacctccagggagacctttcatccaagcgtgactgtcccggtcatcatcaacccagggaaggggagaaagcgggtttcctgcaatgcacaacgctgaggacaggattgcagggccagagggtgtgtgggggcacctgtgtgcacaaccctgaggacaggactgcagggccagaggttgcgtgcgggggcacctgtgtgcacaacactgaggacaggattgcagggccagagggtgcgtgcgggggcacctgtgtgcacaaccctgaggacgggactgcagggccagagggtgcgtacggggcacttgtgtgcacaaccctgaggataggactgcagggccagagggtgtgtgggggcacctgtgtgcacaaccctgaggatgggactgcagggccagagggtgtgtgggggacctgtgtgcaggtgtttgctgcaggtggggagctggggccgctggaggatgaggcgatggtgctcagaagcttcttttcagtgcattga

SEQ ID NO: 408781 - DNA, 330 bp, Homo Sapiens; identical to SEQ ID NO: 295781

SEQ ID NO: 408782 - DNA, 1000 bp, Homo Sapiens
agggacccacagatgcggagtcagcatggaccaggggactcacagacacgggaccaagggacccacagatgcgggaattaaggcagagcacagcgaggaaggggcagcatcctcctgcatttccagagtggcttctgagtgcagcagggatgggagaggtgggggtgatgcgagtgcagagagggtggcggccacagacactcggggtctggagatggactcgcctgggaaggcccccgcggcggggcagctgagaaagttctcatggtttaatttgagtgcctcctctatggaccacatggctggtgctgcagggaggatctgggtcacctccctgctggccgctgggtctctacaggccttgctgaaaaccttcctggacgcttttcagagacaagtcttggtctttgtgctggacggaggcaatgctgctaatgggaggcggagcccacctgctcctcagccaggccgcagggagaggcaggcagcggtgaaagccgctgagcgggaagcagggccgggatgtaaggcagaagccgcagggacgtcggctgggcctcggttgagagcaggggaacgaggagcgggtctcccagtcgggcttctatctaaggacagagctgctgtgcaccggctccctgaactgctcctgctccctgcagtgctcccactccctgctgtgcacccgctccctgctgtgtacccactccctgctgtgtacccactccctgaagtgcacccactccgtgctgtgcacccgctccctgctgtgtacccgctctctgcagtgctcctgctccctgcagtgctcccgctccctgcagagctccccctccctgcagagctcctgctacctgctgtgcacctgctcatacagttcacccactccctgcagtgctcccactccctgctgtgctcctgctacctgctgtgcacctacctgaagtgctcccactcctttcagtgctcctgctccctgcagcgcacctgctccttgtag

SEQ ID NO: 408783 - DNA, 300 bp, Homo Sapiens
atgtgccagggagagccagggccccctgccactctatggcccatgccctgtggccccacagtcctggagtccccagggggcccagagctgtcagtgcaggattccagggctcagacccagaaagtcagcctcaggcccaggcgctttgcataaacaaagagaggaggagggacgccccgggcaccgcccccgccccgccggcgcccccgctccaatctgggaccccgagccaggcctgtcccaagtcctcccgggcccgccagcccgcggccccttaccttggcctggcatttccgatga

SEQ ID NO: 408784 - DNA, 1000 bp, Homo Sapiens
ttctgttatgtcttccatcgtccatagggcagtgaccctcatggcttggccacaagaaaagcaggcatcttctctaaactatggaagaaatcatgaggtggggcccccagtcttttgggaggtcctcgtcaccccgaggaagttcgaagacgtgggcagtgacttggaaagcttcccgagattccccttctataacctgggtggctcagaccgggagcggggtcccagccggccggtaattccgcccggaggtgcgcacgaaacaaacctgcagcgctggccgagggcggctcagcttcggagggcgcgactccggagccacttcagcggccgcccttttaagcgaagaggttcccttaggatgctccccgggtaccccttccgttcccctgccctcccccgacccgcctcccccttccaacccgaaggtagcagcgcggggagcccggggctcggcgcgagccgcctcctcacttcccattggctgagagcgccgggaaagcggtcacgtgggagcgcggcaggccagctcgggggccgccatcttggcggaaagtttcgggggagagcggttgggggcgcggaaggaggcgaggttccggggttccgagcgcacgccgctcaccggaactttgtggcggcgccgcaggtgtgggggcccgcggaggtgtgcatgcggggcgcgagggcgtcgcggagagcggccgctgccctgtccggcccccgctggagcagcccggaggcagcgagcaaggagaaaggcaagcgagaggagggggcccgagcagggcgggcggccagtcccgctggtcccctctcagcgctctgcggccgctgctggctcaggggccaagggtcggagcgcttcacccgcccgtacccagtagcaggtggggagtgtggatacttgtgcgggggaagaggcggcctcaggtctaggctctttggggaggggacgctttcgaggagagtttggaagccgacttctgtctgttcttaa

SEQ ID NO: 408785 - DNA, 1000 bp, Homo Sapiens
gcccccaacccctcatcaaaacagcagcccccagaccccatcaaaacagcagccccccaacccctatcaaaacagcagcctcccaacccctatcaaaacagggtgcgggaaggtgtcccggcagcgcctctccatcgccacaggcccgcggacagtagccaagacccggggcagctggaggctctgcggggggcggtctgacagccccacctgccaggacgcggtggtgcctgggaatagggaaacggttcgagtcccgagctggggagggtctggagggaagggctgcaggggcgtccgtggccgcgaagaaaggccaaagcgccaggcacagggcccggagacggtgacagacctgtccctggcgcggccgacgtctccgcccccgggtgccccccgcgccgcgcccgcgggaccgagccccgcgcccgcttaccttggagacgcagcgactgcagcggagcaccgcccagccccgcccagcccggtcccgggcccgcccccggcccccagcgtccggcgcccgcccagcgtcccgccccgcgcgctcattgcgcagggcgcggccgacccgcgggtcgtgggaaccgctgggcagggggcggcggggcccctcacctggctctggggccccccggggacgaccggaccccgatctctccgccccgcaggacgcgcgttgacggtgcggcgggggatggatgagcgcggccgcggcctcctggggtggggtgggttggcggcggggcctcgaggacggtgcggggcgagccccgaccgcgcccagttctttaaggagccgcagacgtgctgcccagagatgggcttctgtctagttctcctgagaaattccacactcgcagctgggaagtcgggggacccccgaagctgtgcggcggccacgctgcggctcctgcttccctcctgctcgggtgcgggctcggctgccttctcgtcccgcggagcccggagtgcctccccctcgggtagatcctactaa

SEQ ID NO: 408786 - DNA, 1000 bp, Homo Sapiens; identical to SEQ ID NO: 295782

SEQ ID NO: 408787 - DNA, 717 bp, Homo Sapiens
atgggaaagaccccacctgacgcgcccgcggcccatcgtccctacctgacgcgcccgcggacccagacttcagcagacgcgcacgcggcaatcccgtccccacctgacgcgcccgcgacaaccccgtccccacctgacgcgcccgaggcccccggtccccacctgaccctcccacaggccccgtccccacctgacgcgctcgcgaccccatgtcttcccctgacgcgcccgccgcccccgcgcgcctgcggcccccagtcttcacctgacgcgcccgcgtcccccagtgcccaacgggcgcgccggccacctgggcccgcacctgacggcgaccaggcggttattgccggaagtgggccgccgcctcccggcgcgcctcagggaagccccgcccctggccatgctgattggccggcgcggatccgcgtggcaatgttgctgcctggtcctgtcgcccgcagcgtgcgcctgcgtagtaggcactgcccctccgtccgcgcgcgtccagagtgccgggcgtggaggcgtgggggcgtgggggcgtggggtggggctcgggtgcgcagggacgggcgcggtcagtgcctgagatccctgcgatcgctgggagatgacggtgaagacctgagatttaggcctgcgcggcgggtgacgacgccggtccgggtcttcacgggaggacgctggccggggccttcaggtgttctcgtggcctga

SEQ ID NO: 408788 - DNA, 1000 bp, Homo Sapiens; identical to SEQ ID NO: 295785

SEQ ID NO: 408789 - DNA, 1000 bp, Homo Sapiens
gccccccaactggcaccactgctgcccctgcccctactctcagcctcacgtgactctcgggcagaagcactggtggggcagccagggcagcgtcaagagtctgagccagctgcaggacaagttcgagcatcttaaaatgattcaacaggaggagataaggaagctcgaggaagagaaaaaacaactggaaggagaaatcatagatttttataaaatgaaagctgcctctgaagcactgcagactcagctgagcaccgatacaaagaaagacaaacatcctgatccatatgaattcctcttattaagaaaaataaagcatccaggattcaatgaagaactgactatcaccttgttaatcattcagaaacatgttgcaggcttaagccatttttgatatagatactgaaacaattacttgctaagagcaaacttgaaggtatggataaggccctgagtcatcttcctgagctgaatgatagttaagctgaattaacaatttggacaagacagcaaatgctattgtccaagttttctaaagaagaatctgaagtgaaatgacatcaagagacctatcaagacctgtatccaggaaaagagtcttgctcttgttgcccaggctggagtgcaatggcatgattttggctcactgtaaactccacctcctgggttcaagcgattctcctgcctcagcctccctagtagctggtattacaggtgcctgccaccacacccagctaatttttgtatttttagtagagatgggggtttcaccatgttggccagcctggtcccgaactcctgaccttaggtgatccaccagcatcggcctcccaaagtgctgggattacaggtgtgagccactgtgtccagccagtggtgggtctcatatctcaatgtggacttttactaactcccaatgcctcagtttcctcatcagttgaaaggaatgaatgaaagatatgtgtttttcatattaccaggtagatgataaggagatttt

SEQ ID NO: 408790 - DNA, 1000 bp, Homo Sapiens
gggcttggggagcgagttctttcgtctcctacatgaccttcatctgctcgcgtttgccatgaagcgcatctggtcagttgtgtgggctagtctcattctgaaactgcacactcccatcccagaggtagaaagcgagatctcctgcctgcatttcatggagcatgtgattatggaggtgtccagtcccagcaaacagaccccacattcttttccttcagtgactcagacgcaatatgtggagagtcccagacagggcgaggccacagctcgaccgcgagcacctgagcatcctgcaccgcctgcgacggccgtcagggggcgcgatgccgcctcacagaacctcaagcggcgcccgggttccggcacagacggcctgcggctccagggggcggagccgagccgtctcctcaggacctacgcaagaggcgccgtcatccctacagggacacctgagagggcccagcctcctcctcctcaggacccactcgggagacgccgctggctctctaggaacacctggggaccgtggccagggacgacccagcctccttctcctcagctcctcaggaacgactggggaagctgtggcttcatggtccccgaggctgcccgaggaaaggtatttcaggacagccaggagggggcgcacatccgccgagaaactgtgagcaagagcgtctgtgctgaaccatggcgccaccagagggcgcgcgatcccgccccaaccaacttcccgctgaagtgccagaagcagcgaggagcttcaacttcctcagggcagcacggggatcgtgttaatttggtgttcttcattgagacaaagaccaacgagccaccacagccaccagtcccagaacctgccaatgctggggaacggaaaatgagggagttcaactctgctcgagctgtaaaagccaaaggtccggtgatgatcccatacccttttttccagtctcatgttgaagatttttatacatttttacttgtcttggaagagtag

SEQ ID NO: 408791 - DNA, 882 bp, Homo Sapiens; identical to SEQ ID NO: 295786

SEQ ID NO: 408792 - DNA, 1000 bp, Homo Sapiens
gaagtaggccaaatgggacctacaggccctcgaggaccagtgggaattggagtacaaggtccaaagggagagccaggctcaatagggctcccaggacaaccaggagtaccaggagaagatggagctgcagggaagaaggtaacaccaagtttttcggagaagcggggcttccgggagcaagaggcccagaaggaccacctggaaaaggacagcctggccccaagggtgacgaaggcaagaaagggagcaaaggaaatcaaggacagaggggacttcccagggcccgaaggaccaaagggtgaaccgggcattatgggcccttttggaatgcctggaacatcaattcctggaccacctgggccaaagggagatagaggaggacctgggatacctggatttaagggagaacctggactttctattcgaggaccaaagggtgtccaaggccctcggggaccagtgggtgctccaggactcaaaggtgatggctatcctggtgtgcctggacctcgtggattaccaggaccccctgggccgatgggtttacgtggagtgggagacactggagcaaagactttgaacacttcccatggccttgaagatccttcatgccccgactgcagcttctgtcatttctccctggctgccgacattcagccaaaatggcctgccctacttcagctcattcctgcatcagggactcgccaggatggctgattattaaaagcttagctcaaatgtcacctccccgaccacccatacagaaagcattactaccccaacccctctgtatgttttccatgtagcgtgtatcactttctgagatcatcttcctcatttatttctctgcatattccatgagagtgaaggttttcctggagcaggcttcttgctttgttccctcctaacttcatgtcaccagaactaggtgtaccattcagtaggagctctacaacttgttgaatgaatggaaaatgaataaatgatcaatattacccta

SEQ ID NO: 408793 - DNA, 1000 bp, Homo Sapiens; identical to SEQ ID NO: 119391

SEQ ID NO: 408794 - DNA, 647 bp, Homo Sapiens
ccctttcggccggaaccgccatcttccagtaattcgccaaaatgacgaacacaaagggaaagaggagaggcacccgatatatgttctctaggccttttagaaaacatggagttgttcctttggccacatatatgcgaatctataagaaaggtgatattgtagacatcaagggaatgggtactgttcaaaaaggaatgccccacaagtgttaccatggcaaaactggaagagtctacaatgttacccagcatgctgttggcattgttgtaaacaaacaagttaagggcaagattcttgccaagagaattaatgtgcgtattgagcacattaagcactctaagagccgagatagcttcctgaaacgtgtgaaggaaaatgatcagaaaaagaaagaagccaaagagaaaggtacctgggttcaactaaagcgccagcctactccacccagagaagcacactttgtgagaaccaatgggaaggagcctgagctgctggaacctattccctatgaattcatggcataataggtgttaaaaaaaaaaaataaaggacctctgggctacaaaaaataaataaataaataaataaataaataaaaaaaaaaaaaaaaaaaagcaaaaaagcaaaaaaaaaaaaaaaaaaaaatg

SEQ ID NO: 408795 - DNA, 1000 bp, Homo Sapiens; identical to SEQ ID NO: 295788

SEQ ID NO: 408796 - DNA, 546 bp, Homo Sapiens; identical to SEQ ID NO: 295789

SEQ ID NO: 408797 - DNA, 1000 bp, Homo Sapiens
gttgtactcagataaagaaatccaagaacataaagttaaaatatatgaatttccagaaacagatgatgaagaagaaaaaaaacttgttaaaaagataaaggaccatttacctcttgctgtggtgggtagtaatactatcattgaagttaatggcaaaagggtcataggaaggcagtatccttggagtgttgctgaagaagggagttttagtaaagtggtgaagatgaatgatggcagatataggaagtttgagatagaacagatgatgggaagagggagaactgacaatacagagtattgccacaccgtgtatatccaagaacactacattgacctcaaaggagttaaaccaggcgacttccaccagattttcttgattctgtgtttattccatgagaagctgtgggctcgatcctgtacaagttctagaacttcgtggaacctgcagaacctatatgggcagttgaacggggacatggagcagctgtcaaaacaccaagggaggcccaggaaagatgctcatctccggggaggagcggaggggacagccagcatgtcttcagccaggaaggggcatgacagcacagggcagcctctattaatagaagcaaactcttgccgtttatttatgacagaacacacgcaggacttgaaagatgttactaataatgtccactacgagaactatggaatcagaaaactggcagctgtgacttatcatggagttgataacaagaagaataaagggcagctcactaagagccctctggcacaaatggaagaagaaagaagggagcaagtagctaaaattaagaagatggagatggagatggagcaggtgtttgagatgaaggtcaaagaaaaagttcaaaaactgaaggactctgaagctgaggccttcaggaagtgtcgagtctgggacgcccagcgcgggcccgagcagggggaagggaagcgcagctcggtccgcgtgggtggaggggacgtgaagccgccctga

SEQ ID NO: 408798 - DNA, 1000 bp, Homo Sapiens; identical to SEQ ID NO: 295790

SEQ ID NO: 408799 - DNA, 1000 bp, Homo Sapiens
ccggtggcttctgcaggccaaaatcgacctcaagctctggacttcctccagtcggcctctccaggcccagctcttcctctcggcggcctctgcaggcccagactgtcgtcaagtcggcctgtccagggccagctccagcctcccggcgccctctgcaggcccaagtcgtcctcaagtcggcctccccaggcccagctccggcctctcggcggccgctccgggtgcaaaagttcctcgagcccagtttttcccttccggcggcctctccgggcccagaacctcctcaagtcggcctctccagacccacttgcagcctcccggcgtcctctccgggcccagctcttcctcccggctgcgtctccaggcccgactgctgcctcccaacaacctctttggactcagcgcctgcccatctcctggcggccttggtcggcccacagcttcctcaagccaagctccccaggcccaggggcctctccaggcccagctctcgcccccacggcagcctcccggggacaagtccctgcctgcctcccagcagcccgcgtgcggcccagctcctccctcacggtggcctgttgatgcccaactcatgcctctggcaccctgcccagaggccccctcccatgctgaccccttgcctcacacgggcccctcccacgctgaccccttgcctcacacgggcccctcccacgctgaccccttgcctcacactggcccctcccacgcggagagagagtcgtccccactctcagtcggtcacccactccttgaacttgagatcagtgtcagtggtgctaaagccgtcatcagcaatgacatcatcaccccctcctcctcatggatgaccatgggctcctcgtcactcgctgctgagtaccccgctgtgggagaaggcttgggccaggctgagccaggttccctgactgtgtgcagccgtcctgccccacagaagctgctccttggtatccgagctctggaatgtctgggccacaactga

SEQ ID NO: 408800 - DNA, 756 bp, Homo Sapiens
atgaggaggtgcttccttctgcctgtccatggcccacagcaaaggaatgtctgcttctgggggttgggtgggagacggctgacagaactggaaatcttcttcaggtccgcctctgtggcgtcgccgaaggcacccccaccttcacgcggagcccatcggaactcgaggcggggctgctgggtcttccaggagcgcccagacgcgggcaggtggccgccggtggccacaggcctgggcaggatggaagcgcccgcagagcgggcgcttccacgtctgcaggctctggctcggccgccgccacccataagctacgaggaggagctttacgactgcctggactactactacctgcgcgacttcccggcctgcggggcagggcgcagcaagggccggactcggcgcgagcaggcgctgcgcaccaactggcctgcacctggcgggcacgagcgcaaggtcgcgcagaagctcctcaatggccagcgcaagcgccgccagcgccagctgcatcccaagatgcgcactcgcctcacctgagcctgggataccgaaggacctgttcgaagtatttactgtaactccaactgtaacttggttctgaggaggagagaatccatgtttggtcaacagaacttttcgctgtcacttaagtttactgcttcgatatcttttccttactaattgattgttaattaagtagtgcccaagtggattagcctttttagagtttattaattaaaagagagcagcaagaatggc

SEQ ID NO: 408801 - DNA, 1000 bp, Homo Sapiens
ctgcctcccaacaacctctttggactcagcgcctgcccatctcctggcggccttggtcggcccacagcttcctcaagccaagctccccaggcccaggtcaggcctcacggtggcctctccaggatcagctcctgccctccgatggcgtctccaggccccaaacggtctccggtcggtgggctcctccgcgcccagcttgggcctcctggcgacctctgcaggcccaagtcgtcctgaagtcggcgtctcccggccctgcctcccagcaagtaagcaagctctttgggctcaactcctgcccagctcaaaaccgcctttgggcctctccaggcccagctctcgcccccacggcggcctcccggcagcccgcgtgcggcccagtgcctccctcacggtggcctgccaccgggaggcaggatgtgggcctgaagagcttggctgcagaaacttcggggtctacaaacgctggagggagctgagccaaaagagcttgcctgctgggaggcaggagctgggccgagagatgcagccaggaggaacagctgggcctgcagaggccgccatgagggaggcagaggccgggcctcctcaagtcggcctctccagacccacatgcagcctcccggcgtcctctccgggcccagctcttcctcccggctgcgtctccaggcccgactgctgcctcccaacaacctctttggactcagcgcctgcccatctcctggcggccttggtcggcccacagcttcctcaagccaagctccccaggcccaggtcaggcctcacggtggcctctccaggatcagctcctgccctccgatggcgtctccaggccccaaacggtctccggtcggtgggctcctccgcgcccagcttgggcctcctggcgacctctgcaggcccaagtcgtcctgaagtcggcgtctcccggccctgcctcccagcaagtaagcaagctctttgggctcaactcctgcccagctcaaaaccgcctttgtag

SEQ ID NO: 408802 - DNA, 1000 bp, Homo Sapiens; identical to SEQ ID NO: 295792

SEQ ID NO: 408803 - DNA, 1000 bp, Homo Sapiens
tcactcacccagccccgctcttcaccgcggttttaggaaccgcggagaaaacaaaaaacaggcagcctcacagcccaagcggcgccacacagaggcgcacaaaaggtcgaccgactcgaaagaacaagcgttccagtgcggcctcctcgggctgtctccatggtcggtcccactggaggaagaggcacttccagactgtgaggtgggcgctggaaactgctcttctgattccattcctgaaagaggcattgtgctggaatcgggtcccgtggggctggggatacagtctggagatgatgtggacagcttctacaatgaagggaatgcggggatggagctggaagcaccttctataacatctgtctgcatttctcctgaaggtgaaagttcgggatctcatccagtgtcctgcgactggagcatgggcattcgcgaggtaggctggggcacctggctgtcagggctgtcagcctgcctaagcagaggaaaatggtacaagcagagccggcctggtctcggggaaaaggctgcctatgacaaacaccgagggacccttaaagtcttgaccgtacagcctctttggggcgtctcggtggtcgaccctgctggatgggaaatatttactgtggaagactttgagccagacccaggaaactgtaggcccatgaggagcatggaagtcaggaaaagagaaggccagagtggaatcaaaagcccaggtagcatcagtcgttcaccctactgctatgtggctccgggagtgaaggtccaagggaggagctggccagaaaggccacagtttgggctccagcggttcctggcactttggggtcctccttattccgaaccgggctatgttgtggacaggttgtgcaatgaagagaatgtggagatggagttggaaacagctcctatgccatctgtctgcttctcttctgaaggtgaaggttcaggaccccatccatacctcaccagactatatcctcacccgtattattga

SEQ ID NO: 408804 - DNA, 1000 bp, Homo Sapiens; identical to SEQ ID NO: 295793

SEQ ID NO: 408805 - DNA, 1000 bp, Homo Sapiens
tgttggccattgaattattcatagatttatttcaaatagtttggaaattgttgtacttttgaaaacatgctgttcctgtagttttttgatgagagttatagttgttatatatacataaagataattttcttttcatttttaagagacaattctttttatcctaaatattttattatctttaaatttctttctgtattattatatgtgctcctgaagcgagcactctttttatctatgatacttccataataatctcttctatttatagctattggtagttccccaccacaaaaaaaacataattctggtgatagaaatttttatttgctgtttaggtttgtgactgaattgtgagaattcagttgtgatttttaacatgtctcagatatatatactaacacgtctaatatatactatctattttattggtttattttgaaaaacatgggtatagaattatttaaatattattttatttattgaaatatttattaaatatatttatttaaatattattacttgaaatattattttaaatatttttgaaatactgctatttttgaatagatgctgtttctataaagctgtgtgatgggtgttataactgttatatacacatacgtataattttgctttcctttttaagagaggattcttttcatcctaaatcttttacctttcaatctttgtatctattattacacgtgttgctgaagggagcatggtttttatctgtgatacttagttaacatatatattacatttatagctatgtagtagttcccctaaattcttgtaaaaataaatttttatttgatatttcatatatgtttgaaatgtgagaattcaggtgtaattttttaccttgttttggcatgtttgtatgttactttaaagaggatgtgtgttctaaaggaggacatgagctgtgtgttttcaagagaacaatagagtgcgtctcttggggaaacataataaaaatgaacttttctcaccttca

SEQ ID NO: 408806 - DNA, 1000 bp, Homo Sapiens
ctcccagatcgttagggtgctgactgaggatgagatggggcacccagagacaggagatgctactgcccggctcaaggaggtcctggagtacaatgccattggaggcaagtatcaccgaggtttgatggtgctagtagcgttccgggagctggtggagccgaggaaactggatgctgatagtctccagtgggcaccgactgtgggctggtatgcgcaactgctgcaagctttcttcctggtggcagatgacattatggattcatcccttacctgccagggacagatctcctggtatcagaagctgggcatgggtttggatgccatcaatgatgctatccttctggaagcatgtatctactgcctgctgaagctgtattgccgggagcagccctattacctgaacctgatggagctcttccagcagaattcttatcagactgagattgggcagaccctcgacctcatcacaaccccccagggcaatgtggatcttcgcagatgcaccgaaaaaaggcacaaatctgttgtcaagtacaagacagctttctactccttctaccttcctgtagctgcagccatgtacatgtcaagaatggatgacaagaaggagcacaccagtgccaagaagatcctgctggagattcaagagttctttcagattcaggatgattaccttgacttctttggggaccccagtgtgactggcagagttggcaatgacttccaggacaacaaatgcagctggctggtggttcagtgtctgctacaggccactccagaacagtaccagatcctgaaggaaaattacaggcagaaggaggccgagaaggtggcccgggtgaaggcactatacgaggagctggatctgccagccgtgttcttgcagtatgagaaagacagttacagccacgttatgggtctcatcgaatagtacgcagagcccctgcccccagccatctttctggggcttgggcacaaaatctacaagtggaaaaagtga

SEQ ID NO: 408807 - DNA, 1000 bp, Homo Sapiens; identical to SEQ ID NO: 295795

SEQ ID NO: 408808 - DNA, 1000 bp, Homo Sapiens; identical to SEQ ID NO: 119392

SEQ ID NO: 408809 - DNA, 1000 bp, Homo Sapiens; identical to SEQ ID NO: 295796

SEQ ID NO: 408810 - DNA, 1000 bp, Homo Sapiens
catcaagatttactagctgtacaagctacacagataaggaatgccatatatcaaaacaggctggcactagattacctcctagcctcagaaggaggagtatgtgggaagtttaatctaacaaactgctgtttagacgtagacaataggcgagctgtcatgggaattactgccaggatgtggaagttagcccaagttccagttcaaacctggtcaggttggtctccagattctctctttgaaggatggttttcaacctttagtgggttcaaaaccttaataggtgggttcctgcttatcacaggtgcctgcctaattctcccttgtctcctacctcttctcatcagaagtgttcagtcaactatagaggcagttgtggccaaatacactactactcaaataatggcattgactaagtattgccccaagaataatatgtaccgactcaagaaaaaataaacaactgtggtgctattaaccaacatttatatagagcaccaaaggggggaatgaagtggaaaattaaaataggataatagcataagtaataatagtaaaattatagtaacagaaataatagctcatagaatgaattgctgtaccaaccaaggctaaaaagaatttaagtagcccccctgaagttagagttaaagaaggatattaactgccagtcccaagaaacattaaccatatctgcccttcaggtattttgtaggctctgtaagctcgtgttttcttccctccttgtacagctgcaaggtcacaagacagataagcataagctgcatactaagttttcccagagatgtaagacatgttgcaaaagtgtcacaagataattaatggactttgttcttgcttctgtaagcctgcttcctgcttcacgtaattcctgcctcaaaatgcttaaaagacattcgttttctttgatctatgcttagattttctggatgcaattccactgagccgatgtacacctaaaaataaaaactttcctgcatcc

SEQ ID NO: 408811 - DNA, 1000 bp, Homo Sapiens; identical to SEQ ID NO: 295797

SEQ ID NO: 408812 - DNA, 1000 bp, Homo Sapiens
gcaaaacctctgcagccgtctcagtcccagctccccccagtcacccctggtggccccaggcctggccatctctgatggctatcaaaggacagagtggctggtagaggaggcccactatctcagcggctacttccgagggcaggctgggcctccacccctcaaaaactcgctgtttcccaagctcctgcaggataccgtggagcccttggtgtttgtcctgagtttctgctttggaagccctcctccaggagcactggcccaggcccctgaggcagacggacagtgcaggggcttctctgcaggggctccggggagcagcagccctgggcacaagccccccgcccactctcccccgtcccacccctccaacctcagtgactccacagtgaaggtcagggggccacgttatgcagcctggcccaagaacagctcccctgtccccatcaagaaacaccaagcggtgggacccagatgcaaggctgtcctgacacagccacaaaggggcccccacggcccctgcctgcagggacctaagggcctccgagtggtgaccaacctacaaccagctcacgaggaaacgatgctccgcacggtgcacctggaaacgacgctccccaacatgcacccggaaacaacgctccccaccgtgcacccggaaacgatgctccccaccgtgcacctggaaacgatgctccctgccgtgcacctggaaacgacgctccccaacatgcacctggaaattacgctccccaccgtgcacccggaaacgacgctccccaccgtgcacccggaaacgatgctccctgccgtgcacctggaaacgacgctccccaacatgcacctggaaactacgctccccaccgtgcacccggaaacgacgctccccaacatgcacctggacgacaaccttcgagtcccgcccaccagctcacgaggaaatgatgctccccctccccaccgtgcacctggaaacgatgctccccactgtgcacctggatga

SEQ ID NO: 408813 - DNA, 1000 bp, Homo Sapiens
atttcccagtgcctctcaccatttcccagtgcccctcaccatttcccagtgcctctcaccattccccagtgcctctcaccatttcccagtgcctctcaccatttcccagtgcctctcaccatttcccagtgcctctcaccatttcccagtggccctcaccatttcccagtgcttctcaccatttcccagtgcccctcaccattccccagtgcctctcaccattccccagtgcccctcaccattccccagtgcccctcaccatttcccagtgcctctcaccattccccagtgcccctcaccatttcccagtgcctctcaccatttcccagtgcctctcaccatttcccagtgcctctcaccatttcccagtggccctcaccatttcccagtgcttctcaccatttcccagtgcccctcaccattccccagtgcctctcaccattccccagtgcccctcaccatttcccagtgcttctcaccatttcccagtgcccctcaccattccccagtgcttctcaccattccccagtgcctctcaccattccccagtgcccctcaccatttcccagaaaggagctggcctagggacgggatgagtcacttccttcacagggagcttggagtctctgctgtcttcaccactgaaagctttgttgtcaggtccagcgtcttgctctggcaccacctcatgtgggaggtgttctcccctggtgctctattccgttccttacaagaagtcagcccccatagtgggcccagactgagtcctcttccaggaggctcttctgcctgtgcaaaggggccaccgccagcccagcccttagtgcgctggtctcagtctcagtggccccaccatggtgctgccctatgggagcaaactctccctcatctccatcctcctcacagcactagccactgtggtgaccatgggtcctacccgatcctgctggtgactccctgccaccattgccaggacacagctctttctggcccagagtga

SEQ ID NO: 408814 - DNA, 1000 bp, Homo Sapiens
ggatgacccctcactgggcaccccagctcagacctcaagggaaacaggatctacggaagatgggtggaaggatggggccctggtgggaggactcacaggccctgcagactgctgccgagcagaggagcgggaagcgtggtctggaggttatcctggcggcgttctggcgcagttatggtgctgcgcgctggcgctgcagggcaggttgctgtacccccgggagagcccgtcgcgggagctcaagaagctggacggcctctgaagcttcagcgcctacttctccgacaaccggcgccggggcttctaggagcagtgttacggtcctcggctgcgagaggtgcgtgctcggggcagggccgtcaggcgcacggaagcccggcggagggagtgggagtgggggagcacgggcatcccgcagtgggtcatctgcctcttagttatgcgtctgaactttcttgcctcggactgggatgtggccctgggctcgctcctgtcttgggagatattgggccccatccactccgagaaggaactcctggctccactagcccagatgtggtacgaacaggaagtgaccctgccagagcgatggacccaggacctgcacacaagagtggtgctgaggattggcagtgcccactcctatgccatcatgtgggtgaatgggatcgaagcgctggagggtgagaggggctgtctccccttccaggccaacatcagcagcctggtcctggtgggtcccctgccctcccacctccacatcactgtcaccatcaacaacacactcactccctccaccctgccaccagggaccaaccacgatatgaccaacacctttatatatctcaggggttactttgtctggaacacagactttgacttcttcaactatgcaggactgcagcggtctgtgcttctgtacacaacacccaccacctacattgatgacatcaccatcaccaccggcgtggagcatgacagtggtgagggtttctggtag

SEQ ID NO: 408815 - DNA, 1000 bp, Homo Sapiens; identical to SEQ ID NO: 295799

SEQ ID NO: 408816 - DNA, 810 bp, Homo Sapiens
atgggggactgcaggcgcaggagcagcgaggtgggatatgagacctgcaagtcccacgcatattatcatcaatgtgggaaaacgagagggggaaggctgccacggacacaggaagtggccgcacaatgcaacatctacttaccctctgagggatggtttgagtccctgtcatcgaagggtagactggcagaggaactagaagatgcagacaaggccctcttggtacctcccgcagctctctgcagtggggaagacatgcttggcgaggaggagctatggggccaggaagacgaggaccgcagggtaggtttggcaatccagctggggaagaaagagaagaaagggctcctaccacagcacttctccatccccagccgtgagcagtccctttctttgcaagggaatggttctagaactgtggggtcagatctaaagcttaaggactatggagtggatctcattgaagtttcagacaatggatgtggggtagaagaagaaaactttgaaggcttaactctgaaacatcacacatgtaagattcaagagtttgccgacctaactgaggttgaaactttcggctttcagggggaagctctgagctcactgtgtgcactgagcgatgtcaccatttctacctgccacgcatcggcgaaggttgggactcgactggtgtttgatcactatgggaaaatcatccagaaaaccccctacccccaccccagagggatgacagtcagcgtgaagcagttattttctacactacctgtgcgccataaggaatttcaaaggaatattaagaaggtacagtaa

SEQ ID NO: 408817 - DNA, 1000 bp, Homo Sapiens
tattagcatagccatcattcccggagttgtcaggaggtattccttcacccaggcctgcatgcttcattgtgctagaggagagagggaaaaggtgggcgcgggagagttgggctgtgggaaaagcaccacagggaacagcatccttggccagcctgtgtttgagtgcaagctgggggcccagtcagtaaccaggacatgccaggtggagacaggaacatggaatgggaggaaagtcctggtggtcgacacgctctccatctttgagtccaaggtccagactcaagagctgtacaagaacatcggggactgctacctgctctctgccctcgggccccatgtgctgcttctggtgatccagctgggggacttagggagccaggccctggatgactatgtagcaaacatggacaacctcagcctgaaggacctggtgcaggaatgtgagagaaggtactgtgccttcaacaaccgggctgccggggaggagcagaggcagcagcaggcagagctcctggctgcgatcgagaggctggggagggagcgagagggctccttctacagcaataacctcttcctggatgcccagctgctccagagaggcagggctggggcctgccaagaagactacaggcagtacctggccaaggtggaacaggtggtgttccccatctcaagcagcaaagagaagaaggcagacatggggctcaagtatgggcagatcgggaattcagtggaaacaggtaatcagatgaagaggaagtccctgggtccctccaccacaccttcttctttgtgttcgcagcatcctccagcactgctgctggcaatgaagctccacgtctggctccatggcactgactcctgcatcgtctggcacagaactgattccaaacatgtgcagggagtatgttgtgtgccagctccccaaaccctgggaaccctgagttctcagactgaggaccacctcctcaattcattgttcccaaactgctccaactga

SEQ ID NO: 408818 - DNA, 1000 bp, Homo Sapiens; identical to SEQ ID NO: 295801

SEQ ID NO: 408819 - DNA, 1000 bp, Homo Sapiens; identical to SEQ ID NO: 295802

SEQ ID NO: 408820 - DNA, 1000 bp, Homo Sapiens
gctgccacatggccggggaaatccccggcccctcaggaagcaccagtggaaactctgccagcaccagatcaaccaaggatacccagacggcaccacccatcccaaagagtaaaaatgtcaggaaccacagttcatgacaccagccaggacctggtgccaacctacagggcggtggcctaggaaaataaagtacatccacaggactcagagtctctaagcagggccaaaatgcccaggatacaagcaaaagctgctcatcacagcaaaagctggaggacacacacgtgaatgagaaaagacaatgaatgacaccagtgccaggaccagctcgaggctgaggacacgaccaggaggccagggttgtcaccacagggcaccatgacaaagcaatgcactctccagaaacaaatgaagtagaagacctcagcaaagacacagaagttatcagaaagaaccaaagggaatacacagagctaacaactacaaacacagaaacaaaactctccggatgtactcagtagtaaagtgaagatggcagaggacacagccagtgaacctgaggacacagcagtagaatgggcccaataagaaccatagagagagaaagggagggaggaagggaggagggaggaaggaagggaggaagagagggagggagaaaggagaggaaaaagggagaagtgagggagggagggaaggaggagggaacagaggaagaaaaaacgaacagagcttcaggaaccagtagaacaataaccaaagacccacccgattttcaggaagagaacaggactgactgaggatttgaataagtaataatggaatacttctcaaatgtggtgaaaaacataaactcacagaatgagtgaaaataaaaatacatcaaaatgtgtggtatgaagcagagcttagagggaaatttatagtaccaaatacttaatattagaaaaagagaaagcatctcaaatcaatcatctaagttttggcctcaggaaactag

SEQ ID NO: 408821 - DNA, 1000 bp, Homo Sapiens; identical to SEQ ID NO: 225137

SEQ ID NO: 408822 - DNA, 1000 bp, Homo Sapiens
ggttcgggaggcgggtcctgcacagcgacgcagccttgtcccggtggccgcaggcctggggagcagggcgcagcacacccgccgcccgcttgcaggcgagacgagagcggggcgccgggatgctggcgtccaatttaaccaccagggcgcacgggacggaggccgggggtcccgcttttccgtcagagttcgcgggcgcgtctgcgcctccggccgccgcggctcccggggcctccgcctgcagccggcggcggaacgggggcaggcggctgagacaggcgagctatttgcattccccggcagtcatttttatatgcggaggtaatgaagttgtcagcggcgccccgagtgtggcagagcctgatattcaaatcgccctgcccgctccgcctgctcccgcccgctggtcccgggagccccaggctgcgcgcgcccgcaccgcatcgccgctttgccccgcgaccgcgcgcgcctcctcgtcctcccccgcgcctttgtttccgtctccttctcctttccctcctcttttgtgtcgggccagactcagccccagaaaccagccaccctgccgcgtccgactgccagggatccctcacgccgcgagaaacccaacacacagctattctgtcaggctgccgagaaaaggctgttcggcagttgcagccctggtgaggcaatgaggaggaaaggtggacgcacctgcctggagtggttgaaggaaggcagtgaacatccacgctcctggggttggttttcctgagcctctgtagctgtgctgctcactggggcagccactgaccacaagaggctgccgagggcttgcagtgtggccaggccagaccaggatgttctccaagtgggaaatacacaccccattgtaaagaagactgtatggaaaaaagaatgtgaactggctcattcatcatttaaaaacattgattgcatattgaaatgataatattttgggtatatggggtgaaataaagtatcatgaattaaa

SEQ ID NO: 408823 - DNA, 1000 bp, Homo Sapiens; identical to SEQ ID NO: 225139

SEQ ID NO: 408824 - DNA, 416 bp, Homo Sapiens
agtttattactttgcctttaacactgttgcagtttacatttatttccttgtttctctcaccatatagaagggatgaagttggggagaacctggtatttagttcagtcctggatgagtgccagcagaagtttgaaaggatgtcatgcatgtgtgagatttagctttccagatattcattgcattgttggctcacctctgccggtggtattgctagcattgcacattggaactgcagcttgggaaagtgatagaaaccaaacacatggtgggtacaaagcaagtttgttgtattttatccacattagtattttggatgtttcaatatttaaacatttcaaaaagcaaaatcaatgataatacttcttgaatgtgttgtgaacaatgcaagccttttattaaaaattatggaatattcg

SEQ ID NO: 408825 - DNA, 1000 bp, Homo Sapiens
cggccctgcctcccagcaagtaagcaagctcttttggctcaactcctgcccagctcccagtggccctggtaggcccacaacttcctgaagccaagctccccaggcccaggtcaggcctcacggtggcctcgccaggctcagctcctgccctccgatggcatctccaggtcccaaacggcctccggtcggtgggctcctctaggcccagcttgggcctcccggcggcctctgcaggcccaaatcgtcctgaagtcggcctctccaggtccagctccagcctcccggcagcctctgcaggcctaagttgtcctcaagtcggcctggaagtgggcctggaagagctgcaagttggcctccctgggcccagctccgtcctcttggcctctccaggtgcaaaacttcctcgagtcagcctctccaggcccagctcctcctgcctcccagtggcctcttttggcccagcccagctcatggctctcagcagccttcccaggccccgcttttgacttttggtggcctcttcaggcccagaacttgacctccagtcggcctttgcaggcccggcttcctgcctctcgaaggcctgcacgggcccagcctcagcctcacagcggactctccacgcccagctagctctcgcctcactgcggcctccccagtcgaaagctcctgcctttcggccgctttggcaggcccagctcctgcctgccagtggcctctttaggcccagctcattcctcacaacggcctttccaggccccgtttttcccttccggcagccttttggcctctaatttgtttatcttttgtgtataaatcccaaaatatggaattttggaatattgctaccattatataaatattttcgtatgtaatttatttggagtgagtttctgcaccaagcctgaattttttattttattttccttattatttggtgttaaacaggtttaatgacggtcatggcaactttttggcacaatgaaaaataccacccatg

SEQ ID NO: 408826 - DNA, 679 bp, Homo Sapiens
aatgttccaaatctgccactatgaaataattggcagcaaggatgggaaaaagaaaaacctcattttaatgcgaatgacttaccaggaaataaaacacaggacctcagatgagtgggcgttctccatagcaaaccctgcccacttaacagttttgccaagatatggtccagatacaggtccttacctctggtttggctttcacagtgaagccaaaccaggacagcttgttacacagagtctggaaagcagcccttcatgttgggattctggaattgggtcactgccgagtcagatttcaataaggaaaacatacttgaaaatcatgctgaccaactatattgatgacattaggctaatttgacatggtagacaagaaattccaagtactggataaaatgatctggagcatgccaagtaaatgaaagttattggatcttgaatcttctaccactaagaaagaggcacagtgctttttggacctctttggattttagggaagtatattctataattgaaagtggctctctgacctattcattatatgactgtgaagactacctattttgaatgaaactctgaggaagaaagggctctggggcaggtccagcctgcagagtaaccttccctcccacttggaaatcctaacaaaatcaaagatatccttgatagctaaagatag

SEQ ID NO: 408827 - DNA, 801 bp, Homo Sapiens
atggggaaagcaaggtcctgagactctgagcaacttccccaagatcacacagctaggaagtgatgaagctgagacaagaccagccagcacttacccaccacggtgtgatgctgacgttagaggacaaggacatgaagggattctcctgggccatagtcccagccttaacctccctaggctacctgattatactggtggtctccatctttcccttctgggtgcgactgacaaacgaggagtcccacgaagtctttttcagtggcctatttgagaactgcttcaatgccaaatgctggaagcctcgacccttatccatttacatcatcctcggccgggttttcctgctctctgcagttttcttggctttcgtcaccaccttcatcatgatgccctttgcatccgagttcttcccgaggacctggaagcaaaactttgtgttagcctgcatcagcttcttcacaggggcctgtgccttcctggctttggtgctgcatgccctggagatcaaggctctgaggatgaagctcggccccctgcagttctccgtgctgtggccttactacgtgctgggcttcggcatctttctgttcatagtggctggtaccatctgcctcattcaagaaatggtttgcccttgctggcacttgttgtccacttcccagagtatggaggaggaccacgggagcctgtacctggacaatctggagagtttgggaggagaaccgagctcagtacaaaaggagacacaggtgacagcagaaacagtcatctagcccaggacatggcttctttacccttctt

SEQ ID NO: 408828 - DNA, 641 bp, Homo Sapiens
atggaggccggacggaactggggagggggtgctggccagggtgggctcaggccctccccactaaggccagctcggcccagggcctccctgcgcagcccagcgcgccttgtcggagaggctcctaggaccggaggggaagccgctctgaaccggaatgatctggtttggagcgggttggctccctccctgctcccccgcccactgctctccctctcctccagcgacgggctggtttttgccgcagtccctgaccaagaaaacccttccagggggcagctcagcctggggacaaccacagaagtgggacctgggcccaaagacaggtgtcacctgaaacaggccactgttgtccgcctgcagtatgctgggaggaccagctcccgctccaccctgctccccctgggaggaaggctgacccctgcgtgggagtgtgactgctggaaaggcatccttgctgcagctgtgagtgtgatgggacagcagagtcactcctgcatgggattctagggctgggggtcccagaggggtggcctccgcccctcctgggggccgaggactgtcaccatgtcactacggcactctccagctgctgaccaaagccctcgctaaccgcagccctgccatactctgggtctttcctc

SEQ ID NO: 408829 - DNA, 597 bp, Homo Sapiens; identical to SEQ ID NO: 295808

SEQ ID NO: 408830 - DNA, 1000 bp, Homo Sapiens; identical to SEQ ID NO: 295811

SEQ ID NO: 408831 - DNA, 1000 bp, Homo Sapiens; identical to SEQ ID NO: 295812

SEQ ID NO: 408832 - DNA, 1000 bp, Homo Sapiens; identical to SEQ ID NO: 295815

SEQ ID NO: 408833 - DNA, 1000 bp, Homo Sapiens; identical to SEQ ID NO: 295816

SEQ ID NO: 408834 - DNA, 1000 bp, Homo Sapiens; identical to SEQ ID NO: 295817

SEQ ID NO: 408835 - DNA, 1000 bp, Homo Sapiens
ctgccttctcaaggagtccacagtctggaggactagactataacaagtcataagacaggagtcatcacaagggaatacacaattatttgcaaatgtctcttattgacaaggaaaaggctgatgcttcagggaacagatgttgctggacccactgacacagcattacatttctgagctaagaggctgagtcaactggacccatacattctgtgcttcctggttttgcaattggattgattgaactctgcagaagcagccataaggacaatctaaggaaataaagcaattgtggccccggggatcaagagctccattgagttgagagtcctagacagctgcctcagagaaccaaagggtttccatatcattaggtgaaggatactcccttctttcatacagaagctgctgtggtgccagtcttcctaggaaatgttcctagtgaccagaaaatgtcgaacagggtgaggctcagtgctggatcttagtcactgagcataccctcctcctaccactctatccactgactattaactagcctcctatctcaccttcctgaggctgagtttactctctaggaggaggttaaaaaccacagagagaagttgggtgtggtggcctgtagtgtcagctactcggaaggctgtggtgggaagatcgtttgagcccatgagtttgagaccagcctgggtaacatagcaagactctgtcgctaaaaataaaaaccacaaaacaaggaattactaagagacctggagggaatgtaggccatgtagcccagagaagaatttcaggatccagagtcagacaaacaaacccttcctcaaatctcaacccttccattccgaggctgattgactttaagcaaatcatgtctattctctgagtgtcacgttcctcacctgtgaaataaccaccatcattgggctttcagggaggagaaggggcagaaatgatatcattcatgtcgagcacctagtaaaaagcctatacatatcaccat

SEQ ID NO: 408836 - DNA, 1000 bp, Homo Sapiens; identical to SEQ ID NO: 295818

SEQ ID NO: 408837 - DNA, 1000 bp, Homo Sapiens; identical to SEQ ID NO: 295819

SEQ ID NO: 408838 - DNA, 1000 bp, Homo Sapiens; identical to SEQ ID NO: 225140

SEQ ID NO: 408839 - DNA, 1000 bp, Homo Sapiens; identical to SEQ ID NO: 295821

SEQ ID NO: 408840 - DNA, 1000 bp, Homo Sapiens; identical to SEQ ID NO: 295822

SEQ ID NO: 408841 - DNA, 1000 bp, Homo Sapiens; identical to SEQ ID NO: 295823

SEQ ID NO: 408842 - DNA, 1000 bp, Homo Sapiens; identical to SEQ ID NO: 119393

SEQ ID NO: 408843 - DNA, 1000 bp, Homo Sapiens; identical to SEQ ID NO: 295827

SEQ ID NO: 408844 - DNA, 1000 bp, Homo Sapiens; identical to SEQ ID NO: 295829

SEQ ID NO: 408845 - DNA, 1000 bp, Homo Sapiens
atatccgcctgggccctgtgagctgtgctgccagcacaggggtgtctggggttgctaccccatgcactacgggacactgtggctgtacggagacccccacctgcacactttcaatgggacccaccatcaggttcaagggcctggctgggagatattggctagaacatgccggccacaccacagcgcctatgccatctgggtggagatcaggcgccaggagccgtgggatgccatgtgggcccagcaggtggatgtggatgtggcaggatggcagctgtcactgctggcaggacagtttggagccgtccagcttaatgggggcccagcccctctgtgcccaccagacaaggcagccctataccaggccttctgtggcttgctgggcacccaagatgggccctacagggcctgcagtaaggacgtggatccccaggtgcatgtggagaactgcatccatgacctctgtgccacggggggctcaagagagactctgtgtgccatactggggagctacgcccaggaaagccagcagcgcagcgttcccatgcagccctggagacacctcttggcctgcaagctggcctgtcctccccgcagcaattacgagctctgcggctcctcctgtcctagctcttgtgccgagcctgccctgcccgacagctgcctgacaccatgccaggatggctgccagtgtgacccaggctttgtgctcagtggcatggactgcgtgcccccaatccagtgcagctgctccatggggggcaggtaccaccacccggctggggaggccttctggactggggagcgctgtgagcaattctgccactgccaggcctccacccacgccgtgtgctgctccccgtcctcctgtgggccggggcagagatgtgctgagaccacagcgctgttccacaaagccccaggaagccacattaccctgtccaccggcctctctagccccatcttgcccaggaagtgggaccttggcgtatcgctgtga

SEQ ID NO: 408846 - DNA, 1000 bp, Homo Sapiens
caactgttgaaaggcactggagtccaatgggtgaggccgcctctgagacaagcctctgagttgaggctgggagaggctccctccttggagtgttgctttttttgtttcacccctgcctctggagatgggtagaggaacatgagctgaccttctgggaagttaggttggtgaggagttgctgaggcactgcagggccatgcccagtagagaggaatgtataacattttaagaggctgagagcaccccttgttggacgcatgcccatggcagcttccttctgccgatcatgggagaaatcaagcactttcacctaatggctagatgattgattttgggatgaaattctccactcctctcctttaccacatcaccactatccttcctgcaatacatccacgagactcactgagtggaaaagggataggaatgaatgttcacccagggccagctacatgctaggcactgtactggaccatttaaatttgccacctcttatgttcctcacattaatcttacagagtaggtacagacatacctatggatattgcagattcagttccagaccacagcaataaagcaagtcacatgaattttttgctttccttagtgcatgtaaaagttacatttccactatattatagtttattaagtgtgcaatagcattatgtctttaaaaagcgtgtacataccttaatttaaaaataccttgttgctgaaaaatgctaacaatcatctgagccttcagtgattgcagtagcctaggctactattttctatgtggggtttgcacattctgcccatgtctgcgtgggttttctctgagttctccagcttcctcccacattccaaagatgtgtatgttacattcatgggaatgtctaaattgtcgtaatctttttgctggttgatggtcttgccttgatgttgatgctgcaggtggtggttgctgaaggtgggggaggctgtggcaatttcttaaaataaaataagacaacagtgg

SEQ ID NO: 408847 - DNA, 1000 bp, Homo Sapiens
cggtgaggtggcccacgtcagcgcggagatcacctacacctccaagcactctgtggaggtgcaggtcaacatgatgtccgaaaacatcctcacaggtgccaaaaagctgaccaataaggccaccctctggtatgcgcccctgtcgctgacgaacgtggacaaggtcctcgaagagcctcctgttgtgtatttccggcaggagcaggaggaggagggccagaagcggtacaaaacccagaagctggagcgcatggagaccaactggaggaacggggacatcgtccagccagtcctcaacccagagccgaacactgtcagctacagccagtccagcttgatccacctggtggggccttcagactgtaccctgcacagcttcgtgcatgaaggggtgaccatgaaggtcatggacgaggtcgccgggatcttggctgcacgccactgcaagaccaacctcgtcacagcctccatggaggccattaattttgacaacaagatcagaaaaggctgcatcaagaccatctccggacgcatgaccttcacgagcaataagtccgtagagatcgaggtcttggtggatgccgactgtgttgtggacagctctcagaagcgctacagggccgccagtgtcttcacctaagtgtcgctgagccaggaaggcaggtcgctgcccatgccccagctcgtgccggagacccaggacgagaagggctttgaggcctggctcggtggctcacgcctataatcccagcactttaggatgctgaggcaggcggatcacttgacgtcaggagttcaagaccagcctagccaacatggcaaaaccccatctctactaaaaatacaaaacttaactgggcgtggtggcaggcgcctataatcccagctactcaggaggctgaggcaggacaatctcttgaacctgggaggcagaggttgcagtgagccaagatcatgccactgctctccagcctgggcaacaagagcaaaactccgtctc

SEQ ID NO: 408848 - DNA, 1000 bp, Homo Sapiens
tcgacttctacgacttatcattctgataagagtttttcgtctggctcatctaaaaagacaacttggaaagctgataagaaggctggaagtcgtacagtttctagacaagaaacatccaaaccactatcgagtctacaatctatgcagtgtgtaccttactctgtattttgctactgtagatagaaaacagattactgaatgtgaaagagcttatgatcctaagcacttccataatagggtcagtagaatcatgatcgatgatcataatgtccccactctacgggagatggtagcattctccaaggaagtgttggagtggatggctcaagattctgaaaacatcgtagtgattcactgtaaaggaggcaaaggaagaaccggaactatggtttgtgcctgcctgattgccagtgaaatatttttaactgcagaggaaagattgtactattttggagaacggcgaacagataaaaccaatggcactaaatatcagggagtagaaactccttctcagaatagatatgttggatattttgcacaagtgaaacatagctacaactggaatctccctccaagaaaaacactgtttataaaaagattagttatttattcgattcatggtatgcccctcctcctggaattgcccattgattgccagcccttagatgttcttcactttttcttttccatcaccaatttggaggacttcatccccttcccatctctcctgttctctttgctcttctggtcacaacccaaggtggacttttcagggcagagtgttggaacaggcgatggatatgatctaaaagtccaaatagtaatgaagaaaaagattgtcttttcctgcacttccttaaacagttgtcgggtatttcatgacactgaaacagacagggtaataattgatgtgttcaactgtccacctctgtatgatgatgtgaaagtgcaagcttcctcttcgttcccaacaagggagatgatagatgtcatcccatag

SEQ ID NO: 408849 - DNA, 1000 bp, Homo Sapiens; identical to SEQ ID NO: 295831

SEQ ID NO: 408850 - DNA, 1000 bp, Homo Sapiens; identical to SEQ ID NO: 295832

SEQ ID NO: 408851 - DNA, 1000 bp, Homo Sapiens; identical to SEQ ID NO: 119395

SEQ ID NO: 408852 - DNA, 1000 bp, Homo Sapiens; identical to SEQ ID NO: 295833

SEQ ID NO: 408853 - DNA, 1000 bp, Homo Sapiens
cttttcctcaggggatgactcctacactttttcctgccaaggacggcaccacagaagcctggcagctccagcccttggttcctgtcacccttctacatctcttcattgtgtcccactgcatttctgaaaacactgaagccaatcaccttggctgtcaaaagaagacaaggcttttggaaagtgtcctattaacacagaaagtgaccacaaatctacaatttaatgccacacatgagtctaacaatgagatcagctgctcataactgaggtggtgggactctggcccttttgcctctctctgggaatgtccaatattttgctattcagggaaatacatagttattattaattgaaatactatgtggaattctctgaaacctttggaatgaaatgaagtccaagagggaggctgagtggcaagctgagatctacaaggagctgctaagaaatgtaagcccctctcagtgatatcctattcacattctccctcacacacagattaaacaaagtccctcctacagacctgctttgggaggtctctcagtgtagcttgccataccaagatgttcctagagttctttcctgctaccttttcggtcgagcctcccaccccaatcccagcaccatcactgggtgagtgatccaccaccaaaggcagctttggtaatcctagccacacatcaagcctcttaataatggccatcatactcatattccttcgaacctctaaggagacctaaggggaccttgtccttccttctccagttacttgggttaaggcaggcactagtctccctggaacgcctgacctcttaaggagccatggcagaacagcatagctcaaggttgtgcttgctccactcaataggttaaatatgagtaaaagatttgggtcacccccttccctctggaaatttctggctgaagtgaccaaagaatgattttaaggcaaaatgataaacatgaacaaagggcaataaaacagcacaaagaaaatatt

SEQ ID NO: 408854 - DNA, 914 bp, Homo Sapiens
atgcccgcgccggcgcaggggcggataaaaagccgtagcgccacgggactcacctcctggctccgcgttcggttcggcacttggaactggatctggcgactgtgccggcgcgccgcctctgccgcggtcctagcgccgctcggcttcacgctccgcaagtcccaggcgtctgccaggaaccgccatcaccacccgcacccgcgccgggggtcgtgcctgcccgcagcccaccaccaggtgcgctggcgcgcggacggcccttccctggagaagctgcctgtgcacatgggcctggtgatcaccgaggtggagcaggaacccagcttctcggacatcgagagcctcgtggtgtggtgtatggccgtgggcatctcctacattagcgtctacgaccaccaaggaataacatattgacttactgaactgaagcattctgagttgaaaggagccccagaggaaaggagttctgtgttgctcacatgttaaaagcttgctcaccttcagagcagagggaatacctatcttcagatatccgcccattttcatctcttcattatagtcaaacagtgtgacttgagagtgttgctctggtgtctgtattctggcttatgaagattatttgaaaaagaactcttactacattgaaatgcagacttttaaaaatttaaatattggattaggcagtcaaaaaaccaaacaagcataaaaggtcagtaagttgtaatcttaaaagtaaaggtggaaaactcattataaatggaagaaaagttttgatttccttttttgtttgatgggcagtatgccatattatatccaaagttggtttaaaaaatacttccatcaactatttttatttaaaataaacatttgagggaagttaccaaggcagcttttttcctcaaaagtaacctgtt

SEQ ID NO: 408855 - DNA, 1000 bp, Homo Sapiens; identical to SEQ ID NO: 295839

SEQ ID NO: 408856 - DNA, 927 bp, Homo Sapiens
atgacggttcgttgggtccgtgaaaagggcagtgtgccaactacagcagggaatcagctggtccctcttctcaggtgtagatcacctattataattttacctaattttgatactctgataaggaaagtcccaggacttatcagctgggataggcctcacttacaagacagctctgttcagtatttggaagaaagcctgacaggtttcttcggaaaagtggccatccatggaatgaatgaaatgttctctttctattccagggattgcagtggcaaagctaggctaggtcttggaggctggtgtaaggcgatgtgggtgaaggcaggaggctgatggaaagactggggggaagaaaagccgaaatggattcacggtgccttggatgaaggacgagaggggaactgcaagctccttcaactggttctgtccggtgagaagtgatcaagcttgggctgacaagaggctcagggagccctcacgttctttcgcttttttacctgccaatcaaactgctacaagacaacaccctgatctggcatggacatgtccgtgtttaccttaatattacacctggattaaacagaaaacagtgctgtattttgaagagcgccgaatatgtatgcattttgagaaacccaatctcaccctttccgggttcccaagaactaaaacaagccataacttgagagaaaaaggagaaccttcggggggcaggaaggttgattggaaataacttaaggaaagtctgcagaattcttttttttacaacttttctgagtttccagtgggtatatttagtgtgagtttgacagtaacaggctagggagggcagagattggagaaattgggggtcgggggagtgattatgggaagaaggttagtaaggaacaaaacaatgcaccgttttgtaaagataataaatggaac

SEQ ID NO: 408857 - DNA, 928 bp, Homo Sapiens
ggatgggaacgggggagaagaagggcaccgcggcgggagggaagaaacagagcgagctacgctgcaggagcgcagttaccagccggctgcgatcacgtgcctgggaggaggagctgagacctcaggggaggggcgcgcggtagcgtcccgggtcccctagcagggctctagagaccacgtgaagtctcctcgacagctgctttgcctcaggcataaatcagaagaggaaaaccagcttctggacctggagagaggatgaaagggaataggaattgagggaagcggaagggaagaataagggacccctggagagtccctaccaagccagacataacaaacaaaagtcctctactactgaggaagacagaacagggaagccagcaggggaagaaaaagatgctgctgctcttgatgcctcaaaaacagcaaggaagaacccaagcaactgatgtacacacccttggaacaaatctgccccagaagtacaagacacactcttcgaattcatggaataaatgggaggagctggtgtagtgaaggatgaagagaaggcaatgcattggtttagacaagcctcccagcaggaccatcctggtgctgcctttaaccttgcagtaggaacactgaaaaacatgactgcctccatggaagcaggggatgtagaaatgctccttaatgttgctgcaaaatgggggatccaagaagcccaagaacttctggagaatgttatttggactaaaagcaagctcttgccaactgaaagaaccaggagttcttataaaccataatgtgtgcctgcatgctcttcctggaacatgggatgttctgctctcacttgtccactgtggccttgcaatgctttgtggcattttcaatggaagctccttttacttatagtctcatatgctgctgcagcattaatttgctg

SEQ ID NO: 408858 - DNA, 921 bp, Homo Sapiens
atggccctggccagctggcgccagggtcagctttccccacatctgcactccctctgctggaggcctgagctctccatgcccctggctctcttctgcagagggcctgctctctgctgccacaagatggcgctggagaaggggcctgagcagagaggcaggagctcctctgcaggtcctcccagacaccacccctctgggaggaaggctggggagtcccctaagacagatcctccatcacttctccctgcctgtgactcaggaagaccagctcctcctactgccttctgtgctagggaacacttcctgtttgagtgggacctgagttttgaaagcgtcttctgctcctcttcatctggtccctttccttccaagaccccagagaggaaggcatgcgccagtcagaaatcttccaacttgcaagggagaaggaagtcagtcaccaggccagctgggtcatctgctgtaatcacttgtgatcttactgtaataaataccttctacatccactggtacctgcaccaggcggggaaggccccacagcatcttccatactatgacccctactactccagggttgtgttggaatcaagaatcagtagaggaaagtattttacttatgcaagcatgaggaggagctggaaattgatactgcaaaatctaattgaaaatgattctggattctattactgtgccacctgggacaggcacagtgattcacacctgccctacaccacactgaaaatctgccttgtgactgcttctggtacacaagatagaccagccccctctcatttgttgccaccgaatttactgtattctgtacaagagaaacacagcataattcctgatctctcccctaatatcacactctcctggcagcagctgcaccttgttccccaccctcccccaggactttcctga

SEQ ID NO: 408859 - DNA, 171 bp, Homo Sapiens
cgccactttgaaccattcaaataccacattaggcaagactgtgataggccttttgtcttcaaatacaacaggcctccactaacccactggtttggtggggaactcacagtaattccaaatgtacaatagatgtctagggtctgttttcggaagaagcagtcaattatcagt

SEQ ID NO: 408860 - DNA, 1046 bp, Homo Sapiens
  misc_feature (45)..(45): n is a, c, g, or t
  misc_feature (82)..(102): n is a, c, g, or t
atcaggccaaatcggccgagctcgaattcgtcgagagcggatttngtacacataacatgggttatttagtttaactctggcnnnnnnnnnnnnnnnnnnnnntttggtatgtggatgttggtataccggtccagtataaaaggtggtcctaaggcattattaagccaatcttttcacaggtaggagcatactaaagggctggctgggtactggagtataccttaaattataactccaaaatccagggactgggtggtaaaaccagggattagacgcttggtaaagggtacattctagatccatatattggaatcttaaacacgtggttattttcctcttaagtaatgggctaaatggcagtacaaaaaaagtctctatagggtgagccaattggaaaaagaatggaaggggcaaggtggaaaaattcagggggcacaaaagtaggggtatgtgcaacacgaagaaatcctaagttggagggtagactcatatttcccagatggatacaaggctgtgacttggtcgggaaccttgtcccaaatctctaaaatccggttctctgccaaaagcaaggtcttcctgggtcggatatcggagtttaacaagggtcaaatctctcaaattcgggatcttaagagggcacgcctctagaagaattcagcggtctaatcccaccagtaagaaactaccatttctggattttacggatttaaaaaactctttccagtgaccttcctttgagggtacctcacaattttaaccctgggctaaatatggggcgttccccttttcacccaaggtgatgtcacagttccgaatgcaaatcaggatccagaaggtcggggtcaaaaataacccaacggtgttcttaggggtcactttgggttgccaacacaatttacttggattaccggggtgtctggaccgggcccgattgggtcgctttgaaacgccgaattgagccaaacctgggaatgcctctaaaatccgaactatggactcgggttaaacccgggggacactacagtggctaatctcatgggaaa

SEQ ID NO: 408861 - DNA, 402 bp, Homo Sapiens
  misc_feature (109)..(109): n is a, c, g, or t
  misc_feature (111)..(111): n is a, c, g, or t
  misc_feature (170)..(170): n is a, c, g, or t
  misc_feature (173)..(173): n is a, c, g, or t
  misc_feature (187)..(187): n is a, c, g, or t
  misc_feature (189)..(190): n is a, c, g, or t
  misc_feature (196)..(197): n is a, c, g, or t
  misc_feature (204)..(205): n is a, c, g, or t
  misc_feature (254)..(254): n is a, c, g, or t
  misc_feature (256)..(258): n is a, c, g, or t
  misc_feature (264)..(264): n is a, c, g, or t
  misc_feature (266)..(266): n is a, c, g, or t
  misc_feature (269)..(269): n is a, c, g, or t
  misc_feature (272)..(273): n is a, c, g, or t
  misc_feature (278)..(278): n is a, c, g, or t
  misc_feature (280)..(281): n is a, c, g, or t
  misc_feature (284)..(284): n is a, c, g, or t
  misc_feature (286)..(287): n is a, c, g, or t
  misc_feature (293)..(294): n is a, c, g, or t
  misc_feature (302)..(302): n is a, c, g, or t
tttaaaaaaggaaagggaaaacggattctagttaaaaattgtattgtyytctctctttcctctcaatccatttcccctcccgccaaaattaaaatcgcaaaaagcgganantggaggttkgkggtgagggagttmaargmmmgggmtmaggagmcctaamttmtacmctnttnaagaaagagggagngnntggttnntttttgnntaggaagatgggtgtctgtttttaaaataataatkwktgggggaaaagngnnncattgntnagntgnnccctnannaangnnttgggnntgtwkkrnkkwtkkggwkkakkaaacctcagcgaagatattgggawtdkkggrggggkgsctccagggagcccccggagagaggtcccgtggagaagcaatcccggga

SEQ ID NO: 408862 - DNA, 923 bp, Homo Sapiens
  misc_feature (252)..(252): n is a, c, g, or t
  misc_feature (256)..(256): n is a, c, g, or t
  misc_feature (258)..(258): n is a, c, g, or t
  misc_feature (284)..(284): n is a, c, g, or t
  misc_feature (308)..(308): n is a, c, g, or t
  misc_feature (310)..(310): n is a, c, g, or t
  misc_feature (315)..(315): n is a, c, g, or t
  misc_feature (323)..(323): n is a, c, g, or t
  misc_feature (327)..(327): n is a, c, g, or t
  misc_feature (343)..(343): n is a, c, g, or t
  misc_feature (345)..(345): n is a, c, g, or t
  misc_feature (347)..(347): n is a, c, g, or t
  misc_feature (352)..(352): n is a, c, g, or t
  misc_feature (363)..(363): n is a, c, g, or t
  misc_feature (367)..(370): n is a, c, g, or t
  misc_feature (373)..(374): n is a, c, g, or t
  misc_feature (376)..(377): n is a, c, g, or t
  misc_feature (382)..(382): n is a, c, g, or t
  misc_feature (388)..(388): n is a, c, g, or t
  misc_feature (393)..(393): n is a, c, g, or t
  misc_feature (419)..(419): n is a, c, g, or t
  misc_feature (441)..(441): n is a, c, g, or t
  misc_feature (446)..(446): n is a, c, g, or t
  misc_feature (448)..(449): n is a, c, g, or t
  misc_feature (453)..(453): n is a, c, g, or t
  misc_feature (455)..(455): n is a, c, g, or t
  misc_feature (460)..(460): n is a, c, g, or t
  misc_feature (463)..(463): n is a, c, g, or t
  misc_feature (466)..(466): n is a, c, g, or t
  misc_feature (490)..(490): n is a, c, g, or t
  misc_feature (492)..(492): n is a, c, g, or t
  misc_feature (497)..(498): n is a, c, g, or t
  misc_feature (502)..(502): n is a, c, g, or t
  misc_feature (513)..(513): n is a, c, g, or t
  misc_feature (521)..(522): n is a, c, g, or t
  misc_feature (526)..(527): n is a, c, g, or t
  misc_feature (529)..(531): n is a, c, g, or t
  misc_feature (535)..(535): n is a, c, g, or t
  misc_feature (541)..(541): n is a, c, g, or t
  misc_feature (546)..(546): n is a, c, g, or t
  misc_feature (548)..(548): n is a, c, g, or t
  misc_feature (550)..(550): n is a, c, g, or t
  misc_feature (556)..(556): n is a, c, g, or t
  misc_feature (559)..(559): n is a, c, g, or t
  misc_feature (563)..(563): n is a, c, g, or t
  misc_feature (574)..(574): n is a, c, g, or t
  misc_feature (576)..(576): n is a, c, g, or t
  misc_feature (580)..(580): n is a, c, g, or t
  misc_feature (593)..(593): n is a, c, g, or t
  misc_feature (603)..(603): n is a, c, g, or t
  misc_feature (605)..(605): n is a, c, g, or t
  misc_feature (613)..(613): n is a, c, g, or t
  misc_feature (617)..(617): n is a, c, g, or t
  misc_feature (620)..(620): n is a, c, g, or t
  misc_feature (635)..(635): n is a, c, g, or t
gtttcctcggcgtggggcggaagcacgatctccggcagcggcctgggaactcttagctgagcaggcgagagcatcatggataccgacttatatgatgagtttgggaattatattggaccagagcttgattctgatgaagatgatgatgaattgggtagagagaccaaagatcttgatgagatggatgatgatgacgacgacgatgacgtaggagatcatgacgatgaccaccctgggatggaggtggtgctncatnangacaagaagtactacccaacagccgnggaggtgtatggtcctgaggtggngnccatngttcaagnggangacactcagcctctcncngnacccnttattaagccngtgnnnnccnngnnattcnctctgntggancagacttaacctgttacggtgtatgngtggatttcttggcggattctnatggntnnctcngngctcntcngantgtgccctttgtggacatctccancntggcnngacntgttttgtggnttgttttnnttgnncnnnctcncccggnaatcngnangcgctntgnccangatctgtgctntnctgncatcctcttcacnggagcaaagngngaggtgtnggcntcnaaagcactcctgtgncagtggtcttgccagacaccaaaggaaaatcttatctcttcaatatcatggacmctccaggacatgtgaatttctctgatgaggtcacagctggcttgcgcatctcagatggagtggwccttttcatwgatgctgctgagggggtgatgctgaamamaragmggstgatmaasatgcggtgcaggarargctgsagtactgtgksatcacmagattgaccgstgatctggacckaasygcctccacctrtgcttatacaactgcgcmcattgyggtggaggcatggat

SEQ ID NO: 408863 - DNA, 629 bp, Homo Sapiens
  misc_feature (112)..(188): n is a, c, g, or t
cccacatggcattgcacaatcagtgctgtatattttggaccttactcatatttggattgttttatattaagagggcagtagaatggcaaacagcaaatggtttggatctaannnnnnnnnnnnnnnnnnnnnnnnnnnnnnnnnnnnnnnnnnnnnnnnnnnnnnnnnnnnnnnnnnnnnnnnnnnnnaagcttgggccccctactattgaaaaaaatctctgatatgaatgaactttgttttggagtgagttcctccccgcaactgggagatttttaaacagcttcccaagtggatccactgagaaccacaggtgagaggagcccctggagcctgctgctgcctgtcctaggctcggcaccccaaggctcagttgccttaagatctgagtatgtgttactccaccttgtaccaagtgcttctgcacacccagcccacctgcgtcatttggctctgctttttacactgttcagcttcttgcagccttcggaggtgttaatccccagagtttaacccttttttctagggttttacacatagacagactccaaattgtatgacaggttgtcaactgtattggttgtgggagcttctgtcccttggatgggcaatgtgctacctagggttaa

SEQ ID NO: 408864 - DNA, 690 bp, Homo Sapiens
cggtttggaatcccctggggtcagcgagcgcttgtttcctccgcctggtgtagcaaaagtgtaaacacgcgcgctccggaaggcgccctccagtgggaggttgctcaggggatggcggagctgtgaaactcggagctagaaggaaagtctcaacgcttgtctaaattttgctttgtcgtgacgagctacctagacccacgcagagctaacttggtatatgccccggttcccatctcttaagtctctttacagttgaaacacgtttataatgcttgactgccactcactttctagggagagcgcttgtgacgctacgaacctctcgaacacctgacgactgggcgccaggccggatggagggtggagagccagtgcggcgcagctgcctcctcttaaccgggacaccttgcaggaatgtgcggagtggagctaacgggagcggatagaaaccgagggaggggaagagagcgcgaaggcttggccggaaggagaggttaaaaaggaaaggcctaaaatgaggaagagagttaccacaacaagcagtacctagttccagttcttggtcccaggagttgtggttgtgctgctttcatcttcctcagccaacacaaaaggaaagtgccaaggggcgattcctaggaccttcagtgcagtctccaccttgcggacttggctcatttgtgtccactc

SEQ ID NO: 408865 - DNA, 341 bp, Homo Sapiens
  misc_feature (182)..(212): n is a, c, g, or t
tcaatcttaattcattttattctacaaaatgctactcaactgaaagtggaaatgctaacccccctcccccaaaaaaatcgcaagggaaagaagttttaatatgttctttcttccatagcagcaagctttttctaacaagctttctttagtgcaaatactgtaggcttgtattacatatagtnnnnnnnnnnnnnnnnnnnnnnnnnnnnnnncaccaccagaaaggcttccaaacaaagctactcctcaattttcaaaactatacaaagattttgagcttgcggttctgcctggaaggtctatttaggagactctccaatgggaccatttcaccattactt

SEQ ID NO: 408866 - DNA, 476 bp, Homo Sapiens
  misc_feature (83)..(115): n is a, c, g, or t
aaataaatactttacatttcatgcttgcctgtaatgcactaccaggagcaagataaggaaattctactgtagacagtacaaannnnnnnnnnnnnnnnnnnnnnnnnnnnnnnnntagagagaccctgcagttagtaaggaaggcccttacttttgtactctaggagaagcaagtggcccctgcaagaacagtcagctttaagaagctggaaatcagggatgggaaatggaaaacaatacttgaataatgctatgtaattagtgtagaaagcaaagctgagcgcgaccctgccaaccatctaagcagaaatggccaatttcctccaagatggctgcattatgacaagaagtcaagcttcatgacagttagtatgggctggagtctgcaaagtctgaactgtattctcatagaatgattccaggtttcagggtgttccacctgccagaacccaaaactacaactatgggcgacacaa

SEQ ID NO: 408867 - DNA, 682 bp, Homo Sapiens
taccgggctggcggcctggccgttgccccgggctgctagcgggtccaccgggttgctagccgacagccggccttcttcctcgcagcgcgccgcgattcagcagcctggtcccttctgcggagagcgatgccgcttcccgaccccatgttctgcgctcggctgatccacattcccccgtgagctggccggacatcctgaaagtcaattcaccaacgtgctgcgcatcctgctaccctagtctcggcacgactggtgcttgctggctggatcctgcgtggctgatttcttcatgcgtctagtcagatgcaggagatccacctttcgctgtaaaggtagcagaatgtgaatagtgctccacgtgcaatcccgagatagatagcagacacaggcctgagtcaaggactcctgaaagttattgcagcaagcagtgtcaccacaagcggtatgtggcattatcagatcttgcatgccagaagtggcaagaacttgtgcctgccgaagggaacaattcaaagcgctcttacaatatggattccttgtgacaaaaccacacatcaagtggataaacttttaagcgcttggagtgcagcatgcttggtgggtccttgaatcactgcggctgaaggcacctgtgcgagcatcctcacggactgatccggagggcgggcccgatctgcatccc

SEQ ID NO: 408868 - DNA, 1085 bp, Homo Sapiens
  misc_feature (119)..(128): n is a, c, g, or t
taawtcawwaaahhttaaaaatatttttaaaaatataataaagcaawmmaaaaatggaaattmmaattaattmmtamtaaamtaattgaaagaamtgaaggaagaaagaaaatagagtnnnnnnnnnntttwartwmwawaaaaaaggtmtagaamtgtatatamagtmamaggaagaaamaggtatggaammgtggamagaagggggtaggtattmaaagagagtgggtataaaggtgtaaaamtttgtattatgawagttttmmaraaattmatgtagaraagggagaagggaaaaaataatatamgaaaaaattaamtgaaaamtatgaattatgaagaatgtggatttataagtattgtwawaaaaataaaactttaaaagactttatgawaatwaaaaataaaatttacattaaaaatggaaattttattaatacataagagtactaaaaaaaagtaaaactatggtaatgaacggagactgacaacaragaacggaggaacaacaactgtaggagggaaaaacagaatacaaaactaactaacttactagatgaaaaaaggaytacttgagagtaaaacaaragaggaggactgttgataaaataactgaactaagaactaaaytaaactggacttamctgwgammctagggagggtaaataartgaatagstmtacaggggggtamcatgstagacaatammaagacaattamctgagggtgagagacaagacaaagaggtatagggatgaaggggaaggacaggacaaagsaatgtgactmctagctaagaagmmaactmtgttaccamtacactaactttttgmtmtgtgggmaggmaagtgaaactggggtttctmcttmagagmmcttammmmcagggctctggmatggactcttagamttmmcagtggaggctgctcttgtgcccatggctaggtctgctgtgtatatcgcatgttcttmcttgctctcaggcttagatatggactgggttggtgagcmgagattyctaaagggraaaagmatgamtgtkgggsgctccttatggctcccctagtggaggccattgggatgaa

SEQ ID NO: 408869 - DNA, 958 bp, Homo Sapiens
  misc_feature (138)..(138): n is a, c, g, or t
  misc_feature (255)..(315): n is a, c, g, or t
attttttgagtaccagtwgttgctacctgctgctgttttaccaggaatgaaatagcccattgwbggagctttaaaagcccccaattaatatgttgtgcatgtataagatctacaaagaactcactgtattctttctyncyccaccaagtccccccctccccaagtactcacatattccctaaccaccacctttctgtcctgtcgggtgcagggggaaaagatcagagctacaaaataattgactaattgcttcannnnnnnnnnnnnnnnnnnnnnnnnnnnnnnnnnnnnnnnnnnnnnnnnnnnnnnnnnnnntgttcattaatgaagggataaattaccgatggcttcttcattctctttagttcattaccccccaaaagaaacaaatataatccacgtgttaatatttcttgtcttcgttttctttgtttctaatatgatgctgtttattatatattttttagtgttggtatttgtagaagcctctgctactgcattccccaaagagctactagtttcagcccactggagtttatattcctttaattgtctagtgcaggaacatttctgctgttttgtaaaatacactgctctgcaggaattagaagaatccaaggttgtatccaacttcaaaggtttccaagtcataatgattttwgcaaaagtagaagacagatcatggaacaagtccccgtttgaagataagcatcatagggacctttttttcttccctctctccccaactttgtacttctcctggttctgaatgcccctcactaacacagtttaatgatatgcaaatgaaatatgcataaaaccatttactgtatgatgattaaacactggagacattaacagcggaggcttcactctgtgtaataatccttcccgaccatccactttgattgcagagttatggaaacccatagcagttggcagagagagcgaaagasag

SEQ ID NO: 408870 - DNA, 493 bp, Homo Sapiens
  misc_feature (49)..(97): n is a, c, g, or t
  misc_feature (202)..(202): n is a, c, g, or t
  misc_feature (339)..(339): n is a, c, g, or t
  misc_feature (446)..(446): n is a, c, g, or t
accagataacgtttgaatggagggattatatttcaggtgttttagcttnnnnnnnnnnnnnnnnnnnnnnnnnnnnnnnnnnnnnnnnnnnnnnnnntagaacaaagccggtgatgcaagttgatattataaacaggcagttttagcacagaaagaaaatactgacctgtctgcattctggtacggtgggtgcaggtcccanctgggtatgacatgatacatttttaattattctcaccagcaagtaaaaggaaaatgaacagtcttttggaattgtctttgaaaaggatcaaagagtaggaaattcacatttgacctaacattacttgcctatagaantatggcatttccaagcttttgtctgaggagcatctcagagaagtgagagtaaatctgagttagcttaaacattggtagggaggaagaaaatctctgcaaataatganttttatgtttgttggccaaagtgaaatgatctatcattgtgtttggg

SEQ ID NO: 408871 - DNA, 531 bp, Homo Sapiens
  misc_feature (55)..(343): n is a, c, g, or t
  misc_feature (411)..(419): n is a, c, g, or t
  misc_feature (443)..(443): n is a, c, g, or t
  misc_feature (468)..(468): n is a, c, g, or t
  misc_feature (479)..(479): n is a, c, g, or t
aaagtctgtttccatggcctatagacttggagtaccttaaaatgttacctatggnnnnnnnnnnnnnnnnnnnnnnnnnnnnnnnnnnnnnnnnnnnnnnnnnnnnnnnnnnnnnnnnnnnnnnnnnnnnnnnnnnnnnnnnnnnnnnnnnnnnnnnnnnnnnnnnnnnnnnnnnnnnnnnnnnnnnnnnnnnnnnnnnnnnnnnnnnnnnnnnnnnnnnnnnnnnnnnnnnnnnnnnnnnnnnnnnnnnnnnnnnnnnnnnnnnnnnnnnnnnnnnnnnnnnnnnnnnnnnnnnnnnnnnnnnnnnnnnnnnnnnnnnnnnnnnnnnnnnnnnnnnnnnnnngacaaatgcataaataactaaaaattacctatggaatggaaatatttctgattcaccacccgattacnnnnnnnnngttaaaagaagcttgaaagggtancttgggaaagacagaatgaatgccnctggacttcanttaaccaaccaaaaagctgggtggcaatggaaaaaaaggcgcgggcctggtc

SEQ ID NO: 408872 - DNA, 812 bp, Homo Sapiens
  misc_feature (76)..(373): n is a, c, g, or t
  misc_feature (375)..(385): n is a, c, g, or t
  misc_feature (459)..(519): n is a, c, g, or t
  misc_feature (749)..(750): n is a, c, g, or t
  misc_feature (771)..(771): n is a, c, g, or t
tgatggcaaatatcacgtttaagcctgagtctcttatgttgcagttaaataaaagaactatgtaagatgatttttnnnnnnnnnnnnnnnnnnnnnnnnnnnnnnnnnnnnnnnnnnnnnnnnnnnnnnnnnnnnnnnnnnnnnnnnnnnnnnnnnnnnnnnnnnnnnnnnnnnnnnnnnnnnnnnnnnnnnnnnnnnnnnnnnnnnnnnnnnnnnnnnnnnnnnnnnnnnnnnnnnnnnnnnnnnnnnnnnnnnnnnnnnnnnnnnnnnnnnnnnnnnnnnnnnnnnnnnnnnnnnnnnnnnnnnnnnnnnnnnnnnnnnnnnnnnnnnnnnnnnnnnnnnnnnnnnnnnnnnnnnnnnnnnnnnnnnnnnncnnnnnnnnnnnctcaagcaaatgaagttcataataataggggatgttgataaaacttgtggcagccttccaattcatttacagtnnnnnnnnnnnnnnnnnnnnnnnnnnnnnnnnnnnnnnnnnnnnnnnnnnnnnnnnnnnnnccatacagtctgtatgtaaagtctggttttcattaagctgtggccagtatttgccactacaacagaaacacactgtcacacttgctagaatataactgtacttgggcttctcctttcctgtgaagtagtgctgggctttctagagtttaattctcaagtggcacaagatagcagagcccatgcattttaatggctgagactgctaagagtgaacctaaacacttcacagnngcagagagaaatgaaaaagtnattacatgctattagcattgagaaatggggacaaattaatt

SEQ ID NO: 408873 - DNA, 449 bp, Homo Sapiens
  misc_feature (75)..(75): n is a, c, g, or t
gtccgcagtcattcacctggttcttaaggccagctagatttcggggttatctccatcctggaggctgcgtggacnccttctggaagcacgcatcccatgtcctctggggagtagtagaggttggtgtgtatgtatgtctgtctccgcatgcctcagattattgcttcctaataaaattctgatagctgggccccatcaatatctcaaatacatgtgaggaaatgttaatttagaatcaattttaggatgtttcagactgtaaagtccttttaactagatctctggcgaagatgtagaagcactttatgggactgtaaatttcatgttgaacagtcttcgtgaaatacacatctctcctacacacaagctgttctctccatatcaatcatggcccctgcaagtaatgtttcacaaatattctgtaaatcacagaaaactccatgataatg

SEQ ID NO: 408874 - DNA, 212 bp, Homo Sapiens
caaaataacctttatttttgatacaaaaataaagatgctaactcctttagctcaatttcccacaataacctttaaaatagcaacagattcagtctcaaaaattgcttttcatttgtagtggaaaatgaaagtggagaacatggaacagcaatatttgtgctcttctcataggatgcagttacacacacatatgactggaatcacttcagagt

SEQ ID NO: 408875 - DNA, 401 bp, Homo Sapiens
  misc_feature (129)..(183): n is a, c, g, or t
  misc_feature (317)..(317): n is a, c, g, or t
  misc_feature (371)..(371): n is a, c, g, or t
acacaaacagcaaaatcaaaccacaagtgtgttagtgggaatgacccatcttaaatagaatgtaaatgcaaatatgcatgagatgcataatttggtaagatgttttggtaatgcctgcagagttactgnnnnnnnnnnnnnnnnnnnnnnnnnnnnnnnnnnnnnnnnnnnnnnnnnnnnnnncagtctgtgttcatgtctaactcatacataatagtgcatgaaacagcaacatactgaaatagagtaaatggcctaatgaggaacattaatgaaacacttaaggttaagtgattataggggatgtgtgttttccntgtctgttttgatgggcacagttgcagccatctataggtatcactgattgggcnaggactattcgtgtgcatcatgtgtggctc

SEQ ID NO: 408876 - DNA, 328 bp, Homo Sapiens
  misc_feature (196)..(196): n is a, c, g, or t
aggagttgggggcagaggggggaggatgagagaattttccatgtaactccttttccttaagaaaaagaagcaaaaatccctcatgcagtgccatctgactttatggtgtttcacattatatagttactttttttaataaacgcataagattaactcttcctgcaacccaaggtggatacttggatgtttgattttnatttatttatttattttttggggcagtctctctctgttgcccaggctggagtgatgcgtgatttctgctcactgcagtctctcccacccgggttcaagcgattcttcctgcctcagcctcccaagtagctag

SEQ ID NO: 408877 - DNA, 161 bp, Homo Sapiens
caatataagaaataaatgtgatgatcatgtaaaatgtgaaaaattgaaagcattccagcaaaataagaattttttatatatcttgttttttaagatgtatatgttaaaaaaagagaaggtcgcattatggacagacttcctgaatgggaatgtgcttacaa

SEQ ID NO: 408878 - DNA, 676 bp, Homo Sapiens
  misc_feature (125)..(133): n is a, c, g, or t
  misc_feature (208)..(209): n is a, c, g, or t
  misc_feature (216)..(217): n is a, c, g, or t
  misc_feature (233)..(233): n is a, c, g, or t
  misc_feature (243)..(243): n is a, c, g, or t
  misc_feature (250)..(258): n is a, c, g, or t
  misc_feature (271)..(271): n is a, c, g, or t
  misc_feature (274)..(274): n is a, c, g, or t
  misc_feature (295)..(296): n is a, c, g, or t
  misc_feature (305)..(306): n is a, c, g, or t
  misc_feature (315)..(315): n is a, c, g, or t
  misc_feature (320)..(320): n is a, c, g, or t
  misc_feature (324)..(325): n is a, c, g, or t
  misc_feature (327)..(327): n is a, c, g, or t
  misc_feature (336)..(336): n is a, c, g, or t
  misc_feature (343)..(343): n is a, c, g, or t
  misc_feature (391)..(391): n is a, c, g, or t
  misc_feature (395)..(395): n is a, c, g, or t
  misc_feature (412)..(413): n is a, c, g, or t
  misc_feature (454)..(455): n is a, c, g, or t
  misc_feature (459)..(459): n is a, c, g, or t
  misc_feature (479)..(479): n is a, c, g, or t
  misc_feature (504)..(504): n is a, c, g, or t
  misc_feature (534)..(534): n is a, c, g, or t
  misc_feature (537)..(537): n is a, c, g, or t
  misc_feature (547)..(548): n is a, c, g, or t
  misc_feature (551)..(551): n is a, c, g, or t
  misc_feature (572)..(573): n is a, c, g, or t
  misc_feature (591)..(592): n is a, c, g, or t
  misc_feature (606)..(606): n is a, c, g, or t
  misc_feature (639)..(639): n is a, c, g, or t
  misc_feature (654)..(654): n is a, c, g, or t
gtcgtacgcttagggggccgtggttggtacttcgctgttkgggaggctttcaggtcgcccagatcctgcttcccaatgggtgactgggaaaattagcgggtggaaaatctcgaggggtggaggcnnnnnnnnncctccttggccccgccctcttcctgttcggcgacttghacccctggccctactahggggaaggvaggckttgccnngctatcnnaaawcdctgtgccacnctccawcccnattycgnnnnnnnnnktycacgcgcacnccnckcctgckcttaaaaaaccknnkaaagaccnntgkgckaanaaatnatcnngnaaaacatantcccctntckkkkgcaccaaacactccccacttttccctgactctccccccccanccancagcctttkccaaaaanncttttttccataccckckgkkcgkkkkcackgcaggaccanncacnaaaaktaaaacaaaatgaanatktkktcttaatctcataaaacantgtktgttgtggatcactgcccttatatgncanaatcktgcanncancatttctattkkaakakacknntaaaaaakaaaacccaannaatcaktccktkgncccccatatctaaakcakkgkksackkgckcankakaakckkccaggnaagaggggaaaagaaggkagga

SEQ ID NO: 408879 - DNA, 1010 bp, Homo Sapiens
  misc_feature (48)..(48): n is a, c, g, or t
  misc_feature (250)..(250): n is a, c, g, or t
sgagcacagcgagagtkcgcagakgcctttktrcgtcttttaaggktngakatttttvatcaagagascacagcggaatcctatattaggavagastcttccctgtagaggsgtcagtgatcgcmtggkgagccgggggcttgggkggcagagggctccaagaatagttaagataccttttatgargtcaactgcttacatttacaagtkgatcatgaaaacatcagtragamacaaaaacatttccggngctctcggcatgaggggtkggkatckggggggtggcaagttataatagkgggggkkckgcgagagattaaatagtataaagrrtattagtrtgcsttcggctggcagagataggactgggcacgatgaggaaaaggkcagarataagagaggatgcagatttgctcaaaggctgctrcccagcagtcccatgcccaccccattcctaagctcttccccaagcatactcttcatatgcattggkgaggggccaggtccctgggggtcccagagacacaaagttaagggtaggggaaagttcagccccacactcccatcacactttgtagggctttctccctccagtctgggggtccccacaaatgcccaagatggtggaaacagtcamatggatttctaagagaccacatgacatgctgggagwtgmagatcactgtccwcarctcgcattatttgaactcagggcagtgaccatgawcactgctgctgmtcagaagagcwwtaatttacwmaatgactcamaaatggggaaaagtggaaagcatgcatagtttcagaatcaragataggatggcmarcacarggtcccctgacctcggcactattggcatttwarrgvaggataatwmttatttgccsggggcggmcagtacatwgtaggrtrwtcggtggsatmctggrctccaccatgrratamaawagmgwyccaaaaghgdaagathaaaaadkttcmaaattgbkgtggcmccgccttcttggga

SEQ ID NO: 408880 - DNA, 674 bp, Homo Sapiens
  misc_feature (61)..(61): n is a, c, g, or t
  misc_feature (64)..(64): n is a, c, g, or t
  misc_feature (78)..(79): n is a, c, g, or t
  misc_feature (81)..(81): n is a, c, g, or t
  misc_feature (85)..(85): n is a, c, g, or t
  misc_feature (89)..(89): n is a, c, g, or t
  misc_feature (93)..(93): n is a, c, g, or t
  misc_feature (99)..(99): n is a, c, g, or t
  misc_feature (118)..(118): n is a, c, g, or t
  misc_feature (121)..(122): n is a, c, g, or t
  misc_feature (126)..(126): n is a, c, g, or t
  misc_feature (138)..(138): n is a, c, g, or t
  misc_feature (141)..(141): n is a, c, g, or t
  misc_feature (146)..(146): n is a, c, g, or t
  misc_feature (151)..(151): n is a, c, g, or t
  misc_feature (164)..(164): n is a, c, g, or t
  misc_feature (172)..(172): n is a, c, g, or t
  misc_feature (178)..(178): n is a, c, g, or t
  misc_feature (250)..(250): n is a, c, g, or t
  misc_feature (279)..(279): n is a, c, g, or t
  misc_feature (283)..(283): n is a, c, g, or t
  misc_feature (287)..(287): n is a, c, g, or t
  misc_feature (297)..(297): n is a, c, g, or t
  misc_feature (310)..(310): n is a, c, g, or t
  misc_feature (319)..(319): n is a, c, g, or t
  misc_feature (326)..(326): n is a, c, g, or t
  misc_feature (333)..(333): n is a, c, g, or t
  misc_feature (335)..(335): n is a, c, g, or t
  misc_feature (344)..(344): n is a, c, g, or t
  misc_feature (347)..(348): n is a, c, g, or t
  misc_feature (357)..(357): n is a, c, g, or t
  misc_feature (383)..(383): n is a, c, g, or t
  misc_feature (408)..(408): n is a, c, g, or t
  misc_feature (410)..(411): n is a, c, g, or t
  misc_feature (414)..(414): n is a, c, g, or t
  misc_feature (422)..(422): n is a, c, g, or t
  misc_feature (432)..(432): n is a, c, g, or t
  misc_feature (456)..(456): n is a, c, g, or t
  misc_feature (470)..(470): n is a, c, g, or t
  misc_feature (490)..(490): n is a, c, g, or t
  misc_feature (515)..(515): n is a, c, g, or t
cagggagggatggktgcdagakgggattccaggatctaaaagatccttgaaactctggatntantctcaagaaacaanntncctnaganaatntggatntgggggaaatggtggtgtnagnnaatntcctttagaganccnaaagnaaaancagtttggggttncctgaaanctacanaaaatgtggaaatgaagagtttggcaatggtgagtagatccctttgggaagctggtaagtccctgttctacntaactagactgctctgaagcagagcttgntcantagnggccattcgnaggctcaaagggnaagtgtggnaggcagnaaaaagnantattagagncannagtagaaantagagggaatatggggtttatccaanagataaaattgccttaaaaagtttncnnggnacagatgncttagacttncatggtgttttaaagtttgaaagnaaacaagagtgtgnttttataaataaaatgtatnagccaatctaaccaagaagtttggnaaagatcasacttcctsttgsggaaastattcagagcccaarthtasrarasaaggggtgcttttgtgttaagaaaagcthcaaagtgttagscagtttkagacchygasatcctgcwgaytaagaaagtagaagagggaayctactggstctgtcasg

SEQ ID NO: 408881 - DNA, 810 bp, Homo Sapiens
  misc_feature (259)..(267): n is a, c, g, or t
aggrggtagaramggggtttcacatgtvgccgagggtksgkggggggrggggtttgcaaagtrctgggattacaggcawgaaccgcmgcacacaccacttgtatctcctatggsmgtgtcaagcagcagcagggcggtgggaacagctgcacctgcactgtggcagctcggagggctccctgasgtccaggvggaggctttctcaagtgtgggtgcgttgggtgcgaggsrggggggsctsgscagctcccgtsgtgtnnnnnnnnncccaggatggttcctcaccaccgggtggrgatgtsctgrgsscctgsgcactgsgccctaacattactgactctaaacsagarcccagtgcscacsctgtbmtcaacgtcctcaccccacggcattctgagtgagggaggcscagggbcacccactccctggactcacttytgtbcccccgagagaccttgcbcgggacatgtacccacctatgcyctctactgcycacctcagccctgtgggacccagtggtgttgtggggagtcctyacggccagctaaggacaggatggtgatgagggggaggggaacgaggggcacctggttttggttcatgatgcttccaaatttttcagggcctcctywgakcytggataccgctgcatggtagggtgggtgtagcttgctagctacatgttctctgctccatccctcgctggaaatgcctgtcccgatatggcccacgggtcctgctgttgcccctcaccatgctccctgatgtgtccaggctggcctgggggtcgtgctacctgaggcggcagag

SEQ ID NO: 408882 - DNA, 977 bp, Homo Sapiens
  misc_feature (42)..(102): n is a, c, g, or t
  misc_feature (189)..(208): n is a, c, g, or t
agtcgacggtaccggacatatgcccgggaattcggccattannnnnnnnnnnnnnnnnnnnnnnnnnnnnnnnnnnnnnnnnnnnnnnnnnnnnnnnnnnnnatggtggccgcgtttgcacccccgccctagtgcatgtcccgctggaatcgttccacgaccgctccccctcccacccgcgggacaaannnnnnnnnnnnnnnnnnnncgcaaccccccagcgcgtgaccctttcccccggtacttgcgcacgtcgcacaagcccccaatccacccggcgggcaactggtccggccgccccaagccgagttgccggggcacgggtgttgttgggggggccccgaaaaggttaggaaggcaagggcacacgccgccgcaacaggggttggaacccttccttccttaccgtggggaacgtgtggggggcaggtttcccccctggaagcctggctttttcttttaagggcccttggcatgttgtcccgcgactcgagacggagggtcctacccccctttcaagggcttagggtgctcccctggggttcagggagacccctttgggggcgacaccacaccaaatttgagcgggttcacggctcccttttcctttcggattacccagggagccagccgtcccccaggtgcattttctcccccgagggtaccttaagggcgggctggacccccttggccctttgagtcctgaggggaccccagggagtttgtgacggccaaggcgcgctttggcctcacagtcgtggggttcggggtcccttctcccttaaggacaagggttcacggccgagagggcccctctgtgtttaattaccccgcccaaggggtggaccctcagggtcacttgggtctcccattggtgcagccgctttgtcagtgcctaggcctcggtgtgggtcggaagacgcgctattgccgggattggcgcatgcgggggagccttggtcttcttatggacctgg

SEQ ID NO: 408883 - DNA, 837 bp, Homo Sapiens
  misc_feature (87)..(90): n is a, c, g, or t
  misc_feature (228)..(320): n is a, c, g, or t
  misc_feature (518)..(574): n is a, c, g, or t
  misc_feature (585)..(605): n is a, c, g, or t
  misc_feature (662)..(672): n is a, c, g, or t
cacacagccccaaagcaacgaccgcagacgtatgccaccctcaataaacaatgtattaacgaaacacaaaccgacgagcacacctannnnactggtacggtccggaatttcggatatactctgtcttgtacgtttgttctgcttctctttaatattgtatcaacgccaggaaaggggggtgaaaagcctcttttaccccccaaataaattgtcacattccgaagctgnnnnnnnnnnnnnnnnnnnnnnnnnnnnnnnnnnnnnnnnnnnnnnnnnnnnnnnnnnnnnnnnnnnnnnnnnnnnnnnnnnnnnnnnnnnnncgggggggcccttaaaaaaacccctccgggggcccgaattaaaccccaccccctttttttgcccaaagggcccccccaaagggggttataaaaaaataggggccgggccgggctttaaaaaacttgggagggggaaaagcgccacgcggggacttttggaaaaaaaccctaattccggggggggacccaatgggacannnnnnnnnnnnnnnnnnnnnnnnnnnnnnnnnnnnnnnnnnnnnnnnnnnnnnnnngggccacacannnnnnnnnnnnnnnnnnnnngccttttaaaaaaacctccctccccggggggaggcctttaggaaaaacattatactnnnnnnnnnnnaaagaatttacaaaccgggggcggggcctttttaaaaatcggagggcccccaggggtattttttagggggccctcaaatccccccaaaaaattggcttcccggcgccccaaaaccccgcgcaaaaacaccaattgtgggaaggggggggatcccccctcgtgttt

SEQ ID NO: 408884 - DNA, 367 bp, Homo Sapiens
  misc_feature (296)..(321): n is a, c, g, or t
  misc_feature (349)..(349): n is a, c, g, or t
cattttttaaaattttattactgtttaccaatggggagatgcagtttatttacaccagcagccataggggaaaggggaatacagttaatcagctatctgtataggatggactacttatgcaaaaataaaaatctccaaaacaaaggacagtggtgagcttcactaccctcccccgatgatcccagcatgcgataatgccaggcagtggtccctgggcatgcgatggtgggaactaatgtatggaagaaaaagccacaaaccacagaaattttaaagaacccccccttcccccatannnnnnnnnnnnnnnnnnnnnnnnnntcagatacataataggattgcagggtgntcaatacacataatcaag

SEQ ID NO: 408885 - DNA, 466 bp, Homo Sapiens
  misc_feature (317)..(317): n is a, c, g, or t
  misc_feature (379)..(379): n is a, c, g, or t
  misc_feature (384)..(384): n is a, c, g, or t
  misc_feature (404)..(404): n is a, c, g, or t
  misc_feature (427)..(427): n is a, c, g, or t
  misc_feature (437)..(437): n is a, c, g, or t
  misc_feature (449)..(449): n is a, c, g, or t
ttcccatttgttagcatcatgattgtgctgctgagttttaaaagattgtgctatttgaatatctcaggatcaatttctattttgtgtagtctattaatcaaatatttatcgagaacatttatatgccagactgtgctggagtcatagaatgtaatggttggcagaatctagtaaaaagaaaaagattgagcaaactcctgaatttgcaattttgaatgctttatctccaccttctatcaactgctttgagtaaataaaatttggaagtccacattcttccctaacttctgaaagccagcatagcatggtggccaganccagatttggagccagggtgccagtgccttggttccagctccatcacttctagttgaatgantgggnaagtacttccgtgctcgttntcacagtaaatggagcagtacantgcttttcanggtgtgtaggtnctgaattcaatagtaag

SEQ ID NO: 408886 - DNA, 609 bp, Homo Sapiens
agactcaactggtgacagcttttggctatagagaatgaaactgcttccctttggcggtggaactcttaaacttcgaagagtgaaagaatacaatgaaataaaatgccataagatcactggatttttcagaaaaaggaagaccccaaattactcccaaaatgaggctttgtaaattcttgttaaaaatctttaaatctcgaatttccccctacaacatctgatgagtgctttaagagcaaacgagcaaatcccacctcgagaatcaacaaacccaagctctggccaaggctctccccgcgttttcttctcgtgacctggggaatgtcccgccccatcgctcacctggctcttgtcatctcgctcatcttgaagtgacccgtggacaatgctgctccccgccgcagctccgccggtcactcaggcagaacggggtatgcaaatggcctggagaggccgaggccgaacactgcgcccattgtcccgggcgctcaaagcgccgagcagctgcgcagactttctgggctcggaccctcggccgccacgctaatgtcatcattgcaaaacatcagattttgagaactatgcagtctgaattcattagcagccttc

SEQ ID NO: 408887 - DNA, 401 bp, Homo Sapiens
  misc_feature (323)..(323): n is a, c, g, or t
  misc_feature (337)..(337): n is a, c, g, or t
  misc_feature (339)..(339): n is a, c, g, or t
  misc_feature (344)..(344): n is a, c, g, or t
  misc_feature (348)..(348): n is a, c, g, or t
aaccgcgcgggtgtccctcgccagccggccctctggkaacagggcgggggcgacaccccagggagtagggctgaggaccgcaaaaatcaatcgtgggtaccggcgcggggtcacgcatagragaggagcvggaramgggccggtgggggccccagggcggctgaggccgtggctctgtctgtggactcggcgggcgccccgaagtctggggccgccacggctccagctccgccggctccggccggagactccaggccgcagtttctcctcctcccggcgccttctctccagtgaggagctgagcgcgggcrgcgcrgrgrgangggtgtcttcggananaacanccanttgtttaaaawccttctagagcagtttctaattccccccttgcgcccgggttc

SEQ ID NO: 408888 - DNA, 630 bp, Homo Sapiens
  misc_feature (368)..(394): n is a, c, g, or t
atgagtcaatctggcccgatgaggtaactctaggccggatgagtaaatctggccgcatgagtaaatctgggcccgatgagtaaatctgggccgatgagtacatcttaggctctccacaaaaggcattcgaaatctgtatttcctaattgttcgagaaacataaaagaaattttgggagatgccgcagttcaaatatgacaagactctaaggcgaaaaactggatattaaaggtttcagaaaaactagttgacgaggagaacagagaaggcgggtcttgtgatctagagctagacaccagctaatatctggggtagtcaactacttgatagagtggctttgtcatctatcagtggagacagaaagtttnnnnnnnnnnnnnnnnnnnnnnnnnnncagtggaaagaaggtgcaggcagagttgctggtgttatcaagggtgtgggagtggaggttactttcctttctgagttaacacttgatgttttggagcagtggcattgtaaagtgtcctaggaaaaagtccagtctagaaaggacagattaggggaatgaaaagcaggagttggttgaattttacaagatgaggttcttagggggcttagggtaataaaactcagaatgcaatagcc

SEQ ID NO: 408889 - DNA, 906 bp, Homo Sapiens
gtcccttgtcagatatatacattgtattttctcccactctgcaggttgcctttttactcttgctgtgcagaagtgttttagtttaattaggtcccatttatttatttttgttgcatttgcctttgggttcttggtcatgaattctttaagtcaatgtctagagtagttttttttgatgttatcttctagaatttttatggtttcaagtgttagatttaagtttgacccatcttgagttaatttttgtataaggtgagagatgaggattcagggactaacaggtatttgacactgtccccatcattctcaacatttattttgacctcacatggttttcattagcaacacatgcccatgaataacatcttgtttccctgcagtggctaccacctggggatataaaagcattccttatactcaggaagtcatatcagtttcctggagtggcaatggaaaggagatggggtagaggatgcagagacgggcaggaccatgtgagatggaactgtgtagtttgaccctacccccatcctagttgggaatcactactctctataggtgtgagtgaacaaaaaagataagaatgaataagcaaaatatttgactgaaagacaggttgtccctgatgacgacttataacaatcatttatgatgtatttttgttattgtgtttctttaaaagaaatgtttgccttctgggacacattaatatcacccggaaacagcctcattcatggtgagttaaggtctatgatttttaaaaatataccatgaaggaataatacaccatgaaggaatgctttcttggttttaattagtgaatccagtgagtgtttattgacaggttgaaaatggagaaatatttagaatgaatgactaaaaatttggaaagttaattagcatatc

SEQ ID NO: 408890 - DNA, 694 bp, Homo Sapiens
  misc_feature (306)..(319): n is a, c, g, or t
  misc_feature (451)..(508): n is a, c, g, or t
  misc_feature (658)..(658): n is a, c, g, or t
gagcaaatttcaaatctacttttagttctttaaggaatctgcatatttttttccataccagcagggtaaaagtgttcccttttcaccacagccatgccaacatctattatttttggattttttaattatgaccattcttgcagaagtaaggtggtattgcactgtggttttgatttgcatttccctgataattagtgatactgagcattttatatgtttgttggccatgtgtatatcttcttttgataattgtctatttatgtccttagccaactttttgatgtgattatttgtatttggttggannnnnnnnnnnnnngtcttgtgatttgtttgattgccttgtagattctggatattattcctttgttgaatgcttcgtttgtgaagattttctcccactctgagggttctgtttactctgctgattatttcttttgcggtatagaannnnnnnnnnnnnnnnnnnnnnnnnnnnnnnnnnnnnnnnnnnnnnnnnnnnnnnnnngggttcttggtcatgaagtctttgcctaagccaatgtttagaagggtttttctgatgttaccttctagaatggttacagtttcaggtctcagattttctttgatccatattgaattgatgtttggataaggtgagagattaggatctagnttcattctcctacatgtgtcttgccttatcccgcct

SEQ ID NO: 408891 - DNA, 321 bp, Homo Sapiens
gtatcagggcaacaccacacactgcagaggggcagggctcctccggcagttactcacttcccttgaaacagaagctcaaacatggagtagtcttctgtgactaaacttgttttccgccctcccaacttccaggaagaaccttcttctgaataggatttgaggtaacttaggaaactgctctcaatacggaattttaaagttggtgaggaagtcgacagaaggggaagtcacggtaggaaaatcaaggtactatcaggatgaagtcagcacgcagagcaaggccagcgaggcccaggcgccaggccttggtccctgcccacc

SEQ ID NO: 408892 - DNA, 396 bp, Homo Sapiens
aaaaccgctaaaggccaaagaggctttgaaaccatgggaataacatgtgtctgggccttgttactttggtctaccaaataatgtggctacagagcattgtaaaggatttgtgttcttttgcagcaaatggtgatgtgggtagcctttgagtgtgttctttatgagatcagaagttacctggagataacaaaggtcccaacagatgttccatgctggcctgtttcttctagcagctcttgcttctattgccctaagaaagaagcctgagtccagctggctttgtttgggatatgttacagaggactagaacctcttcctgtgcacatgaggatgtatttgggggactgaggtggagtaaaggtcctaatttgtggctgaattaatcttccattttta

SEQ ID NO: 408893 - DNA, 211 bp, Homo Sapiens
tagaggatcccgcctaagtggacactgcgtccgcacaggccaagtgggggaagctcttttcggggacagtccgcctcaatctaaggaatctagatacctggtcactctgtcccttcagaggatgttgagggtcacattctgcacactgagagaaggctcaggggacagccgccgtgcgacccccgatactggtgctggcgggccgggagcc

SEQ ID NO: 408894 - DNA, 318 bp, Homo Sapiens
gcagaagggtaaggatgaacctctccctcctttgccgctttagctttagctggcaaacaaacctgctctgtaacctcttctgttacttcgttatactccccttcctcctcatcatcagtgtgggttccaaggtggaatgaaccagagtccacccttgtcccattgttaccttgatgcctccgagctccccttcttactgaccatggggactgctttaagagtactcgggtgtcctccagcttagttccacgttctccaactgtcgctctggtgatccttcgacctggattcgagcccccacgtatgggcgctgcttgc

SEQ ID NO: 408895 - DNA, 822 bp, Homo Sapiens
  misc_feature (117)..(117): n is a, c, g, or t
  misc_feature (140)..(140): n is a, c, g, or t
  misc_feature (614)..(615): n is a, c, g, or t
  misc_feature (622)..(622): n is a, c, g, or t
atkttmataaaaarkgtgtgttgkktttaaasagttgattggtagrgcttcagtttctgcctcaattaaaaccmattgccgcatattcacacagcaacatggtyggmgctgaagtanaggagctaaraammaggaggacnagagwgtccctttttatggtyagttggttwgttgahtttwttwtggggaraawaagacgaaagtwawtwgggttggttwatakgtgtkttggkgdggttgaktggkggkggggcaggtgtttgtkttgggtgaggkttttggaakgggkggtggktttkrttsstgagtttgtgggtrgttgtgkggggggtttaggtgaatggtgttaktkgtggatarkwsgggtgtggggttggtrrtgkgkcyaaggggcgtatsccgttgcgaagggtctgggttgtggtgtacggagagggtkactggtgtctaggctggatagggagcaacaaatyagtttaaaaccccaaatgttctgacgttttctgagagcayttwcwtttrccyctgaattytagcagctatttgttttttaaacrsycagtactgarwtwwtwtccaaagatwgtwttgtdatgtactcyttttgctgtttnntgtkgtnttgttttttttdygaggttccctctctttagctaaaaatcacaaaacattaaacaatggaaaaagccctcccctcagttcttgctaattgaggtgtccgtgatttacaaaaaaagagttccttaaacactgcaggattcttatttttttaatataatttatcttgctgagatagcaagtcaagtttataaagaagatgca

SEQ ID NO: 408896 - DNA, 451 bp, Homo Sapiens
  misc_feature (356)..(356): n is a, c, g, or t
  misc_feature (375)..(375): n is a, c, g, or t
  misc_feature (386)..(386): n is a, c, g, or t
  misc_feature (396)..(407): n is a, c, g, or t
  misc_feature (412)..(412): n is a, c, g, or t
gctgggtgtttcttccaagtctttgttcaaaatgccaagaacctaaacaacttgcagtcaagaccctctactggtaacatattctggtgagctagccaggagagaaggtaggcccaaagtttgggatttctttttctcctttccccttttacatacagggaaatcttcctctctccatcttttcctttccaactgaggaccctcagtggacagcacctaagcacaaagacacttgcaagtttctggccagggccattctctggtgaaactggaaggtttccgtgtggaagtgcctaactgccaccgcttggttaaggtgaggaacctgagtccttttcctcgtttttgggtttttnccttgggggaaaaggggtncccccccttanaaaatttccnnnnnnnnnnnncgagnattttcctttctccttttcagtctttcagcggccgtttc

SEQ ID NO: 408897 - DNA, 1022 bp, Homo Sapiens
  misc_feature (41)..(219): n is a, c, g, or t
  misc_feature (297)..(297): n is a, c, g, or t
  misc_feature (426)..(426): n is a, c, g, or t
  misc_feature (432)..(432): n is a, c, g, or t
gatcgagcggcggcggcaagcwggctgcgagcagctgagcnnnnnnnnnnnnnnnnnnnnnnnnnnnnnnnnnnnnnnnnnnnnnnnnnnnnnnnnnnnnnnnnnnnnnnnnnnnnnnnnnnnnnnnnnnnnnnnnnnnnnnnnnnnnnnnnnnnnnnnnnnnnnnnnnnnnnnnnnnnnnnnnnnnnnnnnnnnnnnnnnnnnnnnnnnnnnnnnnnnaaarcaaccatggaagacctgggggaaaacaccatggttttatccaccctgagatctttgaacaacttcatctctcancgtgtbgagggaggctctggactggatatttctacctcggccccaggttctctgcagatgcagtaccagcagagcatgcagctggaggaaagagcagagcagatccgttcgaagtcccacctcatctanttggwncgtgtgtaaaagctgawggagctgaggcacatgagggckctagyggagcgggagagakcagccagcaccatkgccatgaaccacgtrctggttgtcgaccgttatcakgagtctctgaygckcattckgcagcttcaggtgcgggagkccgtkgcggagtatawgacgcaggakcagcytgttcgcatcaggcagagrcatcataacsgggattttgtcwgyaagwtgcakcgcgwgaawgatgacagacgggccagkctgggcgagaccaayaacgcwymgaagggggaggatcbcggaaccgtaggkkagtgtgacggaccaggwkatgckggtgaagcgtcctggagacggagaagcaggagcsgyaggattasctgtacccgcaayacaaaaaaagtyatgaagccaatcagmaaaaccmagtamcccamtccagccaagaagcaagagcatactacgagcggyagattaaggrtccggagcagatgtcggcccckcaagagcatgatgtagcgagtgwgattatmwtaaggcgyrccggttcggscccctaggcggatcggwgccgagmgmctsgggaggragcg

SEQ ID NO: 408898 - DNA, 718 bp, Homo Sapiens
  misc_feature (413)..(413): n is a, c, g, or t
  misc_feature (420)..(420): n is a, c, g, or t
ccatcactgatttactgatttaagctagccaaactgtaagaaacaagccatctattttaaagctatccagggcttaacctatatgaactctatttatcatgtctaatgcatgtgattgaatgtatgtttaatttgatatcatgttttaaaatatcctacttctggtagccatttaattcctccccctacccccaaataaatcaggcatgcaggakgcctkagatttaktaatktcattktktttkaccttkaaggaaaatgckattagtccgtcgtkctttatttktttttktccttkaataakcatkttatktatattktctcgtgtttttatttttacaccatattgtattacacttttagtattcaccagcataatcactktctkcctaaratatkcaactstttkcatnacaatankaagtaaagttctatgaagtatkcattttktktaactaatktaaaaacacaaattttataadattttacatttttttaawwwytwctcacaactatcatatttcttaawtttatcaatctcttctttaattaaattccttwwatatatataattwactttcatttttaatatctactaaattwatawttacttcawtawtatcawtaatttccacaatttccttaaststwattssttttstttbcaatttctattctttttctcttttamaaactttaatttttctatttataaaat

SEQ ID NO: 408899 - DNA, 284 bp, Homo Sapiens
  misc_feature (134)..(172): n is a, c, g, or t
  misc_feature (197)..(197): n is a, c, g, or t
  misc_feature (209)..(209): n is a, c, g, or t
  misc_feature (229)..(229): n is a, c, g, or t
cagtttaataaatactttattttataaatcaggtcaatacacatacccatccaacaatacatacaaattcggcctaattatttaaattcaactccacataaaattaaggtattacaaaacatttttctggtaannnnnnnnnnnnnnnnnnnnnnnnnnnnnnnnnnnnnnntatgtgttaaatgtaaacatgaggntaaaatattttncaaatgagcactaaattaanttattcatttattagaatcttcaaaatgttcaagtctcatattccaatgtattat

SEQ ID NO: 408900 - DNA, 168 bp, Homo Sapiens
ataaaaggacaatttagaactgtgcagggacaatattcgtaacagaactatttaaacacccatgcaaaataaattaaaaatgctgtgagatttaaattaaactataggcaactttgttgggattaattatgtttaaaatgacgatggttgaactcaaattattgaacc

SEQ ID NO: 408901 - DNA, 102 bp, Homo Sapiens
agacaactgagaaacaggcaagtatattttgaagtgctaaaataaaacatatttatacaagtacaaagcaaaacaatgctgataaaaatgttaaactttatg

SEQ ID NO: 408902 - DNA, 1100 bp, Homo Sapiens
aatagatccaggagttatgaaaaagtagaacaaattagtttccatatactgaactccgtgtaaccaagaatcacattttggattggggaaaacacagtaaacacagtaccaaaaacacatgccactaataccacaaagacaaaaaccagctcgagtataggattgaactggctggtaacacagcttctagtgttactgccttaagaaccccacgagagcaccattgatagctcattaactgtcacattattgccttagggggggaaacaaggtcctctctcagtgcacatatgcataaggaaactctcaagaacccaaaggccatcactgtggaagggtgatttctatgttttcactgggtagaatacctggacatggtgagtagggcctggctgaacctgaggcattcagtataatcgtagcaaaggagcatcaggaacaaaaacaaaaaagcctcataagtaagagcatacatgaggttatcagccatctaacttgagaggatgacagaatactatacagggcatgatcaagtatagaaggcatgacaaaagactgatatccttatgagaccaactataaccaattgactgatcattacatttgatgaatgaccaaagagcagcatgcaatcgaccgaacctcaagcagtcttcagtattcacaagcccacaacaagcatacgaaggcgtatgctaaatatcgaacgattgttcacagtatatacccaataaactcaaacaaggaccctaacgtacatatacacagagaacataagcgtttatgactgggagacagcggcaaaaggcagataacgagcgtcgaaaaagaatctacccacaacaacgcatcagactcagaaggatcgattgaaagaagcaatgagaatgcaaaagagacaatatgaagacaataagaacagagaccggggagtcaggaagcgccatgtagggaccacaaagcgagcaatgtaaaagatagagagagaacagcaagcacgggacacagggtgaaacacggaaaaacccagacagaggcaacaaagaggaaaaggaaacacataagaggcaaccagcagacgacagcgaccccgaaacact

SEQ ID NO: 408903 - DNA, 218 bp, Homo Sapiens
  misc_feature (114)..(170): n is a, c, g, or t
  misc_feature (205)..(205): n is a, c, g, or t
caaacwcatytacttcttccagtatagatctggtgcttcctgaccaaaagatgagaaaacaatgttaaaaatatagatgctttccattgaaatggagtgaaaacatwtggttcnnnnnnnnnnnnnnnnnnnnnnnnnnnnnnnnnnnnnnnnnnnnnnnnnnnnnnnnnaccccttttatgcatatcmatagtatttataagangtgttctataaat

SEQ ID NO: 408904 - DNA, 338 bp, Homo Sapiens
atgcagtttaaatgaatggaatattttcctcttgtttagttgtatctgtttgtatttttctttgatgaatgattggtcatgaggcctcttgccacactccagaaatacgtgtgcggctgcttttaagaactatgtgtctggtcacttatttctctaaaattatctcattgcctggcaatcagtcttctcttgtatacttgtcctagcacattatgtacatgggaaatgtaaacaaatgtgaaggaggaccagaaaaattagttaatatttaaaaaaatgtattgtgcattttggcttcacatgtttaactttttttaagaaaaaagttgcatgaatgg

SEQ ID NO: 408905 - DNA, 977 bp, Homo Sapiens
  misc_feature (32)..(32): n is a, c, g, or t
  misc_feature (35)..(36): n is a, c, g, or t
  misc_feature (43)..(78): n is a, c, g, or t
  misc_feature (89)..(89): n is a, c, g, or t
  misc_feature (417)..(417): n is a, c, g, or t
  misc_feature (562)..(562): n is a, c, g, or t
  misc_feature (570)..(570): n is a, c, g, or t
  misc_feature (579)..(579): n is a, c, g, or t
  misc_feature (613)..(614): n is a, c, g, or t
  misc_feature (620)..(620): n is a, c, g, or t
  misc_feature (623)..(623): n is a, c, g, or t
  misc_feature (633)..(633): n is a, c, g, or t
  misc_feature (684)..(684): n is a, c, g, or t
  misc_feature (700)..(700): n is a, c, g, or t
attaaaaattgaaaacmatactactaacaatnaannacattcnnnnnnnnnnnnnnnnnnnnnnnnnnnnnnnnnnnnrmtcccctttnshcaatmccttctcaaacattacaactgkkkctcccagcacagcggcgcaccatgawctcggacgtggagcccaaggwatggagatykytctwkctttyyytgcttccccaccccaactacaccytttkkagaaaggatacgwggaaatacactgtcttcaatgctttkkgggctggkkkkktkctctggkaccaggkggkggggggagggcsgackgttcgkckckcttyctykgggatytytggttccccgacctacacaagcagcagcagcagcagcgagttctgcmaacgccgcagtagctgctcatgagaaaagtkcccacgntcccaaagccctcctgtttacatttcctagtggggcaaaratactttcccaggacaggcagcagagcagcggggcaaagtgcactctgggacccgggacagcaggttacacagggtcaggcggtggtgggtgctggaatcggggntgaggttntggaaatgncaccaggtgatgccaccctgtggtgtctgcccannaaaaancanaagaatcaankggttttccccttttggccctaaaccacctaacacctcagcggcatggganggcaattctcagcaangcaaggacatggggaaggctcctgggagaggcmgccgtccaccctcaagcctggctgtcacaggtggagscccsccccccccgtcaccacacctggggaagctgcacagaatgccacagcactggaaagggacactctgarggcagstycagcagcagctccaggacagcmrccggccttytgcccaggcgcccacgctgtgtctgtgcacgcatcttargtttccmvmaaccacttctgaataktttytcccaaasaaggaggactccsttagttc

SEQ ID NO: 408906 - DNA, 907 bp, Homo Sapiens
agcggatgtgctgtatctgaaagcataatgagaaaacgaattgtacttgttacgctacatgtctaaaactggatctgttggaggttagtgctgtgtactgttgatagttctgagtgtgcaggcctacggataactttataccaaagttttcacataggcagttaggcttttactgtaactatcaagacaagatgacagacaaactattggcatcgactgaaagccgataacatttggcctcatttggatttctttacccagttcacgagtgtaaacgaagttagactctcatgctttcattgtacctgcaggcctgtgggcattgtacagtagataacttaatttctaaaaagaacagctgccgtatccttcttcctaggtcaggtatatagtctgtcatacatcacgaagaacttcagtgattggcaaccaatacgaactcctggctctatgacactctttgacacttggttctagtatcattgagttaatatcactcagtatatattcttctgtattaagctcactttgggcgctcacttttacagcctgatcatacctttaggtcatcatcatcgttgacatataggtgtctatgggactattgaatgcaaggatccccgtattaacgttggaggccgcacgcaattgttgcgtgatgattgacgctatggaaccgtcaatttcttggctgagacaggggatgcaaattgagaggcaaaggggacatctgtgcaccattgggtcatcgggaaaaggtactacacagcaatggtgccccaaaggaggtaccaagtacacactggggacccaaactggcaagaaacggtaaacgagcagtgaacaatggcccatcggaagaatacgatacacagccagtgacaagcaaacacgaagcataagcata

SEQ ID NO: 408907 - DNA, 1385 bp, Homo Sapiens
  misc_feature (40)..(40): n is a, c, g, or t
  misc_feature (44)..(44): n is a, c, g, or t
  misc_feature (442)..(471): n is a, c, g, or t
  misc_feature (1070)..(1070): n is a, c, g, or t
  misc_feature (1112)..(1112): n is a, c, g, or t
  misc_feature (1127)..(1127): n is a, c, g, or t
tcccccgccctctaccccaccaaaagacgcgctcacgctntatnactgagggctgggtggcgaattccgcacgagggctggtctccgtccggtcgccgggcgtctaggtctccggccctccccagccgctcctgcgcccttggcggccccgccgcccgcagccctggcgctccctgcgggccccgccgaggccgcctgcgccctgtgccaccgcgcgccccggcaaccgccgccccgccactggggccaccgcctccgcccggcgggcgtggtgcccttccgggccgacgaggacggggccttcctgggccccgagcgcccccacgactgctgggagcgcgccatggagcgccggcaggcccccgctgacgcgccggcttctggcgctccacgaagcggcccgaggagaccccgcgcgacggcccgggccagcccgtccatnnnnnnnnnnnnnnnnnnnnnnnnnnnnnnacgcccggccccctctggcgcccgtccggctcgatcggatgctgcgacgatgatccccccccgagccgggcgaacccctccgccgacgacacgggcggccgccggggccgacggagacacgcgggggccgccgcgggacgcaccaagggacgaaagggcaggcggccaaggcaccgcccgcgggcaccaccgggatccgccccaacaacgcccagttcagggaggcgttgccccctggtgcggataggatgcccctcccggtacgggcgacccgtcaagcgaacggacacggccgcctcgggcgccgcgcccgtctaagccaaacccctccgccgggggtgcctccctcttcccgcgttcggcggcggcgggggagcgcccccttctccccgtgtgccttgcgataccgtgccgcgcacaagcgccggtaccggcgtggagaggagccgccacgccgccgacaccgcgagaccgcgagagatagcgcgctcggcggcgttccacgtgccggttcggcagttatacgcgcatcacccacgaccgcataacgcgaggccgatccgttaccgcccgcggaaggcgcttgactgacagtggcncgccgcggttatacgccttgaccggcgccgtcaccgcgacgngacgcgtccccgttntcccccccacgcacgcgaaaccgccgcccttcgccctgtacccatgacgcgaacccgtgcccgaatataatatagccgcgcgcgcgcgggtcaccacggtatgcccgtaaggtggacccgccggtgccgtattctgttctcccccggcagaccgattacgccgccagtagcgccaccccgctgtttcccggctcatagatgaatccgcgcggccgcgtcgctatccccctcaacaccacggtaaaacgcccacatact

SEQ ID NO: 408908 - DNA, 978 bp, Homo Sapiens
  misc_feature (139)..(139): n is a, c, g, or t
  misc_feature (152)..(152): n is a, c, g, or t
  misc_feature (154)..(155): n is a, c, g, or t
  misc_feature (164)..(164): n is a, c, g, or t
  misc_feature (182)..(182): n is a, c, g, or t
  misc_feature (204)..(205): n is a, c, g, or t
  misc_feature (209)..(209): n is a, c, g, or t
  misc_feature (211)..(211): n is a, c, g, or t
  misc_feature (214)..(214): n is a, c, g, or t
  misc_feature (219)..(219): n is a, c, g, or t
  misc_feature (222)..(225): n is a, c, g, or t
  misc_feature (235)..(236): n is a, c, g, or t
  misc_feature (239)..(239): n is a, c, g, or t
  misc_feature (241)..(241): n is a, c, g, or t
  misc_feature (246)..(247): n is a, c, g, or t
  misc_feature (249)..(249): n is a, c, g, or t
  misc_feature (267)..(267): n is a, c, g, or t
  misc_feature (269)..(269): n is a, c, g, or t
  misc_feature (280)..(281): n is a, c, g, or t
  misc_feature (286)..(287): n is a, c, g, or t
  misc_feature (311)..(311): n is a, c, g, or t
  misc_feature (323)..(323): n is a, c, g, or t
  misc_feature (326)..(326): n is a, c, g, or t
  misc_feature (332)..(332): n is a, c, g, or t
  misc_feature (350)..(351): n is a, c, g, or t
  misc_feature (421)..(422): n is a, c, g, or t
  misc_feature (424)..(424): n is a, c, g, or t
  misc_feature (427)..(427): n is a, c, g, or t
  misc_feature (429)..(429): n is a, c, g, or t
  misc_feature (441)..(441): n is a, c, g, or t
  misc_feature (443)..(445): n is a, c, g, or t
  misc_feature (451)..(451): n is a, c, g, or t
  misc_feature (461)..(462): n is a, c, g, or t
  misc_feature (474)..(474): n is a, c, g, or t
  misc_feature (486)..(486): n is a, c, g, or t
  misc_feature (520)..(520): n is a, c, g, or t
  misc_feature (522)..(522): n is a, c, g, or t
  misc_feature (526)..(527): n is a, c, g, or t
  misc_feature (533)..(535): n is a, c, g, or t
  misc_feature (541)..(541): n is a, c, g, or t
  misc_feature (543)..(544): n is a, c, g, or t
  misc_feature (556)..(556): n is a, c, g, or t
  misc_feature (560)..(561): n is a, c, g, or t
  misc_feature (570)..(570): n is a, c, g, or t
caggcaccccggtgggcaaaaattgcgtgtgcctggggccttttcatttaccagtccttggaagccaaagaggggaaacaggcaagaagaaccaataggagggcgccccggggagaacctttggavcagggcggggaancaccaacaacagngnncgggggtcngggaacggggaaggcagngcagccggggacaaaccccgannggangngtntgggnggnnnngcggggacanncangncccanngngcgcaccggcaaacggangngtcsggaacanngcganngggaaaaaatgaagtgactgaagngcaaaaccccanaanaaacangcaggggcgggcagggannggaggaccacctgttggggcaaaccaagaatccagggcggaaaaaccaaaagaaaaavctscccgcaccnngnacngnagcagggaccanannnccccgnacaaaavacnnccggggaaaccncacagggggggngggcaaaaaaggaccaacaaaagcaggaacaagngncccnncgcccnnncgccanannggagcagagaanacannagccgcaangaaccacaagaaaactgcagttcagctttttgaaaagcatcccygtctttatatactgacatttggktttgtgtctgcbaaaaacactaataagcttgtggktgcacacatgacgaaaagtgaaatgcatttgcatgacacagcattcatagggccggcacytttgtttctggaccagtattttaacagcyttawtgaagaatatattgtaccttggattgccccgggtttccccttccttgaattgaaccgccaccgggtcagkggttgcaaacagartgcggcccaccgcacawacawgtcygcagaatcaagggcsccacagcscatrccaatcatcataatgwtggaatwgggaaataggracaacamggctsccgsagggaagaaagraamaaaaaaggwgra

SEQ ID NO: 408909 - DNA, 398 bp, Homo Sapiens
catactggaccttcttcaacattaacccgagcgctaccaggcatcggtagttttgctgagcttgtcaggtgtttataatggacagttggagattggggtcctaggcttaggtctttgagagcctctgtgtccaggagagcccagtaggcatccagccatttactgctttaatagggtagcatgaggctgagagggatagtttcttgcatccaaagcccttaggcaccttatgtccatcctaagtgggccagagactccagggctgcatagagcttgccagagcttctataatgaaggggtctctgagggcaccaacaggagtgcccatggattttaaggtttgattatagaggttgtttatggagggtgccccatttaaagcaagctgatttgtaagc

SEQ ID NO: 408910 - DNA, 440 bp, Homo Sapiens
  misc_feature (223)..(223): n is a, c, g, or t
  misc_feature (329)..(329): n is a, c, g, or t
  misc_feature (404)..(404): n is a, c, g, or t
aattttaataaggttgtatgcatacagtgagcagccaaagtggtaggcttcctagatcgtgtctcaataggcactgaaatccaattcccctaaatcctaattccatttttctgtgtcatgttgcagctgcctcactctagtattctggatgtgatttggggtccaatgagatgcacttactaatatctgcagtgtacaatgcaggcagcagcagcgccactanaagctgagctctggtagagttggattggatgtttacagtgacctacctcttcagtgtgatatttcctcacggtcatcagcttacaggctgtgaggacagccggggngggaggacagggataggccatgtttccccacttacctcccaaccactgggctgggtgcaccagccttcctggggnctttagggttcggcagccacagttgacgtggacctt

SEQ ID NO: 408911 - DNA, 181 bp, Homo Sapiens
tagacagctattcacgtggctttgaaaaaagaatccagcagtgcatatctattagactaaatacgttcatctcctcccaaacaggcatttgatttgaaaacagaaaccagaacagagcatacaccacaaggaaacatggtacttacaaatattgtcaaataattcagcagaactctttaag

SEQ ID NO: 408912 - DNA, 368 bp, Homo Sapiens
tttcaaactggaggagtttgcaacaaaatccttttcaatactggtaaatcaaattggagatcgtgtatgaacatacactgatttttaacagattatgttcacattgctcttccttatgactttctggaaaagctgcttttaagtttgtttcctattgaatttcatctttcctgcataaccaatggtgtctggtccaacgttgagtaagaaacactataggggaggaagtatgcgtatacatgtccatatgtttatcataaattttgctgatacgaaagatatgtggcacacagtctataagtaacaatgaaatatacagtattctttatggcaaattccatatagtgaattggttcccatgacagcca

SEQ ID NO: 408913 - DNA, 214 bp, Homo Sapiens
ggctccccgggtttaggagggacaagtaagtgggggcttgaagtccgattagagcaaaagatgaatggccgagagtactataatgtccatcaagggctgctcaagtcaccgtgatcatagcccaagcagagatagggaaaggaagatgtgagcacgagttcggggtctcgaacaatggaggttattcgtgcagcccaggaaaggctccctaaga

SEQ ID NO: 408914 - DNA, 350 bp, Homo Sapiens
  misc_feature (171)..(222): n is a, c, g, or t
  misc_feature (340)..(340): n is a, c, g, or t
aaaatagtttctagtggcaaacgatttggtttggaaaagcttcaggctcccctgccttgcgggatgtgtaaatctaattagacagttagataggtaaaaaacattaaacccttttagaggactatctttttacaaaattgtttcattaacaagagtgacaatttgcatgannnnnnnnnnnnnnnnnnnnnnnnnnnnnnnnnnnnnnnnnnnnnnnnnnnntattttattagaatgataattctcctgtgtgcttatggagaacaggcctacttagcctaaacattggagcattaggaggttatcaagcaaacctcagtataaccatagccctttcttnagctggctgc

SEQ ID NO: 408915 - DNA, 143 bp, Homo Sapiens
actcatttatgaaacatttattgaattagacattctactaaccatttatttttacaaacagttaactaaacatcactggttttctttgataaatggtaatcttgcaaaggctcatttatagatacatcattatttcatgctgt

SEQ ID NO: 408916 - DNA, 679 bp, Homo Sapiens
  misc_feature (598)..(598): n is a, c, g, or t
  misc_feature (604)..(604): n is a, c, g, or t
atgaaccactttgcctagctggtcatcttgtttttattacataactttcctccatcctttcttccaccatcttccttcccttcattattgaccctccctccaatgaacctccacacccccaaacttctcatgggtttctgagactgtagttaggagtgttaagcaccccaggtcctgtagggcaagagatacaagggtacagtgtatattcacacagagacaatttcaatacagtttatcataaggacttcaggttctagcttatgttatagggataagtgtgtatgtcttcttctttccttctgtctggtgacctcccttagggcaagaactgtgcattacttatttggattaatccacccttcatcttttaatccatgcatgcatttatcaacagctatttgtcaagcacctatttgtgatccaaggttccatactatggctctgggaaatgtcgacggttagataaagaacagagtgggttttaaaagcaatcacaagacctttatacttttcttgttatgaaagatcaggccccccagctaggtaaaaggcgactcccttttggggaggtatagggcacaagaattataagggngccttnttaaaagaagaggcttttattggttggtatcccacggtgccacaattgttggagaatatatttacaacggaaggc

SEQ ID NO: 408917 - DNA, 233 bp, Homo Sapiens
ggaagtactgaccatttaaaagtggcagatctccgggccccatttctgcagccttcattctgcaactccagccacccacctgtgccaacgtcaagccagttgggattgccttgctcatgtgcctcctcccatctgcttttttcatgtgtgctacagccttagaaataaggactcttagacagctgtctttatgttcccaagaagtatctgtctttaagcaaatctagtctgca

SEQ ID NO: 408918 - DNA, 465 bp, Homo Sapiens
tgcagtggtgctatggtaaatgcacagcattgaggttgcttcattcgactcaggctaagcctggcttttaaacaacggtctcatcattcacagccactcagtccccttcttcacacagagctttcagattggtcaaccttgaagtaataaccaacaaggatgatgaaaccatgatcatactttcccagcttatggaaggggcctttcagagggctgctgaagtcagcacacagagtcactgtagctgctgaaatgctgttactttaatatatctcgtttggtgtaccgttttgtacggaattagtcactgttatgtgggaaggtgcaactgaaaatgcaagtagctgtccttagcgaggatgctcacagtgggccaacagacccaggagggcttgacacagaatgccagggtttgaagcagaatggcagaacaggacatcaagccagagctacaccaggctgact

SEQ ID NO: 408919 - DNA, 389 bp, Homo Sapiens
  misc_feature (122)..(122): n is a, c, g, or t
  misc_feature (185)..(185): n is a, c, g, or t
  misc_feature (332)..(332): n is a, c, g, or t
gccttttgttcctgttagaatgaactgtgcaattcctaaagtccctgtgctctttcatacctctgtgttttagctcgatgtgtctctgtctgaagcagcttggaatccccttcttaattttnaagacttaaggtcacttctatgatgaccctattcctcatttcttaggtggaaagacccctctntcctttgagccctaacagtgctctgaatagaatcaatgccttttttgtttccacatatatcatcctccactgctactgtggaactctgtaaagtcagaacatgtgtgactgacctttacatctgcagtgccaggtgtgtaggttggnatctagtgagtggttttagtgaattgaatatactgcagtcatactgaggataactgg

SEQ ID NO: 408920 - DNA, 900 bp, Homo Sapiens; identical to SEQ ID NO: 301822

SEQ ID NO: 408921 - DNA, 941 bp, Homo Sapiens
  misc_feature (16)..(16): n is a, c, g, or t
  misc_feature (327)..(381): n is a, c, g, or t
  misc_feature (689)..(689): n is a, c, g, or t
ttgtgattaaaattcnagaratagtaccagctccagatacgtctrgcggtgtgtttgtgctrgtkgccgggtgtccttstgssccatcttssaaatsatctctggtttcacgggggagataaaacctagggctgctgtgaatgtgccctctcaggtccctgakttggccccaggtagagctgtaagagatcaggaagagggcctccctgcctgakggcgatgatcctggrggsaacgtgtggtgcagaaagagaagtygaggtagtgaaaggragtkaggbcttggdgggrtggsccabawctccagcdgsgtcgagtattgasgannnnnnnnnnnnnnnnnnnnnnnnnnnnnnnnnnnnnnnnnnnnnnnnnnnnnnnctctgcrgccagagctctcttctctcggtcactgagggsggcaaatcgccgctgctcttctcgttcacgctcctcctggtcctgstgcctctgctgctgttcctcccgttgccgccgggctgccttctgctcccttttccgtgtagcctgcsgtgcctccatttctggtgtcaatggtcctggcacctggrggatttcaaatataagaccctataagttatctttggtaaaactgcaagargtagaaaggrtctagccaggatctgtgatgccttcccactctgcttgtscttcctattccagagtgnggctgagcsttgtgtgtaatcgtgaggcatctggmattcttctccatgaaaccttcggaactcattacgtgttgatttgtcagccgcaacagtataaggtggccgggcccgagagtccctaggtgcaaaaactccaaaaatgggtttaacttgcctcctgcctttcccaacatcacccaaccagaccaaggggatattsccaagtasccaatgccaactttaacctccaaattatcctctctatacccaaaa

SEQ ID NO: 408922 - DNA, 504 bp, Homo Sapiens
agcggtcggatgcggccgcgcgcggccggggtcgcccaacagaaaccaagcagcaacagcccttggaaagaggctaaatttttcttgacttctgcagcaacaaagaccgtgaaaagttggcacttctggcctaacgctgccgtcatcctacccctcaccacagggcaacccaggctggacatttagtggctccctctttatactctctgtgatcatccttacgatgatgaaggatgtatggagctgggttaatcttcctacattctgaaggaaaaaccttcaaaccgcaaaggaatactttcaaccaatttctggggaattctctaagggtggggcctttgtgaaggggccacaggggaccttggtgtttacccaaccggggaaacaggcagaagacctggcgcatccccacaagatctaccagtttgttccctgtacatcgtgcgcctacttgtctccccttttgtgggtctccctaaaatggcgccattctcgcttgggctt

SEQ ID NO: 408923 - DNA, 1000 bp, Homo Sapiens
  misc_feature (302)..(588): n is a, c, g, or t
tgctgacctggttgaaaaagcaggtggtacggtcggaattcacgggatatcgtcgaccacgcgtcgccacgcgtcgaccaccttaaagttgctgaaaacctcccccagcctgcctcttgccagcatgttccatcttcttccttttttagcacctaccaccttcacatatattatttacttatttttatgtctgtttctccctgccacgagagacggagatttttacccctagcacctggaactgttcctggtatcagaggcattaaaatgtttgtggatggactaatgaatgagaagagaannnnnnnnnnnnnnnnnnnnnnnnnnnnnnnnnnnnnnnnnnnnnnnnnnnnnnnnnnnnnnnnnnnnnnnnnnnnnnnnnnnnnnnnnnnnnnnnnnnnnnnnnnnnnnnnnnnnnnnnnnnnnnnnnnnnnnnnnnnnnnnnnnnnnnnnnnnnnnnnnnnnnnnnnnnnnnnnnnnnnnnnnnnnnnnnnnnnnnnnnnnnnnnnnnnnnnnnnnnnnnnnnnnnnnnnnnnnnnnnnnnnnnnnnnnnnnnnnnnnnnnnnnnnnnnnnnnnnnnnnnnnnnncaacaaaagcaaattccattccacaaatttcttttcattcaaaacccaaattttctcacacggtagacgaaccgtgggtttgtgacaaggagaggagaacgtgcaacagtggtcagccctgtcgtaactactttgatttcataaccgtctgggggcgttagggccattgccttggaaaccgcgcaagcgaacagccagtggggaagaacgcgaaatggcaggcctgacgggcaacaaagcacgatgggggtgaggccaagtacaccgggtagcctgtttgcacggtggggcccagggcgaaaagatggagcagcacgcggggatcgtgtacacacggggcagccgatgacacggacaagcgggccaggggaccgaaatactgtcgcctggtggcggaagtcgtgacgcgtgc

SEQ ID NO: 408924 - DNA, 318 bp, Homo Sapiens
  misc_feature (63)..(63): n is a, c, g, or t
  misc_feature (164)..(198): n is a, c, g, or t
cttatcttcacttaattgcatcacaagtaacaagaatgaaaaaggccacagttcatatatttncaccattacatatgtctataatacttgaaatgagtatggcaaaaccagcactgcacaaagatgagtccacttcaagtcccatgagaaagagcatgtctctnnnnnnnnnnnnnnnnnnnnnnnnnnnnnnnnnnngagaggcctaaaggccttggtgccccattgtgttggaattcatcatattccatcttgacttttttgcttccagtcagccagcagactaaatttttgtgcttgtttatgctgaaattgatt

SEQ ID NO: 408925 - DNA, 300 bp, Homo Sapiens
tactttcacaggtgagttaggtacgctaacggggaatactgaaagttacagtgttaagtatatatagatatactgtaatatacattcttatgtatatatactgatagacagcatttctgcattcaaataaaataagtgtatgcttttctagtatattagtttgtagtccaataatttaggggaactgagtacagagggatcaggaccaggaaaggtaaagaggaagagggaaaagaatatgccctagatgaggtaaatctaggaaaaataagagcacaaatcatcagagtgggaaagaga

SEQ ID NO: 408926 - DNA, 986 bp, Homo Sapiens
  misc_feature (231)..(239): n is a, c, g, or t
  misc_feature (246)..(246): n is a, c, g, or t
  misc_feature (248)..(248): n is a, c, g, or t
  misc_feature (250)..(250): n is a, c, g, or t
  misc_feature (262)..(264): n is a, c, g, or t
  misc_feature (268)..(268): n is a, c, g, or t
  misc_feature (273)..(273): n is a, c, g, or t
  misc_feature (285)..(285): n is a, c, g, or t
  misc_feature (301)..(301): n is a, c, g, or t
  misc_feature (305)..(305): n is a, c, g, or t
  misc_feature (309)..(318): n is a, c, g, or t
  misc_feature (359)..(359): n is a, c, g, or t
  misc_feature (361)..(361): n is a, c, g, or t
  misc_feature (367)..(367): n is a, c, g, or t
  misc_feature (381)..(381): n is a, c, g, or t
  misc_feature (384)..(384): n is a, c, g, or t
  misc_feature (388)..(388): n is a, c, g, or t
  misc_feature (395)..(395): n is a, c, g, or t
  misc_feature (398)..(400): n is a, c, g, or t
  misc_feature (404)..(406): n is a, c, g, or t
  misc_feature (409)..(409): n is a, c, g, or t
  misc_feature (424)..(424): n is a, c, g, or t
  misc_feature (429)..(430): n is a, c, g, or t
  misc_feature (434)..(434): n is a, c, g, or t
  misc_feature (446)..(446): n is a, c, g, or t
  misc_feature (451)..(451): n is a, c, g, or t
  misc_feature (454)..(454): n is a, c, g, or t
  misc_feature (457)..(457): n is a, c, g, or t
  misc_feature (461)..(462): n is a, c, g, or t
  misc_feature (464)..(466): n is a, c, g, or t
  misc_feature (473)..(473): n is a, c, g, or t
  misc_feature (476)..(476): n is a, c, g, or t
  misc_feature (485)..(486): n is a, c, g, or t
  misc_feature (489)..(494): n is a, c, g, or t
  misc_feature (496)..(496): n is a, c, g, or t
  misc_feature (498)..(499): n is a, c, g, or t
  misc_feature (501)..(501): n is a, c, g, or t
  misc_feature (504)..(506): n is a, c, g, or t
  misc_feature (508)..(508): n is a, c, g, or t
  misc_feature (510)..(510): n is a, c, g, or t
  misc_feature (513)..(513): n is a, c, g, or t
  misc_feature (518)..(518): n is a, c, g, or t
  misc_feature (523)..(523): n is a, c, g, or t
  misc_feature (529)..(529): n is a, c, g, or t
  misc_feature (532)..(532): n is a, c, g, or t
  misc_feature (545)..(545): n is a, c, g, or t
  misc_feature (554)..(555): n is a, c, g, or t
  misc_feature (558)..(559): n is a, c, g, or t
  misc_feature (561)..(561): n is a, c, g, or t
  misc_feature (578)..(578): n is a, c, g, or t
  misc_feature (581)..(581): n is a, c, g, or t
  misc_feature (583)..(584): n is a, c, g, or t
  misc_feature (587)..(587): n is a, c, g, or t
  misc_feature (590)..(592): n is a, c, g, or t
  misc_feature (598)..(598): n is a, c, g, or t
  misc_feature (600)..(600): n is a, c, g, or t
  misc_feature (608)..(608): n is a, c, g, or t
  misc_feature (611)..(611): n is a, c, g, or t
  misc_feature (613)..(613): n is a, c, g, or t
  misc_feature (616)..(616): n is a, c, g, or t
  misc_feature (620)..(620): n is a, c, g, or t
  misc_feature (624)..(624): n is a, c, g, or t
  misc_feature (626)..(627): n is a, c, g, or t
  misc_feature (632)..(632): n is a, c, g, or t
  misc_feature (637)..(639): n is a, c, g, or t
  misc_feature (641)..(641): n is a, c, g, or t
  misc_feature (644)..(644): n is a, c, g, or t
  misc_feature (649)..(649): n is a, c, g, or t
  misc_feature (653)..(653): n is a, c, g, or t
  misc_feature (656)..(656): n is a, c, g, or t
  misc_feature (660)..(660): n is a, c, g, or t
  misc_feature (662)..(662): n is a, c, g, or t
  misc_feature (665)..(665): n is a, c, g, or t
  misc_feature (668)..(668): n is a, c, g, or t
  misc_feature (673)..(673): n is a, c, g, or t
aagckgtagcttatgcatgatgtataaccaattcattgtcagtttaggtagaggaaagattaaaaaatctcaatctaggtaataagatcaaatcaataaattctttctgtgtacaaatactaatatttcatttggcatccttaammmccctcatcctaaacccaaccattacaaccaacatcagtcactgthatgayataygacacccmttatcccamaacmccagccgannnnnnnnnyytcccntnyncgcccccbsccnnncccngsbtntgbcggtbgcancggaccaaccgcgaanggsncagnnnnnnnnnnkgsagagtccaaagkkgggtttgggtaatactttcrgggcnkngacgtncaccaccagatcantgngatntgsgagngcnnngggnnnctnaacacaaactccagnctctnngaanaagaaaaaaagngaacntcngcngaanncnnncccggangangcgagcccnncannnnnnangnngncannnanantcncaaanagggnaagganatnaagaagaatctcnctatcccannctnnantaaagagggaaatcaantcngnnggnacnnnacaacngnccagctcnctngncanggcnggantnncaagnaaagnnnanaantagtntcanaanctgnanctnggngaagngatttcccaggaataacaaagcaaaaaagtctggawawgawtaggaaagcaaatgttggtaatgattagtcacagtcatgttkggtaacagtcttagcccagccatctgcacagctgagtccaagcgacagacyatggtgtcatcacacacttgactkatgtacgtcwtaatcttkccctgattttctgcgttcacactcaagttattarggcattgtaagtctctttcctaacttatggggkcwttcgtttatatcartwtkgcaataatatgggcaccaccccatkymmgctwtgkcwtcctggttaaatg

SEQ ID NO: 408927 - DNA, 283 bp, Homo Sapiens
aactcttttataaacctttattggaaaggctacaaactttatattgccaccacatttcttatgtttaaagtggttgtggggaagtaaccttggatacaaaactactatgctgttgaatcttacccaggcttgttgtaaaatattttttgttcattggggggggagtggataggtcaataatttaaacctcacaggacttgattagtgtcagcacaccttttttcattcaggttttcaggttctagcagacctagaaataaactacaaatactagatttaggct

SEQ ID NO: 408928 - DNA, 1072 bp, Homo Sapiens
  misc_feature (24)..(24): n is a, c, g, or t
  misc_feature (30)..(30): n is a, c, g, or t
  misc_feature (37)..(37): n is a, c, g, or t
  misc_feature (171)..(188): n is a, c, g, or t
  misc_feature (219)..(219): n is a, c, g, or t
  misc_feature (231)..(231): n is a, c, g, or t
  misc_feature (244)..(244): n is a, c, g, or t
  misc_feature (247)..(247): n is a, c, g, or t
  misc_feature (256)..(257): n is a, c, g, or t
  misc_feature (260)..(260): n is a, c, g, or t
  misc_feature (280)..(280): n is a, c, g, or t
  misc_feature (286)..(286): n is a, c, g, or t
  misc_feature (289)..(289): n is a, c, g, or t
  misc_feature (293)..(293): n is a, c, g, or t
  misc_feature (300)..(300): n is a, c, g, or t
  misc_feature (304)..(304): n is a, c, g, or t
  misc_feature (316)..(316): n is a, c, g, or t
  misc_feature (321)..(321): n is a, c, g, or t
  misc_feature (399)..(399): n is a, c, g, or t
  misc_feature (402)..(402): n is a, c, g, or t
  misc_feature (406)..(406): n is a, c, g, or t
  misc_feature (409)..(409): n is a, c, g, or t
  misc_feature (412)..(412): n is a, c, g, or t
  misc_feature (416)..(416): n is a, c, g, or t
  misc_feature (421)..(421): n is a, c, g, or t
  misc_feature (423)..(423): n is a, c, g, or t
  misc_feature (426)..(426): n is a, c, g, or t
  misc_feature (432)..(433): n is a, c, g, or t
  misc_feature (435)..(436): n is a, c, g, or t
  misc_feature (442)..(442): n is a, c, g, or t
  misc_feature (447)..(447): n is a, c, g, or t
  misc_feature (461)..(461): n is a, c, g, or t
  misc_feature (466)..(466): n is a, c, g, or t
  misc_feature (493)..(493): n is a, c, g, or t
  misc_feature (534)..(534): n is a, c, g, or t
  misc_feature (552)..(552): n is a, c, g, or t
  misc_feature (557)..(557): n is a, c, g, or t
  misc_feature (561)..(561): n is a, c, g, or t
  misc_feature (565)..(565): n is a, c, g, or t
  misc_feature (568)..(568): n is a, c, g, or t
  misc_feature (571)..(571): n is a, c, g, or t
  misc_feature (579)..(579): n is a, c, g, or t
  misc_feature (583)..(583): n is a, c, g, or t
  misc_feature (589)..(590): n is a, c, g, or t
  misc_feature (592)..(592): n is a, c, g, or t
aaggggggaggagggaaggagacnaagaanaccccanacctggatgacaggaccttgcactgagaagaggagagaaagctggaaggaacaggatttatgttggatacttgaactacagcgagtgtaagaatggtcctatttacagggcagaaacactgcaggtggrgcgcnnnnnnnnnnnnnnnnnnagagagtggtggggaagggtaccttgcgtgnratcttccccanctctcccagatgnatntttgagganncgntgggattctscggggggaangagggncantcanatgatgntcgntggggtgaaganagggnccaggcacagggtgtgtgtgatcttccagcggcagagagaggcttgcacacaacctccaagtaatcctcctgttctgnagngatnagntgnattnggagngnttntcaggnnanncggganatggnataggtgatgtggnaggantggataccccaaaagggggaaccatgnccacagtgtaggcgcgcatgttgtcaaagaacagcgagttncctacgtgtagttgcggnagganaggncctnagngangcaattanagcnatcaanngnggggccccacaggctgctgctgtacaggggctgctccgtggatggtttcttctgcaggatgggggtagggcagatgttgtcaaacaggactgagttgaagatcccatacacgccctcatcaaggtggtacacgatggtcttggaggtggaaccattttcctcctccctgccaggctggtctagcagaacctccttcttggcaatgatgctgactgccacagtgaaggccgaggtcacgtagtagcgcgccagctcagcaaagatgtchmcgccacagccctctgggaagtacaggtccaaggctgagttgatcacggaagcaatctcttcaaatctcactttggcaccttctgtsccagggragccaccacaargtccagamcgtgcatctkgtgmccmgctcggtsccatttcaaaaagascgggsgtctcgatggactgagctaagsctgagggymrggcaccgmtgcratgtgraaa

SEQ ID NO: 408929 - DNA, 958 bp, Homo Sapiens
  misc_feature (505)..(505): n is a, c, g, or t
ccagtaattttataaawgtttatatatgcttctkgcaaaaaggattttwgtttaahttatgaaytttyttatygtgacagtkkcatgggcagcaaacaaaaggttgttcmaagttgttgggaaaatagatgataaaattgcwctgctcaathtggcmtywthatggctttratgcccttyctycctctcatgctctgtcatgatgaccatwawcttttttcwttawaaktttttgttaatggtgatttyyctgatgtgcmtttgtttatctttttgttytgtgtgtttgtgatcgcaatcggggtcgtgcagkcactgattktgggktaakcattccaatttthgcatttgctkagcwcgtakattcakcgctctgttcacaggkctytgtatttatgatacgttctkggcatcgttctttaaggcacgkttctktgttttgcagtggccatcttctctatattctttgttcccttgtcttaaatgctgatgktgactgtaattntcctctactatgttagcaaggtcaccggctggtgcagagacaggctcctgggccacagggagcyctyggctyaccyagtggaagtcttctcgtttgacctccacgagccaytcagcaaggagcgcgtggaagccttcagcgacggatttacgccatcgtggccacgcttctcatcctggacatctgcgaagacaacgtcccggaccccaaggatgtkaaggagaggttcagcggcaccytcgtggccgccytgagtgygascgggccgcgcttcctggcgtacttcggctcctttcgccacagtgggastgctgtggttcgcccaccactbaytcttcctgtatgtgcgctaggycacgcgggcgatggggctgbtgaacmmsctctcgytgggcttcgtgggtggctccmmtarcctacmacaracttggbttttgccgghascccggatga

SEQ ID NO: 408930 - DNA, 395 bp, Homo Sapiens
  misc_feature (41)..(41): n is a, c, g, or t
  misc_feature (186)..(186): n is a, c, g, or t
  misc_feature (188)..(259): n is a, c, g, or t
ctcctcaaagtcctatcatccgtctcaattgakactacctnatcaagttaataagaacctttgctaatwctgggaaaagcagaggactatccttccttgtcctggaaggacagtactcccaaatggtagttgtgaagagagtgggcactggtgtcaaacctggtttaaatctcgtggctcttccantnnnnnnnnnnnnnnnnnnnnnnnnnnnnnnnnnnnnnnnnnnnnnnnnnnnnnnnnnnnnnnnnnnnnnnnncgattcaggtaaagtgcacatagtaagacctcaaattttggcacttgttgctgtcaagctgtattaggtcaaaactattaattgattaagcatcctkcatatctgtgaattatctgttcatcaaaaagactttatg

SEQ ID NO: 408931 - DNA, 527 bp, Homo Sapiens
  misc_feature (127)..(204): n is a, c, g, or t
tactttcacaggaaaacaggaccgctgctccttcaccagcctggatttgactcccagctttgtccagagagggaattggtcctgaagaaacagtcagaggtgagcactgagatgtatgatgcagggnnnnnnnnnnnnnnnnnnnnnnnnnnnnnnnnnnnnnnnnnnnnnnnnnnnnnnnnnnnnnnnnnnnnnnnnnnnnnntgccattgtagttttgtcgggttctagaatataagacaaccgttaagaatagtgttatagaataagtgtctaaaggcatggaatgtgttcccggttgtatttgcctgttttcgcaccgctaatgaaggcatgcctgagactgggtaatttgtagggaaaaagaggtgtgatggactcacagttccgcatggctggggaggcctcacggtcatggcggagggtaaaggaggaccaaagccacctcttgcactgcggcaggcaggagagcgtgtgcaggggaactcccctttgtagaaccatcggatctcatgagacttatgcac

SEQ ID NO: 408932 - DNA, 1340 bp, Homo Sapiens
  misc_feature (1183)..(1183): n is a, c, g, or t
  misc_feature (1195)..(1195): n is a, c, g, or t
  misc_feature (1284)..(1284): n is a, c, g, or t
ttaataagaagtggggtgggtgggggcactagtcggccggtaccggtccggaattctctggatgaggctttgacgcatgtgtacctttttagtggcggtatctcggccggggattttcgggctccagtggaggtggctatgctcaccccatctcccttgagaggcacagaaggttacagatgtgtgcgaggaacggccaggtccagcgtctcctcgttgctgccccttgagcccgggaccggcgccaatgcgcgcccgggttcttgggttctttcatcccgcagacctgccttggtgtggcgacacagggccgtagctacacaaggcggcatccgacgtgtacagggatatatatacggacgcaatgaataccaattgcgcttatagacaaactggaagggaaggcgactagatcgtcgtgagaggtgagggggatgcggtttgttcctgggatatattgggcgggttggactacggttataagacataggatacaaatacattgcagatcatataaccaggtaataggtccttttcgcggtgcgcacatacgaccattaagtaacatagcgacgaggagcttggtgttttaaaccacaaggtttggatcataatttacctcgaagttcgtcagctattaccccgaatacgaacgagttgcgctgcgagggttgaatcgatgtggggactccgattaaccagctgatggaaattggcgttggttgcgactgtcgccagattcacggcgtgttgttaacggcctcgttacacacacattgtacgttgtgatgaccaagtgtaggtggaacgaagctttgtaaccaatcatgggagcgccacgaatctagttctcttccacactttattgctaatattatttacgtcgtgcacttgtatgacgaccggtagaaagcccggcgcacgcatttaggcgcgaaggaattacgagatgttaggcgcgtctttagaagtgataagtcaacgcacattttatcacggttgctgtgcggtcgtcataacaaaagacggagcttatcgcgcttcaccgctgttatactcccactaataatagttatgcacgtgtgtatagttaattatgacgatctacttttaataatatagctcgtgccgctaaatatatatcgcaccgcccgctgtaatagactgtgatccattcttattnttcgtggacgcncgttatatcacactcggacaatgagtcgtagagagacacggtgtggtgtcctggagtggggtacgtggtgggtgataagctatcgctcnctcttattaatagaccgcgacgctgaaatatgcgcctaaacaaacacacaatcacc

SEQ ID NO: 408933 - DNA, 679 bp, Homo Sapiens
  misc_feature (341)..(423): n is a, c, g, or t
agcgtggaacatgtcttatctaaactcttaaaacgtgtttgttgctgtcaaatatgacttgagttcctgatcgggttatcattgcctaaagacacaggactattttttttattaagataacttgtttttatcttaataaaagagatgatagtcatttcctgacagtttgtctgacggaatgccttctgtataatagtttaaaataattatttttagtgtttggaaaacagcatttaaaagtttgaacagcagaagtctgttttaagaagcttctgttaacccttgaaaagaatcttcctgtgggatattaaaattttggattgaacttgtgcaaacagtannnnnnnnnnnnnnnnnnnnnnnnnnnnnnnnnnnnnnnnnnnnnnnnnnnnnnnnnnnnnnnnnnnnnnnnnnnnnnnnnnnaatctgttcagttgtgtgtaaggtggaatacctacccgaaggtttttctgtaaggtacattaaataatacatgtacaattctttttgaattgtaaagggctttatgaacatcaattataatcatttcgcttattaggttctgcagaaagtattctctcaaaagttatactttcatcaagaatgaaaaagactttgtaatggaactctaaaaaactgaaacacgtatcatatgacattattcctttcctatatgtat

SEQ ID NO: 408934 - DNA, 892 bp, Homo Sapiens
  misc_feature (54)..(54): n is a, c, g, or t
  misc_feature (427)..(427): n is a, c, g, or t
  misc_feature (635)..(635): n is a, c, g, or t
  misc_feature (651)..(651): n is a, c, g, or t
  misc_feature (675)..(675): n is a, c, g, or t
  misc_feature (695)..(695): n is a, c, g, or t
  misc_feature (703)..(703): n is a, c, g, or t
  misc_feature (713)..(713): n is a, c, g, or t
  misc_feature (716)..(716): n is a, c, g, or t
  misc_feature (743)..(743): n is a, c, g, or t
  misc_feature (746)..(746): n is a, c, g, or t
  misc_feature (751)..(751): n is a, c, g, or t
  misc_feature (774)..(774): n is a, c, g, or t
  misc_feature (782)..(782): n is a, c, g, or t
  misc_feature (803)..(803): n is a, c, g, or t
  misc_feature (813)..(813): n is a, c, g, or t
  misc_feature (827)..(827): n is a, c, g, or t
  misc_feature (829)..(829): n is a, c, g, or t
cccatacagcacagcagacacttttcttagctttccaatggcggcagcatcatngtccctctcctcctcgacctttgccggcaaggcggtgaagaatgtaccatctttggctctctttggagaggcccgagtcacaatgcgcaagactgcagcgaaggtgaagcaggtttcctttggcagcccatggtacggtgccgaccgtgtgctctacctcggcccactctctggtgagcccccgagctacctcactggtgagttcccaggcgactatgggtgggacactgccggactttcagctgaccccgagaccttcgccaagaaccgggagctggaggtgatccattgccgctgggccatgctcggggcacttggttgtgtcttccctgagtagctcgcccacaacggcgtcaacttcggtgaggctgtntggttcaaggccggctctcaaatctttagtgagggtggtctcgattacctcggcaaccccagcctcgtccacgcacaaagcatccttgctatttgggcatgccaggttgtgctcatgggtgcgtcgagggggaacgcgttgccggtggcccactgagtgagaacgtcgacccactctacccaggcggcagcatcgaccctctagggtnggctgacgaccctgangcattcgccgagctcaatgtgaangagatcaagaactgtcgctngcaatgtnctcaatgtcngcntctttgtcaagctatcgtcacggcaanggnccacncgagaacacgctgacacatcgcngacgccgncaacaacaatgcatgagcatntgcaacaacnttgtcgcagcaagnangagtctgagatgtctcgcaagaggcgtgtctgtgctgagtgtacaaagaaaatgcaaagcatc

SEQ ID NO: 408935 - DNA, 1201 bp, Homo Sapiens
caghhatyctyyygctcctctggggagggagcagagggctgggcagtggtcggggagatggtccctcagaggtcgaggagctcgcctgggcgtagacatcctccacaggaamaatagagraaaagacwgggcgctgagcttcagagacctaggagcctgggccgggarrgrgtggracaatgcaaactacaatgacaccaagratctagggccacacgaamgcccggtgrcgccccgctggacgaagatgagtrrgaagggggcggcggagragatgccggtgrcatgtggcagtggaactacgcatcccagttctcccwgcggcaccgctgctcctccagacggcagagacggtagccctratactwgacccgcgccctccgggaccgccgatccwgaataaaatcatccagatttccagcctcacagrctcwrgccaggctgamgctgggggtggcatcagcagcagwggtggwrgaagcggggaaccctaggtgrggaggagcccgrggccatgrcgggmcggctgtaagacaamamrttgcgccggctgatctacaggwcmmrmtgcttgctgrgcmcgtaggactcccgcagtgagatgaagataaagtcgacctcccgcamgctaaacccctmyacgaactcavgggctgcctcgggccmggmtgtgwcagggtcccgctccacatggaagaggtcaaacwttcttggccmcgtcctgccgatrggcyccccctagcscacctaccgtttgwwgccccgggcgawctmgaccttactagactccmggccccacttgggacatrctgcmcatmcccgctgcggyacttgctggtgaaagtgtacaagmagagaatgttargcagatccwmtgtgctatycacatcccgrawgatggsgtcccmttrccgacgcagtracacaaatggtgtgggggyagtgcaggcccccgvccccaytgctyrcgttarttatdcggcccwtggttcttargtttttkggtycggarcaaagcsgvccscmawtkamaamgctkwggkacccttkaaawwsccgcggtgsccsctggsggccccyytkgrmwytcgccttscmarggbccrcgggswgytttaacvaatwtttttttdgamaaaaacmwtwrtwhahctttwaaagygrmmamhaarggmaacyysskycctttargatcgawtym

SEQ ID NO: 408936 - DNA, 490 bp, Homo Sapiens
  misc_feature (26)..(26): n is a, c, g, or t
  misc_feature (45)..(45): n is a, c, g, or t
  misc_feature (111)..(111): n is a, c, g, or t
  misc_feature (361)..(361): n is a, c, g, or t
  misc_feature (370)..(370): n is a, c, g, or t
  misc_feature (372)..(372): n is a, c, g, or t
  misc_feature (379)..(379): n is a, c, g, or t
  misc_feature (403)..(403): n is a, c, g, or t
  misc_feature (466)..(466): n is a, c, g, or t
gagggagtgcttctcagttggthhknawhttkgttggtttttttnctgggcctttggagggaagtgggggcttcagcattkggggtatgggagttggrgggtgcaccccangatttgaggggtgaactcccggakgttgagggtggaycccaggagcygacggatggaccccgggaggttgggggtggacccccggdgcctgadggtgcatccctggggctggtgggtgcacccctggggcctgagggtgaacggtggggkyttytggktgytyccccggggcttggkggtgawcccccgctgwttttggaggatggttccctggggctggtgggtgaaccccaggggctggtgggtggantccgggggntngtgggtnaaccccggggttttkwkgktggantccaggatttggggggtggaccccagaggttggtgggtggtccccaggggctgggggattacncyatgwttttkggggtkgacgtca

SEQ ID NO: 408937 - DNA, 657 bp, Homo Sapiens
  misc_feature (145)..(445): n is a, c, g, or t
  misc_feature (452)..(460): n is a, c, g, or t
atagttttatgtttgaaaatagaagggtttattgatagttgtagtataatctgcaaagacaatatcttggctgggaatctgtaccaaggtaataattctaagtggaaggtctacctccccacaagcttttgtgttataattatcnnnnnnnnnnnnnnnnnnnnnnnnnnnnnnnnnnnnnnnnnnnnnnnnnnnnnnnnnnnnnnnnnnnnnnnnnnnnnnnnnnnnnnnnnnnnnnnnnnnnnnnnnnnnnnnnnnnnnnnnnnnnnnnnnnnnnnnnnnnnnnnnnnnnnnnnnnnnnnnnnnnnnnnnnnnnnnnnnnnnnnnnnnnnnnnnnnnnnnnnnnnnnnnnnnnnnnnnnnnnnnnnnnnnnnnnnnnnnnnnnnnnnnnnnnnnnnnnnnnnnnnnnnnnnnnnnnnnnnnnnnnnnnnnnnnnnnnnnnnnnttttttnnnnnnnnnttttcagtataaacaaaactttcaccagccctgcttttctttccttaagaaaagcttcccaaaagaactgtctacatgccccacaacaaatcacaatcactgttaactggtatccgactctactcccgctatccaccaacacgcagcagccagagtcagcttttagaacatcaacatttaatcactagtctccatct

SEQ ID NO: 408938 - DNA, 815 bp, Homo Sapiens
  misc_feature (41)..(41): n is a, c, g, or t
  misc_feature (64)..(65): n is a, c, g, or t
  misc_feature (72)..(74): n is a, c, g, or t
  misc_feature (84)..(84): n is a, c, g, or t
  misc_feature (87)..(87): n is a, c, g, or t
  misc_feature (112)..(112): n is a, c, g, or t
  misc_feature (114)..(114): n is a, c, g, or t
  misc_feature (116)..(116): n is a, c, g, or t
  misc_feature (162)..(162): n is a, c, g, or t
  misc_feature (191)..(191): n is a, c, g, or t
  misc_feature (234)..(234): n is a, c, g, or t
  misc_feature (265)..(314): n is a, c, g, or t
  misc_feature (331)..(356): n is a, c, g, or t
  misc_feature (384)..(395): n is a, c, g, or t
  misc_feature (615)..(634): n is a, c, g, or t
  misc_feature (768)..(768): n is a, c, g, or t
acccttcccttttattaaatcttcattcctctcccatatanaaacccaacctcccatacccccnnaactaannnaaacattttnaantccctcccctccccaaccttccacntntncaaaaacaaccaaatcctaatttactcaaaatacttcacttacatntaaaaaacttctaaaactctacccaattntttttatatatactaaaattctatttaaatcttttcttttttnttcaaattccctcctccttctatttaatcannnnnnnnnnnnnnnnnnnnnnnnnnnnnnnnnnnnnnnnnnnnnnnnnnctaatattcttattacnnnnnnnnnnnnnnnnnnnnnnnnnnaatttataccaacaacacttttatcacnnnnnnnnnnnngggcttctbcaaaatacaaactcatttttaaaccaaattaacaaaccataaacttbcttcaagggaawttctattcacaagaccatatccaccaccctcttaaattcctaaacaatatcatctargacttctatttaaattatttaaaawaaatcttccyttatarccttgggaatttatttcargtttataaatttcacawttcattttctttaagaannnnnnnnnnnnnnnnnnnnatacacacaatattttttataccttaatgcttattctttattgcatctttyaaatattaaaatttaaaataaaaatcttcccmaaatcctttwatttaccttatycccycatcaagtcsttaaaaatyaaatwntttaataactaaaaamhacaaattawctctwwacaacaactacaraa

SEQ ID NO: 408939 - DNA, 884 bp, Homo Sapiens
  misc_feature (60)..(60): n is a, c, g, or t
  misc_feature (65)..(65): n is a, c, g, or t
  misc_feature (77)..(77): n is a, c, g, or t
  misc_feature (79)..(79): n is a, c, g, or t
  misc_feature (82)..(82): n is a, c, g, or t
  misc_feature (235)..(235): n is a, c, g, or t
  misc_feature (244)..(245): n is a, c, g, or t
  misc_feature (247)..(247): n is a, c, g, or t
  misc_feature (316)..(319): n is a, c, g, or t
  misc_feature (323)..(323): n is a, c, g, or t
  misc_feature (329)..(329): n is a, c, g, or t
  misc_feature (334)..(336): n is a, c, g, or t
  misc_feature (340)..(340): n is a, c, g, or t
  misc_feature (343)..(346): n is a, c, g, or t
  misc_feature (348)..(348): n is a, c, g, or t
  misc_feature (350)..(351): n is a, c, g, or t
  misc_feature (355)..(355): n is a, c, g, or t
  misc_feature (357)..(358): n is a, c, g, or t
  misc_feature (387)..(391): n is a, c, g, or t
  misc_feature (393)..(394): n is a, c, g, or t
  misc_feature (396)..(409): n is a, c, g, or t
tcttccccccttttaaamatagttcsggggggggtttggtgttataaaattcatttacangaggntatacacaawgnanttntcaaatttcctcctgatatttcgcgtatmamctawacaactctaamaaamtgatarmacacawcacaatccgaaggcaaattatatacaatgtaamaaaamaagcattaaartarcacawattcatttaaaataactaatattraaaggaganagggaactnncnttgaaggccatggcaaagacraaagacgaagarccacacattcaacacacttgaaaaaagaaaaacccnnnncaanaaacanaacgnnnacancannnnangnngggnanngtgaccataggaaatggctttggcaatannnnnannannnnnnnnnnnnnnagtwtcamaagtartgtgaggtacaactgcattccgctgtgaaaggccgtcacaggacacaggctcgtctgttagaaaggatgatctagttctamcattaawtcttgcagaawcagatctgcwgagtggtgyaccaacaggtgwacacaacgtaagaamaggcatcaaacttcactggaaataatattgttcagtgtgtggcggmaaaatatgcatttwmgagaaaacwtatwwctcaaatcatgtrwtamtagwatwaacatgagcarcgtgagwrwmwtcmtgrccccaacgtttttgmcatrcctccctttagaagcttaargagwwtgtacawtccctaagtggtccgcactaccagtgtctgctawaatgggcacttcatcagatwwcgggcagcscacttaaarawamvagaawtcwaccaaagaaaatkgkrgaacygatrrasccytgccccgacaraakgggcccc

SEQ ID NO: 408940 - DNA, 502 bp, Homo Sapiens
  misc_feature (431)..(431): n is a, c, g, or t
  misc_feature (440)..(440): n is a, c, g, or t
  misc_feature (456)..(456): n is a, c, g, or t
  misc_feature (463)..(463): n is a, c, g, or t
  misc_feature (491)..(491): n is a, c, g, or t
acaagatccaaatcaatgtccttccgggagaatttcttaaaatcttgttttctctcgttgtcttcggaagaagcccgacatttcttataggaaatggaactcttcataaggttcatctcaaagatctctctttgcataatgtgtgtgtggacctgcctacagatacattgggtggaagccctaggagcctcaagcaagtctgaagattggccctgagaaccactgttctcattatcagcaaggattttatccagagacctctaggaatacattcactaaaatgtgactgtggtcctgtggttgtatgaactctggctcttctcgtgaattcatttcactggagtcaggtgtttctgtaaacatcgttaaaccacgagaccactgcattgaacatttttgcactacattgtttattcttgccgctttccttnaaactgggntgggtgaccaaacaancatgatnccttgtgcattattgagaaaaacattgntgccatgagca

SEQ ID NO: 408941 - DNA, 1133 bp, Homo Sapiens
  misc_feature (464)..(464): n is a, c, g, or t
  misc_feature (748)..(756): n is a, c, g, or t
cgcacgtrgaagscggsgcggggggcgcgggmargagacsggcatgcctagagagcgcagcggcggmasmcsgcgcgggcggcgmggcgtcaayggcgsmagsgcccaggacsggmagccggcaagatgcgascgcccyrcmcgagcatsycsycaaatyygkgggsgtamakgayccyggccaggctacaaagcgaataaaggagwcagcagrcmgmsggcacctgtgagayggkgagsttggaamsggacagcasccaacskcggarcgtatgatsgmmcggyagacagcmcggtgtgartsatgagaaargggcagatsgmsggcacaacgagakccmggcsmgccwgtktgracgcaagaatgagcaagaacaagcagtrrtgtgaaatgcgtgtccggggtaatgagaggggraaggmwgcgacttgatggaatacaactcggtcgakgctaggacrtnacacgctagcccgagacgggatsgatgaaagaccagccagaggtctcctagacaaaccacagcscctagaggggmycscggggagtggmcttctgctccctcggagagacccagtgtstcagcsacagkkctmcactcgcctcsrsacttcacccggtkctctcgccgsgcgcccactscgttttsccygttggtcygygaacggacggcgctcacsgcttrkgcatcctgaagcttcggtctgtccagccgacccgaggaggcmggactcasacacataggcnnnnnnnnnmactgtgcatcarcaatacgcakctgatgggaccccggccgckcccaccccccgccgacygtggsgtyrgccctgctgtcckcaraggaggrggggggggasgcagctccggcagacacaraakgctkcakcccagcccgccykaracacggmgctgccccacggggmmtgtcacrcacagaagcggcmtcctccggtgcccaagacykttcaaatkgsttthatkttcytakmcttccagamtmsycakagacmaaagaggaaacttatgtkaamctggaggracgyaatgtcaggggcttggggtcswtggsggggggargggaatgggggrgaraaayattgtrgcccggcgaagaaaacwggggcgccgtraa

SEQ ID NO: 408942 - DNA, 696 bp, Homo Sapiens
  misc_feature (14)..(14): n is a, c, g, or t
  misc_feature (497)..(497): n is a, c, g, or t
aaaataacgcaggnggggccatgtgttttmcataggaatacrcacattaacaaagcatttcttatagttttccaaaactctattatrtcagtccgaaatttataaattatatagtatcagaattcttamagktaaaatgrattccckgtwmctactggatatgckactttttccaagagatgcwaatggacagaggatactggatgkggtkggtgttsrrtmaggtkkattgktagctttattgcctatagtctagtaagakgcaactttacggtgcckttgcmmtcaggakacattyctkaaaaaattgtcaraattttccatacctatgggctctagtatgatagattacagkgcmacacgtakkctcgttacatwattatmcgaaatactatagaacccaagagctcggggtaagcttttatttttgcggtctctgttgccatcttgcagacgaaggttgagtcttgatgatagtcgctgttagttgtccagtngtgagaaaatctactgtagctcggattaaatcacatgcrtactggcagtcgtgtacgcgawgtrcctcaaacgcctgttccgtgctgggtgctggtgggggccgtggtggacttctgcacgcatgctctctcactcacagctcgccatttttcttctgcttscctcccagccccaacacattcattcccgccccttccc

SEQ ID NO: 408943 - DNA, 583 bp, Homo Sapiens
tggctctacctgtcgaagtaaatcaacagggaaaattcatcctaaaacgcctcatctgctattaaaatacattgtcattctatttttggtatctattcaattatagttcattaagaacggttcatgaagcttgtacctgcttatggtaaacatcagtgtaccacacaaaacctgccacacctagacaggcttatgaaacaccaaatcttctatgtgttccttgctaacattccctcaagaccacagcattctagtgttaccagagataaagtacgtatagttaagtgatgaaagaaaggtattgggtttgtgtcgtcaccttatacatcctagtgatgaaactaaccaaactatgcctccatgccttccctgaaaataacctgagtcggctgacgaaacagactgagcagcgtggctcccagtccactttatcagaggtggagctggaaaaccagagggctaatgtagtccaccagcagcttgtgcggataaccaagagttcttggctgttgcagtatccactgtcccaaaggctaagccactgaggtgggaatcactcgcagcataaagaagactggactta

SEQ ID NO: 408944 - DNA, 499 bp, Homo Sapiens
  misc_feature (374)..(374): n is a, c, g, or t
  misc_feature (417)..(417): n is a, c, g, or t
  misc_feature (427)..(427): n is a, c, g, or t
  misc_feature (433)..(433): n is a, c, g, or t
  misc_feature (451)..(451): n is a, c, g, or t
  misc_feature (468)..(468): n is a, c, g, or t
  misc_feature (473)..(473): n is a, c, g, or t
agattctgacttagccagagcatctgagtgttcaagtacagttttacagtggctaaggttgtctcttgatcttttttctccgttgtgtgatccagatgctatttctgttttattggtgattatacgagacttctaatacataaatgaacgggtattggtgcctctttattttaaaaaatttgaagaaaagagccacctcatattcatagggtgtgtattttttgagtgtgagcatttaattgaaaataagaaagctatgaagtaaatgttaacttctctgtaggcagctaatgcataggagacactaaaacccacaccacattttgtggggaaatgagggtcctgatcctcttttgtcctctccagggtagtcntcgcaggttgtggcagctttaagtttcagtcttcttttatggntgcgattggntttccncctcagtgggccttggcntttgggggacatggggnactgncaacagcccagggacctttgggttat

SEQ ID NO: 408945 - DNA, 898 bp, Homo Sapiens
  misc_feature (104)..(160): n is a, c, g, or t
  misc_feature (333)..(470): n is a, c, g, or t
ccccccccgcgctcccagttgacgctctgggccgccacctccgcggaccctgagcgcaagavccaagccgccagcgctgcgatgtgggccacgctgccgctgcnnnnnnnnnnnnnnnnnnnnnnnnnnnnnnnnnnnnnnnnnnnnnnnnnnnnnnnnnttaactccttatattaattttctayttyatattcatttwtttctaattacyttwatatytayattacttwttattacyattyatatttttyattaytttttyyatcwattttatttwtatwaatyttccacaataatttttawcywtatatttaawatttytwtttwactawnnnnnnnnnnnnnnnnnnnnnnnnnnnnnnnnnnnnnnnnnnnnnnnnnnnnnnnnnnnnnnnnnnnnnnnnnnnnnnnnnnnnnnnnnnnnnnnnnnnnnnnnnnnnnnnnnnnnnnnnnnnnnnnnnnnnnnnnnnatatgaaatttttgtctcacctgttkaaaaatcaggkgtgcctkctgcagtttkctgtgactttctccaccactkgggccctkgtagtytgcwatcgccatcgcaaccggaaakatkctgtcctttgcggaacagyatctkktgtgwctkckcccagkacttcaataatcacggctkscaaggggggtctccccagccaggctttcgagtatatcctgtacaacaagggkwtcattkkttaagacacctacccctaccagggcaaggatggttattgcaagtccwacctggaaaggcatcggctttgtcaaggatgtagcwacatcacaatctatkacgagaakcgatgtakgaggcgtkgccctctacaaccctttgagcttakcctttkaggttacchagrtctcatgwtktatatackgtatcta

SEQ ID NO: 408946 - DNA, 491 bp, Homo Sapiens
  misc_feature (272)..(320): n is a, c, g, or t
agcggcaggggctcacccggcgcgttggcgcgcctttcttcccttcgggtgtctcataggaagattctgagatgtagtctggaatgaagttaaacagataggtgaggataaagcgaggaaacttgcttgtttgctgtattccctccaaatcaggagggaaagttagatcaggttggtcattcttttctcaggcactcaggccctgagaaatgaaggtggatttgtcaaggggatggtggcaaactggcttgggggcgatgctgagtaatcannnnnnnnnnnnnnnnnnnnnnnnnnnnnnnnnnnnnnnnnnnnnnnnnttgctcactaagcagggtcgggcccttacacatgcctggaatgcagtcaacgttgtcagtttgagttcccctatgtggcgcatgtgcgttaacgttgtcccaagtgacttcacagcgctggtgtaagttcttaagacgtacaagggcgtgatgtgtacaccaaggaccacg

SEQ ID NO: 408947 - DNA, 652 bp, Homo Sapiens
aaakaccaacaaacccatcakkkacatatagagckagakattacaaaacagatggraakkkaaasragkgkkkkkktgaagkgcgkccaaattgagaacattgkgaackatkaaggacakgcckaaaarakgkacacaktakcagggaaacacaagkggcgctaakaggraaagrgccakaakacacatacagkgggakakaakksarakaggkkcaagggasagggakggggkarrgkrcaagadarccccaaagcgaataackagaackakaggggaaaksakagckgggkkksgaaackaakgsrccackatataakgskkkcscagaggragkrgaagggkcksarggkkkkrtgkggrsccatgakkktkcacgggttctcaaagatraaaccagagkkktcktkttgkckkkaakkkacackcakgggtgcskgkgtgcktkkataagaakaackrarakgkatcakgagargkgccakcaaacckgkggakktagagcgcaggaaccaagagakkkckktcakkkkkccckgkggcgckatkkkcccktcaaaaagkcgckgagggaattktakaaacagtggtggtaaaaagataattctgagatggcaaagaaatatgagacttggcacaagcacggatttac

SEQ ID NO: 408948 - DNA, 278 bp, Homo Sapiens
  misc_feature (53)..(80): n is a, c, g, or t
ggaacccggtccctcctgggaccttccagtagattggatttcactccatggannnnnnnnnnnnnnnnnnnnnnnnnnnnaggggagccggcagagccaaacaaagaaagggattaacaagaaaggaagaagctgtaggactaaggactgaggatcctggggtgtccccacmmctttcccctgcctgtcgcaggggcaagtsaggagggggaatccagaattaaggcctagcaggctataggaaccctcagagatgtgtgagatttaagagatctaga

SEQ ID NO: 408949 - DNA, 956 bp, Homo Sapiens
  misc_feature (128)..(141): n is a, c, g, or t
  misc_feature (249)..(271): n is a, c, g, or t
  misc_feature (294)..(294): n is a, c, g, or t
  misc_feature (311)..(311): n is a, c, g, or t
  misc_feature (341)..(342): n is a, c, g, or t
  misc_feature (344)..(344): n is a, c, g, or t
  misc_feature (346)..(409): n is a, c, g, or t
  misc_feature (427)..(427): n is a, c, g, or t
  misc_feature (431)..(431): n is a, c, g, or t
  misc_feature (438)..(438): n is a, c, g, or t
  misc_feature (440)..(441): n is a, c, g, or t
  misc_feature (443)..(443): n is a, c, g, or t
  misc_feature (488)..(488): n is a, c, g, or t
  misc_feature (491)..(491): n is a, c, g, or t
  misc_feature (505)..(506): n is a, c, g, or t
  misc_feature (508)..(508): n is a, c, g, or t
  misc_feature (510)..(510): n is a, c, g, or t
  misc_feature (523)..(523): n is a, c, g, or t
  misc_feature (532)..(534): n is a, c, g, or t
  misc_feature (538)..(538): n is a, c, g, or t
  misc_feature (540)..(542): n is a, c, g, or t
  misc_feature (554)..(556): n is a, c, g, or t
  misc_feature (564)..(565): n is a, c, g, or t
  misc_feature (581)..(581): n is a, c, g, or t
  misc_feature (583)..(583): n is a, c, g, or t
  misc_feature (586)..(586): n is a, c, g, or t
  misc_feature (598)..(599): n is a, c, g, or t
  misc_feature (601)..(601): n is a, c, g, or t
  misc_feature (614)..(615): n is a, c, g, or t
  misc_feature (618)..(618): n is a, c, g, or t
  misc_feature (620)..(620): n is a, c, g, or t
  misc_feature (622)..(622): n is a, c, g, or t
  misc_feature (624)..(625): n is a, c, g, or t
  misc_feature (627)..(627): n is a, c, g, or t
  misc_feature (637)..(637): n is a, c, g, or t
  misc_feature (639)..(639): n is a, c, g, or t
  misc_feature (641)..(641): n is a, c, g, or t
  misc_feature (643)..(644): n is a, c, g, or t
  misc_feature (649)..(649): n is a, c, g, or t
  misc_feature (663)..(663): n is a, c, g, or t
  misc_feature (665)..(665): n is a, c, g, or t
  misc_feature (671)..(672): n is a, c, g, or t
  misc_feature (676)..(676): n is a, c, g, or t
  misc_feature (688)..(688): n is a, c, g, or t
  misc_feature (692)..(692): n is a, c, g, or t
  misc_feature (698)..(698): n is a, c, g, or t
  misc_feature (703)..(703): n is a, c, g, or t
tcagcagcaggcctgakttaatttaaaccaaagstgcattgtgatggccatctatgtgcagagtgcgtgtgtgggttagcacatcaaaagtstaatcaaggctcaaaccaccatccttagaaatccannnnnnnnnnnnnngaaaaaggctttytttctcagttaaattagataagtcttaaagttgggaaactactaaaaacattaaaaatttaaaactgttttttgctaaagggtatagggtaaatnnnnnnnnnnnnnnnnnnnnnnnaaatgacaaaccagaaacactanaatgtgtttwcatgtgnaagaatcatcacgttgatttacgtcaaagnncntnnnnnnnnnnnnnnnnnnnnnnnnnnnnnnnnnnnnnnnnnnnnnnnnnnnnnnnnnnnnnnnntttattaaacaataggancgtnctgttcngnntntttcaaaactgcttccaagaaaacaagtgcaaattctacctagcnatntaggtttcttttcnncntnccttttttcctcnctggtttcnnnctgncnnnggtgtggggggnnnataattgnntggtttctggggggcncnctngccctttggccnngngttctgcttctgnnttncntngnncntcttggkccncngncnntgggntgggtttttggggngngtgtcnntttngggckggggggntgcngggtgnggtgnggccctcawmaakagctccaaaagggmacaraaamtggtaagtgaamtaaatatrgagaramargtgaggagaaaatacatagtaaatgmtggmtmgttattgmattttattmtmtcccttmtctcawcattcatcwtcttaagactgymtactgtgtacatttgmrrgggaatawctwtacmttaaamatagtaccttmmmwatwwtaamaaaaascawaagaaaataatwattwcaggctatacwakagct

SEQ ID NO: 408950 - DNA, 998 bp, Homo Sapiens
  misc_feature (685)..(717): n is a, c, g, or t
ggggsgtkgsggggstataggcaaggctgtagttgggggtgtgttttgccccactctgtacaatatagaagattctcatatagatactttgtatwtaagccacgtrtcctcatttgtgtccwcttattggctggctgggcaggggaaamwggggraaaaagaagcyggggtgtttbycccggccccggggcycccccctggyccccttcctctggctgtcccctggyggggtcgctttggytccttggtgggsgcbtggcscggctccagtsgccgggccaccttcccggttttctctttcccccgcycccgggycggcgggcctttcaacgtcgtgcycbccccgcctcccggtgcgttgttgttggtgtgctgcttttcactggcgccctccgggctgggcstggcsggckcctcaggtccgtyttctcctccggbgkkkssrssctscccgccaaaaccatcargtcctccggtgtcaaacgcsccccctccaggccctcctggctcccctgcttcctgctgttgcctccgctcgagggcaatgcgcagggccaagtacttggagaggtggtccactgtggcattcccagttgtcttcacatacctcgtctggcagtdttctcccttctccacgagccccsggtggggccggaacacgagctcaatttctccacctggctcnnnnnnnnnnnnnnnnnnnnnnnnnnnnnnnnnccagcgttccccctcccagagtccctccccggtmaccaragtyttccgaaccggcgsscccagccaccccaccagtamcgcstccccctgtacctaaactgctcccccctgcgccccctccacggggtygctttggkakcagggyctggggcaraktyaggggcggagkktgagctcaaatyttstccatccccttttycctccccggggtttccttbcccccaatcatcgktgtggtktgatttkamcctggtktbggcgsctyaaamgctkgggcctgt

SEQ ID NO: 408951 - DNA, 400 bp, Homo Sapiens
acggaggagcccagttgacagctgctacctgtgagaagacgctgataccctggtctcccggacaggccaggtcttctgggcttctggacactaggactccctcttttccccatcccaggaacgaccaagtatgcaggtccctcctctggcctttgggcatggaccacccacctccagggatgggtgaggagccatttgtctccacagtaagtgaagaggtatgtggagcattggattgggagaagctgactctccagcaagatctggtggtttcccaggcagctgaaccaagttctatgtacaaacttcaaagcgagaaagggaggcctggggctgggtgacattctgtggcatctcaagggagaaggagggagacggagcttgtcagcttgacagtatc

SEQ ID NO: 408952 - DNA, 841 bp, Homo Sapiens
  misc_feature (639)..(639): n is a, c, g, or t
  misc_feature (675)..(675): n is a, c, g, or t
  misc_feature (713)..(713): n is a, c, g, or t
  misc_feature (722)..(723): n is a, c, g, or t
  misc_feature (739)..(739): n is a, c, g, or t
  misc_feature (750)..(750): n is a, c, g, or t
  misc_feature (768)..(768): n is a, c, g, or t
  misc_feature (782)..(782): n is a, c, g, or t
gggaaaaacattcaggactcatgaagagctgaaatattcatgaatatcaagcagagcaagagttaactgaatgggctgaactaatagaagacatgtaatctgtttaactttttgcttaaaactttgctgatgttttgtttttcagagtcaagaaaacttttattttgagctatttacagcttttaacaattgagtaaggtatactcctgtgaacaaaatttggagtgtatttgttcctctgctggtttctctagaattcagaaactatttgtgagtattcttatggcaatgtagttatttgcataagtgcaacaagaatcccattttccttttggcaacaggacacaattggagaaactggtgggttttaccagtttctgatagaagggtgtgcttcccttttaaggaatcaagcttgactttgcagagcccaaaaaaaagggagaaactggcctccatacctttgtcttacacagtcccttggtacaggggctccctaaacctggtgattgaagttaaaagaaatggtcacctttttcttaaccaagggtccccagggaagccccccaaagtttttatcctggggggaacccctccaagaaaaagaagaagggaaatttttccgcgcacaacttcctnaaggtttttttgggaaaggggtcacccaacaccccnatttggcttggcggcctttgaaccctttttaaaaaaangtccttttnntttgagaaatatttcnccccttttggngaaaaaacaaacatttcncctctccacaaagnacccacaatattttcctaatacacctgaatatttgtgtgagaacaaaccataacattat

SEQ ID NO: 408953 - DNA, 483 bp, Homo Sapiens
  misc_feature (48)..(113): n is a, c, g, or t
  misc_feature (149)..(199): n is a, c, g, or t
  misc_feature (287)..(287): n is a, c, g, or t
gggaaaaacccaaccccaaaaagcccctttaattccggcccaaccgcnnnnnnnnnnnnnnnnnnnnnnnnnnnnnnnnnnnnnnnnnnnnnnnnnnnnnnnnnnnnnnnnnngggtccaaaaaggcccccaaggggggacttaccttnnnnnnnnnnnnnnnnnnnnnnnnnnnnnnnnnnnnnnnnnnnnnnnnnnnccggcctggggggaaaaggggcttctttttggcaaaggaaaacttcatgggggtgttctgggggaacttaaaaccctgcaggggattnggaggtgcccctgcctgtgccccattgtgaaacctcccaaaagggaagggattgccccccgggtcccaaacgggcccccttggaacccgggaactgtattaaaaccctggcaagccagaactcgttggcctcctcgggccggtggggaggaaacaaatgtgaatcggggattcctaaaaagaggtgggcggggggc

SEQ ID NO: 408954 - DNA, 960 bp, Homo Sapiens
  misc_feature (93)..(93): n is a, c, g, or t
  misc_feature (204)..(204): n is a, c, g, or t
  misc_feature (327)..(340): n is a, c, g, or t
  misc_feature (434)..(434): n is a, c, g, or t
  misc_feature (477)..(477): n is a, c, g, or t
  misc_feature (522)..(522): n is a, c, g, or t
attttaatgagtcagagaaaaagkaatttttcttcaatacaataatagaacaagtagcctattctcttaaaaagtatgtgaaaagaaaattangaagaawtatgcwtacctaatgaagtattggttttagtaagaattaaatayatttcattgagctttaaagtactttggagaaacttcggggcacgttttccgacgcgaatncaactataagttataaatatagagataatactcatttcagataatctatggattttataaaattattttactgcagccaagtttgcatttcaaaatggaattgcagtttggagcttttakgcnnnnnnnnnnnnnnararagatttgcggcaaaawkgcyakktgggcakgktgggatggatgttgcaawagataaccggagcckcyagtcggtcatataacatgaatanggtatatcacctctcttctattgggtctcaatttattatttancgatatggtawactcagagatcactccttaggggtgtktcctwtntgcaatwtkaccgayaawgtagacaaaasagyattgtaattaayccatacaawatatycaactctggattctgtgaataagtatcttgaccttatawagttattgckgktctttkktckawtgtwtatagtgtccattwktaaaagtgaaattcwgkyttaagkatggtgrattggatcaymattwcayawtagwtggytttttctmttkcrtgaatatacattttggatcacctccaaakaatgaaaaccagtagtacgttttagrcwtatmagtcaggatgagaaactatawgagggktgkracatgkggatttgcaccaaagtgagcgkkkaaacttcktatttaatgtaaaawwagtcagaaatgkaawwgctcakgakggkktgaatccaaaraarttarawcttttwtaaggggtttmattwtaaattttaa

SEQ ID NO: 408955 - DNA, 823 bp, Homo Sapiens
  misc_feature (163)..(204): n is a, c, g, or t
  misc_feature (641)..(704): n is a, c, g, or t
gatctttgtcccgctcctgccaccccacgaagacagacgtgagggtcaggggagccgcggtgctaactgccactctgggcgggcacaggcgagggctgtgcagcacccgggcacgtggggtcttcggaggggctgctccccacaccacttcccctgcccctgnnnnnnnnnnnnnnnnnnnnnnnnnnnnnnnnnnnnnnnnnngctgccctgggtgagagccaggagggacactgggcaggcagatgccacccccaggtgtggggacccccgctactgagtggccgggaggagcccacaagcttcccacatgcagctgaacccacagggtgtgggcccggggtccggggtcaaggattggggcctggtgtggtttggggagaagctcaaaggccgcccggccaccttggacccttttgggggtgaggggagcccccagaggccaaagcccccatggtcctttcccccttctaacagggtctagggctcttagggccccagaatttggagttttttttgtttgccgggccttggtttggggttttggggagcccctgtccaaaacccccccttttgaatgggctgggggggcgcttggaaacccaaggccccggccctctggagaggggccttcccctttnnnnnnnnnnnnnnnnnnnnnnnnnnnnnnnnnnnnnnnnnnnnnnnnnnnnnnnnnnnnnnnnaagaggggagttcaggcccactggcctctgggaggcttcagggttgcaggaaggttttctttcgggaagcccccctaacgctgtggagaggcccaactgtgggaggcttgtctaagaga

SEQ ID NO: 408956 - DNA, 457 bp, Homo Sapiens
taatcatcaactttataatactccaatattccgttttataataattcagagccctgtggcttttacacaccgttaattatgtactctgttggaagtgcacatgaaaagtgaagaaaagttcctcttgtgattaaactaatgggaggaaataaatcaacaaagtctccattaagttctacattttgagaccttttaaaaattcccctcacaattctttaaggagcccccctttttatggaacatgagcctaaaaattatagaaagaagaattttaagttaataaagtttgtatttataaatgctgaaaaaatacagaaactttctgttccaaatgtgttgcctttgtgtattttataatacagatactacattgtaaacatttccattgttttatgatttagccagtgattccccgcagcctcttagtgttttaatatattaatctgttttggtatgc

SEQ ID NO: 408957 - DNA, 872 bp, Homo Sapiens
  misc_feature (41)..(41): n is a, c, g, or t
  misc_feature (61)..(71): n is a, c, g, or t
  misc_feature (78)..(78): n is a, c, g, or t
  misc_feature (576)..(620): n is a, c, g, or t
  misc_feature (771)..(818): n is a, c, g, or t
tattagaaasvtccctgttgkktkgkkgtctttcaccgttncgttktbttttwttawwawnnnnnnnnnnnttagagngcacttctaattacgttttgtaaactttttaaagtcaaaacttttaaaaagttacggcaaaaagggtaatwtttwttcwtwttttcagtwttttttgttwttttgtggctatttttaaatagagggggggcgatcaaattgcttacrgttccccmccrgctggcgcggggckgcggtgcggcgggggcggatatratacggcgtckgkgcmcctcaggctctacactccgggrggkgtcactgtcccattttcmcaaattccggtctctaacggggggcctctgckgckgggccgggatccttttcgggktcaccgggkgggggggcctcggcgggkgactcttcggggggckttggggctgcggcctcgggcccccccttctcaggktckggggcggkgkckacgtttcccactkggctagkggggggttcagcggttttgttaccacckgccctgtckgtcacctcgggcttttcctttcctcgggcttcttcctnnnnnnnnnnnnnnnnnnnnnnnnnnnnnnnnnnnnnnnnnnnnnkatkcccactagagcgtctatttctctcttccaaktctctktkcctttccckktcakkkctcctccttccccactctctcctktcackkttactattatctctatcatcattacgkttcccatacckttccckktcattttccaccctatnnnnnnnnnnnnnnnnnnnnnnnnnnnnnnnnnnnnnnnnnnnnnnnnacttctkcctkttatcatttctaaacttctttttcwtcttctttttttgakgag

SEQ ID NO: 408958 - DNA, 1042 bp, Homo Sapiens
  misc_feature (26)..(26): n is a, c, g, or t
  misc_feature (195)..(195): n is a, c, g, or t
  misc_feature (237)..(238): n is a, c, g, or t
  misc_feature (541)..(541): n is a, c, g, or t
  misc_feature (555)..(555): n is a, c, g, or t
  misc_feature (572)..(572): n is a, c, g, or t
  misc_feature (724)..(737): n is a, c, g, or t
  misc_feature (951)..(951): n is a, c, g, or t
tcycttttgtttttttacttatttgnctatcttctcaaaamcgtgacwttcgtttataacacataaactacatttttagttgttaagtcaccttgtagtataaatatgttttcmtcattttttttgtaataaggmmcataccaatmccaatgamcaatggccaccccatcttatttcgtyattcttccaatgycnaaytcatctctggccaacccccaattmmccaaagavaagwcnnccaattgtccctctgtycaccaatacggtccttttkggttgtttggggrtrtgtckggsggggccgcggcgttgggctgggggsgccatggsgtggggkctggttgcgttttcctcggtggctttttcctttgtctttccttcgkctgttttttcggtttttggycggtbcgggtgggggttggtctcggctctctctttctttggtctcgggtgttccttttgtgctctgggttttcygtccttccctcctggcttgtgtttttggtgtgtktytctttctttggcttccggtggygtytcncgccttttttsccncttcctgcgcccctccntgtggctggctctctgtccccccccacccaacaatattcccccggttgtgacaagamtctgctcctccggtctctcttatctcttcattgctaagcccactctcccagatmttgccgcctgtcagtctccccsascmggctaatgtttcmynnnnnnnnnnnnnnacacagcagccattcttttcttggccaatctgcrggcytcctccctcaggcccaatgtgacctgtggccatctcaacagtggtcgccgccagtccccctttcccccacacggctgtccscccttcctctgccttcccaggcgccgcacaggtgggtccccttcccccsgcccacatggcttctgccacccgtttgtcyyctstcsgccacacanacmmtwtgggttggccstggghtccggtggwtttathtggytctttttgtgmataggcmcaggcggtttgtttatthtttgtggkttggac

SEQ ID NO: 408959 - DNA, 1078 bp, Homo Sapiens
  misc_feature (333)..(459): n is a, c, g, or t
  misc_feature (579)..(622): n is a, c, g, or t
ktcwtttagaattcaaaaagttttaaattggataatgccccacatcctttatggtacatactggatatctggcaaatgtaagttcctccttctaagccttagtttgctcattgtagagtgctagtaataatacgaaattcacagggttgtaaaatctaaagaaaatattatagccaaagtacctaatatactgaatagaacatattagacactcaacaaatgtcagttctgttacaatcccagaaggaaattacatatgtaagavgcttctcctataarartattttggrcagggtattcctgggccacacttgcatcagctggccacttggnnnnnnnnnnnnnnnnnnnnnnnnnnnnnnnnnnnnnnnnnnnnnnnnnnnnnnnnnnnnnnnnnnnnnnnnnnnnnnnnnnnnnnnnnnnnnnnnnnnnnnnnnnnnnnnnnnnnnnnnnnnnnnntttcagcaaatatccagcaccccttctgagtcttccatatggcatctacaacttccagcaagtcttgtcatatcaccagcaagcagtgaagctagttattggtgtacatttcatgctgtnnnnnnnnnnnnnnnnnnnnnnnnnnnnnnnnnnnnnnnnnnnnatgatggcccatagtacttaatacaatgtatcccgagagtgtaatatggttggtatgagcaatgtcaaaggcttttaggctcccacctttgatctgtagattgacacaacaaataagtccttagcagaattatgagtctgccaacaaggtttataaagcacactttcacaaagccaaagaacaaagcccgtggccgtgggatggcatcttagggctccagaggtcattttgggcttgcttccagggcagagttggaaggggatagatctacagccaagtggagggtttctggagaaggtacaatggtgtatgctgctgggcactgccactaatgggtggtcaatacttamaaaaaaagtamaatctacccccamcagtggtgtccattaaattgatttatcttcacagtgacgagaaaggctgtcttagggaaacagatgccaaccagtctagtaa

SEQ ID NO: 408960 - DNA, 1001 bp, Homo Sapiens
  misc_feature (63)..(63): n is a, c, g, or t
  misc_feature (78)..(94): n is a, c, g, or t
  misc_feature (139)..(139): n is a, c, g, or t
  misc_feature (238)..(239): n is a, c, g, or t
  misc_feature (298)..(298): n is a, c, g, or t
  misc_feature (310)..(310): n is a, c, g, or t
  misc_feature (317)..(318): n is a, c, g, or t
  misc_feature (322)..(323): n is a, c, g, or t
  misc_feature (327)..(328): n is a, c, g, or t
  misc_feature (333)..(334): n is a, c, g, or t
  misc_feature (346)..(346): n is a, c, g, or t
  misc_feature (348)..(348): n is a, c, g, or t
  misc_feature (352)..(352): n is a, c, g, or t
  misc_feature (354)..(354): n is a, c, g, or t
  misc_feature (409)..(411): n is a, c, g, or t
  misc_feature (415)..(416): n is a, c, g, or t
  misc_feature (418)..(418): n is a, c, g, or t
  misc_feature (420)..(422): n is a, c, g, or t
  misc_feature (430)..(430): n is a, c, g, or t
  misc_feature (432)..(432): n is a, c, g, or t
  misc_feature (435)..(435): n is a, c, g, or t
  misc_feature (437)..(438): n is a, c, g, or t
  misc_feature (440)..(440): n is a, c, g, or t
  misc_feature (442)..(442): n is a, c, g, or t
  misc_feature (444)..(445): n is a, c, g, or t
  misc_feature (447)..(447): n is a, c, g, or t
  misc_feature (449)..(450): n is a, c, g, or t
  misc_feature (454)..(454): n is a, c, g, or t
  misc_feature (460)..(461): n is a, c, g, or t
  misc_feature (464)..(464): n is a, c, g, or t
  misc_feature (547)..(596): n is a, c, g, or t
  misc_feature (879)..(879): n is a, c, g, or t
  misc_feature (932)..(941): n is a, c, g, or t
gaagawttagggcatgttccctcctatcaatttacamctcgttcccaattttamatcttggtngttaacttgcttccnnnnnnnnnnnnnnnnngacttcaagtactggaagttatgamaccaggttctaaatgtggancccatctgctttgccccatttttcgggccctgccccccttsctgcgtccggsgtcttctgccttccyccctcggtctctsyccccctccccctgtgtcnnccttcttcctggsgbgggggggtttgttgttgcytgtcagtgtgttggtttcytgtggncgttcactttgnctttggnnctgnngctnncgggnntktgtcttcctngngctncntctctgttctttttttctccctggkggtggtttcccttctcccctttccttgccnnncttnncngnnnttctgtcngntcncnntncnanncntnnctyngggtgnngcncctctggcgatgatcagcatacagcaaggkacagakaggtagcgtttccttrgtgacagctcctggmtgactcmgatgatwtnnnnnnnnnnnnnnnnnnnnnnnnnnnnnnnnnnnnnnnnnnnnnnnnnntcatacagtgggattccatacatgggagtttctccttcawatatatmagagataagctgaggaaatggtataacaaagaaaagcgtataagatatamamattttggataattatgcacttttcttttttaaaggacwatcaatatagtagttagaaacaawgtcattgaacagttaggagatccagmccatatttwtcwgatarggagcaaggktcwggaggagtgagagakggggtccaaacactgrgmgggggyacactagcytttcacgcggccaaagwnaagatmtgttckctctttaackccatgacattcmmaggacacgggatkgggmnnnnnnnnnnkrgcgsggraacaggtcarsmggrggagrgatgacacccccwgctstgggtckgagagaa

SEQ ID NO: 408961 - DNA, 445 bp, Homo Sapiens
ggggagaaaaatcacatttattagttaagacgaccacaggctggacacaacacacatgctaaaaagtggactgtcttttaaaacttccaaggtaaataggtaaatgttttccacagcccaacaatcatttcagtgtttacaaattaaaaggcccacggttaagacattaaacagtaaaatatgtaataaatgctccaacctaccctctcccccgaaagctgcttctaagtttaaaaccatgaatttgactaaccatgccattgaaaaccatccaggttactacaggctgaattagttttcaatgtctaagtcctagaaatatcactccctatcccagccctagcaaattctaactttacatttgacataaggcattaacatcaattaaagcctcagtttaataatcagaatttaaatgaagtctcctgaagacctctcttctggc

SEQ ID NO: 408962 - DNA, 469 bp, Homo Sapiens
  misc_feature (374)..(374): n is a, c, g, or t
  misc_feature (391)..(391): n is a, c, g, or t
  misc_feature (405)..(405): n is a, c, g, or t
  misc_feature (422)..(422): n is a, c, g, or t
  misc_feature (447)..(447): n is a, c, g, or t
  misc_feature (453)..(453): n is a, c, g, or t
attgttaacaattataaacatttattaagcaccaagaatatactgtggtggttgctatatgaaaacataattaccaatatagtatccctgccattgagcttacaatctaaaacgaaatacaaggctatgagcctatctaaaaacttccttaacttagaaatggctactttggcaaatgagtgaggcaaaatgacctattattcaggtgcagtgctaataaggctttgaatatcatccaaagaatgttttacttgtacccattgttcctgattatgttacacttgctaagaaaaacagtacttagaattttggcatgaacaatgaattatttcaaattgtcttgtaggactttaaacaaagagatgcctactggnctaagttttccagcagncaggggaaagcccnatttaaaaatattatgnaactagaaccaagtttccccttttnaatccnccttacaccttttttt

SEQ ID NO: 408963 - DNA, 366 bp, Homo Sapiens
cctttcttatgcctattcacattcccaacaagctgctagattgttcaaatcaacgcacgcccttttcacttgatataaactcacatacccaggaacactgtgggctcagaacattatttcacaagcaggtattgctggcacgttgttagtgccacatttagatcccgattaaatgacatcattttgttcctcagatcctgacatacacaatgaaagtatttgaaagttacataaccagttgcacttaatgagtcatcctttgtcaatattagaatgagggaaccaggatatgactaggaagagactcaaggggtaaaatctgaagattctgtcccatacctctgcagaatcatggacccccacaga

SEQ ID NO: 408964 - DNA, 111 bp, Homo Sapiens; identical to SEQ ID NO: 300928

SEQ ID NO: 408965 - DNA, 377 bp, Homo Sapiens
  misc_feature (55)..(55): n is a, c, g, or t
  misc_feature (145)..(145): n is a, c, g, or t
  misc_feature (186)..(242): n is a, c, g, or t
  misc_feature (258)..(258): n is a, c, g, or t
  misc_feature (357)..(357): n is a, c, g, or t
gaaatgaaattgtatttttatttcattttccaaatgctcattgctaatacacaanaatacaaaagactacttctattgaagcttatattctgcaacattaccaaactcactaattagttttggcagatttttgtaagatttctanggattattaacatacacagtcattatctgtgaataaagacnnnnnnnnnnnnnnnnnnnnnnnnnnnnnnnnnnnnnnnnnnnnnnnnnnnnnnnnnttgcattgatttaganctctagtataatgctgaattgaaagaataacaacagatattctacttttttctctgatttaataggaaaagcattcaatcctatgccatttaatataanggttacctctgaggtttttt

SEQ ID NO: 408966 - DNA, 297 bp, Homo Sapiens
cagacccaattggaatactttaatatgattttaaacagcatttccattttccttcccatgatgtgtctgctttctctggtggcatggtataatggcaagaatatgagttttgaaaccagacactctatatttggattccagctcaatcactttgtaaagaccttcagcaagtcctttaattctctgagccttagtggcttcatgtataatctgggaataataacacttgcctcacaggtttgtctcaagataaactgcagaaagcacttagtacagtgtcagccatacatttaggag

SEQ ID NO: 408967 - DNA, 404 bp, Homo Sapiens
  misc_feature (61)..(69): n is a, c, g, or t
gcaagacagaagcaggcaccttttttcacaaggtggcaggagagagaagtgagtgcacagnnnnnnnnncctcctacttttaaaaccatcagatctcctaagaattcactcactatcatgaggatagcatgaagtaaacttcttcgacacatggcgattacaggtccctctgtcgatgtgtggggataataatttgagatgaggtttgggtggggacacagagccaaaccatattattctgctcctggcacctcccaaatctcatgtcttttatatatatttcaaaaccaatcatgctttcccaacagtcccccaaagtcttaactgattccagcataactcaaaactccaagtccaaagtcttatttgagacaagtcccttctgcctatcagcctataaaatt

SEQ ID NO: 408968 - DNA, 342 bp, Homo Sapiens
gttccttggtgcactgatgtggtctttgaaactcagaacaaatgttacctgggccgatgttacatgagtatttggccattaaaatcagataaagaggccaacctagcaagttactctcattgaagtgtggcttgtctgccatcctcattgggagcacgtagaacctccccaagctgagtgggcagggtccgtgtggctgtgtgaagggccccgtcgtcttgtgtagctgctcccgtgttgagagtatagcacgttgaaaacagccttggcaggaaccacgcttgctgttaaccagctcgtccactaaccagctgtgtataccctaggtcaggccagctgttt

SEQ ID NO: 408969 - DNA, 543 bp, Homo Sapiens
  misc_feature (419)..(419): n is a, c, g, or t
acctatctcactgggttgctgtaaaagataaacaagattacaaatgtatagtgcttagctgcagttgctgacacatagtaagcaccccattgttattgttattgttagcaaaataagactccatggtagaaaaactatgcaagtcataaaatgtatcagcattaacttttatcaacagatagggtgctattaaatgtatcaccaacatagtaaaatgacagaaaggaatattacagtgtgaaagcatttatttatttgtttgacaacagctacaattgaaatacagcaattctgaaggtctttaaatgggttgcactttgccctgttaactcactatttcctgattggcaataattttacttggtaatgctctgtattatggtaaaagctaacaataataatttatcgagtatattctntgtagcaggcacagttatgagtgctatgtgaatacatttaatcttcacagcaactttgaagtaggtactattactgtgcatattttgaaatgggatataccagaaactgtgacatagcccaggg

SEQ ID NO: 408970 - DNA, 352 bp, Homo Sapiens
ccataggttttagggaacaggtggtgttcggttacatgagtaagtttctttagtggtgatgtgtgagattttggtgcacgcatcacctgagcagtatacactgaacccaacttgtagtcttttatccctcacccccttcccaccctttccccctgagtcctcaaagtccattatgccattcttatgcctttgcatcctcatagcttagctgccacttagggttgagaacatatgaatataatgtttggtttcccatccctgagttacttcccttaggataacagtatccaatcccatccaggttgctgtaaatgccattaattcattcctttttatgtctgagtagtattcc

SEQ ID NO: 408971 - DNA, 597 bp, Homo Sapiens
  misc_feature (394)..(394): n is a, c, g, or t
  misc_feature (444)..(444): n is a, c, g, or t
  misc_feature (548)..(549): n is a, c, g, or t
  misc_feature (577)..(577): n is a, c, g, or t
ggaattcggcacgagcatctctccaactaaagtcctataacattccaacccattgccttgagttctccttggttgatctcctgcgtgtcccaactctcagatagtcctgtcacactcatggggctttattgcctagtttacatgggggtgcttctttcctgcctgctgcttccctctttgtgggtgaagatcagttgctataatggcctggcctttcttcctcttcccctttcactcaattcttctctttcagcccccaggaagacgcagtagcttctctccttggtaaatttgggaaaaataaactggatgtaaaaagatcagctttcacctctatagtttcactctccttttctatgctttcaaggctaaccagcctctctgaagactgctntaaatctttattctaatatgacaatatgttcagtcagctctcccagattntatataactgggagttgtcttttcagctcccctcagtgcctctctgctctgagttaacatctgttgctttcaaagcttaattgtcagatgccattcattcaaannattgaacatggtcttacgcctcatgatngtcacactttccatttcatt

SEQ ID NO: 408972 - DNA, 369 bp, Homo Sapiens
  misc_feature (332)..(332): n is a, c, g, or t
ctatgaagaaatttggcagagaaactgctatttaaataattcttcatgaatcacaaatatttttcctcaatttatctgctattttatgtcattacctgtgactgttagtattttaggacaatttcatttgactcctgttggaaataagtgttgcccttttaactatgacttcagtaaaactctcagtgagctgataggaaaggattctgattactcagctgtctaggctggtatacacagagcagtgagtctgtattgttgggaaatgaagttggaattttgcagctttactgaatatgcagggagagaagaggaagccagaactggcctgnggtgtacagctaatggccaaagaatgttctcctgaag

SEQ ID NO: 408973 - DNA, 372 bp, Homo Sapiens
  misc_feature (303)..(322): n is a, c, g, or t
ggccgtgctttaggggcaacagtgccaccatgtgaccagaacaaaggttctggagcagaatttgcactaaggtggaggagcggccaagaggtgtgggacggggcccagagccactgacataactcctccaagtgcttctctgaaacaggctgagaggttctgtgactgcaactgggaagtcagacccaagtcgcagctgagagaaatggttgaaagctcactttctcaaggtttagattagtggtgactaacttccaagcaaacttcatagaagagtttgcaaactttagtgccagcagctgnnnnnnnnnnnnnnnnnnnncatattgagactatttttctaattaagaatagggggtagccataaagagc

SEQ ID NO: 408974 - DNA, 349 bp, Homo Sapiens
agagatgataatttattgttttaccatgactcagaagagaaacaacataaagagaatatttcaaatccccacaatttccttcctcaacctcactactcttaacatttctttatcagacgccactggcttcctaaaatggaccactgactatgtatgtgtacacatttcattatgctgccttttctcttatgattaaaactttagccctcattcgaggtttccaatggttacttttagtggaggagttccctagcttttaaaaaaccacttttcctctaagattccattatttattgaaagaagtctttctagaaatgttaaggaggattttaaatgaacacattcaatt

SEQ ID NO: 408975 - DNA, 789 bp, Homo Sapiens
  misc_feature (279)..(393): n is a, c, g, or t
  misc_feature (489)..(489): n is a, c, g, or t
  misc_feature (613)..(613): n is a, c, g, or t
  misc_feature (618)..(618): n is a, c, g, or t
  misc_feature (674)..(674): n is a, c, g, or t
  misc_feature (728)..(728): n is a, c, g, or t
  misc_feature (749)..(749): n is a, c, g, or t
aaaaccctgtgtgttcattggaaccgtatcaggcttggggctattcatgtagcattatttccatttttatgtatatgatatatgacgtctgatgcattggccagtaatagtcaaattaacccagccaaattgtcacagtgattcttaaactgtggttctcacacttgcccaggatgttgttaaatgcagatctgaagaccccaatctcagaaattcaaatttaagcatggggcccaagagtatgcattcttaccagataccttgggcagtgactgtcannnnnnnnnnnnnnnnnnnnnnnnnnnnnnnnnnnnnnnnnnnnnnnnnnnnnnnnnnnnnnnnnnnnnnnnnnnnnnnnnnnnnnnnnnnnnnnnnnnnnnnnnnnnnnnnnnnggcaggggcaggggctagcagttgtgtttaagcaaactctgcaggtgtctttcttatcctagtttgagaaccaatacccaacaacctacgtgattntggtgcaagtagtgtttgaaacacactgaagattactggcctattactaagacacttttcaaaaagcatgttttaaatcagtgtagtccaggatcacactatattaaatataaagataacttanaggantcatggatcattcattttggccaaatttttagcttcttcaaagtgactaacatcanggcctacaataaaatctgtaattcttcaaacgttagtcctttatattgaggcangaagggctcatttagtactanatagtacatacattattaaaaaccatcattagtgtcatca

SEQ ID NO: 408976 - DNA, 155 bp, Homo Sapiens
agcggaaaatatttctaatccctgcctctgtaataccatattctgtacttttcttcctattttactctgccatgccctcatgttttcattgttatctctttttcatctttcatctttactaggcaataagaatcttagggatcacagattgactc

SEQ ID NO: 408977 - DNA, 397 bp, Homo Sapiens
cgtgatgcctccagtctcattcatcagtctgaagaccacaatggactctgacctggatcatcatttaaaaatcatcagctggtcttttgcccaggctatgttacgcctttcaagtagttctgacaaggaagatgattattctaaccagcattatgatgttgtttgtttggcctgagtcgctctgcatcataatattcagtagcatttataaaagctgtctagttagctctttaaaaacttttgtcctgcaaaatgtttgttagtcaacacactactttgtgtaaacaactattatgtttccttgggaccatcacaagctctttaacaaacacaaggactcaattcattcagcaggtggggattaaagaatcaaagcccagtagcaaaaccgtggttt

SEQ ID NO: 408978 - DNA, 382 bp, Homo Sapiens
gaaatgaagactggctctgtggtttgaatgtatcctctctaccttctccttttcctccttcttcttctttgggctatgtatccttaaatcacttctttagaaaaacagcatgagaagtactttctaaatacaggcatacctcagatatattgggggttgtgtttcaggccaccataattgtgataaactgaatatcacaaaaaggtaagtcatgcaaattttgtggtttcccagtacatatgtcctttccccattgcttgttattgttgattttgtcaatgaccagatgattgcaggtgtgtagctttattcatgggttctctgtcctgttccattgatctatgtgtttgtttttgcatcagtaccatgctgttttggttac

SEQ ID NO: 408979 - DNA, 209 bp, Homo Sapiens
agaactcattggtaatctacataacctctcataattaaacagataaaaatttgaagaaagagtattttgtcgtagaaacaagcgagaataagaatatctgagggataaactggcactataggatcattgtgttcagtgtcctaacattcaagaatcgtctacattacattgtttaaggaaaacaaattatcagcggtgtgaatacgtgg

SEQ ID NO: 408980 - DNA, 703 bp, Homo Sapiens
  misc_feature (136)..(257): n is a, c, g, or t
  misc_feature (479)..(479): n is a, c, g, or t
  misc_feature (627)..(628): n is a, c, g, or t
gaggaggtaaggttgctggggaggcaaaacagaacatgacgaagccacactcgggaataacattgaggagtgtctacatttgattgcctggagaaagaggaaaaaagaaggaaaactgggtgataatgttaccaannnnnnnnnnnnnnnnnnnnnnnnnnnnnnnnnnnnnnnnnnnnnnnnnnnnnnnnnnnnnnnnnnnnnnnnnnnnnnnnnnnnnnnnnnnnnnnnnnnnnnnnnnnnnnnnnnnnnnnnnncaatgaaatgattaaaaggataactaaaggaaatgtatagaagaatgaaaaggttgagtcaggggcacagcatagtaacatgtaggaagagaggatatagacattacattgcctggggacatctctttccctctctaggccactagcataggttcaaaacagagactaaattgcaatgcttatattctgtgtagactaaagactgaaaaagtaatggagctntactaaaagatgggtttcaaatgagagagtcagatgaaagtgcaagggatttccagcacctatgatggtaccatagttgtagatggcaggaaagcaaggagcagaagctttcaagtcgagtgcacagtcattttatgagaaggtgcanngaaatgatgagggagtttacagaaccccactgtctcactttgcatgtatgggcgcctttattagcctgtgggttt

SEQ ID NO: 408981 - DNA, 268 bp, Homo Sapiens
tcggactgcctttgtcgctatcaaaacttttgggctatttctaaaagctgactgatatttattctagaaaatctttttagtttttggagtttctttttaatatcctgggctgcctgagccacaaatgctaaattaagagcaaggctattttcgggagctgccgggtcaaaaggggtgtaaaaattagaatagttagctctgggttctagttgaacatgctttgatactaggggatgttattttcttgttcttgttggcccttatcgag

SEQ ID NO: 408982 - DNA, 495 bp, Homo Sapiens
  misc_feature (286)..(391): n is a, c, g, or t
acagccagtcatttgtagatttaattaataggttaacacatgcaaactttttagaacagtagctgcaggtgccaaatacataaaagcaagcaactattccttagtaacgcattatagcagtgatatttaggtgcaaagaagtcactcctgacaatacaaaactttttactttaaacttacactacatatgtatatagcaaaaaactcctatatgctactactcacatcaatacttttagccaccaaatgtgtgggtttctcctcacaataattcaattctccaatnnnnnnnnnnnnnnnnnnnnnnnnnnnnnnnnnnnnnnnnnnnnnnnnnnnnnnnnnnnnnnnnnnnnnnnnnnnnnnnnnnnnnnnnnnnnnnnnnnnnnnnnnnccccaatttcacacgccaatcataagtggcaggttcccatgttatattaggatatataccacttttgtccaacttgtctacaaatcaaaggttcccataactcc

SEQ ID NO: 408983 - DNA, 425 bp, Homo Sapiens
  misc_feature (116)..(138): n is a, c, g, or t
  misc_feature (327)..(327): n is a, c, g, or t
  misc_feature (354)..(354): n is a, c, g, or t
cttcttcgtaacacattgtatattcttgtttttgtagaatattcgaatgaggataaaatgatgaaaattacaataggttaattgcatcccttgtatcacatatttttggtgcattnnnnnnnnnnnnnnnnnnnnnnngcaaccagcataataaatccggcctagagaactgtgttagtgacttgaagggttaacacagattttagaagtagttaaaaatagtattagaggattatacatacaacagtttaaaattcatatggattgtatttttttcttttaaaaatggcaaaatgtttttgggcaaatggtaagcaaatggacctnggactgcgttgggtctcaccagctctngagccggggtcagtcatagccaggcgaggcctactggcttcctgaggtcaccctgtgggggctgggggaag

SEQ ID NO: 408984 - DNA, 423 bp, Homo Sapiens
  misc_feature (153)..(153): n is a, c, g, or t
  misc_feature (200)..(231): n is a, c, g, or t
  misc_feature (343)..(351): n is a, c, g, or t
cagaatagttatttagagaaacttttcttgcctgtattcatggctgtttttgaatttcaatttattagtcataaatagtgccactcttctttgattactaaataggacatggagcaagctgacctaggtgtcacaaattattcatttgacctntaaggacagagaaaacccttcaatatagcttaagaaattgagtaatnnnnnnnnnnnnnnnnnnnnnnnnnnnnnnnntgacacctggtgcccaaccagggatccagtatcttaaaggcccatactgtaaaggtcagcctgcctagggaattctgccacatttacacacacccctgggccaaagtaatannnnnnnnnccatgtaggaccaaattatgggggcagaaagtaaagtttagttttaggaagtgctgttttgttgggtgggag

SEQ ID NO: 408985 - DNA, 333 bp, Homo Sapiens
gttttatataaaaaggaaagccatgaccacctttctacctcagatccatcttcatccattgcattggaaactgctttatgctgctgcagtctgcaaagtctagagcttttatcaggccatgtcatacccaagaaagcacctatttaaagaaaaaacaattccctgagctctcaactccaagttgtagatttggtgtcttccttgttcttactttaaaaatatctctgctgcaaatagacacccttgccccccaacccacccaacctattctaaaataatagcaatttctaactttaagcctccttctggccagaycccagctaaagagaccca

SEQ ID NO: 408986 - DNA, 478 bp, Homo Sapiens
  misc_feature (395)..(395): n is a, c, g, or t
  misc_feature (413)..(413): n is a, c, g, or t
  misc_feature (450)..(450): n is a, c, g, or t
aagcatgtcttattttatgtaattttaagaaatactctatttaacttgtgaaatatacctaaaagcatactagttagctcttagactctcacttagggagggtaaagaaacatcactgatgccaatatgaagatctataaacaaatcctttgtttagaacttttttctcttcgtgcacctcacaacacacttaccatggtacatatttcttaatgccactaagaaaggcaagatagtgaacgcaggaattatttatgtgggtatagtgtttgttttcctgttttagtgcttttgtaggctaaacttactgggaactgcatcacaacttacatttggcagttcttcagtggggagggtgggactaggcctgtggggtttaatttttaggaggcttnaaaagttttattagggcntttaaaaacacattacatgtatttgggattcttgttntaaccccttcacaaggggtggtggggtg

SEQ ID NO: 408987 - DNA, 408 bp, Homo Sapiens
  misc_feature (320)..(320): n is a, c, g, or t
agaagacacaagacagagataaaagacagctgggactggggggacactactaccaagacatggagaccagtagtggccccaaatgccaggctgcactgatatttattggatacaagactcaggcaggacaaggagtgtgagccatctccagtgataggtaaggccacgtggatcacatgtccactggacagggggcccttccctgcctggcagccgaggtagagagagaaggagagaaacatcttacattattatttctgcttatcggagacttttagtactttcactaatttgctgctgctaactaaacggcagagcanggtgtacaagatggaacatgaaggcggactaggagtgtgaccactgaagcacagcatcacagggagacggttaggcctccggataact

SEQ ID NO: 408988 - DNA, 253 bp, Homo Sapiens
aatataaaattgtttaatgtttttctttgttgcagtacactcaatccagatgtagtggatgaggtggccagattttttcaagattcttagtccaccaggagctgattccatttgtgtcatccctactctggtcacagaacattcacatctttaattccaaatactgagcgtgatgtaaatgatgtaatcagtatctaacacgagtatatactttcttggtggccactgcatgacatatcaacagtgcagcctc

SEQ ID NO: 408989 - DNA, 715 bp, Homo Sapiens; identical to SEQ ID NO: 229139
  misc_feature (500)..(500): n is a, c, g, or t

SEQ ID NO: 408990 - DNA, 509 bp, Homo Sapiens
  misc_feature (366)..(366): n is a, c, g, or t
  misc_feature (412)..(412): n is a, c, g, or t
  misc_feature (451)..(451): n is a, c, g, or t
  misc_feature (488)..(488): n is a, c, g, or t
tccatgtttgcaaggatttaccatagaaatattaggttgatgcaaaaattaaatttccagactgcgaattttaaatcattgtaactacgctaaaacatattctattaatcaaaacaggaaccattacaatcaacacatttttgccaatgagaaatgtttgtttattcctgtagcataaaaatccgtgcttcaggatttgacgaactcttggaaagcattttctgcaccatgctgaagtgttttccctgcaaaaagttgtcaagatgctagcagaagtggtagtcagttggcgaaaggtcaggtgaatatggtggatgaggcaaaacttgtagcccaattccttcaacttttgaagcactggttgtncgaacacgcagtcaggtgttgtcgtggagaagaattggggcccttntgttgaccaatggcggcgcaggtattggcgtttttcggngcatcttaccaatttgctgagcataacttctcagaangtaatggtttcaccaggattc

SEQ ID NO: 408991 - DNA, 749 bp, Homo Sapiens
agcggtctgtcagtaatatttaccactgcttgaacagcaaactgttgaggctagggttgattattgataatttttatgtgtttagtaataaccacagcatcatacgtacaactgcctttaatacaatcaaagttaaggacctttgagcgagagcatgtagcaagtatttcattttaacaaattaatcacagacagtttccctgtttcaaagtctccactcaataaagcaaagcattgcagcaacaggcattagacctgctatattacgacgcatcctccgctttcaatctctatattcctatcgatagttcctaattaacccttatgccattctatcctacacacaaccacataaatatcccaaaccttaacaccaatttcctgcccattaattcccaaacgctttatattccatcatctcattacctttcccgcacacgcaccaatttcgccacccttatccatacattctaactcaactctaatccttggttacaacttctgtctaaccatttacctctactatcctacttacctcccgactatcctcatcgccctaaccatctcaactattatcccttgacacctctgcaaccacctccatatctatattcctctctttacattccccattgttgttccccttgacctctttttaaaccttttacgttctacattaccacatacctatcacctacaactttcatattaacccttacttccacttacgattttactttcctagacta

SEQ ID NO: 408992 - DNA, 482 bp, Homo Sapiens
  misc_feature (342)..(342): n is a, c, g, or t
  misc_feature (357)..(357): n is a, c, g, or t
  misc_feature (362)..(362): n is a, c, g, or t
  misc_feature (365)..(365): n is a, c, g, or t
  misc_feature (374)..(374): n is a, c, g, or t
  misc_feature (384)..(384): n is a, c, g, or t
tttttagctcacgaaagaagttccaggatatggctataacaacaaactaatcttggtgatatctgtgactgtaatactaacgattttgattctaattttttgtcttattgaggtaaggacaataattaattcaggttttcagaaagcaatcctgtctttgtgtggattcagaacccacaaactgaaaaccaaagccacttccccacttgacattcttcttcagtcgtttaaggctgaggtatgctttgttcttttactgcagtgtatattccaggatttttaaaggatcctcgcttccaagagatctcaagtcacccttactctgccactaatttatttccnttgttggctttgggngaaanaanaagtggggnaaatttgggngagaatgtataatctccaccctcacggagttgcatcaccctggcaacccctccgtagtcaaggccttcttctccatgaaattttatcattaatctctt

SEQ ID NO: 408993 - DNA, 407 bp, Homo Sapiens
  misc_feature (49)..(49): n is a, c, g, or t
  misc_feature (57)..(57): n is a, c, g, or t
  misc_feature (138)..(180): n is a, c, g, or t
  misc_feature (257)..(257): n is a, c, g, or t
ggaaaaagtattatatttattattagagaagttaatatgaatatatganggtaaccntgctcattatgaacatgcgactctctggaatatataaagatttgtaaaaagtttcaagaaatggtcaactttataaatgtnnnnnnnnnnnnnnnnnnnnnnnnnnnnnnnnnnnnnnnnnnnattggaagaaaacagattaaaatgataaaacccagtgctagtaaattacaatgaaacagatatatttttatattccngttgacaatgtaagttattaaaatgttttaagataattatttagccttttattaacaagcaacaaatgcccagcaaatccagtcattgtacatgtaagcaattgttgtcaagggagaaaaattaattcataatcttcaacttagtaattc

SEQ ID NO: 408994 - DNA, 356 bp, Homo Sapiens
  misc_feature (78)..(78): n is a, c, g, or t
  misc_feature (84)..(84): n is a, c, g, or t
  misc_feature (151)..(256): n is a, c, g, or t
aaagacaggatctcacccagaatagagtacagtacaagattatagctcactgcagcctcaaactcccggactcaggcnattctntctcctcagcctcccaaacagttgggaccacaggcatgtgtgaccacactcagccaatctttcaaannnnnnnnnnnnnnnnnnnnnnnnnnnnnnnnnnnnnnnnnnnnnnnnnnnnnnnnnnnnnnnnnnnnnnnnnnnnnnnnnnnnnnnnnnnnnnnnnnnnnnnnnngtgttagccaccacatccggccatcattcttgaagaaacaaaactgaagctaactagtaactagttaaccctacccagctccaaatccaggactacgatt

SEQ ID NO: 408995 - DNA, 1206 bp, Homo Sapiens
  misc_feature (242)..(365): n is a, c, g, or t
  misc_feature (541)..(627): n is a, c, g, or t
  misc_feature (710)..(1003): n is a, c, g, or t
gcacatacatagtgtacactaaattttacatacacacagaggaatatatatgtgtatagttatcttgtgtttagaaatttggaatcccttctagttgtcttgtaacatgtgcttactctattttgaggattttctctatgaatttcatgtagctctttaaattaactttcaggaggattgtaacaatgtgctctccacccagtattttaccagccttgagttttctcaaagggggcattggnnnnnnnnnnnnnnnnnnnnnnnnnnnnnnnnnnnnnnnnnnnnnnnnnnnnnnnnnnnnnnnnnnnnnnnnnnnnnnnnnnnnnnnnnnnnnnnnnnnnnnnnnnnnnnnnnnnnnnnnnnnnaatcctacacatatatttgtatgtgtgcagactgtttgtacatggttttcattatgctattgattttaaaagtcagaatttggaaacaaccctccatgtccaccatggggaactggctaagtacatttatggtggaatggagatcatatccttaaaaatgaagactctttatatannnnnnnnnnnnnnnnnnnnnnnnnnnnnnnnnnnnnnnnnnnnnnnnnnnnnnnnnnnnnnnnnnnnnnnnnnnnnnnnnnnnnnnaatgtgagaaagagctctaagatagttaagtagataaaagcaaggtgtcaaactgtagagtatgtttccatttatgtaaagannnnnnnnnnnnnnnnnnnnnnnnnnnnnnnnnnnnnnnnnnnnnnnnnnnnnnnnnnnnnnnnnnnnnnnnnnnnnnnnnnnnnnnnnnnnnnnnnnnnnnnnnnnnnnnnnnnnnnnnnnnnnnnnnnnnnnnnnnnnnnnnnnnnnnnnnnnnnnnnnnnnnnnnnnnnnnnnnnnnnnnnnnnnnnnnnnnnnnnnnnnnnnnnnnnnnnnnnnnnnnnnnnnnnnnnnnnnnnnnnnnnnnnnnnnnnnnnnnnnnnnnnnnnnnnnnnnnnnnnnnnnnnnnnnnnnnataaataaataagaaacatttgtttatatgtacacacataatctctgaaagggtaaaagtggcatactggttggccagaagaattgggaggacagtgatgaggaataattttcactctttatcattttatatttttggaattttgaaacatgtaaaattattaccagttcaaaaaataaatttaaacaaaaatcttaactgtt

SEQ ID NO: 408996 - DNA, 1013 bp, Homo Sapiens
ggcggggtctgggcagcggcggccgtggtggagggctatgctggcgggggatgacggggcaggcccctcctcctttgtccgccctgccctcccattggtcctagctggggtgtgccgtgggtgcgtgacaccgggctgcggtggccgtgagcatctgctggctcagtgctgcgtggaaagcggtgcgctgtgccagctggtggtgggtgcccttggtcctggcgggcggagctctgaattgcatgcccaacgccctgtggctgctgtacggggtgcccaatgtgacctgggcccttgaagtggcatgcagctgttgtgatggccacttatcccttggcacggcacacacgtggaacccgtggtggttcaacccctgggaaaggattaggcctttgtggtgtgcggctaggccttgtggccatggggccgcgaaaatgggaaacccctgtgcgggtcgtttggctggcacgcaacatgcgcccgggtggttcaattacattatggggccatatgggcaaagggtggaaaggccactgggtaccgaaccattacacttttgagctgttaaacactggcgcacctgagggtgacatttactttaaggacttgataggatgtacccggggcgcgctttaaaacgctggcgcgaaagacgcccgagttacactatacacgttggggccgtttggtgtaagcacgaaagaaattatcctttaccgatgttacccggggggaacatttctcgtggggcgttagcgtattaaagcccccctccagtccgggtgaccaaaactttttaatgttttggggcccgccgttttacggaaatagttttatcccaagagaatacgggggcgcatttaaagttttaccgtgtggacatgtgagcagtgtgccgcgccgcaccaagagaaggcgccccgacacagactggtgctgacacagcgtgtgaaaacctcgtggacacccacagccctgtatggggatctgtattgggtcgacatttccagaag

SEQ ID NO: 408997 - DNA, 116 bp, Homo Sapiens
gagaagacgacagaatactctttacatgctaacttttgaaggttggtaatgtaatttatactattttccttcagtgcaggagattttttaagtaaataagtaaattttagcacctc

SEQ ID NO: 408998 - DNA, 393 bp, Homo Sapiens
gcggccgccaggatgtgcccccggccccgtcgtcgccgcgcccgcgcccctcgccccagtgtggacgtggggaggatcttctaagtccctccaacgaaggcaagtgtgagactctggccctttatttgtaagaagcaagccttcagattgcagaagtgtcgcgcgggtcgccgtgcgttgcgcgagtgggaagatggaggaggccggcacgctgctttcgtggacgcaagtgaaccgggcgtgaaggcagggtgcgagctctgcccttggcccagccctgcgtgggcgccgtcccagattccgggcggtgcggggtgcagagatctggagagacttgcgggctccccagcgcaggctgctctgggatttcgttggaagatccggcagagcctt

SEQ ID NO: 408999 - DNA, 289 bp, Homo Sapiens
  misc_feature (134)..(192): n is a, c, g, or t
gttgaaactttcaatagctttaagaattatattctctaatttttaaatcacttgcagtttaagctcatttgagaaacttttttctccttcagagtaccgtattcatttatcacagcaaaaacccacctttaaannnnnnnnnnnnnnnnnnnnnnnnnnnnnnnnnnnnnnnnnnnnnnnnnnnnnnnnnnntaagtatgatactgagggcagaaacaatctgaattccatattcgggttcacagggtatatatattttttctgttagatacacactccttaatcactg

SEQ ID NO: 409000 - DNA, 328 bp, Homo Sapiens
acaggaacacagatttgatgttttaataaaaatacgatttctacaaaaggtgcttaacacggcccaggacgggctgtccggtggagtcagccgtaggacccctgaaggatttacaaagacagagccggctcaccagcacactcctgccagcaccgggacccactgcgaacaaagacagagccggctccccagcacgctcctgctagccctgggacccactgtgagccactgcggggtgtccttcatttaaaaaaagtctggactgtgacactgcagaaggagtctgaaagcccaattcctgaatccctgcgttagaactgagagttca

SEQ ID NO: 409001 - DNA, 759 bp, Homo Sapiens
atcacttaatcagaggtcttttaggatgtgctaaagggtcgtgagggctctcttaaaattttcttcacaagcggttatccagtcgtgccccgcggcctgctgctggccccggggatctgagtcgtaccctcttgtttttctctgagtcagtcttaaggtgaaatgaagtgtggcccagtggctcctcactgtcgcttctctagttttctgcctccttttagaaaatgtaagttgagaatttctaatttacatcgggatgtgttctaatgcgcttgtttttaaaactgtggaaaatttttaaaagaaaataaatctcaccagtcatccagctacccagaagtaacattttcatgcattacctattaatttttttctctgcatattttttcatagttgagataatttagggaaaaccattttgtgtccttcatatatggatgaatacaatataatttggtattaatatcatagcaacaaagaaggcattgaaggctttaaatctgtttacagtgaattgaaaagacaggatgaagtggacacagcatgtgaagacaattctttcaagaagttggctgtcaaggaaaacagagaatgtgctaaagaacatacagacacagagcagacaggccactttgcaaccacatggaggtttggtctgatattgaagctaaaagaagctaagctggaagacacgagagaccaagtcctgatgacttgtttgaacccgagatccgactgcctgaaaatagttttaccact

SEQ ID NO: 409002 - DNA, 198 bp, Homo Sapiens
aacctgcaaactctttattaaattctcccatttcatctgtacagaaaaaaatgcacattatgttcagaacatatctcagtaacatctcaaaattacacagcatgaacatgtaaaaacaagggaccaccacgattttatacatagaaaggaaacccatttacaaaagaggcttgttaattgtatttttttctttctttc

SEQ ID NO: 409003 - DNA, 151 bp, Homo Sapiens
tatgaaatgcatatattataattatgaattgtgtacgtctttattagtcatccaaacatcaatagcctattagcagaacacccagtcataatcataattgtcattgatattttgctgactttcagtcccattaaaaaccatagatttacac

SEQ ID NO: 409004 - DNA, 475 bp, Homo Sapiens
  misc_feature (255)..(318): n is a, c, g, or t
agagccagcttttgttttattgaagcaaaaagaaaccagacccaaaaccaaaatttgtttcccaagacattgaaagggctggcatcttttcagaaataaccagaacaatatttatttttatatttaaaatccataaaaaagggccttacatttaaaaaaagtttgtttctcaaagggctccgaggaattaaatttcgccttgaaccccatttttaattgggggaaaatcccccaaaatacattaagtaaattatnnnnnnnnnnnnnnnnnnnnnnnnnnnnnnnnnnnnnnnnnnnnnnnnnnnnnnnnnnnnnnnnatccacttttagcaaaaaaattactatggacttctggctttaattttgggaagaatatggggggtcactggaaaaccaacacattcggaaggataccttacctagggaaagattcttatgtactttgctaaaaaacggggatttgaattgacaagtt

SEQ ID NO: 409005 - DNA, 411 bp, Homo Sapiens
aacacagtattgaaatcttcattatctccaaatattctatctatgtttgctactaaatgtacatgtagtagtgctattgcccaatatgatttctgaatggattaataataatatcaattttatatttccaggtacacaactcacaggattcttaaagtatctcaatagtagaatacgaatatgtaaagaaatcactgtgctatgattcatatctgaaggactgtgatcccacataggaacatgtaaataatcaagggcttaggcaaatgatataaacacatttgcacaagcctgaatgtataaacttcatacatgcaaagatataaaaatatacgcattacatgagttatttgcaattatgtcttaaaacactcagggtatttctgagtgttcaagttaatgaagttcttg

SEQ ID NO: 409006 - DNA, 352 bp, Homo Sapiens
  misc_feature (267)..(275): n is a, c, g, or t
cacaggctaggctgggttttattccacagggatctgcacatttcacacaaagccacacgtttgttatgtcaaacctccatcacgttccacccccgttccatcacgtcccagtttcagtctctggggctgcaagtcccctgccctccctttttcacaatcaaacgtcccaaacacaaatggccatcaccttctgggagttggtagttggggggcaaggggctgcactgggcatgccctgcaggcagggatgtctgcaactgaccactnnnnnnnnnttgggaaccaaaaaagggaggtccagggtggaaaaatcattgtcaggggaggaaagagggaccagggaaaagttatc

SEQ ID NO: 409007 - DNA, 408 bp, Homo Sapiens
  misc_feature (277)..(277): n is a, c, g, or t
  misc_feature (349)..(349): n is a, c, g, or t
  misc_feature (360)..(360): n is a, c, g, or t
  misc_feature (382)..(382): n is a, c, g, or t
cttttaagtgaagctgcaggattttatctttcaatctgccctttctacccttgtcctattgaaaggatgccctcttcccttgcttttttggtctagggcctgtttggagctaactaggcttggctgagtccgggcaagaccttcttccgaggcatggacaagccccagagaacatgcagaacattgacctttccattgactgtctttcaaggcagccagtgaaatcactaagtgggggttcttccatggacatattttgttaatatggggttttcanttttttccaaggaatagttcccttgtttggccacaatgttggatttacttttacacaatggacagtatgtanttaatttggtnaatttaaaacccatccaggatngtttttagggctttttcccaaggggt

SEQ ID NO: 409008 - DNA, 349 bp, Homo Sapiens
tttataagcgtcttgtaaatgcaagtgatcacagcatgacaatgacatgtgctgcatattatacaatgtctgagactgcataatgtacaagtcacacttatgctgtttataacaggaggagaaagggacctcctttactattctcatcatcctaaaatctcacttctaatcagcttatcatctgttgcctgtacagctcagtgaaatgtactttcatcttataaaagttcagatatatgccagtgcctatttttgctgtaaaggagaaagtaaaaactccacagcgggaatctttaactttgcttttgaaaccaccattgaatcactatcgtatagcagacttagcaca

SEQ ID NO: 409009 - DNA, 463 bp, Homo Sapiens
gttggaaagatattttttaattacatactctttaaatctcttaatacacattaaattagaaggttcatagaaaacattactataaaaataaggcactacatggcagaattttaaaaccctgcttcataattacagcatcattaaggtactgcagaaaaatcattgttatttttactcattttatgtgagaagtcaaatcttaaaccatgtggtaatatttataaaaacaggtactttggcatctttgaatatctccctgtcggatattaagtttacaatattttcacaggccttgcgtggtaggaattcttggtctaggaagtcttaagttaactttaagagaaacttgtgaaaacttggattggtgtttccatgagtatgttgttatcaaatcagggaatccgtgaggagagttgcctccttgacccacaaggatatcccaaggtttctgctgctcttccaa

SEQ ID NO: 409010 - DNA, 128 bp, Homo Sapiens
taaagcaacatattttcctttgctttattaggttaacaagcaaggattaaagcaacatattttcctttgctttattaggttaacatagcagataacctgaattccttggcttagtgtttgtagagttt

SEQ ID NO: 409011 - DNA, 631 bp, Homo Sapiens
  misc_feature (495)..(505): n is a, c, g, or t
tgcttatgaagattaagggtagtattttctaaggaagtggaaagaattaaactagaaatccacaacctcggaagaagtgtttcgagtttaacatgcgctgtttctgcttatgtggttccttctctagagctgctttcccatggctttcaaaacatcaggttattgtggggcttcaggtgtaaggtcctggaagttcagcaaagtttcgtggacaagacatgggcacagagagtagaagcagaaataaatggttctatgttttcaacttccagggttggggcaggccagagcaaggcggtctcatcgaggtgggtgctacctgtgtgtgtgtagatgagtgtgctgaaggtggggagggcagcacacagcagctcatggcagagccgcctcctaggtcttggcaaagaggcaagctgacgatagacatctacctatattgttaagaaaggggtcggggggatcagccaaggtccatcattgcttttttgccggcgnnnnnnnnnnngcggtcccctttgagattggtcacgctgtcatgctgaaccctcctaggtgcacaaacggaggggaccccggtgttggggaagtctccccatcaacgttgtcggcttttccttggctttttgcgaaa

SEQ ID NO: 409012 - DNA, 440 bp, Homo Sapiens
  misc_feature (304)..(304): n is a, c, g, or t
  misc_feature (373)..(373): n is a, c, g, or t
  misc_feature (402)..(402): n is a, c, g, or t
agagaataacttacagatgtgacgtttgtgatcgttaaaactggaaacagcgcaagagtggacgataggggatgagagagccacacagcgcatagaagatgatcagtctgaagagagggttttcagacatgcaattaactgctattcactgtacttcattttaactgcaaactagcagtctctttccccagggaaaaaagaggtcaactcgggaggagccaggggatttcagcccactctgggacaacactcaggaggccatgggcaccttacctgttatggaaaaaaattgtttaaggcaggntgccactcctagtttactgggcctcttgcttcggtgacttggatggcactttcttaacatcctttgttnccagggggtttaaaggacctttgttaatnggggggggaaaaaagattgggcaggggattcccttttt

SEQ ID NO: 409013 - DNA, 301 bp, Homo Sapiens
  misc_feature (113)..(113): n is a, c, g, or t
ataaaaactaacttgaaatgtgactaaataactgatccaaactgggcattaagtggcaggattatgagaaaggataaaaaaagagatttgagaaaacacatttcttgaatttncagaaaaaaatctagactattgctttgacacttagaaattctgaggtttttcaattggaattgagcatctctgtatgtggggatgtgggcccttatcaagggataaaaatccaaacactctaacatgcctccttgactgtaaagtaatgacactggttccaaaattcacaaataatagacactactgt

SEQ ID NO: 409014 - DNA, 461 bp, Homo Sapiens
gtgttattaaacctttattgaattcagcactagtaagaagttctgaattggccatcctgtagtataagcattatagttattcccagaactggcccagccaggggatggctgtcatgacggctttaaccacataactcagcttaattcccaagggccgatttccagggatagaaggagcctccatggcccgtaaatcttcggctgcttcccaaatccaaggagcagctggagagagtactgtgtcacgcaccggatacaaccacacacaggagtttctggtacatcacgtgccagttacacatccacaaggcagagactggagtccttgctgggacagcgtttgaggtccgttctgtttcctccctgctactgcagcagtgcttggaaccgtgtctccacacagcaggccctgaaacctttgctgaatgagtgcacgattaattttctcagctaagtccccg

SEQ ID NO: 409015 - DNA, 127 bp, Homo Sapiens
gcttttgtttttaaaaaagaagatagcataccacggaattcaggcaacttacatcaacaaataggccgtgtgattttagcatgaagaaaaaaattacaaacagagctgtgtaagcgggttctcccgg

SEQ ID NO: 409016 - DNA, 1310 bp, Homo Sapiens
  misc_feature (61)..(61): n is a, c, g, or t
  misc_feature (139)..(139): n is a, c, g, or t
  misc_feature (226)..(226): n is a, c, g, or t
  misc_feature (772)..(780): n is a, c, g, or t
  misc_feature (1242)..(1250): n is a, c, g, or t
cccccccctggtaccgatccggaattcctgcgatattctctcccccctccccaatcctacnaaacaggaccctgctccagtggtatccaactcctccctgcccactcttcctcatgggccacctcacctcccactttcnatgtctcgcctcccgtggccaccctgcaattaactttccaagccccctcccgtggccgtcccctcccaacacctctcacccatgtancaatccctacatggctgcctgacatgtccctactctctaagccctcctgcccactgttcctccctccccgacatgctgacaccaattggcgtaaaccacccctcatccccaccctgccctgtgcatagctcatctttgtgttcaatgaagtggagacggacaactgacgcccgacatacagttcacgaagaggcacgatgcccagggagcagatactgacggaggcacataccgaacacatacacctaacaccttgtaccgcacacgcgtctcctctcatttttctcccgggaccaaaccgtctacaccgccctgcctgtacattttcttctctctctgccaaaaatcacaacgccccactcgtctcctcaatgacagccccatatttgccccattctccctcacgtactctcttatacccttcccctcccccccggttcaccccaatccatttttccatggacataggcggcgcgagggatagtccgggctttttttcccgaatcccgccctcctcactccatcaaacgatattcctaccctttnnnnnnnnntccgaacgttccctcccctccccggaagaccccattcaacaagtcccgaagcgcgcgttataccaatccgcctttttttatattccccacctttaaatttcccccgcgatcttttcccgtttccctgtaccagtattcatcggacaaataacacccgcccatcccacactcactatatccgccccggggcccgttcgaatacataccgcaccttcataccttttcccttattgctcacccctcagtcttataactacacaatgtccactatcatctgatgagctcgccccccgccaatagtgcgctcactccgcttacggcggcaaaggtaaactggatccaacaaggctttttcgccctccctggttcgacatctctacacgcccccctatctcgataaaaaacccccggctttcctctttgctacccccgcgacatggatactcttcccctcgccattannnnnnnnnaaacgcccaaaccggcgcgtgcttaaaaacacctattaggaggggcaaaataaaaagagc

SEQ ID NO: 409017 - DNA, 1032 bp, Homo Sapiens; identical to SEQ ID NO: 119748
  misc_feature (144)..(153): n is a, c, g, or t
  misc_feature (183)..(266): n is a, c, g, or t
  misc_feature (804)..(804): n is a, c, g, or t
  misc_feature (908)..(908): n is a, c, g, or t

SEQ ID NO: 409018 - DNA, 401 bp, Homo Sapiens
ccaacagaaaggttttaatgtaggaaactggttaaaatatgcattagtatctattgctgtgtaagaagttagctcaaaacatagtgacctaaaacagcaataatcatttattgtctttcatggtttctgcaggtccagaatttgggagcaacatgtctgagcagttctgacacatggtttttcatgatattgcagtcaagatatcagctggggctgtggtcatctgaaggctcgactggggctggggaatcttgcatggctgttggtgagaatccacagcttctagccacagggggtctctcccagagctgcttgagtgtcctcatgacatgatagctagtttcccagagaaagtgattcaagggaacaaggcaacaatgccttttaaaaaaagttatgca

SEQ ID NO: 409019 - DNA, 424 bp, Homo Sapiens
agaggctggtacggccggaatcgggatatgtcgaccacgcgtcgccacgcgtcggacagctgctctgcatatggtaattgttgctgcctttacatgggcttttacattattctttgaagttagcgaatgatgtgccattgagcatttttatttggtttggtcattgccatttaaataaattccattaatcttgtatttttattggttgttcattagagatttaagaatgtatgacatttaagaaatatgaacattttggaagtaataatattttaataatgccacactgaactattaataaattttaatgccacaattactgttcagaatgtcttttattagctaaatgtatcctctcatgatttgaaatataataaaagtacaaatttaaaccttactatagcaccaaataaattgcttatgc

SEQ ID NO: 409020 - DNA, 314 bp, Homo Sapiens
atttagcagaaatctttgcttttttctttaacaaaatgttgactggaactccaatacataaactagatgacaatggagctcttctggtttaatccaatttggggaaggaagagatatgcatgggaaggaaaagttcaacccatcagtttaagtgatccaggactttttggaacacaggcactcacagtttgaaaaccaccattgcagggcatcaaggacaaggctggctagggatggagagtctctgacattctacaacagcctaggagccaccaaagaccttcgagaaagccctgctaccacagattctgcct

SEQ ID NO: 409021 - DNA, 354 bp, Homo Sapiens
  misc_feature (64)..(64): n is a, c, g, or t
  misc_feature (97)..(159): n is a, c, g, or t
cctgagaggtaaaaatttattgatttctatcatatcagcatgttatgatatggtcacgcctgcncatacagctgacttcttagagccaaaagagaannnnnnnnnnnnnnnnnnnnnnnnnnnnnnnnnnnnnnnnnnnnnnnnnnnnnnnnnnnnnnncatattaagtggaaattaaaaacaatggcttccccccgccaactcatgaggaatagggctggtcagcaatagatctctgagtgcttccaatttgttttcaggcctctgtccccagtctgttccttgtcttccacagaaagtagttccaggggaaaaagaaattagaatctcaccaaaacagcagcctaaatacag

SEQ ID NO: 409022 - DNA, 347 bp, Homo Sapiens
aattatagagtttatttggacacaaagcatgagaatagccacctggaaacctcaactccaaatgaatggggtcagcgttcccaagtagagacattaacatttcacacacacaaggaaatacagagaagctttcccagaaccaccacattttccattcaagtccagtgcataggctgcggcagcttgactggtgatggagtgatacacttcaaggaaggttacattatcactccataagaagggacaatgatgccaggaggtcttatctctggggctgcttagttttcctaattatttacacgaaaactttttaaaattgatattaggaaactaaattgtatagcaca

SEQ ID NO: 409023 - DNA, 262 bp, Homo Sapiens
  misc_feature (226)..(226): n is a, c, g, or t
aaaggcaaagaaggtttttatttaagtgacaacatttgagagctaaaaaccagctcacatcaaaatcaagacccagttgtaaaaatcttttaactccataatgctgtttttgtcttgttagaaatctggatatcttacattaggcgtttctaacgggattttgtacaagggcagccataagggattataataaacctttttcaccacagaaccatctgttcacagnctaatactgcaaagtttacacacttaggggacagtt

SEQ ID NO: 409024 - DNA, 327 bp, Homo Sapiens
  misc_feature (259)..(276): n is a, c, g, or t
cctggaagaatattttaaatactggttttttttctctgtaaaactgattcataaaaccatttagataagaaatgttaaaaaatgtagcaaaggaatattaaagacaagattattccctaattagagcaactatagcaaaagctagagatccagggtatcctggcaccatgtcaaagaggtgaacggtgatggttctgttgcgtgttgatcagcggtctggaggtttctggccaggacttcacagcagaatcaccaaggnnnnnnnnnnnnnnnnnnaaacaaatatcaatgaggtgcctcagctgagatgtgctaaatcaagagtac

SEQ ID NO: 409025 - DNA, 125 bp, Homo Sapiens
aagctcatgtgccaggccactcttttctacaagcttttgctaaaatcagcattccccagcatcctactttgaccgcaattttgttggaaagaagcttaccagcattttaggggcgctcatcatag

SEQ ID NO: 409026 - DNA, 296 bp, Homo Sapiens
aaggatcccttccaccagcctcccttccacagctgatttataccaacagcataattaaaaaatcacaatgtcctgagaactcacctgaaatttaaaatcatctcttgacttggaaggctgcttacttttaaaagtaagttagtctggcaaggcaacttgaactcctttgaaactgtttactggaattttccagcaaacctgcctgaggtacccaccctgacttgtaaagatttaaaatgctggtgacaacacaatgagcataaaataggacaactgttgcatttgtaagtaagcag

SEQ ID NO: 409027 - DNA, 938 bp, Homo Sapiens
gggagctacagaataaggacactccttggccccaagccagccccagcttgctcgggagcctgggtttccccctccgtccccatcaccgcgagggtctgtgcatgggaatctgctccagaggctccctcaggcgccgcgccgcggggatacgcctttcaccgccccagcaatgggagcgctgagtcgaagtcctgattccacgataggcggatgaagccctaacgctgaaattctttcctctaggtctttggcagcggctggggccaaagcccgggcaagaccaacgccttcggcacccggactcaggctccgtcctctctgccagcgtgcggctacaatgactcgacatggcaggtgggcaagcacagcacgccccaacagacatgctttatttaatatgtactaaaaatacagcaggcctgtgaaacccacaggtgcaattgcttaaaatgaggctaaggtagacgtgtgaatggttaataatgagttgattaaaatattcagaaatcatctactggagacgggcaaactgcaaaatggtagcatgggagcaactgatgttcgagaaagcccaggctccggcaagccgtgggtttgaatttacacatgcgcacataatgggtatgatctaaacctttcttcaaaaaaaccagatcaagtcaaggcagttatttgctgtgggcaggtgccaaggctggctgcttcagtccccacgcgagtcgcccccgagcctgcttctgcagccaagctggaaagtgcaaggcacttggaaaggagccacgcccaacgccctgtaccaggcggctccggacacaacagcgtcctctggcctgctgcagcttgtacgttagtcctcccggacagaggggtgaaagtgggtgcgccaacaggaagcgggccggataacatcggggccatggcctcggaaacacagaagg

SEQ ID NO: 409028 - DNA, 482 bp, Homo Sapiens
tccgcaaggcgcgatctcttcctccttgcagcccttcgaaagtgagatttctcaccccacccttgcagggtggagagaacacgttcacaaaggggatgcctagaactcagccgtgggaagtgcctgtctaaagccttgtgctggtgccagtagcacacccgtgcgcgtgctcggctttgagcgatcatggagctctgcaaatagctcaactgcagagcgtgccccttagagctcctgtgctgctgggaggcctcataaaggtgccaaaaccaggtgtacccagcggttggcctctttaaaaacgaaaacaaaaaagggcggagtgggatgtccttgacgtgctgagaggcggagtagaaagagacgtgggttcacatgggcgggccattaagcacgcactgggccactgtgtgccagatccgggttactagcccataattcatatcggagccataaactagaacactcgatgggactatcta

SEQ ID NO: 409029 - DNA, 177 bp, Homo Sapiens
gttctgaaaaagaacgtttattaacacacctgggcgtgccacatggaacatgtttgcaaacagggatccctgcccagggggctcacaatttacacaaaacacgacacatacacccaggacacaaatgtagcaccttccttttgaagtaccctgaaagctgcgggggctcaacttccc

SEQ ID NO: 409030 - DNA, 371 bp, Homo Sapiens
gagttacagtagatgttcgtatagttaaagctccaagaagtcctacagaaatgtttgagtttaacactacgtttgttccaacaaattagatcatagaaacaacaccactttttgtctctagcccatattaacaacctgtggaagatccctcaggctggtctgaaagaatcgccccagagctcttaaggaggaagcgagccgagaaaggagggttgtgacattgtgatgagctctgagttgtattaaggaatttgaacttttcatctggggagtaataggatccagtctagcttccaaaagctgaccctaccagccacatgggggcccctgaaagcagggtttcagccctgctgtaattccgtactccccaa

SEQ ID NO: 409031 - DNA, 263 bp, Homo Sapiens
  misc_feature (91)..(100): n is a, c, g, or t
  misc_feature (223)..(223): n is a, c, g, or t
cagctctttatgtcatgtcactctcttctggcttttgagtttccactgaaaactctgctgctagatgtattggttctccattgtatgttannnnnnnnnncttgctgcttttcagatcctttcctcattcttgacctttgggagtttgactactaaatgccttgaggtaatctttgagttaaatctgtttgtcagctaatgtctttatttctccttcatgttngaagaatgtttttttgtatatgctgatctagggaaaaagc

SEQ ID NO: 409032 - DNA, 197 bp, Homo Sapiens
  misc_feature (108)..(108): n is a, c, g, or t
  misc_feature (121)..(121): n is a, c, g, or t
  misc_feature (126)..(126): n is a, c, g, or t
  misc_feature (184)..(184): n is a, c, g, or t
atatttagtttcttttcatcgtttcttgggtaacttcaaccacatatgttaatttcattagattaatccacagtaccatattctaaggacttaccacaaaggaagggnaaacagactcttnacccngatggataattacatatttaatacggggttggcttttaacaggcaattttttaaaggnaaacacatcatag

SEQ ID NO: 409033 - DNA, 195 bp, Homo Sapiens
  misc_feature (45)..(45): n is a, c, g, or t
  misc_feature (77)..(77): n is a, c, g, or t
  misc_feature (118)..(118): n is a, c, g, or t
  misc_feature (123)..(123): n is a, c, g, or t
  misc_feature (139)..(139): n is a, c, g, or t
  misc_feature (147)..(147): n is a, c, g, or t
  misc_feature (157)..(157): n is a, c, g, or t
  misc_feature (164)..(164): n is a, c, g, or t
  misc_feature (183)..(183): n is a, c, g, or t
ccatttctttttcaatagggaggatactgggatgaggatgcttgnaatgtggtgcacactgattaccagaggacagntgagatactgatgggtcctgtctcctcccaaagcacacatnacatnccagggtgcacaccantaaatgancagattctgnacatggngagccaaggacaggggaangcagagagagga

SEQ ID NO: 409034 - DNA, 1134 bp, Homo Sapiens
  misc_feature (66)..(96): n is a, c, g, or t
  misc_feature (114)..(170): n is a, c, g, or t
  misc_feature (655)..(655): n is a, c, g, or t
  misc_feature (793)..(793): n is a, c, g, or t
ggcctgaaataatcttggaaaattttttaaatgtcaaaatgatgagtcatgctaatacattgaggnnnnnnnnnnnnnnnnnnnnnnnnnnnnnnnagacagagtttcgctctnnnnnnnnnnnnnnnnnnnnnnnnnnnnnnnnnnnnnnnnnnnnnnnnnnnnnnnnntggatttcagtgatttctccggcctcagtctacattaacggttttgcccgaccaacaactcacccacaatagcgcgcattatccgtcacctgatccacacgccttgtccctcgtagatctcgtctgtatattattttcgctcgtatcctccccaccacgattgcccccaacttctcatcagccagcaaggcatcgacatgactcgtagtctgtattaatcgtctagaccctgcattgccgcgcgtgccggcggcaccggtgcagtcgctccaattcgtggctcagggcgatcgttatatataccccttaccctgatcttcccccccgttctctgtattcatactgattacatcttatcattgtccatggtaacggcgtgcgcatcggtatacctatatgcctattcttccccttcgaattaatactgccctggcacattcgcgcgccttggccacccgttgtgtgtgtgtccgttgacgaccccncgcgcgtccacctttattatccgtcattccccacgaaccccgtatttttattaacaccgcatataaccgttccctcactcgtccccttttctcatcccgccatctccgcgttggtggtaccgttcttcttcttccacnttcctgtgcgacctatcaccattacatgtctatgcacaaatcgccggtcgccaagtattaccatatacccaagttctaacgtacacatatcgcgcgacctgacaacgcacagggtccgtgctaacatgcgccaagagaggtacaggataatctctgcatcacataatatagagcgtggttacacagcaatggggcgatgcgtcggaaattcgtactgtgtccgtcgaatggctaacgtgtcactagatagagcacgctgtctacgcgttctgctcgcgttctcgtacgttgtgcgagccgtataattacaataagcccgcctgtgcccactcgccaccccg

SEQ ID NO: 409035 - DNA, 100 bp, Homo Sapiens
gaagatggctgacctcaaatcttatatcctaaatattaacgatatcccccaagttaatatacagaaaaacatgattctaaaataaatacacaggcttttt

SEQ ID NO: 409036 - DNA, 532 bp, Homo Sapiens
tgccaatacggtaggtacgaggctgggtggtgaatcgggcacgaggggcagccccaagttccaacttgcaagccctgtaactaagctgtctataaaccccagcagggaaggccaagggatggtctcacccatgcccttccctttggccaacatgagtcctgcagtggggagcttagcccctgctcccacctaacactctacagttagcacccaggggttgattcaggaagttcttcctttttctagcctgcatccttcctggccaccccctttatttctcagtctgacctggtgcactcttggcaagtgagtccattgcagtcccaggtggatatttaatgagcactcggactgtttcctccaagtcagctagtggcctgccctcctccttttcaagaagtctggggcacagagcctcctctggctgcctcttctcttctctgagcctctgggagccttcaggcaaaacctggcagttctcaggaacccagacctgaggctccagctccgcggccaccagagattcagtgta

SEQ ID NO: 409037 - DNA, 407 bp, Homo Sapiens
gggatcccctccttctggccacgcatacacacatactgttgtgtacacacacaacatgcctgtgcacagagccaacaacccttcaaaagtgtgctctgggtgtgtacctctggataaataagatgcatgccaagccaacccacagattttcaccagtgtggggtagtcaccaggcacctgttcaatgagctgtccacatggattgaagatgttttaaaaacacagaaaactcatggcttcaatgccagacttactagtctccatttcaaatgccaactctgagctgctgtacagcacaatctattccctattctctctttgaaaacagttaacccacctcacaggtgaatgaggagagaagatgtgctttctgcttcagtctcttactctgtgtgtgaccacatgca

SEQ ID NO: 409038 - DNA, 870 bp, Homo Sapiens
  misc_feature (167)..(177): n is a, c, g, or t
tattacataaactcgctcggaaggtacacgctaaatgtatatactttaaccaagaaattctaataaattgtgtttctaatatgagaatactggacagaatgacaatgtatgtgacacagcaggtgtttaccacatgcattttttatcacagtaaagaaatagctatnnnnnnnnnnntccaagctaacatatcattggaaaactgattatagtataactactaaaaatgactcatacaatgatcatatatagcacctttttcaccttatatagtacatttgctccaatgacttactggttaaaaaaaagtgataaaactaagaatctgaatatccaccaaagtacaaatagtgcttgcatttcggtggttcgacttctatgtggacttgtactctgtccggaattgctcaaaaagttctacatacatatttacccgtaattaataacgggtaaaaatagaatataataactactgcttcacacgtttgacacagacacaaagttcccgagttctgggactacaatacaagcttcccaaatagtgaatacccagagttatggatacccctgggagcgagattattcggagtaaaagtatcatgagggacatacgggaattcaatgcagtgtggggtaataattgacagcgatatgaaagccgaggccttaaagtattttccccaatggtagattgcgagaaaatttgcagaaaggataaccgagtggaagaggtggaaaattgaccagggctagtaggaagaggcggtataaggggcaaaaaatgattagaccatgttggaccataaattgacggaactgagtcacgaaatggggggtaaggggctacacgggtgaacttccaggaagctg

SEQ ID NO: 409039 - DNA, 144 bp, Homo Sapiens
acaccatccaccagttcatctcactgagctcgcaggcagccccagccaccagcgaaatggccgcgtcggcgctgcaccagacgaccagcttcctcggcaccgcaccgcggcgcgatgacctcgtccgcagcgtcggcgacttcg

SEQ ID NO: 409040 - DNA, 442 bp, Homo Sapiens
  misc_feature (27)..(27): n is a, c, g, or t
  misc_feature (80)..(80): n is a, c, g, or t
  misc_feature (222)..(222): n is a, c, g, or t
  misc_feature (294)..(294): n is a, c, g, or t
  misc_feature (346)..(346): n is a, c, g, or t
  misc_feature (365)..(365): n is a, c, g, or t
  misc_feature (382)..(382): n is a, c, g, or t
  misc_feature (395)..(395): n is a, c, g, or t
  misc_feature (405)..(405): n is a, c, g, or t
  misc_feature (415)..(415): n is a, c, g, or t
attcggcatgaggttccagcctcaggnccgcctggcaggactactgagcaaggccttggaaaatcggagcgattagagcngttcaaacaatacagaagtgtataaagtaagaattggaagtctcttcgctgctctaatctcactcctcagaggtgatcactggacctgagtgagcagaaggcttttcagaattacagcctgaactatttcttgagcaatttnggaactcatttctaaagcagtcctcagattcacacaacgtagtttgtgacggagtatgcccagagcagtgtngaagatgatcaaagtatgacatttcttctaccccagaggctgggcatttctncaggcacaaatgagctttngttttcaagcactgctncttttgaacacangggaattccntttaatgatncacggccggactatattggacttttgg

SEQ ID NO: 409041 - DNA, 615 bp, Homo Sapiens
  misc_feature (462)..(462): n is a, c, g, or t
attcccaacacacagggaccagcttctttcctaactcacttaggctcttcgtgctgctctggcaactaacacccttggctgcaggggcttggacactgcccttagtcactgacaattgtgtgaaggctgctgtcgttaacttcacttgatcaccttaggctcctgtgaagtggtgagcaattcaaacaaattcctgtcgtcaaatcatgatatacatctttccacaccaatagaccttgttttccgatgtagcattatttttcatagttggcgaatatacagttatggattcataacagcaagatggagaaattgcactgcagagaaatctttaaaagcaaattacctaatactgcagattgctgaactgtacccacacccaagactgagcattggatccatccagaatatacatcaaggtggtctgcaatgtctggctaaaaacattgactctggcctccntccgctggttgctacattctccctatgggttttcctgtggacattttggagcaaagatgccctcctgtgaactgggggtttcttaacctccccaaatgggatgaaaaagcccccgtaaagggggtttttttaaaaggaaaattcccccggggc

SEQ ID NO: 409042 - DNA, 1156 bp, Homo Sapiens
  misc_feature (1003)..(1011): n is a, c, g, or t
cggtccggaattcccgggatccggcacggaagcggctgtgcgcatgagcagatgaggcctagccgaggcggcgggacccccaagtttggaaagctcttttaacggctatgcgaaagttctgtccaaaggctgctcacagcccctgtctgactggttgtcatgatgaattgagctctctgttacctgcgcatcacaaccggtgagcgtctgtctctgtgcccctcaaagtggcccatagttttgtcctgggggcccgcctgggacggagtcctctatggcgggtccctaatgacaccccatccgtggggaacctgggggacggggagccgcccatggacaagcatggtgaaaggatcagctaagggcccatctaatttaaattcctatgcagagaatctaacctccagcaagcagttgaagaatcataccccctccttgcctaaagagggtgcataatgaatacttgattggagaaggatccatttttacaggaaggccgtttccttaggtccaactatcaggaatttgcctttgagtacttccttgtttaatggaattgttgctcttttcttctctgctacagatagtaactgtccctactgaaggccccaggagtgctccagccaggtgtggaaagctggtcacgattctatgctacttggttcattttctacacagcaacagaagagcccctcctgagattgctattaccatacccgcctgtcaccttgccaaggctggcccaatgtgtgtttttgtcataagctgtcatggaggccatgatggaggaaaagggaaaggggaaggcagatgttgaaggcccagaggccacagttgagagcagtttaagttccctgggggtgccaggactaagggggcattgcccctgtcccccgggattaccgttgaacccacatgttcaaagccccagaagcccggaaaggaatcctttcccccccagggggtaataattcaaagcatccctggaccccgccagcccagnnnnnnnnnggcaatccccggaagggcttgcacctccttagagaagggtatacccttccctttccttaaagccaccccaaagtttgttgaaactattgatttggtcacctttgtgttggggggggctttctgtcccccctttagggaatgcaaa

SEQ ID NO: 409043 - DNA, 420 bp, Homo Sapiens
  misc_feature (211)..(272): n is a, c, g, or t
actcctttaaatgaaaggactagacttggtctttaagctcccttccgattctaacatttggtggtagcaggattgtgcacaaagctcctaatttagagaaagatctgggttttagtcttttctcctctatcgccaccttaccggttgtacaacattggaccagccattctccccaaggcctcggcattttcattgttaaatgggaacactnnnnnnnnnnnnnnnnnnnnnnnnnnnnnnnnnnnnnnnnnnnnnnnnnnnnnnnnnnnnnntggaaaaggactatacctttcttttttaactacaaaggcgaacatgtaaccctctacctgtgggcgcacatttgctgtggtgttaacgttccactggtagcgcccaacctcccttcattcaagcacattttacgggcctacagggaag

SEQ ID NO: 409044 - DNA, 453 bp, Homo Sapiens
ttcatagctgattctagaggataaaaggagggccaacgaaccgcgaatgatggatacgggccgttccgaggagcaaaagaagctcctggagaagcagaactttgagttgagccagtcccgggagcgaatggacaccctaacaacaaccgtgactgaactcgaggaggacctgggcacgaaccgccgggacctcatcaagtcggaggagctgagcagcaagcatcagcgggacctccgggaggctctggcccagaaggaggacatggaagagcggattactacactggagaagcgctacctggctgctcagcgtgaggcaacatccatccatgacctcaatgacaagctggagaatgagctggccaacaaggagtccctgcaccgccagtgtgaggagaaggcccgactcctgcaggagctgctggaggtggcagagcagaagctgcagcagac

SEQ ID NO: 409045 - DNA, 201 bp, Homo Sapiens
  misc_feature (40)..(40): n is a, c, g, or t
  misc_feature (88)..(88): n is a, c, g, or t
  misc_feature (111)..(111): n is a, c, g, or t
  misc_feature (148)..(148): n is a, c, g, or t
  misc_feature (162)..(162): n is a, c, g, or t
attcggcacaggttcgtgaccatggccgaccgggcggcantgaagagggcttgcaaagacccgaaccccatcatcgacggccgcaacnagccgttgaacctggcatatctnggcgccaagcgcggacctccagacgggctttgcattngggttcagcagctncaccaccttgatccagcggacttacgggcttaccccgca

SEQ ID NO: 409046 - DNA, 413 bp, Homo Sapiens
  misc_feature (149)..(300): n is a, c, g, or t
  misc_feature (360)..(360): n is a, c, g, or t
  misc_feature (382)..(382): n is a, c, g, or t
tcatatttacaataaaacgtttatacctgccattgtcttgtgcatactcttgtcaaaaaatattgtctccaaacaacagtctcatttttgtgtcccctaaaattttcactagagtgacattcggaaaaaatgtattaagcatagcatcnnnnnnnnnnnnnnnnnnnnnnnnnnnnnnnnnnnnnnnnnnnnnnnnnnnnnnnnnnnnnnnnnnnnnnnnnnnnnnnnnnnnnnnnnnnnnnnnnnnnnnnnnnnnnnnnnnnnnnnnnnnnnnnnnnnnnnnnnnnnnnnnnnnnnnnngtgatgggtgcatgtcatttcatttcacacacaaaattgttgtgggatgcttcaaccttnaaaaatcctgggccaggcgccntgggttcatgcccgttaatcttaggcatttc

SEQ ID NO: 409047 - DNA, 782 bp, Homo Sapiens
  misc_feature (99)..(152): n is a, c, g, or t
  misc_feature (313)..(373): n is a, c, g, or t
agcgggcccaccgcccgcaccgccagccgagaagccgggctggtcgcgctcggtttctccgcgaaagccggccgtgtacctaggaattaagccggcccnnnnnnnnnnnnnnnnnnnnnnnnnnnnnnnnnnnnnnnnnnnnnnnnnnnnnntgctgagcgcgcgcgagaacaataataagatcgtgtcgcggtcgctgcccgagaaggaattcggagcagacgcgaggcccggggctcgcgccggcccaggagcccaggagggagaccggcagcggcggcatgaggcaggcgactgcggcgctggtgagcannnnnnnnnnnnnnnnnnnnnnnnnnnnnnnnnnnnnnnnnnnnnnnnnnnnnnnnnnnnnagcagccgaatcggccgggggggctccccgtcccacacgtttgccgggcccgtgatttgcctgggcctgttggagaccccgccgtcgcaccccttgcctcaagcctgcgccttagcccggtttcacaatcgtcaggagcggccggcgtcgtccagaccggtgcttggagggcccagcaggggagagcggccggtggcaaatcggtcgagaccacgcaggggggaaaagggacctcaccggggcaatcttcaagggcgcacacaggggaactacccaaggcaagggggaaaacgggaggggaattggcaagcagtccagggtggccacagcagagttacaaaagcggggcgaaccatggtccgttcgccaaaggattgacagcggttaccaccgcacatggggacgggcc

SEQ ID NO: 409048 - DNA, 1266 bp, Homo Sapiens
  misc_feature (1015)..(1015): n is a, c, g, or t
  misc_feature (1156)..(1156): n is a, c, g, or t
gccctccccctcccctctctctacccaacactccccatcttacccaacgaaggctggtaccgggtccggcattcccgggatcctggttcctaaacgccagctcggagcaatccccttgggctggagccaaatccctgctgtgattttaaggaagaccggcaggtccgggcccccaagggtcaaccccacacacatccccgcactttcctgtatgcaggcctgccagcgtacagggagtggaattcacagcctccccacccatccgcaggggtctcctgggaggaacccaccagcgataggaacactgaagctgggatacggcgtccgcccgagccttttcttaaaggcgccgaccccggaagcggggcgtccgagggaccgcgcgacgggccacgcacgtccgggcgaccagatccgggcagcttctccggctgggtggcaaccaactatatctgacgaccacagccatcctggggcaccagagattgtgacctctccatctccacctagatgggtccaggggccactctcagcctcacctcagccgctgacatcacaaaccagacttgggaacctgcaaacactctggagaacctatccctgacacatgaagctttgcggcctaaatgctgcggaaccccatgtccgagcccaaggaggcaggggcaagtaacccgggagccggggcctttcaccctcacgggaacataaccaaccacccctctggcttggcccccatccgcccgccccaatacccacccggatccaataacacctttatccactgagggcgcaaccttctgaaaaaagaaagagggggcactatctaatatggaagacggaccccgccgcgaaaaatcctccttggtcggccgcgatataatactcccaaattggccgcacctcaccctggcgtcctccttttttgcgaccactccccccccttaacaaaacacgcccacttttttccacgcacaaatatcccccccctcccatacaaaaggtctcccgaggnggcccgacccctttcggtcttggcgggaaaaatcccccctccagtcccctggcactttttgtggggaataaccgttttgcgcttctaaataacccacaccaccatatttaaaacagggggggccggcgttatttccctctngaagggtccgggttacacgcggtgggcgaattactatcgatttccgttcatcccaaaaataatccgccgataaatacaaaagaggataaaaatcatcacgcgcatctggg

SEQ ID NO: 409049 - DNA, 745 bp, Homo Sapiens
aaacaattgagtaaaaaatgtgatttagagtttttaggcagtaacttgtcatcacagatggagcgtttacaaacaagctaatccaatccatcttacttgtgtgaagagaaatttaagcattttttccgaaataatttagttaactagtaaatatatgaaaaaagtataactttcaaatatcacttccctagaaatgctctcatctgatgagttctccaaagcatatggaaaattcaggaaggggaagagaaaatccaaagagcaaagatactctcctgctgagattccccatcccaaaaatgccaaaagaaacctctctagtgaatttgctaactgtgaagaacaagctgggccccctgtggatccctgggtccttcaaacacttgggttaaaagaccttgacactatcgatgacacctcatcagctaactacagtgccctcgcatctcatcccagaagagtcgccagcacattttcccagtttccggatgatgcagttgattataacaaatatccccagagaggatatgccaattgactatagaggtgacagaacaacccccttgcacagcactgccactcatggcagaagatttccacatcctttctcaactttcaaatcccccagtggggctgaaaactcttccttactatactgctcatgtgtcacccaacaagacagagatggcattttccacatccctgagccctcatcgtaatgtgaaaactcattccttccatcagg

SEQ ID NO: 409050 - DNA, 998 bp, Homo Sapiens
  misc_feature (543)..(608): n is a, c, g, or t
cctgggtggcgaattcggcacgaggcagcagctgtgcgctggggacacacgagatgctcaccctccctgccctccaggagcttggactcagctgagatgcctggtatccaactgcacttctccatgtgtgcattgtcccctgagctggcaagaagatcctactacttggtctgcatgccatgccagctcggtcttgcaccctgagggcccagctgttgtccacaccaagggtggcctacagagggaagtgaggaccttgggacttcctccaggacagccctcgctgtccaaatctccacctgctgcagagctgcctccaatcaagcccttgtttccagctttctgtgccctaaataaacttctgctgggattgaaccatcagcattctgtggtgggcgtcgctgctgcgaggttgccctcgtgcacacaagctcctcacaagacttccaggatgatatggaagagtgactgatagcagccgcccggtgcttcccaaccttagagggaggtcacgggcaatctccctgcgatgctggccacagnnnnnnnnnnnnnnnnnnnnnnnnnnnnnnnnnnnnnnnnnnnnnnnnnnnnnnnnnnnnnnnnnnttgggctcaagtgatcctcctccctcagcctccaagtagccaacaccacatggaggcgtcagcatgccaagcccccatgataactttacttttcttcttgaacctgatggagtctcactctggtgcccatgctgaagcgcaatgggagcaatcatgactcactgcgacctccgcctcctgggttcagcgactctgctgccttcaacttcctagatgctgggattaccgggaacccccaaccaagccgaaatgttcgaattttttacaaaagatgggggtttccccatttggcccccccttgggccttgaacccccaattaccaattttcccaagggcgcccttattggaaaaatttttctaagcttcaccccaccttacttaaggggggt

SEQ ID NO: 409051 - DNA, 329 bp, Homo Sapiens
ggctccccgtaccaggcgcacttctgactccttggtcttggagatccctaaggaccacacttggaaactgatgatctatggcaatgggtccttttaggccttgaatccctttaagaatctgacaatatgaaactctgtctctaggaagctgctggaaggtacacatcttgggagtttgccctttgaagctcacctgtggaccttttttcctttcgtaagtccactgactccagttaggaatgcttggtctgataagcgtcctttttatgtaatgatggtggataaactgctttttccaatacctacacatacagtttcaaaaccaagga

SEQ ID NO: 409052 - DNA, 988 bp, Homo Sapiens
  misc_feature (652)..(850): n is a, c, g, or t
attcagactcccaaagtgctgggattacaggcatgagccactgggcccaggccttcctgtcttcttctaagctctccaaactgttccaacctctgcccattacccacttccaaagctgcttccacattttcaggtatcttcatagcaatgctctacttcccagtaccaattttctgtattagtctgttcttgcactgctatgaagaactacctgagactgggtaattttataaagaaaagtggtttaattggatcacgattctgcaggctgaacaagaagcatggctgaggaagcctcaagaaatttacaatcatggcaggaggtgaagagggaggtgacacgccttacatggctgaagcaggaggaagagagagcaaaagggaagatgctacgtacttttaaacaatcagatctggtgagaactcactatacaagaatggcaagggagaaatcctcccccatgatccaattacctctgcccagacccctcctcctacactggggattacaattagacatgagatttgagtggggacacaaatccaaaccataaggttagtattaaaagttaattgctttcctatatactagcaatgaaaaaaactggaatttgaaatttcaaatacaatgctatttacatgagtacccccnnnnnnnnnnnnnnnnnnnnnnnnnnnnnnnnnnnnnnnnnnnnnnnnnnnnnnnnnnnnnnnnnnnnnnnnnnnnnnnnnnnnnnnnnnnnnnnnnnnnnnnnnnnnnnnnnnnnnnnnnnnnnnnnnnnnnnnnnnnnnnnnnnnnnnnnnnnnnnnnnnnnnnnnnnnnnnnnnnnnnnnnnnnnnnnnnnnnnnnaatctagcaggttattttgtagatataaacacatttattctaaagcttatatgaagacgccaaaagactcataggtcaaaatgctggaagaaataacaacttcagagggactggacacctaccccaacttttaagaat

SEQ ID NO: 409053 - DNA, 1397 bp, Homo Sapiens
  misc_feature (815)..(815): n is a, c, g, or t
  misc_feature (887)..(887): n is a, c, g, or t
  misc_feature (984)..(984): n is a, c, g, or t
cggacgagggcgcggccatggcgctcctgctttcggtgctgcgtgtactgctgggcggcttcttcgcgctcgtggggttggccaagctctcggaggagatctcggctccagtttcggagcggatggtcagagatgaacagcagtgttggggacctgggtgttggcggctgcagcctctgggatgaccctgctcgcttcatcgtggtgcccgcggcctatgccttggcactgggcctggggctgccagccaacgtggcggccctggcaatgttcatccgcagcggcgggcgcctgggacaggccctgcttctctacctgttcaacctgtctctggttggtgcaaactgccagactgctctgtccttgtcggctcacgtgctacctgacgtccggaccgaaaaccttccttgcctgccgcccctgggcctccctccagccctaatccttacctgacgccctcactccgacacccttcgaagcgccctcaccttcctcatctctacctgcccccacatccacccacctacacctttcctaacccacacccccaacgctgcttctcattcttctttcttcctttctaactctaggacagcctcacccttcgcctgcttctcccgtttcctcaaattactccactactcttttacctaaccaccaccatccccctcaccacccccaccactcctcactaatcctcctcatctccccacatgttctctccatacacgtgcatcacaccacgctctgtgatcaactgccctacagttgaacaattcctcaccacaccacatactctgatttctcccgatganactcactaacctaaccccccatacaacgaaccacaaccacctcaccacaatgtgcataagatcccggaccanttcagtactacctatccctacattcgtctctccaaccattctcgttgtgctcacccttaaattctccagtcccaaccttctccctgaacctcccganaacacctttactccccactgacccctgttctccccctctactcccacccttcatatcacttaattactcaccctaccacccatccatctccattacttctccccctcccattttctgtttctcctcaccccctaatcccacttaactcactcagtcatctcctactcatctttttctacctagtcttatcctcttcatctcttcacactctgccatcgccattaggcacaacgcctatccgtatcctcaccgctgaggtaataatatgcgcgctcacgtaactccaactctatctctcccgctctcctcatcaaaccatgacagttccgactttgcaccccatcagcgtccattacgtaaccccgcacgtgcccctactcaactcaatcactctctcgctctttctaccctca

SEQ ID NO: 409054 - DNA, 106 bp, Homo Sapiens
caacaccaaaagtctataaaacattccacctaatcagatggtaagaattgaaaaagcatctcctttccaaaaccttatgtttttagatgactgttctgtttatttc

SEQ ID NO: 409055 - DNA, 446 bp, Homo Sapiens; identical to SEQ ID NO: 301568
  misc_feature (60)..(83): n is a, c, g, or t
  misc_feature (103)..(367): n is a, c, g, or t

SEQ ID NO: 409056 - DNA, 667 bp, Homo Sapiens; identical to SEQ ID NO: 301844
  misc_feature (545)..(554): n is a, c, g, or t

SEQ ID NO: 409057 - DNA, 402 bp, Homo Sapiens
ctgtctttttagttaagtagatttttaggtagtccaggctacatatccgtttcaaatatacctgatgagactagatacctaaagctaatcttagttccaggaaagagtatcttccatctccattcgaatcaaatgctctcaagctctctggtcttggcatggcagaacctagggagttccagagttcctggtaggtcagcatcccatccacatcttgaccagtcttgtggaataaatcctgaagatctttgatgctagaaatcccaggcagggagagaggttttacttgggtctcaatttggtttctaagaagctgtgaaaattctggcaatgctgaaggatctgatgtgaagttctgtacttgctcttcatctggtgggtctccggaggcctggttgcttt

SEQ ID NO: 409058 - DNA, 501 bp, Homo Sapiens
tatgctagagaggctgtgtttgatcggacgagggtcttactgagctcttctctctctcattactgactacctcagtgtagaaaccctcatttttttccccagagctatccttggttacccaatgtgcctctggcttccctggggtttgggataaactggaaggagagaatagtctgagttctcttacttatattatgtaccataacattctccctcatatctgtggttggagactcccacccttgtccaccctttcctgcctcatactagtatacatgagtttagggctgtcgctggaaagtctggcagcccaggccataggattccagttcagcctacgatgatcctagggaaatcaccaagttccaaaggctggttgtttaaagcctagaatatccactgtatccatattcctaatgcagtttggaccttgttctagacagagcactcacgccttatgcaagaaaaccaatgatggtgcatgaagatattctgtgccca

SEQ ID NO: 409059 - DNA, 310 bp, Homo Sapiens
ccgtgcgtaacagataccacatgatttggttgggtgaacgtgggaaggcgggtcttggcaattctcaggttcatcccatggcaaggatcggcctggatctcagtagtgtgtgtacacattcaaggtgggaagggttaatttatagttggggtcttgagccatgaaatcaggggagtggcttctgactggcaggacctgttggcgctgttttctgccacaccgtactttggggatttttggggaggggggtggttcaggagtgagcaaaatgtaagaagtcaagggaataaatcttttgggcgtacgggga

SEQ ID NO: 409060 - DNA, 441 bp, Homo Sapiens
ggagctactgcgcgcgtatttccctctctgaggaagtttatccttgtgccttctggaggatttctctctagctcgactcactctggactgactcgctccctggctttctcagttagttttggtcgttcacatcaccattctgtcttccatgctgttctaaaatcctggtttaattgctcttccctccccgttagtccccactagattctcaggttgctgagattgtacagattgatgtgatggcgagtgccccaggctagcccctaaaggctatctcgttcattatggagcaggagcataggcccatattcatgatactacagtatcaaaccactaaatctccccactgctcctgggagaagatgtgctcagtcaagggtgttgagaacataagacccctgcacccaggggtatggctacagtctgaggaatggctatagt

SEQ ID NO: 409061 - DNA, 972 bp, Homo Sapiens
  misc_feature (356)..(356): n is a, c, g, or t
  misc_feature (365)..(365): n is a, c, g, or t
  misc_feature (432)..(433): n is a, c, g, or t
  misc_feature (570)..(570): n is a, c, g, or t
  misc_feature (637)..(637): n is a, c, g, or t
  misc_feature (658)..(677): n is a, c, g, or t
  misc_feature (706)..(706): n is a, c, g, or t
  misc_feature (734)..(734): n is a, c, g, or t
  misc_feature (774)..(774): n is a, c, g, or t
  misc_feature (780)..(780): n is a, c, g, or t
  misc_feature (791)..(791): n is a, c, g, or t
  misc_feature (794)..(794): n is a, c, g, or t
  misc_feature (807)..(807): n is a, c, g, or t
  misc_feature (830)..(830): n is a, c, g, or t
  misc_feature (848)..(848): n is a, c, g, or t
  misc_feature (876)..(876): n is a, c, g, or t
  misc_feature (883)..(883): n is a, c, g, or t
  misc_feature (927)..(927): n is a, c, g, or t
ggatttaaagcaagaaaaagatgaacgttatagttttaaaatcaatattagcagagccatagataggctgagctcttatttggggttctgagaaataactcagtttaaaacttctttaactgcctcccttagtacccaggctagcccatggtgacgtcagggatattcattactgattggcctctagtattccaagggtactactatagatattacaatgatgcttttactaagtgataaccccgtatcttacaggactgactttgactcaataaaccactcagcctattattggaaagtgccataggccttgagaaagtatagttacatcctcacaaatatatgaagttaagtcnctacttccnaggaaaaaaaatgtaaatacatttttctttcctggaaccgaactccttagtatgggggaaataatgnnaaattaaggaaaatggtaaaagcgtggaaatgggaagggtaggccttggatcgaaagattttcggcaggacccttggatttgtggtttaaccaaaccgggaaccaacaacaaaaaattttaataaatttgcaaattntggaaaatttgaagaagaaaggtagatggtgggcgggcggcttgtgggggaggtggttattttaaanatagagtaaacagttatgaannnnnnnnnnnnnnnnnnnnagaatgtgaaaataataaaattgttcggngtgtcgacaaagcctacattaaaaaagnagagaggggtgttgagtccaaccatcaaagagacgggcanaccccngccgtgcgcgntgngaattaatgaggngcgtatttgatcagacactgaanacaatggacaacacggancgacaacctacagcaggtggacatatcncatcaantaagtatacagcggtcgctcgaacacgcgagcatgacacctagngcgatcatgcacatctccgacacaagaccacacgcacaaccaaag

SEQ ID NO: 409062 - DNA, 273 bp, Homo Sapiens
  misc_feature (73)..(188): n is a, c, g, or t
gggaagaaatttacctcaatgcaataaaggtcacttatgaaatgcccacaactaacatcacactcaatggtgnnnnnnnnnnnnnnnnnnnnnnnnnnnnnnnnnnnnnnnnnnnnnnnnnnnnnnnnnnnnnnnnnnnnnnnnnnnnnnnnnnnnnnnnnnnnnnnnnnnnnnnnnnnnnnnnnnnnacagaggcttccaagtcagaaaggaaaaagtaagattatttttgcatgccatgaccatatacataaaaagctcaaaagactacaa

SEQ ID NO: 409063 - DNA, 388 bp, Homo Sapiens
cctgctagctacacaagatcgttgtcaatggcatgaccgtgctgagatgatcctcaaggtagtgatggcccctcatgaaccgttggtggtgtttgtggacaactacatcaaagcttctcacagactgcaacacagaaacctttcagaagatactggacatgaaggggctgaagaggagtgagcagagcagcatgctggaactcctgcgccagtggatccccgcaccgccctcgggggcagaaagctccggctcactgtccctgacggcgccaacaccagagcaagagtcgtcactgcatcctgaagctcgagaaactcattaaaaagagattgtagcagcagcaaggggccctttgctcctggctggagaccctcagtgcccgttccc

SEQ ID NO: 409064 - DNA, 192 bp, Homo Sapiens
tggtcccgcaatgcagtgggcacagccaattagacattcttatccccattgaacgatagaaaactgaggccatctcaagctggccctaatctagcacactggcctcctgctcccctctcccaccgtgcagcacccccgtgtggacaccacctctcattaagccttccctatgctgatacaagatctgctccc

SEQ ID NO: 409065 - DNA, 699 bp, Homo Sapiens
  misc_feature (162)..(207): n is a, c, g, or t
gaagagaggtaggcttttaaaaatgtcactctgttcacagtaaggcaagcaagggaagcaaaatcaatttctttctagaggtgggataatgggtagggagtggaagactttaggaaagaggtgccccagtttctgagtcacttcatggcttcaatattcatnnnnnnnnnnnnnnnnnnnnnnnnnnnnnnnnnnnnnnnnnnnnnntgttgcagcaggtagttagtcagagctgagcagggaaggagaggctcctccggcccatcaggagatgatcaggcagttgttaaactggtctctctcaaataatcattggttgcagccgatgccagggaaagacagtctcccagtagatagaaacgccagaaactggtgatcagcagcttcccagtaagatctcaggaggtgggtgagtgagcttaagcatgtgcatgaagaggccaaaagggtggagcctaagctgggtcacattgaccttcctctaggaacactcaacggataagggaagacaacctcaagtgagacacacataatagcttcagtaaacacactcacatgcagaccctcccaagtgctggcaggccattgtacatgcagactgccaacatataaaccaaagtcaaaggtcaaacatgcacttgaatctctcaaggtccctactggccctcttcacgtgtacttatttccattgaattcctg

SEQ ID NO: 409066 - DNA, 568 bp, Homo Sapiens
  misc_feature (504)..(504): n is a, c, g, or t
tatcgatgccactccacaaacctatctcccactcttacccggcagtcacaaggtgcatgctccccaatcagggaggcggtccggctcaggggatcatcaactccggattaatggggagtagaaaaaataaaattcgaagcatacccaaaccactcggtatccttcctaatgaaatttatggccaaaagcgggtaagtagcaaggcaatgggcctatatcatgtctcattcctccttttctggtctacttacttcaggggttacggagctgtgaaatagctggagaagggggagtaggagggtaacagtgggaggctcagacaatctactcaaataatcggctcccgaataatcaagagctgaccatgagcttttcttcaaagagccaggcaccctccagtgggggcgggttccaagctttactatcctggcctatggctgggtgatcttaagacaaagataaacagtattctggggggacacacattggccagatacctgcttntggaatggttgtcttaggatgaacatttacatacctaccttttttcttaagggcataaaaccct

SEQ ID NO: 409067 - DNA, 461 bp, Homo Sapiens
aatatatatgtattttagaaaaactgctagtcacgggctgagtcattttgggttccaccccttcctgcaatcaaagccttccacatgctacaaaggatttcccttataaggtaaaagaggcttgctagatacatgtggcaaaggaacaggaagatgtcagttaatcacacaaaaatctaaatgaaaccagctgtcgggaaataggcccagaagtctatcataggcctggctcctggcttatactacaagagtgaaaggtttttttattctatttgtataaaccaaccccgtggtctcacgtgccttaggcccgggaagaggtttaccctctccacagatggaacgacagcatccttggcttttcacaagacctttgcgaacgttttaaagaagtctaacaactctccaaaaccatctactctcccaagtacagggtctgggccttaaatctgggctccagg

SEQ ID NO: 409068 - DNA, 938 bp, Homo Sapiens
  misc_feature (64)..(99): n is a, c, g, or t
  misc_feature (269)..(280): n is a, c, g, or t
tatatggccctagcgttattagcgaacgacgagcgccacgaagtagtgagcgaggaagcggcgnnnnnnnnnnnnnnnnnnnnnnnnnnnnnnnnnnnnagtcgaggtaccggacatatgcccgggaattcggccattacggcgggtcttgtgctactgtgatgttcaagcaaaagtggagagaagaaaagctgctgcaaaagacaactgtgaaactgtgatattttataaaatagaagaaattcaagtgctttctttttcctatatgnnnnnnnnnnnnatctgaattctcagatacgggctcctaactggtgtccaaacttcttgtgtaataaagagattctggttttcgatcctaagttcttggggatgccaacattcacagtcaagtcttgaggaggtgtgatgatggtctcatgcccattttttgggaaagctgttgtttttaaaacaggccaaacctctttatactggtggtatcagcctttcaaaaagtctattcttcaatggcctgaaactgcatttaatgcatttcttccacctgagcactgagcacaccaaacgggaatccattcgaaaatgacagtgtgtgcacgcgtctgattacattaacaagaggggagggagtcgccatacatattaaaactcttcaacaggttatagtacaccaaacatgatgattgtgtgaacctttgcagagctgtccagtcaggataaaacaggtcaggactaggacaataacccttagccgattattcgggtggtacaaattttctgtgcaatgtggtccatcagaacatctagatccccaaagagcatattaatctaagagacgaagaaccttccaggttgaacttgtcgtgcggacgtcgtgaccgcctggcaatgttaccctctgccggaccttcaccactcttcccggacaaccaacattcgcg

SEQ ID NO: 409069 - DNA, 288 bp, Homo Sapiens
  misc_feature (21)..(21): n is a, c, g, or t
  misc_feature (40)..(40): n is a, c, g, or t
  misc_feature (76)..(76): n is a, c, g, or t
  misc_feature (87)..(87): n is a, c, g, or t
  misc_feature (120)..(173): n is a, c, g, or t
  misc_feature (181)..(182): n is a, c, g, or t
  misc_feature (198)..(198): n is a, c, g, or t
  misc_feature (227)..(227): n is a, c, g, or t
ccttgttggaccctaattctnccaaggcctcttgattgtnaaccacacacctgctgcattgccaacagatcctgtnccgtacctgtntccaaaaacatttgtaaaaaccctttgagtttnnnnnnnnnnnnnnnnnnnnnnnnnnnnnnnnnnnnnnnnnnnnnnnnnnnnnnatattttnntacaggattatttctncagtatcctactgtgtgattttaaaaaangatgcagcaaccttaatatatctccatatctggtgctactgtgattgtccaagcaaaagtg

SEQ ID NO: 409070 - DNA, 136 bp, Homo Sapiens
tgtatgcttctttttgtaatatgactgagaaagggacagggctgtcaattaaatctgctccaaagaatttgtattgaagattggcctaagacctgcaaactccatctataactagaaaatacgaaaaaggaaaatt

SEQ ID NO: 409071 - DNA, 1061 bp, Homo Sapiens
gttttgtctgcaggcggttccgcctttgcaacccaggtaaatacctgccgcgagaaataataccgcccgcgatcatgctggcgataataagcgcgacttcttttcatcttcattataacctggagtgactggctgacgttgaatactcctggtaataaagataaggtatgcccatgcgtgggacgaaacaagttaaacagccacctttgtcgcgcggattttgaatgttcagccatcgatttatcgtcgtgcggcggtgatgcgtaaagctgcagtggtcactctccaggccaggttcaacggtgagacaagttcgttaatcgctgaatgggaatggatgagtgttgttagcgtttgccagattcggagtaccgctttgtaccatcgccagatgtttcgcgtaattaactcatgatgggtcggtggccttcggttatcaattgggtctctcacgtgactggaatggctacggttaagtccttgggggccagattaacacggcattaatacagccgggctaaagagcgacggaccttggatacagatttgcgggaccatgtggccatggtttgtcgctgttaatttcgaccttggtactctcattctccctgggaaagctttataaagaggtcgagtatcctccgtaacattaacttttcctgaacgttttggccttgcgaacacgggcccgaaccataggctgagcgtgggagagtccctccaacggagaggcatttaatcactaaaaagtacagagtcgaaacttgggggcggttgaccgcgggacatccggccaagaaacctggcagggcgatccattcgcaaaccttgacgcagtcattgaacgaacgctaatattttcgcgttggttgcaatgcgcagggctacaccagagaatggcgacggaatcaccaaatacgcacacatcttgcgggtgtgaaccgcatggaacgcggggcatgtaatttcccaggcattccaaggtaacgagcataggtccggggcttggccacaaagtcaaaaggaacacgcttcgtgggatcctagagcaccgttcccag

SEQ ID NO: 409072 - DNA, 795 bp, Homo Sapiens
  misc_feature (148)..(148): n is a, c, g, or t
  misc_feature (665)..(665): n is a, c, g, or t
agcgggcgctgcctgcctctgactggtcggaagcggcacttactacgtggcggatgctgacgtgtgcaagaggactgtcccacagtgaagagtgggaggcaagtgcctgctgaccgggaggaggtcgaccttacaggagctgggtatngtagctcattctaatagccctagtctacttaggaaggcaaaagggaagcagcaagaagtggccatcagaaggcatgtggtcccgtagaacggtagaacgggtgaggaggatgcaggagatggtcctactgtgtggacgcatcggggctcagaagtccgcttgttagagatggcagtgacctgtgacaactccagtcgtggccgagaaagccttccggagtccttaggaagcgggaaggaggccccggaccaagtgcagatgaacgtacgttagccgtaagtatcacggtagctgggcttggtcgacagaagtccatggactttacattccatgtcgtatcgtgacttcctgacgctgggcaccgcgcctaggtacgctcaggcgaatagacgagtgagtgaatagttgcgtgccaagggggcagagttggcagaaggactgggcaatggtccaagccgaaccggggatttcgaagccttttgcaatgtgcctggcaaggtcgacagaacgttcctgnaacgaattgtggcgaagccacgaatgagttggaacgtgactccagacaaagtgggcatctgtcagccagaatgagcaggcatcagacggagtgaggaaggacctgggcgcggcagggctattttacctcg

SEQ ID NO: 409073 - DNA, 790 bp, Homo Sapiens
  misc_feature (172)..(191): n is a, c, g, or t
agcggataaactatatattaggtaggtagtcataacacattcgtttcagacatttattcaatcattgttcagtcttattaaatacctatcatgtgtcaagaaccaaatgcgtaggtttgaattaaaaatggaaacagggctaaatagctaccatgatcttggcatgagagtnnnnnnnnnnnnnnnnnnnntatacatatatatatgtggtccttcactaaaatctaaaagtgctgtaattataaggtaatctgcagagtgtatattgttacctcagtccctttgggctgtgactgctgtacacattatcatgttaccattgacatcttcacgttgtcccagatgctgatgtgtacatgcatataagcagcactatgtagtggttagaaggagtacatggctgtctgggaaatggcacaggcgctgggattccaagtttaacatgctctgtgcgcctcaagtatttcttcaatcgtctgaagcatgcgtgagataatgaatatccttcttcctagggtctttcggtaggatcaacttggagtttaaatactattataaccactatttacgagacaattgcatggacaccgtaaataacgctcttgagtgaaaacaggctatttacttgaagtactaccctgtgtgataaccagggaagagttttttttgacccagtattatatcggggctgtagtgtaaaggcgtagatccctttgtactagtggtaaaagtgcgccaagactaccttgcggtaggcctctgcttgagggggcgggcatctcttcctcac

SEQ ID NO: 409074 - DNA, 778 bp, Homo Sapiens
  misc_feature (334)..(531): n is a, c, g, or t
  misc_feature (585)..(730): n is a, c, g, or t
agcgggtgggagagcgggcttctgggactccgctaagaactcccgttgctcgctcacgtcgcccgcgttgcccatacccttcgactgcctgcgcagccctgtgtcactgagctccactgctgactccaaatcaccacaaaagcagaccacggcgcgttgcaccgaggttcggtcacgcgctgtagagcgcgagcgacgtattcggggaatactcgagggccaccgcgaggcagtgcgacgcgtgaggtgtacgggggagctgcgagtggaccgatggtctgtacctatatcattcgctgtacgtatgatgcgacaacatcgtcgctcgtgctannnnnnnnnnnnnnnnnnnnnnnnnnnnnnnnnnnnnnnnnnnnnnnnnnnnnnnnnnnnnnnnnnnnnnnnnnnnnnnnnnnnnnnnnnnnnnnnnnnnnnnnnnnnnnnnnnnnnnnnnnnnnnnnnnnnnnnnnnnnnnnnnnnnnnnnnnnnnnnnnnnnnnnnnnnnnnnnnnnnnnnnnnnnnnnnnnnnnnggaactctaggagtggtcaagtaaaagtatagagcagggatgggatggatgagnnnnnnnnnnnnnnnnnnnnnnnnnnnnnnnnnnnnnnnnnnnnnnnnnnnnnnnnnnnnnnnnnnnnnnnnnnnnnnnnnnnnnnnnnnnnnnnnnnnnnnnnnnnnnnnnnnnnnnnnnnnnnnnnnnnnnnnnnnnnnnnnnntgagaggacctggtatcccaataagaacgagagaggcggggcttgcgc

SEQ ID NO: 409075 - DNA, 445 bp, Homo Sapiens
  misc_feature (161)..(198): n is a, c, g, or t
tgtgtaatctaccacgcaagctaaatggatatgaagctgtttacttcaggtcagtattgcaagtttagaatttttaatcattgagttgctaccatagttaccatatatcacaatcacttccctttccatctctcccaaaatgttttctttccaaaaagaannnnnnnnnnnnnnnnnnnnnnnnnnnnnnnnnnnnnngacatcctttgacacaattagagttaccttgtaggctgcaaatatagggatggttaactgcttttcctgaagttagttgacactggccatcctccaagaggtgctacaggaagctggggcagtgagaagtactaaagcagtttccaaaaggactgtgaagcacatctcgttccagctgtgtgtaatgattccttctcctccataagtggagccgccttaccagaaggtgttatcaaaaaagagatgg

SEQ ID NO: 409076 - DNA, 398 bp, Homo Sapiens
tcgagctcggtcccagtctgttctaccatgtgaagaaacatattttcagataaaggaataaagccagtatgcacagagtataagtacggaaaggtcccaactatgggaaagttcccaccctagctcttcatggccatccttattcatacaatgcctattatatggtcatatgaaccaataactttttcccctacaggctacttcaagctgtatttctgttacttgaacaccaaaaagtcctaactaataaaatagagaaaccaaattgataaaaattagacatcaaaggattttttcattcaggctataaaagggcctggtatgccttctctggcttagaaaactttcatctatcaaatataatgtccctttcctctctgtattagataaaccccaaa

SEQ ID NO: 409077 - DNA, 163 bp, Homo Sapiens
agatcgagctcggtaccagtcggttctaccatggacaggataaaaattttgccatgtgaagaacaaaattagtaagctaacacaaacacagaacaaaggatttttgcttgcctttattaatagagtgtactaatgaattaagttaattagtcacacgcaagga

SEQ ID NO: 409078 - DNA, 512 bp, Homo Sapiens
cggaccttcatttatgcaatcagaaaccaaaccagatataattatgtagaaacaaactgaaaaagaaacacacatgcaaaaactggcaaattggcagatgtcctttacatacatgcacgtgcaagcaaatcagtaagaacccagagaaaccaaagaacaggcaggtcatagacgcccaatatactcacatcgcgatgacaaggaccatttcactggtcatcaacgtttttgtttttcgtccatcaaaatcagcatgccttaacaacactggagaaggtgtggggtgaagggtcattaagggcacgcagtagccataatgccacaccctttgtgccagccactgcgcttctggaaacctaccccacagcggtcaaccaaaagacagcaaaggcttctggcactaagctggtcacaaacgcattactaattattgtgcacatgtggaacctaccatctaagcctcctttctaaggcgaaaattcccactactacatcttgccacccttctttaa

SEQ ID NO: 409079 - DNA, 148 bp, Homo Sapiens
agcccaaagtgaaaatgagtgatgttgatctgctggttctccaggttgtctaaaagtagaaaaaggaacatgggttcacattatagggtggcactttgcagagaagacatttctacattttcacagggcaaggattgaagaaatgcaa

SEQ ID NO: 409080 - DNA, 443 bp, Homo Sapiens
  misc_feature (293)..(340): n is a, c, g, or t
aatgggacagctgaagcttggctgtccttactgggaaccgggaacattgagtgaccagcctgcaagggaatgtgggacacctccgttccagaccaatgcttggttttagggctacgactaaaatgaaaacaaatctagctttggagatcagggatatgatggggacgacctttacagcgactggcaggacgaacactgccagacatgaaagcatgttagtgccaagggacaagatgtctttgaaatatcctccacacctgtaaaacactttcccagcttatccctaagaaagnnnnnnnnnnnnnnnnnnnnnnnnnnnnnnnnnnnnnnnnnnnnnnnncccgggccccagagtctgggaatcaataagtctgggatggggcctgcgaatgtgttttcctaacaagttcccagatcactgtggccctgccctgtggtaaagt

SEQ ID NO: 409081 - DNA, 432 bp, Homo Sapiens
gtactactgcacgcttgtattcatgctctcactatgtcctgacgattagaggaaggggcaaagcagctctctggagcctctttcattcataagggtactaatcccattcacgaggactctgccattacaacccaatcacctcccaaaggcctcacctcataaccttatcacatgggtgattaggtttcaatatgtggatctgagggggacaaaacattcagatcacagcagtttctttcaagacttttacacacaggttgcctccagatcacaaggctcttacccctcttttgttcttggctactttataacatccacttagacctcacttccttcaggacacctaggttagacctttgcctgtgtgcttccctagcaccttccactcccttcacatagcacctaacacactctgttgggtttctctgaggt

SEQ ID NO: 409082 - DNA, 266 bp, Homo Sapiens
cgattaagtcttttagtcgtggatctggtcttactcctgcaacccttttgagagtaacggaaagctctgttgagtctcaacttttctttcagtgggcagggctcaccaagtctctctcccggcgtagggcaggttgaccccttccatgagccacggaagaggcaatctgagcagcaaaaggtgcttctcccttagaagtggggaatataaatgctcaccctggaccccagaggaagcgcctccttgggccattttcttgtacatag

SEQ ID NO: 409083 - DNA, 561 bp, Homo Sapiens
  misc_feature (304)..(429): n is a, c, g, or t
gcacactaatggccatgcagcccatcttcaggggcactgttgcctttgagttgtacagtgcacaccctgaataaccatgcacagagtccagtatccactgtggggttctagtgggtaaatagcttgacttcggtttgagggcactgcgtggctcacgctgtctacagatgaaataagcagccaccagctgctcccaggcattctctgttgatatgtaggctttgtgggattaaagtccttttatctgttttatctcattatccattcccatgtcccaggtcagtgttctcgaacttgtgtgcannnnnnnnnnnnnnnnnnnnnnnnnnnnnnnnnnnnnnnnnnnnnnnnnnnnnnnnnnnnnnnnnnnnnnnnnnnnnnnnnnnnnnnnnnnnnnnnnnnnnnnnnnnnnnnnnnnnnnnnnnnnnnactgggctaggccctccttcaagaaccaccatcctaggaaatctttcatggtagcctgtgcagtgggagtcaggagaccaggagtcaagtcccttccctgcctgttattagtgacattaatataggcatatt

SEQ ID NO: 409084 - DNA, 211 bp, Homo Sapiens
ttcagataatgttctaaaaagtccagaataacccccgctgctaggctgggtcacagacgtcttagaatcagatctacgctgcttttgttgtccaacaggaagacagaatttaaacttgagaattttttgacaaacccttgggaatctccctcaaatatatccaaacagacctaaggatgtatggcttatacatgatttcacttcttggtaa

SEQ ID NO: 409085 - DNA, 429 bp, Homo Sapiens
  misc_feature (64)..(131): n is a, c, g, or t
ataataaacaggctccagcatcagactctacaagtttagattctgatgctgtttattcccagannnnnnnnnnnnnnnnnnnnnnnnnnnnnnnnnnnnnnnnnnnnnnnnnnnnnnnnnnnnnnnnnnnnaatatcaagcacagcacctgatctatagacagaaaagttggttgcttcacaaaatgacccgtcccttcctattcaatctcatccctgctacccctaggaactgtttatatgccaagcataattacttacatgcaaagtcctctgcacatgccaagcaatggtccttgtctttgaacatgcttttccctctacctgaaatcccattggcacttcctctgggttgaggttaccttttaccttttgaatccaactctgtgtctcctcttccttccctagttgtcctctccctgtggaaaag

SEQ ID NO: 409086 - DNA, 476 bp, Homo Sapiens
  misc_feature (204)..(247): n is a, c, g, or t
cgacctaaggatccccttccaggggctgagggcaagtgagcggaatggcttgtctgttgttggcatgcttacgtgatcacgagcaactatggtgatggtagaccttacaaaatactaactgcattgaaaacaactactcgtagcttgcaaattatctctagtgcctgaggttatattgcagtgagattccatccaattcctgtnnnnnnnnnnnnnnnnnnnnnnnnnnnnnnnnnnnnnnnnnnnngcactccaaacttcctgttccttggtgtatattaaagtctataccactaagtaaatacctcatcatcttcccttgtctctgattcccatgtgcagcttatttattttacctataatgtttcagaggccgctaaaatatgtttagctgtctccttttcctagcttggtaaaataaagagcaatagaaggtaaaggaaggatgaaaaacaagagtgctgaaaaaaggtaca

SEQ ID NO: 409087 - DNA, 537 bp, Homo Sapiens
tacgtcgaggcggaatgtcatgctaacatggctagtggtcagtttgtatcatgcacgtctgtggactggtaaaaacccctgggcgacaatcatagaaaaagcattccataactgggatggaaccagtaaaatttctggaaggaggcagtatagcatggattatcgaaagccctgtgatcttcattgtcggtttctttctccctgatacttcctagctgtgagacttcggacatgtcgcccaatcggtcgcatatagttcctccttcttagtataggtgtgctgatgagcaagatgaaacatatcaggcttatagccctgtgcctagccctgctacacatcaataaaatggcaacgtctgtcttcatcattagtagtaataataaaaacaacacactcaggatctctctacctaccctgcagatttatgggttggaggtgccttccaaagaagaccatctctgaggtccatctaatgtagggactttctagaacgttatacctaggctttctcttcctctgggatgcagagaaatgca

SEQ ID NO: 409088 - DNA, 240 bp, Homo Sapiens
  misc_feature (116)..(159): n is a, c, g, or t
tgatatgcataggactaaattctccctgattatattatatgctcatcacagtgaatttgaatcatgatcagcggcattttgcctgttatctcaacaattaaatcacataaacctannnnnnnnnnnnnnnnnnnnnnnnnnnnnnnnnnnnnnnnnnnntagtttcatcagacattaagacacatgcatgtatgcatgcgtgctaattctcatggtttgttctgggcatgaatctgcctc

SEQ ID NO: 409089 - DNA, 351 bp, Homo Sapiens
tgactattccacaggggagactggcagagcatgtatgcacgttacaaatttaattcttaactgtaaaaacacttgtagtggagggggaagagaaatagtcaagagtcttaagaacgctccttaggagccataaattcaggcaagctgtagggcaaggctgctactgggaaatcaagacaataaaaaaatgaaacaaaactctaaagcaggagaaaatcccagggagcagccagctaaaggggaagtcctgagcacaagttacggctgtgaatttttaaaaggcaaaagtgaagtccctggatgtggtaacctgcgtcctgaccatctgccataacatttgctagtctgaat

SEQ ID NO: 409090 - DNA, 153 bp, Homo Sapiens
aaaaaatcttcagagacttagaaaactcttgcaatatttggtcaggctgatcgtcttgatactcagtgttcctataaattcagaatgtggaaactactaatccaaagcatcatttctagcactgagtatcaagacgatcagcctgaccaaaat

SEQ ID NO: 409091 - DNA, 503 bp, Homo Sapiens
  misc_feature (24)..(24): n is a, c, g, or t
  misc_feature (289)..(352): n is a, c, g, or t
gagccggtacctactttccacagnggatgtatgcgaggcagagatctttggttttctggtgaagttcattctggttaagttaatcaatgtcccttctaaatcagagctcatattattccctctctctgatgccagccaggccccagtttgagagacctgaaatgcagaagagctgcacttttttatttttcttacccctcttctctggtcctgattcctccattgttggggcaaaaaggagggattagagaaaagaggcaaaagccatttgcacgattagcactattannnnnnnnnnnnnnnnnnnnnnnnnnnnnnnnnnnnnnnnnnnnnnnnnnnnnnnnnnnnnnnntttcctctgcatagttcttccctgtgccccttgcatattagttcctctctgtgccccctgcatattagttcctctctctgtcctctgcatattagttcctctctgtgtcctctgcatagttcttccctgtgccccctgcatattagttcct

SEQ ID NO: 409092 - DNA, 153 bp, Homo Sapiens
ccatgtagataaataattaaaacaggcccatttttattatttacaattaggccctattggctaatgggaaataactcaaaagtcagagaagttatttctttaattttcctaatatcatgttgtaagaaaggcacatggctttgtgaagcaagt

SEQ ID NO: 409093 - DNA, 154 bp, Homo Sapiens
gctttgctgctttactctggtgacacggttttagctaatttgaaaacatctgctagagtaacttgctgttttaattctactactggagaacatctgagtatatgataggaggactggcactaaccctcattctaacctcatgattacacccttt

SEQ ID NO: 409094 - DNA, 494 bp, Homo Sapiens
gccagaagatcatgcctcaggtactctagcctggcatagacatattcgtagactctggctcataaagtaagaacaccggggattctctatagatctaactgtaaggatgcgaggcatatgagatccgtccgccgttacccaccgtcgtgaatggtaccgcctatatgtttatgccaaaataaaactttatcaacattttctggcagagctcataaaaattaattatttaatgccagtgtacactcccacaaataaagataaactcttcagtgccaacactacatcaatgagaaatcaattaatcaagaaaggcttttaaacaaagatcagataaggttatgtcacaggacatatactaagcacagagaaattgctgaagaaagtgcctctgttttggtagcaggcttttattctcaatctttggcaatgacgtactaacgtaaaaatgggcttgtccttgtttattggcatttgctatatttgaccttaggctt

SEQ ID NO: 409095 - DNA, 152 bp, Homo Sapiens
ggaggagaagggacgcagagatacagagggagaacacgcatgatgacaggggcagatactggaggaatgtgcctataagccaaacaaaactaaggattgctgctgacaccggaaactaaaagaaaggtatgcctgttccaatactgttctct

SEQ ID NO: 409096 - DNA, 468 bp, Homo Sapiens
acacttcgtctgacagtgaaaaactggctcttttatcctccgtatctttacttattcactcaatcctataatatgcagaaagtaattgtgagaatgctaacccacaccacggtgataaatgaacctccacccccaagtttaaactgttcaaatcagcagttagtggtcatctactgttcagctcagtgtcttgtcagttagtcatccaaacaaaacagatgaagtaatgctctgcagttccccaggggcatgtttaagaaaagagctgccagactccatcaacagcttactttctggtgatgtcggagcacaaaattgaaaaatcaggagtcgccagagaagaaagggagattaatttcatacagtttataaaaaggacacctgttgtgggaaaaacagtttgtcatcttcatctcaatgtacaaattgccaaagagaagaaataacaaggaaagtgttgagccagtg

SEQ ID NO: 409097 - DNA, 498 bp, Homo Sapiens
  misc_feature (46)..(60): n is a, c, g, or t
tatttccacaggatggcttgcattatggctctcccttggtgtaatnnnnnnnnnnnnnnngagaaaagaatgggagggttaagcaggttacttggggctgcagccagagtgatggccacatgcttttctctctttatctcctctctctcctaccataggctcagttctgtatcagaaaggggctggaggttcctacatgcaccaccttccttcaagggggcaggtacgtcaggtcacatacactcaagtgtttggaaagaatccatttccccactgactttctgataggcggcttcggggtcaagttctgtagccaatactttttttagtcgggttcccccgtgaggaaaacatccagtcagaagggcagtctcagggacaaggggggaacggtgggggagacgattggcttacttccatctgggaggccaggggtgtacctgggctacctcagtagctcctggggggtgcttactcagtgcccctgtggaaaaagta

SEQ ID NO: 409098 - DNA, 485 bp, Homo Sapiens
  misc_feature (84)..(142): n is a, c, g, or t
  misc_feature (177)..(238): n is a, c, g, or t
  misc_feature (303)..(330): n is a, c, g, or t
aaagtcggtgaggtcatcttgtatggatgcctgaccagttcttccagtggtccctccagcttctgcagggcatcctcactaagnnnnnnnnnnnnnnnnnnnnnnnnnnnnnnnnnnnnnnnnnnnnnnnnnnnnnnnnnnnttagtttggcccattttcaaatccattgaatcatnnnnnnnnnnnnnnnnnnnnnnnnnnnnnnnnnnnnnnnnnnnnnnnnnnnnnnnnnnnnnnatttaacaactcactgagaagttttaccagagtcaaaaggtctcagtgagcatgaaggacgacannnnnnnnnnnnnnnnnnnnnnnnnnnncatagacacggggtctcactttgttgaccagactggcctggaactcccagcctcaagggatccactgcaactcagcaaaaaaatgacaatttttttaatgaaacacgaagtaatagccaggtacctaaatattggagtcaggctatctttgacca

SEQ ID NO: 409099 - DNA, 126 bp, Homo Sapiens
ttctatgacctctttgaaccacttaaatctataggaaaacatttggttgtatatgatttacacacaagggaatgagaggaaaccccaaaacttctatcctatcacaaagctaaatcatttttcccc

SEQ ID NO: 409100 - DNA, 426 bp, Homo Sapiens
ctgtgaacataccacggctctgatgtaaaataggttacgcatctctgtaatctgagtccctctgtccatgccttttcctggttgtaaaagtttaggtccctgacccaaattggaaagagattataagtagttggtggcagccaggctagtgtccattactgactgggtcacagtggagtgtccagatgctgaagaggcaggcattttagaaatatcttcttggaggtggggggtggctaggtcactctgtatgtcagagacccacggcaatctgtcttctgatcagctcccaggagccaaggggtcaggggaaagccagccatgagggcttgggcttcagtttgacttaaagagcaagggaaacagaaaactgctgacagtggaaaaaccctggcaagggagaccccttgaatttattatttcaag

SEQ ID NO: 409101 - DNA, 335 bp, Homo Sapiens
  misc_feature (120)..(289): n is a, c, g, or t
tgttataaacaacctagagtctagaagaaataaaagtgtttttaagtgacaataggatacactatatgtctattacaatagctaaaataaaaaagcagtgagaacactaaatgccaacannnnnnnnnnnnnnnnnnnnnnnnnnnnnnnnnnnnnnnnnnnnnnnnnnnnnnnnnnnnnnnnnnnnnnnnnnnnnnnnnnnnnnnnnnnnnnnnnnnnnnnnnnnnnnnnnnnnnnnnnnnnnnnnnnnnnnnnnnnnnnnnnnnnnnnnnnnnnnnnnnnnnnnnnnacacaataatgtccgtataaacctttaaattactattattttttca

SEQ ID NO: 409102 - DNA, 289 bp, Homo Sapiens
gattaaatgaaataatgaatacagaagttgcttttacaacaactggtatatgagatggtctcaagcaatattagttaaagttgggtgtttatctgtgcctccaatgtctgcctccttatagtttccatatcctccagatgcttctagtgccgacctcagctgcctcgcccttctttcattgttatttttatcccttcaagtgcacacactgacctttgcatttgatgctgctcacagccttgagaaaggagctggagtgaggaacacagccaggcatagacaacatcca

SEQ ID NO: 409103 - DNA, 365 bp, Homo Sapiens
  misc_feature (212)..(242): n is a, c, g, or t
ctacggttccgtgctagtacgtagactgagaataaaggtagtatgcgtgatgccaaggaaacaactcctccttaggcagcgggcaatctcacaacctcgatgatacctgagctaggccaaattatatctcaagagcttctaagtagtggctaagaactgtgcgcagaggaaaaagagaggtgactttggaaccaagcagatcagcaacttgnnnnnnnnnnnnnnnnnnnnnnnnnnnnnnnagagccatcagagccttggtttccacattcttaagtgggggtaatacccacatcccaaaataatggtagggagtcaaaaattatatatatatgaatcagtaggacagcaccgccccccaggtg

SEQ ID NO: 409104 - DNA, 100 bp, Homo Sapiens
cttttaaaaaggaaggggtttagaccaaattatgttatggcctccttgctattcatgaagactagtgaagggggtgaggagagtattgtccggggttgtt

SEQ ID NO: 409105 - DNA, 462 bp, Homo Sapiens
tggcttgaagcatgtctgctgaaggagatgccccacccctgctcttttcagctgccgttagagcctcaagcctgagcatctcctgctgttgggaggaacctggcaatgccatctattgtcttcccaactgccggtcatcccaagccactcagagagataaagagccattgcagtccctcttagggctgtctctgcgcacgcacaaaccactggcacatgatagcatggcgtcggcagctactctgtccttggctctccccagacctggtggttatatccgcttatcactctacctgtgactacacaccctgacggctcacaacagacagtcactgttcccctaacactctcttcgaactcactaacgctcgagtgaacaccccagaaacaacataggctgttcttctctaagcgcttctaaataagcagcagacaggccaaggactaccatacatcgccctg

SEQ ID NO: 409106 - DNA, 248 bp, Homo Sapiens
aagcatcagattgaatgcagtggatccatgcagtgtcattgaatgcagtggattccatgcattgtgattgaatgcagtgtacaacatgcagcctggtaaaatgcatcccgattgaatgctgtagattccatgcggcatgattgaatgcagttgattccatgcagcatgaagaaattgaaccctattgaatgcagtggattttatgcagcatgattgaatgcagtggatttttgcagcatgattgaatg

SEQ ID NO: 409107 - DNA, 480 bp, Homo Sapiens
gcgtttaaatagcgacgatccatgcagcgtgtttgaatgcagtggattccatgcagcctggtaaaatgcatcctgattgaatgcagtggattacgtgcagcatgattaaatgcagtgaactccgtgcaatgtggtaaaatgcatcctgattgaatgcagtagattccatgcagtgaggcccaatgcatcccgattaaatgcagtggatttatgcagcgaggaccaaagcatcccgattgaatgcagtggattccatgcagcgtcactgaatgcagtggattcgatgcagcgtggcccaatggatctcgagagattgcagtggattttatgcagtgtggtgcaatggaatttaattgaacgcagtggaatccatgcatcgaggagcaatggatcccaattgaatgcagccgattgaatgcagtggattccatgcaggcgtcattgaatgcagtggattccatgcagccgtcggctacatta

SEQ ID NO: 409108 - DNA, 154 bp, Homo Sapiens
tcatttcagaagaaaaactgaaagcaagactgtcagccattgagttccaggaacctaagagcctggatgcattatcccaccattgattcatgcagtgtgtagtggcaccacaaggactggcctcaggggccagacactgagagggagtgggagg

SEQ ID NO: 409109 - DNA, 262 bp, Homo Sapiens
ggaggtgatctagaggatcccaagctccaacaagactaaatgactctgaatcctgagaaaagggaagagggttaggacagaggaaatggaatcatttagtcaggtaaagggagcaaagccaccgaaggcagtggttggaggtgtagatgtgaggaagttgggttgagaccattcaccatcgaggcttgaagatgagtgtctgtttgtgtgtgtcatgttggctgtgagttgcagaagagagtatctggcctcttgttgggag

SEQ ID NO: 409110 - DNA, 581 bp, Homo Sapiens
  misc_feature (93)..(103): n is a, c, g, or t
  misc_feature (263)..(307): n is a, c, g, or t
gacctccatatagacatcgatgtatgaaaaacaaatgggagtgtatatattcagccaatacaataagattctgttctccatgaaccatgttcnnnnnnnnnnnctattataataattgggccggtggccctacgaatttccctccggcctttcttcctccaagcccactcactagccccgggatacctgcatgatacacaaaaaaggatgggagtgggaacccctgagctgtccaggctccagcatccagcggggggatgcannnnnnnnnnnnnnnnnnnnnnnnnnnnnnnnnnnnnnnnnnnnngcaaatacagcagagtttcccacatttacgggtggttctgtatagcagaagagatacagcatgtgaaagcattggaagactggtaaagcccatgcatatattagttatgcatctttatggttaaaatggcctaagagaaatcaaggcctcagggatcctaaggggctctcccaaggtcacgcaggagtgcaaagtcagagcaaagatggagatagaaactgtggactgaaggaccaggaaactacaatttcatagttcacaagagaccatgagg

SEQ ID NO: 409111 - DNA, 247 bp, Homo Sapiens
caacaaaaacaatcatttaaaaaagactaaaattacacactgtgtgttttctaacaaaaactgaatgaaactaggaattaaaagcaaaagtcaaactggcaaattcaaaactgtgtatatgaaacacactcttcaacatattcttgctcaggggtcaaaaaatttcatttttcacgaaatgtcaataaaatctagagttaaaagctacagaacataaacaatgtgatactgacacaaagataaacag

SEQ ID NO: 409112 - DNA, 343 bp, Homo Sapiens
ataactaagtaagttaaccatagttgtactgaagccaactagttacgatacacctgatcacaacctatctgtgtgtagatatttttctcctaaaatagaaccattaaaagttcgctgatcttatccctaaacaaacttctgggatatgtgtatttcatcattcgtgtgtttgaaattaaattttagtttaactggtatttttaagctaactgttctaccaccaaaatcagttttaaaatacacttctagtttctgctacattctcatataatttacaatcagccgtgtgacgaaaatacaaaccttagattcaaagcctagaatcaactatatacctaaaata

SEQ ID NO: 409113 - DNA, 483 bp, Homo Sapiens
agaccctagaagaactgcagcagtctgtttatttacagtcatgtcacagaactttaattaacttgctcattggaacaatgagtctatacctgggttaacaatactgaaaagtataaacaactctttgtggttaaataagagatgatttgtgtacatttctttatactaacataatcatagtatttatttcacacagctataaggcagtttggcttctaggattaacatatttaacagtgataattacagatgatgggagaagaaacagaaatgaaaataaagtgtagtcttaaaggctacagataataggtaccacattacaaataataggtaccaaccaatattgaattagtgaatgcttactgaatgtcttatgaagatgactacttctaatccatcagttagtcttaggatttaatttctatcatgggagtgatgtcatacgcaatttctaaaactcagctgagtaactgtctttaattg

SEQ ID NO: 409114 - DNA, 445 bp, Homo Sapiens
atataatatacaacagtcgaataacagctcatgcatgcgtgaggtgagtacccgagagaaatagggggcatcagtgaacaaagccccctataatggcaaacactgcacctatagataagacatagtgaaaatgtgcgactacatgatatgtatcatgtaatacaatgtctagggaggagttaactagtaaggggcccgttagacctcctacggtgactaggaagatgaaacccagagcacatagtattgcgggtgatcatttcatatagccgccgtgcaggataactaatcaactaaatactataactccagtgggaaatagcaatgattattgtggcagatgtaaagtatgcacgggtatccacgtctattcctacggagaatctatggtgagcccatacgatcaaacctaagactccaatggacattatggctcatactatgc

SEQ ID NO: 409115 - DNA, 423 bp, Homo Sapiens
  misc_feature (210)..(219): n is a, c, g, or t
  misc_feature (339)..(350): n is a, c, g, or t
acgctctaaaaagacactttgtcgtagagactggatctgtgcgtgtatgcccaggctagctctcaaagctcctggcttcaagcaactcctcctgcctcagtcttccacagcactagaattaggcatgagccactgtgcccagcccaatattgtattttaaataaatgcagttttgattttctttgggacataatagttacttaggaagcnnnnnnnnnngaaattcccaaattttctaccttctacttttattcatgtattgcagttttatggttgggtagtcgaagaattgggccttactactttttagaaagtctattatgcagtacttattaaagnnnnnnnnnnnnggggccccccagtgttttcacttagagggggcatgaggggtgggaaaacaacttccctcgtgcaatgataagg

SEQ ID NO: 409116 - DNA, 313 bp, Homo Sapiens
  misc_feature (196)..(196): n is a, c, g, or t
tatactaacattgatgttatggactaactctccaatcaaactgttatggaaagactgttatggagcagttctccccattccacccacatcatttttcatcaactctagatgagctaagggccccaaatgcttaggctgagcatttcttggggtgaggtcccttcttgctcagagcctaaagacaagtagtgatatngtttctgcctgtccagtgtttcctaacaggccttcagtctccagagtggagaatctgccttcgtgtggggtattagtaagaaaatctaggagccacatccaatcctctctcaccctg

SEQ ID NO: 409117 - DNA, 123 bp, Homo Sapiens
tcatgagctcggcctctttcgccccaactcaagcctagacaatgctgatggtttgccactatttgctaggccccaactcaagcctagcaaatagtggcaacaccatcagcattgtctaggctt

SEQ ID NO: 409118 - DNA, 369 bp, Homo Sapiens
  misc_feature (160)..(281): n is a, c, g, or t
tgtttatcggatgcaaagctcccttcataactgtattaatatgttataaaagagctgtggcagtgtgttctctttttttctacgtaagaagacagcattggtccccctttggccatttctacccccaaccatgtgaggatgccacaagaagtccctcaannnnnnnnnnnnnnnnnnnnnnnnnnnnnnnnnnnnnnnnnnnnnnnnnnnnnnnnnnnnnnnnnnnnnnnnnnnnnnnnnnnnnnnnnnnnnnnnnnnnnnnnnnnnnnnnnnnnnnnnnntacttactttgtctaatactaatacagacacttcagttttcttttgattagtgtcaggtggcatcgataaacacggggtaccgagctc

SEQ ID NO: 409119 - DNA, 631 bp, Homo Sapiens
tagctgtcgaagttaaatgagtaaatatagggctattagaggttcatgtcactttaagtttaatatgtatgaaatttacgctctatacaatgtagtggggaatgaattctttgggtcagcttttctagtgaacaatttgattcataaaaattttatttttgtgcagttttctaagagtttagctgctgtataaggtaagatgtaccttattacttatagctttcagcagaattctttgtgtcagtgaagtgtggatatggtataattattatatggccaagtaaccgcttctcaccatagagtcataaatccagtttagccaagtgggttcagcagttattcctattagcagctgattctagtagtaagatgactttctttcaggtttcagggaaggggttccagatagcctgaagttgctttgtagatgctgtgtttattgaagtagtttatcttcccatttgcttatttatgggcttatttcctcataggtggatgtctctttgtgccctcattgggtattgggtgctgaaactaagcatggtgctaccatccaagaagagtttaaaaattggggtattttgactgcagtattcatgacatattcatgaatacgatttcatctctccgt

SEQ ID NO: 409120 - DNA, 233 bp, Homo Sapiens
ctgacctgcatctgtaactctttaccttaatggcacatccttgatcaaccctggctgtgggcctcagtcattttctagctactgtagaggatgcccccttcaataaacatgctattttaaacgtggggcatgcttgcgggtggggggtctggatacaactcgaaggagctttagctacatgaggccctcagagccaaagacaggatgcaaatagagttctagagagtggccgc

SEQ ID NO: 409121 - DNA, 509 bp, Homo Sapiens
  misc_feature (99)..(160): n is a, c, g, or t
cggcggaaaccaaggtctatttcccttcatctacctctcccacgccaggaagcagagcagaatcacacatgtaaccctgcaactagacccccgggctgnnnnnnnnnnnnnnnnnnnnnnnnnnnnnnnnnnnnnnnnnnnnnnnnnnnnnnnnnnnnnnggggcactggactgaacccagtggcttcagagcagctcccaggagaagctggagtgactccattcaaagggcactggaaagatgcctggagtccttttctacccaggcacaagccttttctttattgcccaactctgatgcctgaggtaaagcaatagcatgactgaatgtctttcacattagagtgtaatttatccacatcagccgcagcctttgatctcaccaagctgagagaggagagaagtgatgaggcgtacaatgtgtacgaggtgagtgaggtgtatgtgggctgcagcagctgaagggagggaagggccaggaggctgcgggtgtagatagaacgttcccg

SEQ ID NO: 409122 - DNA, 153 bp, Homo Sapiens
tctttatctgtttccttacttgtaaaacccttgcgcgatacccatattccaattacagatgtctaatattttaacttacatacaggaacaggtaatcatgttagatcagtttgtctcagttccttgtgtgttatgtttataatgtgcgagata

SEQ ID NO: 409123 - DNA, 368 bp, Homo Sapiens
  misc_feature (46)..(96): n is a, c, g, or t
cccccaagtggaatcctcccatatacccgttcgccggttgcgagcnnnnnnnnnnnnnnnnnnnnnnnnnnnnnnnnnnnnnnnnnnnnnnnnnnnttgccagcaattttcctgataggctgttcatagaagaaacgaagtaatatgtgtaaaataattagaagattagcacatagatggatattattattactcatattactcatgtagaaaatcctgttcttgattaatgaattagataaaattaccaaagataatagaatcttgacctgccttgagaagaattaagtctattaaagaagatgagatagatcaagtgtggccacactggctttgatgtctgaatcgaagttggaattccaccctct

SEQ ID NO: 409124 - DNA, 342 bp, Homo Sapiens
  misc_feature (66)..(126): n is a, c, g, or t
tatattgtatcttcatcatgggatgttgcaaagatgcaatgagctaacatatttaaaatgcttatnnnnnnnnnnnnnnnnnnnnnnnnnnnnnnnnnnnnnnnnnnnnnnnnnnnnnnnnnnnnnagcacaggagtgtgagaccaagctgggcaacagtggctatatttgtgtctcttgtgtagagacaacatttcgccgtgtcgcccaggagttgtctccaacttctgagctcaagcaaggtgcctgcctcagcctctcaaagtcgtggtaatacgggcgtgatcccaagtgcaagtgtccagcagatgcattcttatcacttaagttgcgtgacctaga

SEQ ID NO: 409125 - DNA, 100 bp, Homo Sapiens
cctgttctccagcagaaccaaatgtcagtcacatataccacatttaaaattgcttagaatagataggctgggcatgtggtttatgcctattattccagtg

SEQ ID NO: 409126 - DNA, 345 bp, Homo Sapiens
  misc_feature (128)..(148): n is a, c, g, or t
aatcgagctcggtaccgtaactcgatcagacccgtggcccaccgagcgatgcagcccaggacggctttgaatggggcccaatgcgaatttgtaaactttcttaaaacactgtgagattgttttgcaannnnnnnnnnnnnnnnnnnnnagctcatcagctatctctagtgttaagtgtattttacgtgtggccccaaactattcttcttctaatgtggcccagggaaaccacaagatgggatacccctgctgtagttgtataacttgaaaacaggccatatgcatgctatctccactttctgcatttatgtttactctactctggaatgctaacccagagtcatg

SEQ ID NO: 409127 - DNA, 371 bp, Homo Sapiens
  misc_feature (48)..(91): n is a, c, g, or t
tgatcttccgtgcccctaaaatgacattctcttatgaaagaagacagnnnnnnnnnnnnnnnnnnnnnnnnnnnnnnnnnnnnnnnnnnnntacctcttaaataattttcaaatctattcatatttctgtatttccatttatatcatgttttaacagacaaggaataagaaatcagttaatcgaattgatcagggagggtctcagggaggagatgagacttgaaaatgggttttgaggtttagctattgcttggagaagagaggaaggtaggaattccaagcaaaagggaagaaaggataaaagctccaagatggacgtgatcatggtacatacatatgagtgtgattatggttatgggcacggaagatca

SEQ ID NO: 409128 - DNA, 181 bp, Homo Sapiens
gctacattcagtccatggctgcttttagaatacaacagtagactttaacatttggaacagggaacagaaaccagagccatacagctaataaacttgaaaatatttacaagttgatgctttacaaaatccatctgctgacccctgctctgtaccattgttctcttctgatggtctgtttact

SEQ ID NO: 409129 - DNA, 120 bp, Homo Sapiens
ttagaagatttgattacaagagagtatgctctggagagaatgccaaaggtttggctgagcagtcttttgcttgtgccttggaacgattttagataaggtcagtattttaatcacacagaa

SEQ ID NO: 409130 - DNA, 414 bp, Homo Sapiens
gcgctcagaggatccccgtctctccacactgggaagctggggaagtgggagagctagtattctcaactggcaagggattgattcttcaatgggttcagcatttcacttccctctgaaattaagtggcaaagtaatagcatcccttaaaaaacaggacattggtgagaggtagaatagcaggaggaattttgaaacatggagggatggctactggaaaagaactgatgaagtgcagagtctctccagacaatggtagaaaccacaggactacattaagattgggcccaaatactagtttagaaaaaggtaaataaaactagctttacttaagagtacagccagcttaattactggctagtggacatatttcagacaaatctaactggagagaaaaacagaccagtgtggagagag

SEQ ID NO: 409131 - DNA, 186 bp, Homo Sapiens
tagctccaatcattttctgccttggtaacaccacacttgcaccttgcttgggctgttctgtacctggaaaactcttttcacacccaccttcctggacagcttggggaacagtagtaccaagacacttttccaaacaacagcttgggcgtccagcgctctcttctgttagtccctgtgcattatgag

SEQ ID NO: 409132 - DNA, 257 bp, Homo Sapiens
aggcaaaggtcagattggtttaggcaaaaaagatcttcaaactattcttatgacagaccctaaactctaagttttgttccacagaaataatttactaaagagagacgtcagctgggaggagccaacaaaatgctgagtaaatcagatatgacctcagaaacaaaatgaaaattactttgccttcatatgtaaaacagtgtatttttaataaaataccccatacatttcttggcagtgaatttcaaaactctaaactg

SEQ ID NO: 409133 - DNA, 146 bp, Homo Sapiens
gtgctggtacttctatgccttctcaacaagttttcctatctccaggcactacccagtccagtcagtcttacacaccacttcctcccagattaatctttataaaatgtcagtttggggagtcactcatcatctcaaaaatcttctag

SEQ ID NO: 409134 - DNA, 354 bp, Homo Sapiens
tcaacccaggacagggactgttacatagcatcttccatttggagaacgttaagctccaactcccattgagctaatgcagggaagcgaccataaatacatctctgcctgtcagtgaatgcccatgaattagagactcaacaaacagcagcagatgcttctctaaagattaccttcccagttgctgaaggactttcacccatgttcactctatctgtgttgctaattggacacgggtcattaccttgtaacccagtctgttttgcagcttcgcaatctcagctcaatgggagttgtagcttaacgttcaccaaatggaagatgctatgtaacagtccctgtactgggttgagaact

SEQ ID NO: 409135 - DNA, 158 bp, Homo Sapiens
ctcattcttgtgcacacttgagagttttacaactgatgaaaattaatttaagaatcagatggagcaacttgacgccagtgggctcaggagcccggggagaaaaatacatcactaatggccagttttccatatggtctgcacgggtaaagaaagtctgc

SEQ ID NO: 409136 - DNA, 134 bp, Homo Sapiens
tgtcagtgaacatttgaaaactggggaaccacaaaacccccccacctcagggctgttctcaggctcgcccaactcatgaagtccaagctgttgccccagaggcctcttgcagaccttatcaaagccagggtccc

SEQ ID NO: 409137 - DNA, 287 bp, Homo Sapiens
atacgagtgcgcggaatgtcagaaactgacaactagttcaggcctcaacgcagtaggaaaaggatgaaaaagaaactcattttaaatcaactaaacaagtgcaaaagccatacatatagaggagaggagatacgaatggcatcacaacataattcctttgccatcgaaaacttccatgcctttgaggttttaaatgaagacttccaaaactgatttacttaagactctacgtaaaacgcctgatctttaaacgcaagaaaagcaagatgaatgtattactttcctgg

SEQ ID NO: 409138 - DNA, 532 bp, Homo Sapiens
  misc_feature (198)..(460): n is a, c, g, or t
acacacacaagcttctgatgacctggattgaagagcagacacaggtgcacacggtgctgtgtacctctcagcaccatgatgatcccaaagcaaaaagtgtgtttgaggtgttgaaagaaaaggctggacctggctgtgatgttgaattgactgctagttctgggtggtgtaaacaattcaagaatcgttattcattannnnnnnnnnnnnnnnnnnnnnnnnnnnnnnnnnnnnnnnnnnnnnnnnnnnnnnnnnnnnnnnnnnnnnnnnnnnnnnnnnnnnnnnnnnnnnnnnnnnnnnnnnnnnnnnnnnnnnnnnnnnnnnnnnnnnnnnnnnnnnnnnnnnnnnnnnnnnnnnnnnnnnnnnnnnnnnnnnnnnnnnnnnnnnnnnnnnnnnnnnnnnnnnnnnnnnnnnnnnnnnnnnnnnnnnnnnnnnnnnnnnnnnnnnnnnnnnnnnnnnnctttgtgatttggcatgttgagaaccctaggggcttcaagcatatcaatacacacacacttagccagtgcac

SEQ ID NO: 409139 - DNA, 324 bp, Homo Sapiens
tgacagtgtcttcaggtttgcatcatcacatcaggccacacccaactctctgagtcttctgcagacagctcacgcaaagcactgagatatcctctgaatggattggcttgggtcatgtgtccatcatacataaataatcacatggctcagagaagtgggttatactggggcaatcgaggccgccatacccatagctcccttcctcccatcgaccccccagatccacgcgatgcacgccaacactgctggctctcatacccaggcaggctacacctggctagctccgaccagactcctccacacgctaccactcccaacgagctc

SEQ ID NO: 409140 - DNA, 307 bp, Homo Sapiens
  misc_feature (58)..(130): n is a, c, g, or t
cggtaccttatgtctgacacacccccaaggcagcagaaagcagctggaagagccctgnnnnnnnnnnnnnnnnnnnnnnnnnnnnnnnnnnnnnnnnnnnnnnnnnnnnnnnnnnnnnnnnnnnnnnnnntggttttcctacctggacaatgggaatagggttgctgggaaaactggagattgtgtacctcaaggggccgcacacggtaggggcctaatatgtgcttgctatcattagtatgcaggaggtatccaataatgtttgtgtcatgaggctcagttccccaggctcatctggccttctcag

SEQ ID NO: 409141 - DNA, 385 bp, Homo Sapiens
taccatcacaggcgcaaaggccctctggatagttgctatctgagcctttactaaacaggattgccagccactgaagagaacaaatggtcccaccccctgctgagctcacagtctggctctcctgtgtgcagccacttcttggagctggcttctctccactccccctccagatgcctgccgtgacacctgtgactgacctctgatggccattatttgcactcagagaaggggctgtgcttagagggagggtctctttaggaagctccataggggtgaggggtaaccatgtagtatatcccagctacatagagcctgaactcagtcaactgtagcagctggagctcacaaagtccagtcggcacatgggagccagaggtagggcaga

SEQ ID NO: 409142 - DNA, 549 bp, Homo Sapiens
acgaatctgcagagatacagatgtctgcattaggagtgcagtgtgataccattttttttctttcttcactcaaatctgtggagttgtcccccacatttactctgcattctctgttaaaatattttgtggaaatatattctgggggaacactggtaactgcacatctttccacaagtgtcttttatagtataaaccaaaacatggatgccatgactttgtcttttagaagggagtttcttggcatccttgcttagaactcacccttgaaaagatgttaacgctaatctttaaatttcaacaaggtgtgtagtttgactctaaaaggggaatgaagtagctcagaatgcttaaatctttagagagcaacccaaagtcaaaggcattataagctgtggttcagctaatttacaaggaggataattgccgaaaaattatcatatcagtttactggaaataaccactaaattctttaacttactgtgagtatagcctaagatacctgctttagttatttactgctatttgacaaactgctggcaaacagtggct

SEQ ID NO: 409143 - DNA, 546 bp, Homo Sapiens
  misc_feature (521)..(521): n is a, c, g, or t
tgctcaagtaattctacacttgcaaagttgaaagatcagtaggagcttgcaggtaattttcaaagttgcatctagcacttaaagaaatctattaatgccacacatatctaaaccgctccaggtctgcaagcagcgacacagcacacgcagtgcgccctggctagaccaagccctagccaaacacagctcattcacgcagacaaatacacaccaacagggtttcgggaaacctgctcttgagatatttttgtggtgacatttacataggcaggatgctttaaaagaaacaaaaaagaagcagaagaaaattcagattttgcagactttagaggatcttgtcacatgtatttttaaagaacacatcgtcccgtattccagggatatgccctggatctggctttgactggctgtcctttacattttctttctccaccatcaagcaaactacctgtttatctccagatgcctagcttgcctaatggaacactcctttaaccgccccaaaatgattgtcacagtcncgtcttccgtcaccggagtaattca

SEQ ID NO: 409144 - DNA, 440 bp, Homo Sapiens
ctttgacccgtgtcactctctccattccccgtttaggtcactcagacaagctttatttagaatgaaatgctaaggaattatccagtccaaacctcatctaaggttgctcaggtcatcctcctagaactacttgttaccctgactcttagctaaacaccacagtccttcctactgcacgaagtctcagggtcttgccctggcattctgtcctcctcagtttgatcctgaccccctgggctgaatgcctgaatcgcctttgtccatactgccttcctggaatgccctccctttcacttatcagaatcgtagcagacattctgcagattcacacacctagaccccaactgcagacctcagacccagagcccatctgcccctgcaggcaggtgcctcacccagttagcaagcactgccctatatcaaggtcagccttcccacca

SEQ ID NO: 409145 - DNA, 331 bp, Homo Sapiens
ataaaggaatatcctcacaagttagacattcatataaaagatgtgcttttaattcatcactgttagggtggcagagtgtgcacgcctttattctagatagcagtatcaaagcttgctggatctactagtgtcaaaccttaacaattttgagaaacaaaataagaaacaacaaaacttaacattagagaacagaatttctgtgaacaatcaaatacttttagatctaaaacctgctgcataaaaatcagaaaagcataatttaaaaccatgtattaattagaaatatatatttagtatgttctgtaactgtgatggagcaatttatcatcaa

SEQ ID NO: 409146 - DNA, 468 bp, Homo Sapiens
ttacgggggccttaaccctcatcccgggcttcagcctccagagcatgggaggcacatatctgtgtttttagatgcccccacctatagtgctttgtgacagaagtcccagccaactaacccactgagtctccaggttatcacccctgccaaatccacacccgtggcctggcactcaaggcctggctccctggtagctttccctatcaccgttaggcactctttcccctgctgccccaggagcccagttctcccgcctggagaaggagctgctccgccttacaggcccctcctctccatcatcctagcagcccagctgccataactctcctgcctggagttttccagacctctcgggacgttgccggcaccctgtagcccctgtggccctgactccttcccattcccaacacccaagccagggctgccctggctgagcacccccggacctcagtacaaatcccaggcccc

SEQ ID NO: 409147 - DNA, 155 bp, Homo Sapiens
cgggagcttaccctggtcaaggaccacacctatgcggaagtcaccttgaaatgtgccaatgtctggctgagatgaggttgggactctccggttttagagcgagtaagcccttttccctcttaaagaggcagtgtagtgctatgattacaagaagg

SEQ ID NO: 409148 - DNA, 111 bp, Homo Sapiens
acttacttttccacagggacttacttttccacagggacttacttttccagcagggacttacttttccacagggacttacttttccacagggacttaattttccacaggaac

SEQ ID NO: 409149 - DNA, 192 bp, Homo Sapiens
  misc_feature (47)..(47): n is a, c, g, or t
  misc_feature (83)..(83): n is a, c, g, or t
  misc_feature (99)..(99): n is a, c, g, or t
  misc_feature (142)..(142): n is a, c, g, or t
cttggacatggctacttatcggtcattcccgaatttgaataaaggantttagatgtgggcaacatgcacagtgctagcttggnttgccctttcctctanatcctggggccctattcttggcagtttaacattcatcttaagnccaagcaatacatagctcacaagattggggcctcttgtccttcagggtca

SEQ ID NO: 409150 - DNA, 485 bp, Homo Sapiens
  misc_feature (68)..(68): n is a, c, g, or t
  misc_feature (359)..(359): n is a, c, g, or t
cctcagtagccttgattattgaaggagaaaattacccagttttaagaagcagttactcctctaaaganttaagtaaggaatgagtgcaagtaaattgccagggctgtcacttggatcactgacttgcatcgtggtttgcaggactctaaaccctccagaatttcaatacagagcacgattgatttgtactgagttgactttgcaaatctgataggttataactgcttcagggaaagtgagaaccacaggaaatgagagcaagccagcaagcatgtgaataacctttgccctcccatctccttaccccatcatggcaaattaacatatgacaaaccacattatataaacaactgaaaagngccaatggggtaacaaaaggaaaaggctttaaaaagctttcacaaatgggatttttgcccttatttagttatttggtattcagtgtagggcaggtggtttgctgtagcccgtttggatgtgacttt

SEQ ID NO: 409151 - DNA, 434 bp, Homo Sapiens
  misc_feature (133)..(173): n is a, c, g, or t
  misc_feature (312)..(312): n is a, c, g, or t
  misc_feature (406)..(406): n is a, c, g, or t
tatttataaaatacatataactacaggtttataattttttcatctctatggggaaatctgtcaatatcattagcccctattttatcaaaattatggaaaatgttattaccatatattactctgctatcattannnnnnnnnnnnnnnnnnnnnnnnnnnnnnnnnnnnnnnnnccaaagtacaaaatttgttcaagagatgaaaatgggacctgctccatggaagtccccaagcagaagcctgtgttaactaagtcatcaaattctctgctttggataaattgttactgccatcattcagagacaaaaaganaaacaatttattatacagaaggcaatgacttcattttacattcctactccatttttttgtcaagcattttctaaggtccaccgaatccagcttnaaaacatgttcaggattcatttcagcct

SEQ ID NO: 409152 - DNA, 110 bp, Homo Sapiens
  misc_feature (33)..(33): n is a, c, g, or t
gagtaggtatatggtctatattagagtatagcnatggattattcttccagctgccaagaagtcaagaaggaaagcctgtatttgactttatcatttctattgaatgtctg

SEQ ID NO: 409153 - DNA, 231 bp, Homo Sapiens
  misc_feature (124)..(124): n is a, c, g, or t
  misc_feature (170)..(170): n is a, c, g, or t
  misc_feature (196)..(196): n is a, c, g, or t
  misc_feature (214)..(214): n is a, c, g, or t
cacattggaagtagctctatatcatatggcctacgagcccctctggtctggagctgaccccaggtaccctcatctcccacccaccactcagccttcagccctttgccactgcacgtgggctttntggtgctctccagatgccccacctcgttctgctacagactttgcanttgatgggagctggcttggtgctctncttcagacttgtaagttncattcaaatgcaagttt

SEQ ID NO: 409154 - DNA, 474 bp, Homo Sapiens
  misc_feature (107)..(107): n is a, c, g, or t
  misc_feature (360)..(360): n is a, c, g, or t
  misc_feature (389)..(389): n is a, c, g, or t
  misc_feature (394)..(394): n is a, c, g, or t
  misc_feature (448)..(448): n is a, c, g, or t
  misc_feature (453)..(453): n is a, c, g, or t
tttagtttggccagctgcacagttgaggaggctctgctggcctgattttggaaaaccaagccctgtttggtgaagctcctcaggtgacactgtctgaaacggagttntttggatttgttatttctaccactgtgccttcttgcgtcactgtgttttgatttgtggtcaacaaaacactttcaaatagccttaggtgagtaagcctgcaagtgacagcaagaaattctaccgaatgaaactcaagagggcagaaaatcactattcataccaatggggagctcattttgttcaattccttcctgtggcatccaaccattcacgatctttattttggacattcggcagtaggccctaaggggngaacggcacctggcatttgctcccctttncatangggggatatggtttcaggagggaaactaggcccctattttcgacagggagggantttgngggggttaacagggttagttt

SEQ ID NO: 409155 - DNA, 511 bp, Homo Sapiens
  misc_feature (418)..(418): n is a, c, g, or t
  misc_feature (484)..(484): n is a, c, g, or t
  misc_feature (501)..(501): n is a, c, g, or t
atatgtaaagtttttgtcaacctcccaatatctagcatacttttcagctaaacccagtacgcagcgtccattcttcctatttcaatctataccatataactcagaataattttcataatatttacttttcccatgttacacatagtacttttatattcagaatactccagtgatgtctctcttccttaagggtgacttctatattcatgagcctagcatacagggctctctatagtagacctatttctgaaacgtcatctctagtctctagagtagatctctctcctaaccccacaaattgtctaaacaataaccttcctttgaagccaaggtcaaaagacacattctttaatgggctggaaactttcttattatttgtttcttaggcgttggatttcctaaattcaacctggggganactatggacagtccttttggcactcttcaaaattttagggggacccccttttattctttggttatnacccctaacctgtggancggggttctt

SEQ ID NO: 409156 - DNA, 426 bp, Homo Sapiens
  misc_feature (49)..(49): n is a, c, g, or t
  misc_feature (81)..(81): n is a, c, g, or t
  misc_feature (94)..(94): n is a, c, g, or t
  misc_feature (99)..(99): n is a, c, g, or t
  misc_feature (110)..(110): n is a, c, g, or t
  misc_feature (113)..(113): n is a, c, g, or t
  misc_feature (122)..(123): n is a, c, g, or t
  misc_feature (126)..(126): n is a, c, g, or t
  misc_feature (170)..(173): n is a, c, g, or t
  misc_feature (175)..(175): n is a, c, g, or t
  misc_feature (180)..(183): n is a, c, g, or t
  misc_feature (196)..(197): n is a, c, g, or t
  misc_feature (204)..(204): n is a, c, g, or t
  misc_feature (206)..(206): n is a, c, g, or t
  misc_feature (236)..(236): n is a, c, g, or t
  misc_feature (325)..(325): n is a, c, g, or t
  misc_feature (343)..(343): n is a, c, g, or t
  misc_feature (355)..(355): n is a, c, g, or t
  misc_feature (358)..(358): n is a, c, g, or t
  misc_feature (368)..(368): n is a, c, g, or t
  misc_feature (416)..(416): n is a, c, g, or t
gaagggtagaaagccacagcagggggcagtccagcagactctgactcanctttctaggcacctagcagagaaagataagancaaaaggtgtttngcttnccttttaattntcnttgtagttnnccngggtgggtgggggaagtaaactagactgaagcgatggatttccnnnntnctttnnnncctttagtgtttnnccctttntncttgaacacttttcccctgcagcctcagtnttgaattcttttagcaacttggattagaggggcccatatgtcagaagctcccagcacctcctacttggggagaaaagtgagccatctgntgggtcagggaagtcctncaggaggagggnagntttttcccanaatgggtgggcagggaaactttggggggaaaggcagggatgggtgttncaattggttg

SEQ ID NO: 409157 - DNA, 104 bp, Homo Sapiens
caagaatttcccccaaaagaatcctttaaccaaaaagttgtggtttcttgccttgctaactgtaccatagttattcctgcaggtgaatatataggctttatctg

SEQ ID NO: 409158 - DNA, 142 bp, Homo Sapiens
caaaccctgtttgagacactggggatgtaacgattcattagcttacattctgatgagaaatggtgaagtgagtggtctgtttaaataaacagccaaggccaagtaattgtcaggaataatatttcagaaggtaaatacagtc

SEQ ID NO: 409159 - DNA, 364 bp, Homo Sapiens
  misc_feature (114)..(160): n is a, c, g, or t
  misc_feature (278)..(278): n is a, c, g, or t
  misc_feature (316)..(316): n is a, c, g, or t
caattcacttgcaacaataagactctactattaggcttgtgattattactgtcacccttcctcattactgcatgaagtcctgagggcaggggtggtatctgacttatgtccctnnnnnnnnnnnnnnnnnnnnnnnnnnnnnnnnnnnnnnnnnnnnnnntatgggaatatttgcaagagagcttacatcacatcttgacaccctagtgtgggaggttgaaaagtgccagagtagctaaactttaaagttccttcctgctttaaactatgattatagntattcttaggtacctcctacaagttgactgcatggaanactaacatatatatatatcccggggagctaaacaaagtggcaaacact

SEQ ID NO: 409160 - DNA, 334 bp, Homo Sapiens
agaaaaatagagaaattttaatttgcaaacttactgtattcttccccctcacttaagccagagtagtgtttttcccatcgcgctcttcgctctagctccggtgtcctcccaagctctgtgctgctgttgccagcgtatcaacctctctgtcttcttcgggtctaagttgtattggcctgaacgagtttttcagatcccagagttaataatgatactgtgcaccacagagtgcaggaagcgcacacgttcatttgatcgtcccccgcctgcaggcaaggcagatggggaccccacgttttgctgctcagactctctcccactgttggttccttgt

SEQ ID NO: 409161 - DNA, 352 bp, Homo Sapiens
  misc_feature (122)..(123): n is a, c, g, or t
  misc_feature (130)..(130): n is a, c, g, or t
  misc_feature (140)..(140): n is a, c, g, or t
  misc_feature (280)..(280): n is a, c, g, or t
tttctgctgggatcccgggggaactttcccttataataaaagctgaaggatgtccagattatgctcttctcctccatctgcctgttaagtccttaatctcctacacctgggtgttctaatannttatttnatttaagtanaaatgtttctctatgaaaccatccatattcatattaaggtaaacatgagtttatgtcaccaatgatgagccgtcatcacgtggagtattctagctcctccagttatctcgaaccttccatttcaatcgtgagaaatatanctcctaccattcaccatcccattttatttgaatcgtttcaattttactaggacatggcataggtggtcagga

SEQ ID NO: 409162 - DNA, 148 bp, Homo Sapiens
  misc_feature (97)..(97): n is a, c, g, or t
gagatgggggtctcactttgttgcctaggctggagtgaagtgatagtcacaggcacaatcatagctcactgcagcctcaaactcctgaccgtaagcnatcttctcacttcaacctcccaagtagctgggacaacaggcacgtaccata

SEQ ID NO: 409163 - DNA, 456 bp, Homo Sapiens
  misc_feature (241)..(241): n is a, c, g, or t
  misc_feature (283)..(283): n is a, c, g, or t
  misc_feature (328)..(328): n is a, c, g, or t
  misc_feature (343)..(343): n is a, c, g, or t
  misc_feature (360)..(360): n is a, c, g, or t
  misc_feature (400)..(400): n is a, c, g, or t
  misc_feature (426)..(426): n is a, c, g, or t
  misc_feature (434)..(434): n is a, c, g, or t
attaaaataacttttaatatttgtctactcagtacatcattgtttagtctgcatttctttgatttatattgataaaatatatatttattaaccatttgtttttctcctttgctatgatcttgttatgtcatggttcatttcctaacaaaggtagaataggaggtgtcagagttttctctctaaggatgcatcccatctttgtgcacttgatacacctgggtcagggcagactcacatgggngactgtgctgggctgggaaggccctgggcaaccctggggctncagggtgggtccacatgggaggctcaggaggactttgaccagggnttgacaggacaactnggagggctcgagctctngggggccatgattctgggcccacactttcctccttcaccngctaatctttctgtggattggggggnttttatgnaggagctaggaagggacagagt

SEQ ID NO: 409164 - DNA, 298 bp, Homo Sapiens
  misc_feature (51)..(51): n is a, c, g, or t
  misc_feature (107)..(162): n is a, c, g, or t
agcaatagataaatctcaaaattaattttaaaatctgtattgacaagacgnaggtaaaattatgaccaggaatcattgttacccttagttccaagaggtggtttttnnnnnnnnnnnnnnnnnnnnnnnnnnnnnnnnnnnnnnnnnnnnnnnnnnnnnnnncgtgtaagaatggtttgcagattgattggttaaaagtgtttttagcacatccccaaccctgaaaacttcgcattaagagccaagcacaatgttggtagctccaagatattctgactgtgttctcagaatgaggggt

SEQ ID NO: 409165 - DNA, 544 bp, Homo Sapiens
  misc_feature (153)..(271): n is a, c, g, or t
  misc_feature (339)..(339): n is a, c, g, or t
  misc_feature (362)..(362): n is a, c, g, or t
  misc_feature (401)..(401): n is a, c, g, or t
  misc_feature (459)..(459): n is a, c, g, or t
  misc_feature (468)..(468): n is a, c, g, or t
  misc_feature (486)..(486): n is a, c, g, or t
  misc_feature (493)..(493): n is a, c, g, or t
  misc_feature (534)..(534): n is a, c, g, or t
gagacaagggtcttgctctgtcacccaggctggaatgcaagtggcatgatcatggctcaccatagcctctacctcctgggctcaggtgatcctcccacctcagcaccctgggtagctggaactacaggtttgcaccactatgcccagctaagnnnnnnnnnnnnnnnnnnnnnnnnnnnnnnnnnnnnnnnnnnnnnnnnnnnnnnnnnnnnnnnnnnnnnnnnnnnnnnnnnnnnnnnnnnnnnnnnnnnnnnnnnnnnnnnnnnnnnnnggtgacccaccacgagtggccagcagaatgttttcaatgttcatccatggttgttgcatgtatcaganctccattcctttttaaggttgantaatattccattgtatgtatataccacattttgtttatncattcatctgtttataggcacttggggggtttttttccatattttgggctatttgagnataatgctncaatgaaagttgggacanaaggatnctgtttgagtacctgtttcaattcttttgggggatataatnaaggctgggt

SEQ ID NO: 409166 - DNA, 430 bp, Homo Sapiens
  misc_feature (55)..(55): n is a, c, g, or t
  misc_feature (166)..(166): n is a, c, g, or t
  misc_feature (257)..(306): n is a, c, g, or t
  misc_feature (346)..(346): n is a, c, g, or t
  misc_feature (402)..(402): n is a, c, g, or t
atattatattaatatatatagatggataggaaaaacctacagccataggtattgncaataacctgattctagaggtagaactatagagtatacatttccttttttcttgctttgatgatatttttatacaattttatatgctataaaattttcaaaaatatatttnctattttcatttgtagagcttggttaggtttttatcagctcttgtgcccactgtacaaccagattcccctcatctaatttaaatgtcttcnnnnnnnnnnnnnnnnnnnnnnnnnnnnnnnnnnnnnnnnnnnnnnnnnnctacccttcacaaattccttcttttgcttctgtccagggnaacccattctgcttgcggtatcattttagcacgtacaaacacaaaataatgggggnaaataaaagcaccttgtttccctggcaa

SEQ ID NO: 409167 - DNA, 289 bp, Homo Sapiens
ggacagggtttttacgcgtcacattgtattctattgccttgtttgacagaaggtggaccttctaaagtgtttcacctaagggaagacatttcttttctttatacataactgccttgaacctgcgagtaaatattgaggcttcgtgttgtaattcttcaactggtcgcctctttttttcccccctttatttcctttttctgatcagctctgtgcttggtccacatttaaagcatcgctgccatgcctgtctaagaaaagcattccgaactctacatcttcatttatgaag

SEQ ID NO: 409168 - DNA, 343 bp, Homo Sapiens
agccctaaagtgaaaagttgtgaagtatgaaaaatatagctcagtatggctcaatacagtgcaccaggaagggatggtagaaatgtgtcaaaaccatggtaattgagagtctatgatttgactttggatttttatttacttacaacagtgattagagttataagaaatatcctatctatattttgtagtagagaattagtagagtaggatttgtggaagccaagggaaaaggggacatttctaggtaactagagtgattgccagatttacatactgtagactggtccttaggatttcatagttaataagttagaggacttctagcagcagatacttaggtgtg

SEQ ID NO: 409169 - DNA, 322 bp, Homo Sapiens
  misc_feature (184)..(184): n is a, c, g, or t
tcgcgaagtgttatccttatatttcctagaagatgactactcaaactgaaacaatcaatataattatctcaaagacagccttgaggaaagaataaaaattttcctcaatttccggacataagctacacagggggaggtagcattggccagcgtggcacacacagggctgggcctcagccctggntccaccatgtgctagctgtgtcacgtcaaggcggaacctcggctctaccttgtctacattgttccaggataacacgttcgcgagggataacacgttcgcgagagataacacgttcgcgagggataacacgttcgcgag

SEQ ID NO: 409170 - DNA, 121 bp, Homo Sapiens
tagcattgctttttgtggcactttccaattttctgggtgtcaagaggcaattgtgactacagcattagcagtgtaactctggcttcctgattactggattgcagcaagaggagtatattca

SEQ ID NO: 409171 - DNA, 451 bp, Homo Sapiens
cgactcatacaggatcccccgacggtctgtaccctaagggtaggaaataaagttatgttgttagtagaaatgtcaaatacggttaaagttgtgcaggaggaataattttcctagctggcacctacatttgttgtgtgtagatctgtgactattactgatctgttgtagcacattttccaatctaaaatgtccgatacagcacaataataaacatggggcagaatatatgttagtttctatttcttcccaccttcccttcaatcttaaaacaagtgtgtatcaatcagtcagaccagagcaaatttctatctttcacagagtatttatcataggatccacttactccctgtaaatggtggagacttctttctccctccgaaaaatatactttcattaagtgttttctctctcgccgtagtaaattagttcttccataggttacagaccgtcg

SEQ ID NO: 409172 - DNA, 374 bp, Homo Sapiens
taattgcaaaccaaaaaggtttaattatctttctgatagcacagaaaatgttttctgtcatagactacccatagtatagtaatacctctttgccacaggtaagttctaatacctggtgatgattccccaactgtgtacccactcaaacacttttcgacctacccttcctttaaaagatgttttgaggaattccagaaataaaatgtatgacacaaattgtgggactaggttaataccatgatgcctgtacttttgaaggcagggaagtgataagtggtaaaatgagacatttcctaggggtagaggtacaaagctaaaaaggaaggaaacccagactgaattttacgtttcttatttccaactcctctcgatgt

SEQ ID NO: 409173 - DNA, 155 bp, Homo Sapiens
tttattatgaaaatggcacctgcggatgaaaaaattaagttacataaagacaaccatgtatgtgacatgtatgagaatctacaaaagtataaaaagaaccctgttgtaaatgaagtatgtacatttctgatttgcagcattatcaatggtcaatg

SEQ ID NO: 409174 - DNA, 256 bp, Homo Sapiens
gactataatcactgcgtaactcggacatgcctctcgcactactcacaaatcatgtacgaccacactataagcaaaagcccgtgtagtggactctcacttaaattatcatgtttcatctctagcggtactgatacctgaaaacagatgtcattaattacccttataatctcgacctccctacttgttactgaaagtactaccattcttagggacggcgtacggtgatgccttcctctctctacattctactggttgt

SEQ ID NO: 409175 - DNA, 554 bp, Homo Sapiens
taaggccagaaggatgatgatgcataaagtatatactagaacacagactgaggtagacttaaaattctggaaatggagaaattttgagaaatttggcaaatggggaattttggcaaagaagggcaggagaaggtttggtccttaatgtggaaggatgctctaagattggggatagcagacaactgtgtgtgtacagtgaagtgaagataattggtcctgtgtataggagcctttattattattattatggcagcttgatttttgtaacgtgttgattgagcacaatcatagtacggtagtaactaagccccccttcttcctggataagtgagcagatgattcaatattgatgatagcatcctcgaaccatatcaaagtaggaatgtttggttactgcttcggtctgaaatgatgctgtgtttgggttgtgcttcagagctttgaggtgctacttgaaatctccttttttttacggagctctgaccagttaaacacaacagatgggataaaatactatttagatcgtgtctggcttgtctccattctatggtagt

SEQ ID NO: 409176 - DNA, 370 bp, Homo Sapiens
agttcgacggagactctctaatcattgcttagcaaaacaacctagcttaatcctattctctgcctcctccacccacctgaacagccgaacaggctggagaaaagcatacaatggtgctgtctggtctcatttaaatttatgaccttaactaacaagagagttcttagttctgtttgaaatctgactgtatttttctagctgattcactcctcagacaactatgtacagcttctcctctattcacaaacctccagagtccttccctcacctctggaacactctttctttaggggagatgaagattctgaatggtagtcacacttgttctagaagaagtctttagaaaatcctgcaagaatgagagtctccg

SEQ ID NO: 409177 - DNA, 238 bp, Homo Sapiens
  misc_feature (45)..(45): n is a, c, g, or t
tagaatccgactgagggctggagaactcttcggagacaaacctanggcttcgagagaggagagttggtgctggggcgatggatctttgctgaggaagcaccatgtgcaaccagtgccagatggcaagctcctgcattggcctgggcttctctgcctggcgcagaagtgcctggcacatgtgcccctctcttcctgggattgtaggttgcttgagcagctggagagtctccgtcgaact

SEQ ID NO: 409178 - DNA, 200 bp, Homo Sapiens
aaaggactggggagaaaaaccctcttaatacactattgtcctcagcagtttcctctttaaaaagcaagggcctgttgggctccttgaaggggaaaagttaagaagatggcaatgccagtcaccagcctggtacaggaacaacggcaccattcacagcaagacccttgtcctctgtttcaggggtgaccttgtacttgtca

SEQ ID NO: 409179 - DNA, 451 bp, Homo Sapiens
cgggcctttgtgctctgtactacgttgatacaggctggatgtggttagaccggtaccggtcagactatcggtgacacaggcggtgtgcggttagacaggtaccggtcagattacggtggcacaggcggtgtggggttagacaggtaccggtcagattacggtggcacaggcggtgtggggttagacaggtaccggtcagattacggtggcacaggcggtgtggggttagacaggtaccggtcagattacggtggcacaggcggtgtggggttagacaggtaccggtcagattacggtggcacaggcggtgtggggttagacaggtaccggtcagattacggtggcacaggcggtgtggggttagacaggtaccggtcagattacggtggcaccggcggtgtggggttagacaggtaccggtcagattacggtgaccacagcggtcccgggt

SEQ ID NO: 409180 - DNA, 205 bp, Homo Sapiens
ccacaccttcttgtttccaaacatgacaagctcactcccacctctaggcctttgtccttgcagatcttctccctgggaggctctttccaaagactttgacagcatctacttgtcacatcattctggccttctggcactctttgtggtggttttaaaatatgtcattacattctttgacactcctcccttcaaaaggcaatgattc

SEQ ID NO: 409181 - DNA, 129 bp, Homo Sapiens
acaaggagcttctctaagacattcttctgttgttttctggcatccaatgttgataagatattatttgtgatctaattgtcaattctttgaattctttcttacctccagtagtttttaactctcttggtc

SEQ ID NO: 409182 - DNA, 361 bp, Homo Sapiens
ctttcattcccttgcttgccagagggtggttccatggaaagatgcatgaattggttaattttacgaggaagctctctggtgatatttggtcgtcattaaaaacatttaactttggtggaaggtcctgggtgtaagatgcttgagcttttcctggtttctgtcctccaagtttgtttttaaggcaggagccaaagtgcagagcttgtgacattacatacgtgtgcgacgcaggagcgaaagtgtggagcttgtgacactacatacgtgtgcgaggcaggggccaaagtgtggagcttgtgacactacatatgtgtgtgaggcaggagccaaaagtgtggagcttgtgacattacatacatgt

SEQ ID NO: 409183 - DNA, 226 bp, Homo Sapiens
gggcattttcagtacctatttcagccttgcatctctcactgcctgtctgtcatcagggtcatataatgagtttagagttccaagggggtagagtggtctcatggcatttaactctttggatattcctctcatcatttattgtgtatcattcgagtttggtgaagcccaatgtctggatttctaccacggtcatgcatctgcaggattgagctattcttccactgag

SEQ ID NO: 409184 - DNA, 261 bp, Homo Sapiens
cagcccactagcctcatatcctcatctctatcatgagtgatttgatgaagacaattcccaagtgcacttccagtcttgacattctgcaagtctcaaattcctgtagtatgtcccacagggatcctctcttctgcgagctcatagcctgaaacgatcacttgacaattaaccacatatcaccccatggcatctgtcttgttgtcatgtgttatttaactttacagaagagcagtctcacatccaaagcatgtcggcaggacc

SEQ ID NO: 409185 - DNA, 460 bp, Homo Sapiens
  misc_feature (200)..(208): n is a, c, g, or t
ctaggaaatgcatataagggctgatcacctggtgtttggagccctctcagaggtcatagacctctagagagagaaactgagatacataacagggcggaaacaactcactggtgacacactgtggagtcctgtctacaagcagcacacatcaatccaccacacaaaaaccctaggctacagctcagttccttctcttaagnnnnnnnnngtgtgaaacaaataacctaagaatgaggagaaaacaagaagaatgaccctcttgcgagcactctgtaggttttatggcacctctacttgccagagttaatgtaaaatggaagtaatatcgtcttcgtgcacatttacgttaaagaaaaagagccctaaagtagacctgcaaactatagagttcctaagttcccctttttctctattttattttctgcctgctttaaatctgctgttatttttctattatgat

SEQ ID NO: 409186 - DNA, 327 bp, Homo Sapiens
acaggctgggctgacataccactgtccccatgcaggcggggaactcctctttctgtcatccattgattatcatcgtgtttctaacggattatatgacagggcttaggcacaatcagctcatgaactgccctcctcatgctccacctctccctattgaatcttgttggtacagatacctgagaaacgctggttgtctgctgccacttcagctcatccaggggctgagggaacaagctggccattagccccgaggtgcaaaaccttcaaatacaggttgccagcacggatggcttgtacttggccttcagcaactccagtgagggatcc

SEQ ID NO: 409187 - DNA, 428 bp, Homo Sapiens
agctcagcttgggtttattggaaactgtttacccaccactccacaaaggggtttccagcggggtgacacttaggattcctatggcctaatcctgggatttcaaaagggccatggttgtttggacaaatggaggggggggaccggccttcatgtgagggattgcttatcacccaggaagaaggaaccagtgggtccctaaagttgcttcattttggcagggatctctgctttagggcttgtttgcaggcctttctcttggccctggggtggatgtgtttttttgagtttgcccccgcttatgtttgcaattttgtgtttgtccacaggctctcacggttttcatataagtggtaggtgtagggagcacagctaaaaatttggcatcaggcgttcttcattttttccttcaatttttaaggcacaaactg

SEQ ID NO: 409188 - DNA, 470 bp, Homo Sapiens
  misc_feature (122)..(131): n is a, c, g, or t
  misc_feature (146)..(315): n is a, c, g, or t
tcacttggtctctgaaataaggaaggcaatttaaagagtagcatttcttattgtcacccccagcaggcagaggatacccgctacaaagctcctaaagggaaatggagctctcctccgcacannnnnnnnnngtaagagaaggtctnnnnnnnnnnnnnnnnnnnnnnnnnnnnnnnnnnnnnnnnnnnnnnnnnnnnnnnnnnnnnnnnnnnnnnnnnnnnnnnnnnnnnnnnnnnnnnnnnnnnnnnnnnnnnnnnnnnnnnnnnnnnnnnnnnnnnnnnnnnnnnnnnnnnnnnnnnnnnnnnnnnnnnnnnnaaagaataaagccacggacctcgcagtgagtgttacagttcttaaaggtggcgtgtctgcagtcgtttgttcctctctgtgggttggtggtctggctgactaaggaaatgaagccgcaggccctggcagtgaatgctacagctcttcaagttggt

SEQ ID NO: 409189 - DNA, 351 bp, Homo Sapiens
  misc_feature (117)..(117): n is a, c, g, or t
  misc_feature (121)..(121): n is a, c, g, or t
  misc_feature (126)..(126): n is a, c, g, or t
  misc_feature (136)..(136): n is a, c, g, or t
  misc_feature (141)..(141): n is a, c, g, or t
  misc_feature (157)..(198): n is a, c, g, or t
  misc_feature (301)..(301): n is a, c, g, or t
  misc_feature (331)..(331): n is a, c, g, or t
ttaattgaatttattttaagttttcctacagcataaatcatgagcaattaattcccttctgccccttgaactataggttaaactctttgtctccttcctttgctccctccctctctncctnatttncttcttcttnttttnagaggttatgaagacnnnnnnnnnnnnnnnnnnnnnnnnnnnnnnnnnnnnnnnnnnaccagtgatttgtgtcctgggctctgtcatcattggtatgattttagggcaagttattaaacctccaaactgtacataaaataacaatacctataggggtttncttaaaagggactaaaatatggtatggcanaaaacattaggaacaccacc

SEQ ID NO: 409190 - DNA, 473 bp, Homo Sapiens
  misc_feature (426)..(426): n is a, c, g, or t
  misc_feature (433)..(433): n is a, c, g, or t
tggagagcccaaataaattctgctcttttttcaactagaataatgagaaaacccagctattttctcaatctcaaagcccctggatgggaaaattcatgggcaggatagagagggaaataattattcctttggcatgggaattttattttatttagtatttattaaatatgaaggactcaaaacagtgcctgggcacctaataaacactaaaaagtaatgataataaagtatatattccatgtgtttaggacagaagtggcccatcccagccatttgttaaataatacttaattttctaaggatggaataaatgggatagttttattttctatgagtcccccaggaaaagtgggtaggacaatttttcagtgttgtaccctacccctggcacattcaattctcttgaggcccccttttttcaggggnttcactnatttagtgctagcccgtccggaacccttttccaattcact

SEQ ID NO: 409191 - DNA, 361 bp, Homo Sapiens
  misc_feature (84)..(111): n is a, c, g, or t
  misc_feature (332)..(332): n is a, c, g, or t
tccaagcaatacacaggaaatttaagtagaataaatattgcagcccatttttgaaatgtcagcatgtgctgtgttcagttcagnnnnnnnnnnnnnnnnnnnnnnnnnnnnaactaataagttggttatcagtggtgggttttcaaaatgtacttgttctaataagttgtacaatgaactaaatcagtggcattctctagataatgtgggggaaggttagaatattttctggccttctatggggtagcaacccagaatcaatctgaattagtcctgttttggtggagtttgtacattttaaatcctataacaaaaattatctagttttcatntccttactaagctagatgcgaatttgtcc

SEQ ID NO: 409192 - DNA, 460 bp, Homo Sapiens
  misc_feature (266)..(372): n is a, c, g, or t
  misc_feature (410)..(410): n is a, c, g, or t
  misc_feature (432)..(432): n is a, c, g, or t
gtagagttagtgtcaatgtgcttagaatataccaaattcataaacattttctctaaaaaagtattaagcttaaaaagttaattcagtttaaggaatataaaccaaattattttatatttgaatctcaacataagaagtcaaaatgtaatgctgccagataacaatatcaaaggtatttttctttctctataatttcatcagtatgtcctctcccttttctcctatttgtcaaattttaggcaaccctaactctgctaattataagnnnnnnnnnnnnnnnnnnnnnnnnnnnnnnnnnnnnnnnnnnnnnnnnnnnnnnnnnnnnnnnnnnnnnnnnnnnnnnnnnnnnnnnnnnnnnnnnnnnnnnnnnnntgaggggaacatggtatgtgttaaagtgccttccacantaccccggaacatgggcaaacnggtattggatgttggttattaggtattt

SEQ ID NO: 409193 - DNA, 526 bp, Homo Sapiens
  misc_feature (336)..(394): n is a, c, g, or t
ctcctgaaaaattctcctgtgaagtgaggctggtgtggaagacgccaacacagtgctctcattcagaacactctcgaatgcagactgaatcaggccctagacagagggctacgtgtgtgcctatgcgtgttggtcttggatgtgcgaactgtctaaccctgctctgagttttcctaggaaaaggaaaaatgtcctgaacctcgactcttccccaggctgaaaatctccaacattttccagcccggcttcaaacctgacagaaaaagacaaggggagacaggtattaagaaaacggagagctcgtttggatttttgcttcacttctgattctgtccnnnnnnnnnnnnnnnnnnnnnnnnnnnnnnnnnnnnnnnnnnnnnnnnnnnnnnnnnnngagacatcgtgttctttccctgtgacccccccaaatccaaaccttgctattttaaacaatgaaaagcacagtgtgtgaggaacagcttgcatatagctgaagccagcattatttacttcaggtttcctatac

SEQ ID NO: 409194 - DNA, 364 bp, Homo Sapiens
  misc_feature (195)..(230): n is a, c, g, or t
ttttttttctgttattggaactttgatttgactttcccagtggtaaaaaggaggcactaaaattttgcctgtattgagccaagatggtaaattgaagcctaaattcaaaagcagggtagataattttaaaagggattcacattctgtgcatacttcttagccctccacttaggccattcttatttccctctcatnnnnnnnnnnnnnnnnnnnnnnnnnnnnnnnnnnnnggtgtgccactggtatgcctcttctcaaaaacagagaagaaataagattagggtaataatccattcaacgttggttttattgttgctttattttcaacagctatatttcaaaattaaaccagcatccaaagggg

SEQ ID NO: 409195 - DNA, 366 bp, Homo Sapiens
ggtgttttctcaagatttatttctcattatcttccactctcctcaggagtcaaagtcagcatggtcccaggaagcccctagaggcaggggaagctgcatcaggacggggactaaaacagctccatcttaaagagaaactgacatcatctccgaaagccctgaggaacgtgctcttacacagacctgagtgttggggccgctcactttagcaagcacagcagcagcctaaacatcgctgacacctccaccatctggcctttggctccacagagctgctaccccaacttggggcacactttgggagagaaccagagggaaaaacctctcagtagtaaacgtggatctcacaaagcctgtgcgagcgag

SEQ ID NO: 409196 - DNA, 399 bp, Homo Sapiens
  misc_feature (389)..(389): n is a, c, g, or t
catacttcaaaaatttttattgcataaattggtatatacttgcacatgcacacaaaattattactttgccaaatgaattgccagagtattcctttggatagacatctagcacataatgcaactcgtgtacaatttactctaggacatttatgcttatgacataatgtatccaagcacatgatgcttatggacaaatataggctggcatggatggacaatcgtgggacaggtcaatgggctgttatctgggggtaaaaagtcaaaagggcttatctggggggtaaaaggccaacaaggctggatgttggaccatcaaggcattcacaggtctcatcacaggaactttcctactggaaacatttttacaggttggctaactttaaaaaaantcttttattt

SEQ ID NO: 409197 - DNA, 559 bp, Homo Sapiens
  misc_feature (228)..(269): n is a, c, g, or t
  misc_feature (412)..(412): n is a, c, g, or t
  misc_feature (488)..(488): n is a, c, g, or t
  misc_feature (519)..(519): n is a, c, g, or t
  misc_feature (537)..(537): n is a, c, g, or t
attttactattctaagtattccaaataagttgactcatacagtgtttattcttttatgtctggcttatttcacttagcgtaatgttttcaaggttcattcgtgttgtagcgtgtatccaaatttcatttatttttaaggctgaataatatcccattgtacgtacataacacattttctttatccattcatttgttgatggacatttaagttgcttccacctttggctnnnnnnnnnnnnnnnnnnnnnnnnnnnnnnnnnnnnnnnnnngtccctgctttcatttctttggggtatatacccggaagtagaaatgctgggatcatatggtagttctgtgtttaggctttttgagggaactgccatactgttttccacagcgggcagtatatcctgtgcaaattttaagtgtncaaggtccagctcccttactacctcctccaggacattttttcaaatcccctttctggatggaggggactttttttngggaggggttgtgggtgatttacttggcggnttgccttccctcgggctnttttaggagggtcttcttggat

SEQ ID NO: 409198 - DNA, 277 bp, Homo Sapiens
  misc_feature (161)..(180): n is a, c, g, or t
  misc_feature (215)..(215): n is a, c, g, or t
  misc_feature (260)..(260): n is a, c, g, or t
aagaagtccatccaagtttactgtacaacattcagaatttacattgataatacaaggcacaaaaagtgtggtatgaagccaaggctatgcttcattcaacctctctcctctggcttgctcagtccttcagcttcatgtgaaattaagtgttcagccctgcnnnnnnnnnnnnnnnnnnnnggctttgaacacatcaaataaaagttgagagtggntatgggtttgagatgtgaatcacttggaaagaacacccccacggnaccttcccaaaataaac

SEQ ID NO: 409199 - DNA, 141 bp, Homo Sapiens
ttttttttgcattttgacagcccaaattttattttacaaaccaatgacagctactagaagatgctttaggaaaccttagctaagccacataaacaatcagacctatacaagtacagaaaaatctaaacatgcttcagaact

SEQ ID NO: 409200 - DNA, 423 bp, Homo Sapiens
  misc_feature (151)..(220): n is a, c, g, or t
  misc_feature (307)..(307): n is a, c, g, or t
  misc_feature (392)..(392): n is a, c, g, or t
gcagagagtaccttggtgagagtgaagtcctgcttcctggtgcacaggctcttgttcctaaagaggaagaaagatcacacccgagaatgtgtggaagcagcagtgcagtgtgcaaagcagggaccctcagcctgtctcctgggctccatcnnnnnnnnnnnnnnnnnnnnnnnnnnnnnnnnnnnnnnnnnnnnnnnnnnnnnnnnnnnnnnnnnnnnnntgtaaattgctgcaatgaattacatgaggtatttcctgtcaatctccttgaacattaattggcacagtgtaaacactatctattagntcttcattctgatgtttctaaattaacacaaactaatcttatgctgtttctaaattaacacaactaatctaaatcttgatgctgnctgtcatactaataaagtatttgggcatatt

SEQ ID NO: 409201 - DNA, 418 bp, Homo Sapiens
  misc_feature (307)..(338): n is a, c, g, or t
  misc_feature (374)..(374): n is a, c, g, or t
caggcagcaaatataacagtcttttattcatttctcttctaaatccattaccagtattctttttatctggaactcaacagattaacttgtagatatcaggctaaaaccaagtagctctaagtatttataaccaaaaaaccatctagaatccttatctaatgttaattttctatgggtctccaattttcttcctctctttcacgcttccttgagtgagcacagtgtcttcagacatcccacggttccgttgtgttgtcccactcacaccagtagctcccatttatctttctttcaatcgctaggagtnnnnnnnnnnnnnnnnnnnnnnnnnnnnnnnntgtcaagcccctctacacctggggctttcctctggnatggcatggtacaaaaggaagcttccctggaggtgaagtgtcca

SEQ ID NO: 409202 - DNA, 446 bp, Homo Sapiens
  misc_feature (147)..(284): n is a, c, g, or t
  misc_feature (404)..(404): n is a, c, g, or t
  misc_feature (412)..(412): n is a, c, g, or t
  misc_feature (424)..(424): n is a, c, g, or t
  misc_feature (429)..(429): n is a, c, g, or t
acaaaaggagatttttaaaaaaggaatcacaaaaacatcttgaatgtccagctgttcctgccaatacatcaattcttagttttaagacagagtctaggattaattcagcagtcataaaattaaaaagagagactgtggtacaaaaannnnnnnnnnnnnnnnnnnnnnnnnnnnnnnnnnnnnnnnnnnnnnnnnnnnnnnnnnnnnnnnnnnnnnnnnnnnnnnnnnnnnnnnnnnnnnnnnnnnnnnnnnnnnnnnnnnnnnnnnnnnnnnnnnnnnnnnnnaattaaataaataaatgaggtagggaaattaaactttcacacccaggacatgcctggttccaactttgtagccttcatgcaatgccccaagggaaaaggtcttccaaattccctgggcanaggtcccncccaggaaaagnttttnaaaccttaggtatggga

SEQ ID NO: 409203 - DNA, 439 bp, Homo Sapiens
  misc_feature (30)..(30): n is a, c, g, or t
  misc_feature (353)..(361): n is a, c, g, or t
  misc_feature (384)..(384): n is a, c, g, or t
  misc_feature (413)..(413): n is a, c, g, or t
  misc_feature (419)..(419): n is a, c, g, or t
gggtgtatttagcaatctgcgattttttancaaaggtttaattatattttcacatggcctcagtcatgcccctgtgtaactggctcagtaagagataagggtgcacgtagctcaggccgtagcaggtgctaatgaagagtccccgttgagagagggcttcttaaaccactgagggaagggctctcccactggagaagaaacactgaagtatattcttctccatcctcctcccaaagtgttgacagagaaaaaaaccagagtgaccttgtttcctggccctggcctggacagtggagtttaaacagaattccaaactaggaggactgggacatttattcacctggcaaaaacannnnnnnnnggcaggcatttccaaatggtacntgtggtcccaggtatgggtttccattacnggggantggggccttggtctttaagc

SEQ ID NO: 409204 - DNA, 253 bp, Homo Sapiens
tcaaattgtatgtacatttttattttgagatattttgccaaatgaccctccacagagtcaaagtcatcatatcacccaatttgaagtggttgtcattcacactgtagtctgtataaatttcacccctagagttgggaaacctgtccgtactgacaaaggatgtatcaatttacacttcatcaatgaatatgagaatatcggtctgcatactttccaaccatgttatcaaactttgatctttgccattctgagg

SEQ ID NO: 409205 - DNA, 269 bp, Homo Sapiens
  misc_feature (49)..(49): n is a, c, g, or t
  misc_feature (180)..(180): n is a, c, g, or t
  misc_feature (255)..(255): n is a, c, g, or t
gacccatgagcaaggagtggggcctccgcttgataccagctggagtctnctctgcccctgctctactggcttgcttcctcctggaaactgtgagcttctgctacgtccagtctacaactatagaccaccatttaaccgcctctttgatcacagtgctaaatagtgtattcaccttctccntacaagaaggctcagcgagatctgggctatgagcacttgtcagctgggaggaagcaagcagaaaacctcagagtngatcgggacactag

SEQ ID NO: 409206 - DNA, 536 bp, Homo Sapiens
  misc_feature (474)..(474): n is a, c, g, or t
  misc_feature (479)..(479): n is a, c, g, or t
  misc_feature (503)..(503): n is a, c, g, or t
ctatagtacccatgaccctgcaaccagagaaactgcctgtagggaggccagagtccaaagcagccacctgtaacctgaaaatgaaacgcagacccaggcatctgtgggtcttcatcagcaggatgaccattctaaggctaaaagacaggcctttaaatctgatgctataattccatccaaatacacagttaggtttctaccatagggaaagctattctccactttttgaagtatctgtttcaaagataacttgctctctggttctcttttatctaaaagagagaatcaacatgctaatttaaaggttaacatcattttaattcaaaaattttagtctccattccatatttaatgatgaagacaaatctgctgggtgctgggagggaataaaaagtaatgcaccccattgatttcagagtatctgatcacttgggttattgcaagctgctacttacccgccattaacatgggtanttaantgctggattaaacctaagtggacncaagtgaaaaaagatttttgggaaaaaattaat

SEQ ID NO: 409207 - DNA, 497 bp, Homo Sapiens
cccacgcgtccgcccacgcgtccgcccacgcgtccgggcctttttcttttaccttgagtaaaggaggaagtcattacaaagttttgggtggaagaatgacatgatctgacttatgctttaaaaagatcattctggctgctataaataagctacatagaattataaactgtagagaattaagggatatcttttaggggactattgcagtaatccaggagaaagtagtgtcttattccaaggtagagcattggaggtggtgacaagtggctggattctggaaatacatgtgctccttgacttaaaatagggttatgtcctgataaacccatcgtatgttgaaagtatcataagttgaaaatgcatataatacacctaccaaacaccatagcttagcctagcctatcttaaacatgctcagacaacttatccgacagttgggtaaaatcatctaacacaaagcctattttataataaagtgttgaatatttcatgtaact

SEQ ID NO: 409208 - DNA, 607 bp, Homo Sapiens
  misc_feature (577)..(577): n is a, c, g, or t
ggggcttatacccagccctgctcacctgaccgaaaaagacaagcagtaaaaaaacagcttgaccctcgattatttgttacagtgaaactgagagtccacaaggcctgctccttcatatacagctttcagtcacttggaatcactgtacacagatagccaaggatcactagatatttgaggaaaccttcaacatgaaagatgaacataaagaagctgtgatattctcagaaaggaatatactgcttccatcaaataggatcaggatgctattttttcagtagatgtattagaaaataacttgaagaaattttaaaaagtagaacaaagagatgaaaagcaggcaagaacaaaaaagaaacttaaacctgaataagatgcaacatctaataaatgagttccaaaatgagagaacagagaaagaaggtgaagagagaaaaaaattaaaataacatttcccggaaataataagactttagtcttctaaattaaaagggtccactaagtgccctgtgaaatgaattaaaaaataccaaaagcacattgttaggatatttcagaatgctagagttatggaaangactaaaagcttccccaataaaatgttacc

SEQ ID NO: 409209 - DNA, 742 bp, Homo Sapiens
  misc_feature (160)..(160): n is a, c, g, or t
  misc_feature (358)..(358): n is a, c, g, or t
  misc_feature (396)..(396): n is a, c, g, or t
  misc_feature (520)..(520): n is a, c, g, or t
  misc_feature (542)..(542): n is a, c, g, or t
  misc_feature (695)..(695): n is a, c, g, or t
gtgaacacctggatacacacctcctcctttctcccatccacaggttcctgtacttgctttagcaatgtctgtccatcccccaccaatttcatcttattttttggatacattcaaagtaaactgcaggtatccatacttttgttttccctaaatactttanatgaatgtatctttatcatgaggtaaacatagattttaactgaaaacataggaaaggactttcattcacccgccattttttggagggccaaggccttctcgttaagtatggtttgctgatgcgctttctagtcgtgtcttaccatctagaatttctagtttcagttatttccaatgggatgtgatttacagactctancaaggcatacagtatagctttccagattttttgttgtnttcctcctagttttttattcatgtcatcctcacttactttgactattgtttgtttcactggattgctgttaattgttctttctaaaacattaccttagttttctttcacagaaacagtgctatnctttttgtgttcattttttatnggtatatataatacttaacgtgttcactcagcaaacacacgaagtgctttactatatgccaagcatgattctaaatgctggggatatactagtgaagaaagcaaagtgcctgccctccccggaactgggaagacagacagaaaataaatattncaataatcaaactagtttagccgaatggactggtgagaaacgaaaaa

SEQ ID NO: 409210 - DNA, 490 bp, Homo Sapiens
  misc_feature (473)..(473): n is a, c, g, or t
ctataacaacggtgttaatttgattaactcactgatatcttttaaaaataatagacatttgcttcctacacctttttgtacatgacctaaagagtatattcccagaagctgctggtcagacacatttagggatgacagttgaagaggacttttttaaagctgcatgtgaatatttcctctgtgtgatttgtctgatgtagaaaagttttcccctcatttttatgagtaaaaacactaagtgggtggcaggggggtgggggttcttatgggagtgtcataccgcggcatgttacctgactggagactagagactatttccattataagccttcagaaacccaaccatgtctttactgtgtctagctttttaaatactgattggttagttttatttttgcccacagtttcttgggcaaaaaggttcttcattttgtctgaaaaagaaattatttgccagaggtatttggagcctntttgaaggggagataga

SEQ ID NO: 409211 - DNA, 219 bp, Homo Sapiens
ttctaacaccagtgcagcataactaatttaatgccagtgctgtgaactatatactgaatagctctgtgtgggctttgtagtctacagggatatcacattattagcaatcatatctgcttaggcaaagctggcttctacagatggctgctttcaagtgcaaatgaactggttagacgtgtcttgtttaatacatactcaagattcacaaatgggtattga

SEQ ID NO: 409212 - DNA, 167 bp, Homo Sapiens
ccaaactgaaggaagctaccgtttgaaatgtctgtgattacagatttacttagactcagcttccgatagcacttatttctagctcattacttcctccggaaggaaagggtcagctctgggtgatgggagtttaacccaatgaatttggtgtgatggatagatatttg

SEQ ID NO: 409213 - DNA, 125 bp, Homo Sapiens
agagtttatagttctgagtgcctacatcaaaaaagtagaaaaacttcaaataaacaacctgatgatgcatcttgaagaactaggagaggaagagaaagccaaacccagaattaatagaagaaaag

SEQ ID NO: 409214 - DNA, 497 bp, Homo Sapiens
atttttagcaagtttctgctaatgatgcttacgacggtggcctcttcactggtcttaacaaccactgttcaacagcctttcacagacagaaatccatctgcataacaaggaaaggtgaacgactatctccagtaataaatctgatttacaactcaagccatccactaaaacagaagcatgaattaaataaggagagcctgtgatattaagtacaggaggaaattagtaataaatattaaaatctaatttcttggaatatttggagctaacctaattggcagaatgggcaaatgacaatgaggaagggggagaaaatgaaacatgcccctgaatctggggcatattaaatccataatctagatgaatggcaaaggccagccaagagctgtggccatgaagcagttgaaacatgattaaagtgtgaactggaatcttaatggcagatgtaattgaacagccttgagttttattgagagttaaacaaataatattatcta

SEQ ID NO: 409215 - DNA, 409 bp, Homo Sapiens
cggacgcgtgggctttttgtcctttcaaaatgatagttttattaccacagaagactacttatccttaatgtttgttatagttcatttttgttactaagtagtttgtgttaatctccagatagaatatttcctttcaaggtccaattctttggttcttgtgtaatagtcaattactgttgactatatatagccccctgaagctttcatgtatcacaggtagagtttttaactgcattctctgtgtatgtcgctataatttgtacatgtacataattttcttattttaagatgccaaactaagcacattgtagacattttggatgaaattagaacaaatgattgtgtgccattaataatagatgtggattggcattctgaccttaaaggataaaataagaggtgtggttag

SEQ ID NO: 409216 - DNA, 334 bp, Homo Sapiens
cttaggttgattccaattcttggctgtattcttgtgaatagtgctacagtaaacatgggagtgcagatatccctttgatatacagatttcctttttttggtatatacctagcagtgctggatcagatggtagctctatatttagttttttgaggaacttccaaatttttctccataatgattgtactcatttacattccccccaacagtgtacgagggttccctatctccatatccttgccagtatttgctattacctatcttttggataaaaaccattttaattggggtgaggtaataactcgtagttttgatttgtatttctctgatgattg

SEQ ID NO: 409217 - DNA, 223 bp, Homo Sapiens
taaaacaataactgccattaagcactgactgaaaccaaggcttatttctaggttagatcctaaagatgtgggagaatccacttactgggcctccgaccacgaaatgaatgaaatccctactagtttaatgaatgagtgtttgtaactccagtatcaaccatggggcaggagcccaccactgtcagtatgaggtcttaggggctgaaggacaaagtgaagaaag

SEQ ID NO: 409218 - DNA, 107 bp, Homo Sapiens
caaacatcctgttctatgtcctgagagctgacctctaggcccacaccactgggctccattgccctctgatttggggttggattcagccaaaaggaggtactggtggg

SEQ ID NO: 409219 - DNA, 474 bp, Homo Sapiens
cggtccgtatttccgggtcgacccgcgcgtccgcaaatatgttgtgaatttgcacactttccagtgttttgttgttgtcacgatgggggtgatagtccccacctttgtgtgtcctgtttggaagatgggaatctgaattcctttttatgttgggctcttaaaagaaggaactcaggttcaggatggactgttgttccctgtcacatacactcagcattttcaggagcttcatcagggaccctccaaaaacttttgatccctgggaggttatgtagctggataaactgatccatgcttttacagcataaggcccacagactgcatgccttcaggactggctcttctctgacatagttggctctgctgtcccggccaacatggtcccttggtttctcctaagagatgatgcaaaacttcgttcatacactgggtgttgtctttgaaggctgttgacagtgctttgctaccatggtt

SEQ ID NO: 409220 - DNA, 123 bp, Homo Sapiens
cagccaaagcatttttgatatttagttcttcttgtaagactattgaggtaaacattctaagaaatacaggtttagagaacatctttctgctgagcttattatagagttgatatagttgacatg

SEQ ID NO: 409221 - DNA, 358 bp, Homo Sapiens
gaaatcgaaggacaggcagacacaccagtttcttattcaggtcctcatagcaatttgaccagttctggtcttctcaggggtcgtttttaaagggaatggaaatatgtccctgcttcgaccctaagcaactacccttgactttgactttggtgtccaaaagctccatgttgatttgttaagtagggctgattatgtctcgccttcttcagggacagtggtcctcaaggttgttttggctttcggacaacttggataggacaaaaggactgtccgcctccttatcacctccttcgcatttggcgttcttaatagaaccccttctgagatagggaggcagttgtttctcccggcaacagga

SEQ ID NO: 409222 - DNA, 204 bp, Homo Sapiens
ttcaaaccaagcgtcagggatcattcatgtttatatccaaataaacaaaaattatctagagttgtgcatgccatcatttccttcaacacagtcttctatgtagttttctcattacccactgtgaaagatatgccaaggagaggataatgcaacccattctatatgtgaataatgggtgggacacaggccaattatcatgatcca

SEQ ID NO: 409223 - DNA, 371 bp, Homo Sapiens
gggtcaaaccacgcgtccggtcctcaaatatgtctgcggccttggacaagttacctaagaatcagagggagcattcactgagtgcttattggttctacgcactgttaagtgttcctttgtgtcttacctcatccacctctcgcatccccccttggaacaagatagcatcattaccctacatctcttgaaggttcaggtccctgggctgcaaagagataaaaggctccctcacacagtctctggagggctaaatgagatcctacagcaatgccctggtggggcttctctctccctcttatgtcacttgtcacacctgatctaagtaatcatttccctccagatgagaggtgtaggaaaggacctgatgccac

SEQ ID NO: 409224 - DNA, 148 bp, Homo Sapiens
ccggggttctaaccacgcgtccgtagagagaggggtgactatctgccttggagctggctgaagagaatgctgagatgataacaaagcagcttgtataaaataacaagcacccctgataggtcactggatgtatactaaaaactttttt

SEQ ID NO: 409225 - DNA, 229 bp, Homo Sapiens
tggacgcgtggggtcataattgcaatgagaaggggagctgtggctggctctgactgccctgcttcccacattttcttttaacgagtgtccccacgtccccaccgcccctcccccccgacactcagatcccttcaatacccactggctgccattttcccttgctctgcaccctccaactccactccacttaagagaacagactgtatactgctggacgccctgaagtgat

SEQ ID NO: 409226 - DNA, 460 bp, Homo Sapiens
gataaatcgacatactaacttttccccctgcaaaattaaaagcctgaggtacaagtctaagaagcttttagtgctctacataatataaattctggctggtgttaatgctatgaagataatatgtagttagaaaattgagtcggggaggaatgctcttcattttaagtggattttaaagtttctccttgagtggatgaagaacttgcctggtttgcaaaaatcttacttcaaaattatattttctaacaaaaactgcattttgagaagataagctaattttactcagtagtaagtcaaatgaggaagtgcagagggtttttttacatatatatagcaaccttgtcaagtggtcctcacaagagtcataaatactttgtaattagcacagtatattcagcagtgtataactctacaaatagtaccttatattagtgtagtattatatcaatatcttatgtat

SEQ ID NO: 409227 - DNA, 489 bp, Homo Sapiens
  misc_feature (387)..(446): n is a, c, g, or t
tggataatgggggtggggattctgtgcagagcttggggatacagatgggtagtcacccctggctacaaatctaatctaacaccaggtgttcctggcctaccccgctctgcccatgatggtacagaggaaaaatgcaaggtctgtgcgccttgggactctcctcgttgcctggattctgagttgacctgatctgtcacatggccactttgtcagaactcatctggtacgtgggcttcactgatgctgggctagtctgaccccatccaggtcagggctgggtgttatcacagggaggggcagatgcctgcaaaaccctggctgagacaccagtgaaggcctcaggagtgatgggtaaagtcagcagtcagctaagaaccctggggtctnnnnnnnnnnnnnnnnnnnnnnnnnnnnnnnnnnnnnnnnnnnnnnnnnnnnnnnnnnnngcctaggaaagtgaagatctcttctagttcaaaactgtgataa

SEQ ID NO: 409228 - DNA, 531 bp, Homo Sapiens
tttttaagcaaatacgtcttctctgtgagtcagtagtgtcctgtacatgtgtacctccatcatactgtaatgaatagcttagttgcctcttttcccactagactatgagatctttgaggggaagaaacaaacaattatgctcttaatataaaataaggttttataaactagctgaaggaggaaggtgtttatccctctcatacaggactgccctatatccactatgtatgtaaacctgagtccatttctctggcctaactcactatttccctgtgtcacacaatccatcctttccccttgtctacccacaagtatacttaaaatcattcatgtagcccttccatacatttaatctatttgtgtttgcttttcaagacctgattgcttcccttgcagtagatataaaagagtgtcattctcttacacttagtttttattcctgattaccagaattacaggtttcttttgctgtattgtgcaaatgtcatatacttaaaacagatataacgttaactttaaaagaattttttt

SEQ ID NO: 409229 - DNA, 154 bp, Homo Sapiens
tatcccctcatgcaactgcttctaattctccattagcatacctacgaagtcacagtaaaaaatgaaaatgaatattaccattgaaatcacagatgactgataaccttttgctaggatcttagaggcatgtgcactgacaatagaatcaatgaag

SEQ ID NO: 409230 - DNA, 407 bp, Homo Sapiens
  misc_feature (172)..(187): n is a, c, g, or t
aacgttacagaataccatgtattgtgtcaaaaatgcatttgcaaattttcaggaagggctcgttgggtgccaagggctatgtgaggtgccagaaacagacaagtagctggaaacagatcaaatcagacaaggctactttcttcgtacagcatataatatagctgaaaagagnnnnnnnnnnnnnnnntccttttgcttacctgaatttcatatttaatgttcttggactttttttgttgacctcaatccataagaactgtagttctccccagtacagtttcagcaccaatgaccaagtctcatcagagaaggaggccacatgatgatctagcagatagactctttattcagtatgtgagagtcatttacagactggggacataaattagaaatgatgagctggatgt

SEQ ID NO: 409231 - DNA, 543 bp, Homo Sapiens
tcccggcctggtggctgtttgattatgtcaccagactctttcagcatgtacgtcccatgggacttcttcccttcctcctcagcccccgatcctggctcctcctcggcctcagccctctcctagctctcccctaagcttcttgagtctccttgctgaccagcagtggccacttctccagctctgaccccagtaccaactgtcccctagacggggaccccagctacagaattcccacctgcccaaaaccaaacgcagcatcttcccatcctcccagacctgtgcttcctagcgcgtcccccatcagtggggcaccagcgctggggtgctgccttcacccttcccctgtgtggctcccacatcctagtgtgaccggatcccacgtccgagctctactcacctcccaaacccagccagcttcctcacccctgttgccctgccttcttcaaaggttgtggttgctaattggtgtccctacctccgcctcatcccccttccctcctgcatcctgcagccggggcgctttctccgcccccctccgagttc

SEQ ID NO: 409232 - DNA, 281 bp, Homo Sapiens
actcttacttcttactgatacttgataaaagagctttaataatccttgcacagtacagtatcagttgcttccaatttgctaggtgcatttgacaaactaataaccaagcctcttaaaacttgaagtaaatgcagaggcctgaaagagggtataaaatttcctccaatgatcaaaattcataaactgtagctcatggacttatgacctttctcttgatttgccatctaggtcccaactggataagtgaatttatgtaaatgtgagttccagattgttgtggt

SEQ ID NO: 409233 - DNA, 486 bp, Homo Sapiens
atttttttcaggcagagagagcccctccattagtcacacagaccactgagaccctgcccgcccataagagtcataaagctgtttgcaccatgtcacatgtaaaatgaccatcatcaacaccaaagcaggaaaaggggtgaagccaaaagctgagcaggttggactggttatgtggctgatacatagtgtcttgccgctgccaagattttcatcccagctccttgatgctctgccaagatttcaaggtgaagatcccagcggaggaatgaggaactctgcacgataagtcggagcatgcctgcagaggccacaggcagtgcggccatacccgcaaggctgagttggcagttttggggtgcaagaacaaacctcaacttctagcctgcaggactagcccaggctggagaatctgaaagccatgctgggagagatctaacccagaggcctttgatattggcttctagtcaagttcaagtccagtacttt

SEQ ID NO: 409234 - DNA, 617 bp, Homo Sapiens
cttcagagaagatgaacacttaacatgaatttaggcaagtaagaagttgagtttagcgaaggaagctgcagtcagaagagttcggccctatacgtagacaggctagagaagccaaggtcagaggttcaatcaggcaatcagacagacctaacaacgtggctcaagagagagcaggggactttgcctgcaaatgtggtttatgctcttcccagtctcccagctctttttgccaggtgcctctgcagccagaacaagtttagagacttatcggtgagccctcccttcccccaagagactgaataagcttcacttttacttttatcccagaataatatacatgcatccttctaacaaacataggtaatgagcacccatgtccacaagtagatgtcatggagaatgagacaaataagtgatagacctgtcccttggaaagttgacagtcaggaaggaaaaatgagacacgtaagcaccactaagtaaaacacaagtttcgacctggtacatgccagatgggaataaaggcaaagtgcctgggtcatcttccaaatgccatcatcctcttgtgtccagtctctgaagaaggtctctgaccttggattacatgaccatctata

SEQ ID NO: 409235 - DNA, 612 bp, Homo Sapiens
gtgacattagtaaatggaaatgaggtgcggaaacagctggattggttacagtttggtgtttgccttatttctggattggttacagtttggcatttgccttatttgaacacgatttgaatagttggtcacctttgattggccaatacttggtgattagcagaagagtaggttatgctctgtttacacatatagttaggttacagtttactatggagaaaccttttggctgaatttaaaatatgtaaggaggcagctttaggctaaacctaatttaacaactgaatgaccaactgaaatacgtttttaggagaacatccagtaaacctgaagataataagaaagcctgaatggtctcattcagggtagaaagggtgagaaacagattggtaagactcaggtaattttctccttgctgtgaatttcttgtcttagtccattcagctgttttaacaaaataccatcctgggtggcttataaacaacagaaattgatttctcacagttctaaaggctggaaaatccaagatcaaggcactgtcagatttggtgtctggtgagggcctgcttccttgtagatggccatcttctcactgtcactccacataatgaaagg

SEQ ID NO: 409236 - DNA, 609 bp, Homo Sapiens
taaaattagcagttttaacctggtgtcagctccagaattgactttttggggaatctgggaaagttgccttggaagttgttaggtttaaacataagtaataacagcacttaaaatcattttaaaaaattacaaaattaacacccttactgattttacaataatgtgtaggaactctcatatctcccttactctctgtaattgtggtagaatacacaggaggttgaccatcttaaccattctagagtacagttcagtagcattaagtacattcacattgttgtgcagccatcactaccatccatctaaatgactcttttcatcttgcaaaactgaaactttatacccattaaacaacagctccctattccctcctgcccctgtctctggcaagcaccattgtactttgtctctatttgataactccagatactgcaggtaagtggaatcatattgtatatattttttgttactggcttatttcacttcctataatgtcctcaaagttcatccatgttgtagcatatgtccaaatttctttcttttttaaggttgaataatatttaattgtatgtatataccccattttgtttacccattcgttcattgatg

SEQ ID NO: 409237 - DNA, 619 bp, Homo Sapiens
  misc_feature (166)..(387): n is a, c, g, or t
attttggtgaaagacataaattataaatttatgtctttcaagcttagcaaacccaatcaggataaatatgaagaaaattttgtctagggtcattacagttaaagtgctgcaaactaaaaagaataagaaaatcttgaaaacagagaaaaataaattatagaattannnnnnnnnnnnnnnnnnnnnnnnnnnnnnnnnnnnnnnnnnnnnnnnnnnnnnnnnnnnnnnnnnnnnnnnnnnnnnnnnnnnnnnnnnnnnnnnnnnnnnnnnnnnnnnnnnnnnnnnnnnnnnnnnnnnnnnnnnnnnnnnnnnnnnnnnnnnnnnnnnnnnnnnnnnnnnnnnnnnnnnnnnnnnnnnnnnnnnnnnnnnnnnnnnnnnnnnnnnnnnaatgccaagaaaattctacagactgaaaagaaataaaaccagcttgaatttcagctcttcaagaaggaatgaagaacatgagaaatagtaaatatgtgggttgaagcatatgaagaaaatccatcctcacacatatatatagttggaaatggaggagaattttaatagacttttcagataattgtggatatcttctttaatactacaccaaaactcagaagtggaggtttct

SEQ ID NO: 409238 - DNA, 618 bp, Homo Sapiens
aaggagacacagggctgtgacttgttcacaagatcaggcaaggcacaaaccagcttgtagtggcagcttgaggatggcatcaggtggtgattgtaattatttttagagttacaagatcctgggtaaagtgttaaaatgccaatagccacaacacagagtatcttcttagagaaccaagtgagagtctgttgagtcaagtcctaggctgtggatggggactaggagatcacatgtgatagtccccttcagagcacagtctgaacagtctgaacaggaaggaggacttcggaggcatggtagccacggaaacgtgagcctcacctcttcagtgctgcccccagaaatccgccaccactgcacgtgcttcccagtgcaccatggacagcaccgctaagctcccagtgcaggactgttcctgggagacacggggccctccgagtatgcatctgacagcctggctgagcgcacctagaaatgcagtgcagtcttgaattgtaccccaccttcgctgcccccctcccctgtgccctaactgtgttgatgtcctccagtgctcccagctccctcctgccctccctgtcttcctcacaggcttagtccctaatcaatctcttacta

SEQ ID NO: 409239 - DNA, 233 bp, Homo Sapiens
gaaggttagagtggtaaggcaatttcttaaaataaaacaacaataaggtttgacacattgattgattattcttttcctgaaaatttctgtgcgatttctgtttgatgaaattttatccacagtagaactgctttaaaaattaaagtcaatcctctgatacccttccattgctttatcaactaaatttatgtaatattctaaatcctttgtgattatttcagcaatcttcacag

SEQ ID NO: 409240 - DNA, 595 bp, Homo Sapiens
  misc_feature (277)..(358): n is a, c, g, or t
  misc_feature (405)..(448): n is a, c, g, or t
ggaaaaaggaaaagtgatacccaaaataaaaggacatagtatactcatatgattattgtatcgcaggtggcattgcctttatgttcttgtttaattttttaaaactgagataacttgttaatcataatatagtacagcttgtacttgtgacctgaatttacttagggtgctgagcgtaattaacctgatggagccatgtcatctatcagtatggttggaaagagagaacagacctaagctctgaatgtgactagagcagaggaagctatgctgaaannnnnnnnnnnnnnnnnnnnnnnnnnnnnnnnnnnnnnnnnnnnnnnnnnnnnnnnnnnnnnnnnnnnnnnnnnnnnnnnnngtatgctgaaatttttaaaacttgatagattcttcaaaaggccaggnnnnnnnnnnnnnnnnnnnnnnnnnnnnnnnnnnnnnnnnnnnnaattgatgcctgtcacaactccagaaaattctgtttgtgtagcagttgacaatctaaaaaacaaatggtcttttccagacattctcaactgtcgtggttgttttgataacttgaaagcaaactgtttctagcacccatctcttgtcc

SEQ ID NO: 409241 - DNA, 596 bp, Homo Sapiens
  misc_feature (328)..(351): n is a, c, g, or t
  misc_feature (563)..(563): n is a, c, g, or t
aggaaacacaatattgtttatagaagccctctaattttcataagttgctaccttcatttggtacctactgattatcatgtgctaactaggagaaaacacctacaagcaaacaatattatagtgctgcgattgattctgctttaatgttgcttgttcaggtagcaaagccattagctacttcttgatagtttttatgaatagacttagcacctagtattgagcaaccactgaagaatgcatcttccgttaaaaggttgatttattagtttatatgtaaaagaacactggaggttataaaggtaacaaagaccttaaacattatattgannnnnnnnnnnnnnnnnnnnnnnncttcttgttgtattgcagggtaataaaatttcactaggcccattggatctataaaatctgaagtacaaccaccaactgatacaaatgaaattgtttgactggagcgataagcaaggacttggctttgaactctgagcagtataagttgtttctctggcccgtgagggtgaattacagcctgctgtgcattaaggacaggcatgtatttgtangagctcccagttcagtaatcactgggtgataca

SEQ ID NO: 409242 - DNA, 571 bp, Homo Sapiens
ggaagggccgagggccggaagcagaactgcaaggaaagcccggaagcaggggctgggggagcttgggccgcggcgggtgatgctaggcgcgtgggcgaggtggtagcctagatggagaaggagtttggggcgtgggcaagagaaagagtgagggtctaggggaatgctgggccccttcaatgttagatccggagttggattgggggggtcatataggcctcctcccaacctccaagggtcctacagatgaggaaacaggttcagtgtgagctctggcagaggccccgaagagagggataggaaggggccaggagaaccagagctagttgtgaccatggaagccgaggggtcaacgcaagggccagacgttccaagggaaaggaatggactcatcagactcttaagatttgttaggacgcttgagtttccgagaattggggggaacaggattagtttggccctaagagttggtttggtatgtcaactcatgcacgtttgttggtaggagggtaaaatctggttgggatagggtgtggtggagcctagcttccaagtaatgaaaattcaatta

SEQ ID NO: 409243 - DNA, 252 bp, Homo Sapiens
caaaccattcgggatcattcaagataagtatgataaggcaactagagcacctaggacgttccctgtacctgagcacctgccaccaaatggaggtattaaatgagttcaagtgacatgctgtgtgcagcacagactcaggacctggcttttgcctctcaagacagaagcttcctccctctcctcctgcccagttaaagacttcgcccagcagggcaatgaaacggggaggggagtcagacagggatgaggtgt

SEQ ID NO: 409244 - DNA, 591 bp, Homo Sapiens
aaaaaaacgaacggctagatctagtgaagctaaaataccaggactagggtggttccttcccccatgaagaacaacttgagtcttcacatgtaattattctgcctcagcctggtgcctttttatccttaaccatataattaaatggttcacagctacagtgcaaataaagagttggtgttaacagaatatgtatgccctgtaattttcagctttattggatttcctggtgctaagcgctaatgctgaggcgctcacagtggaagaacaaccttcttgtgggagagttggataccttggaaacatattcactttccatccacctaagatcttcctcttccagcaccgccatcccctctactggccctctgcatagccgacttcatcattgttacctgtgcccatgtggttcctcaagctgagatccgctttccatagtgttccttcttatctgtccctcctcacagcctctccattgatgaatttgtgttgggacaagttgggacaagcaaccttcagagtctttctgccatttacttaactgccatttagtgtcatgaccttggcttcagaatgggttgatataagaaatgg

SEQ ID NO: 409245 - DNA, 564 bp, Homo Sapiens
  misc_feature (194)..(333): n is a, c, g, or t
caaagagaaagaatgtgagtgccacatgactggttaagtatggattctcaaactagggctttaaatatccttcgtgattttttttggcatgaaaacttgtaagaccactggtgggctctgtacaaagtcggctaccccctcattctatatcttcctctgcccactttcctcccagctattaaaaatgaatgtannnnnnnnnnnnnnnnnnnnnnnnnnnnnnnnnnnnnnnnnnnnnnnnnnnnnnnnnnnnnnnnnnnnnnnnnnnnnnnnnnnnnnnnnnnnnnnnnnnnnnnnnnnnnnnnnnnnnnnnnnnnnnnnnnnnnnnnnnnnaatgactgtaaggcagtatgtagccaaacaacttggcaaagtttgttatctttcctccaaaattctctcactctccaaccttccctctttcttgatagctcatccatagccttgagctcagcattacctctgaactaggaagctcttctccagctgacattaggatctttgcatttgtccctaatgaaatcaaaatatagggccattcgatattatcctcttttcctcctg

SEQ ID NO: 409246 - DNA, 568 bp, Homo Sapiens
agcaaggactggcattaaattctgcattaaacgtgaggcctgtttttacatttacacatacagatttcagtttgcgtagtgaaccgtgggaggctgtctcagtcgtgccttcctggggtcaaaccagttggcctgttttcaagaatgaaaaatgctttgcccgaaagtggggcgaatggtaatcacagacacacacgtctcggtgccagagttgtagctttatacatagtgccttcctgacaagtaaattactggattcctttgccaaatcattagataacttttaagagcaacaaacattcatgcaaaaggagattcagcattatcttgttagaaaaatagtcatgatttttgaaaagcaaggacattctgtgaagtttgaccaactgtgaaaattacagcctttcttccccgtacttcccccgtgcttttcaatcaatcagtttctaatggatgaagcattccctacatttgtcactagatggatgtgccggtcaattaaaatattctgacttcgcagggttgagataatagccagcctggatccatccgttactgtgaaatagaa

SEQ ID NO: 409247 - DNA, 562 bp, Homo Sapiens
ggggagagtcaatgctgcgccttcgactgaaacatccaggtactcacattgggactaaccaaggaaacaacttgacccagggagaatgaagaaaagaaaggcaaaatgacagcccacctgggagtaccacagagccagtggaacctccctcacccagggaagcagtgagtgaatgtgtgaccctggaaacccatgctttttccatggatctttgcaatccttgggttgggagatcttctcatgaacccactttaccagggccttcagtctgatggagctatgtggaatcttggcacagcagccactcaggcacacatggagacctgggagccttaggtacctgggctttcctgcagaagtagctgcaactctggcaaagtgggaggttagaccctcatacatattcctagggaagaggctgaattcagggagctgagcagcaacagcctgcaggctccacttccacagaacctcacaggataagagccactggcttggaattctagccagccaccagcaacactgttgagactccctgagatgaagctcctgagggaaggag

SEQ ID NO: 409248 - DNA, 445 bp, Homo Sapiens
ccctggtaaaatttgttcatattaatttaaaatcctgaattaaaaactaagacatgggtaattgtcctattggttattaaaagtgttttaatactttcattaaaaagactatgaagtattcacccatgaatatacaggtcagtgggatatgataaaactgagaaaacggcccacttatttatgcagttatagtatataataaaaacagccttctgtatctgtggggaaaaggtgagttaattattaatgatgtgggtaccattttagcagaatctgggggaaaaaacggatgtatactttaaaatttacatcataattaattccaaatagatgagttaaatataaacaatgaaactccaatagcagtaaaactatgggagaaagatgatgagagcactgaaaaacctctttccacctctcaagttcaggaaaaatatgtatgatt

SEQ ID NO: 409249 - DNA, 508 bp, Homo Sapiens
tagctaattatctggtttcttcattttctaactaggaaattgaatttcagaggagtggagggccttgcccaaggtttcatattcagtcagtgctttttccataaaggaccagagtgcctcagttaacatatcccagaagaacttgaaactgaactaaactaaaagattacatgacacagtcactcttaaaaatgtggatgagggaaagagtggtctgatgaactattctgccaagctagtataaagctaaagtgtgcctgtggctcaactttctgactttgcagatgtcaagatgccctgctagattggtgcattagggttacccagagcctcagagtaggctgcggcagggactgctcgggggtgcaagatgggcgacaggtgtgcctccagaggtgttgaatcccggcccacaggtggcagcagccttctattgtgtctgccctcacaggcagtagattctagaaacaagtgttctgtttgttctggagtgcttttatatttggtg

SEQ ID NO: 409250 - DNA, 565 bp, Homo Sapiens
taaagttaccaagtgaactggaattggaacatcaccctccccagcctgctaggtgatttacttaacacatagagtaataaaatcatcgctgttgctttagatcacggattattttgctaataatgctaaggatgaagctgtgatcttattatcacctgaatcgggaggtgtggacactttaagcagttccactttccttctaattccccatccccatgcctttgctaaagctgtcccttttgctctaacacccttcctggaccttcctaccctagctgggctaagtgtttctcctcagcgttcccacttgtttcaaacatagcacttaccacttgtactaaaattacttgccttcttaattagatatgaacaaccctccccaactccagtatgggccttctgtcaataataatacgatatgacagctaccatttattaagggcctcctgtatgaaagaccttaggctaagcatgttttaaatgttatttaatcttcacaatctctgaaaaaaatgaagaaatcaacgtgcttttcttactacctctacccctaagccattattac

SEQ ID NO: 409251 - DNA, 562 bp, Homo Sapiens
gtgggtgccgacattgggcactagagaagatgaaagtagtaagagatcataggctgaaactgttaaactcccaaagtacagggatatttaatgcacttgctgtcagctgcaccttgaacttcccattatgccaacagctgtgaagactgagcccccgtgaacccctgaagggccgtggcgggggtagacttgctttcgatgtttccaggggagcctctgctggaggtgaagacctacactcagatccttccaggcaccactgggcatggaaagatacttgttcagggtcagaggagtagccaccctctcccaagacaaaatccgtaagaccctgagaaaaggaggcaggagagaaacacaaatgcttcaaattcatttttaaaggctttttcaaggtcaaggctaggttgtgtcccagtcaagcacatgtaagtagacctcacgttgccttaagtagacctcacgttgccttatgatctggtgagcgtagaaggctctccattcactagctttgtaaaagaaacaaaatgtgctgtcttgactttctccttataatcctcac

SEQ ID NO: 409252 - DNA, 553 bp, Homo Sapiens
cttatagtataaagtcttgcaaaattccaagggaatgttgagagagaattcaggtcactgaagggtttcagtatttttttcattaacatagtaatcatacttagcatttatatactacttttcaatttagaagtgccttatgttacttttttaatcctcatactacattactacataaacatattgaatgactgaaaaattaatactaaatcaaatgtatgaggtataatgttcaaagtgtattccctaattaataccagggactacatgcatacatagttatatgtaaattagatactttggatttattttttcaccaaggaaccaaaacacaatacagaatagtattgtaaatagattaagatgattgggttgaaaatgtagatactgattttaggttgaccttaaaaaatatatatattcttattaaattatagcttttggagaatataaactttctgtgttcccaacaaaatggatagttttgctgccaggttaccctccctttgtttatcatgagtctttagaggtttaagtaaaacaaaagagagac

SEQ ID NO: 409253 - DNA, 358 bp, Homo Sapiens
ttcaaagaaaaagtaagatgtttaagacagtaaaaggctactagagtcaatgatttttccatctaaaataccttcaatcatataaaagatggacattttaaaataacaaagtcctagaaagaatctatgtataaagagtcgtaagaaaggagtgagataatatgtttgttaagttacaatttgaaatccaagtatccagtacataggtatatagccacaaatgctgggaaagtacttctcaggtctcacagctatgaaatgtagaactaaagatcctacagtctccttcaactttatcattttataagcctccaacagtactaataaaatcataacgtattaacatataattcaacac

SEQ ID NO: 409254 - DNA, 364 bp, Homo Sapiens
tatcatttaaatgggtcttatgcactacctaccacaaggtcattctataacttgtggcacttcagtctcaataacctctgccaataacagggctcaagtgataataagtttgcctgtgtgactctttctttcatgcaaatataaggcatttgtatgttacggcttaccttttccctgcaatacctggaaatcagagtcagtgagacactgtgtgttttagagttgggaaatctgaggccaaaaagaaaaataaattgtagaattcagtagatgtgtctgttcaagaggaggacccctcttctgaatttcctcatccagtaacacctctttgtggatcttctcatgagtccatatatgggcttat

SEQ ID NO: 409255 - DNA, 125 bp, Homo Sapiens
caaagacaaaacaattgtactaactgttgatgacaggtgtactttcttccagatgcctctacgcctataattacctatggctacgtgaacactcttcccctgcagtctgatcgttttttgttggt

SEQ ID NO: 409256 - DNA, 517 bp, Homo Sapiens
gtggaattcgtgtttgaactaaaatgagtattatttcttcttcatgtgaaagtttataatattacctaatttagtaataatctatttgaattttaagctcttcttaataaggaaagagataaaaagaaaatcaacacatctataagttaaaacctatatgttattacatatttgaaaagtatttattgtatacctacaattcaagattgaaggaattttcattagcacatttttgttatgccttacagattttacttaatccaatttcatgagtgacacgctgtctttaaaaaggatgtttagaagcctcatgatttatatattctttgtgatggcatttttcaaaatcttaaatggcagtgaaaaatgccttcccaaatgctttgtagttcgtgtttcacaagttctcttgttggctcaattttgaaatgtgcaacatctgtttgatagtttcactaattctacaaatagaaatctataaatactttagacttctaaatttatgaatacagtaaca

SEQ ID NO: 409257 - DNA, 454 bp, Homo Sapiens
atttagcatctattattcctggcagtgccttttaagattactagtcaagagaaaagattttcctcatttagcttagcattttgtgagctgccttggcacagttatagtaaaagcttcagtggctttttcagtatagtaaaagcttcactgtatataacaaactttgctggtacttggtataaggagtagataaagcccttcagcttgcttacagtggcttgccatcagtagcactgccttgcagatacccgtttgacctcatcttcctccactgacccagttttctacttccaacttttctaatacagcttgcaacctctggcataacttcagaccttggccattggtctcaactgtttgaaaacctaaagattactcacccatcacgcttagttttgcagcatggtagggggaatgggaagtaaattcttcttaaaaaatttttttatgttgg

SEQ ID NO: 409258 - DNA, 582 bp, Homo Sapiens
ttattaggcattcaggttccttctgtgaattttgtttctatttttcaccatttattctactaagctgtttgtcttttattgttgacttgtaggaatgttctgaatacaaccctttgcaagttgtatttattccagaactcccagcctggagcctgtctttgcactttaaactccccttccaccctcctggtcctccaaggtggggggcatacttgaggatcactccttactctctgctcaggccaccatgagtccctagactcaggctgcatttcccctacatttcccatctgggtgggactgtagggcaggcacatttcccagaggcagggcagggctgtagggcaggcatttgggatagaagctgcctctactcccaggatagagcccagattccccagtaagtctgcctgtgcccaaggcctgttccctcaggtttagagacctgctctcctggctgtggctggtggcagcacccaagccacctgtgttgtaggtgggcccattcgtgacctgtcagacaaccaaatgagcagtctatcccactgcccacttcctcatcgcagggctttgggggaagaa

SEQ ID NO: 409259 - DNA, 579 bp, Homo Sapiens
aagcgggtggttgtaggtcagctacttgatttagagcaggcctgcatgactgcatttttcaaacaataggctccagatgtcccagtagataacctcaagcagcacagcaccagggagtgattgtcctcagtataccttctggcagcagaagcagatgtgagtttgcccacattctgcattcatgataaacagttcactgtttatcatatagccttcagtggaaagctgagttggtcacaacctttgggccttgggctcccaacatctctccctttctgtttatgcattaattgaatgaatgtaaggccaggttgggcagctctcattttctgattggcggtccatctgattttacagactatgaacaaaaaacagagactaaacaacatcattccaataactatatatgagatgttaatatagtgctttagattggtccaaatattgaggctctctaggccttgcaggaattcactccagacttctaaggaaggctgaaactcttgagtttgcttatttaagtcaagaattttgttttgcagttcaccaatatcaaaggtcccgtggatgctcactttg

SEQ ID NO: 409260 - DNA, 586 bp, Homo Sapiens
  misc_feature (42)..(54): n is a, c, g, or t
  misc_feature (201)..(312): n is a, c, g, or t
agacaaggacactgaggctcagagaggtgaagtgactttacnnnnnnnnnnnnncagacagggtctcactgttgcccaggctgagtgcaatggcacgatcacagctcgttgcagcttcgacctcctgggctcaagcaatccttgcacctcagcctcccaagtagctgggacaacagacgtgcacctccatgcacatctggnnnnnnnnnnnnnnnnnnnnnnnnnnnnnnnnnnnnnnnnnnnnnnnnnnnnnnnnnnnnnnnnnnnnnnnnnnnnnnnnnnnnnnnnnnnnnnnnnnnnnnnnnnnnnnnnatatgccaccatacctggcctgacatgacttattacctcaaggttgccacagtaaaggagggaaaacaagatcctcagatgtgccaggtgctcctcctctagctcgctggcctgatacttgccatttcctgtgtcaggaacactctagttcctgctcatcccatcacagcacctacttatctcatggggctgaaattgccttgtctcgtctcccccactggactgtgagcaacaagccacatcaaggctctgctgtagcccagcacaaaacctg

SEQ ID NO: 409261 - DNA, 205 bp, Homo Sapiens
  misc_feature (109)..(146): n is a, c, g, or t
ctaatccatggatatgggacttgtatttgacccaagaaattaatagtactagcttccattgttgaagactttttctgatgtgttcttgagaatggttgtatgactagannnnnnnnnnnnnnnnnnnnnnnnnnnnnnnnnnnnnnacccacaaacactgaattatttgctttggggatgtgaggaaattatagattgttggttt

SEQ ID NO: 409262 - DNA, 599 bp, Homo Sapiens
  misc_feature (146)..(196): n is a, c, g, or t
tttttcaatttgttttcgtatttgatttgcttagggaaatttcaattttgtatttatttacagaaataatgcatagtctatagcagtaatttcagcaagctttttgtttaaattttagcctctgtagaatcaaaagcataaagaannnnnnnnnnnnnnnnnnnnnnnnnnnnnnnnnnnnnnnnnnnnnnnnnnnaatccaaaactttttgagtgccaacatgacagcacaaatggagaatttcacacctgacctcatgtgacaggtcagtcaaaacaaaggcacacaacagtttattaaaactactgtataaaattaccttcaagctatgtatatatgaaacatgaatgaatttcatgtttagacttcccatcccaaagatatctcattatgtatatgtaaatattccaaaatctgaaaaagttaaatctgaagcacttctgttcccacacatttcagataagggatactcaacctgtatctactttttaaaaataatattctgaaattcgatactgtttttcatcttccatgctatttttgctatcaagatatggttacatacagtggctggtccataatatattcctatataata

SEQ ID NO: 409263 - DNA, 604 bp, Homo Sapiens
  misc_feature (340)..(427): n is a, c, g, or t
cttgccagcagactgggaacatctcaggccctcgagcacagcaggtgcttaaatttgaggtcccagataacaaagccgtgggtctggtaccaggccctgtgggttagagcatgcagcccacgagtgctgagagagccttggccccctgaaataatccaaaaacaaagccagtcatctgaacacaacttataccatagtcaaaccttcaatggcatcaaataatgtaaaagtaaaaaactgcatccaaaggacagcagcttcaaagattaaaggaacatcagcccacacagatgagaaaaagccagtgcaagaacaatggcaactcaaaaacccagtgtcnnnnnnnnnnnnnnnnnnnnnnnnnnnnnnnnnnnnnnnnnnnnnnnnnnnnnnnnnnnnnnnnnnnnnnnnnnnnnnnnnnnnnnnntctggatagccatagagatcatcaagattcaggagaaagttgaaatgtaatccaaggaatccagtaaaatgagacaagagctgaaaaatgaaatagtcattttatgaaagaaccaaaattatctgatagagctgaaaaactcactagaaggatttcataatacaatgggaagtatta

SEQ ID NO: 409264 - DNA, 590 bp, Homo Sapiens
aaggaaaattatgcccagagtgactctgttctatggcctgggagggaaactggggtgaatgtcctaaattgttgtctttgaaaagaccgtttctaaaattcgtggcccaacgtagccttttactggttaactctaagtatttaagatgttctccaagcgttttaactgaagacactgcgtcttattttgtcttcattgaatttcgaagaagcatctgtagtaagaatatttacacggtttttctaggtaattgtttgtctcctggaccatagagtaccttaaatacgttacattatataatttactaatagtaatacaattttatgaagatatctagaggtaacaaattcaagattatgtatttctatctctggaataataattactgttttcatttgtaaaagagattgtaagggaaataaaatgtaaagttaaagctaaatgtcattgtattctatgcttgctgtaaggtcaaaatatgtgatcctgatggaatatggtaatatccctttgctctcctccgcacactgaggaaccttttcctgggactaatagaccccctaatgggatgcagacagtgcctcagagta

SEQ ID NO: 409265 - DNA, 681 bp, Homo Sapiens
cagaatgccaattacatgttttttactcctgaggagtaactttggttactttatattcattagaaaaaatacagtggaaaatttaactttagcaatgaaaatgcttaacatggtcaaatttttgttcactgatcttttttattgaatgggtaaagccaatgtttacactgcatatgataaatgttttgctttctttgatcaaatttacattcaaagagctattataagaaacattctataaaaattccaatatgttgttaaagtagattttgattgttatttatatcacatgtaggtctgttgcttaatctttgtcacgtaaattataaacatattttctgggtattgcttgtcttaaacagtcttgaaaatgtatctggctgaataattgcctgtcacaatatttaaatgcaagactaagtattcctctgcctgcgcaccccacccccatttaatgggataatagaacataaatgtcatttgtgcatttagttgattaaatgtcactcgtttatgattgtacaactggtctatacaatgtaatggtctctgtagtaaagtaacaatacatttttagtggcattatcagtgttggtaaaataaactcaccgttatattaactaaactgtgcaaacagaatttacttgtcatggtatattgttcagataactgcataaaaat

SEQ ID NO: 409266 - DNA, 462 bp, Homo Sapiens
gtgggtgctaatagtaggatgtgataacaaaagaggttctaactaactagaacctttcccgaaagatcaggaaaaggtaaaagagagccctatcaaaaccactgtccttggggctagagggagtagtcatggtgactgcacacgcccagactgtactctgaggagggacatcagagcctgcatacttcagggtaagtggacttaactgaaatcatccagccaagaaactaaacaagaagaaatgcgctggagggcagagggtaggggttggagggaaattactatccagagctgctgtgacacagtgtctaaaatatccagtcctcaacaacaaactacaagacatacagaagaacaggaaactaatccatacaaggagcgaaaaagcaatcaaaggaaactgagagggtcaataggttggaagcagataaaaacttcaaagcattattataagtgtgttcc

SEQ ID NO: 409267 - DNA, 576 bp, Homo Sapiens
gagagattgagagaaaaggtggatgtgaaagccaagcagctgcactttctcatttaggaaatcgcggaccgtttacatagcttatgcttacatgtctaatactactacggcgtctctgaaaacacctttgggggaaggtttggcttctctcgaagtctcagtgtttttcctcgccggatagggagctgcttgaatgcgaagagatggcatgatgtgaatgactccagtgtgaagaaatctgcttcgccaactcatcctgcatcaagtgcccattgagtagcactgtcactttaatgtctccatgccaaggggattgctttccttttttttcaatcctctcggttaatacatgggaagatcagaatcagaggggcattaaggatcaagcctgggggcttggagagcacagaagaaaaaaatgaaagggacagcaagctggattctgagttactgaggggaagactcagcctggatttcaaaactgaacactgaaagtgggttttgcaacagttacctggctcttggcctcaatcccagctgggatcaaactgagacctgaaaagaagattattgact

SEQ ID NO: 409268 - DNA, 461 bp, Homo Sapiens
cggacgcgtgggggagggctgggggctggagtaccctgaaccatagattcattgctgccatcatccttttggaagcttagctcggaaaaagaggagtgagatttattgcacttgtaggtctaattaggggggaaggggggcttctggcccgttcactggttccctctcttcttcacggagctggggccgcctcctccagagctgtggccttgttttcacccctctactttgaaaggaaagtttgtgactgaaccgtgctttcatagttgtgtcattttttttaaagcatgatactcgttttatttcttcatcaaactccaccctctgcttaaatactgcatacaaattacaatttacaacggcatttaccgatccttctgatttggccgtaatgcatagactgcagctagcatgagcttccacatcatttaatccctgtgttgtatgggtttgtttttttt

SEQ ID NO: 409269 - DNA, 668 bp, Homo Sapiens
  misc_feature (423)..(423): n is a, c, g, or t
ggtagataaaggtgaaaatatcacctcaatttttggtaaagctgcttgtagaacatagattaggtcggtggccaagcaaacaagaatgcatgctccttcaagcaagcagttagcaagaatgagaaaggaactcaatcgaatatgtccaatttcttcttccaagtttattggatctgataatgaggataagtgtcttaagtcagcttcttcctaaagtaggccctgagacaggatctgagttccagtggtttctttgggaggtgatttccagagcaccagtaatggagtagggaaatgaaacagggaagaaaggaatttatttaagccaatataaagtatattaatgagcaactggagctcagtcatcctgggaaccctaggaattgtgcagaacatgcctctgagttgaaaaaactggagtanccattcactaactgctatcagtcatggctaagggctcctcctaggaatgtcaactccctggaaattactaactctctagcttactctatgcccaggctgatcaagcttctggggccagagaatgcactctggcaggcagaaaattgcaaataattgccataaagaattgtccatgtgcacaggagcaggcagtgccaagtggttaccagtggagtatagatggtgatacatttgtcatgggacct

SEQ ID NO: 409270 - DNA, 289 bp, Homo Sapiens
  misc_feature (157)..(230): n is a, c, g, or t
tggagttctttaaagtagtgtttttatataatctgcctgacaggcaagacaggatggttgaaatttatactcccaaatatgacagagttcaacccagttctgctgtttcataacagtgtggtcttgaggaaatctgaagagattggcaacttggaannnnnnnnnnnnnnnnnnnnnnnnnnnnnnnnnnnnnnnnnnnnnnnnnnnnnnnnnnnnnnnnnnnnnnnnnnatagaatagcaatttcgtatggagctgcgcatatattcagtaagtggtcgaagtacaat

SEQ ID NO: 409271 - DNA, 359 bp, Homo Sapiens
ctagttctgcagagaatgtccagcctatcctgtgtcactctactcccaagggaagcctggctccacccttgatggctttcacttggcttggtgctagactactcttggacacatttttcccaagctgggatgagaacccaacctctattgatgtcactatagactctgatctgtgagtgtatttgtgaatgtgagggagatagaaaatcaccactgggcttcccttttccctgctcagctgacttctgcatccacatgccctctcctctattctcatgcattttgtgaggtggtttgtgaaagccaatgtgaagtctgaggtgtttaccattgctggaggggacgttgtgggtaacaga

SEQ ID NO: 409272 - DNA, 500 bp, Homo Sapiens
gagggcattatgattttaaacggatttgtgctttatgttgtacactagggttttttttaacccatttattggaatattagtatgtctagatttttttattagaaagaaactgaaaaacttttctgctttccctgttttgtatgtgttcattcatttttccagtgtttaaccaagatggactatattacctttcaaaacaatgcaaaatttgagcctgaagcaaagctcctcttattgccctctctttgtcgtcattggtcctcccataaaagtgtttattttgacttttgatacttaatttttcaggtgttactaaaataatctttacagtcttgtttatgtctgccaaatgacagtaaagcaaaaaaatcaattaattcataattttttaatgaaagatttctgtgtacaaattcagaagcatatagtatattttacaaaggttgaaatcatttaagtaaaattatttgtctggccgttctaaattccatatttttaaa

SEQ ID NO: 409273 - DNA, 549 bp, Homo Sapiens
  misc_feature (383)..(483): n is a, c, g, or t
agcagggctatcctctagtggccagtttgggaagcttggccaatctgtataaacagtccttacgtcttttacttttgatcgtcaccttcatgagagagacagagacagcaaaagtggaactaaagattccacgtggggcagtagtagtcaaatgaactagaaatggaggaggagggtacatttcttatatagcaatactctatccaacaggactttattcctttgactcttgacctaaatgtcccctaagtaatgacttcccaggccaccctatcaaaattttttacctccccacacctgatacttcctgtatttcctcccttatttaacttctatccttagcacttattactatctaacatgctatattttactcatgtatnnnnnnnnnnnnnnnnnnnnnnnnnnnnnnnnnnnnnnnnnnnnnnnnnnnnnnnnnnnnnnnnnnnnnnnnnnnnnnnnnnnnnnnnnnnnnnnnnnnnncacatcataaaccttcatgaatatttaattgacaaatgaattgtataattataataagtgcctatt

SEQ ID NO: 409274 - DNA, 775 bp, Homo Sapiens
  misc_feature (662)..(662): n is a, c, g, or t
attgtgtaacattgatgtgtgttacagcctaggtagtctcaaaataggaaattatcttgctggtttttccagctgggcaatttatatttatttagtcttccatttattccatttaaatgttaatttattttgccatttactgttcaaaggaaaaggagagctctattcagaagaccatatcagggatcctgtagcatttctcatatttctgtattttttgccactgtggttctttcttgtttctgtgccatgacccctttgaggaactgaagaatgctcattgtatatatgtttagaacaggacaagtaataacaaacttccaaatctcaatggcttaacaaaacagaggtttatttcttgttgacatcacagactactgtgaatcaggtgatcttcctcaatcttacagccgtgcctatcgaatatgaggttccaagattgtgatacaaagatacggcaggatgtctcaggggatgatttttaggatctaagcttagaagtagcttacatcacttctgctcaaattctgttagctaaaactcactgtcatcttcccaaatattatctgtgtgctcttgctatttcccagaaccctgttcatggagttctgctacattccatctttctaagtcaccaaacagctcttgggctcctttctttncccatgcataacacacttaagtctctctccttaagggagaaatccaaagtccccattccatcattgcaccccgggccccaaatccatgaatctccagaatgaatgttaaaata

SEQ ID NO: 409275 - DNA, 498 bp, Homo Sapiens
  misc_feature (138)..(163): n is a, c, g, or t
gggggaaatgtcaagttctgatcatctatagatgagataatgctgcaagaattctgcggttactaggctttgcataggcttaaagcagtgattctcaagggtgtgaaagggtaaatattagcatcacttaagggtggnnnnnnnnnnnnnnnnnnnnnnnnnnggtctgttttaaatacacataccctgttgccgcttgtaggagatataagactctcctgaggaaaagcttggtcaggtgtacctggagaaagctcccaggaggttctaataccttcccactgccacttttacctctttaagaatacaaagtacttcccagccgcttccatgtccccattcctttgacttcggctgaaaacagctactctttccttcaatcagctaatttgacgttttacttcccgaggaatcatttgtgtcctgtcagcctatggcatgagaactactcctgcacttttcttaacccctgcattcagaactaaaatcatacatttg

SEQ ID NO: 409276 - DNA, 505 bp, Homo Sapiens
  misc_feature (53)..(182): n is a, c, g, or t
  misc_feature (187)..(200): n is a, c, g, or t
  misc_feature (261)..(261): n is a, c, g, or t
  misc_feature (382)..(382): n is a, c, g, or t
atgtgtctttctgtgtctgacatttttcacttagcgtaatatcctccaggttnnnnnnnnnnnnnnnnnnnnnnnnnnnnnnnnnnnnnnnnnnnnnnnnnnnnnnnnnnnnnnnnnnnnnnnnnnnnnnnnnnnnnnnnnnnnnnnnnnnnnnnnnnnnnnnnnnnnnnnnnnnnnnnnnngtagnnnnnnnnnnnnnncatgtaaactggatctgtgggactaattgggtgatcaaaataaaagccagtggttttgctntttaaaagtatctcagtacttatttaataattggattaaacttctacttaggtttactgacccaggcatgaaaataggtaactaatgtgtcttactgactgattctgatccactgtgtggnggtctgatcacctgcccaaacctgatcttcaaatatgtgatcttgctgaatagaaaaccactgctctaggttagacaggaaaatggttcaaggaacacattttgtatatgcaattgcctactg

SEQ ID NO: 409277 - DNA, 137 bp, Homo Sapiens
taatcatctaatggaaccttaatagttttcagcagtgatgtctatatcaaggcctgctagactgacagcaagccttcattccccacagggatcttaccaagtgtggaaaaatggaatatgggaagcattcatgttaa

SEQ ID NO: 409278 - DNA, 588 bp, Homo Sapiens
gtaacgatgcagccaacatgctcagcctttgtgcatgaaatcctaggtgagcagagaaacgagctggggatcttcttgcaggctcacaactgggccccaccctcttttaggcagggggaggttttagccctaacaccagccccagagggccttgctgaggccttcatggtcagctcgctggcttggggtggtctgattaaatgccaggcgaaggctgtgtgggcctcgagacggagggagggaagagggcgtgcactggagacagcatctgaccaagtgaatgtgtttgtccctttgttattccggaaccgctcaggtggacctgacttgttttgtcgctttctttggggaaagccagatgtttgagttgttttgtattgttttccttcaagttcgagttgattatctctaatcacatacttgcaagcaaacgctctttaatagaggcctattaatatgctttctattttttgctgtgctcagttttatagatttccccaagtaaggttcattttttccatttaaggaaaggaaacaaagacagagcttcctaattatcctcagtaattattttcaataatatccttg

SEQ ID NO: 409279 - DNA, 138 bp, Homo Sapiens
gagccactctgactgatgtgagatgataactcattgggattttgatttgcatttctctgataattagtgatgttgagcctctttttccatgtttgttggctgcttgtatgtcttcttttgagaagtgtctgttcatgt

SEQ ID NO: 409280 - DNA, 119 bp, Homo Sapiens
gcactgtctcagctgcactaatgacatatagctattaaaatctattaattaaaacaaaattcatttccactgtcacattagctacattttaaatgttcaatagccacatgtggctactg

SEQ ID NO: 409281 - DNA, 485 bp, Homo Sapiens
gttgaagcaagttttcagacaaaagggagataatgagtttattgatatgttgaacaatgtgcgtgttgggaacttgaattatgaaaccattgaagcgttccaaaaattggatcgacaaatcaactacactgacggaatagaaccaacacagttgtacccaactttaaaagaagttctgatggcgaatcaagcaaaattaaacagtttaccagggaaagtatacactttccaagccaaagatccagaaaacccttttctcgtcagtatgcttgataataatcttatggtggataaagttcttcatttaaaaacgggggcccaagtcatgtgtgtcaaaaatttcactgatgaattggtcaatggtaccttaggtaccgttttatttatggctacccgtaaactttatatgaagtttttggaacaatatgtgtatattgatgcggaagaccaggcggcgcttgctgaaatgaggttcgtatgtaata

SEQ ID NO: 409282 - DNA, 370 bp, Homo Sapiens
  misc_feature (235)..(260): n is a, c, g, or t
agctactataaaacacatttaaaaaatagttgataaaaatatttctctggattgtgcaagaagggagactaggaccacggataagacagagtatttgatattaatcaaactaggcttctttctctcttgctgcgttggaggctgaaccctcctcgtttgtcgtttctccattttctgcaggtaaatcttagtttcttggttagctactttgtcctgttttccctttgctaccagnnnnnnnnnnnnnnnnnnnnnnnnnntctgaagatttatcctttcctgctgtcttttttggcttcgtttccccctttgcaggagcaagtttaggtgacaaccttgtggatagagatggaatctcactgtgttgatt

SEQ ID NO: 409283 - DNA, 573 bp, Homo Sapiens
gaagaattcaagttcacgagggactgagcaatatcagagtcataaaattcagaggcaaagagacccacctgtctcttccctgcttaagacttcgtgttgaagctgctggcatcttccttggggaaattgccctcaggaaagggataaagttaagcctttgtttatatcacccaaacatttagaggctttaaaaagatggtaaagtttatttattagcctgtttatgataattggccaaaatagttggaatactatttgctcaaatgattttatgatagattttaagatgtctgcgattttattttgcatggatgatagctgggacagcagacacccatcaaagcgttactaataaaaatgaataaaaataggtctcttgatgtttgacattttctattaaagaagactttcaaggaaaagatcatcataaactttcagaggccaggagaggggagcctaacctttctttagtgtgtaccacgtgtcacatactctatacgtgatttttcagtcccaacagtgcttgcttttctgatgttacaaatgagaacacaggttgaggcaggtcacggt

SEQ ID NO: 409284 - DNA, 138 bp, Homo Sapiens
gaaagttgcttatgaaaggacttaaatgtaagtgtagacacactgtctgactcattttctccccattgattttcaccataatttcagagaatttaccacagaaaaacatttgttcccaacacgtaataaaaatcactc

SEQ ID NO: 409285 - DNA, 494 bp, Homo Sapiens
gctggccatggttttctctgggactaatgggtgtttaagcccacctcttgtccttgcagggtgccttgtgggttttttgctggggatctctggggatttatctctgcaattccctggtccaagagatgtctctcttccaataagccatttcaggcacctctctttccctgagccccacacccctcttttgtttccctctccctcctcctacagcctggaggtgaggtcattgagggatttcaaacctgcttctcagacaccccttgtgcatgtcctgcttagaggcctaactccttgagtggcgtgtgggagagggtgggaatagttgccatctattgcctggagccctcaaacgacactgagaaagagcccgcttttaataccctgcaagatgttacaaggaagtatggctcaagatggaggttaggacagatatttacaatgtcagccttggattgtttctgtttccttcatgtaagtggtatttcgccttt

SEQ ID NO: 409286 - DNA, 544 bp, Homo Sapiens
  misc_feature (128)..(432): n is a, c, g, or t
ggggcatatgacctgtagagtttgtttcccaacttcttcaacagataacttgaaagaaaggggtggagggggaacccatagatttaaaaagatatcaaaacatttttaaataggcaaggctaacctcnnnnnnnnnnnnnnnnnnnnnnnnnnnnnnnnnnnnnnnnnnnnnnnnnnnnnnnnnnnnnnnnnnnnnnnnnnnnnnnnnnnnnnnnnnnnnnnnnnnnnnnnnnnnnnnnnnnnnnnnnnnnnnnnnnnnnnnnnnnnnnnnnnnnnnnnnnnnnnnnnnnnnnnnnnnnnnnnnnnnnnnnnnnnnnnnnnnnnnnnnnnnnnnnnnnnnnnnnnnnnnnnnnnnnnnnnnnnnnnnnnnnnnnnnnnnnnnnnnnnnnnnnnnnnnnnnnnnnnnnnnnnnnnnnnnnnnnnnnnnnnnnnagactcctgagctgttagaagagatcagatccccacacatttcattcatagtaatgagactatttctcatgagcaaagtcagagtagccaggaaaatgctgctttacctcac

SEQ ID NO: 409287 - DNA, 253 bp, Homo Sapiens
gtcacaaagaaggaagtcatgcctttgtggaactattcagcagtaaacagcaaaatgcatgtgcatgtgagagatgagggatgagttccttaagccatgggctggtgaatatgtaagcaaatttaaataacttgccgacaagctcctttctccaaaaatgtatttccctggcagcaattgttgggtccctctcttcttttcaatagccagatctagaataggtttcctttagtaacttgtttccctatttggt

SEQ ID NO: 409288 - DNA, 573 bp, Homo Sapiens
  misc_feature (196)..(492): n is a, c, g, or t
tgcaattttaccatgtacttatggccaagcactacatagtcaacagacctcattaagttgtcaaaaagcattctcaggctgaggacgttaggcaacctggctttagttggcagaggtgcgtggacactgccaaggctcctatttctggttccagtggatgaggtggaggaggattatttgtaataatagcaaacannnnnnnnnnnnnnnnnnnnnnnnnnnnnnnnnnnnnnnnnnnnnnnnnnnnnnnnnnnnnnnnnnnnnnnnnnnnnnnnnnnnnnnnnnnnnnnnnnnnnnnnnnnnnnnnnnnnnnnnnnnnnnnnnnnnnnnnnnnnnnnnnnnnnnnnnnnnnnnnnnnnnnnnnnnnnnnnnnnnnnnnnnnnnnnnnnnnnnnnnnnnnnnnnnnnnnnnnnnnnnnnnnnnnnnnnnnnnnnnnnnnnnnnnnnnnnnnnnnnnnnnnnnnnnnnnnnnnnnnnnnnnnnnnnnnnnnnnagcaaacacacattgagttctaaccaggtgccaggcagtatactgagggcttaaatgcagcatcatgtctgtttctcacag

SEQ ID NO: 409289 - DNA, 601 bp, Homo Sapiens
tgttgttagatgtgagatgggtatcttgaagatagcagatggttgggtcttgtctttttatccaccttgacactccatgtcttttaagagggacgtttagccatttatactcaggattagtattgatatgtgagattttgatcctgtcattatgttgttggttgttgtatagacttgactgtatagttgctttgtagtgtctgtgggctatgtgcttaagtgtatttttgtggtagtaggtgtcattcttctgattccatgtttagtactcccttaaggacctctttcttgtaaggctggtgtagttgaagcaaattccctcagtatttgcttgtctgagaaggattttatttctctttcacttatgaatgttgggctggtaggatatgaaattcttagttgtaatatcttttctttaaggttgcctaaaagaggcccccaatctcttctggtttgcaaggtttctgccaagaagtctgctgctagcctgatgggagttccttctgtacatgacctgacccttctctctagctgcctttaagattttttcttttgcgttgactttggtgaatttgatgacgatgtgccttggcgcaggcaa

SEQ ID NO: 409290 - DNA, 605 bp, Homo Sapiens
gcactatctatgccatatgcttttgtgagactatcaaggcctgcatgcaaaaaaacccagtgcagagttggtggtcaattagctggagtgctttattatttttaataatcagccatgcttagtgggagtctctgaatctgtagttatgactgtagtaaatgggacacaaagggagcagctggacataccggcaagtattataatgtgcagacaacctgcaaatatgaaccttcttttcaaataagaatctcagtgctgtcactatttgttttaggaagtgctggttttaactgaatgaggaagttaaacgcatgttctgttttttgttttcattgcgcccacatgggttgactatgggttcggttttctctccagattgaacacttagtacttaatgggggaaccaccttggaaaagcagaactgatttgaggtggcttcatccctctcttctcccaccagaaagagatgggagcttccacttcaacctggggtgaagacagagaacaaggtgtcccagcattttgcacagaaccaaagccctggaaattctggtggaagctagacattcagagtcatcaagctaacagtcacttcctgctatgt

SEQ ID NO: 409291 - DNA, 620 bp, Homo Sapiens
  misc_feature (118)..(127): n is a, c, g, or t
ccttcataactaaaaatatgcttggcgagaatagaaattcatctcccaatttcacaagccaggtgctccttgaccatgagagagctgaaaggaatgtgaatgtaaatcttctgttccnnnnnnnnnnaatgtatagatcatgtatacaataaggtagattatcaaacatgtacagcagaaggctcatttcagatcagaagttctacattcagtgagggtggtagaaatgaaaacattttattcattttgcatgttgcctatattttctaattttaaaaatacacatattgcttctttctgtattaataaaagcttattttaaatgaccgtactaatacagtttgtactgtggttaaaatatacatgaccttgaccatgagagagctaaatcttctgttccaaccgcctcattttgcagaggacaatgtcaaggctctggcctgtggaatctgatggctctgcctgaggggaggggtgttgacaacacacaagacagttggagttgtgtagccttcagaaagccctgtgtgctcatggcctgagttttcttagctaaagtttttgaagttgaaaaaacagccacaagccaaggtcacaagtagagagaggttttttttggt

SEQ ID NO: 409292 - DNA, 601 bp, Homo Sapiens
ttcttatattggcaaattgtatgtccttgaagtttagtataggaatgatcccatcacccaggtagtgagcatagtacctaataggtaattttagaaccctcaccccactcccgacctccctcctagtagtactcagtgcattttgtttccatcttcatgtctgtgtatacacaatgtttaggtttagctctcacttataagtgaagacatactgtatttgatttcctgttcctgtgttgggttacttaggacaatggcttccagctgcatccattttgctgcaaaggatattaatttctttttttaaggctgcatggtattccatagtacatgtgtaccacatttttttaatccaatccactgttgatggacactagagttgattgcatgtctttgctattgtgaatagtgctgcagtgaacttacaagtgtatttgtctttttggtagaatattctatttttctttgagtatatacccagtaatgggattgctaggtcaaatggtagttctgttttaagttctttgagaaactccaaactgcttttcacagtggctgaactaatttgcattcccttttctcttccacctcaccaacatct

SEQ ID NO: 409293 - DNA, 614 bp, Homo Sapiens
gtttaattgcattgcctcttttaacctcttgctgattaaatagtgggaaacgtagaaataattgtcagatttttaggagaaaacaggttgagaagtgcacttgcttattgaaggatgctttcccttttcactgaaattacctggacttttgtatgcaattgctttgtgccttccattatttttaatttcggcttacaattagagcttgcaaattgaattgctttctctgaggagctgtgatttctctatttggcaagtgcaggcatcccccgtcacaaatccccacttgctcagctgaaattaacatggttgattttgttctcttgtactgcaatcgggtctgatcagtagaatcatgatctcacttagtaattgcttccacagagtctgtagggagagcggatatgagtggtgctctgcctgatgaggagaatggaggttctccaggggagtacaagggagctttaggcaatgatcttggggattatagagagctgtccctctttacttgcactcagaagtcttgtggtatttaccaaagccattaagggccctgatgttggaagtgtcctctttggaatcaggataaattcaaagatgtggttagctgttat

SEQ ID NO: 409294 - DNA, 691 bp, Homo Sapiens
agagaatccagataaacctaaaggagaaaatcaaaattgttaggaacccacctgtcatagagaaccactgttaaccgtttggtatccagccttccagatggctttatatgcatgtatatttcccaaaatatgtgtgtattttttaatggatatttaactaggccacggtgggagttcacctgaacatactgtggtttacaaagagttcccatggatgttggctccttcttgtgatgccaagaaaacggtgtgggattgttgacccactttacagagggggaaacaggggccccagagtgggtagggacttttttgtgtcacccagcttgttgatggtacaactgtaagtgggaggtgggacatggggccagctgaggactcctgggggagccacaagcctgtgagaggcatgtctgggggcacagttcccttccaccaggtctctagaacccttgagtgccccgagggagtggtatccccctgactcatagcacaatcccccaccctccctgacaacctctgcccccacccaggccagccaccctggctaaaaatagcccagggccaagacctcctccgtccctgctgctccagcccttggaaatggactgggtgggaggaaaagtcaacacagcctgggccccaaaatagactgtcacccagactccgcggtttggggcctcagcatcca

SEQ ID NO: 409295 - DNA, 466 bp, Homo Sapiens
ccgtggtgactctttttattactatagcaatgcctagtttaattgacaccaaccaaaatgagtgtcggttatatgggtggtaatgaaagggagtgcaattaactggcaaggtcagaagtagggtaagttaattcaatcttctggttaataggtgccatgtggaatctacctatgttctagggattgttattttcagtaataataattgcaattaagtcctcaactttaccattgaactgaatatgttgttgtccccagtcatatcaaatggtgaagaaacatctctaaagagccaggaaaaactactgacataactgtgtggtcactaattaaaggcaaagatattgattaatggaataatgaaaatgtctgatatataactggatactttatgtgtggaaacaacactgagatctctgcagcaaagttttggtgcagaaagcttgtattagggatttccagagtt

SEQ ID NO: 409296 - DNA, 529 bp, Homo Sapiens
aagcaaatacccacctcttactcaggacaccccagtcagtggatgccttctctggcccctctcccgtcctgttcttggaaaagcagcctactttctctgtcctgatcatgcaacaagttgctctgaaatgaaccagcagcttgtggtgggaataaaagcccaggaaaaggaatgcagaaggaaagtgatggaacggcatgaaacccaaagcaattgataaaaatgagcaccacatggagaatgtggaaaggagaggcaagcataaaaatcacaaccacatctgacatctctagaaatggagagagacaaatgaaatctcacatgtggctttcctcaagtcagaaagattccgcttctccattcaggggcgggatgaaggagcctctttggaagccgtgggcctttctcaagttgttctaccacgcctttcatttctcccgcttcagccagtaagttcaagtgcttagagaaatgcttagcctctagcaccttctccaggcacaaaataatgggttgaccaaattgataa

SEQ ID NO: 409297 - DNA, 602 bp, Homo Sapiens
agaaaaagcttgaagattcacagtggagcaaggctaattggagccttcctcagagcagctcaactatcccagttttacctatcccattccttgccattcccacttgtaattctgtcttggcaagaacaccatactgaaggttcttaaagcagtttgtagactttaattagttctgtggcccgtcagtcaaagctcagccttcattctgccaacagagacaacagtggtgggtgtggaaggaaggcaagaagaagatggacacccagagcagttgtgcaacttactgaaggccatgtggataggaggaactgggtttaaaacccctgagtcttgataaaagtgtcttagccttctagattcctaaacaggtagtgggctcatcctactaacctactttgctagggtgttgttgatgaatgcttataaaccctgtcctagatgataggtttggaagattgttaaagaaagcatgtcattaagtccctactcaccccctccttgacaaatagccctggagggaaatgaatattagccagaatcgtagggcctccacttcaatggaatgaactgagattcaacaacaagagaaatgttccaacagt

SEQ ID NO: 409298 - DNA, 592 bp, Homo Sapiens
aagaaagctttgaattttgttcagagaagatttgtgttaatccatctaagtggaattcaggggtattagaagtttgttttgtcagtgcccaagaatatcatatttgtattttgttcatagcattttgaggtcaccaagagttttaagatgatgtcttttgttgtagacaagtttcggaatcagaccagtatggaggatgcaatcttattgtgtctttgaataagtacccaggctagtatggggacttgtgtaacacagaaagaacatctgcaaccttccccttgttgccacactttaatttgcagttaggctttgcaggatgtgttgctgtattctcttttcccagccatcattctgtctacctgcaagggtcttttgtgtaatattagtgtcatttaaatctgtttcagaatagatttgattctgaatcacttacttctataatattttaacctttagttgggaaatgaactttcatcagaaagataaaaatggattgattaaggaaatttgaaaaacaatatgtttttgagagtgtcatggtgtataggatatagttcatagacttggctttgagtttttaggagttaat

SEQ ID NO: 409299 - DNA, 222 bp, Homo Sapiens
cggtaacacaggggcaaagttggtttggtcagctttgaagcatgcaaaaccaaactcgcctgtcatctaaactgacgcagtgtggggccaccttctcctattaagtgcagtcctcaggggatagatggatatcctcatttgttaaaagttatatataatgcttttgcaaaaagcagtttttaaaatgatgtgtctgtcttgagtgttaaattacttgtttta

SEQ ID NO: 409300 - DNA, 381 bp, Homo Sapiens
attgtccttctagcctttttcatctctaaaactgttagccaagggtttactaattgatccataaaacttaagaaatgatattaaatatccccagttaaacatgaagataaaaggctaggtactttaaaatttgtccaaggccgcagagacaggattaaaacttgggagctccttatactgaacattagagtattgccactgaccaaaatcctacagtttcaaatcagatagctgtgtgtagaaaaagagcaatgaatatggggacagaaaatgttgtttctagttcaggctgagtaaaataagtttcttcacctgtgttctgtaccccatcaccttctattttctcaggaaacatatgttatcaataatatctaatatatt

SEQ ID NO: 409301 - DNA, 210 bp, Homo Sapiens
tttctttgttgactctccatcttgatgacctatctagtgatgtcagtggagtatcgaagtcccccactgttattgtgttgtgtctatgtcatttcttaggtctagtagtaattattttataaatctgggagctccagtgttaggtacatatatatttaggattgtgaaattttcctgttgggcaaatcgttttatcattatataatgtcc

SEQ ID NO: 409302 - DNA, 211 bp, Homo Sapiens
  misc_feature (166)..(166): n is a, c, g, or t
ttcactgatcttttgtatggatttttgcatctcaagttcattcaattctgctctgattttggttatttctttccttctgttagttttggggttagtttgttcttgtttttctagttcccctaggtgtgatgttagattgctaatttgagatctttataactttttnagatagatgtttatcactacaaactctactcttattactgctttt

SEQ ID NO: 409303 - DNA, 660 bp, Homo Sapiens
ttttatatccctcctaataaactgaaatgctgggtttcatctaggaaatctcatgccctgcaagttttttcatataactataaaatatcagaatgtggtaattttttatgtgctgatttcatgaatctcattagaaaatcctgttacttttttgagattgaaattttacactgctacctttgttacagaagatgattttttaaaatgcgtttttgattatcatgtagaactacagaaatagtgatgaatagagacatctgccagcacacatacagattgataatgactttatttgtactttggcctaatgtgtatcctgacagatcatcaaaacaagaaaagaaagagctcagcagacagtaagaaatggccagatgctcacagaatgatgaaaagtcattgtctcttatcttttaatgttcaaattatgcaaagaagacacttttattataaattttaaaaggaatctaacttatcaaacttaactgctacttcagggatatgccaaacattctggtctcgaaatgtttggttctcttcatcttctgtgttcatcctctcctttttcactatcagcctttctgcaaactagatgttatctctacctgggaaccttgaagatctcaagggctcccaaaccattttgtaactgtttcccta

SEQ ID NO: 409304 - DNA, 513 bp, Homo Sapiens
  misc_feature (65)..(65): n is a, c, g, or t
  misc_feature (67)..(67): n is a, c, g, or t
  misc_feature (120)..(456): n is a, c, g, or t
atgttcaatagaaaagcatcatttaaaaattaatgtagtatatttttcctatagagaaataattnanaacagtaaacacttaaaaaatagtcaaataacaaaaaatgcttttcataggtnnnnnnnnnnnnnnnnnnnnnnnnnnnnnnnnnnnnnnnnnnnnnnnnnnnnnnnnnnnnnnnnnnnnnnnnnnnnnnnnnnnnnnnnnnnnnnnnnnnnnnnnnnnnnnnnnnnnnnnnnnnnnnnnnnnnnnnnnnnnnnnnnnnnnnnnnnnnnnnnnnnnnnnnnnnnnnnnnnnnnnnnnnnnnnnnnnnnnnnnnnnnnnnnnnnnnnnnnnnnnnnnnnnnnnnnnnnnnnnnnnnnnnnnnnnnnnnnnnnnnnnnnnnnnnnnnnnnnnnnnnnnnnnnnnnnnnnnnnnnnnnnnnnnnnnnnnnnnnnnnnnnnnnnnnnnnnnnncaagtatattgttgtcaggtaagtgtaggaggaggaaagaagaatgcaactagaagg

SEQ ID NO: 409305 - DNA, 204 bp, Homo Sapiens
ggtttgaattggagcgtgttaagtgtagtgtcttcttcaccactgtgacgtgaggtcctggcgcaaataattgagcacagaaatacatgtcaggcattgctaggcacaagggtacagccagtgagcagggctgccatggtccctgccctcttagagctgaccttcaggtctgagggagactgaaaaataagtaagaatacctcc

SEQ ID NO: 409306 - DNA, 319 bp, Homo Sapiens
cggacgcttgggggaagcaggtggattctccttcctgtccttgaggaggtgaggggtccggggctggctttcccagacaggattcccagatgatttccattactcctgactttggcactgcatcattctctgtgggaggctgtcctttgtactataggatgctcagaggccaccctagcctcttcccgatggatgtcagtgacacctccagccccacagttgtaacacctcggaacgtctccagacattgctaaacatactgggatcaggggcagaattgtcctgggttggcagtgatggctgtagagtagaggttgcc

SEQ ID NO: 409307 - DNA, 271 bp, Homo Sapiens
ggaggagatgctaagtttatcagggatgagggtaaagaggaggtcttagcagaaggcaccagaggtccatgggtgtgtctggggtctatagggggctgatgtggaacacctaggccaatgtgggggtacctgagctgatgagagtcctggactgatgggtggctgtttctggaagatgaagagggcctgggatgatgtgaaggggactgaggtctacatggctggtgaggaggatctgggcccccccatgggcaatgctgtggtggccctg

SEQ ID NO: 409308 - DNA, 214 bp, Homo Sapiens
  misc_feature (160)..(160): n is a, c, g, or t
  misc_feature (166)..(166): n is a, c, g, or t
  misc_feature (169)..(169): n is a, c, g, or t
aattcaaaagtgtagcccaggttaagaacccctattaatgataaacagaaattgacccatgtccgctaaaaaatgtattaagtaggtttcttgtagagcaatatcaatgagaaaaacttttaatattcacaaccagtatatgagtttcttcttacacatncaggcnccnacctttgagaagccttcaccccaaatcaaaattggaaatgttaca

SEQ ID NO: 409309 - DNA, 489 bp, Homo Sapiens
  misc_feature (78)..(128): n is a, c, g, or t
tgaagttggaggaatcacaccaccgtgcccggcccttttatgtgctttttaaaagtacgctatgtatttcagtttttnnnnnnnnnnnnnnnnnnnnnnnnnnnnnnnnnnnnnnnnnnnnnnnnnnngttcttctctaggttttttctgtaaattttacatctctaggtgggggtagtaggggaagagaagcaggttttttttacagctgatgtgatcactgtacagacaagcttggaaaatgctacccaatctgccaattaattaaagcgttaatctgaggagcagccgggcccagggaatgtttacccagggaggagtgggggtggtaggaactgagtaggcagctccctatatttgcatgaaaatgaaggtgcttaggaaaccctgcttccttttgtctctaaaggtggggcagcctagatcacatccctaaacacttttggtctcttttaggaagccttttagggagctggtctctgaaagatg

SEQ ID NO: 409310 - DNA, 259 bp, Homo Sapiens
ggctcttttctttaggaacactaattatatgtatttgattatctttctttagttactggttttctctgtaatcacatttgtattcatttcattttttattatttctccaggcctcattgtgaccttgtagtgattatttttgttgttccttatgtgaatttcatctacataatgctttttatttgcccttccatttctttcctcagcattgtcaaatcacttctcactactttttattgttttctaatctaatttgttt

SEQ ID NO: 409311 - DNA, 352 bp, Homo Sapiens
gagattcttgtttttaacagaaaatatcaggaagaaagcaaacgcagccccgagtgcccccaggaggtgcacagccatgtaaccggaggggccagaccttcaggcacgtgggacctcagcgtgtggagccacctgaacagaagatgaccatcatttaagggctttttaaaaaatcactgttaacagacctccaggtgattctactgaaatgcacagtcatgcagagcccaggaggcaaatgtttgtacactgatctttttcatgaggatgggtccaagggcctgtaatcccgtccaacaggtatggtccttttgagctcttggcacactttgtttatttcttcttctttttc

SEQ ID NO: 409312 - DNA, 499 bp, Homo Sapiens
  misc_feature (189)..(336): n is a, c, g, or t
tattggttatttcatgtaagaaaaattccagcagcatggtagagatttggctgtgttcaagcgggctccaggtctctgcctttgcccatgcatcattgtcttcacactggctttttcatgtcgataaaatggcagtggtagctctaggccttatatgtgaacacagcatcatataaagcagcactatcnnnnnnnnnnnnnnnnnnnnnnnnnnnnnnnnnnnnnnnnnnnnnnnnnnnnnnnnnnnnnnnnnnnnnnnnnnnnnnnnnnnnnnnnnnnnnnnnnnnnnnnnnnnnnnnnnnnnnnnnnnnnnnnnnnnnnnnnnnnnnnnnnnnnttgagcatctatctaaagtatcagagatcagttgtgtcccagaatccacagcagatgttctaaaattaattctaattgtactgtttaaatcgcttgcctctccatctcccactctgaaaacactaaacacagtggtagagaaaggatagaatatcctgattgg

SEQ ID NO: 409313 - DNA, 290 bp, Homo Sapiens
tttttgttttcttatacactttctgaaaagccaaattattaacagtgactatcttagacaaaatatttagggacattaatttactaaatcaataaaacctttacattaagaagttttagtcaagctaactagtgagatatatcttacacagaacagcattaggcatgcatgagcagcaaaaccaaacaaagcttatttgctattaatgaaagattatattatttttacaaatgttaaggatagaaagcttcaatgagactgaattggtagaaaccatttaggggagtgct

SEQ ID NO: 409314 - DNA, 339 bp, Homo Sapiens
gggaattctgtgtctgaaaggtcacatatctccattgctccgatttgcccctggtgccttatttagttcttttgatgaggttatgttttcttcaatggtcttgatgctagtggatatttgtgattatctaggcattgaagaattagatatttattgtaggcttcacagtctgggcttgtttgtactcatccttcttgagaaggctatccaagtattcaaacctacttagttgttattatctaggtttttggtccctacagctgtatctgcattagagggcaccccaagactagtaatgctgtagttcttggacacttatagagataccagcttggtggt

SEQ ID NO: 409315 - DNA, 184 bp, Homo Sapiens
aggtaataaaagatgtacttatttgatgtaaggaatatggctgtgtttttgtttcacagctaagtataaagcctcatgttcatgctttttgtctactcagttttaatacgaagtgtgatcagaatatcagttattaactggtgtagaatcttttgtacttaagagacagactttgcataaatta

SEQ ID NO: 409316 - DNA, 449 bp, Homo Sapiens
ggatggtgaaagtatgaatggaaacatggagattaggaagaaacagaggtagggaagaatatctctatggtagaataaaaccaggcctttttcttactgctcagagtaattctgaaggccaaaactgagaaggccagtaacaaaaatgaagtgacaatggcccagagagagaactcaagagggttactctactcagcaaagaaaggcagcccttagaatgcccctgagcgaatggatggagccacattacgtaactcactcacttctctgcctttcatctttgtcaatggccataaacccgcaatttcactaaacgcaattcccatttcagagagtctttaaagcaagcggcactgcctcacaaacccatgaaaataggtccttttcactctcttatcttgaatctcaaaaaaacatactcttgctatgaacagatatggacttctttg

SEQ ID NO: 409317 - DNA, 566 bp, Homo Sapiens
  misc_feature (65)..(105): n is a, c, g, or t
ctcaaatagctaataatcctgctatgaaagcaaaggtgcctttagaaatatatacaagtgtctgnnnnnnnnnnnnnnnnnnnnnnnnnnnnnnnnnnnnnnnnnaacaacttaggctgaaagaatcattacaaattcactgataacaatatggagcttaactttgggaaatctattcatttcgccgtaaagccttcatcttataggtatgggaacttcttggttggtatctcttgagggtacctggctaatgtgaacagactgcccagcgtcaccttgacattatagtattggctttctaccagtccccctaagacagcagtgtgtccagcaccacgattcctctaaatacgtcattaaaggaaatcattcagactgaccagtgcacgtatatcacatttacattgcaaaacagtccatactactctccaattgtaaaacagattgtataacctacgataattcaaaacatgctataagaaaccactcatttctcagtaatttgctaattattttgagctacttataagcctgagatcactaatattacttaaagatgccctcca

SEQ ID NO: 409318 - DNA, 509 bp, Homo Sapiens
gttacaagaaatgcatctcttaaataagttatctctgttggtgtcctaaggtttattacacctttctacctcagcagggcagcacaatgtagtaagatttaggatgtgccaggggggagaggagccattatgaaatgccaggtgggcctggactgcaggagtcctcagacagatcacttttagaagagttgggatctgaaaactgaatcccttgaaactcctcatgaccacgtgtccatattctcagggatacgcatgcctccatttgaagattgtttttacagaaataattggggtaaggaaaggagacaaggatgctagggattgagtctggaaagataggcaagaaccagatgacagcagggtcttgggggacacataaggattttagaatttatcccaaaggacagggaagctactgagattttaaggagaggagtgacatgcttatatttgatctttttaaaagttgttcaggcattgtggagagtatattttaaacagtttgg

SEQ ID NO: 409319 - DNA, 200 bp, Homo Sapiens
ggggcttctgactgtggaattggattctagctgtgtgtgttatatcctgttactgttgagacacagaggcgggagtcggcgggggaagatatgtgctgagattagtcagcctgccctccctctcccccaagaaactcaggccccatctggggagagtgagaacttaagaaacttgagacagggaaggagagccgagagca

SEQ ID NO: 409320 - DNA, 289 bp, Homo Sapiens
ggggcccctttaagaatctgataagaattacgcattttctttatcccagaatagacatacataaaaataatgcatactaagttcctggtattcatagactttccctaaatccattaatcacaaattaacaactcctgctgttaaagatactacaggctcttgaaaatttccctcttagttctggtctgaatcactaacagtgggttaattttcaacccattgattataagcatgagccagtgaattttcaaaaattaaatgaatattcataattacaaaagaaatcaca

SEQ ID NO: 409321 - DNA, 292 bp, Homo Sapiens
  misc_feature (61)..(128): n is a, c, g, or t
  misc_feature (161)..(224): n is a, c, g, or t
ggaggctgacgctgtggttgttacctggagggtctgggcttataaccccccactgcccgcnnnnnnnnnnnnnnnnnnnnnnnnnnnnnnnnnnnnnnnnnnnnnnnnnnnnnnnnnnnnnnnnnnnnacatcacaggttacctccttcaacattgtgtannnnnnnnnnnnnnnnnnnnnnnnnnnnnnnnnnnnnnnnnnnnnnnnnnnnnnnnnnnnnnnntcacaggttacgtccttcaacattgtgtacaggcacatacacacatccatgcactcccacacacatgc

SEQ ID NO: 409322 - DNA, 243 bp, Homo Sapiens
ggcatctctttaactttagttaggatggaatttgaactcctggctcttttgagtatagaaacccctagtaacaatttaagttccttccatttttcttttaaactccttattcccagcagcagtattctacattctaaccaggttctcccagctttgagacgtctcagacttaccagttctccaaaacgctattttctttaagggtgacaccttttaaaaattaggcacctcaaatatctactg

SEQ ID NO: 409323 - DNA, 401 bp, Homo Sapiens
  misc_feature (230)..(230): n is a, c, g, or t
  misc_feature (311)..(311): n is a, c, g, or t
  misc_feature (375)..(375): n is a, c, g, or t
atgagccaccttgcctggacctatctaactcatataagtggaatcacgcagtatttgtccttctgtgcctggcttgtttcacttggcataatgtcctcaatgttcattcatgttgtcacatatgacaggatttccttcttttttaaagctaaatagttttcattggatttatatgccacattgtctttatctagtcattcatagatggacatttgggttgtttccacaanatcttgggtattaaaaatagtactgctgccaagaatacacactgggggagaagacattctctttcacaaatggtgttgggnaaaaacagatttctaatatgcaaaagttacaaaattgggacttctcttccggcaaaacccaaantcaacccaaaatgggttaaacaccgg

SEQ ID NO: 409324 - DNA, 683 bp, Homo Sapiens
  misc_feature (641)..(641): n is a, c, g, or t
  misc_feature (652)..(652): n is a, c, g, or t
gggagggctgactttgggaattagggaactgcagaaatacacatcccagggcagacaggatgtgcacagaggacaccaggaaggcagggagtaagaaagaagcatcaaaaatgaggtgaggatttcgaggaaaactgttcttttagcaaaggtggcatgaatgctttgcttgaatgctgcttgtctttaagatattgctaattctcaatcaactagaaaaagctgacatctctataaagagaataaattcataaaatgcaaaggacaggcacaacagagtatttagtaagtagtgcgtcatctttattagagaggtacatctaaactaattggaggcaaagttagtttgaatgaatgatagttcacatggcccaggcaactttggtttttagaataagtgttagtaaatgatgtttttttgctttcaagggcagagagtaactggaagtgggtttgtgattagcatatctaatgtccatttagggtgaaaccaccattctgaaatcatgccgcatgatttgtcctgcccctggtcatgttcctcctcctctgccattctcatgatatctgtgtttgcctgggtgccatgtgaccgcatctcatgggcacttcacgctcagtgcgttccaagcctctgaggncaatccagtcnctgttaccacaggactcgtgtcccgcttccc

SEQ ID NO: 409325 - DNA, 567 bp, Homo Sapiens
  misc_feature (65)..(127): n is a, c, g, or t
  misc_feature (531)..(531): n is a, c, g, or t
  misc_feature (557)..(557): n is a, c, g, or t
tggcagtcaacatttgaaaagaagagctgggcattccttcctggtgatctttacctatagtttannnnnnnnnnnnnnnnnnnnnnnnnnnnnnnnnnnnnnnnnnnnnnnnnnnnnnnnnnnnnnnacttctgtgaagttgtttactctgaaaattgtactggaatattttaagccaagctgatctttcaccaggtgtactgtaagggcttttcctgctagcaagatgcttaaacaggatcatgttattggtcgtctgagctatttagttgttttacaaaaccacagcattgtatcagataagattttgataaaaagttttgtgcacatttccaggggcgggagggttgacatttccctgaaatttcttgattagaatgagtaaatactggtgtttgatacctgtcttaatgaacatgctcataaggtgactgataagttgtaaatatacctgaagaaacaaaggggtagttttgatattctggtgtcagtatggaagatcttatacatttatttaatactcaaatgtangaagatgtttgtttgtagcataacancagcacagta

SEQ ID NO: 409326 - DNA, 168 bp, Homo Sapiens
gaacctaagagtatcagtactgattagtgatttgaggcagaaaacttgcaaattaggctgggaattgctagtaaggttctggattcaatcatgatgaagtgacttggttttatgtgcctaaggaccctgtctaatgagttgtatcgtcttaataggccacgtactggt

SEQ ID NO: 409327 - DNA, 276 bp, Homo Sapiens
  misc_feature (99)..(134): n is a, c, g, or t
ttactcgtgccttaagtgttatatagtatcacaactttatttctcagtttttattaagatttaggaattcctagactactttagcattcttagtctttnnnnnnnnnnnnnnnnnnnnnnnnnnnnnnnnnnnntgacactaaaaggtactttagtgacataaaaactatagcaacaaataatccttgcccttgaagatacaggtgtgacataagttgcaaagagttctacgttttcatggggtattcacactgtaagacagtaatacctgtgacc

SEQ ID NO: 409328 - DNA, 370 bp, Homo Sapiens
  misc_feature (183)..(183): n is a, c, g, or t
  misc_feature (198)..(198): n is a, c, g, or t
  misc_feature (205)..(205): n is a, c, g, or t
  misc_feature (222)..(222): n is a, c, g, or t
  misc_feature (255)..(255): n is a, c, g, or t
  misc_feature (301)..(301): n is a, c, g, or t
  misc_feature (321)..(321): n is a, c, g, or t
  misc_feature (338)..(338): n is a, c, g, or t
  misc_feature (341)..(341): n is a, c, g, or t
ttgtgatccaccatacccaacacaggttcttttttgactatcacaagctgtgtgaacctagatgccaagtcacagctgagctaaacctcactttctctgcctaccacagaaaattactaccatatattctcttccttatatttaattcttcttttcaacgtttcattcccctatgccatctanctgtaattttagtanaaacatnaatattagatttaaaangtcctgtaaaggaacggggacaggtaggagaantgatactgacacacgtaagtcaaatgaaaaactgtgttatgagaancaatatcaaggagttagagnataaaccgtcaaaaaanggngattctggaaaaggtttaagggaatagtg

SEQ ID NO: 409329 - DNA, 639 bp, Homo Sapiens
  misc_feature (314)..(346): n is a, c, g, or t
  misc_feature (566)..(566): n is a, c, g, or t
ggggtgagccattgcacacagcccgttcgtcttaggatataaatccacctgcccaggaaggtctaggatacataattctatttgaatcaagccaaaaatcttaaggggagtattgtccacttaaagacactcagtgaatgtgaattgtatgactactgattctgcttataatacctgttcaaatatacatgtaactatcttaaaatcttaacaactgtaccagaattttagaaaaataacttcacatttataagctggagcctgtcagagttcactttgaccaatgtgtcctataggatctattactcttatannnnnnnnnnnnnnnnnnnnnnnnnnnnnnnnncaaaactcacatagcaaataagaataattttttagtatgtgtaatattttccccaaaggggaaaagcccagatagaatgaaaaaagttcagtgacttttaagtgcaaataataaaatataatccataaaatggaaattgagtttcataaaaggaccaacacaatagtgagaactttaacaggaattttaggaagaatttagaccctcaagataaatttanaatcatacggttttctgacgttctaagcaaatagagctgtgcttaatctaaatttgcccagcccaacatattc

SEQ ID NO: 409330 - DNA, 651 bp, Homo Sapiens
ggtgatgtttatatgaaagtttaataataaatagctggtttgagttgtgttactaccttttttggcaataacataatatgaaattgatggactacatgtttgctttgacagtgagaaaaccttgtgtatcaaaatctagacttttcatgcagatgtattttggaggtgatactcatatttcagaagtaaactgaattccataaaaggatgagtagctccttatcatagttagatatttacatatttttatccaagtgaagtgagttagacctagttaaagcattagagaccagcacaatttgaaagaatctgttatcattcaagtctttgagttaaagtaactttaggagtcacttaatcaacgtcactgattttatagatgaggtagctaaagccaaataaatagctccaaatttgcattgtaagtcagcgggaaatgtagttttacaagcattaggattaaacctgactttacatctgttatctagatagaatgaattatgtatttactagaaaaaaagtgttatcaagagcatttatgtctttcagttttagatcatactcttggtagcagatgctaaaaagacgagttctaaataatgttctggtactgtgacttaaagcatgctattgcatacttgattgtagcca

SEQ ID NO: 409331 - DNA, 672 bp, Homo Sapiens
  misc_feature (100)..(242): n is a, c, g, or t
  misc_feature (350)..(418): n is a, c, g, or t
  misc_feature (647)..(647): n is a, c, g, or t
  misc_feature (661)..(661): n is a, c, g, or t
ggggaggaaatttgcatctatggagaatcttcattaatgcagccatgcttcccctttctatgcctttccaggacctaggagtgattgagagtctgatacnnnnnnnnnnnnnnnnnnnnnnnnnnnnnnnnnnnnnnnnnnnnnnnnnnnnnnnnnnnnnnnnnnnnnnnnnnnnnnnnnnnnnnnnnnnnnnnnnnnnnnnnnnnnnnnnnnnnnnnnnnnnnnnnnnnnnnnnnnnnnnngacgatagcataactctctcaaccaattgtcaactaaaggatccctaaaagccccttatgacgtacaagctcctaccctgacctacctgcaattacctgcagttggtnnnnnnnnnnnnnnnnnnnnnnnnnnnnnnnnnnnnnnnnnnnnnnnnnnnnnnnnnnnnnnnnnnnnngatagtgtaacccaggccttggtcacttatactggctctgaataaacctctttaaatatattttgacagaatttgggtttttgtgtatttttctgtgtatttctacctctgagaagaggagtaatttatactctttaaaaatcatggtcaggtatgactggtgctagaatgaggatgaagggaagagaaagggaagaaataatctccactccttggttccaattttagntcttaaagtaaagnacaaaacattt

SEQ ID NO: 409332 - DNA, 665 bp, Homo Sapiens
  misc_feature (118)..(160): n is a, c, g, or t
  misc_feature (611)..(611): n is a, c, g, or t
  misc_feature (629)..(629): n is a, c, g, or t
ggggggttgtgaaaggatagagttgggtaagattatggttttttagagtataatgtttatgagagcttagctgctggaatctgattctcaaatcctgtctccaaaattcctgtaactnnnnnnnnnnnnnnnnnnnnnnnnnnnnnnnnnnnnnnnnnnntgtatttacttcagagagctgttggaagaatttgagtagttaatgcatttaaaatgctcagaatggtcacttagaacttagcactctataaatgatattttttgacatcatgaagagttttgaaatctagcaaaagagtttaaattttatgtgataagtaacgtacagccaggataaattccttattatatgttcaaagcagcatttaaggaaaagtaagtagaaaacagaggaccaattcaaatggaggaggctggggtgaggaagaccacctactaagctgtagtattcggaaatatcaggttttaagttaatgagaggctaggataatagctacaacaaatataatgattaataaaaccgaaacctgtattttctttacaaaacacttttgacataacagtacgtcctggatacaacagtatctctaatttggagacaaagaattggnaacttagtgctggcttcngtcaatgtggtaagagtgaaaatagtgggatacaaa

SEQ ID NO: 409333 - DNA, 443 bp, Homo Sapiens
ggtgtcatatgcaagaaatctttgcctaacccagccttacaaaatttttcctttatgttatctgctagaagttgcacagtttcaggttttacatttaggtccatgatccattttaagtaaattctgatataaggctgtgttagtttcctatggccgctgtaatgaatttaccacgaattcggtggtaatgcattctgtcacagttctgaggccagaagaccaaaatcaaggtgtcagcagggccattccccctccagaggctctgagggagaatctattccttgcttcttccagcttctggtggctgccagcatgctctagcactcctcggacttgtggccttttaaacaccatcttcacataaggcttctcctctttgtggtttgtaattgcactctgcctctctcttgtaaggggacactggcaattttaaggaatttttt

SEQ ID NO: 409334 - DNA, 601 bp, Homo Sapiens
  misc_feature (41)..(41): n is a, c, g, or t
  misc_feature (66)..(67): n is a, c, g, or t
  misc_feature (569)..(569): n is a, c, g, or t
ctttttatttggcatacactttgcccttaaagagctttttnacaatataaaaataagacaaatacnnaaaaaagtttaagataatactacatatgactaaaagaaagatggaatgtgttatgaaagatcagagaagaaagaacttatatccagctgagaaaatccttaaagagtgggcagaatttgctcagttgacgagaggaaataatatttcagccagagtgagagatataagaaaaggctttgcataggaaaggattaggaataacccagttcttgtttgtttacaggtggatggaaagccgatttccagtctttatgataacgccgatgttacacttgggaaagatactgtacaacaatgaaagtagccctttcttttgtctttcaaagaatgtatttttaacaaacagcctctgtgtgatccttttgaccacacaatttgtagagttaacgctgaaattttcattagcaacaatgaaagcacacacaggcacaatattaatatagattaatatcagcctattttggtcagaaaggctcatttaaatgtttaagagacagaagtnccaaattgtagtaatttcttccactagcagga

SEQ ID NO: 409335 - DNA, 606 bp, Homo Sapiens
  misc_feature (45)..(152): n is a, c, g, or t
gtttttcatcacttctaaattccatttcaaattaacagattgtgnnnnnnnnnnnnnnnnnnnnnnnnnnnnnnnnnnnnnnnnnnnnnnnnnnnnnnnnnnnnnnnnnnnnnnnnnnnnnnnnnnnnnnnnnnnnnnnnnnnnnnnnnnnngagaatacaattaaattaacagattctgtaaaaacctaatagatacactcaatagcttaataacctaattgaaaatattttactcatggtgtacttaatttctaaagatacataatttaaaaaccaactaatacaattagcagctctaaaaagaagtttgcaggtataagtcctaaatcttatgcagaagggttcttttcctaaggtgtttaattatgttcataagttcaacatcagttgccggagggtttttgccagaacatgcccacctcttgcagctcccctgaagcagtatgtatatgtatattacagattgcaggtgtgaaacatctattattcatctcaaaatagtaactttgggcatttttcttgttattttttaattgttagaatatttaatcgaatatttaaatatgccttttgtatttcagtaactcttgcaatagtagttttt

SEQ ID NO: 409336 - DNA, 649 bp, Homo Sapiens
  misc_feature (221)..(221): n is a, c, g, or t
  misc_feature (629)..(629): n is a, c, g, or t
ggggtaatataatttaattctacattaagttccttctgggaaatatggattatttctataatagtttcctaattttctaggaagtggacagttcttgtgtaattataatttttatttgggggggttgaaatgtgttttgttatgtttagcagcatatttttgaattttggataggaaaggtgaacatcagaagaaatagaggttagcagataaaataactnaaaattaaaattaaccttttcgtttcaactaatgatttgattattaaacttattaatgcacattaaaaactgacaggttttaaggccctacatgacttaacattttgcctaagatgaacaactgccctttaatcaattttcgggacaagggatagggtgttgataacacagcttaggtttttagcagactactcatttgttagtaataactttgggtgtaaacatgaatgtttttctttctaagttcccaaaggtaaacatttccttttttggtaagttccatcatgggtcagctaaatagcttactgtggaaaagaaaaatacaagattcacattctcgttataacttaaggtcctttctaggtattataaattagcatactgagggataatagattgtaagaagtnggctggtttagtactgaatt

SEQ ID NO: 409337 - DNA, 161 bp, Homo Sapiens
aagagggaagggggctgtcctcactatgttgcccacattggacttgaactcttgaggtcaagcaatcctcctgtctccccagaagctgggactacaggagcttcaaatgactcttgattgtattatatttccaatacatgctgcagtgcaaataaataaat

SEQ ID NO: 409338 - DNA, 320 bp, Homo Sapiens
  misc_feature (31)..(31): n is a, c, g, or t
aaggctccaaggagagaaacattgtccccangggaaagctagattttagacaaggcaaagagcggagaggaatgggtgaagagattgagaatgacattctagaaaggacaatagaaagtcttaggaaggagggacagaggggaagagagaaaggatggctggtcacctagagtatctatagggataaaagtatagctaaaataacctacattttaggtggagataatacagctgcctaagcttaggtgaactgctttttgaatcttagtttgctccttcataaaattggattaatataataccgatttggcagagttttc

SEQ ID NO: 409339 - DNA, 164 bp, Homo Sapiens
gccttacagatttggtcttttccagagttaggaatagataaatttcctgaagttaattcttgaaaatttagaatttagaatattttcccatgttttaggatacttgatgatgatacaattctaaccatattgaggttaatatttgaaatgttagtgttactgcc

SEQ ID NO: 409340 - DNA, 162 bp, Homo Sapiens
  misc_feature (54)..(55): n is a, c, g, or t
  misc_feature (58)..(59): n is a, c, g, or t
  misc_feature (64)..(64): n is a, c, g, or t
  misc_feature (70)..(70): n is a, c, g, or t
  misc_feature (74)..(74): n is a, c, g, or t
  misc_feature (78)..(78): n is a, c, g, or t
  misc_feature (81)..(81): n is a, c, g, or t
  misc_feature (85)..(85): n is a, c, g, or t
  misc_feature (93)..(93): n is a, c, g, or t
agctcgtcgatgactgagccaaccagcaatacattcagtgacatgcaagcgttnnagnnaacanctcttnggtnaacnttntccncgcgaganttttcaacctagctcaaatttactttctcatggtcacctactaggactcattcacctagcagggtcaga

SEQ ID NO: 409341 - DNA, 464 bp, Homo Sapiens
gggagccctgcagttttatacataactatatggttagtaaaactgaatggtccaatgcagactcattaaagtaggcttttaccccctttgttcttgaaataatctagaccagattactcggggttttttttaggattatttttataggtctaaatatgaatgatttgggggtatgaagtacttaaagatagttctgtgaaaaatcattttcagctgtctattcaagggaaaaaatgctaaccttgtcactttactacacaaaaccacactaaaataaaccattaatgatactgcctgcaagattttaacacaccagatagcacacacattaaggatttataaggcactgtacgtaatttttattccaagtgacctctcaattcattttcattttgcattttatccgtatgaactcatgtttaatttagataataaaaatttattttattaaaagggcagtttat

SEQ ID NO: 409342 - DNA, 182 bp, Homo Sapiens
tggggactgcaagccgcctaaatgcagggcttttgatgatattccccgccaacaaggcatgaaggtggggcttgcctccatctggctctcctgccactttcaacaacacaccccacatccgatcctgcttagagtcgaagatgaatctggcataatacaaacagcactggactggaagcatg

SEQ ID NO: 409343 - DNA, 499 bp, Homo Sapiens
  misc_feature (337)..(375): n is a, c, g, or t
  misc_feature (475)..(475): n is a, c, g, or t
actactactatgctgcgagaagacgacagaatgggcatgtaacagaaccaattttaccacaggctaaatgatagaaacaagacttaagttcctatggcatatttctagtcacaaaaacatcaccaacttttaataaagaccaaaacatttctaatattaaacattgaaataaatgtgagttatgcatacatttaagaaacagtaacaaaaacaagtgagataattattcactcaatgatttcagttcaagggtatgggtggccagagcctatgcagcttcaggatgcaaggcagacactgacaccagacaggacgtcatcccagagcagggggcatnnnnnnnnnnnnnnnnnnnnnnnnnnnnnnnnnnnnnnngttactcagactgggaccatttggacatgccaatttacataacatgcagtacgtgtttgggatgtggggggaaccagagtattcagagaaaacccatgcnggacttggggaggatgtgccaact

SEQ ID NO: 409344 - DNA, 440 bp, Homo Sapiens
  misc_feature (370)..(370): n is a, c, g, or t
  misc_feature (423)..(423): n is a, c, g, or t
gggcatcattattttccatgttcctaagtggccttaacatacattcgttagaggactaacaccaagttaaattgaacataaaacattcatctccaatatattgttttaagctgaaaataaggattgttgaagtttttccgttatattttgtggtgtaggtctaatgaccaaattaaaattttaatattccaaaatatgattaggacctgagcctttgccttctgtatttaatgtctggaattttttatagtctgtgtgggtatggctagttcctgcaacaacgtggcacttgcttctcacatgggagtttcccctgtaatttcctgacttaccactctatcatgttgcatctctgcttataactatctgntcgctggttttccttcaaggctacatacataagtggcttggaccttgcttttnaaatggactcagattct

SEQ ID NO: 409345 - DNA, 259 bp, Homo Sapiens
ctaagtgtcaggcagcatgatggaaagaacactgaatctagagtatgaagacttgggttcgtgtttcaacttctgagaaactcatatacttcaatcaaaaaaggaggacaataccacctgcctaaaatatcagggatattctaagggtcaaataagataagtggtagtgatttttaaatggtacagaactacgtaaatgaaaagtgttattactcttattacaccggaactatgttttactttttaagtcaaagttctg

SEQ ID NO: 409346 - DNA, 358 bp, Homo Sapiens
  misc_feature (175)..(175): n is a, c, g, or t
  misc_feature (256)..(256): n is a, c, g, or t
  misc_feature (332)..(332): n is a, c, g, or t
  misc_feature (347)..(347): n is a, c, g, or t
acagaagggggtttttcctttgaggccctaacacattggggagtcagagggtatgaagcccttctgtgtcctctgtatgtcctcaagctgggatgagactccggttctccaattctgatctgtagatgagatggaggaatgagatgaccaggcatgtcaccggaggcagttgcangggtcagagctgaaactcaggcctctgacctgaaatctcgaccagtttctaacagacctattacatctctgcagcagcctntattctttttaaggtctctcccttctcagcacatcacatgtggtcaagcctgttcccccacccagcctggtgcctncttccctccacaatncgtgaaccaca

SEQ ID NO: 409347 - DNA, 194 bp, Homo Sapiens
  misc_feature (184)..(184): n is a, c, g, or t
ctcttctgtgggtgctatgtcagttcgtggagaatcatgatatgcggtacagagaggcagggttctcagtcgagttcataggctacacttacccccagtgtatgcagccaggggaagttgtgtgcgttcacaaaatgaggttctccttgttaaggaaggggatgaatagttcccagatatgatncctcagtcta

SEQ ID NO: 409348 - DNA, 648 bp, Homo Sapiens
  misc_feature (559)..(559): n is a, c, g, or t
  misc_feature (590)..(590): n is a, c, g, or t
  misc_feature (603)..(603): n is a, c, g, or t
gaataatttttgacacagagtgagttatcttatttgttgactgaattaagtgattagcatcatttaacttaaagaaataaaccctgtatagtgactgggacatgagcatcaaaaaatacaatgtgtaatacggtagcttctttaagaagatggcacagtgtattagtccactaaggctgtcctaacaaaataccataggctgagtagctgaaacaacagaaattaattttcttatagttcgggaggcaggaagtccaaaatcaaggtgctggaaaatcatagtgcttggtgtctggagaggcctttctttttggctggcagatgcaaccttctccctctgtcctcacatggcctttcttctgtggggtcaaagcggtgggatgcggaagctctggttagagctcctcttcttcttataaggacactaatcctgtcagattaggatcccactcttatgacctcatttaaccttaattatctctgtacaagccctatctccaaacacagtcacatttggggttaagggcttcaacgtatacattttaagagggcacgagtntaacatacagatttgtttgttttcttcctangaaatgtgtaaancagtgtgagtcaaatctatatatagcacctttggaaaactggacc

SEQ ID NO: 409349 - DNA, 299 bp, Homo Sapiens
ggggagaaaaagtgcaattgcttttatttgagtacttagcatcaacaagaaaaataatacagaaaaaatttcagtgaaactcgtactgaaaggcatcagccccttttccagctaagacaagtgccccttgtcccccatatcataaatacctgaattgatgttcttttaaaactgctccttttcattttgtgagattagaggattggactactgttgtataagtataaacatttctgcctagactaaaatattaaattaatatgtaaagtggaaattacaataaagtgtcctggaaattg

SEQ ID NO: 409350 - DNA, 244 bp, Homo Sapiens
atgatggattgagtgaagagtatgaggaatggtaatatattgtatgaggagtaaataatacctctgcagttttgatttaaacaaatacgggaatactgaagaaagattgggtttggagggaaaggtgaaaattctttggaggtctttttctcatattaaattcacgtacaagtggaggtgttaagtaggcagaagaaataaagcagagggaagaggtaaaagtggctggaggatggaaggtgta

SEQ ID NO: 409351 - DNA, 394 bp, Homo Sapiens
  misc_feature (162)..(327): n is a, c, g, or t
ggggggtccatgctgaacaaacttgtttgctttgaaatcggaagttctagaggaggtattctgacagtggccaggaaaacctcctgcccgcagaattttgtctaatccaccccagacagagttatccaacagcctggtatggtgcagaccaggggctctcgnnnnnnnnnnnnnnnnnnnnnnnnnnnnnnnnnnnnnnnnnnnnnnnnnnnnnnnnnnnnnnnnnnnnnnnnnnnnnnnnnnnnnnnnnnnnnnnnnnnnnnnnnnnnnnnnnnnnnnnnnnnnnnnnnnnnnnnnnnnnnnnnnnnnnnnnnnnnnnnnnnnnnncccactgtctaatgcggtgcataccaaagcaggtgcacgggtcttaatcatcacctcagccctctga

SEQ ID NO: 409352 - DNA, 158 bp, Homo Sapiens
  misc_feature (62)..(62): n is a, c, g, or t
  misc_feature (70)..(70): n is a, c, g, or t
  misc_feature (74)..(74): n is a, c, g, or t
  misc_feature (77)..(77): n is a, c, g, or t
  misc_feature (79)..(79): n is a, c, g, or t
  misc_feature (81)..(81): n is a, c, g, or t
  misc_feature (84)..(84): n is a, c, g, or t
  misc_feature (88)..(90): n is a, c, g, or t
  misc_feature (92)..(92): n is a, c, g, or t
  misc_feature (96)..(96): n is a, c, g, or t
  misc_feature (99)..(100): n is a, c, g, or t
  misc_feature (103)..(103): n is a, c, g, or t
  misc_feature (116)..(116): n is a, c, g, or t
  misc_feature (118)..(118): n is a, c, g, or t
  misc_feature (122)..(122): n is a, c, g, or t
tttactttttttgtcatgtacttctagaaatagacggcagattctccacgccggacatgacngcctcganagcnagncngnaantgannntnacancanncantggcactgagttngnattnaaagtgaatgcaacccttccttaccacatgttagca

SEQ ID NO: 409353 - DNA, 660 bp, Homo Sapiens
  misc_feature (136)..(194): n is a, c, g, or t
  misc_feature (520)..(520): n is a, c, g, or t
  misc_feature (589)..(589): n is a, c, g, or t
  misc_feature (595)..(595): n is a, c, g, or t
  misc_feature (604)..(604): n is a, c, g, or t
  misc_feature (637)..(637): n is a, c, g, or t
ggttaccatgtctcatcaatggtaacagtagagtggaaaccacactaactttcatgtgagggggatatggattgcagtttggccctggtacttggtgtttgtgtgactgaacttcagcatcattttcaacaggagnnnnnnnnnnnnnnnnnnnnnnnnnnnnnnnnnnnnnnnnnnnnnnnnnnnnnnnnnnngcagcaaatagtagcagctcaaaaaatagttaattatgttatcattgtcataagtgtcataattaatggtcctttgttacacacaactgcattaccatttatgcaattgttataagtgagttacctacaaagcaacaaaagctgtattcaactgcccataaattattcatactattttaaaaaatgtttctttatggttttacatttacaggttctttttattttaaagttcatcaatatagcctttatgtcaaaaaatagagatttttatgtgttcttgtgatacaaaatgcattttccgtgagctttacaatgttatgaatcantttttgcgaaaggggaatcggctagctgtctcctctccggctcagacagacttcacaatggatcacagntacagnaaccaccanctggccatccgaataaaatgtccggtgggtccncataccttatgggaagctctaaa

SEQ ID NO: 409354 - DNA, 524 bp, Homo Sapiens
  misc_feature (389)..(389): n is a, c, g, or t
  misc_feature (408)..(408): n is a, c, g, or t
  misc_feature (442)..(442): n is a, c, g, or t
  misc_feature (445)..(445): n is a, c, g, or t
  misc_feature (458)..(458): n is a, c, g, or t
  misc_feature (489)..(489): n is a, c, g, or t
  misc_feature (501)..(501): n is a, c, g, or t
  misc_feature (510)..(510): n is a, c, g, or t
gagagaagctttagctttgctttttagtaagttaagactgacacatggccatccactcccaaagagtcccagccctccaggcagcactgaggcccaggcagctggcccagccgcgctctgcagcttccctgctgcccacccacccacctgcccaccgacagcaccgccaggaggtctgggcagaaagcatgcagctgtgatggccaggcacctgccgcagccctgtctccaagctggacagaactaagatggaggctgccacaggtcaggttgcagcaactcttgcctccacctgggcagaggcagcggccggggtggcatggggctggtctggccggtcccactagctggatcctggctaccacagtagcacgtcctgaaattggtcnttgttgttgttgttttcanctttatgtataaaaaaatttcctagaaattttantantccgggtacaagntaacatctccaagaattccaacaccccgaanggggcataaaantcctggcanaacacacgttccga

SEQ ID NO: 409355 - DNA, 481 bp, Homo Sapiens
ggggtgttgatttagctacagtaattttaaaattaggattcatattccttataattttatctctggggaatttttgaggatcttcttccagaaaggactggggttttatttctccagatacctggagtattaccagcccaaggcctcctacaaatacattttgggtttttttgaaaatgcaggtggtgtaaattctgactccagccctgaactcaggcaggcatttcttcatttcatttattgcacccagaacaaagtctgagaggggcctgtatcctcagttcatttctgtggggcaggtttttgtttgagtaaacccactgagtgtgttgacctttggggaatcctagtttttgtagagttctctcatttagattcctacacttctaaaaatgtaaagcaaataccaataaaatagcataccagatattggttatcttttgccctaatgtggtgtaacaagtcaccacaaaacttagtg

SEQ ID NO: 409356 - DNA, 629 bp, Homo Sapiens
  misc_feature (587)..(587): n is a, c, g, or t
  misc_feature (602)..(602): n is a, c, g, or t
cttttcttctcattacattaaagtgattgctacaacaaatattctatttactgagaactgaacggttattaaaccaaagattgctatacgtacatgagcttggggacatgaataaagtagattatttcagtataattttaacaaagagttaagcaaaacactttcataatgagtcctaaggcaagtggcaaaaagggttatatgtcacaatagatctctcccattatgtctaatataggatggagtcatcagatacgaggttattttagtttttacaactgagatagcaaggaaagtagaaagtttactagcattatcacttgcctatatgtcctaggtcaatttaatcattaattaaatttagtattttttcttatgaaaacaaaggataacatttccaataaaattctgctaaaagttgaatcaatttcagctgtttgacatatgttagacatggccaaatataaaatacatactttctttttgtaatatttgatgggaagaatagaaatcacaatttttcaaaggaagtacaaataaatagaaacacatataggaattcaggagttattatattatcaaaatantattaaagtgttaantttccactactactactactagctcta

SEQ ID NO: 409357 - DNA, 312 bp, Homo Sapiens
gggtcaacaaatactgatcgaacactttgattccatgtgtcagtgtttaaactacttgctgcgtctttagctctatctcttctgctgaataagaaattgtagagagatatttcagattttgctaaatcagtttacaagctttgttctttatttatcattccaaattaagccagaacaaaatatgttttttaattgcattgacataaactaagaaaccaatgggagtgatttagattttgagaaataggaaattaaaatagaaacttggactcattttcatcaaccttaccggttctagggaagtcattgtca

SEQ ID NO: 409358 - DNA, 437 bp, Homo Sapiens
  misc_feature (377)..(377): n is a, c, g, or t
  misc_feature (403)..(403): n is a, c, g, or t
  misc_feature (411)..(411): n is a, c, g, or t
gggagtggtacaatatttttcaagtgatgaagcaagactatcaacccagaatcctctactcagtaaaaatatattataggctagagggagaaatcaaaacattctcaaatgaagaaaaactaagcaaaactttttccaacatacatacctcaaaagaatggctaaaagaaattttctaaatagaaagataatggtaaaagaggaaaccacagaaaagcgggaacaaacaaaaaaaggtagttaagcaaaaatatgggaaaatacaataggcttcctttgtcttgagttgtctaaattatgtttgacacctgaagcaaggatatagctgtctgacatgattctaaatgtgtgtacaggaaacactgtaagatgattanattacaaatggggtaaagagccatanaggaggtnagacttctacacttcactcaaactgg

SEQ ID NO: 409359 - DNA, 452 bp, Homo Sapiens
  misc_feature (426)..(426): n is a, c, g, or t
gttttttcgaagtgtacttttaaacattgaatttagaaaaagatgattttgtgagcaaagccagttctacccccaaaacatttttatattcctgaactgacacggtaaagttagatttgcatgaggtacagaagctaaaaagttgcatttaaaattcagcagagtatatcgtgcagagagtcctggagtgggaattgggagtcctgccaggccacattactgaagccctttctagacctttgttttcttacgtataaatatggaggttgaatttagagatctttaaagttgccttcagccccaagtttcattatagtccctctgttattaaacattgattgatagccctgtactgtgaaggttacaaaggtaaagagagttcctgccctcccaaggcagggattagcctctaattgcaagggtaanccaattaggcaaagagttgtactacc

SEQ ID NO: 409360 - DNA, 357 bp, Homo Sapiens
gggcatatctagacagagatttcctgtcttgcttggtacatggaaatactccaaaggctataatttggaatatgaagattcttgttctgttctttctaccttattaagactcaagatggaatgtcctgtgatatccagaccaacaggagcatgggtattttatttctctgtctgacattttattagacagtggtaacaaatgagctgtggctgcagagtaatgagagtgttttacaggtcaaacacaaaattcagcactatgtatgtggcagcaagcactggacttggaggacctaccgtaacttgtctcgattcttttggttattggttgtatttcagaagttgctcagcataatg

SEQ ID NO: 409361 - DNA, 154 bp, Homo Sapiens
gaatcctgtatatgcatttttccattctcccagctcttcaggatgttgcatagagccatcaaggaataaaaagatgacttccctatgggacagactttcagagacaaaggcattaatataaatgaactaaaaagaactgagctatacaacgctg

SEQ ID NO: 409362 - DNA, 354 bp, Homo Sapiens
actgtaggagttaattcatacgttgtaaagttctccagtattggtattcattgatcttaattctctcctttttaaagagaaaagttgcagacctgaatatgaagaggagcttctcttcagtcatatcttaattttccatttagcctacagatgcatgaagtagagaattaacatcatagctactggcagcctctgtagctgttaagaagagtgttcactaatgagttttatataaacaggttctctctcaattttggattcgggtagtagtctttacaatcttgaaatgtgcatgctgcactaccccaggtataccattgacagtatggggaaaggttctaagtctagtccttt

SEQ ID NO: 409363 - DNA, 249 bp, Homo Sapiens
  misc_feature (127)..(127): n is a, c, g, or t
  misc_feature (152)..(152): n is a, c, g, or t
  misc_feature (183)..(183): n is a, c, g, or t
  misc_feature (215)..(215): n is a, c, g, or t
gggggattctgattcgcaatgtttcctgaaatatacctgcgcttggaacagcatggatctgtacgagctggtgcccctctagttgatgacatggcttcatgaaaacagaggagcacctcaccactanaagagacccttgcagtaggaaacanagctgcatgagaaaaggtgggatgggatggnaacggcctactcactcccccaggagtggagangaggaagcctgaagggatgttggcagggttacgc

SEQ ID NO: 409364 - DNA, 369 bp, Homo Sapiens
ggatggagctgctgtgaaaagcttaaaaaatgctttctccgaatgcattccccagcccccagtgggaagaacctctgctgtgtctgcaatagtgtatggcattggatgggtgggagatgtccctctctccatgttcatttcctggtgttggtactgcctccttcagcaatcattgctgcatccacattccctttgtcctaaggggactttggtaggctgcactcccttgttggtaccccatgctggtggttagatctccaggggcctcacaacttcctgggggcccatcagtctcctgtgcttgccaaagccagagtgggttgtaagttatatttgtgagggttctggtggtgtgatgactcaagggcg

SEQ ID NO: 409365 - DNA, 361 bp, Homo Sapiens
  misc_feature (149)..(149): n is a, c, g, or t
  misc_feature (216)..(216): n is a, c, g, or t
  misc_feature (237)..(237): n is a, c, g, or t
  misc_feature (241)..(241): n is a, c, g, or t
  misc_feature (247)..(247): n is a, c, g, or t
  misc_feature (279)..(280): n is a, c, g, or t
  misc_feature (340)..(340): n is a, c, g, or t
gggggaggcgggggcagccacctggcccggacagctgcaggtccggacggccgtcaacaaagtggtgtagtcactacaggtgctcgctgccacacccagctaattttttgtattttttagtagagatggagtttcaccgtgttgcccangctggtgtcgaactcctgagctcaggcgatccgcccgcctcagcttcccaaagtgttgggattatangcgtgacccactgcacctgtngcangtatangtatgtattttttacaaaattggatgaagtannatttatttgttaaatattttcacttatgccatgatatcttatttaatctttaatttgtcnatgaaaatacctgctctgcta

SEQ ID NO: 409366 - DNA, 659 bp, Homo Sapiens
ctcctataaatctttaacaaaacatagttagttgtttacatactttttaaatcccagagttggttttaaaacctgcatgattgccatttttgcatattatcttagtgctctaaaattatccttgcctatgtgcacaaatagggaaacgctgcctaaaaaatggagttagttatgttcttttgctacttcactgttacactattatctttacatacttatatgtgagatgaattgagctgctgtccgttcttggaaatctgttccttttaataccttttattacccgtatgtcatgtaagcactagtaaaattatttctaccaagtgggtcttatccctcagtgctgttttaacagccctcgtgctctgcatagcctttaaatactgcctgtctccccactccctggttctgacccactcaggagtacattagagttgcccattttcccagtgattgctgtccttctcaatagataataggcaatagaagcagacagatagaccaattattggagggaccttgagcctggaagaaagactcaactcctttcgaatgaagataagacagtggatgaatccatcaggaggaaggattctactccacagccaatttaaagtctgttcatcagtcatcagttaaaacatgggggcccttggtcc

SEQ ID NO: 409367 - DNA, 461 bp, Homo Sapiens
  misc_feature (193)..(337): n is a, c, g, or t
atagaaaattcagagtcaaactcacggtccagctataatagctgtgtaacctaaagatacgaacagtaaaatgttctttctcttccacttgggacacttattctaatttgcatttccctctgtagagattagggagcaaaggtaagacttcctagggttcgcagtctacctctgtctcccagaatgttaaatnnnnnnnnnnnnnnnnnnnnnnnnnnnnnnnnnnnnnnnnnnnnnnnnnnnnnnnnnnnnnnnnnnnnnnnnnnnnnnnnnnnnnnnnnnnnnnnnnnnnnnnnnnnnnnnnnnnnnnnnnnnnnnnnnnnnnnnnnnnnnnnnnattattagtcaccacggataccctgtagaatgaaacgaagtacaagaaaacttagtctgagttgtctaatctagaacttgttaagaaaaatagggaggcttttatctattctaagatacaactg

SEQ ID NO: 409368 - DNA, 392 bp, Homo Sapiens
  misc_feature (322)..(352): n is a, c, g, or t
ggaagataattaagagctgattaatggcatgtctgactccttatgactcattctgtttttttaaggtgaactgtttgcatgtgctaatacaacccttaaaaagtacagtatgtattgtttaaaacacaatctcctttaattgtgaaccaaacactttaaatagctgaacttttgaagtaaggaatttttagatttgttaagtcttagctacctgaatgtacaaatgcactctcattatgttagcagaacctgtccaacagacatgtttgctaagtagtaaacatacttttgttgttcagatcttatgaccatttctccatannnnnnnnnnnnnnnnnnnnnnnnnnnnnnntcctaaaggtaagcaagtactaaaccaatggaaacaagtt

SEQ ID NO: 409369 - DNA, 139 bp, Homo Sapiens
  misc_feature (53)..(53): n is a, c, g, or t
  misc_feature (61)..(70): n is a, c, g, or t
  misc_feature (91)..(91): n is a, c, g, or t
  misc_feature (109)..(109): n is a, c, g, or t
  misc_feature (112)..(112): n is a, c, g, or t
  misc_feature (121)..(121): n is a, c, g, or t
gaaggcggtttctttagatatggtttcttttttattcttgcgggtaatatatngcggcacnnnnnnnnnncaatttttattcagggtcctngggaggcggggaggtttngtngataaccgntccatctctggtttcaac

SEQ ID NO: 409370 - DNA, 224 bp, Homo Sapiens
  misc_feature (76)..(76): n is a, c, g, or t
  misc_feature (126)..(127): n is a, c, g, or t
  misc_feature (132)..(167): n is a, c, g, or t
  misc_feature (200)..(201): n is a, c, g, or t
caacacccaggaacagcgcacaccccccgcccagccaccgccacagcacgcgccgcgcggggcggccacgcacggnccgcagagccgaccccagcccagcgacgcagagcgccccgccgaaaaacnnggagnnnnnnnnnnnnnnnnnnnnnnnnnnnnnnnnnnnnaccaccgaggccacacaccaacagacacggcannaagcccacacgaaacacccagaa

SEQ ID NO: 409371 - DNA, 478 bp, Homo Sapiens
  misc_feature (344)..(389): n is a, c, g, or t
gagtggctgtggtaccgctaattcaacgagtccccatactaatggtcatttagatagtttccaaccttttgcatacaggtaattcatacatacccatatatataagtaaccatacaaatcagttggttctagatagctccagtttatgcatatttttgattcaatccttttcactctcaaaaacattctggtttgaataagacacagttaccctagtttcagattaaggataagataaattgctgaaactgaaattaggcatgaacgagctgtgatttaatcttccaggctatttgttacccagaacttacctcatattagaaatttagtattagaaaaagggnnnnnnnnnnnnnnnnnnnnnnnnnnnnnnnnnnnnnnnnnnnnnncaagtgggagagatatacagagtgaggtatggcagggaccatgccctctctcaggtgtaccactttcgcaagacattagtgtgttcatt

SEQ ID NO: 409372 - DNA, 272 bp, Homo Sapiens
  misc_feature (114)..(114): n is a, c, g, or t
  misc_feature (166)..(166): n is a, c, g, or t
  misc_feature (171)..(171): n is a, c, g, or t
  misc_feature (202)..(202): n is a, c, g, or t
  misc_feature (210)..(210): n is a, c, g, or t
  misc_feature (214)..(214): n is a, c, g, or t
  misc_feature (218)..(218): n is a, c, g, or t
  misc_feature (240)..(240): n is a, c, g, or t
  misc_feature (257)..(257): n is a, c, g, or t
atcagtttcatccaggttatccaattggttggcatgtaatcgttcatagcactctcttataatcctttttatttctgtagagtcactaataatgcccttgctttcatttctgancttagtaatttgactcttctccctcttttgcttagtccctctagctaaaggnttgtnaatttattgatcttttaaagaatcgatttcnagtttcantgantttntctgttgttttcctgttcttangttatttctcttctcanctttattatgtcctc

SEQ ID NO: 409373 - DNA, 357 bp, Homo Sapiens
aagtaagaaacaagaaatttgccaccactccccttgttacaaaagaattccctgcagcatgtgacactgatagcactatacccagagtagaacttctttggaaattggaatcaatcctttcaaaccctgctgttgcactgtcaactaagtttatgtaatattctaaattctttgccaatatttcaacagtgttcatagccttttcaccaggagtagattccatctcaagagaccactttctctgcgcacccctaagaagcagctccacatctgttcaagtttgatgaggagattgcagctcttcagccacattttcaggctccatttctgatactatttttcttgctgtttctgccc

SEQ ID NO: 409374 - DNA, 526 bp, Homo Sapiens
  misc_feature (508)..(508): n is a, c, g, or t
tgacacagcacctggcccccatctgagctgctcaggcacaaaactccatggaacccactttccggtacccttcagtgctcacccaccaggggaggtgaagccccagaagacaaacatcagagccagatgcaccatgagatcctccccgtccaggacaactccaaagcagcagaccctccaaagaacacatctgggtcagggtatggccgaggacaggcagggtcatggtttgaaagaaggcaggccagcaggtagacagtcattactgagcttgccccggggcaggtatcatgttgctggactactagttcatttagttctatccaaaatctgcagacttgggcattttccagagtaaacagaggttcaaagaggggagactatttgcccaaggttacaccatcagtacaaagcgcaccaagatgtgaatccaacacttctggcaatacaaccacagcaggcaggtgggtctgttccttagcgggcaggtaccactccatttcacaanggaagacctagcccttgg

SEQ ID NO: 409375 - DNA, 512 bp, Homo Sapiens
  misc_feature (47)..(47): n is a, c, g, or t
  misc_feature (99)..(121): n is a, c, g, or t
  misc_feature (125)..(188): n is a, c, g, or t
  misc_feature (192)..(252): n is a, c, g, or t
  misc_feature (281)..(345): n is a, c, g, or t
  misc_feature (374)..(374): n is a, c, g, or t
  misc_feature (394)..(394): n is a, c, g, or t
  misc_feature (413)..(413): n is a, c, g, or t
tgtccgggcctttgcttggcccccgggggctcccggcctggcctgcngcccctctggtgggcttggctttgggtctggggtctttgtgtctttggcttnnnnnnnnnnnnnnnnnnnnnnntgcnnnnnnnnnnnnnnnnnnnnnnnnnnnnnnnnnnnnnnnnnnnnnnnnnnnnnnnnnnnnnnnncggnnnnnnnnnnnnnnnnnnnnnnnnnnnnnnnnnnnnnnnnnnnnnnnnnnnnnnnnnnnnntcgctgtccgctgcggcccggccttggcnnnnnnnnnnnnnnnnnnnnnnnnnnnnnnnnnnnnnnnnnnnnnnnnnnnnnnnnnnnnnnnnntggggccgggtccgcggccgcttccgggnccccgcccggctcctttgcngccgggcccgccccccccnggccggccggcgtcggttcttgtcttcgtccccggctccctgggggcctggtgtccggtcctcctcccgcgtttctttccccttccttggggcgtgggt

SEQ ID NO: 409376 - DNA, 469 bp, Homo Sapiens
  misc_feature (202)..(202): n is a, c, g, or t
  misc_feature (282)..(282): n is a, c, g, or t
  misc_feature (391)..(391): n is a, c, g, or t
tttcttactgattttaaaagagtgggttaatcttaacattttccctatttatagcatgggtttaagtagtcaggattttagtacgatgagcagttaactacgggtatggcctaggttttgaattcatctgaatcttatgaggcaggttacaaataagatattttcctattgcagtctttattatattgtattctaattcccngtaatctctgctggattgcaaacctatgatttggggccatgtttgagtgaatttatatataaacaatttgtgtctgccangctatgtgttacggtttgtgcttgggtccagaattttcttctcattaaaaatacccatactcctcagtataaccatttgcttatatactagaaggaaaatactgtcatnatatgatttaattaattcttgtgaatgtgttgctgctgctacacctaatttataagaagtattgctacatgtatgggg

SEQ ID NO: 409377 - DNA, 473 bp, Homo Sapiens
  misc_feature (13)..(13): n is a, c, g, or t
  misc_feature (54)..(411): n is a, c, g, or t
ttcaatggtttcnatgacccctggaataaaatgtaatcttttcatgatacgctnnnnnnnnnnnnnnnnnnnnnnnnnnnnnnnnnnnnnnnnnnnnnnnnnnnnnnnnnnnnnnnnnnnnnnnnnnnnnnnnnnnnnnnnnnnnnnnnnnnnnnnnnnnnnnnnnnnnnnnnnnnnnnnnnnnnnnnnnnnnnnnnnnnnnnnnnnnnnnnnnnnnnnnnnnnnnnnnnnnnnnnnnnnnnnnnnnnnnnnnnnnnnnnnnnnnnnnnnnnnnnnnnnnnnnnnnnnnnnnnnnnnnnnnnnnnnnnnnnnnnnnnnnnnnnnnnnnnnnnnnnnnnnnnnnnnnnnnnnnnnnnnnnnnnnnnnnnnnnnnnnnnnnnnnnnnnnnnnnnnnnnnnnnnnnnnnnnnnngtaaataaagctctctttatgatctggccccaattatcaatgtaatccaaaattgagggggg

SEQ ID NO: 409378 - DNA, 467 bp, Homo Sapiens
cacaaaaagggttagaaatctgcaaagctatgtttcatgttttataatcactgaagcaattcaaatgaaaaattcacttggcatcctaagcataggctctgcaaggtaaggagtcattggtacgtctgcttcaggttagaagtgatctgggaaattaagcccggttaggatgttctgggtctagaatttccctagggcaactggattgggtcaacgcctacagatctgggggcactcaagcgtaaaacttctggagaaattcactatggtagattctatcttccttccagattgagatttacgtgtatgaatgcagaagtgctgcaactcactttgatgttcttacccgagaatgacaggactgctgtggaaccgcatgttcttgtatgtcacctaacctgccaaggacagccccaatatgattacacccccacagaattaccaaagcagggaagagatcagggagg

SEQ ID NO: 409379 - DNA, 302 bp, Homo Sapiens
  misc_feature (279)..(279): n is a, c, g, or t
  misc_feature (286)..(286): n is a, c, g, or t
gggggaaaaatggcattgatagacttgcccaaggcagggttaccataaaccttcaatttgtaaataacgcaacatctgtaaagtgcattaaagccaaggtatgcctgtaatgtgaaatagtgtcaagcgcataaatctgtgtgtgttactactaaattaggtaatccattttgggaggaaggtagaaaatcaagaagtaaagaaaggcaagatgccagaattttcggagcagcttcctagaagatagagcttgagcccttaaagggttcagctcctcangaagggnaataaaggatttctca

SEQ ID NO: 409380 - DNA, 589 bp, Homo Sapiens
  misc_feature (183)..(183): n is a, c, g, or t
  misc_feature (255)..(331): n is a, c, g, or t
  misc_feature (368)..(368): n is a, c, g, or t
  misc_feature (391)..(391): n is a, c, g, or t
  misc_feature (427)..(427): n is a, c, g, or t
  misc_feature (481)..(481): n is a, c, g, or t
  misc_feature (540)..(540): n is a, c, g, or t
  misc_feature (543)..(543): n is a, c, g, or t
  misc_feature (576)..(576): n is a, c, g, or t
tccgttgcacctcctactactatgctgcgagaagacgacagaagggatagaatttgttatatgattctgtcttaacataatttatgcttaatagagtctttaaaatcggcgttcctacggtaatgataccactgactactaaataagaggaagaaaatttgtggcctgtatgttttataattngaaataggcatatcaaagttcttttgtgctgtctagtaggatcctggagatggatttatttatttatttatnnnnnnnnnnnnnnnnnnnnnnnnnnnnnnnnnnnnnnnnnnnnnnnnnnnnnnnnnnnnnnnnnnnnnnnnnnnnntgggctcaatggattcgcccacctgcaggcgcaccgncacacccggctaatttttaaatnttttgtagagacaagggtcttgccttgttgtccggnctggtctgggaactcctgggctcaggtgatccttgccacctcagcctcccaaangtgttggtggttacaggtggtgacccactggtccaggcctgtttgaattatttgacttnganactacagctaggggcgtctgagaggagcagctnaagagcttcaaac

SEQ ID NO: 409381 - DNA, 568 bp, Homo Sapiens
  misc_feature (534)..(534): n is a, c, g, or t
ctactactatgctgcgagaagacgacagaagggtgctgcaaacagatatggtgtcatctagcctttcacattccatttatagagtacaggtagagtagatttagcatagtttttgagggcactaagagtttctaaatggtaaatgaatattggcttcaatttgaagtcaccagatgcattagcccctagcgagagtcagcctgtcctttgaagctttgaagccaggcattgccttctctctagctaggaaagttctagatggcatcttcttccaatagagcactgttaattctgcattgaaaatctgttgtttagtctagccaccttcatcaattattttagctagatcttctggataaccctggtgcagcttctccattagcacttgctgcttcacccttgtacttttatgttataggaaagggcttctttcctttaaacctcatgaaccaacctctgctagcttcagacttctgcaacttcctcaccactcttaagcctttataggaattgaagaagtgtcaaggccttggntctttaattagggctttggcttaagggaaatgct

SEQ ID NO: 409382 - DNA, 499 bp, Homo Sapiens
  misc_feature (340)..(340): n is a, c, g, or t
  misc_feature (456)..(456): n is a, c, g, or t
  misc_feature (463)..(463): n is a, c, g, or t
  misc_feature (476)..(476): n is a, c, g, or t
tgtccaggaccacactttgctgagcaaggctttattaaagactcaaaaccaaattctttcccccagcccttccttttgtctcctgcctatgttcagcacctgtttcatatgtggtcagaatagcagagtttctcacaacccagctccagccctcggccaggatccctggtgaccccggcaaacacacacttctttagggtcacgggcaggttactgagtcaagactgccaaagcccaacaatgatattttccttcactccccatcgtcctccctctctagccaccccaaacccgggactaattcttggagctgcttaataataacaaagccagccagcangagttaaggcaagaatttcaaagccagagttttttctttggtttggcaatttacccttaatttcaagggattgccgaatttcaccaagaatttttggccaaaaaaccccattggtngttgttnggaaaaaacccgnttttcttccctgggaaaaagaat

SEQ ID NO: 409383 - DNA, 574 bp, Homo Sapiens
  misc_feature (458)..(458): n is a, c, g, or t
  misc_feature (512)..(512): n is a, c, g, or t
  misc_feature (532)..(532): n is a, c, g, or t
  misc_feature (552)..(552): n is a, c, g, or t
gatgttgacagatttcaggattttaggttgggcctgattacaggcaggcaggcatcatgcattaggaaagcctagcctttttactagaaccttctgtgattaagacagtattttaatgcactctctgggcagctgagctttaaaagaaaaaggagttataaagcaaaagacatttcctgcatggccccaggggaattttgagcccagagctccgaatcccagtggaagggagtaatttcggctaattaaggaagaagagcaaagttgcgtttggtcaaaatgttcgtttggacttcatttgtgttggcaccaaagagagcctatctggatttttttctccctttttctgtggattcactgcaggactgcaaagcctacagctcacatacattagggagagattcaaaggaaacgccaaagttcaactaaagtacaagtaattagaaccagattctccnctatttgcgtgtgcgcatgcgtgtatgtaactcgtgtgtagacattttattaanaatgtaatttatattgcatncaaacatttggggcaccggnaaggactccattacctgtcact

SEQ ID NO: 409384 - DNA, 362 bp, Homo Sapiens
  misc_feature (44)..(44): n is a, c, g, or t
  misc_feature (59)..(59): n is a, c, g, or t
  misc_feature (64)..(64): n is a, c, g, or t
  misc_feature (66)..(67): n is a, c, g, or t
  misc_feature (69)..(69): n is a, c, g, or t
  misc_feature (86)..(86): n is a, c, g, or t
  misc_feature (119)..(119): n is a, c, g, or t
  misc_feature (145)..(146): n is a, c, g, or t
  misc_feature (174)..(174): n is a, c, g, or t
  misc_feature (180)..(180): n is a, c, g, or t
  misc_feature (183)..(183): n is a, c, g, or t
  misc_feature (187)..(187): n is a, c, g, or t
  misc_feature (193)..(193): n is a, c, g, or t
  misc_feature (201)..(202): n is a, c, g, or t
  misc_feature (216)..(216): n is a, c, g, or t
  misc_feature (220)..(221): n is a, c, g, or t
  misc_feature (235)..(239): n is a, c, g, or t
  misc_feature (252)..(252): n is a, c, g, or t
  misc_feature (256)..(256): n is a, c, g, or t
  misc_feature (310)..(310): n is a, c, g, or t
  misc_feature (319)..(319): n is a, c, g, or t
ggtgtgcttcccatgtcaggcagcggctgcgacacattaacacnttcgccagctggcgnaatancnnanataggccgagaaccaanaggccctgcccaacagttagcgcagccgggaangggtgatcaggggacgctgccctgtnntaggacgacatgaaagcggcgaacgggntgaagntgngcgnacttcntcgggaannatacgcggctacanttgnncaaacgctccttannnnnacacggggccggnacgnatcaactagccgcaaagctatcttgggacacggggacgctcggcattttgcccncgacgaagnctcatagacatcccgagggggccaaccttttgaggggccccac

SEQ ID NO: 409385 - DNA, 116 bp, Homo Sapiens
gggtctgtctttgtatgaaggtcattttgaatctaacagccaggataatcacatggaagaattactggaaaaatccccactcatgtaattgctaacataataaagtttcaaattag

SEQ ID NO: 409386 - DNA, 439 bp, Homo Sapiens
  misc_feature (14)..(14): n is a, c, g, or t
  misc_feature (22)..(22): n is a, c, g, or t
  misc_feature (44)..(44): n is a, c, g, or t
  misc_feature (66)..(66): n is a, c, g, or t
  misc_feature (71)..(71): n is a, c, g, or t
  misc_feature (120)..(220): n is a, c, g, or t
  misc_feature (332)..(332): n is a, c, g, or t
ccacatgaattggnacggctgntagaagacgacacgaagttttntcatttattggtagtttacagnagttnagtggttcagaaaaaatacagtaagttgcttataaaattctgaacactnnnnnnnnnnnnnnnnnnnnnnnnnnnnnnnnnnnnnnnnnnnnnnnnnnnnnnnnnnnnnnnnnnnnnnnnnnnnnnnnnnnnnnnnnnnnnnnnnnnnnaagaacgcctggaatgattgtggcatttgaactaatattcaggtttaacaagagataattgaccatcactctattttagaggctttatttgaaccagatagaaatctatttnccacagctatcactgcctgtcacctacaacttaagggggttggggaggaagtgagagattttctgttagggccaatagggacctgctagatacccccccatcctggg

SEQ ID NO: 409387 - DNA, 237 bp, Homo Sapiens
  misc_feature (49)..(49): n is a, c, g, or t
  misc_feature (51)..(51): n is a, c, g, or t
  misc_feature (85)..(85): n is a, c, g, or t
  misc_feature (89)..(89): n is a, c, g, or t
  misc_feature (94)..(94): n is a, c, g, or t
  misc_feature (122)..(122): n is a, c, g, or t
  misc_feature (154)..(154): n is a, c, g, or t
  misc_feature (160)..(160): n is a, c, g, or t
  misc_feature (162)..(162): n is a, c, g, or t
  misc_feature (171)..(171): n is a, c, g, or t
  misc_feature (182)..(182): n is a, c, g, or t
  misc_feature (187)..(187): n is a, c, g, or t
  misc_feature (193)..(193): n is a, c, g, or t
  misc_feature (207)..(207): n is a, c, g, or t
  misc_feature (218)..(218): n is a, c, g, or t
aatccctcattcacatttgcatggttgttgaaaacggacatggactcancncttccgtccgtttcggtgatttgatgcaggaaantttncccancaaccaacccccgaaaaaattatggccnttacaccgattgtgggaccatggacaatgtcnccccancngtccgtttntggaaaaaatnttttngggttngcaaaaataaaaanacccggaaatnttggggcgtttccaaaaat

SEQ ID NO: 409388 - DNA, 541 bp, Homo Sapiens
  misc_feature (374)..(383): n is a, c, g, or t
  misc_feature (502)..(502): n is a, c, g, or t
gggtgtatagcatatagcatattctatttcaaaaatatatataactggcacatacattatacaaataataaaacaagtagttttaatgcacatgtgggctacagatgctatttttactgtgcaatagtgagacatttttaggtattgattattaatggtatataaatctactttttagtagttctataatgactttattcaaaatttatttctgatgaacttttagcatattttagatgagcaatattgttgaaaatttcatcaagtgagtaacttgcttgaatgttaggggattataaaatgggagaccatgtttcatgcctaatatatattttagcacagtacacatggatgttaattatgataaggtacannnnnnnnnncttgaaaactttcatattatggtagtttccctctacggttttgacttagaatatcacagtttctgggatgtaaatgggagttgatcagccagtcattgtgtccttctctttgcatttangttcatcctggaaaggttaaaggatgctcagaccctctt

SEQ ID NO: 409389 - DNA, 184 bp, Homo Sapiens
  misc_feature (54)..(54): n is a, c, g, or t
ggcatgaagtaattcatagtttttgttcactgaatcctgtgatttaaaaaatgnctattgtagttatgttcacaagttttgttcctagtgttacttgtttgcacgtttccccccatttcgtcaccaattagtcttgctagatatctattttagtaactgaaaatcaaatttctcggctttgctg

SEQ ID NO: 409390 - DNA, 317 bp, Homo Sapiens
  misc_feature (81)..(81): n is a, c, g, or t
  misc_feature (113)..(113): n is a, c, g, or t
  misc_feature (203)..(203): n is a, c, g, or t
cacacatcttcaatagtgtttgtctaatgaaaccatggaagccattgtggacaactttccacccgagatgaaacatccttnccacagggtcctgggcaggttcctgcagcctnctgctggagtcccacttgtcacctagaacctgtggcacattggaaccctcttgttgctagaaagttcctccctggaatacagcctgcctncccagggagttctcaccgggctgttcctgagccacacagttgacttcctcataaccacacaccctgtagagagggcggccacatctcccacagacgtctcatggaacagggcag

SEQ ID NO: 409391 - DNA, 214 bp, Homo Sapiens
  misc_feature (156)..(164): n is a, c, g, or t
tgggttctaaaatgctttgctgatggaaaaggttttgtcctgaaaagtgaattacaataggaaatggatttgcattactgacactatctgctgtgggctttgcctctattgatttaaagcaaaagggcacaattagtggccttcaaagagaggggnnnnnnnnntaacctaactctgtcctagcacgttcaattaacttgtttactttgaaggg

SEQ ID NO: 409392 - DNA, 505 bp, Homo Sapiens
  misc_feature (231)..(231): n is a, c, g, or t
  misc_feature (383)..(383): n is a, c, g, or t
atcttttaaggatgatagtatttggcaggggctgcagctggagttgagggaactatcagaagaatgaaggataggtcactgtattccttttgttgtataacgacatggagtttagcagctttatttctaacacagaggcctaatgtgagaaacaacactgaccagggcacgatagaaagaaaccagtgtttctttctagggaaagcccacagtgaggctggcatcttgganaggtggtaagtggaggaagtgggagagaggcctcacacactggtaaagtggggaaaagactgaactacagggttcggaggctctcacaactgcctgtgcagtgagcaaaattcaccaaatgcctgtaacgctttgtgaccctctttctccangagctcagcctcctcttctgttcttaggcatagtgctgcactacataatcttccagagccagtcctgctgtattacactgtggatgtgaaagagtggagctgaaactctcatttccccaaca

SEQ ID NO: 409393 - DNA, 553 bp, Homo Sapiens
cactcagcacaattacctggagatgcatccaagttataaggtgtatgaatagttcattcctttttattgctgagttctacttcatggtagatatagatgcaccatagtttgtttaaccattcacccatggtaggacacctgagacggttccaatttttggctactatgaaaaatgctattatgaacattcatatataggttttagtgtaaacataaatttttatttctctgggataaatgctgatgagtagaactgctgggatgtatggtaactccatgcttagtttttagaaaaccatgaaaaggtttcccagtgtggctgtacctctttacattttttactagcaatgcatgagtgattcgattcctttatatccttgccaatatttggtggtgttactattttttaaacattttaaccattctgattggttgcttaattcacatttccctaacggtttatgaagttgaaatctttttacatgcatttttgccatctgtacatcctcttcagtgacatgtttgctcatatcaattttctggttgaattatt

SEQ ID NO: 409394 - DNA, 168 bp, Homo Sapiens
gggaggctgctgtgtggggaagcacagacaacaggagaccccccacctgaggctcaacccacccgtgggggagtttactgtctggggaccccccttgcccatgcttccagctagaaaacaattgtggttttttttggtccaaaataaaacctcagctagctccaccac

SEQ ID NO: 409395 - DNA, 457 bp, Homo Sapiens
ggtgggtgggattagaatacccatgatatctctccatcaagagttctgagggacccaggctgatgcctccaggacaaggaacatttcattgcagtgataagggatagggaacttggaaagcaacacagtggggtaatcctgatcttttcagatgacgtttatgccatagcaagtcacttagggtttatctgaattcaagtaggtagaaaaatgttagcctaatcacatgtccagggaaggaaaactaaacatttgtgacttctcagtagaaccctgttgctagtagcaggaattgccaatgtccttcctttgtttttctaccctttggaaacatgccaggccactaactctcctgttagtttctgtcactttctgtcctctcttccatcctccaagaaataaatgctggaaataggcagagtttgtggggcaagggaaggaacaagatgattcaatg

SEQ ID NO: 409396 - DNA, 588 bp, Homo Sapiens
ggggtggctgagagaaaaatatttgtgctgtctgtcctaatcttcatttccttgtagttgtaaaatgcttaatttgttttattccagtattataagttgtgcccatgccttgtcaagactataaaatttttgatatcagggagccttgtttatctttgtattcttatcttgccacccccttcattgtcaacttgtctgccagattggtaccttgctcatagtaagtcagtgtctgttgtatgttgatccgtttgtcctttgaccatccagatctcaacctgactgactgtatgggtggtagagtagcttaaacaaaggcatgccacaaacagctaaatatggatacagaacccaagagcatcaaatgcagaacatttttcagatatttatagcctcaaagcaaagtcaattggctgaaaaagctcagcagcatagcgaaaggaaacgggagtggcaaagccagcctcactgtctgtgctttctggtaaacaatgagaacattaaaattaaatactttaccaatgaatggatggggagtgtaggacactctgggagaaatttaagatccaatctctaggattgcctgcg

SEQ ID NO: 409397 - DNA, 449 bp, Homo Sapiens
ggggggagttctaatgtcactatggcaacaagggacatggatttggggctctgcaaagaggggagccgaatgtgagacttgaataaagtgaggtctctcaaagggaacagaagcagaaaggtttcccactagcacagatgagtctgggctctcgaactcagccagaaaagctcctatgaaacccaagagagctcctacacagagaaggagaagcaagcacttaaggtaggctgaagccagcagttaatgcctgcaagttggtcaccatggaaacaacacaagaaaatctccctccactacctcattctttaatatctgaaattctaaatttacaaaattaagatacaaagaatcaatcatgaagttgaagtttatatgagtgctttctgctgttgcatgttgctcaaggtacagtaaaaccttaacatcgggttgacgactgtaacttt

SEQ ID NO: 409398 - DNA, 514 bp, Homo Sapiens
  misc_feature (71)..(71): n is a, c, g, or t
  misc_feature (126)..(126): n is a, c, g, or t
  misc_feature (155)..(155): n is a, c, g, or t
  misc_feature (172)..(172): n is a, c, g, or t
  misc_feature (211)..(211): n is a, c, g, or t
  misc_feature (245)..(245): n is a, c, g, or t
  misc_feature (258)..(258): n is a, c, g, or t
  misc_feature (322)..(322): n is a, c, g, or t
ccaagacctgattttgccaaatcatttgctcatcttacttggggggcaaacatttccgttgggaatgtaanagcatgtgccctgctattttggtttctgctttttgggccttctgccaaaactganacagaggcccttgaaacatccaggatagngattaaatctagcaagngcaattaagtaaacatttccagctcctgtcctcctttanagaaaaacaaatgaagaaaaagtttaatttctanagggagattttgngcatgagcaggactaaatctaataatcccaatagtctggcatatggcatacgtggatattcagngagaatgtaaaatcatcctgcaagcttttctgtatttatttttggggattgattacaatctctatagtacagggacttctctacatggactacaggagactgttgtctcagtccacagttcttggaatagtcatatttctgagcaactgattttttttaaccttatggacactgaattgattgtttttcact

SEQ ID NO: 409399 - DNA, 278 bp, Homo Sapiens
  misc_feature (96)..(96): n is a, c, g, or t
  misc_feature (99)..(99): n is a, c, g, or t
  misc_feature (125)..(125): n is a, c, g, or t
  misc_feature (133)..(133): n is a, c, g, or t
  misc_feature (186)..(186): n is a, c, g, or t
  misc_feature (225)..(225): n is a, c, g, or t
  misc_feature (238)..(238): n is a, c, g, or t
gacatacaaacttttatttatctgctgatttttgataaaatgtttgttagaggcagccaggggacagctttctttctcccccaagaccagctttanaanggtaattgattgtacttagttctcanaacttcanaaacaatgtaataagtaaacaatttcttaaaagtattctagataatagcaaangggattctttaacaacagtactctgttgcagtgagaggngatttttctgaanaatcccaaacctcacaatattctctatactccagcccctt

SEQ ID NO: 409400 - DNA, 615 bp, Homo Sapiens
  misc_feature (69)..(110): n is a, c, g, or t
  misc_feature (172)..(337): n is a, c, g, or t
ggggagaaagaaattcttggagaaaaatattctcttaattaagaatgcagatgtgatgtattagtgagnnnnnnnnnnnnnnnnnnnnnnnnnnnnnnnnnnnnnnnnnngaaagttattagttattttgctttggaatttcttttttaaagaggcagggtcttactctttnnnnnnnnnnnnnnnnnnnnnnnnnnnnnnnnnnnnnnnnnnnnnnnnnnnnnnnnnnnnnnnnnnnnnnnnnnnnnnnnnnnnnnnnnnnnnnnnnnnnnnnnnnnnnnnnnnnnnnnnnnnnnnnnnnnnnnnnnnnnnnnnnnnnnnnnnnnnnnnnnnnnnncttaagctgttttgaattcctgacctcaagctatcctcctgcctctctttctcaaagtactggaattacaggtgtgagccactacacccagtctggagaattttttgaatacatttaaaatcttctgagacaggcgctttatatatccatcttgagtcttttacctgaaagaaaagcatttaatcatatacacatgacttatacttgcacttctctgagaaaatgtttagcttctgtggatgtataaattctagtgtgttttgagaatacttgatttt

SEQ ID NO: 409401 - DNA, 470 bp, Homo Sapiens
  misc_feature (386)..(386): n is a, c, g, or t
  misc_feature (388)..(388): n is a, c, g, or t
gaagacctaattatatatactaagcaagaagtaatttctccctcctgcctacattttatgttttgggcacttccatttcatgtcccttgacaccttttccaataatccatctacttgatattggaaagcctcacatgaataaaactttatggcactacaggcgtttagccttccactgacattcctggcctgttcaattctgcagttcaatcaaaatcaaatctcaaaatcctcttgtcagccagcactgctttcatatgcctgagccttgtgtaaggataactgcatccaatcttccccccaagcagtgcttatattgttttattacagttcaatgagtggagttcaaaattacatgcagctgcctactatggtggttgggctgngntacgcatggacacaagtattgcccaccaggcctgaaatcattcacttactggccggccagaaagactgtgagcacttctttg

SEQ ID NO: 409402 - DNA, 344 bp, Homo Sapiens
ggtctagcttgcactttctccctgcccagaaatgtcgttaacattaacaagagctctctctggcactggcagggggtctgcaaacagaactggtttggaatatgcaatgggaggcttgaatcaaagaaaagctgtgatacagactgtggagtgtgtaagacaaactcgataagctccagtcaatactgtcaggaaaaatcacagcaaaactgatttcgatgagaagatgtcattgggctgtgagggatacttggaaaggatgcttcagcaacaataacaacaaaagagttttcatttagattgtgaagggcttgctgtgtgtgtcatgtttagggacataaata

SEQ ID NO: 409403 - DNA, 427 bp, Homo Sapiens
  misc_feature (313)..(313): n is a, c, g, or t
cagaaccttggtattttgatgccattctctctccctccttctgacaaagaagataaaaatggcgtccaggaacagatcacatctttaatgttatttacatttatctatgtaaccagaaaataattgtaattagtattaaaacacagttcctgctatgtgttctacttgtacaggcaacataatgaattcagaggtagcagaaggcaaaacttgcttagttccttccattatgggccttttctaaattttaataaggagctttgaatctttagccatacattcttgaagattagtgagtcaccaccctcctggnggagccacgttttgtctctacccattcatcttgaccatttgctgctaatcacttttcccagtctgcatcagaagaatacttcgtctccaaccttgagggtccttgcctttaggt

SEQ ID NO: 409404 - DNA, 502 bp, Homo Sapiens
aagtgcttaataacatttatttatccagtcatctaccaaaggacatcttggttgcttccaagttttggcaattatgagtaaagctgctataaacatccatgtgcagatttttgtgtgaatatgttttctatttctttgggtaaatgctaagtagtgtgattactggattgtatggtaaagtatgttttgttgtaagaaactatcaaactgttccaaaatggatgtatccttttgtattctcacccttggtgaatgagagttcctgttactccacatcctcaccagcattgagtgtggtcagtgttctggatgttggccattcaaataataggtgtgtagtggtatctcattttaatttgcatttccacatgtagaaatcttttcatatgctcatttgtcatctctatacttctggtgaggtttctgtttcaggtatttgactcatttttcaatggggttgttgtcttactgttgagttttaagagttttttgtatattttgg

SEQ ID NO: 409405 - DNA, 599 bp, Homo Sapiens
ccggctactgccactcaagtggcttcatccacagctccagggcctgctcccgaccaggaccacagaacaagggaacctgagcgaatagaaagccactgagacctgctactactatacagatccttagcccatctccaaccttgccccactgagagagtgcagcagtcaggggcccatcagagaccaggtgtgtaggagctgagagatggtaactgttccttcttcatggatgctcacagtagcacctttggatagccctgcttttgcttctttcaggtacaattatttccttagcaaagacccaggcttgctttatctttccccacagtggacaagaaggatggcactcaacctctcactcaatggcaggtgaccatcattcagttacactacatcagttacactacatctagaaagatggctgcaacctaccacaatggcaaaagttaaaaatgagcaaaggaaaaatctctgcttcataccacagagcactgtgtataggcagcatggtttggagggccacaagagggccatttagtggagccaaggatatacagatgtgttcatggtttagcctgaggttatggagggcccggggg

SEQ ID NO: 409406 - DNA, 436 bp, Homo Sapiens
  misc_feature (151)..(320): n is a, c, g, or t
  misc_feature (323)..(354): n is a, c, g, or t
aaaggcaaagccaaggagagtgccagggaaaaacataaacccttccttggtccccaagcaagaaccacacacagcttaggatctgaggtggaagatgtgggtagcaggtggggcataaaaagctaaaaagctgtggaagtccagaacttannnnnnnnnnnnnnnnnnnnnnnnnnnnnnnnnnnnnnnnnnnnnnnnnnnnnnnnnnnnnnnnnnnnnnnnnnnnnnnnnnnnnnnnnnnnnnnnnnnnnnnnnnnnnnnnnnnnnnnnnnnnnnnnnnnnnnnnnnnnnnnnnnnnnnnnnnnnnnnnnnnnnnnnnnccnnnnnnnnnnnnnnnnnnnnnnnnnnnnnnnncccactacccatatgattggtgactgttccaatgaatacaaaagagaaccagactagaatatcattttcttgctggggggtg

SEQ ID NO: 409407 - DNA, 491 bp, Homo Sapiens
aattaaaaaagcttcagctttaaatttagctttctgactctgggcttgtgccttcaacattttcacgacgacattctgctctttgaaaggaaagcatgcttggccctgtcgtggatacatttagcagtcatggaaacaccattggtcgtgctgacactttttaaaattttagacaacctcacaagaacttgaggtctcacagcataaatcccttgaagtctgcctgggcacacgccacatgcagacattggtgctttccctaccttcttgatataaaggtaaacaataccagggtttgggacagcctagttttgttagatcctgtgttgtagaaaagcctatgatggtgcgtcaaacactggatcatgctgagtgcctctagatagcatccctggaagaggaaaaacagtctttgctttaaaatgcatttaataacgagagcaacaccaacttttattgagctcttaattctgtccaggcatttttacctc

SEQ ID NO: 409408 - DNA, 432 bp, Homo Sapiens
gagaatgtcattgaagtttttcagtgcttgtttttgagatacacatactttgccttaaatctggggttttttcccttaagccatgtgaccccttctacaaactcagtgtatgtttttaatatttcctgggtactctgctatcgtcctaatacataatattagggtaaggctgccctaatacgagaacattttgagtatactattgagtatacatttgagtatacatattgagtatactatttatgccaacgtgaaggatgtgattagttttagccttcaagtcataatacataccatgcttgaaagcatttaaaaaggaatagaggaagtttttttcccattccacttggaagctgtgtacctcaagtgtgtgcacatttacaaatgggtgaaacataacttatgttagtccaagcttgatttgactttcag

SEQ ID NO: 409409 - DNA, 426 bp, Homo Sapiens
atggttgtaaattctgcctacaaccgggaaaaagtatgacactgccaaagagtcaagctcgcgaagagtatgacacagccagttctgacctggctggctgaaaagagtgtgtggcaatggcagttactttgaaactctacagcatgagtcttcaaggtttactaatttggggtctcaattctagcccacattttaaatatgaaattagggcctaaaaattaatatacctattaatggtggaaaatattaagcagagtaacttagttaacttttaaaccaacacctactacaacagtctgcccagtatgtatgtatgaaaagtaataataaatttaactagataaacaaaggtaggagaagtctttaagaaactagcagcagccatttgctatttttaagtagtgataaatcctagcaggaagagat

SEQ ID NO: 409410 - DNA, 106 bp, Homo Sapiens
gggtgatgaaatcacttgctattctgctccatcctgtccaggatgtgaattattcctttgtccagttacccgtccagtgtaatactactggcccattactgtgtag

SEQ ID NO: 409411 - DNA, 112 bp, Homo Sapiens
ggggggaacctaaatctgttttaattgcacagacacatggacaaaaagtcattttgtatctgccaagtgtggtaccttcctttgtttatttgctattaaactgtttgagaag

SEQ ID NO: 409412 - DNA, 702 bp, Homo Sapiens
attttctaatacatgttttctgctatggggcagggatgacaaccgtgtagcatgtgactaccactccccactccaatacccatggcaggcaccgctaagtactgacaagattccttcctgccaagcccagaccacagcttcagaatccatgacacagtgcacaagaaggccactatcaacttatctgttctgttatgtgaaaggaagcctttcttccctctcaaagggtgaacccacagctatacaggtagggaaccagacctcccttgaagccagaaggcaaaacccaacttcaattattaaagaacaccagaacttgatagataggccttagactgaaattgatttctttctctgagtctccctcttttttagtttacgctcttgattgaagcctcctttgggtgagaggaaaaagtcaacccttcatcacctggatacaggtcctatagctgggcatgcaggcatggattgggtcttttgcagatgccagactgaaggtgagctagatttgccagtttcctagtcctgtctgtgcttccctattgctatccctgagcttttagtagtcatgtttcatgtcccagcctggttatgactggtcagcagaatattaatggagaggtcatgagtccaagcttaatttagagccatttatgggagaagcaccaagccaatatggtggtacaggattgactacag

SEQ ID NO: 409413 - DNA, 699 bp, Homo Sapiens
  misc_feature (103)..(154): n is a, c, g, or t
  misc_feature (317)..(339): n is a, c, g, or t
gcatttttaaaagatgatctatttgtacagagctaatagaaagaattctaagacatgttgataaacaaggtggtggtgaaacaatgcatatggtctggtgtcnnnnnnnnnnnnnnnnnnnnnnnnnnnnnnnnnnnnnnnnnnnnnnnnnnnngtagaaaggagattggaagaatacacaccaaattatcagctctagttacctctggagagaagaggggctgagtatgaagaaggtcctcagcattttgcttatataattgtatataatttgagtttttcacaatgagaatgtattcatgtaactgctgagtaannnnnnnnnnnnnnnnnnnnnnntaatttatacaaatattttacaaatgtataaagtacatgtgagtagtttttacatgtatagaatgtgaaatgatcaagtcagtgtatttggactatccatcatcttgagtatttaccatttctatgtgttagtaacatttcatgtcctctcttagttactttgaaatgttcaaggcattgttgctaactattgtcaccacactgctatggaatgttaaggctaactttttcttagatctcaccttcttcaggtttaaaaatgtaacaatatgcaaatttttactttcaaataaccaggttctgtgagtgccatgactgatgtacaagaagaaaggatatcaggaagagaaaactagagta

SEQ ID NO: 409414 - DNA, 701 bp, Homo Sapiens
gcgcttgcaacttatttataaatgctgctgaacaggtttacatgcagaactatgcataaaatataaataggttagtagggccatttgagatcagagttgtttagcatgactaaacactctgctttaaatgtcaagagtcctatgggaaaagtagaggtattgtgactaatattggagtaaggccatgggtggaataggttaaacatatacatcttatatgctgaaaatctgcctcttaaactctgggttccccatgtcacttgctgagcctgaccagagaggtatatttcttcagtcttatatctcttctctatacttttctgaaagttacatggcctctttaattcccatattacttttttgtgtgtctttcttaagataatttcattttcacttttattgtaataatttatgcacatttctttaataccttttttgtgaactctcttgaaggcattgaaagtacttaatcatttttatataccatataacacatatagttttcctttgcatagagttgttttttaaaaaattcagtgaaatgggggatgtattcataagacctggaagagatgtaattgagaatatttaggaactccttggacatgcatcagagttgattctaaaatcaatttaaacacctcattgtgaggaaaagtatgcactgatcactgtagtcattaatagagttaggtggagtc

SEQ ID NO: 409415 - DNA, 704 bp, Homo Sapiens
  misc_feature (326)..(373): n is a, c, g, or t
gaatgagagacagggagttgccaccaccttgttatttctagatgatagaccgtccctagctgtggagtcacaagtagttgaattaattagtcattgaaggtcgcagccaggtggaacccctgtaactctaaggtattattggttaaataaacaaataaacaaggaacaataattatagaaaatttaacgtcactaaccgccgattagcaatacggacattactcaccacccccttaaagtagtattttgtcatctgtccgcttaactatcagcccaactgtcagcccaataggatggatttcactcaagggtttatatgaaaattnnnnnnnnnnnnnnnnnnnnnnnnnnnnnnnnnnnnnnnnnnnnnnnnaagtgaaaatttatagctgttaggaacaaagaccacaagttgaagttttatgacatttctaaaaatacttagaaatctgtgttaatgttatcgttgagaaaggaaacgatttgcttcaatttactgggctggagaatggaagagagcagtgtttttaatattttgagcaagtatcagtccttaactttttttattgcttccatgatgcattttgagaattttcaatttaaaacaaccattaggtgtatgtttttacaagtagagttttgaagaatgctagccaaattggttgaggcatcacaagttattagaaataaagtggtaacctggt

SEQ ID NO: 409416 - DNA, 263 bp, Homo Sapiens
attatactttaagttaaaggtacctgtgcacaacatgcagatttgttgcatacgtatacatgtgccatgttggtgtgatgcactccttaacttgtcgtttgcgtgaggtgtatctcctatgcctgaccctccaccctcccccgacccggcaacaggccctggtgtgtgaatgttccccaccctgtgtccaggtgttctcattgttcggtttccacctatgagtgagaacatgtggtgtttggttttccgtccttgcgatagaa

SEQ ID NO: 409417 - DNA, 544 bp, Homo Sapiens
ctaggagagctttgccccagacaagctctgcatcgaatcctggtatgactgtcatcactgcccaaactcagtgtcctcatctctccagcaggattaatgctgatctcagccttgcagaactaaccagagaacctttgagacacactcataaaccaagttgttcctgtaaatgtcccgtacctcccaggatgccaaggagaggagagcatcatcctctctggccacctttaggaggcagcagctaggcgctctgcaatgactgcctgatgggaactctggaggactgggttctggtcctgacttggccactggccccagtgtcaccttggacagcccttcacgctcactgggcctcagtctccctcttatgtaaaacaagattatcttttagatctgttttagtcctgccaccttacagtggaatggctgagggatgcttctcaaggtgtgtacagttcccataggaatggcttctcctggcctgtgggccgcctggcgggttgagtatagggtgatcactggagccctgggctgaggactgtag

SEQ ID NO: 409418 - DNA, 575 bp, Homo Sapiens
  misc_feature (120)..(169): n is a, c, g, or t
tattcgatgattgcttcccaatgccagagatttctcattaaatttgtaacagcatggtgttcaaatacttttctttttaaatttatgttttactacctaaaacataatgtttcatggtcnnnnnnnnnnnnnnnnnnnnnnnnnnnnnnnnnnnnnnnnnnnnnnnnnnttccagtacctgattaaaataacagcaacatttttgtgtatattcttccaggctttgttcaatacatagaaatgaactctttagccaaagtaggatgatagtacatattatagtaagaccatctttttaaaattcacaatgtattctaaacatctttctatggcaattttagaaggacatactattctgttccatggatgtatcataatttgttcaaaaatcacagattattgaacagttagattatttacagttttctgtcataaacaatgctttgataaaaaactatttttcatacccttttcacattattgaattacttcagaaaaataaattgctagaaatgcacttgcctcatcaaaatataacacattttaaaggcttttagttgttaccctcaatttac

SEQ ID NO: 409419 - DNA, 658 bp, Homo Sapiens
  misc_feature (220)..(563): n is a, c, g, or t
tatttttcaactttgtcacatcaagacttaattctccatctatatagataaaaatgcaatggagcttaaaaaccacaaacaacaattatccatagattgatgagcaacatctagagcttcctgggaataagtcaggcagtataattcattagtgcagagttaatgaatcatgcaggttggaaaattggtaacaatttaatttcatcaaggataatacttnnnnnnnnnnnnnnnnnnnnnnnnnnnnnnnnnnnnnnnnnnnnnnnnnnnnnnnnnnnnnnnnnnnnnnnnnnnnnnnnnnnnnnnnnnnnnnnnnnnnnnnnnnnnnnnnnnnnnnnnnnnnnnnnnnnnnnnnnnnnnnnnnnnnnnnnnnnnnnnnnnnnnnnnnnnnnnnnnnnnnnnnnnnnnnnnnnnnnnnnnnnnnnnnnnnnnnnnnnnnnnnnnnnnnnnnnnnnnnnnnnnnnnnnnnnnnnnnnnnnnnnnnnnnnnnnnnnnnnnnnnnnnnnnnnnnnnnnnnnnnnnnnnnnnnnnnnnnnnnnnnnnnnnnnnnnnnnnnnnnnnnncaactggaatttacaatgaaaatgtttccaaaggacataatgaattgtcccattatactttcaccatttatgtttaatatacttccatctcagac

SEQ ID NO: 409420 - DNA, 723 bp, Homo Sapiens
  misc_feature (179)..(237): n is a, c, g, or t
  misc_feature (629)..(639): n is a, c, g, or t
attgctagattgtatggtaagagtacacttagttttgtaaaaatttggcaaattgtcttccaaagtggctgtaccattttgcattgccatcagcaataaatgagagtttttattgctccacatcctcaccagcatttggtgttctggattttggccattctcatagatgtgttatgttnnnnnnnnnnnnnnnnnnnnnnnnnnnnnnnnnnnnnnnnnnnnnnnnnnnnnnnnnnntgactgtggacagatcttctctcatagaagtagccctcccagctggtcctgattcaatctgctgaccttgtaatgaaacagaataaagaggaggacaatggggaggaaagcagtgtttattgagcgaccacaacatgccaggcactgtatcattataatttcattttattcttccatagaagctaagaaatttttactcttgtccccattttaaagattttttgaaatgagattccaagccatagtaatgtttaagcttacagacctactaagtagtgagttcacattagggaattttgaaaagtacaaaagttataaagaagaattttaggaatttacccaccaccccattcaaaacaacattattatttagtgtaaagtcctcacagtannnnnnnnnnncctggtgtaaaaactcctttgggatttcaggctgctctgtgggtctctcatagaattttaggccccacagtggggtcctttgcc

SEQ ID NO: 409421 - DNA, 204 bp, Homo Sapiens
ttctaaagcaccaacacagaggtgatcaaaatactctaagaagcactgggaaacattgaggggatggttcaaacatcagagctaaggcctaatttcccaacagtcattatttctgtggtattttgcatattagagacgtataggttcctcacctaatccttgttttttcattttatttttaatacatatgaaagtcataataac

SEQ ID NO: 409422 - DNA, 598 bp, Homo Sapiens
aatccaatccaaggttcccaaatcagcccgcacatccagacttttctctctcctccggctttattaaaaaatccgctcgagctctcgcctttacttccgaaaaagaaaaggggaactcgcagaacccgaaaggtcctctaagccgtcgagttgccggtagggagaagaggtcggactatagtgaattggccagtcctcgtgaaactccctctagcgctaaatctctatcgcctccgtaaagccgaagccatgaagtagtatttcctccaccgaagcggtcgtgtcctagttcgacccttcctccgcgggaacggagcgagttttattctggttctaatgagctatctaagccgacgaggctcgaggattttggtgtaccttctttaagtggggtaagtaaatcggtaccttcgagggtaaggtccgatgagggtagtgccgggagtagtcttaatggtttgggtatacctagttcgtctctccctactaggggtaggaccgctaaccctaactttattcctccgcctcttactccgatcgagaatccgttatttccgataagtacggagaacccgttcttagaggagaagcctccttt

SEQ ID NO: 409423 - DNA, 598 bp, Homo Sapiens
ctaatccaatccaggttcccaaatcgcccgcacatccacacactaaaaggctctaacctcactacgctcgtaacttctcctgacggaacgatagttattcccaaaggcaagaacaaaagtatagccgcccgcaactaatgtaactaaatagggggaagactaagaggagtgcctaatttccgatatttaactgggggcgtacccagcccggttgcgacgcagagagacgtctaactacccttcgtaagagcgagactacgctatagtagaggagctgtcgtcgttaaccgcgattctaaaaccgtcacaaccgtagaatgtacgagggcgcgtcagatgtgtactgttatgttgatatctacatgcgcgtcgagcttaaaaagtaggggtagacatacggataagtgcttcgcccacccctaacgataaagaggagtcggaaccggctacccttgcgttatacgatttaactctgctagcagcccattccttccctaaggaaggcggcggaggataaccagtgaattaagggccgggttacgcgggttcgctagctataaccgctttcgaggcgcgagatttcgtaggctagttgcta

SEQ ID NO: 409424 - DNA, 603 bp, Homo Sapiens
  misc_feature (68)..(128): n is a, c, g, or t
cgaatccaatccaaggttcccaaatcgcccgcacatccacactccccaacactcgcgcctagactcgnnnnnnnnnnnnnnnnnnnnnnnnnnnnnnnnnnnnnnnnnnnnnnnnnnnnnnnnnnnnncacaccgtatcttcacctcccaggaaagggctgagagctgggactaagcgcccacccaccatagggactaataaggtacaggttatacgagggcgcccgcgtgcgaagagcgccgggaggagagggagcggaagtagccgaaggtaaagggaccccgatccgcctgggcccgctatattcgtctctaaaatcgtcacccaaaatagcgggagtttccccccaacaactacacgaataactcgccgaggaccacgtacctccgtaagcggacgtccttccccggaggcccgacgcgtccgacgaccgcacggatagacctaagatccgccgacctaccccgtaaccccaactctactacgcttaatgtttccctagcgagagaggccgacgatttcacccgggtcctgctctactaaagggtctggaacggggccggatactctatcctttaccttgcgtttccgtgtttggggct

SEQ ID NO: 409425 - DNA, 598 bp, Homo Sapiens
caaatccaatccaaggttcccaaatcagcccgcacatccacttccttttgggttctcgactacggggtggttatgggcggggtggtaacgtttggctgggagtaagacgtagtctggatgcgtgacgcgtataggtggggaggggactagcgatgtgttctaatttcggtggggtagcctgtcgagggatgaggtttcgtccccggagatgtttcgatttgtccggtgttagatggattctagggcgattttgaggggggttttctttttattgggtatagtacgctagtcggtttttatcgcgacgttttcgtgccttcgtaataagctgctgatcgctacttccgtgggtgttatttgcgaaatagagtttaatttgttcgtcttggatactatgacgggctataattcagacggcctataaagggtctatagagaaaggtaaaataaagagtataaaaaggtaataatcgagctagtagcgagtcctgagccggtatgggaggtatatgtctatgtgtgggtggtttgtcgggtgattttctctttatatctatattgatatttttgggactactcgtttcgttttatccggccg

SEQ ID NO: 409426 - DNA, 467 bp, Homo Sapiens
  misc_feature (337)..(337): n is a, c, g, or t
aacacctcacctcaaccaacacctgacgaccagcttgaggctaatacaagccgaaaaggtccagctatttggttggggcgggacgtcacaggaacccacaacaaatattagcacagtatagtttctacccgatactctaggtatcgggataggagggttcggtaggtcacaaatgggcaacaaagatggctgtagctctcttggaatgaccgggtacctcatcgtctggttgatagcacacgtaggtaagtaggcagagttcccgctatccctgcctgctgtccgacagggccgcgaccggtaaaggcaaacttaacaaggtcgacaaaagggaggngccctatttggacttagctctgatctaacgcaataggagggcgtagagaatatgaggtggataaagaacccccaacacccccccaaatatcccctcagaaaacccaaaacaaaatccaccaaccctacaa

SEQ ID NO: 409427 - DNA, 805 bp, Homo Sapiens
ccttctaaaaacttgttgacaaatccgaatccaaggtttcccaaatcgcccgcacatccaaagcgctaccgaacgctacggggaatccggtatctaactctcccaagctccttactactaacttgctacccagtcgatccctaaagggcacctacctttaactctaccgacgctaataaaggcctacggagggtttagaccctaggcatctaccttatcctattatcctatactccgaaaggagcgaacacagtagtaagctccccattcctaagactataacgatccggaacgatatccgtcgaaagacgactaaagctcaaaagccaacccggcagctcctgttactgcggctcaaccgggggcgacgccatactccgaaaaatcgcctttaataacgtccccgctatcctactcgtgagcatcgactacttcctattcttggtcttaatattttctgttgtggaggaggagttctaaagctgtaaccacgttaccctaatatcgaggacgagcgacagatccgagtttcgagagttatcgtcagcttcctcctcgaatcggcggagctttaggggtagactaaagtactatccctaactagctaccgtcttccatctacgtagtagccgaggtcctaaggtaatataaaagaagcaccgtccgctgcctatccttcgagaacgcgtcgttcttcctattaataataatcgactttttatcctatatatgtcctacctatcggcctctcgaaaagcttctaaatggtagcctcctcgcccttatttgtattatgggtaaaacg

SEQ ID NO: 409428 - DNA, 565 bp, Homo Sapiens
acgaatccaatccaggttcccaaatcgcccgcacatccaaccccgttatataaaaaagaccgaaagccggtaaccgacgtactttttgccgactcgtccgccggaacgccggagtagtgccctatagcttcctcgtcccaatccgagcccgacgccccgtgcaaggaaatctacgtcgcggagtcctcctaaccggcttcttaacccgagcgagaaccctagtagaaaaggggtcagcaagaagaacccagggaagactccgaactacaaacggagatccgagaagccttagagaactactaccgcgtggaatctttaggaagggtcacccggccggctctgttatattcgccggactcgcgccgttcgtacttaagaccttaatcaccgtatgtagacgcggagtcttcattcgaaacgtcgtctaaagcgtcggcgactttagccgataaaagataagactaaagggacgactaactggaggggtgagacctagacttagtaacgatactcggatagcctctcgcagcacttctgccggtaaactcgtcggcttcgtcggacg

SEQ ID NO: 409429 - DNA, 568 bp, Homo Sapiens
  misc_feature (95)..(104): n is a, c, g, or t
aaatccaatccaaggtttcccaaatcggcccgcacatccaacgtattaataactagcggaaataatagtacagtgccagagtgggctctcttgannnnnnnnnntacgggacggggtttatgggtgctcgggatagtaataagacctgtggcgtatttttcgggtttctggtgatatatatggaggctcagactactgtaggtttatttgcctttctgcgaagggtggttatctgcatgactaaattataggtccctataatcgtagtaagaaagtacggagttaaataaatggggtggagctgagcggggaagggataggtttgttggggaatcggcgcgcgagcgcgagcggcgttttaaagggggaggggtcgcttcccggagttgacgtatctttgggctggtggtgcgtcgaaaggttttgtactcttaataccggaaaaaccgtatatgggcgcacgtacgcgcgcgcgtacgaagggcgtagaatctggttttaactataatcgtggctgctctattgccctaaatggatcgaatggcctataggtatctcgatttcttcg

SEQ ID NO: 409430 - DNA, 569 bp, Homo Sapiens
caatccaatccaaggttcccaaatcgcccgcacatccaaacctcttctacgtcgcgatttagggggcttagcagttatattaggggaggggaaggggtaggttagggagaattggggaccgtactgggggagagaaagagatagtctttctgacggggcgcgactattgcgaagtatgcggagtaggggcgggttatttggatcccgggttagacgacttgggcggcggggctgccggcgaacgtcttcttttccccctcgtaggaggttgttggggatggtttcgagggagagagggagggtggataatctctaaggtagattgagttctttaggaagtacgattaggcgccgagaaggagggggcggtagccttcaaagagggggctaaaggacggtaaggacgttaacgtcggctaggggggtactacgaagcgggataggcggagcttccggaagggaacgacggcgaataaggactattagattaagaactgggaggattctcggggggttgtttccgggaatatctatcccttctggtttagattgtaataggtaattacgta

SEQ ID NO: 409431 - DNA, 565 bp, Homo Sapiens
cgaatgccaatccaaggttcccaaatcagcccgcacatccacaagcacataaacaagcacataaactttgggcggtgtgatgtttgtaacagaagcgactatgatctattatagtgtttcgcgttctgtttacgcgaattccctaacgctaatgaaatgagtagttgttaaaggtcacttgcgatgccgtttcgttttttaacgctgaatcgttggatgacgcgcgatctaggtacccttttctaagataaccgattcctgtcgagctatacgagcttacacttctctacgccttgtcccttgacgcccgggcgtttggtttcgctaataaagaatgagccttaggagcggtaggagaggtaccagtgctcgagctacgactaagccaacggactaactatatgcgaaggggttaaggacgcgcgataagctatacctcttgggagtacctttcccggccctccgttcgtaaagtacgaatctttctagactcggaaatagggagtaggtgcggtggcggccgtaggcccgcctcgcaaggactttttttacgctttaggcgagg

SEQ ID NO: 409432 - DNA, 638 bp, Homo Sapiens
  misc_feature (181)..(236): n is a, c, g, or t
gaatgccaatccgaaggcttcccaaatccgcccgcacatccactcggcctcttaaaaccccatagtaaaagaagagaaacgtaatacaaaagaactctaaccttccttaataccccaccctttatttacgctgttaagcttgaagataccagaaataaaagagtaagactacccatctcgnnnnnnnnnnnnnnnnnnnnnnnnnnnnnnnnnnnnnnnnnnnnnnnnnnnnnnnnctatctacctatctctctcctcctaagcccgaaacgaccggaaacgaaagtgaacacgataatcgagtaggacgacaccgagagaaaagcctcccgactcttgtttacgccctccccgcctcgccggctttaatccctctctaaaaacgtaggtaattggcgggcgccgagacgatgctccggtgttaagagatcactaaaaacgcgaaactttaggtcgaaatgatgtcctaccttccctcccctagccccgcgtaatctcgaaacccccttaaaaccccctgccccgctagtgacttcctccttctctaacgcggaaaagaccccgaaacttaaaaagaaacatggaataaaaaagggtaccgctacttttgacgggggacctccctcccggggttgacc

SEQ ID NO: 409433 - DNA, 356 bp, Homo Sapiens
aatccaatccaggttcccaaatcgcccgcacatccaaaggatcccgacgtaaaaccgaggccccccgaccgacctcgtgattaaagggatgaccgacttacctaccccgtcggttacgaaagtacttggaaggtaaccccacccgatgtagggactagaagttacctctactagccctcgatctcctcccctaccctctgcgtctaccctcgactaaatccgtcgtacggtactagacgctaaaatagacctaaaaacgacctacctactagcgaaacagacgttataaaagtcgtaaagatatttatagataaaactcctaaatagagcctgacccccgcccccgcgagactcgg

SEQ ID NO: 409434 - DNA, 571 bp, Homo Sapiens
  misc_feature (498)..(523): n is a, c, g, or t
aaatccaatccaaggtttcccaaatcagcccgcacatccaaactgtccgctgcgttctaggaaaccttattggggtccggtactactcgtttcgctgttctatttctagatagagggagtgggggctacccgttatggcttgtttcgaattgggttgggccggaagatctagttacgaaggaaaggggacgtatggagggtggatttttttgggatattgttttatgtgggtaaagggggggagttcggttggattgttggcgtttaaagcctaagtggttgtgtcgagatgtatcgatccggtgggttgtttggctggttggggggtgattacgggacgtttagactataattagaaggataatatggggatacgtccgttgaaggtagtacgctttcgttgaagtaagctcatatctagttgaggtatcgattagtcgactgagtttatatccgcgctgccgatttcgcgccccctttccgtctatttagtgcgannnnnnnnnnnnnnnnnnnnnnnnnnttctctataaccgtttatagtgcttcctcgtgtgcttaggtgttgtgc

SEQ ID NO: 409435 - DNA, 564 bp, Homo Sapiens
caaatccaatccctggttcccaaatcgcccgcacatccagacagtattcggatctgttaaagtcttccttaaggtcttcgataagtcttttacggtaaatactactgctaagataatagcgactttgatagcgggattcgccgggttgcaaagattccgattattaagagcgaacctattcttcttagtatcctaagatgccttcctcttaactaggacgtaaaacttcgcgaatatgattacgatgttattttataacgtcgcgcggacgcgttgtgcatgtggtggtttatccgcaagatctcgacgtgaggctgggcgattatttagacttctcggtttcttaacgagaggtttcgtcttctcctgcgtaaaactagcgctattcgccttccgaggccgtatctttggcccggcgtttatgatgaagacgtttattactgttttcttaaaggagactaccggtgtttgccccttaatccctcttgcttggtttaaatgaggaggatggagttaagtcgggttttcggcgcgtagtagtatttactaaccttcataatacgg

SEQ ID NO: 409436 - DNA, 570 bp, Homo Sapiens
gcaaatccaatccaggttcccaaatcgcccgcacatccaactaacaggctcccctctaggtaagaagtactccgcgagatactacaataacgaacccgcctaagaattcgcccgtggccgcagtataaaaagtctcgcctaaagcggagttaccatctccctgccccactctagaggactccactccctaatactaaccaacgtcccgcgtaacgtagaaccgcgactataagtacaactctctaaaaccctacgaggaggagaaggctctagactatcctgccacagagttataggaggcgactccggcagtagagccgtcactaccggacgagtcagaggaagcctactccacgccgtacccgacggcacctacttcaccgacgtaaatgacgtcaaaataccccacctacacgaaatactccaaaccctaacctaactctgcccgagagtcaactgctaccgaaacgccaacgtaataacacctacctcctactattcctaagaagaagaagcaccttctaagttggtatctaccgtcgtcagaagcctactccccacctcctgctt

SEQ ID NO: 409437 - DNA, 572 bp, Homo Sapiens
ctacgaatccaatccaaggttcccaaatcgcccgcacatccacggtcgctaaattcctacctaccgcgactttggtctaaacggtccgtggagggacggggaaagctaggactaggggaaggtgctgggatccgtataggaggaacggcggggaagccaatttctgggactacggggcgcctgagtgcgccattcgggtaggacatgaccccctagatcgtcgctctgaggaggtctatgcgtcgtcgaagctacgttactcgaacgttttctgggctctgggtttgcagactatgcgggggggttaatcttattatttgtgataacgtctcgtatttaggcccaaataatgtcccgcgattaagttcgattaactataggtggctacctattttcctgggtcgggcccgtcctcgggaagtaggagctcgccgccgtccgaagcgttcgaggagattcgctacgagtactacgaatgatcctcgggggtaaattccgagggtattttagacgctaacggcgtgtttagggtggataggtgttatcctataggggaggtgacgaagcttttg

SEQ ID NO: 409438 - DNA, 571 bp, Homo Sapiens
ctgcctacaatccaatccaggttcccaaatcgcccgcacatccaaaagcgcctgtagcccgcccgaaccgagtaatgcgacctattactcctaaaccgcgcgcctatgcgacgtatagccacgctaggtgccacgaacggttatggcgcgataataggatgtttatatttgcgggcgtgaagggaatgcgatggggctgtaatgttgcggtattgtaaagccgccatcgtatggataatgtatctttagcgagggcgtaattgcataattcgtagctatgtgttcgctaaggagtgatcggagctgggagcgcgttgagacgggttagcccctttggcgtatagttgttatccggttgggagcgattagtttggatgacgtagaatgttgttttgtttatgttcagtctatattgcctaaagtccgatgtcgggtgtgtccgcgttctttgtcgacggacgttcgtaaccgttcgaggagggtgggttgaatggcttagtggtggaactggataaagagatgcctattcggtgactcgtgtgtcagatgccctaatcgtgcgaaggcggat

SEQ ID NO: 409439 - DNA, 638 bp, Homo Sapiens
  misc_feature (16)..(16): n is a, c, g, or t
aatgccaatccatggnttcccaaatcgcccgcacatccaaactggccggaactaccgccaaaaataagtcaagtacaacttagagtcacgtctatctaccggaagcttctcggaaatgtttaccgtatcccctaggggatttaacggactaactctataaggacaaggtagactcggaggaggaacctctctcttctagtaacccccgcctactccaaagcaacccccttgcccctactacttcgaaatttttccccaacaaattaaagaaaacgaagaataaaataagggtgaaataaactcctttcctcgaatgagataaaaaaccggggcctctacgatccccaacgatagactgtaagctttcttccccctcgcggaactaaaaacctcctactctcatccctaaccctccctacgcgaaacgggaccgatctaaactctaacgcgcgagattcgtatttacaccctctccctacccctcgccccgagaaatagaagaaggtagaaaacgttaataattgaaccaattaactatcttaggcgactaagaaaggcggtacgaaaataaaggacaaccgaacgagggagactccgaactcttttcaaccgcccgagcctcccgtgctcgctcctag

SEQ ID NO: 409440 - DNA, 495 bp, Homo Sapiens
caatccaatccaggttcccaaatcgcccgcacatccacctcctatatacgtccggacctaaaaaggacgagggtgtgcggagaaacgcgcccgccttttactgggaacgtagaccgaggttaacgaactcgcctctactaacctctcgttaactaaagctcgatcgcgtaaccgcggacgactactggaaggcctaaaggatatgatcttcgacaaaaccaccgtatacctaacctcgccttaaagattgtcttgttagtaagaagaggagaggtaagtgtaaaaagccgatgacgtctctaaagagaaaaagaaagacgacggtggctcgatcatcaagtccgactctcgttatcgagatttccaaggcgacttactcctatttccctcgctatacgacccgaaactaaaaacgatagaagacttacgactctataaaggaaaagggcgccccctcccctcaacccctcgagcactgcccggtagtaccaattt

SEQ ID NO: 409441 - DNA, 564 bp, Homo Sapiens
  misc_feature (399)..(451): n is a, c, g, or t
  misc_feature (464)..(464): n is a, c, g, or t
atccaatccaaggttcccaaatcgcccgcacatccaccgaggatgcctcctatataggaaaatccctaagttttccctggcgcccgccctctcccccttcgaccgtactagtaacgagagggtggtaggcttaagacccgtttctcgctaagagaaggggcttatcgtctaactttacaagaggaattccgccttgcactcatgatgcgttgtctttgctgtatactgaagtgtcgtgtttggggaagcgggggggtatggggtgcttaggtagacttatgttgtggcgttggtgttgttagagatgtctactttccgaactaggatagttcgttcgttgttctgatcctactttgatcctttatggtttataatggttgtacttttctttttggtgcnnnnnnnnnnnnnnnnnnnnnnnnnnnnnnnnnnnnnnnnnnnnnnnnnnnnnacaaccactctgngaagtccggacttgcatgcacatacgtacagcatcgtgactcttctgtgatatcgcctgggttcggttcgctaaccatcattttgcggcatcatagctaa

SEQ ID NO: 409442 - DNA, 569 bp, Homo Sapiens
ccacaatccaatccaaggttcccaaatcggcccgcacatccacagctgcgagcttgtatgataagagggtaatatcctctgattaagggggtgatgaactccactgttcgagtacgagacgctacgacgtccgacctttcgggactagctcttctcggtcgtctataaatcgtttagcttagttttttggaactgccctaggtttccgaggtacgaattctgggagggtctgagtagagagggatgtttaggggtagtttttgggtattttttgggggagcgcgtctagcgtttttggcggcttgatggggattagggtagccgttctatatgatcgtggggagggcgcggtaggatatgtaacctctaagattgatcttgatggggcttgttactctatatcggtattggcctatctcgagtcggatggttctttcgctgaattaaatttaaaagaaaaaaggggagaaaacttttcctgaagaggcagtggagggtaagggagctccttaggatattacggaaaggcctcctgacgctatagggatcgaggtcacctcgacgtttcc

SEQ ID NO: 409443 - DNA, 563 bp, Homo Sapiens
  misc_feature (128)..(147): n is a, c, g, or t
aaatccaatccaggttcccaaatcagcccgcacatccactagtgttcggggcttttctattggtatttggttttcgtccgttgttcttatctatgcgagtctttttagtttttactctcttgtctgannnnnnnnnnnnnnnnnnnnaacttcccattatattgtccgcgaacgcggtaaatgtgttagctgtcattcgttaggattattagtgcgggtattaggcgaagagggggccgatgacttaccggcttaacgcctcgttctctgacttagcgatggtctcttgtctgatgatttttgagtgtaattgtttggtcgggtgtcgctgacttctggttttattgtggttcgttcgtatgtgcgagcggtaggaggtcgtctttcttcgttcggcgcgtttgttaaaggccggtcgttatccggaacggtgtactgaacgttatatggtgagggacagttggacttttgcccctaatcctctttaacctacgggagacgaatggggttcgtacgcgagcgggtatgatgccgaatgggtgatagaaccgggcgcggagaac

SEQ ID NO: 409444 - DNA, 568 bp, Homo Sapiens
  misc_feature (264)..(264): n is a, c, g, or t
cgaatgccaatccaaggttcccaaatcagcccgcacatccactatagcgctactttatatcgtcttcttgccgtagtcgggaacgggaaggaaagtctcttttaaagcgttatagttattttgacgagagagagggagagtagggtgcgcttcaattttctcttggggagtacgtatgtcgtgcatactttggacggatcgtataaccggacctgacgtcgtaagaccgagggatgtgaccttactatctatctgcgtcgtagntatgtgggttagtgtgtctgcgtaggttgtgagggcttgaggatagtctttgttcgatcttgtggtttttgcgtaggaggtcttgaacctgaagaagaggggtagttttctttctgttgcctggctgagttaaaacgtgtttctagtgggagcccgcctctgatagagttcgtcttttttatttatatagctgtgttccgtgagaggagggagtaaagtgactcggcttcgttgtgtgccgggacggggcgcgtaccgggtagtagctgcgttttgccgggcgtgtttgagcagatgttcttag

SEQ ID NO: 409445 - DNA, 567 bp, Homo Sapiens
  misc_feature (435)..(454): n is a, c, g, or t
cctaacccaaggtttcccaaaaatcagtcccgcacaatccattgtggctttagggggggcgtggtcacggcggaatgattgattagttttggggctgggcgtttaagttttgcttgttcgttcttcgatacgcttcctttgtatgagtctagatttctagcgtgtgatttgtttctgggtggcttcctttggtgtttcttagggaacgagtttgctaacggcgcgttttctcggtttttatttatcgagacggatctttctctttcgccgttaggaagtggtttcttgaaatgcgaggttcttaattaatattttatttcagttttctcggcgctttgcttatttcgctctgctctatgcttgcgtaatttctagaggatcgagtacggtttttgtcttttctcctctatgagtggaataatcttttcctctagnnnnnnnnnnnnnnnnnnnncgttgtctttagttttctagggtttaggtgtaggtatatgaacttttcttgttgaggttcgtagctgctatgtcgatgattccgggtggggcctttcccttcgctgacgtgct

SEQ ID NO: 409446 - DNA, 570 bp, Homo Sapiens
cggaatgccaatccaaggttcccaaagtccgcccgcacatccagggagagtgcgcaagagggtatggaagaactcgggctagggtgccgggagggatgtatggaatggtgtggactaggacttttgttctagagcgtttggctttatttgccttgttgttatcgttttgttcgaaaacgggtctacgctgccttcgaatccgggaaacgtccttctgattaaggtatgggagtatgctacctaccgtactttatgtggggcctcttgtataggtttagggtctatttggaggtattgatttgttcttgatctttcgagggggtgtctttgtcttgctcctcgcccgttttggattttatttttagtggacgatctggatgggtctccgtgaggtataaggtctaatccctgtccgggggactcttatctttaggggtggtttccccgtcggcggctagttccattttctcttttgagaggatcgaactaatataccttagtacttgtagcttagttgttgtactataccttctaggggcgcgtgcgctgagcctggggattgattaatgg

SEQ ID NO: 409447 - DNA, 572 bp, Homo Sapiens
ctacgaatccaatccaaggttcccaaatcagcccgcacatccataagggtagaacttccgataactcacggacctcttgtactgcagagctaaaccacagcgctggagggcgtctgataataccaaaaagtgcggtcgctgcaagcgcgcaagttcgtacaaaaccgtaaggcatgtgtaaagaggggaggcactcgttacgtctattactaactctataagagagatgggcggattagtctatatagggactttaggggccgaatagaggcggggagaagaggagtctacgaggagtagacttacggtagagaatttcttgcgaaggaaaagccttgtcgatatgtcctacactttacgctccgacctcttagtacttttctataaagctaaagggtaaaccttccgttatgtatctctagcaaggaggccgtatcgtccttacgaaagtccagatcttgagccggatatcaaactctactacgtcctttctcgatctccttggttcgaactagctccccgactcttattaaagcctactactggatcgtttctttaaatcttatggcttg

SEQ ID NO: 409448 - DNA, 569 bp, Homo Sapiens
atccaatccaaggatgcccaaatcgtcccgcacatccagtttggcttgattgtcgtattaatgtgacacgtatcgcgaggtgtaagtgacggaggagttctcgagagtcgttttctaatggggagggggaacctgacggtgtttggcgatttagcttggtccgtcgcttcgactaatccgctgattttagcgcgaagctgattggtagtttattgaaggatctccgtctgctcttgggctggtttggggggggactggggattacttttggtgtattgaaatgtggcttcggtgggcgaagatgtttgtctgataattcgagggtggggtggttattgaccgacctatagttggaactgccgtggttacgtggtgggtgactttagcataggtggtctcgattattcggatatgcgggtttgggactatgctatattgaggtggggggatgaactcggaaggggtttctgtttttctgtgtagggggagaggtagtgttcggggtgatgtttttggatgatttctgggttatattcctttgggagatgttgagggtatctattgtatcg

SEQ ID NO: 409449 - DNA, 568 bp, Homo Sapiens
cggaatgccaatccgaaggcttcccaaatcagcccgcacatccattctagttttctccgaggggctaattcgacgagggccggagcgctaccggcgaccctccaacatcctaccggccaaactattaaggatctttgtataaatgaatgcggattaccttacttgacttccgggcttgtttttaccctcttatctaactcctggggtactaagtccgaaaacctaagagattaattttatctctaattgttatttgataacgcgcggaatgctagctaggggcggaaacatttttatgcgtcccttttgcccgcgtacgctcttaaaagaatcgatagtaattaaggatccctactaacgccatctctaccgtgacgttaaaaagacgctttgattatccatttttccgaactggtccgttccttggtagcttggattagcgtttattaggttgtaagatgcagattcactgacgctactgtggcgggatgccgcgggctaaataacttaggaggtctcgatatgtaatctcgactctaagagccgactatctagagtcggaatatct

SEQ ID NO: 409450 - DNA, 569 bp, Homo Sapiens
aaatccgaatccaaggttcccaaatcggcccgcacatccaaacaacccgaagaaacttggggcgaatacgcgagtacttcccgcagccttaccgtttaaaataaactcttcggcgtctcgaactataactaaggcgaagcgaagtagtctggggcgcgcatgccgttaactatggggcgatgtagacccgagctagcactagggtccctcgtagaccggccttgactgcggaatgaaagattctagaaaggaccacatactcctcgaagagagactatttgaattttccagtctttttactcgaaaaccgggcgctaggaacgcatgctacccggcccgctagacacctagaaccgttccctccttttccacgtacctcctacctcctaaactgttcctctccgcccgaggaactaaaggtcccgactagttccctagcgaagaccagcttcgcgcgcgaatagctctcgaacgttaactcgtattttcgaccgaaagtgggccgtcccttcttaaaactttggatccctaaaagactttccctatgaatctcctaaatattagagagc

SEQ ID NO: 409451 - DNA, 667 bp, Homo Sapiens
aactacaaatcctaatccaaggattcccaaatcagcccgcacatccacacgtagagcccgccacgaacctttctttctaactaccctccgctcccgcccgagaactcgattttactaaactacgcgcctccagaagctcgattctttatatttcgtattatttcgtgtccgctgatattgcgagggctactacgggccgaaagccggggatccgtgaattctggttctgactatagcgctgatagagtagatagctactaacggattgctttgtctgtctagcctcgcctcccgtatgcggggttaaatctatgtacgcgtttataattctgggtcctaagatccgggtcgagattctttatacggggtgtgcatgactgaatcctggcctcaagagtcctagctcgatctaaaagggaacacgagtcttaaaagaggggcggctctttgaggagatctcaccttcgatagatagcggagtctctcctatctctcaattcgcgggtattgccctggctggtccgtcctctagtatcgcctactggcggcttcccctataacgtcgggccgatgacccgtttacgactgatgcgggcgcttctttgcgtttggattttatttgcagagtttgacctgcggtcgtgagaactaccgactaaattcgggt

SEQ ID NO: 409452 - DNA, 533 bp, Homo Sapiens
caaaactcaaacaatccccagaacccaacaagacaaacttctaaaatatctacaacaacaccaaaaaggcaaactaaaagtaaaacacctgaccaaacaataaccaaaacctcaaccgtattcacaaaactacgaagcctaaacataaccggcaacagaagcctaggaagagccctagccggctacgcaagaccactcggaaccgtcagacgattccgagcgagaggtaatatactactaccgtctcttcgatcgaccctccccttcttaagcctacgcaaagcaccacaactaagattccgccgatcaatgttcagtagactacaaagcggactactaagacagatatcgaccgtcacttcaagaaaaggaactagaagggaatgcggaggactaaggggccttctaagaggagacttttctctaataggagtaccatcctacgacccataatagtatacatcgtaggacgcctacccggaattcaaggggggggctaggtctaattgtaactagcggaaggctatgtcaga

SEQ ID NO: 409453 - DNA, 565 bp, Homo Sapiens
gaatccaatccaaggttcccaaatcggcccgcacatccgtccctttaagggtagcgctggggatggtttcgagtattcttttgcgataagtctgggagtatagtgagaaaggctttaacgccctgcagagagaaaaactttccctcgagcgagcggggctcctacagagtgccgcaagcggagtgttggctcatgtccgaactcttgcgactccgcgctagggttgcgatactagtaggggtagccggcttagtgtagggggttgagtgggatatgctattattgctacttctgcgtctaggtatttgatgaatgttgattcttatgtttcgatgtcgcttggataccgagaaaagtcctccctgttaagggaggctaggtgtgaaaggataccgaggatcctttaaagcccctcgcgggcctggtagctcctttagactgatctttgtttgtggctggtagttctactggttaagaccattgacggagaaaggaggacctccgcttaaggatgcccctttgaattttgagctttcacccaggttaggtatattttcgactctcc

SEQ ID NO: 409454 - DNA, 565 bp, Homo Sapiens
  misc_feature (326)..(348): n is a, c, g, or t
taatccaatccaaggttcccaaatcgccccgcacatccagcgctgttgggtacgggaggttcgtactatgaatgttactcttactcgatcggactggaccttttcccgggcgcgaaggcgcggcgctaattaggtggtgggtaggcgcggggaggtgccgggttctctttagcgttaaccttaatagacggcgccgactaggctatctacaacgacaaaaagccgaaggggcgtcgtaaagtaagttaaagggatgtgcgatttttagccgagcgttaatgcagtcagctccggtgggtataattttgttgtggctagagagcggnnnnnnnnnnnnnnnnnnnnnnnaattgttattacccgaggtggagtggttgccgttttggggttgggtggtacgctttgggtgtgtcgtctttttatgctgcgctattttgttctggtgaggggatcgccgtttttggggtgggcgcggtccttggaaggagggggtatagttgcgattctttgatggtcttagcgtcggattggtggcggttggttatcgagttttagttttgggtgg

SEQ ID NO: 409455 - DNA, 570 bp, Homo Sapiens
  misc_feature (484)..(493): n is a, c, g, or t
aaatccgaatccaaggtttcccaaatcgtcccgcacatccacaagcacataaacggggggctggatgatgtccgatcgcgtataggtttagggactaaggtgatttatctttgcggtaaatttctattcgctatcgattgtcgttgtgttttaacctttaataaaagtatctacttatttttacggggaggagtaacgaggtttgagcttagcgagaagagggtactcgaaatagagttgaatatgatggtctactatttgcctccgattgtgtatacgggctcccggaccgctggtggcttcgattgtacgctctggcgcgagcagccgcctagggtacgctaatgtttgtttctagtggttgggggttgcgaaaagaaaggaggctgagggggaggcggctttgagccgggaatatctagaggggaagagggaaagacttattcttcccgttactctttatagtttggaacggggcgagttnnnnnnnnnntgtacgaccggtttcttaacgtttacttctctttctcctcggctcagctagccttaataaggtacgagtggtacctc

SEQ ID NO: 409456 - DNA, 632 bp, Homo Sapiens
  misc_feature (299)..(498): n is a, c, g, or t
  misc_feature (569)..(590): n is a, c, g, or t
tacgaaatgcctaatccgaaggattcccaaatcagaattaatcctcctacctcaatctcccggaatgttaaagtttgcgaacgtagggcgctactgctaacctgagtggaggtttttgtgttatttttaattagtttggaatactagaggcttgtttacttcgaggtgagtctttaattagggtacgattcgattttagagctggggggtgggccgagtttgctcccgggggtattgctatttcgggtggatggggtgtttacgcctttgggggttgaagattaactaaacgtaataannnnnnnnnnnnnnnnnnnnnnnnnnnnnnnnnnnnnnnnnnnnnnnnnnnnnnnnnnnnnnnnnnnnnnnnnnnnnnnnnnnnnnnnnnnnnnnnnnnnnnnnnnnnnnnnnnnnnnnnnnnnnnnnnnnnnnnnnnnnnnnnnnnnnnnnnnnnnnnnnnnnnnnnnnnnnnnnnnnnnnnnnnnnnnnnnnnnnnnnagaattacgaaatactagagtcacgccgctacgatcccgacctaaatagtgaggcccgagctcttatcttnnnnnnnnnnnnnnnnnnnnnnacaaaccacctctggggaaagtcccggaactttgccattgcc

SEQ ID NO: 409457 - DNA, 680 bp, Homo Sapiens
ataactacgaaatgcctattccaaggattcccataatcagcccgccacatccaaagtatgggaaaatcttagacagaccgtattaccaagttgttctgtttcccctccctctctcccaccccatgtctcttttcgcccttctcccgccctcactcacatgaccgtaacaagaccatcaacaaccgctcgatcccgttccgtctcctcatcatccttcaagaccagaccatccacacccaacaacaacaaagacccgaagacctaccccaccctaaaagcaggagactacgactcctcctatacaatacgcagtctagttttctaagagagtataggaggagctaaatttatctttaacgccgcactagtcgtactactttccctaacgactttcgatatcgtcgatataatttcttgcctcgtcctaactcttctctctatcgccgtcgacttcgaagtctgcggatccatcgtccggactatgcgaggatcgaggaggaaccgtccgcttcgggacctgcctaagcatgagcggttgctctatcctcgaggactttccgtgggttgcgtaggtactaccgataatacgcgtcggcgaaaccctagggctcgttggttcatcttctttctaatgagggggtctaattaggctccttagggactaactatcttcgtattaa

SEQ ID NO: 409458 - DNA, 669 bp, Homo Sapiens
atactacgaatgcctaatccaaggattcccaaatcgcccgcacatcctgaacggtaaaagccccagaggccctagtacgaaatccgcgactaagggattaaacccctagaagactttatatcatcttaggcagacgacccgaaacctgagaatggccattgaacaaagtttgtatacgctacctacgtagactaacggccgaccgacatcccttaatagagggaaagttactagaacgccatccgaaccccgccaaccgaaccacacccgacgagaacatgctgcccgactctatcctcttaaccgtccttctatatgccgcttcctagaacctcgttttaaaaatcgtcttaagggaaaagaagacttctcccgatatagagccccgggagctctaagaatcgtctaacaagaatctctaaagacccgaggcccgcgtggggaccccgacttaactcgcggaacccgaagagcctccgactgggcgccggcccctagcctgccccgaccgaactcctgcctatctactaccgacgcgatgaatcccaaccgactctaagattctctcgtcaagaacccgtaccctccgctccgctacctttaaggaaatctctctccgaatcgacctaggaagcgatgtcatttatttgttgggttaccgctaaagcg

SEQ ID NO: 409459 - DNA, 674 bp, Homo Sapiens
aataacctacgtaatgcctaatccaaggttcccaaatcagcccgcacaatccaaagggggaggggatatttacgggagttaggctaagtgtgggtgagactgccgggttatggggtgggtcggaggggttctatacctttggtcgacagtactattagaggtgtaagctccgctcttcgctgtgttcgcgacagttcgagcttagacggcggtgacgattttgaccctagtagaagggaagaggctgggatgcggagtattatgcctcgaacattattgagtcgatgtttgtctgtagctagcccttctcatacgcgagcaattagcgctagggttactggacgctatacgtgtgacctccctaatataaccttagcgctcaaggagcgaggttaacgctacctagagagagcatgtagagctctaacctcgagcgtacgataagggattcagcaggctctgacgttctccgtccgcagacttacgattgttcttaagagtcggttagcgactacgagtctaattccggtttttggtaagtttttggggagcctcagtaggatcgaagtgaatattcttgggcgcttacgtagtttttctaggacttcttcgtgttagcggggaggagaggtgtctttgtcggcttcgaagatttttaatagcgagtggtgatg

SEQ ID NO: 409460 - DNA, 377 bp, Homo Sapiens
acgaatgcctaatccaaggattcccaaaatcagcccgcacatccacggttttgcggagtggggggctagtaactaatcgcttagcgtgggttgccgatactaaccgaagctttgagagccgtttggtccggtactcttgttttgcgagaatacgactaggcacctggaagaatagtgtagtttcctgcgcgttcgtacgccttcatacgcgtccgttggggcttttgttgggataaggcccgctgtccgtgctccggttgactgaataccttttttcccccgtctgatggtttgcggttggttaagaagctttttgtgattgtgtttgagaagggaagacgtattttgctctgtgtcggctttcttttcctacttgg

SEQ ID NO: 409461 - DNA, 491 bp, Homo Sapiens
tttccctacgaatgcctaatccaaggttcccaaatcggcccgcacatccacaagcacataaaaggaaaaggtcccgtttttatagtagtttaaacgcgctgcttagactagaactgacgatcgcgtagttttaactatctctagcctaggacttttaggatggaattgtatctcttccctaggactttatttgtgataatggtttaatagatttagactttagacttatcttgaggggtggagctatccgcctaaaagaaaagacttgtgaaaggcccatattggctcgaggtactaggagggatacttttgaccggcggggatggagttgctgtctgaggaataaggggggatcgttacttctattcctcccgacgatcgattagctctgaatttcctttaatttgtgtccccgattcttggtgcttgggcttgtttagcttcctgtcgaagggacgcgccggggggacatcgtttggggcccctaaggt

SEQ ID NO: 409462 - DNA, 482 bp, Homo Sapiens
  misc_feature (50)..(58): n is a, c, g, or t
ataacctacgaatccaatccaaggcttcccaaatcagcccgcacatcctnnnnnnnnnagttaggcttagtagcttgaatttacgttagtcttttttcccccttgggcgtggtatgctgtatgttggcgtctgggaagggcctactcgtctccctaggacgagctactagaaggttgcgtttactcggaggttttttccatcgggttataggcttttggttcttacgttatggttaactatatccgtggagggtcgtttgttcttcgaacttgagcgttcgtaagtgtacttttctttcgttgaaggcgttttactaatagtagaaggacgtttgactaggtggatttgggaccctttgtgcgagaggttctgcggatttacgggtgttttggcggtgttgggtatacggtgaggcttttgtggggtggttgaggcgagagttttgcgattggaatttcgggttataacgaataatgctatt

SEQ ID NO: 409463 - DNA, 656 bp, Homo Sapiens
actacgaatgcctaatccaaggattcccaaatcagcccgcacatccataggttgttagatttacctatttagataggaggagttctgacggtcttgaatctatatttttccttaagggtatgttttggattaggtgtgttatgatggggccggggtggattatattgcggcgtaacgtccttacccctaagtaaggggcctgagttatttgagtgtttttccggggactagggaggtagtgttctcggtaggcgttactttagggattcggggggcgacgttctaacgactactatgaaagctatttttcggacgatttgcgttcgacgagtgggggacgctctattatagggtgtcttcgaggtttaaatttgtcttagctgagggctcttgggtttaatgtataaaatttaccggtcgtagttttccgattttgctgcctgggtaagttctcggggtgtacctatggacgtgctattcatttttctccttagtcgtattgaaagggtatgatgtttctctcttctcgtgtgcgtttttgaaaaaaagggtgggtattttcggtctcttttcgattggttaatgctctactgtttgtatggtggtgtatatccttaagtggatttgtggtttttttcgttttggggtagaggtct

SEQ ID NO: 409464 - DNA, 668 bp, Homo Sapiens
  misc_feature (259)..(259): n is a, c, g, or t
taacctacaatgccaatccaaggttcccaaatcgcccgcacatcctggaggggcctgtagtcagacggtttggtactgaggcggaggtttaagaaggtgttttgcgactgttatccggaagagtgctttgaggagtgtgtgtggccggatacggacttattgttaggagacggtctaaacctttcgtctaagttccctcgggaaggggattgtgggttgactgctacacctctagcggcagcgaggagacgtttgaggnaggcggggtgtgtgtggcgtgctgcttaagaacttttgtatttttattacgtttgtatttttacgatcggtataggttcttgcaggtatgcggcgcgggctatgtaggaccgtaggaagggcgagaaaaccgggaaataaagcgaggggagcgttacgatgtaggaaggaactttaatttactcgggataccgaatatgaaagtaggcctctagcaaactttctacccggagagtagagtagagacctcctcgccccgacgagtatccgagactagtttgactacgagactctctatatcttttactttgggagggggttaccgacgctcaggcctcgtcgaccttcccgttgcccgcgtctatggttaatgcgctttaggttttgtggctgtacgcgtcttttagttt

SEQ ID NO: 409465 - DNA, 677 bp, Homo Sapiens
ataactacgaaatgcctaatccgaaggattcccaatatcagcccgcacatcctaacggctaaagggtgcctaagacgtacgcgtatgtaggggtcgcagatgtagttcttttttcgggaaggctgataagggaggtggggaaaaggtttgggcgccgttatctggcttttagtgccggtggttaggatctggagggcgtttttaaaccttacttgcctcctttaattcttcgtgataagggtgggccgctgcccgcgccgcgctacgtacctatatacctttacgatacttatctaccgtccctctattcatttcgttcctctttagattatgtataggttggccttatcgaggaataaggactgcttgggattttcttagggggattaaagactttctcgtcgcgggttactgaacgtactcggataagcgtcgtgattctccttaaggctaccgtccgtgggccgggcgatgctttactaatcggctagagaatgtttgtgaaacgttatccggaatagcggttgggtacgaggaattctcctgcgattccgggatcgatccggaaagggggagaactccctgtgtatagaggtctcttccttacgtcctctaatggcggagtccgatgtgggccgtttctttttcggtgaaagtctcttttaaacgctatcctc

SEQ ID NO: 409466 - DNA, 670 bp, Homo Sapiens
atacacctacgaatgccaatccaaggttcccaatatcacccgcacatcctaaggggacaagacatatagacgtatgctacaacctcctctcctctcctggcctcactctcacaacctgcctttgcccacccacctactcaacagccgaggcgccttccgccgtagccgcctcgacggattcccgcttgggtgggaacgtcggacgaatatgcgtatccctacctcgaaatagagggatccgaaccgtatgtgtctaagtcagtaatgctaagaggaagctacactacggagcccaagccctaagcgatagacccggatatataaggagattacctagataaggtttcagtaactccgatgctttgcgatctagaaattccggcgatagcgtatgtctcatacctactaccgtatttcaaagccccttccatggaagccctggcggactaatattgtataggattttcggatgcggtcaggaacctacgagagccggtttagaacgcgcctatgggcaagtggtaagcgtaatagacggccgacgccctaatttaacgtaagacgaagatgtgccctcgtaaaagcgaggtaaacgcccctttaattaaacttccggcaacttcccgaaacccgaaaatccgtgttgctataatataaagacgagcgagac

SEQ ID NO: 409467 - DNA, 493 bp, Homo Sapiens
aaatacgaagcctaatccgaaggttcccaaatcagcccgcacatcctgataaactacggggtagggagcgccgagtaaatgatacgtgcgggtctcgctatgttgggaagctacgcaattttctggcttatgcccttcttatctctctaacggtcttacccttggtgtccctaagattcctcgtcgatatcgttttctattgtgcgcgattccgcggattttatctctgattagcttcgggtatatggctttgttaatcttaccctgttgtggttatcgtagctttcgagttatgtctaggctcgcgagctactatcttgctggtgaatctaaggaatcgctctaggtagaggatgggttgttttgtatggtgcgtttttagatatatttttcgattatgtttccctaattgtttcgtcgctgtttccggtaatagacttacctactcgtactccctaagcgaggtgctccttccttttacgtacctatttct

SEQ ID NO: 409468 - DNA, 678 bp, Homo Sapiens
  misc_feature (522)..(522): n is a, c, g, or t
  misc_feature (634)..(634): n is a, c, g, or t
aaacctacgaatgcctaatccaaggttcccaaatcgcccgcacatcctggggcgggttctcgtccggaggtaatgactgaatggggtgtgaaaggaaatagaccgtgttcctgtacgacgtcggtttgttagcggtcgaatgtttctcttggcgatttaatcttcttgattcggaggtgggaaatgtcgtctttggtggtggacgttccccgggggttaggagaacgatcgcgcgcttggatatataactttgaggggacacgtactggtttgggagtgtgcgaaggagaggggatgaagattggattaagtattattgaggattaagtattgatgttgccttcgaaggcgagtccccgtaacgtatcgcgaaccttggttgtgtgcctaactttctttgttatctccgcttttgtcgtagaaagcgaaatcttaatttccgtaaagaaagcttctccgttagggtggggtatctaccgtatcgacgccatttattccctcgatttttggtgtggtaagccntgtgtttgggcgttgttgggcgtgtgttttggggtataatatttactatatctctgacgaagtctagggttttggggggtttacttctaatcctatttcgaggggggcgttnaccccgaggggtttcgtgaagttaggggatattccctggacgaa

SEQ ID NO: 409469 - DNA, 661 bp, Homo Sapiens
acacctacaaatccaatccaaggttcccaaatcggcccgcacatcctgagcggatgcttaatcgcggttgactcggggaggtccccgtttcttggaatactcgatcggtcgcctttgttttaggagtaatgatttttcggattgatgttgcttgctgactttcttagtaggtgtgggggtattatctccgtcgtgcgagactagacctcttataatgtgttggagtggatcccgttcttggtcgcgaggaggcgtaagtgttttgatttttaagatgcccgaggttatgggagttttatttcgttttattttgaagtgacttctctacctggtgctgtgaagtgtatcgtattcattgttatgaccgcctccctcgagtatttttcgctgtttttgggttgtgtggtagccgatgagttcgcgatgacgtatgcttagcggataccgtaagtgtttggaggaggaatgggtggttttggtgttttttactatggttttgtgaagacgataagctatggagagggtgtctgtgggtcgagagatgtttgaagggctttatgttttgtgaataatcgttggggatagtcttcgaagtgtggagtgatttgcgcgggctttgttctcctagtgaagggtttttgttcgttttcctgccgctcga

SEQ ID NO: 409470 - DNA, 438 bp, Homo Sapiens
  misc_feature (299)..(333): n is a, c, g, or t
  misc_feature (353)..(361): n is a, c, g, or t
taacctactaatgcctaatccaaggttcccaaatcgcccgcacatccacaagcacataaagttttttgttacctagtggccgatttcggatagtaggggtaggggcggatactagggatagggtaaggaggaggccattttggtctgaaggttttattttatcgcgcctaacggggatgctttacggagtgtattctgggttaggggcggtttttttgtaggtcgcgtaattcgctgccgggtagccctcgggtggaccgagtaggggtttaggggggggaatcgcccgattctctaannnnnnnnnnnnnnnnnnnnnnnnnnnnnnnnnnnaaagtttgtgtataaatgannnnnnnnnaaatgcggcgcggtcgttctattgggacccgcggggttaatggccttgggttatatatttaaatggatggtggctgg

SEQ ID NO: 409471 - DNA, 266 bp, Homo Sapiens
cattattcaacctgaaaatggtcagcatatttaactaagtgtgaataattaattttattaaactatggacaattagttgatctgggttctattatagatgagatatatatgactataatatggctcttcattgaaatagatattatataacattaaatgttgaaaatccagttatatttttatatagaaagtaggcccccacacactcacttcaaactttttaaaatcaacattggaggtacaatttataaataataacactcatc

SEQ ID NO: 409472 - DNA, 322 bp, Homo Sapiens
gctatttctgggctccctatttgtttccagtgattatgtctattttttcaccattaccaccctatcttaattactgtagctttatagtgagtcttaaagttgggtaatatcagtcttctgacctttttctcctttcaatattgtgccagctattctgggtcttttgcctttccatgttaaactttagaaccagtttgtcaggatccacaaaatactttgctgggttttgattgggattgcattgaatccacaggtcaagttggcaaaactgacatacagcaatgccagtttattgttttgtgatagccttaatccagctagt

SEQ ID NO: 409473 - DNA, 355 bp, Homo Sapiens
ctctgtgactcaggagcagggatctcaggcagctgatatcaaaaccacccagccccatccccaggaggcgacattccaatgctaggaccaatcccagatatctggtcccgatggtgaaatggaacaaagacctgcttgggaataaaccaaatgatttctcatgacgttgaacataagttctcccaagccatcatcttggtagaaaatgggacttattccttgacaggccccacccccttcagaaagaggcccttgaccctgataggttctctctaaaacccgtatattaacgcatctggccaacttgggttataaaattcagccttgtgttggcaactcgaaacatcaccagaga

SEQ ID NO: 409474 - DNA, 427 bp, Homo Sapiens
aaaaatgaagtcccattagaaagctgatggataatatatcacatattactcatttgagtatcaggacccaagaaaacaagatgaatttatttaaattgcaatgtcccttgaagcttgtatgagctctctaaaaggaaatacttttaaagttcttataaagagagaaatttatagccaagtgtgaaaaatgaagtgcagttttgaggaccagttcccatcctgtcccttcctggggagcaagaggtgtgatgttgatggagcagtgatgaaagcagggggaatcatggcaaacacccgctgtgtgatgattagatgctaggcagtttccgtgctgggcatcgtatattcctttcatttgagaagtggtattgcatagtggttagaagcctcagtgttggacccagacttctaggttcaaatcctgccc

SEQ ID NO: 409475 - DNA, 801 bp, Homo Sapiens
  misc_feature (416)..(475): n is a, c, g, or t
  misc_feature (694)..(713): n is a, c, g, or t
ctttttaaccacaaatagcatttaagaattagtgttaatgtgttacaaatggctcattgagttacttttccttctcagccccaaggcccaaagttttcttcaagagtggtagagaatctctctctcttcagtttgcattattttcttgtaggaagattgtttttttaatcttagaaaccagaataattgtgtaatgtccccacctaacccccaactcatcaaaattcagagatgccttacatgtggtgctatttccaatatatacatacttataaatgtgtttaaaaattccaactgaatttattaacttaagtatgagactctgagaagatcatatgggttgtaaatgaaatatgtggaagggcaagtaattctaagtgtaattagcttcaatttgcaggaaaatgatgaatacnnnnnnnnnnnnnnnnnnnnnnnnnnnnnnnnnnnnnnnnnnnnnnnnnnnnnnnnnnnnatgacagcttttgttagaaaacaattggcttagcttgcattaaaattatacaagtccagtcaagtaaaccaaagtaactggcaaagtaaaatgtctcattttccgtcaaaggagaaattgtttgtacataccaaatctaagaacgtgaggctccatcttgaaacaaccatagtttgttttacatgaaagctataaacaagaagtacaacaaaacaaagnnnnnnnnnnnnnnnnnnnnaaaacattacttttcaagcattatttcacaaacatcctaccatatcttttacttccaatcaaaattgaacccacttttctctccagct

SEQ ID NO: 409476 - DNA, 153 bp, Homo Sapiens
atttcagcagaatcaagtcccatgtaaaatgtaatctggacatgaagggtaatgttcccctaagactaccttagaagtcttcactctggagaatgaagattctcaagggatactggccctttggttaaaacgcagcattgatgtctttagctt

SEQ ID NO: 409477 - DNA, 471 bp, Homo Sapiens
gaagaaattgatggttagacatgttcagaatcagatcatgaggacacctaattcttccggaaatcccttaacactaaattgatgtttcgatgggttaaatgctttggctgagatcacatagccaaggtagaaccaaagccctccaaatcaatgctgccctcctgaaacacagatctcataatacacccattgtgcatctcctcagcttaaaaaggaggaccgctgatgtgcatcacggaagatttccatcacatcatggtgactggagatttatatagtgcttgcagtatactttggttacttttacgttgagatctgctaccatggaatacagtccagataaccacagtgccaaagtaggttaaagagggtctggaattgccgcttgaactagtgaggcagaaaagttgggaatctggagtgcatggtagaaggaagaccacttcaacagaagaggagaacaattgctgt

SEQ ID NO: 409478 - DNA, 315 bp, Homo Sapiens
gcaagaatcttctattttatttaaatgaatgccatcttttttagtgcaaagataacattcatcctcagagctacaattttcaagattggtgatgattggtatgctaaccaaatttccagaagctcattgatttttttaccagtgatatgagacagcacctttattttcacccatgtcgtgcaagcgatgttcatagtttcacatgtatgtgaggatagatactagagaggtactttatatgctactttatttaataagctaactctttatacattaaaaagtatcttagagttccacagtggagttagaacagga

SEQ ID NO: 409479 - DNA, 173 bp, Homo Sapiens
aaatttctttatcactattttcattgctgcataatagacgtacacactttcaggatacatgtgatattttgataccttcatataatgtgtaaagatcaaatctgggtaatttggatatccatcaacttcaatatttatcttttctttatgctaggaacattcaagtgattctc

SEQ ID NO: 409480 - DNA, 209 bp, Homo Sapiens
taataagtcaagggggaaatgtatgcttttctcaaggaaaatgttacttttatattaacgtttctggtaattacagcaacatctagtgaagacaaaccagcattacaatccactggtgtaactaacagtatcaaactctactctcagttatggtctataggacccccattaaagtggtcatcttaatgctaatattctaaccctatatt

SEQ ID NO: 409481 - DNA, 161 bp, Homo Sapiens
gacttgttaaggtaaaaggacacatttgttttaactttagatgtattcactttgcttagctgtactttgtacacataaaatctaaagcgctacattttaatatttgttgattaatgagtaattttagtattaaggcacccagaatttaatgatgtagatgt

SEQ ID NO: 409482 - DNA, 281 bp, Homo Sapiens
agggctttaccaggctatatataagagaaaaaatatggcctcgatcaggaattgttaaactttttctttaaagggccatatagtacatattttaggttctgcagactatgcagcccctgtcccaagtattcagctctgtcattgtacatccacagacaggacagaaaagaatgagcaagaatatgttccagtaaaacttttattttacaaaagcagatggcagcccctgggcctttagcttttctgccccagatgggtaaataacaagggaaactattcta

SEQ ID NO: 409483 - DNA, 133 bp, Homo Sapiens
tttaaaatcataatagaatggcctttagaagaattatacttgcccttccctttgtgaatgaccatatcatgtttttctcatttcatcaggaaaaatgttatttttggcaatcaaatttagagattatatcctt

SEQ ID NO: 409484 - DNA, 145 bp, Homo Sapiens
gatttctatctctttgttgatactctcatcttgctcatatatccttttcctcactagttctttctctgtgttttactttcactcttggagtatttaagacactttgttgtaaagtcttttgtctagtagctccaatgcctgtttt

SEQ ID NO: 409485 - DNA, 525 bp, Homo Sapiens
  misc_feature (471)..(471): n is a, c, g, or t
ccttccctgacccaaaacatgtcaccaagttcaaattattcttaacccttaactacttccagaattcacctacttctgtccatccaaactcctcctgacttagttctgcctataataaaacttcagtaaggtaaggtaataatcacacaagttgtttttcgtcacctgatctaactcattccaatctataatccattcagtcagaaaagccatcttactaataaagtgcaaattgaatattcagtcccttgcttaaacttatcttatgaattacaagttccttagaaagacagcataagttccctatttcaccaacctcatcttccagcctttcttcttatgaaccctagattttagctgaatcaagacttcctggatcagtgtcaatcattcaatggctcttcagtttcatatatcttgttcccactacttgaaatacttttgctatgagatcttattcccatccaccanaaaaatgcttactttaccttttgaagctcagcccaggcattttaactctaggaa

SEQ ID NO: 409486 - DNA, 537 bp, Homo Sapiens
  misc_feature (403)..(403): n is a, c, g, or t
tctcttaaggaaagtttttagaggctacgtatgcttatatgtcactggttagaacttagttgcatgatccgatgctagaaaatctagcctttattctgaaagagtatgtgcacagcaacagaaaacaaacctagaacaaatattgaggatgacctgctgtttgaagaaaaagcaagaaattaaatttagctcatagtttacttcctatgtaaaatataaataatcttattgtcagatatctttgttttagaaagtgactgctaatgttgggctagtactagagagaattttctgttatgtacattttatttagatttgacaagctttgggtcagtaatttcgttacgggtaggcactaatttttcaaagctttgggataagtaggggcagcaagagaaactanaagttgttttatggtccccttagatttcttcatctctgattgttagttattaatggccatattttaattaactgcggaagcaggtaaaaatgactttatcatgtgtttccttctttaaaacggctttacttaca

SEQ ID NO: 409487 - DNA, 558 bp, Homo Sapiens
  misc_feature (530)..(530): n is a, c, g, or t
ctaatttcatagagaacaggtattacaagatctatagctttaaaaaaagaaacctaattctaaaaattagaggaaatgactcaactctcatgaaaaatcttttgcaattctgatttctcagttattagatgaattttcatatcttacatacttctttattagtctcaaacatttgtatttttctattcctcacttctttcctaagagatgtagatacaatcaagagaagttccaaatgcatgagcttgaaccagtggcttacaatgcagctaaagctcttgtcaatgaaggccagggttcttgtcagtttatctcaaatttctacaaggctactaaaattaaccagggagctgcggctccatttttatattcttattgccccagccaaattctgatatagctaattgcttgtcccccacccaaaattctcttctattttggttaactcatatctctctgcatgatctaagcttcataggtacccatacccactagagctctggccattgggcaaatgtactgcatcctanagatggcagtatatgttaataaagagcc

SEQ ID NO: 409488 - DNA, 691 bp, Homo Sapiens
  misc_feature (135)..(171): n is a, c, g, or t
  misc_feature (246)..(289): n is a, c, g, or t
gacagttctattttgctttatttgacaaataatcatgtctcatcagtcatatggaatcccacggaatttgccatttcacttttaacgctgtctgaaatctcattgaatgatatctcaacttggtatttaagaccnnnnnnnnnnnnnnnnnnnnnnnnnnnnnnnnnnnnngatgcttcagttaatcacattggctgccatcatcactgtcactaccactggattctgttttgtccaaatctgttnnnnnnnnnnnnnnnnnnnnnnnnnnnnnnnnnnnnnnnnnnnnggcttcaagctccctggagttaacaaagcacagagccagcactgacgaaatggcaagctcaagaccaatttctctagaaagtccttgacagccacagaaagcccatgcgttttcatgggcataatcaccaacattattggggacagaaaataaagtttaaaattctgtcatcagtgactcttctcagcagagcctcctcatgaatttccggagggttaatgagctgagtttcatgaccgtgagtgcctctgtgaaagccatgcttctctcagagagatgagtgtgcacacaggctcttcatcttggaaatgaaagattacttgcacatggcactccggctgcttcagaaagcagggaaagctgccagtacacacctctgcctgtccaggaggatgatgtcac

SEQ ID NO: 409489 - DNA, 647 bp, Homo Sapiens
gcaaatgctaataagcaaagcccagattactaaaccatttgaccacacgtgtagtagtgtttcagcccactcttttaagaagttttcagaaagccaatgagctaatagcttgaatatattacagtttgaccttcatttcagcaggacagacaaatcattgacaaaacggctgcaagaatatcagcccttttaataagttgtccagtaatatgatatttttatgattattcaatgaattgatttttatggaattggctttcagtgaatttatttatcagccagttttctgaagggcagcccaacactatatgccataaattttctttgctataattaagttcagacactctgtctcctatctttcctaatttcatctctctctctgccctgtttatatttattggatgctctggtatgtaattattagaattttccctttactttaaaaactgttctttcatctttgtgtatatcattgattgatgaccccatcatgaccttaattgcaatttacaaacttacttgctacaaagttaggttaatgagattattcactatacaggtagattcaacataagtttccattatcatttttaaagccagtatcatccactaaacatcaatatgtcatgcgatgttttaggagc

SEQ ID NO: 409490 - DNA, 516 bp, Homo Sapiens
  misc_feature (12)..(12): n is a, c, g, or t
  misc_feature (193)..(193): n is a, c, g, or t
  misc_feature (245)..(245): n is a, c, g, or t
cataacctgtgntaccaggtttcctgattcgagctctagtgatacccccagctagttcggtaacaatatattctcttctaatgtattcatcctattaaaggtattataggaacactttttaaatatcttccacattatagtagagcagtaaagacataggggagagggaaaacttggactcactgtggcctantagacttccctatctttataccctctggaaggcagtcattctagagtaccgnccatgcttgttgcaaagacaaagtccgtttatccctcaaatctttctgtggtggttatagtaaagattgtggcagtagggttggtaaggtaggttggccaggtgtctcctgggtcccacagagaattacaacacaggaaaggaaaacatagtatgccaagagacatttgatgatcttctgctttcatccttcccagcaatttattgcattcttctctttaaggaaatgggaaactatacttaagcaaatgcattctttttctatggatcat

SEQ ID NO: 409491 - DNA, 489 bp, Homo Sapiens
ggcacatgtggcaagcagaggctctcagtatagggagagggcacagaggcagagaggctgcggcgcacatgatgtgcagtgtggcccacatacacgtggagacacttcccatacacagtatgatccacagacacacacagaaggggccagaaagagggggagtcaggcacacatgaggaagagccacacacagtcagagactggaagacagaagtaagcagaaagaagacagagatggaaagtcacgtagaggtgacagagcctgagggtccaagggatgagaaggatagtctcagttaaaaacaaagacataaatagagagaagcccacaatatagaaagggggggataaccagatgaactagtaaagagggacagagaaagaagacaggagagcaaaatcgacaggaaaactggaaaaggaggaggagttagacttagtacagaaatgatgtgggaaccgaagcaagagaattccaaaggccaggtt

SEQ ID NO: 409492 - DNA, 370 bp, Homo Sapiens
  misc_feature (280)..(280): n is a, c, g, or t
ggctccagctcatttgcaccagctgcacacctctgaggtctggctatcatactctttccttacttatgtggaacttaggttgttagcaccatcactgaggtgctaagtcctggcatccttctcctgcttttcatttggagcctatctggactgactcagctcactgccaatgtgctcatcgagctggcactgggattggcaaataaatggatttgaaattggttggggagtttcttacatatatcaagcttttggctacagatatcatcctatttttgtntattaatctttaaacctagcctatgtggtgtcttgttagtacaggatggtgcttttgtgatttatatagacaatactgtcagatattcgg

SEQ ID NO: 409493 - DNA, 790 bp, Homo Sapiens
ctacacaacaactgataggtgacatccgggaagactgtgacccccatagtacccagcctatgaggaaccagggactactacaagcaatttaggggataaattgcttgttgtaaccatgctgggggtgcctgagcatcagacacctgatcttgcaagaccatcattaaaagtctcactttcagtgttctcaaggtctctgagtcccttctttgggtttggacaggtgagtttatttctcaggacctggtggcctatatggggaactctgtgcctgcatggagtgggactccagccgagaggggagatgcatcccacctgatttaggtggcctgctctgcccaagtgtcttgtctccctgcagaaccatagacaaacctgagactgttattcaggagatgtgaaagtgacacagggagaaaagctggcaccccagcaactgggcaacctcgtgtttgagccaaggtaggaaaactggactatgtgtactgccttggtggttcagcattttcagaggtgagtgtgtgtgactgagatgtatctagatacgagcgagtgcagagtcccatccgtggttatgtcctccacagggaacagctgagacagatgaagtgatctcagggcatgcaggaactcagtcgggctagtaggaagctcgcacgagactaactgaaaaatgtgaaataagaattctaggcctagggaacagaggaaagaggggaactgaagagactccctctgaaattccccccgggaaaagccaagatataaaattttgcctgtttttttctgg

SEQ ID NO: 409494 - DNA, 206 bp, Homo Sapiens
cttttccccttctcaacgtttattttagaatcaggggggtacatgtgcgaatttgttacaaaggtatattgggtgatgctgaggtctggggtatggttgaacctgtcacccaggtagcgagcacagtatccaataggtagttttcaatctttgctcccctccttctctcctggctctagtagtccccagtgtctgctgttcccatc

SEQ ID NO: 409495 - DNA, 585 bp, Homo Sapiens
  misc_feature (179)..(248): n is a, c, g, or t
  misc_feature (353)..(392): n is a, c, g, or t
ccagtagctggggctacaagtcctacacttcttaaatataggggatattgttgattaccaatatccccttgccttgttgaactgtaaaccaagagcagaacctttgtgtcctcattaatgtatcctaaattcctagaaaggttcctagcaataaatatgtggataaatccaagagaacnnnnnnnnnnnnnnnnnnnnnnnnnnnnnnnnnnnnnnnnnnnnnnnnnnnnnnnnnnnnnnnnnnnnnnccaagagaactttgcttaagatgtatgtaagtccctttggatccttgtagcacatctgaggcatgtgtgtcagggatgatcagcctcattttataggttagtatnnnnnnnnnnnnnnnnnnnnnnnnnnnnnnnnnnnnnnnncagtgagtgttcccctctctctccaacttaatggtaatgtaagctgttggagaattaaggctgtgttttaaagctctattttccattgtatggggaaacttacacagtactaacttttttatcttctagttctttgacactaagtatgtaataaattgtagttccatattcaccctacagattacagagcacc

SEQ ID NO: 409496 - DNA, 628 bp, Homo Sapiens
gaaaggtgggagcgaaataaaacaaggagcagaaccgcgaagaagccatgtttggtgcgtcgaagtttaaactcgtaggacttgggaggagccaaggtatatccgcagaagagaccacccctgccctttcgctttgacgctcattgggccttttggctgcgcatttcaccccgggctgagaaaacaagctggggattcgacaagaatgaactcaaagtctggaaacggcagcttctgagagtttacaatgtttcaccaactgtcgtccaaataagtcgtcacccctgtcagagtagttgcagctctgccgttacccactgctgtcactgtggccgttttattcgcgagggttacagttctgtttagcatgcatctaatgacttaagactccacgcaagtaaaacggagtttcctcccattaagtattggctttgctttaacagtgctttgagaggctctctgtggccaacatatcttctcatatctttgtcctcgtttcccaatctccgcgtggtgaaatcatctatcaagacttggcttaaaggacctctcttctgcaaataatgccatcttccgctaggtgctcactgcacacagactcgccgcccaccacttctgtccaccttct

SEQ ID NO: 409497 - DNA, 525 bp, Homo Sapiens
gaaaaatttgcagacttaatcacttaaacatcttacaatactttcaaaattaagaacattaaagtaatgcataattatctagtcttttaaccaaagaaaattagtttattaacattaattaagtctccaactgacactaaaagtaaattaagaatattattaaattgattttgcaagtggataaactgagacagagaaatatcaactgaatttcccagggttatattcaagtcagtagaaattggaacctgtggattttaattgatttttgtatggttctaatgattattaaagtatgtcttcttctaagtataacagttaatgacattagttacataaaaaatctttacaagatctctcttttgaaaaattatgtttcttctgattaactcttacaaaagatttaagaagagcaaaattaatacatttctcatgcaaagtaacaaaaatagatattttaaaaattatttgcatacataaaataaaatagtttgtgctgcaagaatagaaaatactgattggagc

SEQ ID NO: 409498 - DNA, 331 bp, Homo Sapiens
cttgagtttttgaattgagatttatttatgtgaacctattaattatacattctgcttatactaaagatgtctccatgtagatattttttgtcagacttttaatggaacattctcagtatgattcagagaaacatggtatatcatttttatggcagttcatctttggtttatatcattttaattttattccagtgccccagcaattttatttttgtaacactgtatagttaaagaaattatatggtgattttatgcaggaatgatataaggattttcccctataaaccaaactagttcattaataattttagctggtaatattatcaggaac

SEQ ID NO: 409499 - DNA, 420 bp, Homo Sapiens
  misc_feature (241)..(285): n is a, c, g, or t
atttattatttctctttgtcttcattgaattctttttatttaaattctaggagaataggctttcttcttggtgagaatgccttgagttaattgagtttcctgcagtttgtggtctgccatttattgtactggctccactgtatttataaacagggcaacctttccctttgaatcaatttttcctgtcttcaagtattgctttacagaactacctaatcttttattttatgtatgcctatgnnnnnnnnnnnnnnnnnnnnnnnnnnnnnnnnnnnnnnnnnnnnncactcatgtatataacactctcctgaattacattgaaaatgccaactaaaaacaacatgcaattttagcttttcacattgcaaatttatttctaagaggatattggtatagagttcaaaacttggtccgcttttt

SEQ ID NO: 409500 - DNA, 524 bp, Homo Sapiens
gcatccttatccttcagacggcggcaattctgcagctgctcattgaggacatgagctggcacctttcccggtaggactgcggcacgtctgtagccacgcactaaggacctgggtaggcgtcatgaccctgggagcagcggcacagctgcgactgcgtatggaggacccaggcaggctcctcactctgccgactgcagcgcgcctgtggttgtgcaccaaggacccacccagacaggcgttcttaccctgtggacagcggcacagctggggctgtgaacccccaagattctagctgggcattcttatcctgccgactgtggcacgtctgtggccagaagtttttatggtgtggacagcagcacagctgcggctgcacactacgggacccagacgggcgttcttgccttgtagactgtggcagggcggttgccggggaacccacgattgcaggccgattgtataccctgcgactggcaaccacaggcttgcgcaccaggacttcagcgggagttcctttacttctg

SEQ ID NO: 409501 - DNA, 224 bp, Homo Sapiens
ctgtatttttagtataggccgggttttgccatgttggccaggtttggtcttgaactcctgacctcaggtgacccacttgcctcaacttcccaaagtgctggcattacaggcacgagccatcatgcccagcccaaaagtggggctttcatttcaacctgctgctctctaagtcaacgttcatgactattcacttggtactctctaccctggcaccaatctttcat

SEQ ID NO: 409502 - DNA, 525 bp, Homo Sapiens
aaaaggtgtaaacttagacttatctatctagcagaggaggcactgtacatctccaggcagtcacaaacatagctttatccttctttttgggaaaatgtgtcttgtctaagtttatactgtcatttctctcctaccagctaatgatatcttaagttagaacatcatgccaagagaagtatgttttcaaccaagaaagcaaaatcaacatgatcctaaatgaactgcttctgcatgtcaacagtcttgatatacctgagagagtgagatacagagtatgttgttaaactttttataattacaaatattgcttgtatttcttttgaaatttgccacacgctgatattaaaaataatagatagaaaatcaagagagaaacttgtagctttaatttattttgttgtttggataattaagattgtaggatagacagactaataattctctacttttaaaggaaaagtatttctctttgagtctccttcactttgtaaaccatggttgaaacaagttcagagattgaaaggg

SEQ ID NO: 409503 - DNA, 154 bp, Homo Sapiens
tgattcagaagacctcgtattatattcatgtgacttagagctctcactattgatctagttttatgaacaatgtttactgtaaaatagaggcatgaaatggtaattaatagaccaactaatgaaactttttatataagtgagcttactttatgac

SEQ ID NO: 409504 - DNA, 301 bp, Homo Sapiens
gtttctcttgtcactctgcaatcagaagccatggaagttttgtgcagggcagttgcctgacctgacacacattgttcgaggaagaacctgattgagtgacgtgtagggtgttgggatgggaaggaggtctgggtgaaggcaggaggtaggacggaaggtgggtggcaccgtgcaggtgagaggagttgcctcatgtaacagctcatagtcatcaaggtcgctaggttggaggtgtggttagaagacagacatgacgagatgtgctgattcgaagtctccatgcaggcggagaggtggacag

SEQ ID NO: 409505 - DNA, 650 bp, Homo Sapiens
atttgggctaaattttaaatatctctgtacagacaattaaattcaagttaagtcagggtaatacttatttgaacttaattgtctgtacagagatatttaaaatttagcccaaatattctccactaagtcttcaaataaagattaattaaaagtcctaaagctatctaaacataaatcaataagtagtaaatgttaaaaataaagagacaaagttgcttttctctcttgctaggagaaaaagagaaggtgaagcatgaaagtcatgctttcattttaaaagtatgtgcagagtgagtagatggcacttttatttcaactaaatcatgtgtatttagtgtctgtgtatcttactggtgtgttcattttcatttttcaatccactgtatctcaagtgatcagataattcatcatccaagtcaatttcattttagaacgtgaaaaggggcactggaaacattttttttggacggggggacaagagatacaaccatgaacatctccaagcaaatcagaataaatgatcacttaacattgaccccaaaaatctgctgctctagtatttttgtcggttccttctcttttactccatcaatgcaccaggtgtagttctggctaattttctggtttataatgtcaatttcagattcagg

SEQ ID NO: 409506 - DNA, 327 bp, Homo Sapiens
gtggagactttattttggcatgtttttgatatattagaacatacccaatgtcattattataaaacagaaataacagaccaggtagcattcagggatctttgcttgcttcattgtttggaggggaggtgtaggtgggtaataattcggtaaatattttttgtttaaagtatagttcctactttcttgctaaattgagcaagccattgcccttttatagacaactttccttctctcataacagaaagtacttcaggaattgggcgtgattatctttatgagtgcagaataagctctacctttgtatattaagtcagtatattcattact

SEQ ID NO: 409507 - DNA, 251 bp, Homo Sapiens
gcacatcttccctgagtcgccgcccatccttgagtgttggatccagtagtttgtttcgcgcctcagctccttccttccttattttaggacttcttcccacaccagccttgtcatcctggggttttcctgtccctgtgaattcacataaatcccttaaatctgcctggctcttgggcgagattatgcgaatctccagttgtgtggtatttttagcacgtcttatttgtctgcttgcataagctccgggcgct

SEQ ID NO: 409508 - DNA, 123 bp, Homo Sapiens
gcaaattgctccatgttcttctctccctttatgttaacatctccttgaagggtggtttagtttgcattggctggtttcagaaaggtattaaggcttaggccaaatcctaccttgagtatggtt

SEQ ID NO: 409509 - DNA, 494 bp, Homo Sapiens
cagcttgaaccacttttattttattccttctcttccctaaaaaaaattgaggataagctctgccttttttcatcaaccataataagtatggtatccattcactacttgactgctggagagctcaggacatttggacagaatgcttcaaactggggccaaagtagcctgtctcctcagagagctgacttctgggcatacgcatctctgtagtgggaggccacatgaaagtgaacctaactcatgtacagaggtcatcgccatgtcacttcctagtaaatgctcaataaacttgtaaaccaccccctctctttagagccctacagttttgtccttattgtggtggtgaagttgggagttggttaggtggtcttatcgtcaccctgcagccccactttctcatcctgaaaaccctctttcccacaccgggtcatacagagggacttttgatgcttccagctagatggcaggggcatcctgtggcatcctgctgtgca

SEQ ID NO: 409510 - DNA, 505 bp, Homo Sapiens
atttgttcaagtgtaatgggaggctctggagacctaggccagccccctgagctgcagcctcatggacacgccattcagaagcacgtgtcagtgctctggtcagcttctgtcatgagacacaactttccatgtgaactaagaggataatgacaattgagtgtgacctggaggtcaggcctgcacagctgatttgggaaagatgagtctgggccagatgaaggtaaatgaaactgacgaagggacaaggaaaaccccaaaacagaacgtgaaggatggcaactgctggaaggcggtcaaagcctgtgtgtgaagtaggagaaatctggatgggcttagtccttcttcccttcagaccgcagggtaactaattggcaatttcttttaacactcagcagctacataaatgttttatgtattcacaacaaagtctgtggcaaattgaaactttgatgattatgaaacaccaaagaaagccttattagacaagatgggtttcgtctttctt

SEQ ID NO: 409511 - DNA, 713 bp, Homo Sapiens
  misc_feature (162)..(334): n is a, c, g, or t
  misc_feature (413)..(609): n is a, c, g, or t
ttcaaccttcgccactgtctttgcactgccccataaggcctgaataaggctgatgggtcatgtatggcagggccaccccaacagtctagtaataggtcttgcattgttggacacacttcttgatttagaactatggctttcagtcatggttaggtgtgcccnnnnnnnnnnnnnnnnnnnnnnnnnnnnnnnnnnnnnnnnnnnnnnnnnnnnnnnnnnnnnnnnnnnnnnnnnnnnnnnnnnnnnnnnnnnnnnnnnnnnnnnnnnnnnnnnnnnnnnnnnnnnnnnnnnnnnnnnnnnnnnnnnnnnnnnnnnnnnnnnnnnnnnnnnnnnnctctaagtcaatgctttttttgtatgcatattttaaaagtctcctccagctaaaccattagcttttaatggggtatacnnnnnnnnnnnnnnnnnnnnnnnnnnnnnnnnnnnnnnnnnnnnnnnnnnnnnnnnnnnnnnnnnnnnnnnnnnnnnnnnnnnnnnnnnnnnnnnnnnnnnnnnnnnnnnnnnnnnnnnnnnnnnnnnnnnnnnnnnnnnnnnnnnnnnnnnnnnnnnnnnnnnnnnnnnnnnnnnnnnnnnnnnnnnnnnnnnnnngtttagaatacagggagagctagtggtatcctctaagatgctgtctggaagcagctttgaagacaagcagagaccagagactttgaagccatactcacagggtt

SEQ ID NO: 409512 - DNA, 766 bp, Homo Sapiens
  misc_feature (110)..(172): n is a, c, g, or t
tgagccactgcgccaggtgagccttcagggattcttaaccgttttgtgccatggatcaacttggcagtcttgtgaagtctagggattccctttttagaataatacttttnnnnnnnnnnnnnnnnnnnnnnnnnnnnnnnnnnnnnnnnnnnnnnnnnnnnnnnnnnnnnnntctacaactcttcactcttacttctcatgaccgcccccaagaaagacctgacttgaccaaaattggcacctaccatgcttcccccaggacctggccccaggcatttggaaggtaatagattggtagtccaggattgtaatattgggctgtctctgtttaagctaaaaattaaggtaaactattaggtcccatctggacagccccattgttaagttttatataacctttcataatcggcctcaatgacagatatgtccagcaaatatccaaattggttttaaagtcagttgcaccatcatttactgatatttaaagtagatcattataatttagtaagtaccactggtggctagctctgggaggagggctgccatgtgacagagtaggtaagattttccaacccaggacacctggtaggtgctattagcagcgataccagtgtcttcctgagcatgccctaggggtggcagaagggattgcctgtgctcccctatgttttgccagagtttctattggcttttgtgggagatgaacacaatccatagagaaaataggccccagtgggacaggtggagcatcacatgagcacagggg

SEQ ID NO: 409513 - DNA, 736 bp, Homo Sapiens
  misc_feature (302)..(327): n is a, c, g, or t
gctaatagtccccagtggcatccttcctctgagaaccgtcctagcatataggaaaatacctgggagagtagcgcaccctccctttggcgtgcatcccccagccaattaattaacagaaatccaaaggctggctcctcaacttgaggtgagataaacctgtggtaccatgcagactccaggtatacctgtaggatcaggtacagtgaaaacagatgtcagttaaagcaggtcttcattgaacaaacttctaacctggaagtacaagtatttcattttcctcaattccttactgttttttatcnnnnnnnnnnnnnnnnnnnnnnnnnnttttctaggccctctcccacttggacaagtacctatctctcaaaccctgcttctgggaagccttatataagatgcactgtcttcacatttgctgccctgtagcataagtaaatacagttatttaacttaggataatgccatatgatttgccaaaattgtattttgaattttgttctagacagaagaaattttatatcattaagatgagtgaaattcctattaaaaaggataaaagcgcaactcgatttctgacttcataaagattgaatattgtttcttactcattctacttggaaatagtcaagaaactctctgaaagtagaatatttcaaaaaattctgagaaaattaagatatttagaaacaaaaggatagctgttttgaaaataagtaagtaagggaaatcaaaa

SEQ ID NO: 409514 - DNA, 671 bp, Homo Sapiens
  misc_feature (420)..(440): n is a, c, g, or t
caaatgtcagtgtacacccgagacatcagtggctgaaagctacagtcttaggttgacttgcggactttttttaaaatacaaagtcaagcccccgggagccatttcttcagtgggtcagtgcagactggctccttgctgggggtctgacgctcgctgggaccagtcctctgtttctgtggttctttatctgttcactgactgtttggcagttgaagacttgctccccaaggccctcagtctttgccacttcattcagagcacttaattaaaagagaaaaggaatgcagttctgatgcagttataactagtaaaaagaaccaataaaaatgactataaagtgcctgacaaatagaaaatgtttagtaataccaaggtactttatgggggaagggtttacctcttggcacaggatggcagctnnnnnnnnnnnnnnnnnnnnnaggcctttccctccatgatgcccttggcagggagctcttgcccagccagaacaggtgagtgaaaagattctgctgtcttggagtcacctgacttcttactacaagaacatccttcagaagtgaaaatcacagacatgtaggtcttttgctggtgatgacagataacacaagagataaagaatactttggtgatgagagtaaaagggaaaatgaggaaaagacagtagaaaa

SEQ ID NO: 409515 - DNA, 361 bp, Homo Sapiens
  misc_feature (30)..(30): n is a, c, g, or t
  misc_feature (50)..(83): n is a, c, g, or t
  misc_feature (131)..(131): n is a, c, g, or t
  misc_feature (219)..(219): n is a, c, g, or t
  misc_feature (263)..(263): n is a, c, g, or t
  misc_feature (310)..(310): n is a, c, g, or t
  misc_feature (320)..(320): n is a, c, g, or t
ctttaaaacatcattttttcactctaaggncataagatattccccaatannnnnnnnnnnnnnnnnnnnnnnnnnnnnnnnnnacaatcttcaagtcttttatgtgccaggaattaacttgtgtgtagtgngaggtcaggagctagttttatttttttctacatcgacaagcaattgtttagaaaccattaattgaatattacatttcttccccacagntgggtaatggcactttcatcataaatcctggactctctatcagncagggtattattcctgggccttattataccatattaactactatatntttatggganggctcaatatctggaaagcccctatttgtcaagggggatgc

SEQ ID NO: 409516 - DNA, 280 bp, Homo Sapiens
  misc_feature (238)..(238): n is a, c, g, or t
cctatgtaaaaggatttgtaatttccttgtaattcctgcctattagtccatattctgatttccttatgttcatcactgatatgttcctgatcagggtcattgctagtagttgagcatttactggttgaacattgtttaatggttagatgttatgtgtgtctgcatttaaaaaaattgtgtacatgttatttcactattggtattacaatattcataaccacatgataaacagaaatgngcccaataaatttcctataaaaattttcaaaggccctttatt

SEQ ID NO: 409517 - DNA, 580 bp, Homo Sapiens
  misc_feature (354)..(354): n is a, c, g, or t
  misc_feature (433)..(433): n is a, c, g, or t
  misc_feature (453)..(453): n is a, c, g, or t
  misc_feature (455)..(455): n is a, c, g, or t
  misc_feature (509)..(509): n is a, c, g, or t
  misc_feature (549)..(550): n is a, c, g, or t
catgggaaggatacgtttcctttgtgttacaccaacaatacatgtggttttgatgaggaataagcattccctccaggaagacaggtcagatgccaagactacttaaaagtgttcgcaatgtaatgaaaagtgggacggtaaagatactaaactctgggaggaaagatcctattatataatggtgcataggaaaaaaatgaaagtacgccaaaatgccaataagattatcattggttgatggatttatgggcagttttaattatcctctgtatacttttccttatattccaaatttttacaatgagctatggttactcagaaaacaaatgttatgaaaaaatacttagctctctnttttacccactcaatttcactaccctcttcctgcaacctggtaaaatagtcagtaaacccactgtatataactagaggnattttatacttctgcatggngnaggattctggctaaaatcgttttaaaagaataccaaatacctcgtagacccccnaaaagaaagagagaagggcccagtagcattctatccatgnngattctggtgggcttattttctttaaaagc

SEQ ID NO: 409518 - DNA, 145 bp, Homo Sapiens
  misc_feature (126)..(126): n is a, c, g, or t
gcctcaggagtaattacagctttatagcatatctactaagaactttagtgaaagtgaaaaggagtcggtaaccttgaattttagcaaactagagaaggaagatgtgggtgtcctttcctcacgcgntaacaaggatgctgttagg

SEQ ID NO: 409519 - DNA, 263 bp, Homo Sapiens
  misc_feature (83)..(83): n is a, c, g, or t
  misc_feature (115)..(115): n is a, c, g, or t
  misc_feature (144)..(144): n is a, c, g, or t
  misc_feature (174)..(174): n is a, c, g, or t
  misc_feature (194)..(194): n is a, c, g, or t
  misc_feature (215)..(215): n is a, c, g, or t
ccttatcaagggttttgggggagagcttttctgtactggccaagtagaatctggaggtatgatactaatgccgctcaacttgncaggaaaattctttaaaaaaatttacccggcntaaatttttaacgaaaggaaatgggcttncaaaaacttggaggaagtaaaaactttttnccttggccaaaaccctagcngaactatttattgaatcctgnacatgccgggttccaacccccttttacgcgggggggtttaaaaataaa

SEQ ID NO: 409520 - DNA, 540 bp, Homo Sapiens
  misc_feature (211)..(219): n is a, c, g, or t
ttatgaaagcaagtagctgtgccccgcctgccgcacctcctacccatgcctgagcgcactttaccaccaccttttaaagtccagacgtctgcgccattaacttcggagtggtgttcgcaggagcatttgtcgcagtggtctttaattgctttaagtcgctgtccattttgagaatctgataactggacgatctcccagggaaaaagaaaannnnnnnnncagatttgcatacaatgcggggagaggttttctgaagcccatttccaactttcccgtaaagaacccctggctttgaagagccaagtctttcgagatttaactccaccaacatttagagttcagatgtttttgtaaaatcgcttttttctaagtttgagtggggatttgctttctggaattgactgtctcctgtcttcagatgactgccccgtgtcagcccggcggcaatcgttagtctccgggccaacccaggacgatgctttttggcgttttcaggcaccagcgctgccacctgctggcaaaaactttctctttcggttg

SEQ ID NO: 409521 - DNA, 754 bp, Homo Sapiens
  misc_feature (372)..(568): n is a, c, g, or t
  misc_feature (581)..(581): n is a, c, g, or t
  misc_feature (615)..(615): n is a, c, g, or t
  misc_feature (625)..(625): n is a, c, g, or t
  misc_feature (634)..(634): n is a, c, g, or t
  misc_feature (654)..(654): n is a, c, g, or t
  misc_feature (672)..(672): n is a, c, g, or t
  misc_feature (682)..(682): n is a, c, g, or t
  misc_feature (702)..(702): n is a, c, g, or t
  misc_feature (719)..(719): n is a, c, g, or t
  misc_feature (739)..(739): n is a, c, g, or t
cttcctgtccttctttctgtcctatgtttattgaatgcttattacttggtcttaaagtttttcagattaattggaaaatgatacatatgataaaataattaaaggatgatataatcagtgctccgcaagaaggaataagaaaagtattcagaagccacagtaaattatgacatacattggcttgctcctgtgttgctatgaatagggagtaagtttgcggccctattgccatataccttgaaggcagtttctgtgttgtctgttgagtgatcctgtactacccaactgcttacactacttgtggggttctgatgtatccctacatcattgcttttattcgtgccttttctcttcttgtgaagtcatttgtannnnnnnnnnnnnnnnnnnnnnnnnnnnnnnnnnnnnnnnnnnnnnnnnnnnnnnnnnnnnnnnnnnnnnnnnnnnnnnnnnnnnnnnnnnnnnnnnnnnnnnnnnnnnnnnnnnnnnnnnnnnnnnnnnnnnnnnnnnnnnnnnnnnnnnnnnnnnnnnnnnnnnnnnnnnnnnnnnnnnnnnnnnnnnnnnnnnnaccaatataatgnggataaaaaataatgtgaaatggatctctctctnttttcaaaanaccctattnatggtaccacggggctgagncctccaaaaggaaaaccntgggccctgngaaactactggataccattntttttctttttacccgnccggaactttaatggttgcnttaaaaaacacggta

SEQ ID NO: 409522 - DNA, 285 bp, Homo Sapiens
  misc_feature (75)..(87): n is a, c, g, or t
  misc_feature (186)..(186): n is a, c, g, or t
  misc_feature (251)..(251): n is a, c, g, or t
  misc_feature (258)..(258): n is a, c, g, or t
acaccaccaggaccctaggtgtcaagcacaaaactgggcagctatttgggcagacaccgagctagctgcaggaannnnnnnnnnnnncatactccagtggcacctggaacaccaatgagacagaaccattcactcccctggaaagggggctgaagccagggagccaagttgtctggctcggtgggncccacccccacagaagcccagcaagctgagatccactggcttgaaattctcactgccagcacagnaagtctnaggtcaacctgggatgcttgaacttgg

SEQ ID NO: 409523 - DNA, 545 bp, Homo Sapiens
  misc_feature (334)..(343): n is a, c, g, or t
  misc_feature (469)..(469): n is a, c, g, or t
  misc_feature (497)..(497): n is a, c, g, or t
  misc_feature (513)..(513): n is a, c, g, or t
accttaggagcacctggtacattaggcacctggtgcattgttgaaatgctggtatggcccttagttcaggattacctgcacagtagctccttcatgccattcattttagaccaactcaaagcaaagaagcttattctgtcatagtctgatgggatattgtcagcctgcatgtcaaatactttgtgatagttaaataagactacaggactgttagaaattcttgtctgttagtctgcatgccataggctgtcatgaaaattaaacagagactataggattattatcagtttttgccctctggtttgtaatgcaagttgggctcaagtttgtttgnnnnnnnnnnccccattgctgttttactgattagccagtagagtgaaatattaaagtttgtggattactttttatttctatatttatcagaccccagtattagaccaatgctgagctaaaccattgagagagcaangacattttttagcatgaggtcatctagntccccctccctgtaanctgggggggcagggggtcttggtactgggttt

SEQ ID NO: 409524 - DNA, 263 bp, Homo Sapiens
  misc_feature (73)..(73): n is a, c, g, or t
  misc_feature (92)..(92): n is a, c, g, or t
  misc_feature (95)..(95): n is a, c, g, or t
  misc_feature (118)..(118): n is a, c, g, or t
  misc_feature (165)..(165): n is a, c, g, or t
  misc_feature (172)..(172): n is a, c, g, or t
  misc_feature (187)..(187): n is a, c, g, or t
  misc_feature (220)..(220): n is a, c, g, or t
  misc_feature (249)..(249): n is a, c, g, or t
gcttacttttaagtaagcacatacatttttgacttctcctgtcacttccattgggatcattctaaaataatgnatctctagtcctgacttgnggnccagtactattgctagaaaaagnttctatttttagtgcatcaaaaatgttataacacaagctgatctttntctactncccaaagagcaacanttcccatgactttagctttagtacctctcttgnccatctcccatgaaaatataaaacatctngggccaggttttct

SEQ ID NO: 409525 - DNA, 267 bp, Homo Sapiens
  misc_feature (111)..(175): n is a, c, g, or t
tagaagtctttgcctaagattaagagctgatgtatactcaccaatgatgtatgaaaatacagttttatagtattattgttttgttattttttagcaaacctacataactgnnnnnnnnnnnnnnnnnnnnnnnnnnnnnnnnnnnnnnnnnnnnnnnnnnnnnnnnnnnnnnnnncaagatctcatgaggttgcatttccttcactttaatatctaactccagcataagtcagtataagtgactctgtgatgagtcacatctcattt

SEQ ID NO: 409526 - DNA, 508 bp, Homo Sapiens
  misc_feature (214)..(227): n is a, c, g, or t
  misc_feature (273)..(273): n is a, c, g, or t
  misc_feature (386)..(386): n is a, c, g, or t
  misc_feature (411)..(411): n is a, c, g, or t
ctgaactaaaaattcagcttttaactaaaactgaatttagttaaactaaatttttaactgccataaaaatttcgttggtgaaagtagaagtagtaattgtgaagattagtgagacatctaaataatattttaatcctatctaggaatattcttaaatggaactaataaaggttttgttggttttagaactgaatattacagataagtaacctcnnnnnnnnnnnnnnaaccaggatcatttatttttaccttctgctgcttgatctgataggngataacagcctttttatgcctataatgctacaagttgttcatgtcttttgacccagtttaatccagacacttactaatccatgaatggaggaactgcagcatctgtagactgnagtttctttttttaaaagttattgngactgaacatttccatacatcctataaggagacatattaagtctttggatacttgagggatataatgccattattgaaatgctaatgcattttaacc

SEQ ID NO: 409527 - DNA, 658 bp, Homo Sapiens
  misc_feature (481)..(481): n is a, c, g, or t
  misc_feature (518)..(518): n is a, c, g, or t
  misc_feature (567)..(567): n is a, c, g, or t
  misc_feature (599)..(599): n is a, c, g, or t
ggatttgagacattttgggtctacttgggactgtgtcctgagtctaacctattggctagataatgaactgtgtttgaaccaaacaccctaccccagtaccacaggtgaaccctatctaaatttttatacctttctaagtgtgagttttctctaaaaagcctcattgactggcctactatacaaaatcaaggggacttatccatatataatcacagagataaccctgtgtgaaacatcccttcccattctaaaccacttgcaactgaaagaggtacagtgctcttaaaaatattaaaaactcttaggcatttttatttagcccaccagtatattcccttatcaaaacagacttttaaaaaattcatcctgatatccgttgcactgtacttgacacatatatttaacaattacttgattatgactgagtcaggagccttgagtttttgacccagtggatccttgggcaagtaatttcacttgncaaaaatacaacttggaattcaaaaataaataatacnggagaagtgataattctaaatccagctcataaaccatttttaacaatgnataaaaaatgattttttttcaaaataccgtcnaaaatatgttaaacgacttcctggggacctcctgggccctgggccaaacccagaaattt

SEQ ID NO: 409528 - DNA, 580 bp, Homo Sapiens
  misc_feature (528)..(528): n is a, c, g, or t
gctataaggaagtacctgagactgggtaacttataaaggaaagaggtttcattggctcatagttgctcatggctggggagacttcaggaaactaaaatcatggaagaaggtgaaggggaagcaaggcacatcttacatggtagcaggagaggcagaacgagagaggggaaccaccgcacacttttaaaccatcagatcttgtgacaattccctcactatcatgagaacagcatgggggaacctcccccatgatccagtcacctacaactaggtccttccctcagcacatggggattacaatttgagatgagatttgggtgggaacacagagccaaccatatcagatagctaccaataagccaagacagtgaagactacaataaacacctaactcttcaatgcccagacaccaaagaacagctactaacaccaacaccattccaggaaaacatgacctcctaaatgaactaaataaggcacaataacacatcctggagaaacagagatatgtgaccattcagaaggagnaattaaaatagctgtggtgggaaaacttcaagattttcagattacccagaga

SEQ ID NO: 409529 - DNA, 495 bp, Homo Sapiens
  misc_feature (460)..(460): n is a, c, g, or t
aaagctagctatacctttgaaataggaaatttgtagttagaaatgtttgtgttctctttgtttaaattgtagcttgtggtataacaaaacattcactcaacaaattttgtaaagaattggctgtatgcagatactaggaagatggcagtaatgaaacagacacaaatccctgctctcagagagataatattctaacaaaaacgtgtttgtaagtgtgcgcagaacccatttcatgatttctgcttggtttgtggactcgactgaggttgatgtgagcagttcctgtaaaggaccatccctatcccaggttgttcagagaattgttttccgtccaagccctctgagtggctcttgtgtttgtctaccctcttcctaattgtcgcttttaaatacctcatagaaatactctgtctccatatttcaacttggtcagcatgtggtacctgactaagcagccagncaaattttggtgctggtgaccaatgggtggtgcag

SEQ ID NO: 409530 - DNA, 148 bp, Homo Sapiens
caaagcagttttaaaagagtaatctgctgatagtatctaggttggattgaggagtgaagagattctgtaggtaggggttcagttaggaggttattgtagacatagagtagtaaatgataaggatccccaggtaggacttgacaatggg

SEQ ID NO: 409531 - DNA, 609 bp, Homo Sapiens
  misc_feature (300)..(300): n is a, c, g, or t
  misc_feature (422)..(422): n is a, c, g, or t
  misc_feature (448)..(448): n is a, c, g, or t
  misc_feature (453)..(453): n is a, c, g, or t
  misc_feature (495)..(495): n is a, c, g, or t
  misc_feature (513)..(513): n is a, c, g, or t
  misc_feature (521)..(521): n is a, c, g, or t
  misc_feature (584)..(584): n is a, c, g, or t
gatttgttcagactcactgtaaagaatgacaaggcagatagctaatcctttcactgtgcctcaaagcccgccgtgcaagtcaccaaccctaccggtcctctccacgtgcgaggctaatagagtgatcagaaccaggaatgtgagctgggttccaccttaggaggggacaatgaggacagagcaagagggctccatgtttaattactccaggctctgacttctgcccacaattacagagcatgaaagcagaattggcctttagtaagtgaaaaggaagtggctcctgcagcatataattgntataatttcgtatttatggaaagagaaaaggacttcagtccactcatgttgttaaagcacttgtccctcactccactggagcccccttcctatgttttgggcacagaaggctgggacccganaggaaagaggaagagcggctgcccanaatgngaatatacccctcaagggatatacagcgggggtttcatgatnaaactaaccatacctttnccaaaaanggtggggggcaaaacataacttttgcagaataacaaaaccctgggtttaacttttttaaaacnttttttcatacctctggcttattgg

SEQ ID NO: 409532 - DNA, 385 bp, Homo Sapiens
gaaatttatagtaaacacacagggcagatatgctgaactattaaaatggaaaggcaaaagtcaattaatacacaggaaggggaaggggacttgatattcagaaagataagctgaacaaagggctagttcttgagcttcctagcaggagatggccacctggtggattgtacctctctcatcttttactcgatcgtatggagggaggcaaactttgccctgttcctaagtgcagaaagaaacttttcctgtgggaacccagaagtttaggaaaacacagaggcctttgtgagacaggttcttctactggctccctataaaacagacacagtgttaaatttagtcacataaaggcaattataacatgaagggagaaggaatgaatggg

SEQ ID NO: 409533 - DNA, 213 bp, Homo Sapiens
acaatttacattgcatcgtatgcagtaggtactgctttttcagaaagacctggagaacatacctgctatgaatattttgttcagatgtagccatttacctggctctcaagttgtctttgtggagagggtcttagacaaaaatcttccttgtatttacttgggttaagtgaagtccaaattcttacagtatgctatttcaggatttctgatatt

SEQ ID NO: 409534 - DNA, 405 bp, Homo Sapiens
taagcacagaagtgagggcatgaaaggagaggagctgcgaaaacactaggattaatggattgtaggtcttcatgaggtctaaggattgttggcgtcaaggacctataaggagtatgctagaaaaaagataggagaaagtagtgagagaataggatgcttgaaactgagattaagggtttttgttatcagtaatgacaaaggagtgagtggctgaggctgatcttgctactccagatcattagcagagaggtcaaaggactgagaagtatcatttggagagtgacggtgaggtagagactaaaatctctgagaacaagagtgaaccaggaatggtaaatgacaatgggtggtatagtctgatgatcacgaaaaattttaagacggaagtttttagggaggagggag

SEQ ID NO: 409535 - DNA, 270 bp, Homo Sapiens
ccccaattggtcacatgaatgccaaacatactcttccctgctcatattatatagcagcaactttacgtcctcatgataatctagggccaattcccactgtcagtatggtaactctttttcatacctgttgatctattggcagaaggagcccaagtgaccagccaatacgtgtagctttaggtgtagttggactcttgctacgtctctttgtggaagtgatccccatctgggaactggatcttctagatgcatagatcctaaggttgtaga

SEQ ID NO: 409536 - DNA, 421 bp, Homo Sapiens
agtactttccctttggatatcaagtaaccgggttcccagtattgcttatcatgagcttgggtctgtcagacccaccccatcataaggttgggcaggccccagcagcaatttattgtaagataaagtggtacatccagcaggattgggtgctagcaggccaaaagacccaagtaagctacagaaacaggtggtccagacacctatgtcatccacaactgatgcactggtgcttcttccttaactgacaccaatgggcacatggaaggggaagtattccttatgatcagctggcatagaaggaaaaatctcaaatttagctcattgatagatcggctcagtatttgtgtaccagctgaaaatatgtagctactgccctacaaccccactcaagggtgactctgaaagaccgtcagcagagctt

SEQ ID NO: 409537 - DNA, 326 bp, Homo Sapiens
ctcttgatttgacccatttacatgtggagtatttactaggtatgatattccaggcatgtattcaataagcaataggaaaatcattatacctgaatgggaataaaagcttattaagtgagattgttttactttattagcatactttgtatatagtttctttgatagcattttatagacattaaattatatgaactgtaggttttgcctaatggaagttgccacttaacaatattggcccctattttttattcactataatatatttttgagttacacattgactataatcctaggagtactttcttaattcttatattatagtactg

SEQ ID NO: 409538 - DNA, 268 bp, Homo Sapiens
actgtatatacagttatatgttccacataacattcttctcctgaggtattaaaacagaatattatttctttagttgatcatcagtaaagtagttgtcttgtgtttgggaaccattgtgaaagaaaaatatgtaggtttgctctgatgtttctttccctagtgcatcagttgaacttgtgagaatggacttcactgcaaactcattccatttgttgtaacggaaaaagccacagccaaggagccagaatattctcactctaggtttagt

SEQ ID NO: 409539 - DNA, 278 bp, Homo Sapiens
  misc_feature (72)..(233): n is a, c, g, or t
tatgaacctgtttcagattaaaggaaactaaacagacctaacattttaatacaatgtttgattttgaacttnnnnnnnnnnnnnnnnnnnnnnnnnnnnnnnnnnnnnnnnnnnnnnnnnnnnnnnnnnnnnnnnnnnnnnnnnnnnnnnnnnnnnnnnnnnnnnnnnnnnnnnnnnnnnnnnnnnnnnnnnnnnnnnnnnnnnnnnnnnnnnnnnnnnnnnnnnnnnnnnnncattctgtcttcaagcttctgaaaaaactctgcttttagggcata

SEQ ID NO: 409540 - DNA, 444 bp, Homo Sapiens
agctgatggaggtcaaatacacagaggcatatttcttggcttgaactgccaatcttaaaagttaataagactatcataattactgaactgacacgtactactgtccttgtctggtctgcagatcttacctcaaaaagatccaaatggatattttgtcagaaggaagagaagttgcataattcacctaaacatacaaagaaagctggcattcaaactgagaggttctgcgtctaccttccttaaggtatattatattaggaatgttagggtaaaatgaaactatcacaaatccctccttatggaaatattacagcaaatgctgtaagaacgcagaaagaacacaaacctacttttgcttaattttatattaaaaaaatcatttcattaatacacggtgtatgtcaattgtcattactacttttttgtcagtgggtgaggaaagca

SEQ ID NO: 409541 - DNA, 474 bp, Homo Sapiens
  misc_feature (408)..(408): n is a, c, g, or t
gcctcaaagtggtccaaatatccacttgcagattccacaaaaagagtgtttcaaacctcctctatcaaaagcaaggttcaattctgtgagttgaaagcacacatcaccaagaagtttctgagaatgcttctctgtagcttttatgtgaagatatttcctttttgaccataggcctcaaagctctccaaatatccaattgcagattttacaaaaagagtttgtcaaaactgctccatcaaaagcaacgttcaactctgtgagttgaatgcacacatcacaaagaactttctgagaatgcttctgtctagtgtttatgtgaagatattcccgtttccaatgttggtctcaaaacactccaaatatcctcttgcaaattctagtaaaagagtctttcaaaactgttctatntataaggtatgttcaactctgtgagttgaatgcaaagatcacgaacaagtctctgagaatgcttct

SEQ ID NO: 409542 - DNA, 139 bp, Homo Sapiens
  misc_feature (42)..(64): n is a, c, g, or t
aaatattcttaaatattccttgcagtgttaagtaaatattcnnnnnnnnnnnnnnnnnnnnnnnaaagatttatagttaacccttcaataatgcaggagtaaagagcactgatcaaccaaacagttaaaaatttccata

SEQ ID NO: 409543 - DNA, 510 bp, Homo Sapiens
aaaagccccagcttcaggctcctctcactagctgtgagacaggaggaaaggttgggagatatttttttcccctttcctacaaccatgcattgatcttaaatgagttccaaatagatgagttctgccaagtcttcttgaagtacatttctgtaccttacactataacctgcttcgaaatgttaagtgttttaaaaacatctttccacataattaaatattccttaccattatttttatttattgactgctcaatatttcacattttaagcaatattctgtgggaaagcatttgcgttgctttctttttgcaaactgctaaacatagttgcacatatatcttagagcccgaatccacatattgtcttgaaataaatacctgaatagggcaacttctgtgtagaaaggcaagctcactaagatagattgcccgccatgaattttagagtcctaccagaagagcatgatggtaagtgcttttatcaaaggtttttgaagaggaatttagagaga

SEQ ID NO: 409544 - DNA, 460 bp, Homo Sapiens
gcactctcaaatttgatgatgagtagtttatagaaatattttgctttatcgttaggattaagcataattcatgtatatccagttacatgaaaattttaggtcagaattaactgttgcaacacaggtgaatcagtattctatagagatagctaaacttgaaacaaagtaaatagtgacaaaaactaactgtaatttataatttaaaaatgggaatagtaagtaggtctggattgaacaactcagctgcactgatgtacagtgatgttatttttcaaaattgtaggaatttcgcttgtcttcatatgcacattatcggtagtttagtacccttgagtggcaggtagatttctacgaatcacatgttagagaacctaagtgtactaagttctcatatgttctcagggtattgtacttagtttctctttaggaatatcaaatttaatatccctcagtaagtcac

SEQ ID NO: 409545 - DNA, 500 bp, Homo Sapiens
ttcttaaatgtggataaattagtaactatctcataggattaatagacttaaaggagcttgtatttgtaaagttcttagagcctggcacaaagaagtgctgtatgagtgtgcagtaataaaataaatacataagcctaaagacaaaactcttcctcatttcaagaaataatttctccagaacaaagcaatagaaagtgagttaagcacctaatttttgtttacctcccacattgcacctgttcttgcataacaaacacattctatttcaagaagttgaaatcccttcctttttgtccatctaagttgtctattatttctgtgccacgggtcattaatgaaaggcaggattctctctgaaattaaacagtggggaagtcaactggaaagagagaaaagtgcagcagaagtgactaaaagtgaaataaaagaagcagaagaaaacattaaaaaaccccgtaattaaaagcatgcacagagtcctgttaacctcggctgactcc

SEQ ID NO: 409546 - DNA, 479 bp, Homo Sapiens
tgcaggtttgtgacaggggtatattgtgcaatgctgaggtttggggtgcaaatgagatagtacccagtaggtagtttttcagcccttgtcccctccccttcctccccactctagtggtctccaatgtctgttgtttccatctttatgcccatgggtacccaatgcttggggcccacttacaagtgagaacatggcggtagttagttttctgtttctgcactagttcacttaggataatggcctccagttgcacccatgttgccacaaaggccatgatttcattcttttttagggctgcatagtattccattgtgtgtatgtaccacattttctttatccaatccactgttgatgagcatctaagttgatgctatgtttttgctattgcgaatagtgctgcagtgaacatacgtgtgcatgtgtcctttcagtagaacgatttattttcctttgggtatatacccagtaatgggattgct

SEQ ID NO: 409547 - DNA, 259 bp, Homo Sapiens
gggcaggcttctcaggacggcctcagctcatagccccacgtgtggtgtgcacggatgtgcagggagagcctgattgttaggtggatgtattttccagaatcggggagggactgaacacgagcatttcccattaatatgtgcaataaatgtcttggggaaggggctatttgaccctcattcccatagttttggcacttcaaatgaagctcttccttgtggtcaccatctctgctgtgggcacacagcttctttttcttgg

SEQ ID NO: 409548 - DNA, 509 bp, Homo Sapiens
gccgggctgacgctccagctgctgtggccggaggtgcagccccgtcaggacggctccactccctggcgcctcacagactctggggctgcggtgaggtcgccctgaagaccccctggtgaggacgcttgaacccgggctgtcacctgagcacaggctgccactctgagcttttggggcgccctgtgcctgtcgggctgatgctcctctggctcccggccacctggggctgacaccggttctgtgggtcctgatatgttcacctgtcgccactcctgtggccacagctacccatgaagcgctttgggagcctcaggagcaacaagaaacacaaggaccaaaatcgaagcacggagaggcgccagtcggagcctcatggccttttcggtaggactctgcccattcccgagcccctggtggtctgtccttgggagggaaccccacggcgtgtgtgcacaccctcctaagcagtagctgtttccagccactctcttccaactggggtataacat

SEQ ID NO: 409549 - DNA, 456 bp, Homo Sapiens
gaaatactaagaacactgcaacaaaccaagctacctacaagctgtagatctctgattgatatgagagagtcagattgtcattagatagaatgagacattaaatattttaacttgcgaaatattatttggctgtctttttttgagaaataatgaagttagtttcaaagttctcacttttcttgatctgtgaaatgactgccctatggtagtctttgtaaggaggacagagctagaagaattaatattaactggtatgtgattgtttttatatacctgacttaaaagcaatgaatcagaggatctgattgaatgaaggaaattaacagatctgtgtaacactaatactttctatacttttccagtaatctatgaaatgtccataataggaaaaatgcattcaggagccagatggaccacattttattatttccttactagcaaactaaatgaatcatt

SEQ ID NO: 409550 - DNA, 489 bp, Homo Sapiens
cggacgcgtgggcaaagaaggaaaaacaccaatcaattctgttacttaacctatgcatttgaaaatgcagtcaagtagtcagtcatgccctttgcaaagtacacaggcaaatataatactaacaaataacacttgagactaaattttaggtgatgaaaacattatgattatgaatcttcctgggaaacgtgggtcaatcatgtctatctccttgaaatctggcaccgctaggtttcaggaagccatttatggtgtgtgtaccagttaggcttagatgggacttcatttaacaggaagagcaaaataaaattagttttaagatggtagaagtttatttgtccctaacagaaaaggaattcataagtaggctgtacaggcctcctatgaccacttaactatgttatcatggctcatattttctgctttgtcattcttagcttgggctttccaaattcaagggttgagatgatgactaagagttccacctat

SEQ ID NO: 409551 - DNA, 404 bp, Homo Sapiens
atgtttttggtggggagggggtaaccaagatttcagggtagtaacttaggaatctaagaactatcttctactttaggaagagtgggattagttactccctttgtataggaggactttatgctcaaggaatgtgttgtggagaaaaacacttcttcacaaacaattcagtgacaagacctcaaaggtaatgcgtattgaggaaaacagtagtgggtgaaaattcccgcttagctgtaaaatgactctcttgccaggtttccgtgtttgtctcaactgaactctgggctgagtgtttaccagggagaagagatgtgaattaaacaaccttcctgtttagtggtacctgctttgtacaagaatgaagtgcaaagccaacttactttattaatccaagttctttttat

SEQ ID NO: 409552 - DNA, 500 bp, Homo Sapiens
gaaaaacatctataaatgaggtaaagttgagtgattttcatttgtagttggataacaatacttcagtggcagcttctctttgttctcaattgcctggactagaaccaaaatctggcatccacatcttattactaactttataacgtggcaatgcctccctttcctgggtctcagcttcatcactgtaagcagagggaactacagagtaccttctaaccctaacatttcgtgacaataaccaagtacaccctaagcaaactgtaaatttgttgccaagtttgtggccttgatccccaatctattctttctgcatctgggtgaggaccctttcttcctcttaaaatttctcaagtcctttactcttctagtaataattcgagtgagctacctatcctttatgctttgttttcctcaaagcacatgaattaactcagttaatctttaaaataatatctggccctctagtgtgggacctgaggtacaaagagggtaatttactt

SEQ ID NO: 409553 - DNA, 388 bp, Homo Sapiens
caagtaactgctctttcattcatcacggttcccatatatctctataatctattgtagcagaagattcctaagaaatcattttctttctgcctagaaccagtcagccctattttagaaatcctaaagtaaatacttataatccctgtcctctttaagtgatcactcaaagaggacatgacatgttcttttaagtgccaaacagctggttcatttcccaattagaggagagcactgcaaatgatagctctaaataaatatgtaatataatctactgataaggacaatgtaaatatttacaacaattagggaaacaaatgtacacatatttgaatattctccagaagatgaaatctatccattgtaacatttgtcagaaagagtctgtttg

SEQ ID NO: 409554 - DNA, 502 bp, Homo Sapiens
  misc_feature (262)..(375): n is a, c, g, or t
aaaaaattgtagccctttacgtctgtttaatcatagttagtaaaattatatccactcgacatattattttgaatcattaatatgctcagcatctctagctaaggcaaatcagaagagaaaaagagaacgttgggtgagaatctggtttgtcattccccatgtatggtggttgaaagatagccacaagttctttgataactccccaattcaaagattgggtccaattccccttaccttgtatttggactagccttaaagactnnnnnnnnnnnnnnnnnnnnnnnnnnnnnnnnnnnnnnnnnnnnnnnnnnnnnnnnnnnnnnnnnnnnnnnnnnnnnnnnnnnnnnnnnnnnnnnnnnnnnnnnnnnnnnnnnnatccctgatccatcaggaaaaaaatctgactacctgagaccactgtgataaagtgtgcacatgaagtgctcttgttgacagtccctgctgtgcctaggctactagccatacccaccaaagtgacaga

SEQ ID NO: 409555 - DNA, 472 bp, Homo Sapiens
cggacgcgtgggcaagttacttatttgcttctcatggcttcactaggtgcctagaatttcctttaaactcaggatttttctttatttccatgcttggggtccacaggccgctaataaaaggtgtccctactgtcttcataccatagcaatcttcttcccgtttcttgtcatataacccctaaaattttttgagtcttaaaagtgataagtgacattttgtatgctaatgagttgactgatggcttgggcctgctggatagcctcaggatgggggggcaggtagcaaaggaaataaccatgtgattataggattggaactttcagctccattcctttggacctccagagtggggagatggactgaaggttaagttgataaacaatgggcaataatgtaatcagtcatgactacataatgatgactccattcaacttgaaaggcctgggtccgggagcttctggggagctgaac

SEQ ID NO: 409556 - DNA, 280 bp, Homo Sapiens
cggacgcgtgggtaagagaattctagtattttaggaagagttgagtaaatttaaggatgtacttaatttgctcattttcctactagtgtgttaaaagttttcagctatcacatggaaacacaggaaacgtattgtcctgttgcataaacgaacagcttcactttagagctgtaacctcaatagttggcagtatgtttgcagaataaactcatagtgaaaaatattaatctgtaaatcatctattctttgaagaaatagggcttttaaaagttatatttgg

SEQ ID NO: 409557 - DNA, 515 bp, Homo Sapiens
ttacaaatcttcagggttgaacattttgatgagattcatgcctagggttactttagtaaaaaatagggagccaatagttgaagtattggtcttatgctatcaatttttattaaagtaacatattcaaaataagttgggatcttaccctaatattttattaactgagaaagtaatataaatgtcccaaatctaatgtaatatggagcctcatagttttgacacatttcccaccatattagatgctatgtcatataattaacattagaattctgtgccttctttttggtgattatatgtgttgaatcatttccaaatattttcatgtatcagatgatattgatgctatttacattactttagttctgactagttatttcattttagttttgtaatagatgaaaattgctatagtttctatgataatagagtaattcacacctatgtcttctctataactctgtgtttcttgttgaaaatgagttctcacttgtgttacatttagttttctgttgcag

SEQ ID NO: 409558 - DNA, 595 bp, Homo Sapiens
ccctgagaagcttattccctaaatgatgatactatttcaccactccctttcagcacccctactaaggggcctttgaggaaaccaaggccccaaatctggttagttctgaggtagaagaccgagggttctttaggtctagctctaggcattactctaagcccaggagggtctgaggtttgggagccccggctgaggccctaatggtgagggctttcacacttgctctcagccctcggcagggaaccccaacctagatgtgtggaggggggctccactctcctagatccttctcaagacctgggtcctctcctttggagcaggctgtagttgccctggggagctgacaccttttggatttaattagaaaaatatcagacacacacagctctcctaaccataacttcccgcctacaccacacaccctgtgtctctatgacacattccctagggaggctggacattggcccagagcctgctttggaaaagacagatgcccaactgtggcccccatatcagcatctccccaactctgccccatcttactcttcctttgctccagcttaggaatcctgtgagataaagtctatgaaggatg

SEQ ID NO: 409559 - DNA, 588 bp, Homo Sapiens
  misc_feature (242)..(342): n is a, c, g, or t
  misc_feature (518)..(547): n is a, c, g, or t
gggaagaatatattcaggttgagagagaaaatagctttcccaagagtgaggaccaaagtagtttccaaactctctataaattaataataagatagaactataacatcagtttatataagataaattggtatacgacaaactgcttatctacaaagagctgtgattattcactaaaaagaagtggcttgtcttggttgggaaaatcccccagttggaagtttcacagacctgagattgttttnnnnnnnnnnnnnnnnnnnnnnnnnnnnnnnnnnnnnnnnnnnnnnnnnnnnnnnnnnnnnnnnnnnnnnnnnnnnnnnnnnnnnnnnnnnnnnnnnnnnntggtaagcattaagtgagggaatgggtgtgcagctctcaccatagtgcttaaaacaaaatgaaagtagccagcattattggtagaataaggtatggaaaaaagacttttcagacttagaaagtcataaaaccacttttctctaaatgtacattttggctcagatgatttccttggnnnnnnnnnnnnnnnnnnnnnnnnnnnnnnaattcaatatattccctatctttcctaggtaagaacaatgc

SEQ ID NO: 409560 - DNA, 588 bp, Homo Sapiens
ctgagaagttgagtacatttacatggtatcaaaaatttagcatctgcagccaaaagccacacctgtgctactcaaaagctgagaaagtacatgtatgtaacacagcaactattgcatggtccttttcttatttaaagctttctcaggtaagttttaatagctggaggatacatattgaaaaaaatctcaatatgaaagaaagaaaacttcagtgttgaaatacattaatacctcctgtgacatctgaatctctggctcaggatcagaacttaggatcacgtctctggtggccataaaatatttacaatctagttaaaggcacagtggcatttaaaaataaagtcttggggacccatggtaaaagattcactgtaattattaacctggcttcaattggtagaattgactcttgccagataacatgcgagggagatggtgattcggaacctgctagctggttatgagggcatagcgaggcctttacctcaagaacaggtggaaacaaactcacggaaacatgcccgtgtttaattctggtgatttacatctttcccgcattttttgctaacctgagccagaatgtggagc

SEQ ID NO: 409561 - DNA, 477 bp, Homo Sapiens
  misc_feature (193)..(244): n is a, c, g, or t
caaatccagtgtgtatttttcacacatcttaattcagtagctaaattttaaacaattaaaactaaatggagtcctactagaacaatcaagttgtgtttaatgggaaaacattttacactgtttccatttaaaagtaaaattgaaattgattaaataaaattaaaagttaaacttctcagtcatactagccacnnnnnnnnnnnnnnnnnnnnnnnnnnnnnnnnnnnnnnnnnnnnnnnnnnnnagagacatagaatcatccccatcatcagtgaaagctttattggacaataaatctttaaacctttcattgcagaagaatggacatattttgttatttttaaaaattaggatctgcataacaacattttagtcagcaatgggccacatataatgacaggagtcctttaagattatgccaaaattttgctgtaccctttccatgtttaggtatatttagatatacaaatacttacc

SEQ ID NO: 409562 - DNA, 201 bp, Homo Sapiens
cagggtgacaaattcagatgtttctggggccaggtcaccaacggcaatgagtagcggggcctggtggggactgcgctgagcagtgggaagcacgtgccctgcctcaggggctcctcggtgcaagcacagactcagagtttccacagatttatctgcttctcaggcaaggggtcagcccagatttttatgtaaaacctacca

SEQ ID NO: 409563 - DNA, 482 bp, Homo Sapiens
gttacctcctgggaaagcaagacgctcccttaagttttagaatggtacagagagtagtcccttctaccagagtttccatttagacatgggagtgtagggggccatgtttcggcagaagcagggcatgtatcagcattagtggactcctcagtattaaaaggaagaacagcaaacatgtcatgtgcccactttgtgcctcaggagaggtagcccgtggacatcgctagggcagaggttttaatatctgggacaaagttatctcccacggcgaggtcgtggctgggaccatgtcatcttcagccgtgagctgctgggctgggcaatgtcttctgggaatgtgagacgtggggtctcctttctaagcggacccccactcgtgctgatgtgggtcccagcatttgccgtgtttggttgaaacagtggcttacctggagggtctgggtctctggatcataaaccagcgaaagcccccacatcagtgg

SEQ ID NO: 409564 - DNA, 130 bp, Homo Sapiens
cttctacccgagggtgtaggattcagacagatgtaagcatggtaccattgtgagttaagatggatgctgccacagtaggctgctgtgaagaatgcagactggagaatgaaagtctaataggttggtttgg

SEQ ID NO: 409565 - DNA, 325 bp, Homo Sapiens
gctaggttggggaggcgctgttctgaatcccaaccggctggaaccaagaatgtcgtttctatttttatagaagttttatacagctccggggtggagaatatttattacctaaattatatctctggaaaaggccaggattttgtagaatccagaatgtgattgttatacacacagggtgctgtgtatgattgaaactactgactttctgtggcccgtttgcagcccagctaacctgcccaaggggaaggtgttaatgctgtgaattggcagaggagagagctgtgctccatagggtgctgtcggtgctgtgctccctagccttctg

SEQ ID NO: 409566 - DNA, 536 bp, Homo Sapiens
gttgattattgcagactaaacaacttgagtagtaagctagaaatgtttttgaatctcatgtttaatttagacattttcagctaaggaaagcactggtttacccgaaacagtcataaagatgaaaacagtcatctttatgatagcgcagcagaaatatcattttgtaattccaaaaggaaccctggactgcaaggagcaaatcaatatatagcttactgaattatgaccccagttttgacactaactgaagggtagagtagggaatgggatatttttcagtatttctgcataatacaggaatggaaagcatgttctcttatctttgttatagtcagatttcatgtgtatctttttggtaacatgttttagttgttttaaagacttgtcttctcagtggatttgacaaaacactcaagtccttgaaggcaaggaatggagtctcatttgttcctagcaccaagtatcaggtcacgtatattgttggtagctgatcaaagtgtattgaatcaaattggatgttaattagttggagaaaa

SEQ ID NO: 409567 - DNA, 716 bp, Homo Sapiens
tgaataacagagctaaccttaatgttccttctgataaaaatactgtcctatagacccaaattagcatatttgcttttgattaccttgcaaaactctatttgctctcttttcttaaaagcttaataattcatataaggcttcagaggaataaaatcactatgtgcaggtgaaaaatcctaacttccctgctgaggttaaatggcagccttcaaagaattttttaaataaataatggaaagagatactccatcttgcctctgaactgctgcataagcaattccttagtcgccggaatttgcagagacataagaaatcagtagtcatacaggcaggtactagaaaccaggaagcaccaatatcctaaatgaagggcagagactggaactgctctgcttcagggctttgtgagactctgggaatcaattcctcaattttcaatgcagtagcttgcttttgcactcctaaggcatgaaattggatgagcagaaaaaatgcattcttttcaggcagaacacaggtttaaggaaacaagaggggaaaatgtacaggtgccctggagaagggacttcttctcttggaacagtctactgggcagactaggaaaggaatcaagaggaagtttgagggtgagcttggtgctggggtatggcatgacattttttgctttgtagatcatagaggaagatgggcaccactggcccaactcatttccttcc

SEQ ID NO: 409568 - DNA, 534 bp, Homo Sapiens
  misc_feature (158)..(209): n is a, c, g, or t
  misc_feature (316)..(376): n is a, c, g, or t
gaaacttcatggagaagtactgccggctcttggacttttcttccagaagtggcacatttcacttctcatattttaattgtggaaagaaatcacatggccacacttgtctttgtttgtttgtttgtctgtttgtttgagacagcgtctcactccatcannnnnnnnnnnnnnnnnnnnnnnnnnnnnnnnnnnnnnnnnnnnnnnnnnnnagctctaccaagtagctggaactacaggtgcacatcaccacgcccagctaatttttttgatttttgatagagacaaagtctcactatgttataacccaggctggttnnnnnnnnnnnnnnnnnnnnnnnnnnnnnnnnnnnnnnnnnnnnnnnnnnnnnnnnnnnnnatgagccactgtgcccggccacaagatttatatttctatatgcaaattatatttagaggttttagaaaatgcctagctataatcatggatcaaaataacaactgagagctgtgcacagtggcacatccctgtagccaggagttcaagtccagcctggg

SEQ ID NO: 409569 - DNA, 434 bp, Homo Sapiens
aaatctcaaattttttaagaacctgcagattctttgatacaattcacgaaacaaaccagtgcaaagcaaacgcagtacacccattccaatgtaattccaatggcaggcccattccaaccctcagactaccaatatttgaactcaggtttgaatgtcagaatccaatcattggcagtcctgtgccaaagcttaactgataatgtggaattcactactgaacatcatgtttactgctgactaaacaaattgctattggaaagcctcttctctccatcttctgggtataactgcattgtgtagtagccattctggtcttttctgcaccagaaggaacactggagtaagaactcagaggtcatgctcccataggaaatatttcccagtggggaaatactttatagacttgtttctcctaagttcagttgtcccagggt

SEQ ID NO: 409570 - DNA, 410 bp, Homo Sapiens
gaaactgactgataatcctaaaataagtgtttgagtacctcttcaaagtcatttagctcaaccgtttattttatgaaagtcttgagaggttaagtgggttattctttcagaaaagcaagggcacattaaggctgttggtgtagatttaatcaaacttcctaacagaaaaaaatacaatgtgtcaaaactagatggttttgcatccataaatattaatactatgtacaccaaaatattttttattctggtattttacatttttgtcataaagaggcaagggttggtctgtgcttagtccagtctctctcccttgctggcaagaaatgtgagcttgtgtcattgtgagaggctcctccccagagccctggcctgcatctgtatcactctggggcttagaggcaatgggccta

SEQ ID NO: 409571 - DNA, 324 bp, Homo Sapiens
  misc_feature (95)..(108): n is a, c, g, or t
  misc_feature (240)..(240): n is a, c, g, or t
gagtagaaggtcataactgataagtacttcagagattttggacaattactgttcaattttttgccattcagacatacctgatgctttcagaaggnnnnnnnnnnnnnncttagtatgagtatgttgactgtggcactgctattactaggaaaaaagtgttcctaatttaccagtgttaatcatttcatgttttcattgctagctcttatcttttttttctgtcatcttccttaatgtggnttatttaaaaaatttctttgactggtcctgtttcaaattgaatgattatgctgttgaaaagatcagaaatggtcctggctctca

SEQ ID NO: 409572 - DNA, 473 bp, Homo Sapiens
  misc_feature (352)..(352): n is a, c, g, or t
  misc_feature (436)..(436): n is a, c, g, or t
catatttcagcacattcctcagtttataatgttaaggttttaagaaagcttaaagaaaccagcatcactggtagttaagcggtttatatttttactgtattttcttcagaagcttgttgccatgtagagtaaaagaaacctcatgttaatcttttcagaggacactgccagtaagagtgttgttattgttagataatcataatggtatgttctggagtctcttctcccctcactcgacacacccgattcactcccaccctgccagcggagccagagagagaagaataaagcaggatcttatttgctttcagaatttgattctgtattgctttggagacatgctgggatttgntcttaaactattattaaatttctaatgccgcaagggttagattcctttgtaagagaaccaagaacgtaagtgaaactgtaaggnttcgctgtgcagacctttctttcacaagcatcagctt

SEQ ID NO: 409573 - DNA, 438 bp, Homo Sapiens
gatctaagcaactttgaaataggcaggatgccattgtgacagatgggtctccgtgtggccaagatgccaagtattctatgcatcaagtgtctctgctaaaagtttgaatccccgccaggaaaatccaaatggatgtctgtctccaaacccggacataatgtttagggcgtgaccctctcccgaaatccactgccgccgggcgctaacgttccctcgtccgaggtctgggtgtgaaggttgggaactgctagcccagagttcaatcggatgcaacagtcccccagctgtccctgctcctgccctctactgcagacgcaggtccatgacacctcagagccgtgctcctgccaggcctgctttttgtatggaaacccaagaaaaataaatatatgttggttctgaggaaaggaagattgtacgcagatatgtggtttccaa

SEQ ID NO: 409574 - DNA, 321 bp, Homo Sapiens
  misc_feature (206)..(206): n is a, c, g, or t
  misc_feature (268)..(268): n is a, c, g, or t
tctgacctcaggcgatctgcctgctcagcctcccaaggtgcagagagtataggcgggagccactgcacccggacttttttttgggacagagtccccattaaagtcattctcttaaatccatagtactcccctaaggtgtccccttagagagagtaaatgcttcagaaaaacagataaagtcaagaatactggcatcattcacgtgnctatttgaaagctgagaattttttaaaaatctcgccagtccaaagtaaacctatttgaaagngaccactgagagttggcctcctgtctaaaggtttagctgtaagtaaacaatcc

SEQ ID NO: 409575 - DNA, 283 bp, Homo Sapiens
ggaagggaagaaagctccccacatacatgcacgatgtgttttctctattgttctgttacctgctttctccttcagattgtataaggctacactggccttttacaagacaaaattggccattcacactgataacgggtattaattaatcagcctcaaattgataacaggtatctcttgtgaaacaaagataatttgttattgattgtgatcatgtcttctgatgtaaactctaggcttattttgtcttgtaaaaggccagtgtagccttatacaatctgaagga

SEQ ID NO: 409576 - DNA, 396 bp, Homo Sapiens
aagggcaagagttggagttacaccatttgtccatcagtgtgtacctgggactaatgcgatcctagcagcgtgttacacagcagggcttgaacttgacatgctgacagtctacagaagtgaagacagaggagatctaagtcctctctgcagtcacaaatttcaaactcaatccatcacggattaaaatgaaaaatctctaccctcattaagggcactgagcacatcaaaagatgtttccaggaacccaggcaaaatgagattgatttgtttcccgtacttatttcaaactcttgtcttgtaccaagggtcagaaatcatccatttaagaactgttacattggagaaataaaagtaagttgttcagatttacattttcattccttctggtgttgagat

SEQ ID NO: 409577 - DNA, 440 bp, Homo Sapiens
actatcaatgaagtggaatgtaataaaaatgtgagggcattttaatagtataatctttattcaaaaaacataatatggtgaagtaacctcattaactattagctgtatgctttccaacccattaccgttttcctgctttttaagtaattttcctcatcaggtagaatgattgcctttagggaagctagtccttgtcaagaactgtgaagggcccgcggtgttagcctgcatgcaagctgacaagttagccttctcaactttcatacaagctggcagaagacacatgaagggtccaggcaaagcaggcagcatgaattgtgtgttcacgtgggctccccttgtccacccctgaatcccaaaagtaatgcaaagtaggccaacttaatggtgtgcatgtactggatttgcatgacaactgagagaccttgagtgtaagaaac

SEQ ID NO: 409578 - DNA, 412 bp, Homo Sapiens
aaaaaaatgagcttcagtttgtgttgtgatgtgtataatttgcatgctgaatcacaacatgcttggagagattgtagagactctttggtaaataatctaacctttacaatttccgtttatatgttaacatttttctataatatgagtgcctttccaatgcacagatattttttatggctgtaatttctctgtaaaaataatttttaagcatacattttattctttttttgcaacaaccgagatttttccaagattgttctgtttcccctcgccctcctagctcccgcccccgtcacttcggcgcttgtattttctaattattcatgggtgccatgttgagtgtttgtaatttgaccaccacaggtaagcttcctgtttacttgaacactcagcctcatctccggtgaatgaa

SEQ ID NO: 409579 - DNA, 252 bp, Homo Sapiens
gagaaattctctgcatctcttgtgcccttgggaaaaaagacctgtgtccgaatgctgtgattttgtgagttgtggtgttgccactgtcagagtaagagataaattaatggtcaaattacttctttcagaaagcacaaatataataaattttttacagagtgaagaatcactttgcaatagttctgagcagtttctattctggaagaaattagtacagaatttccaacagttgtatacattgactggggcttc

SEQ ID NO: 409580 - DNA, 189 bp, Homo Sapiens
gtgtggaggaacagttattggacttggtcttgaataaggagtagcactatagttgcaaacttatgggccttgggctgaattcagcctgcagatatgtttaattcagccagcatatggttttacatttgttgaaatccattaccactatctaagaatgtggagactttgcttagaaatcttggaattcta

SEQ ID NO: 409581 - DNA, 391 bp, Homo Sapiens
  misc_feature (57)..(57): n is a, c, g, or t
  misc_feature (226)..(287): n is a, c, g, or t
aaaatggttaatgctataaagaagaacaaagtaaccataatgataaaagtgaagatnaaagttactttgcagaggtaagcacaaaagggcagtttctggggggaaagtatgttctttatcagagttagataacctggtgtttgattcacaaccattcattcaagttcacttataatcaaggttgccagacacaatgcagtatacccagataaatgtgaatttcagnnnnnnnnnnnnnnnnnnnnnnnnnnnnnnnnnnnnnnnnnnnnnnnnnnnnnnnnnnnnnngtcacaaggaataatataataatatttggaacatatgcatgtatgcttagcacaatatttgcctgtgtgtatctcaaatattatatgggacacacttaatacct

SEQ ID NO: 409582 - DNA, 528 bp, Homo Sapiens
gagccaaagaacaagataattaaaaaatgagttatccagtgcttcatttgtggtttcagtgtgggtagtaagacataggttttggttccaaattaagttttcaatcttaggagggtcaaggcagacataaaaagattattccaaatatcactgcaaaacattatgaaacagatgctatagaaagaaaaggagtgaatgagccagggagaggcaaagagagaaaaagagaagatggacagggagcaagtgaaagggagagaattagctgattcgcagagggagagacacaatagcagacaaaggggcagccatgggcagcgatgtgatttggtgggcaggactgactggaggtgggagggtcttgtgctacccccttgatatttggctggtgttttcatggtcatagaggagagggggttgcagcaaaggaggaagccacagtggtttgatgcccagctagtaatatgctgcacgtgtgacctttccgcctacctaagcctttccgcttttatactggctcattccctg

SEQ ID NO: 409583 - DNA, 513 bp, Homo Sapiens
  misc_feature (355)..(413): n is a, c, g, or t
gtggctaatctaggaatgactcttgctcttctgagagtcactggtagaactgtggaaacactgtccatgtccaagccctttcttcattcgttagcaccttcattctttcaaaacacgtttatgtggagtccatctggtgtcagggagaactgtaggagccagctgacaaagatgaccaacagagttggggccctggcctcagagcctaccagagtgaagcgagagatggtcacctcatggcccacagcatgacggtgtcatcctccactgggcattgcgtgggtaggagttgggacgggattccccgaggaagttgtaaagagcctgaggccccgcatttgagtgggaggccacnnnnnnnnnnnnnnnnnnnnnnnnnnnnnnnnnnnnnnnnnnnnnnnnnnnnnnnnnnnaagcctgtgaggcaggagtgggcgagcccagcagggcctccaaggtcatgggagtgtcttagactctcaaggatggtgggagccatagtagggtgtgggc

SEQ ID NO: 409584 - DNA, 470 bp, Homo Sapiens
  misc_feature (338)..(370): n is a, c, g, or t
gtgaagctcctgctatgcctgggaggccttgggaggaggatgaggtctttccagaggtgtagctggaccctggtattaaccatcaggaaaatgtaaccggggggaggacaggaatccacatgcggaaagtcctgtcccaccttctcttccctccttgggctttggagcaccgcagggtggagctgtgtggccctctcagcccttctgatccagggacctaggagccttgactttgaggtctggatgtcacagaaggacacagcaaggataaaagtggtggcccaggaattaggaagctggttctggaccctgctctgccacttatagtgaactagaannnnnnnnnnnnnnnnnnnnnnnnnnnnnnnnngcatgaggttgcactagaccattgcaaataaacatcgaggctccagttgcttccaggacatctgcgcgcacacacctctcaccatgcccctctgctgcct

SEQ ID NO: 409585 - DNA, 722 bp, Homo Sapiens
tcttaaatcacaatgcagttctatacagcaacaggcaattcaacttgatatgagctgaagtaattgaactgacacccaaacgtgggtttatagcaatatatagttacagtggatagactgacttttctggccgtttgttaatttaagggagtttctggctgaaaaacctaaattattaaagctctgctgagatgtgtatggtagtatttgaagcatttggaactgttgataaccaatcatcgcaacaggtaacagttgagagtggtgctgtgcatgatgaatgttcagaaacagctaaaactaataggaaagcagtaacatttcctgttgctgtcaacatataaaaacaccattaagtgggggagggattgtacatctagggaatgttgttattttgagtattatgttcagccataagcacatttgcctgaagaaacagtggattataaagcaccactgtcttctgtgatagagctttcaaatactttaatgattttgtacattgcaaaaatgagaaattttgtctaacaagggttgataatgattcagtaatgaacaatttgcaacagaaagtgcgtttatatattcatgtatatattttgaagtgttttatgctgaatcagttaatggttcttttatgaattgcagaaatctcctgtggatatgtcaatatgggaaagagggcttttcttatggttcgagtgaaataagtacatcttttt

SEQ ID NO: 409586 - DNA, 442 bp, Homo Sapiens
gtgcttaggaaggacattttaaacgggtattaaaagcagaaaacagtatcctgcataaatgtaaagccatggttcactttcacctggaatattgtgagccattttttcagcaaaccttaagcagctataatagggtaggagaaagtcctgaggatgtcaactgaaatgatttatggaaaagaggagctgctttatgaaaacaaacttgcaaagattaggattaatcagcctggggagatgaaggttttataaaatcatagggatatggtgcatggggacattcaccttggctaacatttaccctcctcatcatcaacagacatgggtcagagggtggctgtcaaaggaatagggcgtagtgtgagtttaaaatctacatcagtttaggccagaaggcccgtaagttaaccaacaaataggcaaataaaaagtcaaggtagat

SEQ ID NO: 409587 - DNA, 125 bp, Homo Sapiens
ggctctgcctctgcaggatgaggcctggcccagtagagcaatgcttgagacagggtaaatctgtccagttctagagttcagtgataagaagcttactggccttaagatgaaacccatattctctt

SEQ ID NO: 409588 - DNA, 463 bp, Homo Sapiens
gtcccccctgggaaaacatatttcagcatgtataagagggagaaaaaaagtttcattccttccagagaataacttatttagtccagtagggtagaattttaaaatgtcagttaaagtcttcaaagtgcttggggggatatcagattccagaggccaattgtagcaattgaaatttgcagaatcaattatgtaaatctgagacaaattagtattaaaattacacggagtatattttttaaatcacccaactttgtagattatacctattttgggcaggtatggaaaaattttgcagttaaatgattgcctaaagaaagtggtaaacaggtgaggaaagatggcctctgatctaggatagatccagaaccacaaagcatctgcaccacaaaaggtgttagactaccaagcagctcctggtttctgcatagtattagtagcacagcttaggatgagaatcctttct

SEQ ID NO: 409589 - DNA, 479 bp, Homo Sapiens
  misc_feature (366)..(382): n is a, c, g, or t
gctctttagtttaataaagtctcagttgtccatttttggttttgctgcaattgcttttgaattctttgtcataaaatcttaagcgaggccaatgtacagaatagtgttttctgggttttcttctagagtttttatagttttaagttttacatttatgtctttaatccaccttgagttgaattttatatgtgttgaaagaaaatgatccatcctgaatcttttgcatatgcctagttacctatcttaccataatttgttaaatagggggtcctttacctattgcttattttgtcaattttgttgaagattaagtggttgtaggtgtacagctttatttctgggttctctaaccagtttgattggtcnnnnnnnnnnnnnnnnngctttgtatcaataccattctatttggaactggaatcttgaattttagttttatgtcagacagtgtgatgcttcactttgtctttcctagaaataca

SEQ ID NO: 409590 - DNA, 470 bp, Homo Sapiens
  misc_feature (49)..(351): n is a, c, g, or t
  misc_feature (354)..(354): n is a, c, g, or t
  misc_feature (399)..(399): n is a, c, g, or t
  misc_feature (402)..(402): n is a, c, g, or t
  misc_feature (418)..(418): n is a, c, g, or t
  misc_feature (432)..(432): n is a, c, g, or t
gagagaggttacgtgactatagattctacagacattaaaaaaaggttannnnnnnnnnnnnnnnnnnnnnnnnnnnnnnnnnnnnnnnnnnnnnnnnnnnnnnnnnnnnnnnnnnnnnnnnnnnnnnnnnnnnnnnnnnnnnnnnnnnnnnnnnnnnnnnnnnnnnnnnnnnnnnnnnnnnnnnnnnnnnnnnnnnnnnnnnnnnnnnnnnnnnnnnnnnnnnnnnnnnnnnnnnnnnnnnnnnnnnnnnnnnnnnnnnnnnnnnnnnnnnnnnnnnnnnnnnnnnnnnnnnnnnnnnnnnnnnnnnnnnnnnnnnnnnnnnnnnnnnnnnnnnnnnnnnnnnnnnnnnnntgnatatatattatgaacaacttcatgctcatacatttggcaacttancanaaatggaccaattagntgaaagatccaagnattatcaaagtcacttaagaagaaatagctgaatacct

SEQ ID NO: 409591 - DNA, 384 bp, Homo Sapiens
agttactagaactgaaccctttatatagtaaatcaagacatatgttcatgaatctctgagtcagtacatgccttaagtcacttaaaacgttgccttgcaatttcttcctttgcaaaataaggatcatacccactctgccttttacagagaagtagtctgtgaataaaatgatatggtgaatattaaagtatttggaaactgtagggagaaagaaattgattgttgctttgtaaccatgtttataggcatcaaagaaaactcaaagcctcctgccttcttaattctgcttctggagatcccacttactttctttagattctttaaataacattaacaatacaaaccaggctgggcaagccttctctttctaaaagtctcccttgg

SEQ ID NO: 409592 - DNA, 413 bp, Homo Sapiens
  misc_feature (95)..(240): n is a, c, g, or t
gtgctcttgcatctctaacaagcttcaggtgatgctaatgcagctagaccacgccattttgagtagcaaagaggtagaacagtagttatatattnnnnnnnnnnnnnnnnnnnnnnnnnnnnnnnnnnnnnnnnnnnnnnnnnnnnnnnnnnnnnnnnnnnnnnnnnnnnnnnnnnnnnnnnnnnnnnnnnnnnnnnnnnnnnnnnnnnnnnnnnnnnnnnnnnnnnnnnnnnnnnnnnntgagaatctacacaggtaagtttcaggaagtctttctttaatttgtaaaacagataaatcgaagtgaattaatgagggtaaataggaaagtagaagatgttaggaaacccagagtccatttcttatccctgaaagcctttggatctctttaaagtatctggggtgccttggat

SEQ ID NO: 409593 - DNA, 469 bp, Homo Sapiens
aaagaaagtggaagatagtaacagagaaagtggaaaaaaggacgagaagggatagacatgcaaaactccagcattccaaagttaagggaaagagaataaccatgttgtgcctataaccctagaagattacaaaaattatttctagcaaattgacaacccttctttctgaaggtagctttgggcaaaaaggtgctgttttgagcttttaccctgaatcacctggggtgcacttgaaaagaagccattttgccaatgcattaaaagtgtctgagtgaaagctgccacttgattgtcctaagaggcttttaaccccagccacataattatttcataacaaacaatcaggaacatttctcttcctcatcagtttcccagactacctcatagcacatgcatgatacaatgtgtgattttgcagccttcatgtaacatcggagtcctaaagagatggacttgaagaagctcatgg

SEQ ID NO: 409594 - DNA, 472 bp, Homo Sapiens
gtgcccttcattctttgtggggtctaatttcttcattgagtaaagactcacataagcttcttctctttctaaaacttagttctgatgaagccatccctccacctgttgtcagctgtgggaaccccatgtcacacacgtcctgtcccatgagctctatacatccccaccggggcaattctgccaatacgtaaattcacctaacgagcaatttaccagttgtagtcacttactggaaatgtgttcacagactttgtactgaatgaatccaggtggtctagagaggttgggaggagccaggaccaacattctgggacttcatacttcccctttctactcagtttccccctcttttttcccattatcctccttcctgactctatgctcctctctgccctcacaatcttgtgaagctggagacagctgagagccaggcaggttgcatatcatgaaaaccacctcactcatcatctgt

SEQ ID NO: 409595 - DNA, 475 bp, Homo Sapiens
tgggaagagcaggtgacagttgcagactggggcaaagctgtgtctctggatgctcatgggggccggcctcctgagacccgcagagcccaggctaccccacttgcgtgggtcttgtgtctcacagcgcctcctgccaccccataaaagaggatcaatgccctccaggctaggctgctatggggaggtgcaaaaggaaagggcctcccaagagaggggacaaaacagaaagtgagacctgcctgcccagactttcactttcatagcctcccagcatcatccaggtggcccgtagtccccaggcccacgtgggttgagccactgcaagcccaagacctggcccctgcatccctgatggccagaaggaaggaaaggtccccgatggcaggtgacccatggcagagccagaggttcctgtgcctctgggacttggggggcacagattgagaatgggtgctaccgtggggttatgcttggt

SEQ ID NO: 409596 - DNA, 471 bp, Homo Sapiens
  misc_feature (251)..(295): n is a, c, g, or t
aacttacaaatgtatatcaacatattataattcaaaagctgtttttatttgggaaataaataacaatgtgtaaagaccgggaatttgttctcctacctaagcctgatgattaaaagacagtgtaactatgcaggtgttaaacattttctatattcttacagccatctctgttcatatatccatttttaactccacgcccctgtaagcctttgagtttgtgatccctggtgaagacagtgacccacattgannnnnnnnnnnnnnnnnnnnnnnnnnnnnnnnnnnnnnnnnnnnngaatataggacctatatctttgttaaggcaaatcctttataatattcattactcaaaagttaaaagttcctgagtagtagtatgaaagaactagattatctttggagagttataatgacatgcctatatatgtagcagtaatttagaataggcatctatttagctatgtgaaaatt

SEQ ID NO: 409597 - DNA, 471 bp, Homo Sapiens
  misc_feature (137)..(219): n is a, c, g, or t
ggcagagaagttccaggtgaatctagggtgtggccatgtgagcaagctgctgaattatgttgaaggcattggaattgaagtcaggaactgaggtcaaggcagagttcagaaccacctatgcgaaatgcacactcttnnnnnnnnnnnnnnnnnnnnnnnnnnnnnnnnnnnnnnnnnnnnnnnnnnnnnnnnnnnnnnnnnnnnnnnnnnnnnnnnnnntaggctccctaacacttgaaaactgctgtgctatgatgttgaatgagccatgcttgttggaattacctgatggcaggaatcaggcaggaagactaaaaacaggtgttgaaatccttagagagtctgggctgatcagtgtatgggactgatgaggaggggtggaaagaagtttgtacatgagtcaggaagagcaatggccttggcctggactattgctagtgcattcctttccaacctggagacaatgtagga

SEQ ID NO: 409598 - DNA, 505 bp, Homo Sapiens
gacaatttacgtgtatcccctgagatccctagagataatttttctgtggaatgcaaaagttacactctcaaatccagaacatcccagagccattctcccgagcaaacatctaaacctaagttggaattcatagtttaactgtgactgcctgaaaaggactaaaagctcctggttggttgacaggaggattttgaaaagagggagtaaggcctactcatctcataaactacacaggatcccaggatttaatagagccatggatcctgagtcatcactgaaaacctctagtctaggaaaattgagattgaggaaggttggggtttcagccctcaggatgtagctccttagggaatgccctaaatcaggattggatcctgggtacaaggagaaatggagcaagtcacctttacccctttcacatttgtccattgcagactactcttttgcaaagagtgaaacaaggaattagaaaataatagaacagtttttcctcatattatgtatt

SEQ ID NO: 409599 - DNA, 161 bp, Homo Sapiens
caacgctcctggccagggatcttatttacaccccaccctggcaaggaccgtcagaggctgctgctcatctagtgtcctcatcggctgtgcaggtgcaaggggcaggtgtaaggggagctgcctgagtccaggtccagcccttactcatctagcaaaatgga

SEQ ID NO: 409600 - DNA, 466 bp, Homo Sapiens
ggtttttgctgttacgatgtttgagtttcttttgtattctggatactaatcccctatcagatgagtagtttgcaaatatttcctgccattctgtaggttgtcttttcactctgttggttgtttcctttactgtgcaaaagatttttggttgatataagcccatttgtttatttttacttttgttgcctgtgcttttgaggtgttattcataaaatcttttttaagaccaatgtcctgaggtcttttccctgctttcttctagtagttttattgtttcaggtcttagatttaggtctttgagttgagtcttataaagagtgagtgggagggtttaagtttcattcgtctgcatatggatatctagttttccccagcgccatttattgaagagactgtgctttccccaatgactgttcttggcacttttgtcaaaaatcgattggctgtagatatgtggattaatttt

SEQ ID NO: 409601 - DNA, 184 bp, Homo Sapiens
gaagatttggataattcatgtgtcttttgttttgatctcagaatttcctcattaacagatgtgaaataatttaccaagtttttcttcaaattgactaggcctgtataaaataacagaaatgccctttgcagtgaaagcactttgtattagggattgatcactcaattacattctggatgagaag

SEQ ID NO: 409602 - DNA, 478 bp, Homo Sapiens
gtatattttcaatctataaagcttagataaatttcgtatatgctcacctttttttgtgggagacttgcaagagaaacctaccctaaaagctaacctagccaccttctatttgcagaaataaagcaaaaatcattttagtgttgattttgatgtaccagaacctaaattgcttaaattaaaaactttttagagcagtgtgtagaattctatttgtgtccgtgagtatggctaataactccattttaagaaccagaaaaggaaataaaataagttaaccatctcccttgagctgcaaaagttgctaatcaaaaacttcatgtaaacaatgtaccgatatcagactctggttatgatctgtatacatttagtgtgcaattcaagtataaaggctttcattttttggcagcccagatgcaaacaataaaataatcctgcttatttcctctcagcagcaggttttgtcatccatatgtaacta

SEQ ID NO: 409603 - DNA, 470 bp, Homo Sapiens
  misc_feature (339)..(339): n is a, c, g, or t
  misc_feature (356)..(356): n is a, c, g, or t
  misc_feature (416)..(416): n is a, c, g, or t
aaacagaggggctcacgttgccggcttctcccattacattttcatttctcactctgaaaaaggacagttctagcagtgtggtgggtggagagaaccatcattggcaagccctggagacctttctagccttgggttagaatgcacagcacccctctgtggcacttccagatatccaaacaagcccttctagacgcccttgtctcttggaacgttaaagacacagctccctgtcttccaaggcagcttgtggttccacagccttggagcgtcctgcagacagtttctgtttttgaaagtttttcagaaattatgcatttattatagagagaccatgtaggntccctcattccctttgnttagagcatcttttatttttacattttagtgatctgaaaatgggatgcatctaaaaaaanaatgctggtggtttggaatgggcctgggccttttcgggggaaggggggtcccct

SEQ ID NO: 409604 - DNA, 477 bp, Homo Sapiens
  misc_feature (207)..(231): n is a, c, g, or t
atccagtagttaggacaaatgaaccaaaatttgaaatagaaaacagataaagcattccatctcaagtatagacaggtgaactaaaagagctataattacaataatagtgcctttcaaagtataacttcttgtttccaaaacactttcacttgtatatgtatcattgagttcttatgaaattaagcatcaattctttgaagtttgaannnnnnnnnnnnnnnnnnnnnnnnnctccagacaaatataaaaaggaacacttgacactgtgaagagtaaatttatagactccattagccaaggaatggtggaaatgagaggtggaacaatgtagaaagagaaatcaaaggcagcaaacaggcttcagcctgggtcagctctgatctttggatagtggccactgaagtgctagactgagaaaatcttaggtcatgcctagcctcagtggttagtaataaattagccatgcctgtacaatca

SEQ ID NO: 409605 - DNA, 467 bp, Homo Sapiens
gatgttttgaaacgtatcagaccaattaatataccttagttcatacagtcatcatttttttggtgaaaacccatttaattaagttttaatcttttagcagctttcaagtgtatttatcattaactgtagtcaccatgctgtacagatctacagaatgtattcattctatgtaaactttgtaccctttaaccagcatctatccatttcccctcagtcctctcccttccacgcactaagcacctagtaaccactattctactctgcttccatgagtttgacattttagatttccacatataagtgagatcacatatttgtctttctgtgcctggctggtttcctttagcataatgtcatccaggtttattcatgttgtcacaaatgacaaaatttccttcttagaggctgaatagtatccagttatatatagatacactcagtttctttatccattcatcacatagacg

SEQ ID NO: 409606 - DNA, 382 bp, Homo Sapiens
ggagtggtgagacagggcatccttgtcttgttttggttctcaagaggaatgcttccagcttttgcccattcaatttgatgttggctgtgagtttttcatagatggctcttattattttgaggtatgtttctttgattcctagtttgttaagggcttttaacatgaaaggatgttgaattctattgaaagacttttctgcttcttttgagatacctacatattatttggttttgttctttctatgtggtaagtcatttattgatttgcatatgttgaaccaaccttgcattctaggaataaaacctactccatcatggatggtggattagctttttgacgtgctgccagatttgatttgctagtattttgttcaagattttta

SEQ ID NO: 409607 - DNA, 478 bp, Homo Sapiens
cttaatcatatctaggaatataaaccggtatagagtatataatatttcgtatgtgatttttctacgtatttataaattagggaaaattaggtttcaagaactgcttttctttctttgtttccacttaatgatgaaacagaatatggctactatttgctcttcaattaggtaattggtttagcatgttcagtagaagcagacacatttgattaatgcacatgaaaaactttaatgtgaacctactcacaatgattttccagataaatccttctttgttgcactggtaaatctgtgctagtgatttatatgatatttatgattgcagcagtgattctgttactatccttttgggaaacagaaaattaaatcatgatttgagggaaaaaatgattctgacttaatcagttaaattgccatacaattctggaatagacagaataattgcatgtcagattaaatttgagtggatagattgtac

SEQ ID NO: 409608 - DNA, 476 bp, Homo Sapiens
gtgatatttagttaatgatttgttttggaaaacatgcagttaggagtatttttgtattttgtcagatgtttaggagacagactttcgggtcatgtttcttgtcttgttcccagatcttttcttaaaagaacagtgtgacaccagaagccaagagatggtttttactaacaacagctttgatgagttcctattaaggtcgtattgtgtattgtgccaaattttccacccagtataaatttagtaacccgctatgagcatatgtaggatattcaatttgcagatacttttgttggttatgttggtttataatagacaagttttatggtcatatgcaattattccattatctttttggacacagtgaatatgtcttttagctaaaaatgtccttggaaacataaatgcctgccaataacatggaatattgaattcgggcaatgtgaattgattaattagaaaagggtcaaaagaaatca

SEQ ID NO: 409609 - DNA, 718 bp, Homo Sapiens
  misc_feature (142)..(142): n is a, c, g, or t
  misc_feature (195)..(195): n is a, c, g, or t
gagacttacaaattatggccttaaaccaacagctacggagattacattcatataaattgagaatattagggaggctgtgggagtaaagaaaaggggatcctttgaatagtcttaggagaaaatttatccatataaaaattanaaaagctctatacccttatctatccaactggtaaagtctgttttaaatatatnctttgaatatagaatcatgctctcaagattaaaacatattatgacagtatagccagaaagcctgggtgtgagagggaggtctctgctcctgctgtaataggggcaggatgtcaggtgggggcagctcagctcatcctgcacatccttccccgcctctgacctctgatgccactatgttgaggactgcctgttcctggttatttgggtttcccagtttttggtacacacatgcatctcacaatgtcctaggggtattcactggaagacaaagaatagtattaggggagaagatttagagatggacagaaatggcttctaacaaggtcacatctgatatctcactaatctaaaatgcagtgctgaacctataccatctgaaaactgacggatgctgtgttatgctgtgtttaaagatccttatgtcttacttattttagtgcatcacagtctaagtatgttatcacttttgtctgaactaagccagttggaaagtaaagagaagaacatttgatagaaagaaggc

SEQ ID NO: 409610 - DNA, 431 bp, Homo Sapiens
tatttatattttaaaaagtaatggagaacagtgggttaaaataaccatatcatagtgtttcttgtctgtttccccgtgcccttctttgccacggattttaagtattatgaacattagtgggctttgttggggttagaactaagtatacaatgccctaaaatcttagatggataccaggttacaagtttgataactgtataatggagaattatatctagaagttgaaattatctctgttagtgtcagagtcttgggaggaggggttagatttcgaagaagacttcgaagaggagctgacagggttttggggactgaattttaatttgcttggtgaacaaaagtggaaagtcatttaaggcatatatagacataaagatgtgcaaaaattctgttatattcaggggtctaaaagtagttggtattgattggat

SEQ ID NO: 409611 - DNA, 123 bp, Homo Sapiens
aagagacctattttaaataagggtatcaagggtagtgactttgaaagtgggaatttaggatgaggaagaattatccacaggagggtagtaagggagtaacagtgttccaggtaggataaagat

SEQ ID NO: 409612 - DNA, 418 bp, Homo Sapiens
  misc_feature (276)..(377): n is a, c, g, or t
gaaaggtctgaaaactggatatgatttcatcaaaaaacataatgcaacatgacatttctttcattctgtacagagtggagaagaaaatacctgttaaaaaatattgcaatacaggaatatgaaatacagaacttctcttccttagaaaatttacaccagactaagactcttaagttattataacaaagttagactgatttattgaggatgaggttagtgcctggaaagtaatacagtgttacaaattagtttttttagatgctgtcaggttaggcnnnnnnnnnnnnnnnnnnnnnnnnnnnnnnnnnnnnnnnnnnnnnnnnnnnnnnnnnnnnnnnnnnnnnnnnnnnnnnnnnnnnnnnnnnnnnnnnnnnnnncatctgaaagccattttttaaaaatgttgtcttgaggagcg

SEQ ID NO: 409613 - DNA, 561 bp, Homo Sapiens
  misc_feature (207)..(278): n is a, c, g, or t
aaaaaattaatgttgttatctgaaaacctaatgattttacggataataaaaatggcaaaaataacacatttttatctctaagtgcttgagcaatacgttaagtatcccaaagtattttaggatagacatttgactaagtacttgcctgttatctttcagaaaaaaataaatatgattttatttgtttccctaattatactgttacannnnnnnnnnnnnnnnnnnnnnnnnnnnnnnnnnnnnnnnnnnnnnnnnnnnnnnnnnnnnnnnnnnnnnnnggagccatctatttaatggaaaatgcaaacctattaatgtaatccaatggaataagacagattacatgccaggaaatggaaagaatcatattgtctagaaagcgattactcctgaaagtttttcactttttgttggaagatggaagagtactagtcatttgaaagcaactgatttctttcctgaattccagtcttgaaatatgcattcatcgataatcaaataaatattcatgatccgtattggtgactcatttgatattttcagtggtttgttgtttgctta

SEQ ID NO: 409614 - DNA, 690 bp, Homo Sapiens
atggcttctccctgagtttgtcttccctttatttagatggtataggtgaatgctaatcatatggcgacttctgaggttttccgttttcattcctaattttcttaagggcaaaggctgctgtaatctctacaataggcatctactctctaaaaataattcagtacactaaaaaatcttggaaatatcttttacatctcctgatcactcactcactacatcacatttgccattgagttatgtaattttgaattactttgtaattcaaactagcttttgaatctctccaggaagtctttcccactcttcatcttgactgcaaccatgcttatcatccctcatctgaactattgccagaggctcctaagttttctttccctgtctttatggtccctgacttcgaattcattgtccaaactgacactagagtaattggtttcaaattcagaggagaccaatcactatcctgcttccagtgattccctattaggagataaagtctaagcttcttaggaatgtgcaatcctcaaaatcctactcccacttgccactccagcttcatcttctctcggtttcccattccttccccactagactgttccctttcacaataatcatcaattattaatctgtaactgagaattgttgggtaatgtattcagcattctatttggtattatgatatttaagtct

SEQ ID NO: 409615 - DNA, 545 bp, Homo Sapiens
aacgcaattatgaaggagaattagattctgtcatcgtggtctcctgcagggagcacaaagttacttctaaagaatgttttcttaattctttacttgaaaataacctctgttcaagtagcataccagatgctcttagagaaatggagtcagtgactccccagacacaccatcaatcttgctctgaactttgtagccagcctgtgtttctcctgcagtctcctaccccgttgctgctccgggttttgccatttccagctgcagtaatcgtgtgtgtgacttgaacatgtgtttgctgttaaccattttagaatgtgttttttcttctcaacatccccctttcctccccttttgggtgcagttgatggatttcccatccccagaacggggaagcaagatgcactgtggattttccttcatttattttctagtactcacctaggagcagacgcctagcttcacttggtttaatttcatcttaaagctgacatgatgttgtgatgtaggaagacagtaaattggggtcactggttaatgctgatatcatt

SEQ ID NO: 409616 - DNA, 670 bp, Homo Sapiens
  misc_feature (575)..(583): n is a, c, g, or t
gccacttcctgcaatctcccagccatgcccattgtatgacttctatgctgaatgactttaagtttctttaatattacatgctctctttcccactgtgggttctacagatgctgtttgctgtgtctgaaacatcctactgttcctctctccacttaccaactaagctttcatctttcatcctccacctaatctctactctcctttcaggatcatcagaggtattacctcttacaaatatctttccctgccttccaaatcctgtctccaaagcctggattatgtacttattataggttcccacattgcactcagtacattgtctccaccctctactagcttggaaaaatctgcgagagcaagaagtatgtctgttcatgttagagttacctctaatgcctgacttgatacctgacaacatagtgttgctcaatcaataattgtaaatacctgaattattaatgcatgaataaataaatgatttggtaaatatacaaatgtatgtattaaaaacaggagagaaagaaatggaaatatttgtataaccagaacatcaggcaattagcattaggaaagcnnnnnnnnnctgtttaagtaggttaaaacaggccttaaaagacaaaaaatcgtggaacattaagatctctctcctttcccccctcctccttctacc

SEQ ID NO: 409617 - DNA, 722 bp, Homo Sapiens
  misc_feature (276)..(301): n is a, c, g, or t
caaaggatgccatttcctgagacacgtcaaggtatctgcatcttagacagtggtgttaccatgtccgcacatcagtcagtgcattttctcttggccccaggccagtaatgtggttgtgtacactggtcacagctcaaaaaactgaaaaatgaactctgagctttactgcaaagaatgccagctaacaaaaataactctgccagagcagtgccctggacaggtttgcagctctgagatctaacagtgctgatgtatgggagtccagtagaatgcttnnnnnnnnnnnnnnnnnnnnnnnnnntccatctgctgtgccgttaacattccaaaaaggtaatgcccaagaactccaaatgggtcctaatgtgctgtttaagactcagaaaactcagctttaagttctacaccactctgtgctcccagactgggaacaaaaacagggtatttccgtgaagtgcaaatagatgattgtatggaggaatcagtgggtaggaattattttgctagcatgttaaaaatacttcaggtgtaggcatttcaagaaataataaagcccaatactctaacccttagaccagaacttggggctacagatggaatacaatgctttgaataaaactataacccctaccagagacctctttgaaaacacagcagtgctagtatggatgtgcttcccctagcatgcaattccccatggatccagccttattgcgtttctc

SEQ ID NO: 409618 - DNA, 720 bp, Homo Sapiens
aaacaacacagagcatggcctggggcgtgaacaaatgggaacttaccataataaaatgtcacatacattgtagagttatcattacaaagataacctaattttatcttggtgaacctctctgtagtctcctagacaattgaagacaccctggtttgtcagaatttacagacgggacttgctgatccaataaaaaactatggctttgtgtcttcccaactctaagtcaataatgtcagctaaaggattgtcattctacctccctagatgttaactctgacaacttctcggccaagcatttttgtaagacagtcatccaggtagccacagcttgaaagtgaagaatcgagaaggaaggtttggtcttgccaattataggaatttggcaccaggttccaaagcatggtatggctttgctcatctagcccctggaatgtgtacatggctagactgatcctaggctatgaggaccacccaaggtaggtttgagattcctgagaaatatctattctctgactccctgtgctctgcactccccaacaaaagaatgtgacattatgagaatggaacattataatattattgagaataggcacctggggtgtttagagatcagtaaaaacaaagttacaaaaataatggatgccagatattaaatgacttctttacacttgctgctttaatgtgttatttaaagcacactagattttggctaaaaagggt

SEQ ID NO: 409619 - DNA, 509 bp, Homo Sapiens
  misc_feature (262)..(270): n is a, c, g, or t
gcaccagcaggtaaccagtggtggcctgcccacgaaagagtatttgaaattcaacagtgagcaagtgcagaaacagcatcccaaaccgcaggccccaccacacgcaggaaccagaaagctgaagggtcaccaaggagtttacttagtatttctcgctgggaatggggatgggtagcaaaaagcccctttcatgtacataatggttggtcctatgtcctacttttattttctctaagagttttagaagaaaggctgttttaannnnnnnnnctccttaagagcaacttcctttttaaaatgctttcctcttcttgtcctgcttgagtaatgcaggcatcattctgaaatcattctgaaacagctaggcagtcgccttttgccaaaattacttctctaagaaaatagagtgttcttttttttaggacttagaacccacaaggggtgagtggaagttttgtagcccatcaaaggtgaatatgtgttctgcagtatcaactaaaacagtgtac

SEQ ID NO: 409620 - DNA, 604 bp, Homo Sapiens
aatccaatccaaggtttcccaaatcgcccgcacatccacgggttcttacgaattccgactcgccatcggcataataaccataggttataaccttcgcgaacacctacgtcgcacgaagctcccctctaggaaccatacgagtactctaaataggcctcgtcgtaagcgcatttacctcactaacgctaaccgctagaccacccgcaagagccctactactagaaggaccatgcaaccacggcggaccactcgtctccgaagccgtagtaggaggcgtcctaaaccgtactatctgccgacttaccctcgtcttcgccctactctttattaacagaggagtattccgagtcagcgacaaagaaggcacacccctacgttcaccgccctcgaggcgttgcgccgtcgtcttcggcgccttcatcgtagtacgactcttcggcagagtcggcacccacggagtccgcaacagacacggtatctttagcaacgtcttccaaggccccgtcttctacgccgtcatactaaacgcctttaccgtccgagtgataggtcatacgatttaagaaaggaccgttcgactactctccgctacgactaagccgat

SEQ ID NO: 409621 - DNA, 574 bp, Homo Sapiens
aaatccgaatccaaggtttcccaaatcgtcccgcacatcctacttcatcccgacccagacaaaatcccgacccgtctctcctaggtgccgtcgacctaagcgacggttacccggatttaccttctcgtcgagaagtagaaaaatgaacccgaaccctacgaaccccggagaacccatcttcgttctgaaaagacctagccccccgccgacaaccgccccgatagtacccggaccctcagacctttctaccagcgcgactactctcgaccgcacccacctgcaagtacggtgacgtcaacacccagcgctccgcgccggaacctctaagtaccgaccaaaaccaccaccttaaaaacccggagagcccgacccctagaggatccgagacctcctccgacaataacgataataacaacgataaaaaccacatacccggatcgacctctatctctaccctatccctcgtcgtcgcaacgagtagtaacgacaacaaccccctcgtagaccccctttccccacactctctatcctctggcccatcatcccatagctcttcaccagaccagagcccatc

SEQ ID NO: 409622 - DNA, 565 bp, Homo Sapiens
aaatccgaatccaaggttcccaaatcgcccgcacatccactctcgtacgttgggggttacgcgacttccggaacgaccgccgttttgcctatcgatagtggaaagcccatagtggtgttaactgtaaattttatttttctgggaagtccttttaaagggaccgtcctctccgatattaaagtagtggggaagtaaaggatcaagatcgacttaggcttgccggtcgagaggcgtatgaaaattagataagaaaaggagtcctctccggaaggttaagagaggctttctgctcgcgttgcatctggctgaccgagaagtaaacgctaaagctatgtgcttatggaattccttcgggacctaggttatatagatcgatagtacgactgctttctgagtagactgccgatttggtggtgaagcttgaccccgagttcctctccctttttaacccttagcgtaaagcgcgagtcccttgatgagtattcgtacctaacccgtataaacgaccaaatggatctttccgatacgactaatcgattaatctcgcccggagattacgtcgctt

SEQ ID NO: 409623 - DNA, 368 bp, Homo Sapiens
aatttgctttcaaagactgtcaccaaagagcctcatccagcactgagcagccacactctgttcagacacctgtactcctgcacacgcagctcccaagctaggcttggctacaaccaaaacccaaatacctcaaatctttatggttacaacagtgccagctcacacagtttaaactatcttagcctcctcatcacaaacaaaatgctgtggaaaaaaccgtaccttcctcaggctaattccatttggttatacagagccctgaacaaaagtaactctaagagtgcattggtgagcttaagcttaaagtaaaagccagttctttcatttgagttcaagcccttgtttaacagatttcaaacaataatttt

SEQ ID NO: 409624 - DNA, 563 bp, Homo Sapiens
cggaagccaatccaaggttcccaaatcgcccgcacatccacttaggctcctagcctcatagtccgcctacctcaacttcccgggatactaaagttgtgaacgtagaacgccatacctaacctggtgcaggttcttggtggacgcggtggcaatgtgtccctcccctttcctctcgatccctgtcctctttcttcgaaagcttttatcgtctcttgctctactgcctgctcttctataggtagtttcttgaatttcgctttccttctttgtgaggtgtttcgtcgttctttatgctaggagcctcgttagaaggctgaccgaggtgtttcttgctcctgaacgtctgaaggtccgactttgaagggaatagggtttatgctcgagggctgtgttagaacttgggagtgatgtgtctgcttacctgtctgattttcgtatcttctacttccttatttttattttagagcgaaatcccgctctataacccgagctaagatgcgattataccgtcgcgactcgctgcgacctcggcctaaactcggaaagttctcctgtatcgaccc

SEQ ID NO: 409625 - DNA, 673 bp, Homo Sapiens
  misc_feature (150)..(150): n is a, c, g, or t
aacctacaaatgccaatccaaggttcccaaatcagcccgcacatcctaaggcgtaccggcgggttagtttgtaattaccggcttaaacctattccgatctcggggtggtagggaggaaatatgggacttattcaggtatctacggaccgnattgagggaccctctatcctcgaattgttggtactacgctaactttgacgacggggccgcgagatgggctaacccggagaggcgtaagtctttttgggaggcggtaaagggggcggatccatattctcgcgagtactatcagtagcgttgcttccgttagtagcttcttaactatctcgagaggtcgcgttttaaggagtataggcgggtatatcgttactctccggagaggaagtataagtaacctaagccacgcgactaatacggttcagaaccaaacgacccaaatcgttcgcatgatcgcctcgagagtaagcggctgtagaccgaagatctgcgcgagaggaattctaaggaccgctggactactctccggcgcgatcgtaccgcattttgctagacggatgaggacgaccataaggaccctcgactcaagccctacccgacccgtaagtagaggtagatttgtcagtacttccacctaatgtgtagtaacgtccaaagcgtcgaagggacgatacta

SEQ ID NO: 409626 - DNA, 669 bp, Homo Sapiens
actacgaaatgcctattccaaggattcccaaatcagacccgcacatccacagtaggcggagggtgtttatgcctaattctaagacgcatctcaaaaaatagactgttcagctgcctaatgggaggaaaagagctagcacccggaagaacccagggattcttccaccgagttatatctacactaagcttctaccgcgactgctccgtctaccgcgagagcctgggtacccagaggcctacttttaagtagagggggcggcgtccacgttacgagcttcaacgtaacatccctacgaataaaaagcgacctcctaagagccgactacaaatccccccgttgtacatatccgagaatagttggaaaaagggggtgtagtaaccaccaaacgagcgtataagactataagatcgtcctcttcaccctactcataaaaactctaccctttagtagcagcggcctccaccgactactaagaggaatagggcaaaacatcttccgcgtaccccgcttcgttcctccgagttaccgagacctcctagaaaaggtagtcaggataagacccaggggggaactcgatctaagacgggttcgagggcgtccttaatgcctgaacaaagggcgcagaccgagcccatacctaagaccgacccctaccacaaaatgaccgta

SEQ ID NO: 409627 - DNA, 550 bp, Homo Sapiens
  misc_feature (116)..(253): n is a, c, g, or t
agatttttcaattaaaaaatggttagtgggtttaatggtaaacaaggcacaaaaaacagtatagaggaccgtctacgctgtcaggactccacattgttttgtttgctcaattgttnnnnnnnnnnnnnnnnnnnnnnnnnnnnnnnnnnnnnnnnnnnnnnnnnnnnnnnnnnnnnnnnnnnnnnnnnnnnnnnnnnnnnnnnnnnnnnnnnnnnnnnnnnnnnnnnnnnnnnnnnnnnnnnnnnnnnnnnnnaaaattttaaagccattgcaatagacgagaaacacaataatcagaacttgctataatttgaacttctaggggtccaacaataaaaaagagtatttttaaaaagtgcttgttattgaaaattaggtaaattttggcataaacgaaaggttagtagtgcaatgacagtgacagtaatagcgactgggaagggggctacaatatgtaaagccagctcaagttctatttagggtgtcctccctcaattaccttagaaaacatgggcaggaagtagatcttataaacattttttagggtgga

SEQ ID NO: 409628 - DNA, 386 bp, Homo Sapiens
cgcaaccttcatgcaaaccagactgaggtcatggcttatgtcttcaaagtctgacagtggtgggcagttggaggggcaacagattcactgctcctcccagggcaacatgagttcctaggcgacctgctgtttaacaacaatttcggcagctgtaaaactagtaatcctttacggtagaataatgctctgtactctagaaaacattttcaaccctttctctcctttgatgctcagaaaaaccctgtaagacagataggtagagtaaaaccctgggataacatgaatttagttaaaacaagatagcctattggctcttatgcttggcccaactcccaattctcaaataaggtcaacttaggttctgttctgctggggtgggggaaagg

SEQ ID NO: 409629 - DNA, 675 bp, Homo Sapiens
ggtgaaagcatggacaatgagagcagctgtaagcatggaaaggaagttaggtggagaggcatgttaaaagaattttgacgatacttagtgtactggacattatcttatctgaccagaaaaatatatcctttattttccaaaagttgcccctctcccactccagccatatgattatggaggggactgaggtgcagccatgagaatgcccttggtagaactcctaccaaaaagagtgcacttgaataagggcctcagctgctgcacttggaaatccatctccatgtatgcactgagaccacatctcatacaggttgctgccaccagtaactgagtgtgatagggacaccaagggagctccattccaggaagacaagagactacctttcagcaactttgcctcaggaactacctgataatcttgcagaaccctctatagactgcctagcaatctagacccaaactattctctcttttaccttcacttagagtcagattgcatcatggtctgatggcttcccagccatttccagcaccctccctatatatatatccttttacacagatatataggttgtatatgtctaagtatatctaataaaatccttatacatttaatcctgtctggcatctgcttgttagaggacatgaatgaatgcaactggcaatcctattctt

SEQ ID NO: 409630 - DNA, 634 bp, Homo Sapiens
  misc_feature (147)..(215): n is a, c, g, or t
  misc_feature (588)..(588): n is a, c, g, or t
ggggagaaaaaaatattatagaatgaaatatatgttctgtaccatgacttccaggtttctaaatatgtattcatgttacagaacatatatttagaaacctggaagtcatggtaaaaagtacaaaactggaaaatttggtatagtggnnnnnnnnnnnnnnnnnnnnnnnnnnnnnnnnnnnnnnnnnnnnnnnnnnnnnnnnnnnnnnnnnnnnncagtgaaaatttagtgttcaatttcatttatatcatcttcttattaccattgcgtttcctggcactctttgattgaaatgggagaggaagaaaccctgtgttcattcccctgggtgtgtgtttggcagttgtgtcctgaaactctattgcctggggagtgcttttatctccttgaagcctatttgatgaaaatattaccaatacctcatagttacacaaagatgactggaaaggtcgttttttaacgagaaagtcatttgggcataaagaattgaaatattttgcactttttcttagtaggaatcagagcagagcgacattggaaataagaacagaaagaaatgaaagttttctgtcccctacccagtgttgntctcctccttcccttcctcgttacttaatttaagagaagggaagca

SEQ ID NO: 409631 - DNA, 214 bp, Homo Sapiens
gtgaatgataacttcattaaagggggaaaggtagaactgactgcatttgaaatagttggttcagatatgaggccacgtttggaaacagtacctaatatcttgtctcttggaacaagtcccaaggatagcaaaatcttcttggaatgagtaagaaagggttattaattttcttttaaaggttgttgatctatagagtttatcctatatgagtacc

SEQ ID NO: 409632 - DNA, 598 bp, Homo Sapiens
aaaaaagattgcgggaatcacgtgcattaagttgttaactcccttagaatgtttaagccaccggtttactctgagttttttcctttgtgcacatgtggcttaatttccgtaagtaaacatgaattatgatatctgcctagggtgttacatggtgaccagcgtactgttttttgctgatcaggtaggtgagttgttgaattccttgccttccttcaggtgaagtggatgtagcccaggagaacatgattttaatgcaggcatcttaatctttccatcttggggaaatatacattttaaagaagcagtgttttctgaaggcataccttatcataaatcctacttacagaaaacagtataatgaaaaacttatgaaatgtgttttctgttgtcttaatcaaaaggaataatttagttattcataaatacataccctactgtcttctgatgaatacttgagattaagattaaatggaataaattaaaacctagtttcaatattgaatcaaagctaagtggcctccctctccctctcaaaggttaataagtttttcaaaccagagtgcgtgaataatttaaaagatagcatgtggaataattt

SEQ ID NO: 409633 - DNA, 485 bp, Homo Sapiens
  misc_feature (404)..(420): n is a, c, g, or t
atgagccaccgcgcccggaagacctgactcatttctaaagtggcatgtcttcacaataaaactaatttttaaaaatgcttcatagttaattaatacttgctaggtcagtaacaaaatcttttctgctgttagaatctcagcaacataataataaataaaaagataacaattttttaaagaaaacttaatactttaggtttttgtattagatgtttctttaaatttaaaaaatgcttcttgacacataactttagagttctcattctaagattgttttgtagatatagttgccagaaattaaataaaatgaataatatttcagagtggcaccaaagcttgatcatttttaaagaactcaatatttaaatactgtggaatttctgatataaatgtggctttaagannnnnnnnnnnnnnnnnacaaaaagaagaaaacctaactgatacagggctattgtgtgtggtgaatatattattattaaaat

SEQ ID NO: 409634 - DNA, 352 bp, Homo Sapiens
ctgaacttttctatttgtttgaaatatttgatgacaaaaatcacaaatatattttataacaagatatgtagaagacagcggttaaaaataagctcaataagtagtcaggagtcagattgcaaagtatcttctgtgtagcctgctaggtttttggatttcctgtataagcatatttactattttggtcttcattactcatctttatgtggaggactccaaaatcattcagctcaacccaacccatcctgctcctctgaatgtcagatttctctgtcctacttcccttatcctggcatcgctgtcaatgtagcatgctcaaagctagacatgttataccttaatctacatacct

SEQ ID NO: 409635 - DNA, 625 bp, Homo Sapiens
  misc_feature (186)..(194): n is a, c, g, or t
  misc_feature (204)..(458): n is a, c, g, or t
ggaaataagaaattaattataattataatttcataaattataaacataattccataagtgtagtctaaaggaaaataagaaattaagctataatttttggaaaggcatttcattacgtaagtgcgtgggcatggctgtatcacagcaaatcacgatgaagcagcctaaggcttcatgtttgtttgnnnnnnnnnggagactgannnnnnnnnnnnnnnnnnnnnnnnnnnnnnnnnnnnnnnnnnnnnnnnnnnnnnnnnnnnnnnnnnnnnnnnnnnnnnnnnnnnnnnnnnnnnnnnnnnnnnnnnnnnnnnnnnnnnnnnnnnnnnnnnnnnnnnnnnnnnnnnnnnnnnnnnnnnnnnnnnnnnnnnnnnnnnnnnnnnnnnnnnnnnnnnnnnnnnnnnnnnnnnnnnnnnnnnnnnnnnnnnnnnnnnnnnnnnnnnnnnnnnnnnnnnnnntgagccactgcacccgtccgaggcttaatcttatgtgtagattcaccaacaatcttatatgtacatcaacagctgtaaatatcaactgatacaggtgtgctagattggcaacgcaaatacatgattttctgaaatagcaaataacttgataaagtttcaaaatcaaa

SEQ ID NO: 409636 - DNA, 116 bp, Homo Sapiens
gaaagatttggtggttagaagaatagagttcctgtttagttgcttatgttttttcagtaaagtatgtgagagtggggccaatgaggaagggtttatgttctacagtatttatctta

SEQ ID NO: 409637 - DNA, 541 bp, Homo Sapiens
gtttttgttttccttatttgtgtatctactgcagtgcctcactgtaccttgtacttaatagttgctcagcagtagtcactggagggaatatgtagacatatatttgaacctctggctggcaagtggcatcgaatgtgaatctagacctgacccatctactgtttgtaaattctatgggctggttgattaattttgccaagctgtcctcttctaaactcaaacctggactgtttaagttaaaattacctgccttttctatatcccttcctgttctttcagtggtaccatcagcttgcaaaattgttcaaggttttcctttgctcctgatgacctgcttaatgtgtatgttttagttggagcagtggctacaacatcttaaaagagcttgtctgcaaactctaatgataacctacacaacacatgaaaacagtgtgctttgaggtaatctgcagttcagtttagcttttctcagcagtatcttcaacaactttaaagctctggcaggttttatcaatgtaaataaagtgcattttctttttgt

SEQ ID NO: 409638 - DNA, 856 bp, Homo Sapiens
ctttggccttctgaatatgacttgcagctgggtagggaagtagtgcaatattatccacagattgaagattctttcaaacaacagaaataatcaagaattcactgtggaggattttcccctccagagagtaacagatagattgatgcgtagatctaggtatgcttattaacaaaccattcctgtttcatgggatgtacatgtggcagcatctggattatttaatgtgttaatatagtcagtttgtatatgaataatttaaaacagtagcaagagataaaagtagctcatctgaagaagggttgtttgagagctttttttctgtcaagtataattttactctcaggttaaatgaaatttattaagatgcaatttgctcctgggaggtatttgtgagtttaaccacagtctgtcttggaagatattatgacagtaagtaaatgtcacctggataatactgatccattcacagaagggagaaaaagtgtgttgggtcaattaaggtggtttaaaaatgtgttgactctgaagaagaaaagtatctaaagtacacaactctaacaaatctcaaggccagtgggactttacagactgagcccaattgtgttgagtctgtgtattgtatatacttaacacaagcaaacacagactttttctacaaatgaaaacatgtctgctgagcagttgactcagtcatctggaataaatgttctttatttgtgtttccatgggtaaaatcaagttaatgaactgaaccatcacaatttctcttatttaattttaaaactctagattaccctgtcttctatctctatgtaattcctgtgttagagcaaacataggaaattgtcaatatggc

SEQ ID NO: 409639 - DNA, 158 bp, Homo Sapiens
gatttttagaatgctaaatgagcatcggcttcaacttaaagttaccagctacattaacctgtaacaagagagtaaacctgtcctttgtagctttaaaaccaggcattgactttctctctagctaagaaagtcctagacggcatcttcttccagtataa

SEQ ID NO: 409640 - DNA, 672 bp, Homo Sapiens
  misc_feature (525)..(549): n is a, c, g, or t
cttcggctgccaccatgggttattgctcccttatttgagatacaaatggtgctctcaatgacccaaatccagtcccagctacatcttcactcacacaccatgactaaacttcctgactgccactgaaaccccaacttggtgtgaatctgccctggtgagtattaagctggcagcaggaaatgaaatgagctctttggtgcctgctaacggggacaggggcatttggaaaggttggctctcaattctttcggctaatgggaggaaagtgtaaagaatcaacagaagaatggcttctgaacgatccaatctggtttggaaattttccatagtccttacttgcaaggactggaaatttctgtctgggagttcatgacacttgaaccactgcagccacaggatgaagacttgactccgaagctcaaactgttaagctgtttaggccccccattctactccagtggggctgaaacacttctaatctctgactgaagagaaatactaatatgttctccccacaccccccannnnnnnnnnnnnnnnnnnnnnnnngattatggtctagcaaattctcacaccttccccggagatggaaaaaaatagaagaaacaaaggggccttaggtttcagatatattttctttccagctcctgctcgcttgtggctgccatgtgg

SEQ ID NO: 409641 - DNA, 508 bp, Homo Sapiens
cttgggttcacccacaagttggaggcggcaggactctaggggtttcagttgcccttcccagagtggcccaccaagccttacagtggatacttgttaactgtttttgtttctctgcctcttggggccatcagaagtccctttgtcctctttttatttcctctgatgtgttgaagacactgtacaggtcttaatctcaccagtagtttattacaacccacacatatttggaggtttatagggatgtttttcccgctgctttattggagatgttgtctgggaggtcttgcttttgctatcttagttgctctgtttccatggggtgatttggagaggtggaaaaattatgccaccttgccaccactttcctaattactttaagcaaccaaactttcagcaacgaaacttttaaattactttaagcaaccaaacttttagtctatttctgttgtactttgttagtaagcatctacctgcctgtctatgtaaacaggttttctgatgcactata

SEQ ID NO: 409642 - DNA, 437 bp, Homo Sapiens
tccgcaaaatagaaagtggcatgactattcctcctatgaaagcatcctgtatggaggatcagaccaaatgctaaaacactttagtaggtttacctaaatacagcttgtctttcatatatcatgccttgacacttcttctgcaagaccagttttttcttgtaagactaattgatattgagatttcaatatatatagaaatgggactaaattttatccaaagctatttttgcctctattttgggggcattcaagttaatttcccccacttacactaaactgtcaaatactagaatgtggaagcttgaatattagagataagtaagtgcccagttccattccaccagttcacagccctgtctatccctccatcccaccctcaccaccaccctcctaaagcaagattattaacactgaactggactgctaaaacttcttcc

SEQ ID NO: 409643 - DNA, 817 bp, Homo Sapiens
  misc_feature (527)..(559): n is a, c, g, or t
aaactgactgtcactcacctgcttaaaacccttctgtggtgggttgcttgatacatgaactccaatttcgttaatttaatacaaaaggtcctccatggttcagctcctgcatattcctcagccttatatcctgacactccatttttcataatttaaactctagtaattcttaattggtcatatttacccatatatcttaatattccactgccatacttttgctgaagtcattctttctgtatgggctatttttcccctcttccaacccccttccctagtttattctatttagtgttccaattcaggggtcatctgctttgcccatatccagagggttagctggccctctgggctccatagactcctgtgcatagtctagtatctgcacttagtatattgatggtaatcatctaccctactaaatttgaagcaccttgcacagaagggccaagtttcagtcatctgagaatttccacctactcacttaagacctggtacatgagaattgtgaaataaatgactgtcgnnnnnnnnnnnnnnnnnnnnnnnnnnnnnnnnncgattctcagagcaattctactaagttctaatgatttccctgagagtcagaataaagataattttggggtggaagctgagtcgtagagaggttgaatgagttgcccaagttctcttggctgggtttagagtctaattttgactcctagcccataatttccatcagtaggcagtactgcatcacaactgatctttaacatcagaactgcgtgtattaatggcccggctcacttgtgaatgcccaggcactattttggag

SEQ ID NO: 409644 - DNA, 892 bp, Homo Sapiens
  misc_feature (537)..(553): n is a, c, g, or t
  misc_feature (565)..(815): n is a, c, g, or t
agcacctgcaatgtgctggcattcttctagatacttgggaggcatttagtaagcaaaacaaagatccatgccctcatggagctttaattccagtggaaagagatagataataggcataacacattgttaaattagttgtctgtgttattgtgtgaataaaaagaatcaagtagtggccagtgaagtcttagatattataccatgtgagtatttatgcggatatggttttccccacaaccttgaggaaataatctattttggttgcttttgtagtaaacaatggtgataaatggctaagggtctaggataaagtagattgtggcattaatgtatgtgttatgatgtggcatatattgagcatttgtaagtttatagaaataaactgattgttctctcaaaaactggtttgacacaggtttgtatataactggttattcagtaatgataattttcaaagttgtcttagtctatttgcactactacagcaaaataccatagagtaggtagcttataaagaacagatgtttatttctttcnnnnnnnnnnnnnnnnngagacaaagtcnnnnnnnnnnnnnnnnnnnnnnnnnnnnnnnnnnnnnnnnnnnnnnnnnnnnnnnnnnnnnnnnnnnnnnnnnnnnnnnnnnnnnnnnnnnnnnnnnnnnnnnnnnnnnnnnnnnnnnnnnnnnnnnnnnnnnnnnnnnnnnnnnnnnnnnnnnnnnnnnnnnnnnnnnnnnnnnnnnnnnnnnnnnnnnnnnnnnnnnnnnnnnnnnnnnnnnnnnnnnnnnnnnnnnnnnnnnnnnnnnnnnnnnnnnnatgagccaccgtacccggccagatgtttattctaacagttctggtggctggaagtttagatcagatgctggcagatc

SEQ ID NO: 409645 - DNA, 535 bp, Homo Sapiens
ctaacgaggacttggtgcatttgagacactctcagctgtactttgaattttgattccagagaggtcacgactctggtcaagagggcagacagggaggtgggaggacgggttgtgtgcaccctggataggccggggtagggggaggagaaaggaacggcagatgaggggtccatcttgggtggagcagaaaattaaaaggtgagagccctccactgagaaagcgcagccctggatccaggcctgaggaatttggagcagaggggatggggtcacatccaggatctgctgaaaatttgggggtgtcgaggtcagtgagggaagcctgagtccacgggagcaggtggcagtccagctgtttacatgctagaatgttctattgaacacccactgtgagccatgtgcagatgcccccccacactcagtgctgggagcacagaaatgactcatatctggcctcagtctgtttggatagacagacggtatagccagtgctatggagccatcagtgctgtgatggtgggaagaggagcagggc

SEQ ID NO: 409646 - DNA, 486 bp, Homo Sapiens
tataaagaaagaattagaatacttgaaacctagccaaaaccttatccttacttagggtgatcctgtgcttccatttgctaatccatagatactcctaatatcttccttctcttcttcataagtaaggagataagatgaaataaggaattcgtaaatacaaagagagtcataaagcatcacataaatgttatgtttattttatattgaaatgtccacctgaaaaactttctctggcagagtgcagggccagatgaaattcacatgaaggaggaacacctgatctgtatggccctgtcattattatgcatacccatggaaccagctgggcactcagggttatatgtggtagccacagcagggtgatttgcaacccccactcctatatccatcaagacaaggccaccacgaggccccctatcctgctgtagatgacctgaaatacgctgtccccttagagggtgctttctttggaattgatcatgaaca

SEQ ID NO: 409647 - DNA, 398 bp, Homo Sapiens
gtaagtggcaagactgggggtgggcccaagttcatatgaagccagaaactgtcctctatccaccacagtaccctgcttttcatttttaattcctttttgtacagcatcactgtgtatttctacatggagtctagattgatagtggatttctcctttgtatggtactgatatattgttacagtgtcattaaaatatcttggtgtcagcaggtcagggatgggactgactcgttagtgtccagtatttcacaggctacagtggattttcacttcattttataatgtgatcccataggccagggataaattgtgacttcagaagagtaaaggttaatattaatcacagttcattttttttggacatactgttcttttacggagctgcctctttatgaaatt

SEQ ID NO: 409648 - DNA, 476 bp, Homo Sapiens
gaatgataatgagcacctgaaggcttggtaggtacctgtgagcccagtaaatgagccacccatatctgcttagctcattaatctgttctccaaaatccagaatttggatttgtgcattaaaaccacatatgtgatacctttggatgtcaagagacatctctgcaaatctgtttaacaaaaaggtcatgatgtggtaaaggaagaactggcaagctttgttcatgatctctaccatctctccatcaccagacaagatcttgacaatgtggccagaggcatttctgaagcccttgccaactgacccatggagaatcatcgggccttggagaacatttatgtggcagttttattgctgccatcaaaagtgaattcttatcacttttggcctaaatcagctcttgtaccttaggctgtttaaaaaatatgatgtcaattggaaagcatcccatttggtgctgtttctactttttttattt

SEQ ID NO: 409649 - DNA, 611 bp, Homo Sapiens
cggcactcaaaggcatagtgtgaatgaccttgagaatcacctgaagcctgtgctgctaacccaaggtttcaagaaggatgtgacaaacatactgtcctagttagtgctgtcctcgatttccagcgttgagaaggttggttgtcatttgaaagaatctcttctctctgcctgatttatggcttcttgtgccagagctggctgtgctgaggtggataccctgaggagggagatttattggtaggcattgcactgtctttaggtgctgacatgttttcccagccttgcccaaggcagacaagaattgtgagtgcaataataaacctcttgagttccatcaacagctcataggcagaagtgcccttagttggtccctgcccttgcatgaacctgagagggttttttggtgatcgacctctacacctcacttgtctaccccagttccgccgtggtcatgacggcgcagttgtgaatcttgccagctcctcagccccatgcctgcctgaacagcaactcagggcagtagacagtggagaaagcggaagttggctcacccagcctgaagatctttgagcaccagagaacccacgcatcctgcccagacttccccattt

SEQ ID NO: 409650 - DNA, 551 bp, Homo Sapiens
aatgaaacttatgtgcaggagaacaaagataattatagaacaaaaaatgatactacttttgtgaactttgtgactctgaagtagaggattgctttgtacttggttagccaatgtgaggaaataatgacatgttttatacaatgaggaagattacattcatgccttgtaattttgtgtacaaataattccattattccttataaacttcaagccctcaggagcactgatttaccatactggtcttggacctttgacaagttgttggtcatttttattcttagacaagactatttctgagtacctgttacaaaattctgaggttctttaagactttacaagtccataattgaatgaaatctttacgtttatccctgttttacatgctgaggtcaccagaataagtatggtcataatatttaccttttagtatattagcctttgacttactagccaagttggttggtggtgctattaagggtaaagtaacaggtaacccctgtgggccagttgggttcatggcccaaggttgctccactgcttagccatctcag

SEQ ID NO: 409651 - DNA, 421 bp, Homo Sapiens
ccaaaataatagtcatgcaatagtttatgagtgttattatctggcatcatgctaacagttagtgcaattcttcctggaaggaagacctatagagattaaacaatgtttaggccccagtaagttaaattattccctttccgacagacaccctatatggagaaggcaaattaaaaaggaagtaaggtagctattagttgatatccaattttcttcaaatcttctaaagtgtgttttcatattttctgggagatgtgtgggaaaattgagctctgactcagatccaactcaaagcctgtgcaagcatgagaggctaagtagtttcctgcgaagctctgcactaccaacctctgtttaatttgttttcttatgttatatctcagagtacaatattattatgatttggcagaaaaccttgatctgt

SEQ ID NO: 409652 - DNA, 662 bp, Homo Sapiens
  misc_feature (427)..(442): n is a, c, g, or t
ttaattcccttttctacccactcttcctcataatatggtaagtgctaagaagaaaaaataaagcagaaaaaagacaatagaaattcaagggaggagggcatttgaaattttaaataaggtagccaaggaagtcctcactgaaaaactatctttggagtaaggacttgaaggaagtgagggagctacctgtgtgaagggctaggagaagcccagtaatccaggcagattaataacatgtacaaaagacccaaggtgcatgcctcaaagacggcaaggagaacagtgagccggtgctgagtgaatgaacgggagagtactagaaaaagatggggagcatggggtgtagaccgtgccatatagagccttgttagtaagaattctaatgagaagtcattggattttaagcagaagagtggcacaatcagannnnnnnnnnnnnnnnaagagatggggtcttgctatatcggctaggttggtcttgaactcctggcctcaagcattcctcccacctcagcctcccaaactgctaggattacgggtgtgagccaccgcaccccgtcagcacaatcagactgacattcgaagagcattattggttggctgtattgagaacagattgcaagggggcaagggccaagagaccaattagggtggtgttattc

SEQ ID NO: 409653 - DNA, 125 bp, Homo Sapiens
ccagtgcagatatctaaaaagataaggactttaaaaacaacaatcttactaccattattacacctgaaataatagcagtaatccttttatatcatcaaatattcagtcactgttaaaatgtcaga

SEQ ID NO: 409654 - DNA, 169 bp, Homo Sapiens
gaacatcaacggattgagctcctattatatccagggtctgggctgcacttaggcgttacagaagtgagcaagaaacccagtatctgttctcagcatttctgtaaacagcccaggcattttcaactttagtttcctattagaatcacccaggcactgaagtgtactaatg

SEQ ID NO: 409655 - DNA, 161 bp, Homo Sapiens
aatcgttgaagtctgtgagttcgtgttgaggtggctgaaaaatgcgagcttgaggattacagtaacataattagatcgcttcctgtaagaacccagcgacttttccctgggtccgtcttccgattggctgccctccgaggccttcctcctcccgagtgaat

SEQ ID NO: 409656 - DNA, 550 bp, Homo Sapiens
  misc_feature (420)..(434): n is a, c, g, or t
atttagaccactttctatgctatactctgtagcaaatcactgtacaattccttgttttgtctatttcacatgtctcaaaatagtaaatacaaatcaatatttcttgagttcaaaaaaaattagtgaattctattgagccagttcaccagttaaggtatgtagcagacatctttccaaataataaatacagcctatctgaagtcatgctatagtatgccaattcaaatttcatggaatatgaaatttccagcataaatctcatctgatccagccccataagtggttccttaatcctttgccacaacctcaacatgtaattgtgaagcctatcattgaacactgccatgggtctgaattctaaaacagctggctgcattttggactatttgggatgtcttctttatattgatttcttgctcnnnnnnnnnnnnnnnatagccacaccgtcttcatcgcctgaattgatctcaaatatttaaagatggctttcatatcttccatgagttattttctcctgaaagcaaaaaatcccacttgaaatacaaaatag

SEQ ID NO: 409657 - DNA, 259 bp, Homo Sapiens
ctagggaatttagaaagccacgtgcaagcctacaacagaacacatgctcataaaagccctatactttaacattgggtcttctcactaaggccctaaacttcaacctagggctgagctctgagctcagtgcaagcttagctaaatgttgaaggagggcactggcacagatccaatctgcgaagactataagaggtattgttctctctctgctttttgaatgtttgttttattcgttgtttttgtgtttagctgtcaaaaa

SEQ ID NO: 409658 - DNA, 356 bp, Homo Sapiens
  misc_feature (161)..(176): n is a, c, g, or t
  misc_feature (212)..(231): n is a, c, g, or t
  misc_feature (297)..(297): n is a, c, g, or t
  misc_feature (331)..(331): n is a, c, g, or t
tttttataacctgtctttaatttggtccttttgctaaagattgcagtcactgcttatttattataccattgggcatagggtagtaatgcattttcattttgctttactggcagtcctttgattgtatctaaaagaaggctgtattctagaagttgttgtgnnnnnnnnnnnnnnnnctgacatgagatgttctttaacagtttgggtttggnnnnnnnnnnnnnnnnnnnnactgtgataattctaattctccctatttattgtttaaaaacaataataggatacataagtagttgngcttatgaatttgtttttcattccatcttaaaancaaaaattaattccacaaatataga

SEQ ID NO: 409659 - DNA, 398 bp, Homo Sapiens
ctgtagtttgtcttttcaccccagtactatggaataattagcttttacttaagattaacaccattaagtcttcagtagaaggaagatagtaaagaaaaccgtctcatgtttctcttcttcctgttctgtatgattacgtactgcttttatccccaaatcccttccagaataattttggtaccattttatggattaaattatcttcctataaattatgtcctgggtaaattttactcctgcctattttggcctgaaaccagtatcctagaacctagaaaaaatgttttgaaagtttccttgatgtagttggattgacctgtaaattgagcatagtagtttgttacaaataatgctttataaataatagctaatagtttgtaacaactgtagaatagaaa

SEQ ID NO: 409660 - DNA, 281 bp, Homo Sapiens
gggaaatggaaagtaacttatgaatacataaaggtttggccctatatagatttctagaaataattaattccagcctaaggctcttgcattagtttcttaaatgaatcagatccttttcatccacagcaaacataggtagcatggaaatagaagggttgcagtgtatacacattgcacttccgtctaaatgtacacatcgacatagcctgccatatcccaccatcactcagaggactggagagaaggtaaaatccaaatagtctccaggattaagaagccac

SEQ ID NO: 409661 - DNA, 487 bp, Homo Sapiens
aaatctgtacctaagactggtgcgtgagagactcacgttcctccatttcgaatctggttaacttgctatgattgagaagctcgctcacaaatcctcaccctctcattcctatcctttctggattgagtgaaagattttcaggttgtgaaggctgaagaaaatggctgctgacttcacaacctgtttcagccaaattgcaaagccccaaagggtcagtaaaattcttgctgggcttcatcagacattacatttcataggggcacgggaggagtgtgctcttctgtctaatgaaatgtgggccttcagcctcacttccactgtgattcttgaaaaacatttatttcctcactaacggttcagtgttcagcaacctgggaggtttgccctagtactattctacaaggtcacaggtatactttgcaaggttctgcctctctttctctcggagagcttattctctcttgtggcctaaacctcacctctgtct

SEQ ID NO: 409662 - DNA, 563 bp, Homo Sapiens
atgcattgtgtgcactgacctgttcctgggcatgagcctgaattcgctcttgcccctttgttgggaagcagaaacgtgtggggtttcgcagttactttctttagtcccctttaatctctagctaatgctgagcttctgcagagccagaagggtcttagggcctactctggaagagcctcactcccattctccttattccctggagctcttctggatttctagcctgtgtctgtcttgttataatcacagttttcatgttgtgattcagtctttatccttgctccttagagctatctactgagccccttctgtgtgtattacgcatgtggtagacatgaagacagagtaatgccgtatcttaagaaatgtcacagtcttaggtggggacagagtttaattatgcagtgctcagtgaaaggtggatctgagtacctgatggcagcatggagtcacaaaggaagcattctaggctagtcttagaggctggtgctctgagaatacgtcatgcggtgggaagagggttatgcccatatgagatgtgaaaagtgggtgggagagggcgt

SEQ ID NO: 409663 - DNA, 273 bp, Homo Sapiens
aacaaggagcagagagtctaagaaattgggtataattctggggcctgggacttgctatgcactgcagggatgacacacgaaggtgggaacatggccatagtggctgcatccagcccatcttagaggcaaatgggaaaaatggcaaatgaaaatcaggctgggtacagaggaagagtactaataccaccacaggcctcaccttaaggtccctgggccactggggatcctcagagatgctatttgccttattttgaaaagctttatgaaaataaa

SEQ ID NO: 409664 - DNA, 260 bp, Homo Sapiens
cagccccagaatacaaatttttaacatttagtataattagacagtcatggcattttaaggtcagagcttcttactcaaatgcagctcttttctgtaaggacaataaaatgttaatttttactcagttaacattctaaattagtgttttaaggtcatctcttttacttagaagacagttgttggccaggaaacgtttactgaaccagctttaaaaccgtgctaattcataattaaatgttgtgaccaatataggtatctgc

SEQ ID NO: 409665 - DNA, 322 bp, Homo Sapiens
  misc_feature (291)..(291): n is a, c, g, or t
gtctttcttgtcttagggcctgaagggtaccaagcatggacttgtcctgcgacatatacacaggcatggaccacagtgggcctggagggttggggtcacagctggtgtgccaggaatggcccatgggacacagggtaatttattttcctgtttgtttgcataggtgagtgttatcacatgaatgttacctgccatccttagttgtgggtatattttggaactggggttggaggctgcttcagtactgaggagtcaatcgggatgcttcacttctccaaagagatggctgtnctaatcaagatattacttaagtggcctggaa

SEQ ID NO: 409666 - DNA, 543 bp, Homo Sapiens
ccattttaaagaatcaattgagaagcttaagtaagcattgtatttacttttttttacaaacagtttcaatatacaatgcataaaccatacaagatgctttctgataagtagaattactttgtgaaggcctcaacattttttaaaaatttttctacagagattcttttgttggattttagaaagttatgcatgtgcctctttgtaatatgtgcctctttgtaataattcttcattacactgattgattaattctacataacatggttgacagcatcagtttaacactttaactgcttaaaaaataacacatagaacattttcattatttattagtaacattcaactttgaaaactctatattcttttctccccctcaagtatagtcaaacgtttcaccatcttgtgatgtgtgaactttataaatctttatgtaatattgaatatttggctattaaagctctaaaaacttcttcacttaatttctaatattataattgaccctgcaaggacagccaatagtttgtattaattttagaattacat

SEQ ID NO: 409667 - DNA, 337 bp, Homo Sapiens
ggtgaacactggtttggtctggaaaggccaaacaacttgaagcaaaggtgggacaacaaagtggggagggggcttccagatcataggtagacaagcaacaaatggttgcattcctttgagtttctgattagcctttccaaaggagccaatcagatacgcatttatctcagtgagcagaagaatgactttgaatagaaagggaggcagatttgcccaagcagttcccagcttgacttttccctataacttagtgattttggggccccaagatttattttcctttcacattgtataaagaaaaagtaaaccatggagaccctacagcggacccaggttc

SEQ ID NO: 409668 - DNA, 282 bp, Homo Sapiens
gaagaatcaactggctacttcccactggttttcagatcagttagttgctactaggttaccatggataaaggatttgtttataagcccagaagtttaattttatcctcttgattctcagttattgatactagtaaacaaacttacaagaaactaatttgtatgagagaatacaaccccgaaatttacataggaaaatgtacctagaaactggggcttgtggtctatacaggtgtggcagagacggtaatcacttaccttgtccttctcaacatttcctaccta

SEQ ID NO: 409669 - DNA, 590 bp, Homo Sapiens
gacaaacaacagaccttctcaaatcaaatatcactgtgtctgtggtttggctaaaggataccaaaagttgttccccagtgagacatgcaaggagggtagcaaggcctacccttttacgcagaaagatcagcgttaacgagaatcagttgtaaatgtgaataaattaggaaaacagccaggatattgtggtagatagttgccaagatggccttccagaagatgctgtttctaatattgagtagttgactgtaattcctctccccttcaacctgggctgtcctgagtgcttccttgaccaataaaatgttagagaagtctgaacttccaagactaggtcgtatgaaatcttgcagcttcctttagtatcttgcaatggtccctatgggctgtttcttgtcaaaagctagtctcaatgctctgagaagcccaagccacctggagatgttacgtgtaggttctccagttaacagacttaatgggctttcaggcaacagcagcatcaactgccagtcctacaagtaagccatcttagatgtgtccatccagcccagttgaacctttagatgaccaaagatgtaatcaagaaactg

SEQ ID NO: 409670 - DNA, 489 bp, Homo Sapiens
gattttgaatctgacaggttctcagctgcttttattaaataacggattttcttaataattactgtactcaaacttagcaaaaagctctatttatagcccagttttttagtcacacactattgtgtcttgtcaaattgaaaccatatactacattctttacttattaagatggtctttctttgtaataattttggagtaaatagtttacttatctaaacctctgatttctgatttaacagatttttgaagcatttattttccttaccatacataaaaattgtcagttgaggacaaggaaggattaacctggactacggtgaataattgttcaggttgcttactgtgtaactccagaggagcattcacatggtacaatttgcagatttaagtatttattacaaccattttctggcagataacagtggaacaccctgttctgttaaaattagtttattatgacaaattgcctacagatggacattaaactgt

SEQ ID NO: 409671 - DNA, 458 bp, Homo Sapiens
aaaaaatgtgaccatttaaaaattggctagaatagcttaataatataatatcatatttattctatgatttccagtggaatgaactgttatggtctccctgattgattataattttaataaacttggttgtgtgtggctaggaacaagttcattccaagttcattttttccctgatgtagataaaattccatcagctaagttctgctactgtgccccatctccagacttctagctaaatgaagtactacagggctctgattcttgctcaaactcactactgctaaactgaaatgcttgaggtattcaaaactgttattttctgcgtcaatttgatatatgtgcagcatttcttttttaaaaggacatgttctgaatgtttagagtgtgtagataaccactcccaccccccaacacactcacgtaacagatgaactttggatacttttattgtgtaactt

SEQ ID NO: 409672 - DNA, 706 bp, Homo Sapiens
atgcttcacggcatgacagcagactgacgaggggcaaagggcatttccagaaggaggagcggtcagttctatcaaagggtgctgaggaggaaataaatatgcagaactgaaggaggtatcagaggaactcagcgttactgttggcccctttttcttgcaaaaatagagcagatgtaagagatgccaggaggagtgagtgatgtgcttcgtgtgggcagagctggggggaaatccctggaagaatgttaacaacactgtgagactagtaagtgaaggaccattccatatatagggaagttttattgtagtggcaggtataagcaaagtaggttgtcaaaggcatttgggtaaaatgccccaatgtttacaggctgtgtttctgctaataattttaacaaaaataacagtaaataaaattaagcacttcctttgtgccaggcagtgctctgttattttgaattttcacaacattcttgtatagtgttttccccgtttaaataaaaggattaataggaataaaggagatcttagactagttttagttaaggaatttgcaggtttcacagctttcagtgatggaattgtatgtctgattctattctgactccaaagctcattgccttacaacaagaaccattgtagcaccagtcatgtactgccagcttgctttagatgaatgactatccctaatggaacatagcatttt

SEQ ID NO: 409673 - DNA, 293 bp, Homo Sapiens
gccttatttttcagaaaagctctagactcagagtcaggaagcccaggtttaggtccttggccttgcacaagtgagttcttccagttataaaactttgattttctgggtctaaatcacttaaacttttctatctcagttttcttttctgtttaagggaacatccttccttcttccttccaagcctctatttgacaaggatgataaaatatctttcttttttaagcataaggaattctacaaaccaaaagaattattacattggttgatgtgaataacacatctcaacaccatga

SEQ ID NO: 409674 - DNA, 567 bp, Homo Sapiens
  misc_feature (202)..(260): n is a, c, g, or t
gtgctgactggcaggcattgctgggatgggtttccactagaatagctttgtgatgtgggatgggtgttctttgtggtttggtttttcttggatgttgtttctagcttggtttatccaagtctggttctctggccctctgagagatctgtgaactaaatagtatcttttaatccctttttgcttcaaccagcccagtcacagnnnnnnnnnnnnnnnnnnnnnnnnnnnnnnnnnnnnnnnnnnnnnnnnnnnnnnnnnnncacaggggaaaatgtgctattatctgtattaaaatataaagctttttctttgttctgtcgtcgctctctccacttgtcatagtgtttttaaatttgctttttaatgtcattctatgagaagaaaaattaaattttttaattcttaggatgaattttaccattcatctttatattgtgtaatgccgttttaaaatgcaaatataagagcatttcaattgtatgtggaatcaccaaaattatacaattcatagccttgtaaatgcatatggaattttgtgctatcagagaagtgtaaactctgcacaaa

SEQ ID NO: 409675 - DNA, 1071 bp, Homo Sapiens
ccggttccaaaattgtgatgctatactagggacctaccattaaatgtattttcaggatgaattctcaatgtgcagagcagagctgattgtatcaataagccaaaataatgtacaccttactgcttcaaagtagtacaggtttttccccttctccaggaaattgtgttttggaattctgtttattataggtaaggaatataatctatatcttagtaatagtaagaggaagtggttcttttttttggaggtgctcaggagatcagcatctagcacaaggtgaggacctgcccttgctctaggatgttttggcactaggcactagagctaggatgctgttgtttgacgtgcaccctctgcttgcagtcccagcccagttctgacttcttcagcatactaagagttagtaatacattcttagaactagagggcatttttagagatcatccagtctttccgtaatttaaagaatatgtatgataatatctaacctgagtcttgtaccatggagggtttgtatactttcattttcccagttaattcttagagtaaccttctaagaaataagaattgttgtaacattttacagatggggagttaaaacttagagagactgaggttacatgacctagtgcccgatcgattcaaacccgcaaacttgcgttcttgatcataacgctgcaattcctccctgtgcagagagaatatagtgacatgctgaaggcctatacaactacttggtattagttttgggactggaattcatcatttctgacttcgctaattatgatgtgcatagacgaccatgactcttgtttgattggtaggttgaggactagccacaaagaaagatggggagaagaagaaacaattcatgttggtagagaggagaaaaggatttaggttgatggaattacatagcctcagaaagagataggcatcttttgtgacgagactgtgaaagaagagaaagatgtattgattgatctcttcattcaacacggttttgggagtacctgctgagaacccttctgagcactggggatacagtggcaaatgaaacaaaggctggtg

SEQ ID NO: 409676 - DNA, 478 bp, Homo Sapiens
aaggcccttttatttaccagtatcaatgacttgagcctgattttcccagtccattgctggaagtgcagtagggactgaaacctctagtcctcaattccttgactgcaattgtgtgagcggagcagtgaagttatgttttgagaatcagaggtcctaactctctgctggctcaagcaagggcttcactgacccacaggtcaagctttctcaggctaggagccctcaggaccgaaaaatggactccacttcaatgcctcgaagttccctggccacctgcttccattcctttctgatcccgaatgagtacatgtctacaatggccatgtcttgagagcaggagggtcagtgaagccagaccaccagctgttgcttcacagatatggcctgggagagcccaaacgtcagagtaagacagccatagactactttacctcctagaaatgggagcctgaggcccagagtggcaatgtaacctttt

SEQ ID NO: 409677 - DNA, 611 bp, Homo Sapiens
agcgtcttctgctgacctcgtgcagcaccgcaggaagctgggatgctttcgagcttactttttctttatttgagcttctggtcatgtttcaaagccatcaaaatctaagcaagggagttacagggagggttagagaattaccaaaggacacaaaatgtcttgggttgtggaatagcacacatcagagaaatctcaaacatctcttaggaaaatctctaaatgtgtatatccccaagtatcttagccttccacctaccacataaagtgagggtatgtgtccctcaaatgagaaaaatgaaaacacactttcttaccacttcaaatctgggaggtggttggctcatttgttttgaagatactcgacactttgccctagcaaaatattgacttctttgatttttccttcagaaaaataagccctgttattcctatagacctaaataagggaggcagccagtttcaagaggctggctctaacaaaatataccaaggctgtcatctgtctcacttaatgaatgggaaactcctgattgagaagaatttgtcttcattaaaactagctaaaatgtacattgcaaatctgaagaaaacaatcatgactctgctaattt

SEQ ID NO: 409678 - DNA, 324 bp, Homo Sapiens
cggacgcgtgggtggacatgcctctcccttgcttaaatacccttgagcctcctagacccttttttgggttgttggtgactcttcagcatggtgtgccatttcggtccccaggggattaccccaactatttagaattcttctttgggtccccaggcccttcctttcccttgcttgcaccttctctactgggactctgcctaggcctaattaatctctggagctaaagagaggcaggcacagaacatcttagcaaacgtggttgcacattttctgagctaagtaagctaggctgattgcaattggagccagcaggagaagggcaag

SEQ ID NO: 409679 - DNA, 565 bp, Homo Sapiens
  misc_feature (119)..(119): n is a, c, g, or t
  misc_feature (263)..(263): n is a, c, g, or t
  misc_feature (437)..(437): n is a, c, g, or t
tccttaaaataacaaaacccttacaacttgacatttttaacttgtctattatgctttatagtgccttagattttactaaaagtcacctatcgaataattaattaatttattcatccagnaaaccttcatgctactagatggagggatggcttttaaatcccaggaggaataagttcagactctgtgctcaaggtctcgtagtctagagggaaggccactatacgaaaaaataattataatgtactataatgtaagtactgagnttagctatatatgaagtgctttcagagtttgaaaggaaaaggaagtacctctacctggggagtaatatttttctatagttcagtagggacaaaacttatagcaaattgctacttttattgctgtatattatatggtcatttattgtcatatatgtttgatgctgctctctgtgnaactattgtgaaaaagatgcattcttcaatcccaggggaaatattcagagactagtgtttggtttgctgataaacaagccattgctggagcatattcctatttgcaactctacctcttagcttcatgg

SEQ ID NO: 409680 - DNA, 626 bp, Homo Sapiens
atagaggatatatatttaggatttctaatacaaaggggaacaactagtagaagccttaaattaaatagggaaacaaagatgtactgctgttccttctttgctcaatagattgtcagtatgcttatttaactgatagttttctttgtaccttctcaggtttattatgctgtcaagggactagcctttgaagaataccgtagggcgtaaggcaaacaaacagaaaaccctgaagatgacagtaagattcccttcgttacatcttaaaaggaaggccagcaatgcccatccaaacttggaatcccatattatgcttttgagttcataagttaacaggctttgagcagtcaatggagcatccgagtaagtagatgtgaaggctgggagaatcactgcttagagagaaagaacccaagaaacatgtctaagtttgtggaggaaagtatactctgcttctatgaaatcaaagctgtgggttcaatgtgctagtttaacataaataaaaaaattatattctaaaacaaacaattgtgccttaagcacacctggtagtctcataaatgctgactgatggtataaaaggtataacggatcaagatggttagctagataccaactcatccttactg

SEQ ID NO: 409681 - DNA, 143 bp, Homo Sapiens
tgtaatgttattagtaagggaaggatagatgtggataaatttaaatagcccctggagttagaaaggagacagagtatttatatgtaggattgggagcaaactgaagtaatattttgtatagatccaaaatgtatatcatatta

SEQ ID NO: 409682 - DNA, 484 bp, Homo Sapiens
aagcttaaatgtattcttattaagggtatttgatgatgcattttatttgcaaaaataaccagtgggtaattttttctctgaaaatttagctttaataagtcgtaaaatttcctaaagattttggagacgatatttcgattataccagctcttgcttttattttgggagcctggagaaatgagagtgattgcacctgtcaaattttgtatctcatcacttttggatcatcacactgtgactaaaatgacttcagcattttgttggccaccacagtgaagaactattccctgaaagttaatcagttgcctgagagacttttctgctactgaggggaaagaaaggaaagctttatttacctctaatgagctccgttccaagtcagttaatcactgttcccttacacccaagagtttcatcagtatcagagtcaacttgtcaaaacactggttctcagacgttttttttagagggacttcttttcccc

SEQ ID NO: 409683 - DNA, 599 bp, Homo Sapiens
atgctgtgtccatttgagaaaaagccccagggatattgaaggtctgagaagttgggtggttcagtgtgttattatatttagggtcccagtaaagaagaactgaagcaactgtgagacaccagggcatacttccctgtatgagtggaaaacaaggcacggaaaatagctcacaggatagtcctcaactgacttgcttgaggataagcagcttcccttcgtgaagaagttgccatttctctggccttcatatttatctactttttgttattgttgtctgtatcggttcaatctcacactgctataaagaaatgcctgagactgggtaacttataaagaaaaaaggtttaattggctcatggttccatgggctgtacaggaagtatgactggggaggtctcagggagcttttactcatggcaaaaggcaaagccagagcaggtatcttcacagggctagagcaagaggaaaagagagaggggaggtgctacacactttttatgcaaccaaatctcatgagaactctatcacgagacagcagtagggggacagtgctaaatcattcatgagaaactacctgcgtggtccagtcaccttgcacc

SEQ ID NO: 409684 - DNA, 150 bp, Homo Sapiens
ttctatcataatctacacagagttttgaacaggcattttaaaatcaacaatatattatttacaattttgttagtatacataactctaactcactgttaaaaatcacctgtctttatatccattaaatgacacttgcatatgctccaaaaa

SEQ ID NO: 409685 - DNA, 391 bp, Homo Sapiens
tacatatgacacaagtaagtgttctgacataaagttttatttagttcagtggcatgtgctgttgggagccatacaccataaaatatatatatcccaaaataaatctagaatattttcacctccaatttcagtaattggcatatgatttgtgagacgcatctgtttttgtatgaggtttaatcactagcaatctgtttaaagaatccagtcctatacacagttggactcattcttgaaacctttaaatgctccctcatagtttttcagttatttggaagttgcattgggtcaaactgaactccttgagtttggtgtaaattccttttttctgcttattatagtgaaacttcagcatgtttcttagtaaactcccataccattgaaatgctta

SEQ ID NO: 409686 - DNA, 110 bp, Homo Sapiens
actctaaggctgaaagcttgattgtaggaaaacatgtcacagaaaggaaagaagcaaattaagtaaacatctatgaagagactgaaaatggaatgtttttggaagtaaat

SEQ ID NO: 409687 - DNA, 146 bp, Homo Sapiens
attggaggaatactgtattttatgtggaagttactaaaaattaacagaaaatttaaattcaatttcaccactatattctatatacagatctcttaaattaagatctatagatttattctactgaaaataaactacttaaggaaaaa

SEQ ID NO: 409688 - DNA, 301 bp, Homo Sapiens
tcacttcttttttaatattcaggttctgtaacctacatatacattaatacatttgatggttgggggattaaagaagatagtctcttcctccttagggtcaaaaagtggcatgtaacttaaattgataatggtgagactgcactaaagtcagtagcttcccaattacaattcacagagccaagaataaacagaattttaagaaaaattttctacatacttttcttaccttgagttaaatgccctgcatatttaatcacgaaagtcctaaaagaatgtatgcatcctacaaattgctttccta

SEQ ID NO: 409689 - DNA, 173 bp, Homo Sapiens
gtgttggcaatggtaagttttggtcttttctgccagggtgggcaaagtttcaagagaatcattttcaaatccattggagttcctatcagcttctgtgaggtttattctgcatatttgtgtgtatccacacaaaacaatataaaatgtatcacagttcatttatttggaatcat

SEQ ID NO: 409690 - DNA, 110 bp, Homo Sapiens
gtgcgaggttttccacagaaggcaaatgtgttcctacacccccggtttgtgttcttgcctcagtgttttgtaaaaatgtgtgagagggcagctctcatgttgctgcaagg

SEQ ID NO: 409691 - DNA, 338 bp, Homo Sapiens
  misc_feature (135)..(160): n is a, c, g, or t
cagagggtcattctgctgcttgttatgaatcatagattacattcatgtcagattgatcaatatgtatgttttatgatttaacagcaaaaacctcttcaaacggaaaatttgaaagaaaggtttcaatagaaaaannnnnnnnnnnnnnnnnnnnnnnnnngtgtgtgtgttactctcacagttcaactactgttgaactcaatcttttaatttatagttatacgtaggctatttatgtgtccaattgtatacctagaatacttacttaaaacttagtttacaactctttttaagatgagaactaaggcaattttgatatgattcatggtctattcttt

SEQ ID NO: 409692 - DNA, 256 bp, Homo Sapiens
aaatctcttggaaacaaagttctttgctccatagtttatggctggtttgattattagttgagctttgtgctattttaattaatatactatttttaatatggacattccaaagtgccttataatattttcttaatggaaatattactgagttgtgtaaaagagatgaaagggaagtcaatatcactgattatcaaggtttgctattaatgcaaatgaattctggattcaacccatttttctacctatggtatggtca

SEQ ID NO: 409693 - DNA, 129 bp, Homo Sapiens
cacaccttgctgcacataagagaattctactggagagaaaccctaccaatgtgaagaatgtggcaaagcttataaatgctcttctgcccttactagacataggagaaatcatactggagagaaacccta

SEQ ID NO: 409694 - DNA, 277 bp, Homo Sapiens
atattagctacttttgacacattaaaatattacgttcagattgaatttaaagtttaaagaaactaatagaattacgtaatagttattgaattgtttaagtaaacccaagatcttaaaaattataacatgatcattttactcctaatagaaatgttaaatagaatatagtacaaaagtgcattaccttcagttgtgtactatttccataatacttttacacaaatatatctataacttaatattaaatccatctaggatacaacattggatggatatt

SEQ ID NO: 409695 - DNA, 420 bp, Homo Sapiens
aatatttaatataattgctgtatttgtgagaaagatctgttttcttttagctggccacttcagtttgctgcgtatctttagctgctgttgtgcttaaatactgagtcatagggtgcttttttaagaggcccttcagaatatacttgtaaaggtgtattggcattttttggtttataagataaaaacagggcatgaagagccttcatagtattaggccaaataaaatctattaataactgccagctagctctacacttatctaaagctgttaatgttcctttttttctatcaccaaatttataaaggactaaacagtactattgagtttactcggtttataaatccagttttaactataattcaacaatattttggtgtggtgaaacgttgtttatgaaatgtataaaatgtataagtttt

SEQ ID NO: 409696 - DNA, 312 bp, Homo Sapiens
caagaaattggacaacaaagtattggagagaatgtggggggtcaataatctcacattatcgggggaatataaattgttaccaacactggaaaaaccattcagcattgtgtataatagttgaccttttataaagctcaaaagcaacccaaatgagataatatataggcatgaatacctagctagtagaactgtaataaaatataaacacaaaattcaaattagtaaattacctttgatctgggaaggtaagggaatgggattcagatagatatcaattactatcactgttctagtttttgaagtgaggtgaag

SEQ ID NO: 409697 - DNA, 612 bp, Homo Sapiens
  misc_feature (220)..(264): n is a, c, g, or t
tttttatccatctcaatatgaccatttctctctgttgtgagctgaacagattaagtatatatctgccaggttgggaaatattttggtctaccttttcctgtcatcagaacttaatttaaaaaaattatcaaaggtcagatgtgactactacagtaagttggctatcataaagaatattccataaaatgttttatctgccatacaaaattactgggtttannnnnnnnnnnnnnnnnnnnnnnnnnnnnnnnnnnnnnnnnnnnnttacaggttatatacaggttataacaatggataccaggacatcagaatatctgataaagcaaatatttatatgctaatttaaaatatcaaattgctactggacataaaatacatctggaagcttggggtaagaagaaagaaaagaagtgttccgttctgttttcaactaagggtaaacgaagtcccagagtgttttccctgtaggtcaaattaaggtaacatgtctttatttgatcatctattgtacaccagatacctggctaagggctttccttttttctcatgtagtcttccaaatgttctttgataattgtcactatattatagatgacaaagtgaagacttacg

SEQ ID NO: 409698 - DNA, 505 bp, Homo Sapiens
gatgaactggacaacccttgctcttcaggagtttgtgaattatctagaagatgctttatcttagatggagagcttctgaggagtttaataagggatagttgggggtaatgataagatatatattctagaacactaggacagtgtgtctcaaatcatctgtggtgaaggacatttttctattttatttctaaaccatcagagactgataaagataataaaattataaagacaaaatacaagtccatgtttcttcatattagattcaacagcatacaattgctgtaaaattgttacgtaagtttttcagtgtgtactctcagtttccattctcatcatagaccaggggtaagtgtaaacagcactggtttgcagactatcctttaagtagcactgttcaaagagatcacgtcttagctgcagatggagaattgattggaagcggattgaatgtgggcagagatcagtagcgaggctatttctctgatccaggcatgtgacagtgggt

SEQ ID NO: 409699 - DNA, 584 bp, Homo Sapiens
tttagctctcaccaaaacttatttgatttattgtagcaaaaggaaagcctgtgagaatgcaagggagcccctggctgctttgctggagtccctgggaggtgccccacacctctgccaccaaagtctgtgtgctcctgagcagctcgcggctttcacagtagggaaaccgcagtcctcgtcactgcgcctttgtcctcccattcgtttaccctcccgttcacatccacacaggcttgtaccccacagaacttgacaggaggtcacatgtgtgaatggcctgtgtctgctttacagggttgagcaggctgagggtgtgtgcctctggggatgctgggctgacagcaaatcccaacagtatttcggctctggactgatttggcctttagtgcttccccaggcctctttcatcggcatgggaaaagcccttaggggtgggcggtgagggcacatttataactaacaaagaagaatgcagttgccccagcatcctactggtcaccttaagtggcagcagagccctccccagcggtgccccagtccctcagaagtgctcagtccggcccgagtgcccatctggtggctct

SEQ ID NO: 409700 - DNA, 129 bp, Homo Sapiens
gtttataacattttccccattaagcatccttctactcatttttcctcaatggattagtatctttaaatttcattacatttccctagtcttcatggaattgccagccagagaagtcagctcggggtcccc

SEQ ID NO: 409701 - DNA, 492 bp, Homo Sapiens
  misc_feature (346)..(346): n is a, c, g, or t
cagttgcttctacaaaacccgtgaaagttctctgtccaaaagccttgttggtcccgcggtacatgcttcctgttcccagagagattcacccttgggctttcctatcagtcttccctaaagttggctgctcctgtgtcctgtcacataaaactgtgaaccgaggtctccgacttacgtcatgtcagtcacagcagggtgaggctccacaagtgtgagttctggcccctgctgctttcctttcaaatgcagtttacagtttattatggtattggacaccccatgctccttactgcattggctttgggtaagaaggagtgaaaattagtgtgcgaacctgaaaacctanaatttctgattgggactgaagaaaacctttgtgctgcagtcagtccccgagccaaacacctgtgactctcttcacatggaaatagatgactatccacactaaaaacaaaattaaaaagtgacttgtgaaaaatatcctccatgctc

SEQ ID NO: 409702 - DNA, 593 bp, Homo Sapiens
cagtgaatggatgggtagttagctggaagccatgatgctaaacaggtatgatgcaactgccatttctgtgaaccaaaaaagaatatacatgtacacatcacctgtgcacggtgtctgcagaaggcagagggaaggcaggtagaagcattaattaagagctgcagattcatcagataaaaatgtgtgaccccaggttaggtgctgggatgcagcaatgctgagttcctgggatcctgggatgctggagggcatgtgcacaccaccctcggccgtcatcctggagacgcgggagctcggctgccaggttgctgatacgctccatgttcaggagctgtcccaccgggaaaggtgtccgtgggggtgaggagccctcttctgatcctcctgctttcctggggggtgaagctgctttcccagaaaacaccaggcccccctcccagctgccggaccccacagtgtggtctttgtccccaggggcagtgctttctgccccttttgttctctgctgatccccagagcctggccctgcacaggtcgtcggtgatgtctgtggattagagacctgctcccctgtgcctccacagggggagggc

SEQ ID NO: 409703 - DNA, 364 bp, Homo Sapiens
cctggtgaaggccatgcctgccatgttcaccacaatattcccttccccatgaccactactggtccaactgatgctcaaaaaagatctgttggtacgcaatgccaacgtgcattcatgtgatcctgcacgcggaattctccacgacttttgagcacccttgggtttgccaccacctacaaatcatggaagacacagggtaatagcaaatacaaggtggctgaggccgatgtccaccctataacggcgtcccttctcttctctcctccttgggcagggataccatttgggtgcactctggctggagcggagaggtggtgcacggcattgccagagcggacctgtgcatgggcaatggacaacgacc

SEQ ID NO: 409704 - DNA, 485 bp, Homo Sapiens
tcaaccagcaaccaggcacaggcagaagagacattagagctttgtaacaagggacacacagagttggcagcacaaagggcctgggcctctgaaggttggatgaccaggctcatcatccatccagggatgaccgagcctgtgccctagactattggcctcccacagcagccagtccatctgcccagcagtccctgggcacccaggaatgcagcctacacggcacgagcgggcaggctgggggtatgtgtggcaggaacagaattggggttcttggggaggtttttttccacttaaaactctttttgtcgcctacgtctccagacatttaaagatttctgagctattttcagacctactatgaaaagaactgaggtgccagcagtcagacacccatcgaactgtttcctaagaggagaactggcatgactcacttttgatctgtcagctttgtattgatttttctggcaaactttgtaagtctgccc

SEQ ID NO: 409705 - DNA, 564 bp, Homo Sapiens
tgtgtccatgaatacccaatgttgagcttccaccgtcgcatcagaccatgcggtgtttgcttttctctgtctgcgttaattcgctgaggatgatggcccgcagctgcatccgttgctgcagaggatgtgattttgcgcttttctatgcttgggcccactgtctttaacatcaagtttgtgtttcttatcacagctctgggtgctttacccagcagcctcccccatgcccactccgcagcctggacgctgctgccggggcctccagcccagcagcacagcactcgcctgtggaccttttcaaatatggctggtgtggagctgtgcccagggccccagccagcgggtcctgctgcccctgttgggaggacgccgcctgtcctctctgctttcacaacaacctcttccttcgggtctggctgtggcgtcacctcctccagggagctgcccctgcgcctgggctgtgccccatcctctgacttggcactgcctggcccttgctgtggtgctagtctaggcctcctcctctccacggtttcacctgttacggggctcctgaggacggga

SEQ ID NO: 409706 - DNA, 400 bp, Homo Sapiens
  misc_feature (347)..(347): n is a, c, g, or t
tggtaactgggtggcagatatactgacttttcattactagcccatgacagacatgctaattcctgacttttcattactagcccatgacagacatgctaatcgatagggcagacattactgatctatctagatgctctttcccctctgagcctgtgttgggattcaagttcttctctacatgatcaaagcaatccttcagagttggccttacttacctattcacctaggcgttacttatcctattcacctagtgggtaggatagactagactgtagaggattttctctagctttagaagtccggcattatcaggaagcagtgggaaaattttgagaagggagtactangaggaggagttgagtggtggtacctggaatggtaaagagagggaggaaagtgg

SEQ ID NO: 409707 - DNA, 624 bp, Homo Sapiens
  misc_feature (243)..(303): n is a, c, g, or t
atattgaatgagtattttattctagtggaggaaaatctctcatcatgccttcctactcgtggtttgttttattattatgacaaatggcacatgggtgatcacaatccacttgcaagaaacactgatattctcttgtaactaagtcaaagcttatgccataatgccaacactgttgtcctccttgagtttatcctctctagctttctttgtaaaggcctaaatcagccttgagtacagatattnnnnnnnnnnnnnnnnnnnnnnnnnnnnnnnnnnnnnnnnnnnnnnnnnnnnnnnnnnnnnctcaagcctatataaaataaacaagacaggagccaggaggtactcaagctttaggtgtggtgggtgttgaggctgtcccacaagtatcccgctgagggtattttcttaccaccagagggcgccagtcaggtgagcagctacttcagatgtagccaagttggccatacaccatgctaatactagttagaagacattttaaacaaagacagtgggaagaagtcctgttccttgcttttttatttcacctttaatgcctcttactaaatacaaaagtatgttgaatgtagaagacagatttgtatgtagttctgcagtcttctt

SEQ ID NO: 409708 - DNA, 516 bp, Homo Sapiens
  misc_feature (417)..(417): n is a, c, g, or t
aggtgtaattacatgccataagcatcaaacagaaaagaatgtcaagcatgaaggtggaatccattttgaagcagcactgcgggtcctggggagaaggccatacggggcaggagaaaggcctaccattgtataattgccattgccacactcacctgccagtccagacacccccagatcccaacactcacagtggagggggccaacgagcctcaggcataattaaaatgcactaatagtaaacaaatgctaattaaagtgtcatagagtgtcccgttaaactctgagtcagccctgacagaaggcgcccgacgcggtggacactctccaggagaaagctccctttccttcttgagtttctgaagacatctccctccccacccgacccagccctagaacaagtgctgggctgtcacctgngctacaaagtgaagtggctcctgactgcggaggcttgaacctggtcctttatggacttcatagatgcagaatgattagaaccaatttctcactgggcat

SEQ ID NO: 409709 - DNA, 484 bp, Homo Sapiens
  misc_feature (400)..(400): n is a, c, g, or t
ctaagctatgttacctgcctcgtcttccctccctcgccacgtacgtgtgtgggtagacacacaggcccacacatctgccatccctgattcccgcttttctctgatctgcagtattaccgggcccttgtaaatgctttgccccagcaccattgcttccattgtgaggcgtccagacgagcatggcacccatccccttcttgtccagccacccctgcagctctgtttggaacacctcctccttttccatgctgtgtcggctctgcttgtctcctcttgctctttttattgtggcactgtttagtagtcatcttttgttcttttgaggggcatttattgagcaactggcttgtgcagagcatagggagggagatgtaccaaaaggagacggacacgcacctgngagtcctggttcaaatctgtgagctcctccctgtgaggggtgccccgttaaccttgatgagactcagctactgactttttaaat

SEQ ID NO: 409710 - DNA, 636 bp, Homo Sapiens
  misc_feature (521)..(521): n is a, c, g, or t
taataagacccagtcctgccctcgaggagccagctcatggtttggtgaggaagcccaggcacacggctaaccctggagtaagccagcctgttatgtgatacagggagggcagagtgctgaaggccgggaaaggaagagcaggagctgggccttgagcagactgtttggtgtggccgatggcccaagagccaaccagaggttctgttgagattttcaacccaggaggtgggcagaggggtggcactgggggcagaaatggagtcactgtaagggaggagtgggctttagggaagagatggcagggcaggtgggaatccagagccaagacacgtgcgagaggctggggttgagttcaagcgtcagcagctggaagcggaagcaaccagagtggtggattcttggaagggggaatgacctaaagcctaagatgaagtctcctggccctgcagcagtggctcctctggatgatgaccattttaatggcagagctgtctgcccctactgtcctagagaggtgatanctggggcccactgaccaggggcccactagaggacaacagaggcatacatatgtttaaagcgtgagtgcctagcactgcatatatgcatattgttgaatctcttcatgtgtcctgt

SEQ ID NO: 409711 - DNA, 586 bp, Homo Sapiens
  misc_feature (416)..(416): n is a, c, g, or t
ctatactgtggaaagttaaggaaccagaaatcatgtttttcattctctaaaaaattatgtgtgctctttagatattatcttttgatactgagactacataagtgtccttcaaataatgcagaagaaaaagatcataggcaggcaaaaattacttaataaattaagctttttaaagaagtgaaagaattatatccagaaccaacagctcttaaatattctatttcaataaaaacaatttctatacaattgcggtgaaacttatttttggcaaatactcttccgtaagttatgaacatttctcttgataaattttatactaggtatataagttcctttattggtgttttggatgacagcaaatgactttccataaggcagatgtagattttattcacacaacttttcaggagtagctntatgttaatatgttaggactgtccttccttgagctttacagttaaccaatgaaagtgagttattttagggaatggttagatttggacatggaccaaaattagttttctaatgagtggtgttaaagatgtgtaactactattacagagataatgtaaatggccttctactt

SEQ ID NO: 409712 - DNA, 557 bp, Homo Sapiens
ttaatgagacaagtgctggtgcttttaattctcattccaggaaaacgtgaccaggtttttcctgaggtgttccaaccctgggctcaagccacggagggtggacagactgcacggtctggacttgtaactaagtctcctctctgtaactttggtccttgctagccaaaacaaatccataagccactgcttcagagtcccagagttgtaggaacaccaccttaggggaaaagagaaaacattgtggtcagtttcagatgaacctgcgaagaaatgttcctagagctgctttgcagtgctcagaaaaggctagttggggttggagaatgtcactaggaatgcggcctcgatgagacgttcagcaggagtgctaagagctaaatgttgcttaaaacctgctaaaggtggaaccagagtgcgggacggagactatagcagggagggctaagtttagataggaggaagagcttcctggcagtaaagggggcccaggcactcaaactggaataatggcaagaagtcacagaagtcacttttttccaagtctaaagtgtagtctc

SEQ ID NO: 409713 - DNA, 417 bp, Homo Sapiens
aagcagatcaatagttgtaatttttaaaaccctacatatatagaaataaccaagttagagtactacaggtttatttttcctgtgattgaccatgtcaatgtgttatcctcccatgtgattttttattgtttccttagagtactttaaaagatgaagaaatgagagactgaaccattgaataatcccaactccaccatttcctaactgagtgactctgggaaagtgatttagcttttttgagtactagctttctcattcatagaaaaaggcagagtaaagtaatatttacttagaggtttgtttcagggattaagttatgtagagagtcttttgcccggtatctgtgaaataaccattgctgcatagacgggagctactgttactgtctctattaaaattaaaggggccttaataacc

SEQ ID NO: 409714 - DNA, 531 bp, Homo Sapiens
tacaaactttggctaggcagctggtccagatgtcttttcaattcttgatatagatgtgggcaaaaaggcatgggcattgaagccagaaccaagtggtaagaatcttggaacctccactgacaagctgtatagttttaagacagattattcaatttcagtttcagccatgtgtttaagatagattctgttagcctgccagtccctgaatgactgggaagagtagaattgtccccatacccaccccaatccctgccattccctgacctggtactgctcaggattatagtccaatgaaaaaataaatatgtttatgccattatacatttgggcaacaatttgttagtacagctagcattatcccaatagaaatcattgccttgaagtggcactaatgctgctgtaataaaaatcaagctatagggcactggcttagcagtctggtagcaaagataaagatggaaacaaaaggcagtggcaaactatttagcaaaatatctcctataacttggaagctgactgcctaatgaactt

SEQ ID NO: 409715 - DNA, 106 bp, Homo Sapiens
agtaacagaaactgggtgcttttaccctctaattacttattgcaaggcctttacggcaaaacttaaacagatcgggcctgaatcccaacaaggacacccccacagc

SEQ ID NO: 409716 - DNA, 361 bp, Homo Sapiens
ttctatactataatgtaatggatttttcttcaactgggaagcaggtgggataaatagaccttggttcttgttctgtactaaggaatgcactggtctatgtgttcctctcactgggtgtccttgtgtatgtgcaacaggggaaaataacatgtcatgtctgcaagttccctgaaaaaaaggccctttccattcagggattttgcaagcttggtttcattgttattaaagaagggagcttgcctgactaaacatagagcattaaagctgtccctgtaggggattctgaggcccttcctggtgaagctcccctgccagactcaggctgcctcctcttggggtctgacccgcacagctggctctc

SEQ ID NO: 409717 - DNA, 628 bp, Homo Sapiens
tcagatcttgaatgcctgtttcaaaatgaaatctactggtaaatttgtaattgcttaagatttgtaaaatattacgggtacaaatcaataccctaaaagcaaatcagatatttcaagtatgtgttgagcagtggaattaaaacatcatccaaagtgacctggtgaagaacacattgagtgtctgtgttgtaggcacggcagacaaggtccctgctctcacgagcagcttagggttaaataagggaaggtgactaaacactatcaagcagattacttcagatatagtaagtttatggatacaacataatggagtaacataaggctgagttctggggctgggggtagctagatggaaagggattgggaaaggccctcaatgtggcatttcaactgacaactgactgatgacaaggggagatcaacagggaaatttggaagaaggaataacaggggaaaaggttcttgaggcaggaaggataattaaactaaactatggtacctacctttgaggagttcacgcaaagatataagaaagttctaatatcttcagtaaaacaaaaactaagcatactgcatatatgaccaaagtacattctaacctttctaatgtactggagttaatgggact

SEQ ID NO: 409718 - DNA, 526 bp, Homo Sapiens
tatctgcctgtcaggtaatgagaaccagatattaatattattaaaataacttccattttaaaacagttcattctgaggtatccaggaggtttacattcacaggttttgtaggtgtctgcactgtcttgctccttttccccgtttttctggtcttcctctttactggtgacaccttgtttttgaggttgccgcgtattggaaaggtagtgaagttcaattcgggtgtattttccagttcattaagagctttcgtaaaatgtttcgcagacttgtttgtccatacttgccctcacggggacactgacagagaatgggctatcctctggaattctcgttttagaacagttgctggtatctgaataattgtcattactcacagcctgactttcattggctttgtttttctagacagttgccaataatcagtaatcacttgtcttaagataaatattggcaccttatggaatgtgaggaggttgattcagttcacaagtcgttgctttgcctgacagccattgccttgtca

SEQ ID NO: 409719 - DNA, 604 bp, Homo Sapiens
  misc_feature (324)..(335): n is a, c, g, or t
caggctaattgtttggtcagaaattcctaaggccacagctttggggggttcgtgtagatgtacatggtgggtgggttataaatattgggacttaaggcagcttgttctatgtatttatctttgctcttgggtgacttagggaatgattttatttgatttaaccttctttctgtttgccccgagaatactcgccagtggcgcttgcagttgtagcatttaccccaagataactttgcctacgaaatatttcgcttttattattttcacatcattctagtatatggactttggaaacaaaagacattgttctatttatagcattcnnnnnnnnnnnnagtagcggtatttccatttacaaaatatagtaactcttgattactgaaaatgtcaaatcctagaaaacgtagcatgcctatacatgatgttaacatcattctcgaacagttgttggccgaagattcatttgatgaatccaatttttttgaaatagacaattctgatgttctctttagaaataactcagtttttatcttttttcacattgaaaatcagttagatttgcttaagcctcaaagagaatgtttatgtaaattagcgctggcaa

SEQ ID NO: 409720 - DNA, 554 bp, Homo Sapiens
  misc_feature (273)..(304): n is a, c, g, or t
tttatgaagcactcacaacatgcccagcgagctcacttcatcctccaccggccccaccttggtgtcgagtcattgcacagatgggcacgctcatgggaacaaccctgagcccggctcccagaggctcacatgggtggtgtaaagtaaatgtgtgcctgccctggccaaaccggcacctttactggcaagtaggaggccacagggtatggtgggaaagacctgaattctggtcccaattttgcctccaacttactgggtagcctctgtcaggannnnnnnnnnnnnnnnnnnnnnnnnnnnnnnngaaaggggctaggctcacctaactgtaacacccattttagcttggggtttggttgtaggaatcacactcttcctcatcttccttctcccggcaggctgccccaggtcccagggccttctgcgtcccaaggatcatcttgacagagtgtgcccccaaccctccctccccgccagaggccagacttgaggaactgggacccaggacagctcccaccccaagacctcagaccctggctgacagcacgaggggc

SEQ ID NO: 409721 - DNA, 426 bp, Homo Sapiens
tgctttgtttttgtcttttaagccaattcatttttctaacagttgaaattcttttagtactaaagaaatagatactgctcttttatggctttagtgtttatatacctgtttatatgcatacattaacaaaattagtaacagcagtgcttagaatttcaatgctgtgtcatactgatgattaactccatactcctagtggtgatgtggtccagatactggaatggaagtggcaggatgtggagtccagacatagtctaccactcatgctacttattagtaatattaaggtgttaaacttaggaatttgtcacatgtaggttcctgaggagatctaaaagttaatacaaaaccaagctgtttactgattttcatgagaacatttaagttagtttaagtctacctgatttattttaaaagaaggcagag

SEQ ID NO: 409722 - DNA, 516 bp, Homo Sapiens
gccctttttttccctactagctggaatggattccgttgtctgtcactgaaccctgatgatacatcttctacacactgtgtgggacaaggccccatggaagtcccaagtcagtaacctgaactccccaccctctctgccaagaaagagcttttttctctcagtatccatttatcggtcccaggggagctctctgattggctgtgcttgggccagtcattatctcctggaccaatcacagtggccagagagatgagatgccaagatcaattggtcaggtccagatcatttcctgcttttgtgaccaggcgggaaagggcctatctccagaagtgggatgagaaagcttgggcattcctaccacagcctgtctgacaacacctttaccccacaaggaggaactattagtgaatgccacacgggacactgctgtaatgaaacactgaggacaggagattatgacaagagtcccacagttcctgctcatgggtgatcatgcctgttcaccactaatagcct

SEQ ID NO: 409723 - DNA, 145 bp, Homo Sapiens
aacttggcggtatccacacagcgtccccctaccctcagccggccggggtcgcgccggagcctggctgcgcgctcgcccggctcggccgggggtccgagtccgagtccctgggcgtccctgccggctccggcggccgaggtctccg

SEQ ID NO: 409724 - DNA, 598 bp, Homo Sapiens
  misc_feature (139)..(152): n is a, c, g, or t
aaaatagcaacttacagctcacacatacaggctgctttgctgtgaccctagaataggtttaaaaatgcctagtgatgtggcccactacttgaaaggccaagggctctaaatcccagcctctgttactccacagctggcnnnnnnnnnnnnnnggtcataatatgtctcactgcttccctggatctggaggggtacagaaggggtaggaaaggaggctgcagactagagttcagagatgaaggaactactgtgaagatacagccaaagtatagcaattgaactgtacatgtgaaacgtatgtagctttgcctgaagaactgtttagattttatattgcagtgttgggtagaattttccccaaaacttaaaatttttatgtaacaaaagataaaatttcagtaacccatagcttataaaatctcaactctagtttgtactcacttgcctgctgcttattacccaggaaaaacagtgctaaattactaaaagtttgtcaaagatatacagacaaatgtttttcaaaataaggatatgtaagtgaatagtgtttgtatgaagtgagtttttctaacacttctgtctctcagttccacaaacc

SEQ ID NO: 409725 - DNA, 422 bp, Homo Sapiens
attaaaaatggagaaacagacttctgtgttctacccaggaaattctggtttggcatttgggagccactgatttaaaagacatcccttagttggttttttgagggtaaaataaaagaatcaccaccttccattcagtcacgcactgtgtgtttgaagccagctgcttctcaagccccgggccaggaactggggcaccagtcccagccttcaccaagtctttcatggtagacaggccaatacagcaccctctgtggaccacatagtgccaagcatgtgacatgtcttggctcgagtaagccttctaacaagcctctgaagtgtgggtcctgttactcccccatttcacagatggtgggggctcagaaggtgagcagttcacagaacttggaagtggtagagctgcgaagcaggaggcagacctg

SEQ ID NO: 409726 - DNA, 477 bp, Homo Sapiens
aggaattatctgtggttgaaagaacttatcatcttataagattggagaagttaattatgtttgtatcctaaggtggcaagtcagtagagatggaaaagttagaagtgtaaggatgaaaggagataattaatagctaagttgctgtggaaggtgtgaggaatgggatatggagcatagcctgggagttagtcttgaatgtggaagggtgagccatttcacagatgtagaaggggaggaagtgatggaagggaaggaattggaagaggtagtagatatcagatacgatattttggaaagttggacattaagaagagtgtgattggggaggttgttgtgactttctgcctgaagattcagagtcaggatcatgtgctaacaggtgacgtgaagtttagaatagccatttggggagagtagacacaagaggtggggcactcatggctgacatttgttagagcaaaaggatttattagagtg

SEQ ID NO: 409727 - DNA, 250 bp, Homo Sapiens
gaccacactcatgaagcgtaacactaccatccccactaaacagactcagacatttaccacctactctgataaccaacctggagtactcatccaagtatttgagggtgagcgtgctatgaccaaagataacaacttgctcggtaaattcgagctgaccgggatcccatcggcgccgcgtggcgtgcctcaaattgaggtcaccttcgacatcgatgccaacggtatactcaacgttaacgctatcgagaag

SEQ ID NO: 409728 - DNA, 453 bp, Homo Sapiens
tattttacccaagggagacaatccaaagtctaatctgctcagggtctacaactgaagtccagggtctttgagttagatgctttgagtgtgacctactttttgcctttgggaccctaaatgtcagtgcctgttaatttttctttgagaagtgtaatttctccagaggtctgctctttaatttccccagagaaggatgttctagtcagcatgggggatataagcctggctaccattactggcgagcaggcagaggcacgccacatggtgggataggagttggagttcatccccttttattcagacttccacttagtatcctgtttttagtcttctatcttatttccatcctcctccaggcccagggtacccaagttaatagcctatcaagttctatttggcaaaagataatgcctctcatttcctgtgggaattgtggtgaattgataatcacct

SEQ ID NO: 409729 - DNA, 309 bp, Homo Sapiens
tttagaatctaagagaaccttagtaattatctgttcacctccttatttaaactattgggagattacggctccatatgataaaatagcatgccctaactttcttggtaggttaaagaatgtccattaccatcaagaattcaacaccttcctcccttaatggcagggaaaagacaactgtttatacagatgaatgccacaccacttttcttagagccagcttattgcaaagtaaggcacccatatgtagtattgttcttagtctgctctgtgatttccctgaactctgtgatgtagatagatgataattag

SEQ ID NO: 409730 - DNA, 299 bp, Homo Sapiens
  misc_feature (199)..(199): n is a, c, g, or t
  misc_feature (285)..(285): n is a, c, g, or t
cgacacgaactaggaatcagagtatatggtacagggattcttggcctcttagtcaatgtcatgggcaactttagtatctatacagctggggaaggactcaaacaaaagggttattaggggaagtcaacttccaccttgataaagccgctaaacaggttaccagcctcctgaaaagccaataatgggataagcacagaanttaccaccatggagtcctctcttactttttgtcctgcttggttctctccccaaagatgagtggcctcaaaagaacccaaccatttntcttccttcgagaa

SEQ ID NO: 409731 - DNA, 299 bp, Homo Sapiens
tttgggtctatcttccctactattgatagggacatgggcacagagaaatacctaattagaataggaaaacaacagtgcaagtgtcctgataaagggcaagtgacctcagctggtaagtggtaaatgatttgagtgtcagggaaactattatacaagcagttgtggaaactgtagcgcactggatagccatgcctcatctaacaaggcagctactatctcagccctagttcattgatgccctgtagaaatgttggacaagtagtatcagatattccaccactcagtaatccagattctga

SEQ ID NO: 409732 - DNA, 399 bp, Homo Sapiens
aagcttggcacgaggtttcagagggattctaggcatgttcaagaaaatatagtatactgttctgtgttttgttcttttcatgtaacaccatagatagcttggagaaaatgccattatcaatatgaattacttagaaacataaccccgctctcttccctgagctcatatggtacaaatcaagcacttatgtgttgaaagtgctgcatgttaaaactctggggtagcagttccctcatagtttccttgtatcctctccctcccgctggcaccattcccaggcaggcaagcaggccggactttttccctggcaaccctctcgcctcaaattctggcaggcctggtgcgctagagtggaaccaagtggtgggcttggggagtcaaggttttaatttcttagtt

SEQ ID NO: 409733 - DNA, 426 bp, Homo Sapiens
  misc_feature (24)..(24): n is a, c, g, or t
  misc_feature (46)..(46): n is a, c, g, or t
  misc_feature (280)..(280): n is a, c, g, or t
  misc_feature (288)..(288): n is a, c, g, or t
  misc_feature (295)..(295): n is a, c, g, or t
aagcttggcacgaggatcttgacnaaacttcaatgggcaaaatttnccttgggaaattttatgcaggggaatccttgggtctgatgtgtggtgggctttggatgtgttgtgtagctcagtgtcccttcctgctactcctagtcatctccagaaactcagaccacccatctactaaaggcaggtggatgagcaagggggcctcggaggcattccggatcacactgaacctgagccccaccgcctgacccactcagtgtcactgttaacagaaactcgctgncatctggnctcaggnctgcctccttcctatagaacttgacactggaagcaccaggcgagctggaccttctgctgctactgcactcccatgatgcaggctgagaatgaagcccaccagagtgacaagagagcagactgagtggtagc

SEQ ID NO: 409734 - DNA, 349 bp, Homo Sapiens
aagcttggcacgaggcaacttttcctccaaaggcccagtagcaagtattttaggttttttaggccttaaggtaggtctctgtcacaaccacttaactctcctgttgtagcacaaaagcagctatagacaatatttaaatgactggacatagctgtgtcccagtcaaactatttacaaaagtaggctgcaggctggatttggcctgtgggtcattgtattatagtcagggtgatccttgttaaaatgaaatatggtcatgtcactcacttaactctaacccctgcaatgatttctcaggcactaagtttacaggtactcagtttgggtcttgcatggctagttggatccc

SEQ ID NO: 409735 - DNA, 348 bp, Homo Sapiens
  misc_feature (32)..(32): n is a, c, g, or t
aagcttggcacgaggaataaatcagtagatcnccttcgatccatcactatgattggaagaacatctcagtattacctgctgttgggtaaaatagcactactgttaattctacagtaggactttttaactttctcctactcccctttgtaagagacaaacgaggtatgggtgagcaatccagatatttgaggattaaatgaaacatgttgaacatctgattttatataagatgctgtaaaaagccgaagtgaaataggtgtgctatgccatgacctccactcagcctgcttaggaggcttgaaggctggggggctattaagtcctggggggaagcttgtgattagacgt

SEQ ID NO: 409736 - DNA, 319 bp, Homo Sapiens
tttaatttcctgtgacccttttatttacttatttcaaaaagtgctcaatgggaaatgcctacgtattctccccagtgctcccatgtggggatatgtcctcagtccaaagatattcctcagtctaggagttcacagttggatggtataaacaagtgtattaactcatcattacaagaccaagtgacaaatgctgttctgaaatatgactaaggggctatgggaggatactttatctaggaacatctgaaaagacttttcaagggaagtctttaaggatgagcaggccttcgtccataagagctttcttgtagcttctaaa

SEQ ID NO: 409737 - DNA, 299 bp, Homo Sapiens
  misc_feature (176)..(176): n is a, c, g, or t
aagcttggcacgaggaaacaatggttccacatagccatgaaatcagctgttacaataggaagaccaccactgaacagctttgtaactcatttcagaattgactttggtatgtgcttattggggtatttctgtgcttgtgtcaattcaacaaagcttcccaagcaaggttacttcancacataacttgggccacggtaaaagaaaaataaaattctgttgattcacagtcaccttcaatctcatctcataaattatgtttctctattctttgatattgtatcacatgatgcatgattaga

SEQ ID NO: 409738 - DNA, 419 bp, Homo Sapiens
  misc_feature (89)..(102): n is a, c, g, or t
  misc_feature (222)..(340): n is a, c, g, or t
caagcttggcacgaggccaacatctccccatttccaccacaccctaacatctagtacctaaccttctattctgtttctatgagattgannnnnnnnnnnnnnagatttcacatataagtgagattacatagtatttatctttctgtgtatgacacttcagttagcataatgttctccaggttcatcctagttgttgcaaatgacaggatttccttccttttnnnnnnnnnnnnnnnnnnnnnnnnnnnnnnnnnnnnnnnnnnnnnnnnnnnnnnnnnnnnnnnnnnnnnnnnnnnnnnnnnnnnnnnnnnnnnnnnnnnnnnnnnnnnnnnnnnnnnnnatctaccaaatataaataaataaataaagtagctaggcatggtggtacatgactgctgaggcaggaagatcacttgacc

SEQ ID NO: 409739 - DNA, 117 bp, Homo Sapiens
  misc_feature (62)..(62): n is a, c, g, or t
  misc_feature (70)..(70): n is a, c, g, or t
actgcttgcaaataattgaaattcatgttccataggacagtatttccttttgccgggaatgnacttttgntcccctaaattaaaccctttttcaacataggctatttacttcgttga

SEQ ID NO: 409740 - DNA, 318 bp, Homo Sapiens
  misc_feature (61)..(61): n is a, c, g, or t
  misc_feature (239)..(239): n is a, c, g, or t
tttgttagcgtttttatgttatagttgacaaaataaagcttagagaattgccttctaagtncccaggaataagtagtatactttggacaacataggccctaaaataagaaagacttaaatctaattctggctcagccacatgcttgcaatacaacccagtgatattgaaactgagtctcagcagcctcttaactgtgaaaagttgacagcatagtttttcccttgcagggtttttatgnaaccccatctatgaaaatccaagtttgtatgtgaaaagatgtagcacagtgcatgacatgttatgcctatttaattatg

SEQ ID NO: 409741 - DNA, 315 bp, Homo Sapiens
  misc_feature (63)..(193): n is a, c, g, or t
  misc_feature (216)..(216): n is a, c, g, or t
  misc_feature (233)..(233): n is a, c, g, or t
  misc_feature (268)..(268): n is a, c, g, or t
cagatgagtaagacatactacttatcctcaaagagctcaatatggtagaagagagtgagatgnnnnnnnnnnnnnnnnnnnnnnnnnnnnnnnnnnnnnnnnnnnnnnnnnnnnnnnnnnnnnnnnnnnnnnnnnnnnnnnnnnnnnnnnnnnnnnnnnnnnnnnnnnnnnnnnnnnnnnnnnnnnnnnnnnntgattgcaaattagagtgatggnaatcacttactgctggnggactgtggttagtaataataatagctatcttttntattgcttaatattgccttggcattatcctaaccatttaatacatgt

SEQ ID NO: 409742 - DNA, 311 bp, Homo Sapiens
  misc_feature (37)..(37): n is a, c, g, or t
  misc_feature (90)..(90): n is a, c, g, or t
  misc_feature (122)..(122): n is a, c, g, or t
  misc_feature (175)..(175): n is a, c, g, or t
  misc_feature (218)..(218): n is a, c, g, or t
  misc_feature (239)..(239): n is a, c, g, or t
tcataagttatagataacaaaaactcagaaatttttnttgaacataggtagggaacttaggtgaaaggactgctttaattccatctaaangataaaacctaatactgacttacaaatatgtngctaagagtttagtgtctccaagtaaaggtagaaattttacattatctatcantgatatcggcgaaaactaaaattattaggaagtaagctaagantaatttatagtctagattttnaacttaaaagtggaaccaatttccaatggtttcttcccttagttcttgagttagccatactgtgaccattaa

SEQ ID NO: 409743 - DNA, 201 bp, Homo Sapiens
  misc_feature (67)..(67): n is a, c, g, or t
  misc_feature (69)..(69): n is a, c, g, or t
  misc_feature (86)..(86): n is a, c, g, or t
  misc_feature (116)..(116): n is a, c, g, or t
  misc_feature (134)..(134): n is a, c, g, or t
gtttattcactgcatgtatgtcttttggaaaatgtctgtttacatttgcccacttttaatggggttntncttttcttgtaaatttntttcttatagatgctgtatattggactttntcggagagcatatatttnggaatcaagtgtgcattatcctaaattaaatgaaaacaaattatcagaacatatgatagaataatga

SEQ ID NO: 409744 - DNA, 349 bp, Homo Sapiens
ggcactttggcagtactcatcaaaatatgcgatgtgcagatgcttagccagcaactccgcttctatgaatctagccaacagaaatacttgtagaagtgtgcagctataaatgtccacagaggctcagagcctcattgtttttaatagtgaacagttggaaaccaaatagatgtctgtcagtagggatgtggcagaattgtggcatgtttatatgggtatagaaagtatggaggaacatagacccaactgttggtaagagttatctctggatgcaggaataggtaggggttgatgggtacagggtctctactttgcataattttggggccactgttcacatagaacattt

SEQ ID NO: 409745 - DNA, 108 bp, Homo Sapiens
ccagctgaggtgtacctgttttgatacatctaattacaatgaaaaatgctagtttcttaccagcattgctcagtcagtcatagaaccttgaacttaaaataatgattt

SEQ ID NO: 409746 - DNA, 225 bp, Homo Sapiens
  misc_feature (53)..(53): n is a, c, g, or t
  misc_feature (119)..(119): n is a, c, g, or t
acctgtaggaaatttgtatgtcttcttttgagaaatgtatattcatatttttngcccatttttaatgagattattttttgtatttgttgaattgagtttcttgtagattctggatattngtctcctcctgttggatgaatagtttgcaaaaatgttctctcactatgcaggttttctattcaccctattgatcatctgttatactgtgcagaagttttttagttt

SEQ ID NO: 409747 - DNA, 403 bp, Homo Sapiens
  misc_feature (14)..(14): n is a, c, g, or t
  misc_feature (121)..(121): n is a, c, g, or t
atttcaggcctgtncttttgaatcggcaacagtgctctttctaaaggtaagaacatgagaaaaccttcaactctgggaggatgggaaagatcatgagtttggtggtagatatgtggatttnaggtctgtcacatgtgcaggagatgtcaagtgggcagttgaatattcttgtctggagctcacaggggagttctaggtaagaggtatgagagtggttcactatttgaagctgtgaatgtgcacgaggtcttccagggtaagagaggatagggtgagaagcagagggcctctgactgatagacagaggcaccttgagagacccagcttcaaaggatgggccaggacttccctgggcaggccacatacttggggctgtctgtgggctgggatgattcgtttattc

SEQ ID NO: 409748 - DNA, 179 bp, Homo Sapiens
  misc_feature (51)..(51): n is a, c, g, or t
  misc_feature (67)..(67): n is a, c, g, or t
  misc_feature (70)..(70): n is a, c, g, or t
  misc_feature (80)..(80): n is a, c, g, or t
  misc_feature (109)..(109): n is a, c, g, or t
gggaattggatgggtaggtaacaacagatacctattaccatcatataacantactaaaataataganggngggggctctnggcgcctctgggtcttggtggaggtaggnatggagcccttccctgtggcacacccaagccctgggaggtcaccagagccctgcttttccaacccctact

SEQ ID NO: 409749 - DNA, 272 bp, Homo Sapiens
  misc_feature (61)..(61): n is a, c, g, or t
gggacttgaatgtatctccagcagccatgtgattattgtcatcagggggtggcagcaagtntagagaaggcagggacacgtttggggttgacattgcacattatagagtgaaacataagtggagcccaaatgctatgcttatgtgacacacattgtcctagtaatgatctcatgcacctgctgcacaaataagaaaggaattgtagcctgctgcgcatggctgccccttgagagaggaggagaggagttatttctggaatttgccccaaggt

SEQ ID NO: 409750 - DNA, 290 bp, Homo Sapiens
  misc_feature (218)..(218): n is a, c, g, or t
catgttgccgttagtttataaggtaccattgatgagaccaagttcaggtcgtcttcctgatttcttcgaatttgagagcctgagtattggtgaggcttggctgccagtattcatttgggatatttgccaaggaggattagataactttctgcatttgcatcgcatattacctctacctggaattgatatggcctgaacactgtttttgaatatttttngcttcatttgagtccttacgagcttgcagtccactccaggtggaccatatcttttaccatcatggccttttt

SEQ ID NO: 409751 - DNA, 343 bp, Homo Sapiens
  misc_feature (13)..(13): n is a, c, g, or t
  misc_feature (260)..(260): n is a, c, g, or t
ttatatttgagtnctgtttcttttgcggcacaaaactttataacaatttggggggctcacctgtaattacattcctctcagggcccaccggtctctggcttgctcttgtgagtaggtgcaccctgcccgcttgtggtggcctcaggggtaagaaatcaggacccacccagtgagagaaataacccaagctgtcagcaacgcggaaagaaatgggctagcaacctcttaaagcatcctcacgtactgcggcgatgactctntgcacagaccaaggaaggagagaggccgcggaagtcaggtaaagtacttccttggtggtcagattctggagggctaaacgtgt

SEQ ID NO: 409752 - DNA, 262 bp, Homo Sapiens
  misc_feature (18)..(18): n is a, c, g, or t
  misc_feature (77)..(77): n is a, c, g, or t
  misc_feature (90)..(90): n is a, c, g, or t
  misc_feature (155)..(155): n is a, c, g, or t
  misc_feature (221)..(221): n is a, c, g, or t
gggacacagaggtgccgncatggttcaccaagaggttcaggactggccagagggaggagaagaggtcaaggtacgtntggggcacttggntgacgcatctttgcctgcacacagctgaaatccccaggaaataagacgggagcagggtgggtttntgcagccaaggtgagaccaaaatgccagctcactgccaccctcagtaaagactaacttgccctttnccccaactcccctcccagaagtagctcactctcctctgcct

SEQ ID NO: 409753 - DNA, 348 bp, Homo Sapiens
  misc_feature (256)..(256): n is a, c, g, or t
acaagaccttttgaatgcttatacaacagcatcttttatctgaaccctgagtttttcaattcttttcatttattcagtgtcttctgtggtgtcttcccttttccagagcacttatccttctctgtcaagcttctttcaagtatctttattccttttgactgtaacaggttctctgaactcttcaggtctatgccatttgcccagtactaccagcatctcagtctggattattcatcatcttagatggtcatatttnctattattcacctttttgtccttctatttcttctctgattggcattagcatattcaatcactttttcagttattcatcaggtatttactgag

SEQ ID NO: 409754 - DNA, 297 bp, Homo Sapiens
  misc_feature (55)..(78): n is a, c, g, or t
tgtgtttgaggtaaagttaatcagataatataaccagacagttgtatgaatatgnnnnnnnnnnnnnnnnnnnnnnnnccattctggaagatccacttataaatgaaagttttctcaaatgggacgtccttaaattggatctcagtgaattatagttgttattgttgtttaagaaatatatttgaaaacatacttactctgtgtgaagtacacagtttatatgggaagctagttccgtggtataccttagctggagacctgtgtaaggacttttcctgtctaatattgagtgcaggt

SEQ ID NO: 409755 - DNA, 198 bp, Homo Sapiens
  misc_feature (34)..(34): n is a, c, g, or t
  misc_feature (48)..(48): n is a, c, g, or t
  misc_feature (155)..(155): n is a, c, g, or t
  misc_feature (172)..(172): n is a, c, g, or t
atttctggagacctttagtctatagactaatctnagcaaggcattgtnaacagtagtgtcataaagatgaatggtactgaccattagggaattgataggctggaagatgagatggaatttttatgtaaatctcttaatacagagaaggaaatggnaagtatgataatagagntgagcacccaaaaaactgtggtccca

SEQ ID NO: 409756 - DNA, 343 bp, Homo Sapiens
  misc_feature (299)..(299): n is a, c, g, or t
acagccacttcctgggtgatattggcaaggtgcccgtgcagatggctttagttttctcacctctcacatgagagaattgcactagggccccagggcacagggtatgggtgaggttttctccatccatattccacttgctttaccttactcaaagttggagaatggtcaaacacaaaagctaaacgtttggggagacttagttgggacgctgccctttgcttctgcatttgttctgacccagctgctatcacacagcagagctgtcaaaagaaagagccaaaacaggacttgaccacttnctctgtcagctcagctcttcattttggctgcagagaacaatgaa

SEQ ID NO: 409757 - DNA, 152 bp, Homo Sapiens
  misc_feature (18)..(18): n is a, c, g, or t
  misc_feature (115)..(115): n is a, c, g, or t
aggatgggaagaaatgancaaagaaccggtggcggcacacaacactccacaggtgctttgctgtaggggagcagaggaaatggggcagtaagtgaaggggtggcccaagggagtnagttttgctgatgggagatccccagtgctttgcctgt

SEQ ID NO: 409758 - DNA, 145 bp, Homo Sapiens
  misc_feature (114)..(114): n is a, c, g, or t
acaatatagtgacagaaagtgggtcagtaggtagttactatggttagtaaaccagtgtgagtcatctgcttttgttgaaaggtagatgagatgcttgtggccatgtgggaaganttaatttaagaatctggtcattttactaagg

SEQ ID NO: 409759 - DNA, 145 bp, Homo Sapiens
  misc_feature (44)..(44): n is a, c, g, or t
  misc_feature (51)..(51): n is a, c, g, or t
catgttttctggtagattatccagaattttttaaaaattattcntagatangttacttaagaacaacaactctttatgaaaatctagcatgcgttttaggatcctgttggccgcatgacatacacagttttcttgcttctcaggg

SEQ ID NO: 409760 - DNA, 321 bp, Homo Sapiens
  misc_feature (176)..(176): n is a, c, g, or t
  misc_feature (301)..(301): n is a, c, g, or t
ctttcttcaaaatgcagaaacagtgacaaggaaattcattcaccattggtcaaaggtagacacaaagtcagaaatgggactagcttgtatttatatttaagctgcttttccttgtacctttcttatatgctttattcatctgcctctccagttaaacaaagaaataactgattatnatttcttttctgacaacctcacagagcacattagcctcagaaaaacagaatcacagtagcctatacaagggattgctctggcagttcttttctgaggcatgatcataaggtgtgcacaaattaantaattaattccctaggtagc

SEQ ID NO: 409761 - DNA, 311 bp, Homo Sapiens
ttgtcagtgacaactgaacaagaacttttagaagcagttggctgtccattaatggcagatttcaaggctatgcaaattgtgccagttcagccctgcattttttcgatattatcatatcaattgagtcagttcagagtagacaaagcaaggttatgggaaccacctagagcatcatgcaccatttaacatcaatgcagcatacatgaacatctgcaacttcgatcttattaacagagggataggaatggaaggcagtaaacagctttcttcatcacttaattgcaaatagtatttcctaatgtttgcattgt

SEQ ID NO: 409762 - DNA, 184 bp, Homo Sapiens
  misc_feature (17)..(17): n is a, c, g, or t
ctgaccttctgcaagtnacctctctgggggcactaccacaggaaaggcaatgtcaagtgatgggactgcttcatccaaaggtcaatcccaagctaaatgaccctgtcattttgcaggccgaggcacaagggaggccccattcatcttccctggagtcggcatccctttgattgcggggccacct

SEQ ID NO: 409763 - DNA, 339 bp, Homo Sapiens
  misc_feature (81)..(81): n is a, c, g, or t
  misc_feature (157)..(157): n is a, c, g, or t
  misc_feature (285)..(285): n is a, c, g, or t
  misc_feature (298)..(298): n is a, c, g, or t
gtcaatttaacttaacaagtatttattgaatatccacatgtaggccagaatcagattagtaaccaggtgccttggaatttnaaaatttctcctctctttattaatggatttagcgagtggaaatcaggctttctgtgatggtttataaaggtatttncctggctctcttggagttctctgtccaccttgctgcagtctttgttgtgatggggagaccacatgggagcggtccagatgagtgatgctacgggcccaaactgttagtggccgtgaggatataggttntaggggacatctngagtggaaagagtgctcttctcacacagctctctctattaa

SEQ ID NO: 409764 - DNA, 382 bp, Homo Sapiens
  misc_feature (293)..(293): n is a, c, g, or t
ctttctaggatagagatgatcactgaggtccctccaggctactcagttctgcaatctgtgatttaagtaaatcagaagttatttagcatggcttcactaatcagaaacctgaaagaccagaggcctgttttcagatgatcccttgaaaatgagattcaaatgaccaaccactaaaagaatcaagtgctaaatcacgagatcgagaccctgaaacatagtctccagctattacgtgtttttttgaagaatggctatcatacaaacacaatttcagcgggtctttatattaaagncaccatttaaatggggactgcatccggtgttctttgtatggtaataaactgagcacctaaaatggatgtgtagcaggatagaagttatc

SEQ ID NO: 409765 - DNA, 115 bp, Homo Sapiens
aaaaagaaagtgggaaggtaaacagggctatttccactgtgacagctcatgatgttttatttctaaggagtcaaagtccaggactggctcacctaatccgaggccctggtgacct

SEQ ID NO: 409766 - DNA, 225 bp, Homo Sapiens
  misc_feature (95)..(95): n is a, c, g, or t
agcctaagcgcatgaacagcagcagttcagagtgctggggttgttggaaccctcctctctccccttctccttctgctcaggctccaggttcccanggggtaggaggagacaccagaatccacaagagggagactgaagtttgcatgaaaagagccgatggctgggagtcaggagacttggatctggccctgactgtgccctgcaggctgctgtctttgcatctgt

SEQ ID NO: 409767 - DNA, 276 bp, Homo Sapiens
  misc_feature (130)..(175): n is a, c, g, or t
  misc_feature (229)..(229): n is a, c, g, or t
agcatctttgtcattgccatggacagaaaaattgaattagggctagtctatggaagttgttattgtagaacgaagttattaattctccaagtagtttgttatgtttaagtttcatacagctaaaataaannnnnnnnnnnnnnnnnnnnnnnnnnnnnnnnnnnnnnnnnnnnnntagttgtttcatccttggtgtagctctggattaagtaatcaaattgtgaatatnctgtatgctgatattaagtacattgtttaataatgtagttttatgtt

SEQ ID NO: 409768 - DNA, 186 bp, Homo Sapiens
  misc_feature (45)..(45): n is a, c, g, or t
  misc_feature (152)..(152): n is a, c, g, or t
taagtgtttaatagaagagtgtgaatggcagaggcagaaggtttngtggatcatacagccttacagtctcttcagaaacatcactgatatttgctgttgagtcaacctagcaaccaattcttgtcccaaagatatgacactgttcaaaaggnacctcagagatgccagtttcatctcttttcaatg

SEQ ID NO: 409769 - DNA, 308 bp, Homo Sapiens
cagctcctctttcacctgcgttatgtattgtctctttggaagatttcatttaaagatacagcaccatggctaaaaccaaccccaaaactaagactcttgctcagtccctcacctggtgcaggaacctccatgtaacattctctgagcagcaaaggctggatgctggggacacagaggtcagctggacatgatttttgctttcagggagctcacagtgcaagccctggcctgcacgcctccagggcccaagtgctccctgctgcttggccagtggttgcattaccaggccacttggactaccagaaaat

SEQ ID NO: 409770 - DNA, 225 bp, Homo Sapiens
ctccctggagcagcccccagcagctcatgtccttaggaacaccccgaagccaggcagaaagaagtaaggtcctgtctgtggggccgtggactcagttgttacccgggtcaggccatccaggggataacagggctcctgcctgtgctgtgtcccctcaatgggcccggtgtgctctccccatgcctccactgccagcggggtgtcaagagtaccacaaggaggcca

SEQ ID NO: 409771 - DNA, 242 bp, Homo Sapiens
  misc_feature (40)..(40): n is a, c, g, or t
  misc_feature (121)..(138): n is a, c, g, or t
  misc_feature (192)..(192): n is a, c, g, or t
  misc_feature (201)..(201): n is a, c, g, or t
  misc_feature (213)..(213): n is a, c, g, or t
tttccccccataacaatgctttgaggcaggtatggcagtntcctgttttgtagatgtgaaaaagattcagaagataaatgacttcttcaaagtcattgagcccagattgtatgcttcaaannnnnnnnnnnnnnnnnnaccttatcacaccactgtgtatgtatctatgtttataaacaaaaaattaggganttatataantccctaaatgtncatttcctcagcattcaaagccaattaaa

SEQ ID NO: 409772 - DNA, 101 bp, Homo Sapiens
aattttttcaaaacaatcacatacgaaaaaaaggagagtagagctcatgtttcctgatgcctcctccgtccagccctcttctcgctttctgttgcatcctt

SEQ ID NO: 409773 - DNA, 192 bp, Homo Sapiens
  misc_feature (109)..(109): n is a, c, g, or t
  misc_feature (171)..(171): n is a, c, g, or t
  misc_feature (176)..(176): n is a, c, g, or t
ataaattcttagttgtaatttgcttctcttaattatattcccattggtgaaggtagaaatcctttcattttctgattctcaaaaccacagtctacttgcaaactccatntctttgattccctactaccatgttcaattttctaatccaacagaaactcccacagtatgtgntccanttataagatttaattt

SEQ ID NO: 409774 - DNA, 309 bp, Homo Sapiens
  misc_feature (135)..(135): n is a, c, g, or t
  misc_feature (152)..(152): n is a, c, g, or t
  misc_feature (154)..(154): n is a, c, g, or t
  misc_feature (240)..(240): n is a, c, g, or t
  misc_feature (279)..(279): n is a, c, g, or t
caagctgcttcccctggaaggagaggctcagagaaccagggggttcacaattttaagcttcatctgagcccaaccagacatccccatgccaagcttcagcatccagttccttcccactcagtgcccacgtttcantagtgaggctgtgagtntnagccacacagcagtcacacaactcagagttaaactgtgcatccgagttgtagcagcagcagccccgaggctctcaggaacaagggnctcttccatggccatggcagtcctgattctttgtctatnacttaaacttgagtttagagacctgaacgt

SEQ ID NO: 409775 - DNA, 257 bp, Homo Sapiens
  misc_feature (82)..(82): n is a, c, g, or t
atgaagtctttgggcctgagcttttctgctgatacatcaacaaaacatcactgctttttgcataaaacttcctgggcttttnagtcctttccaccacccttgttattcctcagagcatactgctttcagggagatggtatcaatccccctatgttcagaatgagaatccagcagggaatgggtcagggaacttctgggtgatcactcactcccatatcccattagagtttgggagtgggggtctggcttagcctgca

SEQ ID NO: 409776 - DNA, 368 bp, Homo Sapiens
  misc_feature (28)..(28): n is a, c, g, or t
  misc_feature (36)..(36): n is a, c, g, or t
  misc_feature (45)..(45): n is a, c, g, or t
  misc_feature (109)..(109): n is a, c, g, or t
  misc_feature (191)..(192): n is a, c, g, or t
  misc_feature (195)..(196): n is a, c, g, or t
  misc_feature (198)..(198): n is a, c, g, or t
  misc_feature (216)..(216): n is a, c, g, or t
  misc_feature (232)..(240): n is a, c, g, or t
  misc_feature (332)..(332): n is a, c, g, or t
ctgacatcagggaagggccacatttaanttaaactnttgacagtntgcttgcgagaggtgatagataggctcccaggagctgcctcctctggaaaccaaatctgaccgngagccagaaggaagtgaatgatgcttctgcacaacatgaagtgaatccagtttcctcctgaccttgtcccactgtatatttnnttnntnttgttttatttatatttntttattaccagaagannnnnnnnnagacagcggagttctaagttaaccacccgtctacggatccaaaagaaaagccagtccgagagagggttagatacgggaggggagacacaggntggaaacaaaaccgttaggacatttgttcggtcttt

SEQ ID NO: 409777 - DNA, 327 bp, Homo Sapiens
  misc_feature (130)..(130): n is a, c, g, or t
  misc_feature (176)..(177): n is a, c, g, or t
ttggtcttctagttatggttgctgggagtcagttttgtcaagttatgcgccactgtcagcagccaggactgacttcctttaggctatgaaacatcatcactgcctttccgtaatacacatgaagtatganttgcatgagacccaacatgagatcttatatcctgcaaataaaattnnttttctaagaggactttatcagtgggccaaagtaatgaatttcctattgtctagtgaactcactcttttcagagaaaaggtacaatgtagtcacctagagtttcagcattagaagggtgttccatctgggtaccaccatccatttcattt

SEQ ID NO: 409778 - DNA, 294 bp, Homo Sapiens
  misc_feature (45)..(45): n is a, c, g, or t
  misc_feature (141)..(141): n is a, c, g, or t
aatttgggaggggaggaagaggcagcattggctgctttgtttgtnaaggtggcaggtatggcaggaggaaggagtttgactccagtagagagcagagtgttgggatataacctgcccttcccttccctcttcctgcctctntagttccctattctctactggtatagatagactggtatagatagaggaaagactgcctctctagttccctattctctactggtatagatagactggtatagatagaggaaagactgcctctctagttccctattctctactggtatagataga

SEQ ID NO: 409779 - DNA, 261 bp, Homo Sapiens
  misc_feature (49)..(49): n is a, c, g, or t
  misc_feature (96)..(165): n is a, c, g, or t
  misc_feature (186)..(186): n is a, c, g, or t
  misc_feature (229)..(229): n is a, c, g, or t
  misc_feature (241)..(241): n is a, c, g, or t
gtaaaatacaatatttccatggtatttagatcttggggataaaaaaggncaaatgatttcaaattagggccgtcatggaacatctgagatgtatannnnnnnnnnnnnnnnnnnnnnnnnnnnnnnnnnnnnnnnnnnnnnnnnnnnnnnnnnnnnnnnnnnnnntgacacctacgcctgcctggnccctctttgccttctcttacactacttcttcaccctggaattnccttcctacctnattgccacattataacattt

SEQ ID NO: 409780 - DNA, 221 bp, Homo Sapiens
  misc_feature (81)..(81): n is a, c, g, or t
  misc_feature (149)..(149): n is a, c, g, or t
  misc_feature (164)..(164): n is a, c, g, or t
tttaccaatctgtgaaggtcctgatttgtgaccatcaatgtctttttaatgtatctgctcaacttctaggacttcaggggncatttcatgcgctttgtgctcttctgagcaccatatatactttccaagaattttgaatgtgaattccnagaaatttcagtagngaaaacaatagctattctttaattatagtaaagttcaggtagaaggagaaattattt

SEQ ID NO: 409781 - DNA, 225 bp, Homo Sapiens
  misc_feature (34)..(34): n is a, c, g, or t
  misc_feature (50)..(50): n is a, c, g, or t
  misc_feature (161)..(161): n is a, c, g, or t
tggtaataactgacttagcaggctgaggaatttncactttaagtgaaccntaaactggggttaggacaggccaaggagtataatctatactgccaaatccctgaaaggtgctggcattaatagcctaagtacctctggaaatgagagtaaagctggggctnaaccccaggaggactagggtaagaagggcttaaatcctcaaatgtccttgcggccaggcgcagt

SEQ ID NO: 409782 - DNA, 288 bp, Homo Sapiens
  misc_feature (91)..(91): n is a, c, g, or t
  misc_feature (100)..(108): n is a, c, g, or t
  misc_feature (165)..(165): n is a, c, g, or t
tgagttcatatggactgctgcccctcgaaagggagagggtcggccccatgtccccagggagcattccatcagggacaacgtacatactgtnatgtaaacnnnnnnnnnccccccagggggcaaaagtgtgagatgccttaatctttccttcatttctgctgtctngaacactctagcccattatttcctttcagttccttgcagcataacctctacgataagccccaagcgggttgttgtattatgacgtttatgatgttccaggtgaaggcattattaagtacctct

SEQ ID NO: 409783 - DNA, 165 bp, Homo Sapiens
  misc_feature (65)..(65): n is a, c, g, or t
ggcccctccattattgttttgggtgggtgcatggttgcctacctagagacatttaacatcctccnttgcagcttggtgtggtcatatgactttaagttcaacccaggaggctatgagttgtaatgtgtacagcttctagaccacattcttaaaacggtgctttcg

SEQ ID NO: 409784 - DNA, 266 bp, Homo Sapiens
  misc_feature (217)..(217): n is a, c, g, or t
cttttgaaacttaatgaacataatcacaatttatgtcgacttcatttctatcaggtagcttgaagtggtgccgaagttaatttaataaaatcactcagttttacagataaagtaattgtggcctaaagggacttggcaagagtatcactgagtagaatttacaatccagaactaacagacttcttcatgatacgttaagtgggtgttttgtgtcctntataattccattttctattgtatctaacaatcccttcatattacaaact

SEQ ID NO: 409785 - DNA, 299 bp, Homo Sapiens
  misc_feature (244)..(244): n is a, c, g, or t
atttaattgacattttttagttaataagggtgataagatttgaaattcaatacagaatttctgtggtggtggtaaataattgagatggcccagaacgtttaacacagtgattctaatgcaagggagaatttcatccaccctctgtgcaagccaagcctcacataggagacccaaagtgcatccacaccttggcttgtgccttgccaaccctattgcttaggctcagatctgcttcatctgtggncaggtcattcaggattacccttcctgtcaaaaccaccacttgagggcaaaggtca

SEQ ID NO: 409786 - DNA, 248 bp, Homo Sapiens
  misc_feature (227)..(227): n is a, c, g, or t
aaatagaatatggccaaattcttgtgacttgtgacaaaggttaaacttccagaaagtgccctagaagccataattttccatgataagagactagaatggaatgtctttcagactttatcaattgatgacaaatggagaaaaataaaagttcatttatggcacttctgaccaagctcatttccctagattgaatctgagtaattgcaatgtcagctatctaggggttngctcttcaaaacaaataacct

SEQ ID NO: 409787 - DNA, 265 bp, Homo Sapiens
  misc_feature (204)..(204): n is a, c, g, or t
  misc_feature (238)..(238): n is a, c, g, or t
tcaggattagttgagtgatgccttaaagaaagaaagtcagatgataggtcttcctgctgcccgcaccacatcatgagtgttattcctatagaggaggagtaaagagtgggaagaaaatgaaatctgtcaatactgtgaatatataaataataaaagtagcagtaggactgattaattctgaatcatctttatgaaatgactggngccgtgaaaatgctcagtctgcacagctgatttnagaaatgtatgcaatctgtttgatcgg

SEQ ID NO: 409788 - DNA, 270 bp, Homo Sapiens
  misc_feature (46)..(46): n is a, c, g, or t
  misc_feature (59)..(59): n is a, c, g, or t
  misc_feature (114)..(114): n is a, c, g, or t
  misc_feature (140)..(140): n is a, c, g, or t
  misc_feature (171)..(171): n is a, c, g, or t
  misc_feature (226)..(226): n is a, c, g, or t
  misc_feature (230)..(230): n is a, c, g, or t
cttcaatccttaaaattatatcctatgactgtatagaaatttcagngcctttcacccgntctttctgtgacatgccatgtctacaaaaatttggagatctctcaagtctgatgntttaataactagcatttttgcaacgntggaagttcgcaaaaggcttttgcatatttncttctgacggcaattttgagagttaggtattattctcctcgttgtactggtaagntcantagatcttagagttaagtgactaaggttcaaggtcgcaaa

SEQ ID NO: 409789 - DNA, 168 bp, Homo Sapiens
  misc_feature (14)..(14): n is a, c, g, or t
  misc_feature (38)..(38): n is a, c, g, or t
  misc_feature (60)..(60): n is a, c, g, or t
  misc_feature (117)..(117): n is a, c, g, or t
atctatatgtggcngtggtgttccttggggctaaaggnaaagtttggagtactgagtttnaaacctcttcattctacaacattctttgtctatacttaccgtacctttgatgcactncagacctcatcatgtcctacacaccttcctagcagagacggtgttaggcca

SEQ ID NO: 409790 - DNA, 288 bp, Homo Sapiens
  misc_feature (148)..(148): n is a, c, g, or t
  misc_feature (175)..(175): n is a, c, g, or t
caggtttggagctagtgacttaggcccctgggttctaacccatggaaatgaatcatgaagcctggggacttgtaataaactgctaccaagaactagactttgaaatatggagaaatactttttccatatgaatatccagtatccattnggcaaggaattaagaaagtgattccangattttagagcaaaacaaattttaggaaggaatgtaaatatttcacatcagcggatgttagactttggttgcatttttagatccccggattctttagggttggggtaattagg

SEQ ID NO: 409791 - DNA, 330 bp, Homo Sapiens
  misc_feature (108)..(108): n is a, c, g, or t
caagagggaaaaattacattttccctcttgcaatcatgtttgtagcataaagaagcaataaatgggggcggggagtaaagcttgggaactattctatgttaggcttgngtagtctagtgcaatgtctgataaaggaggggtttgaattttggtatggaaggctttctaacactgcactattttaaagaatagctcagtgatatcagtattcagttacttaactaggcacgaggtaccagatacagagagattgtgtagaagaatgaacactgttaactactgtctcctctccccgtttgctggatctatctatgggatagggtgctgacc

SEQ ID NO: 409792 - DNA, 358 bp, Homo Sapiens
  misc_feature (328)..(328): n is a, c, g, or t
aggggaaaataacctgaatatatgcttaataatataagactttcagtttgcaaaacagaaatcctgacttgactaaaatacacttttcatttgacggagacctttagttaaggaaagattagttttagcattcaacataactaaatacccagcattatgttttacggtttttttcaacaatgatttatgtgtcgtgtttggtgttgcctccaaacagtacctaggatagctgatgcttttactttgagtctttttctttagttggaacattaattgcaagcttttggttggtaatcattttttatggggtgttatttactatatgggnccccatggggcacattgttatctgggggga

SEQ ID NO: 409793 - DNA, 195 bp, Homo Sapiens
  misc_feature (48)..(48): n is a, c, g, or t
gaaaaaagaaaagctaacccagacgagaaggacgttcaagggaggttntcagagaaaatagtagctatataaacaaggaaagtacattagccaagaagaatggagcaaggtatgctggccaagtgaaacaacctgtgcaaaagctactgtcagaaaaagtgtagtacattgaggggtctgagagtgtaagtttgg

SEQ ID NO: 409794 - DNA, 194 bp, Homo Sapiens
aaaacacaaacgtgtgacgtcagggtcggtttttaaaagtctcttctacccactacatcagttgtgtctcttgggatggactttagagaatcgattcgagcctaatggcagtctagagaaatggagatcttcgtcaggactatcagattattgtaatgctgcacttataacaaaaaacttagatttagccacgc

SEQ ID NO: 409795 - DNA, 333 bp, Homo Sapiens
  misc_feature (234)..(234): n is a, c, g, or t
aattatttaatatggtaagatgctccacatatcagttgagaacttgacagtttcaagatttatctatccatttggtttatttgaactgtggtataactttctgatgaatgactgtaccttgatttacttagcttttcttcttgtgatggacactgttacaagcggtgctataataaacttgtgcaagtaactcttcatacctgtcttggtcatgtaatgtgctggctcacaggncacatacatagtcttcagcttaactagatgttgccagtttgttctccaaaatggcttctctgcaaatctcactaccattccatattttcagattctaaa

SEQ ID NO: 409796 - DNA, 254 bp, Homo Sapiens
  misc_feature (133)..(133): n is a, c, g, or t
  misc_feature (144)..(144): n is a, c, g, or t
  misc_feature (166)..(166): n is a, c, g, or t
  misc_feature (170)..(170): n is a, c, g, or t
taatgcatatgatagtagtaatattataaacttgatactttaggcccttttggttcaaacctttgtgatacttttaatgatgcaaagtgcctatttgtaagcctggatattagtctctatctttttgcatctnatataaaaganttgattttttaaatgtgatgtncatntatattaattgctttggaaatttgctctgtgggcttcataataccaaagaccagaatagctcatggccgcttttgccaaaaatc

SEQ ID NO: 409797 - DNA, 297 bp, Homo Sapiens
  misc_feature (11)..(11): n is a, c, g, or t
  misc_feature (38)..(38): n is a, c, g, or t
  misc_feature (98)..(98): n is a, c, g, or t
  misc_feature (215)..(215): n is a, c, g, or t
  misc_feature (217)..(217): n is a, c, g, or t
  misc_feature (263)..(263): n is a, c, g, or t
ttttatctttntcatgaaatcctttttaagtaaatgtnttataaagtgatatgaacttagctttttaccagatgtctatctgtatggttgaaaatttnttttgagatctattcaggtggtttcctatctactgcctttgtctatttgtgtctgcttttcacttctctttcagataacatcagtactgaatgtatacttggtgtttaatatttatngnttaatatttgtatagttctccatataattgtataaagggtaaaagnatacataaaacatgcatttgttttgaattgtttt

SEQ ID NO: 409798 - DNA, 302 bp, Homo Sapiens
  misc_feature (147)..(147): n is a, c, g, or t
  misc_feature (172)..(172): n is a, c, g, or t
  misc_feature (202)..(202): n is a, c, g, or t
  misc_feature (228)..(228): n is a, c, g, or t
  misc_feature (262)..(262): n is a, c, g, or t
  misc_feature (276)..(276): n is a, c, g, or t
tagtgtaagtgtataacatgatagaggaacttaggaaaagatagctgtaattcctttgtaatcggccccagaaacacacatttctctacttagtttgtacttactaaatcccatatgtctattcatttgtatttatatgtttatccntctttaaagtatttgatatattggnacaacttattgctgagattaagttatctgnccacacttgtattagggttgcctggnttatcttataaattcagaagcattcaagctgagnttttaatttttccnattgggtgctaaataggatactgggt

SEQ ID NO: 409799 - DNA, 290 bp, Homo Sapiens
attattatttttctaggtattttggcagcggggctagtaatcttacttcaagaaggctgtgatctgcacaagtcccagagacaagctggctttgtaggaggagagagaacatgcgagtttacatttgtttgctgagagaaccacatactttaggctcagcctgaggagcgactcactgtattcagggatggtcaggatccagatatgccagagtcagtgggaagcctccagatccctagtcacacagatagaacttaggcacctcggaagcaagctgctggattattgtg

SEQ ID NO: 409800 - DNA, 271 bp, Homo Sapiens
  misc_feature (56)..(128): n is a, c, g, or t
  misc_feature (203)..(203): n is a, c, g, or t
tataaatccagtcatataatgataaacatctccacatcataacaaagtattccacnnnnnnnnnnnnnnnnnnnnnnnnnnnnnnnnnnnnnnnnnnnnnnnnnnnnnnnnnnnnnnnnnnnnnnnnnattaaaggggaagtgttagatcatatttttagctttagaatttctactaccagaaaattagaattttttgtaggntattaaccttaccacttgaaatagtgttctttcctccctccctccagaataatgcttggaagagagta

SEQ ID NO: 409801 - DNA, 318 bp, Homo Sapiens
  misc_feature (27)..(27): n is a, c, g, or t
  misc_feature (187)..(187): n is a, c, g, or t
  misc_feature (262)..(262): n is a, c, g, or t
atcgagaggaaaggcgctctgtgagtntcaggaccttggtggccaggatagccatcagagtgtccaggcctcccacattaccttggatccgagcagccagctccaactgttctgcaagcagcactggagtcagggggtaggaggacaagtggaagcaaaggtgtgggactggggaagacaaagaggnacaagctgcccttcctcacttttcaaagggtcaggaatcctaggctatgatgctgggaagctagaccagcttctncaagagagactagaccagggtcaattttcttctggttattaaatcttggggttcca

SEQ ID NO: 409802 - DNA, 334 bp, Homo Sapiens
  misc_feature (81)..(81): n is a, c, g, or t
  misc_feature (136)..(189): n is a, c, g, or t
aaaggcttctcttgtttctcagtctcatagcatcatctgtctcttttttgtgacttgaatataattaatattttatatttngtccttgttgctagtttggttaatagatttccaccactagactgctcaatacgtnnnnnnnnnnnnnnnnnnnnnnnnnnnnnnnnnnnnnnnnnnnnnnnnnnnnnnttccttcccgtaccacctagtcttgcccactgtcatttttattctgggtattatatttcccaaccagttgtctgactttctcctcagatctcatccccatgggtctgagtgagttgccttgaatataagattcagtgatggtgtc

SEQ ID NO: 409803 - DNA, 369 bp, Homo Sapiens
  misc_feature (186)..(186): n is a, c, g, or t
  misc_feature (265)..(265): n is a, c, g, or t
ctgaaggccgtgagcctctctcctgtttccagcctgcaggtgccctgttgctgctcttcattccagcttctcctcacttttctctcagtctcttgagcttggaagccttactgtagcttgtgtctcctccctgggcacttgaggtcaggcttttgcctttttgtcacattgagccacatgcctttnatacacagttgtagcaaagaagggaggtgatgaacttgctcactttcttttctgatttccctccctactcatcctgcantccccaccgaaacccagatatcttatagtctaaggcttgtagagggattaagggaaaggaattggagatggggttttacttagtttcacagaaaagctttcttt

SEQ ID NO: 409804 - DNA, 285 bp, Homo Sapiens
  misc_feature (51)..(51): n is a, c, g, or t
  misc_feature (216)..(217): n is a, c, g, or t
  misc_feature (222)..(222): n is a, c, g, or t
aattacattcatacataatatggacttcagagccagtcactatttgacccncaaaagcacagattgagtcatatataatcttcaaaacatagtccagcatcgtttgtcgaaggtatgtatggcatctcttttgtaagttaagtatgccatgtcttgcagattacttgtaaaattcttacctaaaaagctgttaattttatattgcattctcccttnntaaantatatttaaaattaccaaagttgtataccacctttgagttctaatttcaatattgccaatagg

SEQ ID NO: 409805 - DNA, 239 bp, Homo Sapiens
  misc_feature (72)..(72): n is a, c, g, or t
  misc_feature (110)..(110): n is a, c, g, or t
  misc_feature (113)..(113): n is a, c, g, or t
ctccaatagcttttccaagttgctttttcccattctacaactgcttccttttgcagaaaggaagtgtctctnaccttgtatcaggagcgttaccaaaatcagctttcctncanaattatccaagttgcacactgtacttccttattagaacatatgcatcacctaagatgttccgtaaaacaaatgtgaacttttcccccacccattggttttcaacgtgaagccagatcagtgcttct

SEQ ID NO: 409806 - DNA, 199 bp, Homo Sapiens
  misc_feature (18)..(18): n is a, c, g, or t
  misc_feature (45)..(45): n is a, c, g, or t
  misc_feature (66)..(66): n is a, c, g, or t
  misc_feature (90)..(90): n is a, c, g, or t
  misc_feature (106)..(106): n is a, c, g, or t
ttgttttaccagaatgantgtttccttccctatgaactgcatctnaaatctttaggagcacatttngctcttcccacaagcatgattgcngcatggcatctttttnggctgcgtggcttcagccaggcatcggattccgtgcagccccacaaaggcacattgctctgctaaggaagaatcggctcgggctcatgaatga

SEQ ID NO: 409807 - DNA, 255 bp, Homo Sapiens
  misc_feature (116)..(116): n is a, c, g, or t
  misc_feature (217)..(217): n is a, c, g, or t
aaattatttctttattttccattgctttttcctgtcacatagccacctcacttcaagattatgctatacgtgatccaaagcataggaaattgagggaaacttgtaaattcactttnttgctctgacttcagtttgtatgtggttccaggttaataatataaaaatgacatgtgtttgccttcaaatcccaagctgtgaattgtaattcctggcaggnatttcacttattccaaaagtggtagttcacaacctagc

SEQ ID NO: 409808 - DNA, 200 bp, Homo Sapiens
  misc_feature (158)..(158): n is a, c, g, or t
gccaccacgcccagcaacagacttgcattttatggaatgattactctagtaacaggctagaggctggaatttatgcggaaaagactaaaccagaaaaccagtaaagtgctgcagtagcccagtgagaggtgacaaaaggctgaattacagccacaggngttgagattcagaggaaggaattcattataaaagttcagcct

SEQ ID NO: 409809 - DNA, 347 bp, Homo Sapiens
  misc_feature (265)..(265): n is a, c, g, or t
  misc_feature (290)..(290): n is a, c, g, or t
aagatctcaaactgttcctattttcttagccagtgagtcagaataaaccccttttagtgacattgttttctctctgcccctgttgaggaatacattgtccaagatttaatgtgaattcaccttggggatgtttttcagaaatacttgttacaatattaaaatttaagtgatgatattgaccaactatttattataatctcatagtcctaaaacaagctgtcattttttaaatgtaaaacctttggagcatattgtcttattaagnaaaaattatttaaacatatttaagnatgcagtctctgcccttcaatgaccttttttctctcaaggggaattttgaaattata

SEQ ID NO: 409810 - DNA, 289 bp, Homo Sapiens
  misc_feature (58)..(58): n is a, c, g, or t
  misc_feature (131)..(131): n is a, c, g, or t
  misc_feature (165)..(165): n is a, c, g, or t
  misc_feature (232)..(232): n is a, c, g, or t
  misc_feature (236)..(236): n is a, c, g, or t
attttacagagcttgtatttttatttgaaatattctgtttgctattaaaatgtgaganaaattaaaactcaattttgagaagtttgaacttgatactctttagcaaagctattatgtttgaaataattganctggaatattttaacccaataaggatgtattttncttaagctactggaactattccttaaagttgctcctctgaacaaggagtaaaatttatatatatganattngtgactaaagattttgatttgttattggaccttatattattgtaaaacaaaaa

SEQ ID NO: 409811 - DNA, 332 bp, Homo Sapiens
  misc_feature (81)..(141): n is a, c, g, or t
  misc_feature (176)..(176): n is a, c, g, or t
  misc_feature (270)..(270): n is a, c, g, or t
atctgccatcaatgttagagaacacagacctgttaactagattataaatttgacaacagcagctgtgatgtgtctatgctnnnnnnnnnnnnnnnnnnnnnnnnnnnnnnnnnnnnnnnnnnnnnnnnnnnnnnnnnnnnngtcacttatgatctcaaaaacatcatacctatgtncaacaaaataaaatttcaaatcccctaatatacaacattcataatagtctgatcaatttacctttccagccacatttgcattgttccctttttnccaccttaacacacacaagcctccttgaagtttcttgaaaatactgtaatagggtgttatgg

SEQ ID NO: 409812 - DNA, 306 bp, Homo Sapiens
  misc_feature (171)..(171): n is a, c, g, or t
ccttgatgtacttgatgaatagtgactattattatcacacatagtaggccttcaaaaatacttctctcttactgcacacatctctgtgttaaagtagtcacattagtgctttgtaactatttatttgactgcctttctttccagaccagtgtttccagatcttcttttttnattattattattgctccctaaggagactttttagacagttttttcctaattgcacccctgctgtgaaattgtaatgccacagacatactacggctctgctttccgtaccatatgtacatttgggcttttacatag

SEQ ID NO: 409813 - DNA, 225 bp, Homo Sapiens
  misc_feature (12)..(12): n is a, c, g, or t
  misc_feature (191)..(191): n is a, c, g, or t
  misc_feature (213)..(213): n is a, c, g, or t
ccgtgctgttantttacaatgacataacaataagatttaatgagtaccagctttgtgctaactacttttctataactggacagtcctgatcagctttaatctttaactctgaagtaggtgaacaagacagatgcagtgtcaaccctcctgaaactgacagtctttatgggtaacagataagtacccaggtnctgtggcttggatatggttggntttgtctccacc

SEQ ID NO: 409814 - DNA, 231 bp, Homo Sapiens
  misc_feature (21)..(21): n is a, c, g, or t
  misc_feature (44)..(44): n is a, c, g, or t
  misc_feature (51)..(51): n is a, c, g, or t
  misc_feature (100)..(100): n is a, c, g, or t
  misc_feature (145)..(145): n is a, c, g, or t
  misc_feature (184)..(184): n is a, c, g, or t
ttaagcactgtgatgggtgtncttgaatactgttctagtttccntaaagtngtttcctagtaatcaagttatttacaagaaataggggaatgcagcagtntattcacattataaaaccctacatttggaagagacctttaggggntacctactttagagtggggagcaacagttttattttctnaaattacttagctaattagtctttctttgaagcaattaactctaacg

SEQ ID NO: 409815 - DNA, 253 bp, Homo Sapiens
  misc_feature (27)..(27): n is a, c, g, or t
  misc_feature (73)..(73): n is a, c, g, or t
  misc_feature (101)..(101): n is a, c, g, or t
  misc_feature (138)..(138): n is a, c, g, or t
  misc_feature (173)..(173): n is a, c, g, or t
  misc_feature (202)..(202): n is a, c, g, or t
  misc_feature (229)..(229): n is a, c, g, or t
gagaatgagggagaaaaaaagaggtgnccttcagccttggaaagctctttggaacaccctttgtcagaaaggntcggttctttctctgccataatcccagncctgtggcaaagcattctcatggttgccattctcctnggcccccacccagtgaggaagattctttgagcttnctccttaaacagtctgaaccctgccacantcatgggcattgttatcttggttctgncctcccccttttccttgtgacagg

SEQ ID NO: 409816 - DNA, 242 bp, Homo Sapiens
  misc_feature (185)..(185): n is a, c, g, or t
ctttccccttggctggtcacaagtaactccggtgactgcagggccaaggtgcaggaagcaacaaagctgagtccagcccgtccttcagtcccacatgcagcgctgggacctctgggaagtcactgagacagagccgcatggaggagcggggagatatctggctggccttgggagggttggccttngtaacctgtggggaggcgaattccaggcccctctgggtttcctcgtgggtccattct

SEQ ID NO: 409817 - DNA, 336 bp, Homo Sapiens
tggatagtagccacataccaggttttgaaggtagtgattgttcctcaggggttatgctttacacagctcggatttcctaaaagataatcattacatgaagtactttaactcagtagcatttagttgtggcttagaaatgctgatatcatacactttatttttcggttctcttgtttcttactcccgtctctacttctccagctttagaatttgagtcatttaagtatgtgtttgcttcattcctgtttgggggctgatttgtactcttcaaagagttttgtcagctttagatctctgagggatagattgccagagaaggggaagtttcagtccagg

SEQ ID NO: 409818 - DNA, 305 bp, Homo Sapiens
  misc_feature (257)..(257): n is a, c, g, or t
agcctgcattttagaaaggcctgttatgctaaagcgttcatatgtatgaatacttaggttgagccccagcagtgcagcctgtctggcttaccccgtgtggtctctggtgttagggaagcagtaacgttctgttattgccacgcaattgaggagcgtgggctcagtcatttcctaacatgtccataagccaagtaggtgtgtagaataattattttgccatgtttcaaggtgtctttatattaaagagtgtgcatgtnttctgtgcactcccctcggccaatagagtggcagcctgagaattgacc

SEQ ID NO: 409819 - DNA, 143 bp, Homo Sapiens
ggaaggaggaaggggatttgtggcgctctctacctactacaagactgacaaggggagggggcacctaaatttgcatcttttcttcgtggtgattgagaactgcaggttcaaaccgatcccactgagcactggcgattgattat

SEQ ID NO: 409820 - DNA, 353 bp, Homo Sapiens
  misc_feature (96)..(96): n is a, c, g, or t
  misc_feature (299)..(299): n is a, c, g, or t
ctctggataagcccaggctagttaaaatttgaaatgacctaaaaatccagctaaaaattgaggtagggtactttttgtactatttatttgaaattncttcccttgttccctctaagccatatctatacaaagctggaattaatgttcatgtacaaaggtgcatgatctgaagtcataggatgggattataggtaaacagctgttgcttacaagcttacagttttgcttaagctatttggaagtggtacaaaaagcagttaattagttgccctttgtcatattccaaacaccaagctctnagtggagtttgccttggacatttaaatggaaacatttgcttatggaggaatatg

SEQ ID NO: 409821 - DNA, 300 bp, Homo Sapiens
  misc_feature (43)..(43): n is a, c, g, or t
ctgacatcctttcttttattggaagacaaatccaacatttgtnagacatccaacatttgttggaagtctaccttacaagaaaccacctcttatctgcaacataaacagaagctacatcaggttgaaaatccacatagaagactggagaaaattgccgtcccctttcgcactaggttttaccaggggcccaagatgtcagaggaaagtccgcggagggccaaacacaggtttacctaattatgaatctcagattagaatgtcttattgtgtggaaaagtcagaactcaggaaatgtgtctg

SEQ ID NO: 409822 - DNA, 297 bp, Homo Sapiens
  misc_feature (54)..(54): n is a, c, g, or t
  misc_feature (174)..(174): n is a, c, g, or t
  misc_feature (181)..(181): n is a, c, g, or t
  misc_feature (204)..(204): n is a, c, g, or t
  misc_feature (257)..(257): n is a, c, g, or t
attagtctagctagcaatctatttgttaattttttcaaaaaaacagctcctggnttcggtgattttttggagtgtttttgtgcctctatctccgtcaactcttctctgatcttagttatttcttgtcttctactagcttttggattagcttgctcttgcctctctagctctttnaattgtnatgttagggtgttgatgtgaganctttctagctttctgatgtgggcatttagtgctatacatttctgtcttaacgntgctttagctgtgtcccagagattctggtacgttgtctct

SEQ ID NO: 409823 - DNA, 320 bp, Homo Sapiens
  misc_feature (118)..(118): n is a, c, g, or t
  misc_feature (161)..(161): n is a, c, g, or t
  misc_feature (182)..(182): n is a, c, g, or t
  misc_feature (240)..(240): n is a, c, g, or t
  misc_feature (284)..(284): n is a, c, g, or t
ccaaaacttaacaaccaaagatccaaacttctttcaccagcagctttcctgagtagagaaacagtaattgtcagcctcataaccattaggctaaatattatgatgttaggtgtaagcngttttcaatttcagcaggcaacttttttgttcagaataatttnctcaaaagttttgagctattnttcctttttaaaaataaatatcagcaactaaactgtctaaactgatctcatatcattngctgtttaatattacagcagaatttttaattgtgtataaatgtnatttaaaatgtaccctaggaacttaaaattataata

SEQ ID NO: 409824 - DNA, 304 bp, Homo Sapiens
cccaggtgatttgtgtgcacactgaggcgtgaaagcactgctgtaaaggacaggtagagagaactgtggtggtggacacgagcacagggcattaaggagcccacagagatgggcccagccagagctgaggttcaagagaggaggcattacaagagaagacttcaagtgagaaagtaggaggtggagccaggtgaggggtcctgcagcacagtgcttgtgcagaggattcatttcagggtgcaggaagggtctcccagagaagccaaggtcagtttaggatgaggctgcagtagtgtcggcggtt

SEQ ID NO: 409825 - DNA, 327 bp, Homo Sapiens
  misc_feature (91)..(91): n is a, c, g, or t
gaataatgaaacagaaagcagagttctgtattagtattcttccatattctggtgaatatacatctatctctgtcaaaaggatatgatagtncccagctggctgggaactagaggatagctaaggagttccccgagccctcttcatcttagacaacatttcaaagtttatgttttccaaactatcctgtattagataattaataaacgcaactagatcaattatgttagaaaagttttgttttcggcttaattgttctgtttgaatctacgttttattttctggaaaaaaagttaaattagatatttagatctacaaatatggatttc

SEQ ID NO: 409826 - DNA, 235 bp, Homo Sapiens
aggagctccagagcaggaccctgtgttaacgctgtctcgctctcaggcttctgagtcccctctaacccaactttattatgtattaataataataaagctgctcaggaggctcctggagtacagctggatgcccctgccctaggaagcctgcgttctgggctgagggcgcagggccaggtggccacggggatgcggcagtcatatgggcgcggctctagcctctcagccacagaca

SEQ ID NO: 409827 - DNA, 254 bp, Homo Sapiens
tcagctttctgcacaatgatcaccagctggagaatgtggcttaacaagattctgactcctcccagtttattacctagcatggatttccttcaaaatacagatttcgtgtgaaaagtccaactgccacaaactgcttgggaagggtggatgctgacaggcagggcttttgtgaaagacgggaatgaaccctgacctgtcgctaaataggagttgtgccaaactcatcacatacattaaaaaataggaaaggattt

SEQ ID NO: 409828 - DNA, 316 bp, Homo Sapiens
  misc_feature (93)..(93): n is a, c, g, or t
  misc_feature (100)..(100): n is a, c, g, or t
  misc_feature (130)..(130): n is a, c, g, or t
  misc_feature (147)..(147): n is a, c, g, or t
  misc_feature (284)..(284): n is a, c, g, or t
agtgacttttactttatttataagcaagtgttagtgggtgttgtcatttcttttaaaaatataaattatactgtacatgctattttgtatttnggctttnctcccacctaaacaccctaaagatcatttnctgtcagtatataaaancttggtgatgccaatacccatcccttagattgtacaagcagcattttgccatgctttatcccatagcctgcctcctgcagtctcatcttttttcctatatgcgtgtccaagtaagttgtagacatttttcacttttnaatcctttcagcatacatgtcatgggaatttg

SEQ ID NO: 409829 - DNA, 266 bp, Homo Sapiens
  misc_feature (86)..(86): n is a, c, g, or t
  misc_feature (91)..(142): n is a, c, g, or t
  misc_feature (146)..(146): n is a, c, g, or t
  misc_feature (223)..(223): n is a, c, g, or t
gccagtgccaacttagaccatgactgagagctcttggtttatcttatccttgccgagctgggtgttacaacattgaagccttctgnagtgnnnnnnnnnnnnnnnnnnnnnnnnnnnnnnnnnnnnnnnnnnnnnnnnnnnnactnctcttatgataggctcgtctgtacttttttgatagaggtaaccatttgccacaccattttctgaagggcctgctctntttccccattcatttgtgatggcacattttatcctaccctaag

SEQ ID NO: 409830 - DNA, 187 bp, Homo Sapiens
  misc_feature (127)..(127): n is a, c, g, or t
  misc_feature (157)..(157): n is a, c, g, or t
  misc_feature (177)..(177): n is a, c, g, or t
agttaatccactctgagaaccgaccctaacacttagtgtttttctacatcgtaaatgcagacccacatctgaaaagagcatcccaaaccccagctaacccccagggtcccagagagtgaaggatgtntgccgagagcctccgtgccgtgcagcgcantgttgaaacgctgtttgttnaatgctttgg

SEQ ID NO: 409831 - DNA, 459 bp, Homo Sapiens
  misc_feature (345)..(345): n is a, c, g, or t
ccaaaaccgggtacttcttagtcatgttgagctttgggaggtgtctattttctccagaagaagaggacaaagagatgcaccatatttcttaaagtcctggataggaagtttgagcatctgtttccctctatccatagttcattcacagtggtaacttcagcagtcatccagcagaactatatagtgtccccatcatcttcaggtgctctgaataagtagtgatttgggctgctagaaagatccttgggtgggctggcagtaacacatcttccagtaatcattactagaagtgtcagcctaggtaaattcatgttcatctgggaccattttctcttactttgcttnaaatttaacccagatcttaagatccaagtgttatattggaacattggtgaggtacagcggaaatttgaagaggtgggaaaaagttttcctttccacccttacagagacaacacg

SEQ ID NO: 409832 - DNA, 400 bp, Homo Sapiens
  misc_feature (177)..(177): n is a, c, g, or t
  misc_feature (208)..(208): n is a, c, g, or t
  misc_feature (210)..(210): n is a, c, g, or t
  misc_feature (299)..(299): n is a, c, g, or t
  misc_feature (349)..(349): n is a, c, g, or t
  misc_feature (355)..(355): n is a, c, g, or t
ctctatctctgttctcaggaatccagttctcaaggttaatagaattggactatcccataattaccatttgtttgatctcgttacacaggcagcactaacaccagaataacactgatgttgccatcagcagtcacacgactgaaacatgaggactgccctgcacgtgctgctccgcancttgctgatctaacggccgcgcccgcgtctntngcttgagtcaccacggctgttacatcccgtgctctcccttctctgccttcttggtgttggttctgcgggcgactgcccatgtggccctnagccccatcctctgttcatggctcttttgccaatctttgttgtccaaagntctttnttctgtaggttccatgggaagagttcatggggaacaatgattctt

SEQ ID NO: 409833 - DNA, 308 bp, Homo Sapiens
  misc_feature (58)..(58): n is a, c, g, or t
  misc_feature (103)..(103): n is a, c, g, or t
  misc_feature (184)..(184): n is a, c, g, or t
  misc_feature (246)..(246): n is a, c, g, or t
caaacagcgaacgtgaaccatgacctagacgatgtccatttagacacggatgattgangggttactatactgtggtgaccgctggcattgcttgctacccgtntccaactctctgactacggcacacagcaggatggtccctctagcattgggtgggactgagcaactggctctgaccattggnttgtgagcagaggcaatgtgtgttgcttccaggctagagcttttaataatgccatgcaaagntcctccagagcattcatccctctgccaaggtgaccagcaatgttccagatggcagtcacact

SEQ ID NO: 409834 - DNA, 240 bp, Homo Sapiens
  misc_feature (170)..(170): n is a, c, g, or t
aggagctgggcagtgactccatgagcgaggccccgcaaggagctgctttccagtgggagcgaggggtagaccggaagagggttttacagaccaggggtaacgtccagccccacctcggagctgggcaaggggctgtcagtctgctaggcccgcagaggaggcctgagttngcaggagatatggtctccagtagccaggcagaggccttgctctgtggtcctggggcaggccctgaatagg

SEQ ID NO: 409835 - DNA, 196 bp, Homo Sapiens
  misc_feature (26)..(26): n is a, c, g, or t
  misc_feature (35)..(36): n is a, c, g, or t
  misc_feature (48)..(48): n is a, c, g, or t
  misc_feature (92)..(92): n is a, c, g, or t
cagagtggtatgcagagatgtaaagntaaattttnnttaatgaatganataagttattaacacatatcttggggccaataagaaagggcctnttgtatccactttgctattctttgtggtaaatgcagtacattgagagaatagtggaaaattaggctacggagagattagagaacaaatttagagatttgagtga

SEQ ID NO: 409836 - DNA, 222 bp, Homo Sapiens
  misc_feature (41)..(41): n is a, c, g, or t
  misc_feature (166)..(166): n is a, c, g, or t
caagctcttgttgagaaaatccctgttgaaacttctcagtntcaaaagcccaggtatcacaggatagagtagcaatcagcaaccaaaccatgactgtatgtggagatgacatattcagccccagataatgtattcacatgagtgaagggtggagtcattgcctgtnagattctacagtcatttggattagagagggcaatacagagttaggtgctactgaat

SEQ ID NO: 409837 - DNA, 241 bp, Homo Sapiens
  misc_feature (47)..(47): n is a, c, g, or t
  misc_feature (171)..(171): n is a, c, g, or t
  misc_feature (216)..(216): n is a, c, g, or t
ctaagtttgcctcaccagacgctactctacaaaatgtagggcatttntcctactgccacctataaatagcacaggagcggccatatgtgctgctggaaccaggctttctcacagagagccctgggcacattccagaagtgagtccttctgctaacctagcaccactcagtnccaaacatgaagtgtcccgttaatgccctgccagtacagggtatnccagcttccagtagggcttttacgg

SEQ ID NO: 409838 - DNA, 428 bp, Homo Sapiens
  misc_feature (13)..(13): n is a, c, g, or t
  misc_feature (96)..(96): n is a, c, g, or t
  misc_feature (100)..(100): n is a, c, g, or t
  misc_feature (136)..(226): n is a, c, g, or t
  misc_feature (245)..(254): n is a, c, g, or t
  misc_feature (317)..(360): n is a, c, g, or t
atttcgccatgtnggccaggcagttctcaaactgctggcctcaagtgatctgctcacttcagcctcccaaagtgctggtgttataggcgtgagctnctgntgcctagccagcaattgactaattttaaaatattannnnnnnnnnnnnnnnnnnnnnnnnnnnnnnnnnnnnnnnnnnnnnnnnnnnnnnnnnnnnnnnnnnnnnnnnnnnnnnnnnnnnnnnnnntcaccacacacggctcaannnnnnnnnnggtattttagtagagatggggtttaaccatgttgaccgggatggtctcgatctctcgacatcnnnnnnnnnnnnnnnnnnnnnnnnnnnnnnnnnnnnnnnnnnnnacgagccaccgcacccggccctgccagtttttttaaatagggaggtttcacacagaatgtgctctttg

SEQ ID NO: 409839 - DNA, 370 bp, Homo Sapiens
  misc_feature (188)..(188): n is a, c, g, or t
  misc_feature (277)..(277): n is a, c, g, or t
  misc_feature (317)..(317): n is a, c, g, or t
aaatggtggaaataaagattacactaaggtgcttatagcctagcaagggacataacattgccaagaagtataaagtctgaggtactccgagatagaaggaaaacaatccctttttggtggtaggaaagatttaccagttttaagctgagtgagaaagggcatgagtagagctttggcataatcctgantttccatatttacatatagaatataaaagagaacagagtcaaggacgtccccaaggttttttggcataggaaactgaagaatgaagttntcattcactgaatataaagacagaggagcagggtattttntagccagggtaaagttgagagctctgtctcaggcatcttcaatttgaggatga

SEQ ID NO: 409840 - DNA, 244 bp, Homo Sapiens
  misc_feature (46)..(47): n is a, c, g, or t
  misc_feature (156)..(156): n is a, c, g, or t
  misc_feature (173)..(173): n is a, c, g, or t
  misc_feature (196)..(196): n is a, c, g, or t
  misc_feature (224)..(224): n is a, c, g, or t
tgaattcaaatttaatctttattctgtggccagtagaaatccaatnnaatgtttctagcaggaggggacaccaataaaagctgctctctggagatgaatttgacagtgtctgcaggatggggtgaaggaaaaagaactcagagcatgagtccaggngtcactggggtcaaatnatccctcgtgttcaaggcacatntctgcccagggtagaacagagccttttnccagcataacgcatcttttt

SEQ ID NO: 409841 - DNA, 285 bp, Homo Sapiens
  misc_feature (228)..(228): n is a, c, g, or t
gaatttccttatgtttcttaatatttgatccttgatagtctgtacagtggaaaccatttccctctgtgatatccttttttgccaacctatatgaatgtgtttagcgtcacttcagatatagagttcaagctcaagtatacacagcacatgaaagatcctatagttcatgttctcttaggttgaattttcttttcataattttttatgattgaattctaagggtatgtnccttggtaaattgtgttaattatgtccactttataatggatttaacaattttaccaa

SEQ ID NO: 409842 - DNA, 362 bp, Homo Sapiens
  misc_feature (73)..(73): n is a, c, g, or t
  misc_feature (301)..(301): n is a, c, g, or t
  misc_feature (331)..(331): n is a, c, g, or t
atttgtgcctagaaaaataaagaatgatgtgctggtgaatcttgggtcacctatgtactatactataattganccttacctggggacccacacgttcaggctcaggtgttttgtttcttagagcctttgttaagtttcctacgtgtgcgacattcctaaggtcttcaagtttcctattctgttttgtgctgtgtgaaagttctgatatgacccctgatgataaagtccataactgtagttaactggtcatcactgctcaggtcccagttactaagaagactaccaaaatggcatcatcttnaatcttgaagcgtatttctgacattcctgnaaccgttcaacccttatgaggttttatagga

SEQ ID NO: 409843 - DNA, 190 bp, Homo Sapiens
ctttattccaatctgagtagagagcagagaccttgagccatcatggaatgcagaagctgaaagtacctggggagttcagtaaattttgactattttcctcagttgaggaaaatttacctactaactggcatgatgtaactacttaagcagaggagagttaccgcttagctatacataagaacatgctttt

SEQ ID NO: 409844 - DNA, 198 bp, Homo Sapiens
  misc_feature (72)..(72): n is a, c, g, or t
  misc_feature (120)..(120): n is a, c, g, or t
  misc_feature (128)..(128): n is a, c, g, or t
  misc_feature (148)..(148): n is a, c, g, or t
  misc_feature (153)..(153): n is a, c, g, or t
taataaataagaaagatgcactactctcactataactagagttgaggagacaggctcagggacatccaagtnttcagggcaaggtcaggtagctaatcaatggtggagctagactttganttagggtnattggctctaagttccaggnttttntcattttgacacttttttctgtctataggacaaatgctggagaca

SEQ ID NO: 409845 - DNA, 280 bp, Homo Sapiens
  misc_feature (22)..(22): n is a, c, g, or t
  misc_feature (30)..(30): n is a, c, g, or t
  misc_feature (230)..(230): n is a, c, g, or t
ccaaggagaagcagcctatggnccgctganggccagagacagacagcagggctcaccagacattctccagaaagtgccaggcggtaactgttttaggatttgcagttcatagtctctctgtcactactactcacctctatcattctagcacaaaagcagctacagacatgagtaaaccaatgagagtggctatgttccagtaacactttcaatcttattagatgccaaanttggaattttacatagttttcatgtatcacaaaatagtttcttctttggg

SEQ ID NO: 409846 - DNA, 319 bp, Homo Sapiens
  misc_feature (292)..(292): n is a, c, g, or t
gggaaattgaaaatctcctgtttgaaagccagataatttaaaatcctttctgattcagaatctcagcaagtagtgaagggctaggttattgattgtgggaaatggggcagcctcaaagggctctgggctatctcagtaccccatctccctcacccctcacgcttcctcaggtttctctctcatgctagcttggaatggatggtgtatttcctacccagttgcctttgtttataagcatccaccaccgctgcagtagggtcaggaaactggcaatttcctcagtgatccttgncccttgaaccctatctcctccagccta

SEQ ID NO: 409847 - DNA, 307 bp, Homo Sapiens
  misc_feature (46)..(46): n is a, c, g, or t
  misc_feature (89)..(89): n is a, c, g, or t
  misc_feature (198)..(199): n is a, c, g, or t
attaactggaaatgtgaaagagcttgttggatatacaggtcaagantacaaagcgaatttgggccacagagaaacatttggtacttttnagcacaagatgggggcaggtttgcttacaataagtgtacaatcagaagagaagaggacccaaggctataggttctaaagaactttaacatttagaagtcaaacataggnnttcacaaaagataccaaccttctctggtcagctctaaatgggcatataataaactatcacggggactatgtaaaagcttgcatagtgcttgtaatattcaaagtactc

SEQ ID NO: 409848 - DNA, 135 bp, Homo Sapiens
  misc_feature (16)..(16): n is a, c, g, or t
  misc_feature (30)..(30): n is a, c, g, or t
  misc_feature (102)..(102): n is a, c, g, or t
  misc_feature (110)..(110): n is a, c, g, or t
cacaaaactgcctcantctatgagagactntaaagctaaaagaaaactgcagagcctcagggctaggcggcctggcaggcacacactgacagtgcgctatcntgaatgtnacctggtcttggagattccatcaga

SEQ ID NO: 409849 - DNA, 398 bp, Homo Sapiens
  misc_feature (340)..(340): n is a, c, g, or t
  misc_feature (375)..(375): n is a, c, g, or t
ctgtgatctttcccaatattgactggggtttgttgagtgtctgtaatcccacaggtggatgttcatgatctgaagtgacaatggtatatttgctcagcatttcctgtacctgaaacaacccttgaaaactgaaatagaaagagcaagtcaatggtaatatcatccagcactctgccaggcttatggcgaccttgcttacccgaaagcaaattacttccctctcatttctatataataagtactttacggctttgtgttttcatgcattgagatttccctaggagtctgagaagatgtccaggaataaaagagggaagaacaatgattaaaactatttctnggactttagacattgggattatattcagaaacccntaatcagaccgttaatggaatgt

SEQ ID NO: 409850 - DNA, 418 bp, Homo Sapiens
  misc_feature (328)..(328): n is a, c, g, or t
  misc_feature (371)..(371): n is a, c, g, or t
  misc_feature (375)..(375): n is a, c, g, or t
  misc_feature (385)..(385): n is a, c, g, or t
atgaagactgtttcaagttcgaggatgggcaaaaataatgactaggacttggctcaagattcctcaaacagccaataaacaatgcaaagaataaatgagagagtaattggagacaagctttcccttggcttcccttcttttctcacagaggcttttccagaaggtggtcatttccatagcccatgtggaatgagatgtccactagggcagagaagcacagaaccgtgggcactgcttcccttcctttaaccctatcatattgctgcccagtgagcaatatggtcattggtcaagaaggcttatgcccaggtatccctgtgggctatgnagcattgctccttatctatggcctctggttctttagacttttncccnttctgccctnttaggggccttccgggccatggaccacaatacc

SEQ ID NO: 409851 - DNA, 363 bp, Homo Sapiens
  misc_feature (83)..(83): n is a, c, g, or t
  misc_feature (100)..(100): n is a, c, g, or t
  misc_feature (136)..(136): n is a, c, g, or t
  misc_feature (211)..(211): n is a, c, g, or t
  misc_feature (241)..(241): n is a, c, g, or t
  misc_feature (338)..(338): n is a, c, g, or t
attcccattaaaatctacttgttggggtttggggcatgtattagcccacaatatcaactccaaacactatctacttgttcggngttgaagtgagtaatgntattggattcacttggcagataaaggaattcttgtnctgtttgagttatgtaagatgaggatttaaggttgaatgcttttattcaactgagtaagtaatatcgagcatttncttctatcagatcatgaagaaatatttgantcagcaagtcatttctctgatctctgttctcactatgatttgagtagttatatgtttcacatttacattacttaatatctacaggaaatgtattttnaatacagagtagttgattattaaaa

SEQ ID NO: 409852 - DNA, 345 bp, Homo Sapiens
cctaggcaaaccagatggaaactaaatcgtttctgcagaatgaacgatttgtgaaatcttggcaaattgaattccaaatatacttagagatgatcttgactttctctgtaactctaccacaacatgcaatgcatttaaggcctacatgggaaatacactaattagttgcataacctttatgcagaaatgaatgagaacagaagatcaccatcaaaggaataaaagtcagtaactccgaaaaagaagtaatatgcagatgggacatcttcactaagaaagtatgagtttaatgtagatattgtgggaggtattcccttgtcatctttgaattggttctttttaacc

SEQ ID NO: 409853 - DNA, 168 bp, Homo Sapiens
tgatcataatagtttattcaaggaagaatcatcactgagtgaaaatttaggaaggtaaagtatgtttttcattgtctcatagcacttccactccatatggtttattaattgcaaagaggaaaaagtgggtaactttaacagtaggaggaaaccccagcaggtcctccc

SEQ ID NO: 409854 - DNA, 224 bp, Homo Sapiens
  misc_feature (34)..(34): n is a, c, g, or t
  misc_feature (211)..(211): n is a, c, g, or t
ggggtgtgcacagatctggaaacacacacacgtntgcacacatcaacacttgactttttgcccagctctgccgtggccgaggttgcaggacaagcagtagacagggctgtgggctcctgttcccatccagaataatagggcgacagggaaccctgcagccagcttcagggaccactgcccaacctgacatgcagctggggtcttccctctntggagatgaagtt

SEQ ID NO: 409855 - DNA, 384 bp, Homo Sapiens
  misc_feature (70)..(70): n is a, c, g, or t
gtcaattccaagtgcaatatttacaaagtccaaaaggatacagagtttatcaggtggaacagaaattttntctggtctttagaaggaggactgacattaccacgccctgtctccttactcagagggacgctccgttcaattttcccataaattgcctggctgcattttccaattcagtctcctacgccttcctaaaggcaattttaagactaggtggctgccaatataatataatttcggtggaaacagaaaggcccacctgcctgaaatcttcactcagtggctaggtcatcctctctagagggctacaattaaaattaatgtgttatatttgggcactggtgtgcattcatttgtctgaggaattctacagttcagaagaca

SEQ ID NO: 409856 - DNA, 275 bp, Homo Sapiens
ccttcagttagtgcttttttctgactctgaagctggtgctataatccactctgtcatactgtctttcttcagtacttcttgaatccttctccttttcttccatctcaacaaaccttgattcaggctctcatgatctttcatcaaacttgttaggagagcttcctattagtctatttctatttcctgtatccgttctctctcacacacacattaacacatattttactatgggtacttcccatatttaacatcgtctaattggcaaggcttggtgg

SEQ ID NO: 409857 - DNA, 356 bp, Homo Sapiens
  misc_feature (163)..(180): n is a, c, g, or t
agtggatgaggcccctcataccagcagatctttccatagtcctcctgtagaaacaccaagtgtctgggtatgccttgtacagtaagttcttggaacctccccagaccctctcactgcactttggacagtgagtggcagagtgggtgggtgtttggtgtttggnnnnnnnnnnnnnnnnnnagactgatcgctgcccattatgagtccccattactgactccaaaatagaaaagcttgtggtcagtcaggaaaatgatcatccagcttttttggctcttgaccctgactcctgtcaactaaattaggggcattaggcaagatcttgtttcaccatctgtacaagtgttgggaattat

SEQ ID NO: 409858 - DNA, 387 bp, Homo Sapiens
  misc_feature (21)..(21): n is a, c, g, or t
  misc_feature (48)..(48): n is a, c, g, or t
  misc_feature (52)..(52): n is a, c, g, or t
  misc_feature (111)..(111): n is a, c, g, or t
  misc_feature (137)..(137): n is a, c, g, or t
  misc_feature (176)..(176): n is a, c, g, or t
  misc_feature (246)..(246): n is a, c, g, or t
  misc_feature (335)..(335): n is a, c, g, or t
ggcagggctatcatggacctnttccatgaagaaagagacacagatctntctntggaaaggtgcaggctctgctgcaggaggaaaatggcaacaagaagcccagttggtganttgatgggactccgtgcagccatctngcgtggccaccgtgaagtatggaccagcccaggtgagtntttaattgatgggactctgtgcagccatctcgcgtggccaccgtgaagtatggaccagcccaggtgagtntttagttgatgggactctgtgcagccatctcgcgtggccaccgtgaagtatggaccagcccaggtgagtgtttagttgatgggactctntgcagccatctcgcgtggccaccgtgaaagtatggaccagcccaggtgagtt

SEQ ID NO: 409859 - DNA, 227 bp, Homo Sapiens
tatccccttatgtatacccatagtctagtacaaacctgggtaatcaataactatctgtttagaaagtgaatgaacgaatgattgggagtgcctgcaagacctatatgttttaagtaatttagaatgaacataaagatcttgtatgtttctggaacattctactcaaaattggtgatatacttgttttctggaatcttattcagttaagcagtaattttccttttttt

SEQ ID NO: 409860 - DNA, 394 bp, Homo Sapiens
  misc_feature (34)..(34): n is a, c, g, or t
  misc_feature (158)..(158): n is a, c, g, or t
  misc_feature (255)..(255): n is a, c, g, or t
  misc_feature (273)..(273): n is a, c, g, or t
  misc_feature (342)..(342): n is a, c, g, or t
  misc_feature (347)..(347): n is a, c, g, or t
cagcaacctgcagaacgatattagggtaataggntccacgtatctggagtctgcgaaggaggatggagaacagtatcaagcagcctgggatccacgtatttggagtctgtgaaggaggatgaagaacagtatcaagcagcctgggatccatgtatgtncagtctgcaaaggaggatggagaacaatattaagcagcctgggatccacgtatttggagtctgcgaaggaggatggagatgggtgtggaaaggagtnttatagaaaaagtatgtnaagaaataatacccaaacattttccacatttgatgaaaacttaaaacccacatttccaagaaaagcatngatgnaaaaccatggcaaagcccttaccctaattcaaattgctggaaaacta

SEQ ID NO: 409861 - DNA, 388 bp, Homo Sapiens
  misc_feature (92)..(92): n is a, c, g, or t
  misc_feature (201)..(201): n is a, c, g, or t
  misc_feature (253)..(253): n is a, c, g, or t
  misc_feature (275)..(332): n is a, c, g, or t
gagaaaagcaatgccaacttaaatgtctgtggccccacaattcacaagcactgtagcactcatcctcagtggctttatacgtcctctgagangcacacaggcaggcatcattcttgccatcattccgatggtgaaatccctgcatgcagaactcattgacttctcaaagatgttacctgttccattccactaatacatgtnttctctaaagcagtgtctttatgacctagctgcatatacttacatttctganttcagagtaatttcagtacatnnnnnnnnnnnnnnnnnnnnnnnnnnnnnnnnnnnnnnnnnnnnnnnnnnnnnnnnnnacattacaattgtccacttaagcaatcagagaaaattgcttaaaagcttctttact

SEQ ID NO: 409862 - DNA, 366 bp, Homo Sapiens
  misc_feature (106)..(106): n is a, c, g, or t
  misc_feature (108)..(108): n is a, c, g, or t
gagggccctacctggggatttccaggtcatattcttgcaggctgtggccacacaacacttcaggaaggtgaatgagccatagcagctgatgcattgattagatttntnctttatgttgccaggcccagaagaacccagcagtaatctaaaacattaccttatacctagaatggcccaaaccaacagcaggcaatccacatcagcaggaaatccagcctgcctctctagccctgactttggaatgtggaacttaaagcacttcctatttcctttgagttgcagcagatcctttgctttattattattaggggcacttacaattgagtgtatggccctgggagacatggctttacaagcacgctgttg

SEQ ID NO: 409863 - DNA, 420 bp, Homo Sapiens
  misc_feature (35)..(35): n is a, c, g, or t
  misc_feature (388)..(388): n is a, c, g, or t
  misc_feature (397)..(397): n is a, c, g, or t
gcggttctgagctggcattacctgcagcagatggntcactggacagcgagtccggaaatcatccttctccaccaagctttcccacttaatagcttggtaacctttgacagatgatttctttctttcctaatttgtagcatggggacagtgagggatacaacagcagtttctgaaacagcagtgaccaccatttactgcatttaccccaggccaggcactgtgtgtgggcatggcatttaatcccggtaacactctataagataggggctgttatgacctcatttctccgatgaggaagccagggctcagagaagttgaaggcatgagccccgttgttatgaagtcattagatagtagagctggggatttgaaccccagaggcccactntaccctttnaggccatggttggttaattttga

SEQ ID NO: 409864 - DNA, 174 bp, Homo Sapiens
gagtgttggggctgcctggcttgaaacctgccctcctgtcttccttgggggccagctcaggtctgaggctcttggctttagtctctgatttgcatgtcatcatcagggacgttgttgcgtcccatcagggccaatggtggtccttgtgctgcaggccagagtgtcctgtgtgtg

SEQ ID NO: 409865 - DNA, 393 bp, Homo Sapiens
  misc_feature (29)..(29): n is a, c, g, or t
  misc_feature (35)..(35): n is a, c, g, or t
  misc_feature (286)..(286): n is a, c, g, or t
aaaacttggaagaaagtctaacgatcgtnctcgcntcctccttcctttccacctcacagtagtaactgttcattgctttcttctttggatttcatgtaaatcagtgaatatgtaggcggacccctggtattccccacatggatgagtggaagcttcctgtccacttacccactgcctggcatctccacgtagtcctgtgtcctccttcaccccatcgcggtattatggagacacttttttcattccgttttgatagtaactgaaagcatcagcacacaagcaggangtgaagttaccagagtcttttccccgcacatgcctatggagtcataaatgaccaggtggaagacaacagtggatgaggagacccagtgtacggtagcagcaaacaag

SEQ ID NO: 409866 - DNA, 372 bp, Homo Sapiens
  misc_feature (348)..(348): n is a, c, g, or t
tctaaccctattatagcagtttctcaaactcttaaaaaatggaaaagatgcctgtagtgtttaatgttatgcctcaaagcttacttttcccccagttttcttttacatcaatgcaaagcactctttatgagcactaaatgtgggtaaaggtacaagtcagagagcacctgtttagtatatgtggcattttaaattgagtccttttggggtactagtctatcaagagagacacattttcttatccatgtcaattttgcttcctatctctctcccccatggcctttcacttgggaatgacaacagttgacattaaaaaagctgttggcaggtatgggaataaccttattnctgtttaccaaataggcaaagacc

SEQ ID NO: 409867 - DNA, 340 bp, Homo Sapiens
  misc_feature (183)..(183): n is a, c, g, or t
  misc_feature (210)..(210): n is a, c, g, or t
  misc_feature (212)..(212): n is a, c, g, or t
cttgattagacttatttatttgttgaaaagtctgtgtggctggtgtgtggaaaataaagaatggattgaaaaggaactcaagtggagcatcaagactcagttaaggagttaatctaggttggaaataattgtagcttaggcctggatgctggcaatagggaaggggatggattcatgaaagantgggatacttgagaagaaatatttctntnctggagaagtagattggggagttcatggcataaacattataatggatgctatgggcatagataacataaacatgtaggagaaagttaaaggtgacctagggcagaagccttagggaacaccaaagttt

SEQ ID NO: 409868 - DNA, 220 bp, Homo Sapiens
  misc_feature (97)..(97): n is a, c, g, or t
  misc_feature (123)..(123): n is a, c, g, or t
  misc_feature (177)..(177): n is a, c, g, or t
  misc_feature (193)..(193): n is a, c, g, or t
  misc_feature (199)..(199): n is a, c, g, or t
gacaggctgcgctggggtcagggtggaagcccgcggggccagcggcgttgagggaaggttctccggaagcagccgctgttctggcttggcgcaagtncgtgtggacgacagcaggatttcctncccagggacatctggataagaggcccaaggttcccaggagcccccaggtgcttntgccctgtttggccanagcccnctcggccaggagttagaagct

SEQ ID NO: 409869 - DNA, 529 bp, Homo Sapiens
  misc_feature (271)..(271): n is a, c, g, or t
  misc_feature (281)..(281): n is a, c, g, or t
  misc_feature (318)..(318): n is a, c, g, or t
  misc_feature (412)..(412): n is a, c, g, or t
tgttggtcccttgagggttagagatgccagtctgtccttgataaaactgcagctttcattagtcattgtgcaattactttttgtagccagaatcgataaagcttttaactcctggacaatgatgaagctgccttttgaatcgttttttctcttctttgtggtttttgcttttgaaaactgtagcttaaccagtgtctatttcctgctgtcaccaattaactattttttaatcatctgcttttacttcagttaatagatggttaaaaaaatnaatctcattnaggcactagtgtctggccgcagacgtggctccagatngaggcctcgtggaaagagcagagggagggtctcaggatgacttctagggaaagtaggggaaggaagttacagcctaagtgctaagtaggagcantaacactttgctgcggatctttataaaggtcccttcatttttataatcagctcctcagacagtagtaaccagtattttccattttaggggtaaaagtcagagttagaggaaattaag

SEQ ID NO: 409870 - DNA, 256 bp, Homo Sapiens
cattcttctaacatatatttgtagaaatctgatgattatgtccaagaatggattctaagggccttagaatttgatttgactgggccaaatttatcagtctaggtgcacttaagagaaactttgaattcagtggtttacctagagcagctggaagtggctctatttggttgaagaactaaaatcttggaccaaaaaaatggcctcctttaaacagaattgctttccagaatataaaagaaggaatccaaagtcttag

SEQ ID NO: 409871 - DNA, 329 bp, Homo Sapiens
  misc_feature (149)..(149): n is a, c, g, or t
  misc_feature (185)..(185): n is a, c, g, or t
gaccaaagagctacctctgagctagctgttacattaagttgagaaagtttcccagcagcttattgactgggtaagcagttgttcaggattgcttttcattgttgggttttggagtccacaggttagtgtgcaggagagtaaggcatgtnctggctctctttctcatttgagtgagggtgcttttnatttttttgtgaattgttctgtagtttgaagaatctagaaggacaggctatcaacagaggcagtctgcttaagcaaggtcgtcttggagtcctttctaacaatttgatgagcagtaaacctctgcaatcctgtctaatatttgt

SEQ ID NO: 409872 - DNA, 263 bp, Homo Sapiens
  misc_feature (101)..(101): n is a, c, g, or t
gaaataattatccttggctacaaatatcaataacaaaggtcacaccagtccgaggttggacaggcagttgctaggcagatgtctttgcagaagtaattttngtgtgaggttgcagcagcctatgtgcaaggttgtaatttttgcagaatcttttgtgatcatttttggtattaggcatacaagcatgagaatcccctcttcatggcctccccagctctatttgtcatggtttgtttttttaaaacactagtgactctatttga

SEQ ID NO: 409873 - DNA, 361 bp, Homo Sapiens
  misc_feature (36)..(36): n is a, c, g, or t
  misc_feature (66)..(66): n is a, c, g, or t
  misc_feature (327)..(327): n is a, c, g, or t
aaactatgtagggaccatgtgggattcatacatggnctggcaccctgtccctgttttgggaatgtnagtaggacagtggttctctaccctcaaaatgactgttggtctggtctgttcatgttcagaaggtagccataggcttcatcttagagctggaaccctttgaatgagtggtaggctccctttcctgtttgtatctttgggttcacataaagtatagacctactttagaactcaaattggtggcggaactagctccttaaaacgcagctggttagcacattgcctcatcctaacaggcctctgcttcccctatgtccccttcgnttatattagctgccctgtgcccattctatcatgt

SEQ ID NO: 409874 - DNA, 245 bp, Homo Sapiens
  misc_feature (26)..(26): n is a, c, g, or t
  misc_feature (29)..(29): n is a, c, g, or t
  misc_feature (95)..(95): n is a, c, g, or t
  misc_feature (99)..(99): n is a, c, g, or t
  misc_feature (121)..(121): n is a, c, g, or t
  misc_feature (225)..(225): n is a, c, g, or t
gacagaaaggagtccctgcgaccgcntanctcctgcagcgccccctgttggcagagtcgtagcgaggccgagatgaggtccgtgacgtggctgcntganatcccggctgcctgtggatgantgggcgtggggctgagaggcgacaacagtggggagcttgctcagcgatcctgggcttctcgggtcaggccaacttcagtccgggctggaggccgtgcacaacancaagcgcatggtggggtcct

SEQ ID NO: 409875 - DNA, 315 bp, Homo Sapiens
  misc_feature (85)..(85): n is a, c, g, or t
  misc_feature (268)..(268): n is a, c, g, or t
gaattattggccattgctctagcttttgcttgctggatttgaactgtagtcattttgctgtcacctgcctgggacccgagatagnccacacacctgtggaggcagagctgagagatggagaactgaattctgattttcctttttggaacctgaatccagtagtggttgaagttctattcctgaccttttgacttcctcagcacttttccctcccctctttagcttaagccaattggaattggtgcttctgtcatctgtcacttgggantagaaacaacccaagtgatacacaccaagtatctgtaagtccaagtt

SEQ ID NO: 409876 - DNA, 417 bp, Homo Sapiens
  misc_feature (37)..(37): n is a, c, g, or t
  misc_feature (95)..(95): n is a, c, g, or t
  misc_feature (129)..(129): n is a, c, g, or t
  misc_feature (347)..(347): n is a, c, g, or t
ggaattcttttgtacatacattcaggttaggccagtncagctcccacccctgctggtggaatttagatcccgtgatgtgagtgtggtgttttctnctcctaccctctccccaccatcaatctatatttnatcacttgcaaaggtggttgtaaactaagacaaaatgaccaaatatcacacattcagatttatgctaatgaaatgtttagatataatcttaccctttttttcttgtgaaatgattgatttctgagccttgggggtctggttccattgaaatacagcaggacccttcatatccttttggagagaatgaagatgaacccttgcagaatagaacatccttnaaaattggtagctaaggccagggtttttaatgtgtttttagagcaaaagttttcggcaaatttgctttgc

SEQ ID NO: 409877 - DNA, 290 bp, Homo Sapiens
  misc_feature (268)..(268): n is a, c, g, or t
cagcagtggtttcttccctgtctatggatccgtggacaacctctgaagatctcttctttaccatccttttggtcttctccagagccaccctactggggctagaccctattctcaaagtaccattcctctagtatccatttgtacttcatgacatttccaaaaaaagtcctatgtttgcaatgaaataagaaagtggctgggtgagggtcggagggatgagctggtatgtgtcattgcttggagaattgacctaccaaaggacttccgngttgctttggccagtcccagag

SEQ ID NO: 409878 - DNA, 270 bp, Homo Sapiens
  misc_feature (69)..(69): n is a, c, g, or t
  misc_feature (101)..(101): n is a, c, g, or t
ggtgcggtacttgagcctgtgagtgtgtggcccacttcctagcagagtggaacttgcactacttctttntcatgcttcaaaatgcaaaaccatgaattggntctcatcaagtcataaatctggcagtgtgtcctcaatttaaagcagtcctaagtgagccattgtgccagtcctgaatctgtggatttagagaggctttaggcctcttcttccctctgtttgtcccagtattattagtcaatacattgctttcattttctggcacttacc

SEQ ID NO: 409879 - DNA, 442 bp, Homo Sapiens
tctgatttaaatactgcttttattgagtttgaagttaacagttgtttttaaaacattttaatgaaaataattgacatgtttaataattaggtgagttgatctcaccttttaatcaaaagatgagctatttcccccattacgcctaacgtgtagtactccatcctccaaatagttgtttggattattctaaagcattggagatgaactttctaaaaaatcatctactgcagcaaaataaatctttcctcttcagagctttaccctcgtagcagaaaaggatgtagcctgccttaagatgtattccataaagcacagatgctgatttttatgagctatttgtagcttgggctttagaggttccaagagtaggtgcagcatgaaaacaaaaacgggaaagctgaggaagacaactggaagataagttatgactagtgggattttc

SEQ ID NO: 409880 - DNA, 218 bp, Homo Sapiens
  misc_feature (124)..(124): n is a, c, g, or t
  misc_feature (129)..(129): n is a, c, g, or t
caactgctctggagcctcctaggctgactctgctggagggtgagacaagcagattcccattgcagcactggtccctggggtaccctgaacggctgtgctctccacccttgtatcggtgagtggntcttntctacatcagccgtaagcctagaagcagagcgtgattgaggcgtttttaataattcgagttggggaagacccggatggttcatcaaaat

SEQ ID NO: 409881 - DNA, 263 bp, Homo Sapiens
  misc_feature (141)..(141): n is a, c, g, or t
tccaggtcctcaaatgctcatgacagatagttcagttgatggcatagcctccgagaaacagaagggcactctgaatctactttctgtaaaatatcagttcaaaaccatcagctcagggcttgtatatgcaggctgcttgtntggtattctactaaacacctatcttttctgcaaagttgaccagctttgctttgtgggcaaaaggtattcattttcaaagagctaagacacaaattgatgccatctaaagtgaatttccttag

SEQ ID NO: 409882 - DNA, 152 bp, Homo Sapiens
  misc_feature (87)..(87): n is a, c, g, or t
  misc_feature (92)..(92): n is a, c, g, or t
  misc_feature (115)..(115): n is a, c, g, or t
  misc_feature (117)..(117): n is a, c, g, or t
ctcccccgccccccatagtctttcgtcattcacccactgagtgtttggggtagagacttgtcccaaagatgtcttctggtctttggnagagnccctaaggcttgagccctggttngngaggaaacagtaagactctgctggagctccctgcg

SEQ ID NO: 409883 - DNA, 332 bp, Homo Sapiens
  misc_feature (106)..(106): n is a, c, g, or t
  misc_feature (112)..(112): n is a, c, g, or t
  misc_feature (143)..(143): n is a, c, g, or t
  misc_feature (174)..(174): n is a, c, g, or t
  misc_feature (270)..(270): n is a, c, g, or t
cagacttaaccttcagatcggagaaacctctgctaattgccagctgctgccatcatgcttgagagtgatttgtatttgggtttgcctagcccgctcctttacacgnttgggntttaaccacctgacaactgatcctgaatcangagcaagcagctttccatcgctcccaatctnccctccatctaatcagtttgctgcgagctcacagctttcaatgcatgccattggaatgacgtacctgaccgctagctgcttctaacccagctccanctgagttcaaatctctgcaacggaaaactaaacctgatatcacctttgcaagtcaagttgat

SEQ ID NO: 409884 - DNA, 336 bp, Homo Sapiens
  misc_feature (107)..(107): n is a, c, g, or t
  misc_feature (114)..(114): n is a, c, g, or t
  misc_feature (116)..(116): n is a, c, g, or t
cttttcttaacctaactagttattagaatcccgcttgtcataagcctactgaggaagaggtgagtaggctgttcattgatgttattgtaggttggaatatggatttnttttttntngccctgcagctacctgattttagcttttagctctcatattaaactgttagacttacggttctacatggttcatgtttatacttagtgaatgggagcctgttgaccccactcttcgtttacacctgtatgaaaaacatgtcaaaagaatacacgatgctgtgaaggacaaggtcacctttcgcctggtttatcaaggcttttctcccatggcctaagtgtg

SEQ ID NO: 409885 - DNA, 313 bp, Homo Sapiens
  misc_feature (27)..(27): n is a, c, g, or t
  misc_feature (75)..(75): n is a, c, g, or t
  misc_feature (101)..(101): n is a, c, g, or t
cttcatccagcctcaagaccctctgtntagggggctgggaataacgggaactgtgtttaacatgacccaattttnaggctggtgacgagttcacgggtgtntcagcaaagttggacacaagctagagagagctctctcctcccagccaaaacctgggaattccccactgcagctcctcaggggccctggacagtagctgtgaccaggctggtgaaaggcccgtccctcccatccagggctttcaaagaagtgggtagaatcacggccatcaagtaaacgccactgcggattgacagaggcctagctgaggagg

SEQ ID NO: 409886 - DNA, 329 bp, Homo Sapiens
  misc_feature (110)..(110): n is a, c, g, or t
  misc_feature (144)..(144): n is a, c, g, or t
  misc_feature (167)..(167): n is a, c, g, or t
gaagaatagagtgtactccagagctatttgaacaatcctattctagaaacagtgactagatgcttctagaagatccttccagctgaaaaatcaaaggctctccaaatctntcagttcctcactggcatttccaccgccattttntactctcacacttagaaaatctnctagagggaagaggaggtagaataaccccatgtccccaccacacacatcccttctgagcgaggaagacaaggaagagaaaggcagccgaatcaggactgcccctggagccctgaagaggatactcttcaggaactccccacatgtggcccataaaggagctg

SEQ ID NO: 409887 - DNA, 120 bp, Homo Sapiens
  misc_feature (99)..(99): n is a, c, g, or t
gaaaactccatctggtctctttcctcccttcttactctggccaccatttaggccctggggtgactgttaataggattcccatttttttatttgccaagntctcccccacccttttacatc

SEQ ID NO: 409888 - DNA, 366 bp, Homo Sapiens
  misc_feature (29)..(29): n is a, c, g, or t
  misc_feature (77)..(77): n is a, c, g, or t
aggctagtggagctgattgacatcctagntattttaattcaggaaatattagtgcttaattatacaaacaggttggnaggctattctgaatgaaatgctgcttgctggtgaaatactctgttttcaagaccgcaaaactaaaaccttgttttaggaattctatacaagaataactttggggaaaattttttcccttagggcatttccactttccaaatttttcctcgttgttcccttttcctccaatgattctcttaattctgactgataccagtcagggcatgaaagaatgaaatgtccaaacccttactgacaaattatacctgacagcagaataaacccacatctactaagaggcttccatgg

SEQ ID NO: 409889 - DNA, 316 bp, Homo Sapiens
  misc_feature (56)..(56): n is a, c, g, or t
  misc_feature (139)..(139): n is a, c, g, or t
  misc_feature (199)..(199): n is a, c, g, or t
gcaattttgaggggtaggaccttgaaattggaagaaccttgtgcataacgcctgtntcttctcagtgcttccacatcaattgttttggagcacctggaatttttaatgactctatatgtaatgacttcagtttgaaggncttacctgtaaattaactattattatttgcagatttttttaataacaaataatttaagtnctaaaaatacttatttggtgctccagttaacaaaaatagccagcatcattgattcaattaataaataactacccatttcagaagtctttacaaggtcgctgtgtgaggtaacccatt

SEQ ID NO: 409890 - DNA, 300 bp, Homo Sapiens
  misc_feature (90)..(90): n is a, c, g, or t
  misc_feature (249)..(249): n is a, c, g, or t
tttaaatttagcaagacctgggttcaaatcttgactccaggacacactggtttgaacaagtttgacttcatgaataaacgaaggattgtnctgagaatagatgagatgacatacatcatagttctggtttggtgtctgacacataatagaccaccaggaaattataggtgttaatagacagaaaaatattttcatcttacatggcttatattaaaaaacaagatttcaagaagatggttggctcctgtnttaatgttcagaaaggcagaggctttgctctcgttttccctgagtcccatc

SEQ ID NO: 409891 - DNA, 347 bp, Homo Sapiens
  misc_feature (140)..(140): n is a, c, g, or t
  misc_feature (306)..(306): n is a, c, g, or t
aaaccatcctcgcatccccagaataaatcccacttggtcattgggaaatatccttttatgtgctgctgaattcagtttgctagtattttgttgaagatttttgcatctgtgttcataaaggatattggcctgtaattttnttttcttgtggtgtccttgtctggctttggtttcagggtaatgctggccttgtaaaatgagtttggaaatattccttcctcttcaagtgttgggaagagtttgagaaggattgcattagttcttctttaaatgtttggtagaattcatctgtgactttatcaggtnctgagtttctttaaatgggagactttttaaagttactaatt

SEQ ID NO: 409892 - DNA, 165 bp, Homo Sapiens
atcaggcctaagccactgggggttcagaatggctccctggccaattaacagcagcaagccagagcctgctcagcatctctggggctcctccctctgccttattcaacaccaaccagcctccacccagcccactctcacatccttctctcagtcgaccagggaaca

SEQ ID NO: 409893 - DNA, 180 bp, Homo Sapiens
ctcacactgacgcctaggggagattagcagctctttgtgatgtaagtgaaaggaaggtctgtaactttggcctaaggagtgcattggagaaaattggtaggttcctgaggaaattcagtttttagagcaagctcactttttagggcaagctcaccttggtagatgagagttgagtgctgg

SEQ ID NO: 409894 - DNA, 154 bp, Homo Sapiens
  misc_feature (94)..(94): n is a, c, g, or t
  misc_feature (118)..(118): n is a, c, g, or t
acagagtttcaccccagtaaaataaacttccacgtgagagttgtgttcattcaagggttattttttgagagtggaagtacatttcctgcatttntcacagataatatcagaaattttnttgttttgattaaaatgttgccatctacttataagt

SEQ ID NO: 409895 - DNA, 302 bp, Homo Sapiens
  misc_feature (265)..(265): n is a, c, g, or t
ctatgatgtaatgttcataaccatcagggacttacctttgactacatcccacaggtcttcttgaaatgccagggggcacagtgggtactcacaaatgtggattaaatatttatctcagctgcaacttcataaatataaatctgctcgccagatttctttttacttttcaaatttaaaatacattcttatttaataagctcatggacttatcagtcactggtatgtaaagagaattcagacatcatttcttttctttatcaagtgnaaaatgagacaaaatagtcttctcttgaaatgaaaat

SEQ ID NO: 409896 - DNA, 189 bp, Homo Sapiens
cctgtttatgcaccactaactgtcatcttgcacaccaccttcaagggaagtatctctcaggtggaaggtgattcgagttcaatcccaccctgccagtttccagcacctggacaaagctgcttgaacctctaagtccccttcccctttttggtgtataaaattggtattcggggggaaccagcccccaat

SEQ ID NO: 409897 - DNA, 267 bp, Homo Sapiens
  misc_feature (54)..(54): n is a, c, g, or t
  misc_feature (72)..(72): n is a, c, g, or t
  misc_feature (119)..(119): n is a, c, g, or t
ccttcccagggctgcggagaaaacctgctctcttctagtcgggcttctccagangccagtaatcagaaaggntgtgtctcctgctccaactctgcccccgagacagctcagagccaganggcaccccgagacagctcagagccagaaggcaccccgagacagctcagagccagaaggcaccgaggactctggcccaagtggggaagctgaggcagagtgcagagggggtcatgcagtgagtgggtggggtgcaggagacagagaggg

SEQ ID NO: 409898 - DNA, 388 bp, Homo Sapiens
  misc_feature (120)..(168): n is a, c, g, or t
  misc_feature (266)..(266): n is a, c, g, or t
  misc_feature (320)..(320): n is a, c, g, or t
gtgacaagggcagtgtgtggaatggaccaacccccggcctcctctgtactgccctgggccctatgcaggttgctgcccagactcgcctacctgcctgtcagaggacacaggcccccaccnnnnnnnnnnnnnnnnnnnnnnnnnnnnnnnnnnnnnnnnnnnnnnnnnatgggacaaggcttctgagccgaggagggcatgtggtacttcgaccctaagcactggacccacggaggggctgctgctaatggtgatagagttttttnttgtgttgtgccagtcagctccaaaaagtaggtcaaggtgccagtttctccctncaggggactgaaattggtggcctgaattgcctcccagtgctgtatatcccgtggagtaattctactgc

SEQ ID NO: 409899 - DNA, 331 bp, Homo Sapiens
  misc_feature (73)..(73): n is a, c, g, or t
  misc_feature (113)..(113): n is a, c, g, or t
  misc_feature (121)..(165): n is a, c, g, or t
  misc_feature (247)..(247): n is a, c, g, or t
  misc_feature (303)..(304): n is a, c, g, or t
attttttttagacattacatcaataaaatgccacagaaaatatttctaagatagactttaataagagaaattncaacagtgggttttagatgcaagcaaatagagaaaatgantatatatnnnnnnnnnnnnnnnnnnnnnnnnnnnnnnnnnnnnnnnnnnnnnccctacctctcttacacttagttcaatggtaaccatataaagggtttacgacacccctgccatccatttctccaatattgantttcagctttattgtctcttctcccacctgcctgattcatttaaattgccaactgnngctgattaaagtttgtagcagaaacct

SEQ ID NO: 409900 - DNA, 185 bp, Homo Sapiens
  misc_feature (27)..(27): n is a, c, g, or t
  misc_feature (67)..(67): n is a, c, g, or t
  misc_feature (115)..(115): n is a, c, g, or t
  misc_feature (140)..(140): n is a, c, g, or t
gaggcatgaccacggtggggaaccggnggcagggatatggccaagacgggcctgggaatcccgggantccgagaccctcctggcatcttgctggagacactaagctgcgttgctngggaaactgcctccggggcagcccntccctcatgaatgattcatcagcagcgctggtcgttcccccaccg

SEQ ID NO: 409901 - DNA, 185 bp, Homo Sapiens
  misc_feature (55)..(55): n is a, c, g, or t
  misc_feature (81)..(81): n is a, c, g, or t
  misc_feature (99)..(99): n is a, c, g, or t
  misc_feature (156)..(156): n is a, c, g, or t
tgaaatgtttctggctttaactacattattctcttttgtcccttgcccccagagncaatttaaaagtttactgatgtgggnatgggagatgggagtctnggttacatgatgttcctaagggggttagacactggtctgagttcccttgggtttggnctgtgtctggacactccttttcccacttt

SEQ ID NO: 409902 - DNA, 308 bp, Homo Sapiens
  misc_feature (41)..(41): n is a, c, g, or t
  misc_feature (265)..(265): n is a, c, g, or t
tgccttcctttcatccttcaggacctcaggtcctaccctgntctttcttacctgagcttaagctcttccacctgccccaatcttctgtgccaggaaagatactttaacatacctggacctcattcttgacttctccgtgactcccatgccccacattcagccaatcaccaattattgcttcctgtcatcatcacctgatggtgatgtggaattcatcagcttcctcacgctgacccccacactccatcctctggttcttcactgngggcctccaaagcagccagggattgtcacaaaagtgttcatag

SEQ ID NO: 409903 - DNA, 346 bp, Homo Sapiens
  misc_feature (78)..(78): n is a, c, g, or t
  misc_feature (263)..(263): n is a, c, g, or t
cttgagccttagaacttaaatcctgatgagggttttactttttaaaatactgaagtttattatttatgcatgttttanagaaaaatgagtggcttttaaaagatcaaaattaaaggcttaaacatggaatctctaggacatataaaatatgagtagaactgtgtatttataagatgttaatgtaagacttcaggccttgtaatatcttaaaggaaccacttcactgtaagggagcagtttgtcttttctaccttttccaattngtattgaggttttgccccagtatggtcttttttacttaaaacacctttggtggaaagctaatcccagcatcccggtttttaaa

SEQ ID NO: 409904 - DNA, 205 bp, Homo Sapiens
  misc_feature (143)..(143): n is a, c, g, or t
  misc_feature (149)..(149): n is a, c, g, or t
aacaagtccagaaaccccaagatgtctgtagagaatggttaagttgcgttaatacctttgtcttcaccattcctgatgaagagggaaagggtagcacccccaatcactgcatgggctcttttgtcggagttaacttctaaggntttctncctccaacctttacgcagaacacaccaaatttgagtttctatctcaaacatagaga

SEQ ID NO: 409905 - DNA, 370 bp, Homo Sapiens
cataaagataatggctttccgtggtgactcagaaagtactttagggccacttgtttttttaaacaccttattatgaaacttcccaaccctaaccaaaagtagagcaaatagtatatgatccttccctctccacatttaagggcactgattttagtatctatttccattgttcatcgtagggggcacaggagagtagtaactggcaaatgctgtacagttttcagagtgccaccacacacacagactcactcgagtctgccagaaaaagaggatgggacaggtggggtttagcccattttataggtgaaccaagatgagagggaatagccccgtggagagtgacagcccggactgtggaactcaggccttt

SEQ ID NO: 409906 - DNA, 232 bp, Homo Sapiens
  misc_feature (124)..(124): n is a, c, g, or t
  misc_feature (132)..(132): n is a, c, g, or t
  misc_feature (138)..(138): n is a, c, g, or t
  misc_feature (175)..(175): n is a, c, g, or t
tcaaaatagtgatttcagttactctcgtataaagtggagggcaggaacgatggacagctatcatcttaaaagcttattggagtcagacgatggttcctcacatctgctgacctgtaactatggnataaacanctctgnatgaccatttgttcattatcatactggagtcatgttnctgaggaatttcagggcagtaaaaatttagaagctaaatgtttaactttccagaatg

SEQ ID NO: 409907 - DNA, 172 bp, Homo Sapiens
  misc_feature (76)..(76): n is a, c, g, or t
  misc_feature (123)..(123): n is a, c, g, or t
  misc_feature (137)..(137): n is a, c, g, or t
gacctacaaaagctgagatgataaacactgttttaagctgctgtgtgtcgcagtgactcgtgtggtagtggatttntagcagagccgtcgttcgtgtctgccttctctcagctcaacactctntagggccacccatnccgttgtgcatgtcaacggtggattttttattgcg

SEQ ID NO: 409908 - DNA, 214 bp, Homo Sapiens
  misc_feature (106)..(106): n is a, c, g, or t
  misc_feature (108)..(108): n is a, c, g, or t
  misc_feature (111)..(111): n is a, c, g, or t
  misc_feature (143)..(143): n is a, c, g, or t
cggcaggggagctttcacgtacacagcctctattcctggcttgcaggactgtttacctaaggggcaaagaagtccacctgcgaaagacaccatgttgctactacantnttngcaacagcagtagcccggttttcattgttgtngtttacagtcatgagagccatactcctttaagaaaacaccaaactcctttccctcattcctggccccaatc

SEQ ID NO: 409909 - DNA, 236 bp, Homo Sapiens
  misc_feature (46)..(46): n is a, c, g, or t
  misc_feature (56)..(56): n is a, c, g, or t
ccctcccaggtctggttagggcagttgttacatatgaggttttttngagttttgtnttgtattttggccttgttggtaaagcattccaaagcttcgacacaccctcctttcagcccattaggaaaggctgttgattgtaatattcacacagctccctgggctatggttaagagccttgcagaaggactgggagaagccctgtgtgtttgaagtattgtagcatcagtaaaaaaaca

SEQ ID NO: 409910 - DNA, 107 bp, Homo Sapiens
ctaaataaattagcgtatgcaaagcatgtagaaaatgttttccatgtaataaacactaattattactgtgataaccgaaggtgtccaaaatcacctcaattttttgg

SEQ ID NO: 409911 - DNA, 244 bp, Homo Sapiens
  misc_feature (41)..(41): n is a, c, g, or t
  misc_feature (43)..(43): n is a, c, g, or t
  misc_feature (160)..(160): n is a, c, g, or t
  misc_feature (189)..(189): n is a, c, g, or t
  misc_feature (216)..(216): n is a, c, g, or t
aggagccaggctcctttaaaccagtagtccccaacctccgntnccagggactgactgatttagtggaagacaatttttccacagacaaggggtcagggaagatgatttcaggatgaaactgtttcagctcagatcatcaaccattagattctcataaggngcacacaacctatatccctcacgtgaggngttcacaatagggtttgcgctcctgtngaaaatctgatgctgctgctgatctaag

SEQ ID NO: 409912 - DNA, 180 bp, Homo Sapiens
atagagccagcttcccccaagaagagcttctgtcattgtttcactacagggctggtggctgctctgatctcatagaattcattcctctgggtagcaccatatgcaggctttgcgaataaagtgatcatgggctttcttgattccatttggccaatgcaagaacttcattggctcccctct

SEQ ID NO: 409913 - DNA, 399 bp, Homo Sapiens
  misc_feature (188)..(188): n is a, c, g, or t
  misc_feature (237)..(237): n is a, c, g, or t
gttctcctcccatgaattgtaaatgttattaatgtcatctagaatggtgaatcctttgcagaaggttttcaatttactttgccaagatccatcaagggaattgctatgtatggccactatagctttatgaaatgtatttcttaaataataagacttgaaaattgaaattactccttgatccatgagcngcagaatggatgctgtgttagcagacatgaaaagtacattctatgagangcattgtatatttatatcagggctcttgggtgaccaggtgtattgtcaatgagaagtagtaatatttttgaaaggaacctttgttttctaagcagtaagtctcaagactgggcttaaaatatccagtaaaccatgctataaacagatatgatgtcatccagg

SEQ ID NO: 409914 - DNA, 289 bp, Homo Sapiens
  misc_feature (71)..(71): n is a, c, g, or t
  misc_feature (147)..(147): n is a, c, g, or t
ctgagattgcgggcgtgagcaggggcacccagcccctttgcctttatcttataaggacatctgtccttganttcaggaaccaccatatgcaggatgatctcaagatccttaattgctaagtgagggcttagtgcctagggtgagggnaagggcagttctctaaagaactgccattggcctttaggataaaacatcagttgtaccagaccatcccaagcattgaaggattttaaagttcctggtctacactcattaatgccaatagccctctaaccctaatatgacaatt

SEQ ID NO: 409915 - DNA, 365 bp, Homo Sapiens
tttttatgtctgtatttaagaaataagtagggttccctttttgcaaatgaatttccaagtttctctgtgctttctcctacttttcatgtacatctatctctgatcctacctttgatcagataggaaacctacatttgttcctcaagagttaaaaaatacaggtggtttttttcttagccttctgcagtgaatggttagttttttgaccacctagtctctctctgacttccaatctttgtttgcagtttgtcaattagtgctttgaattacggtgatttagcttagtaggcagcttccctaagcctgggaaaaagccgttgaaatttgtagtcagttgtgtaacttgtcaaagttagtgagggaag

SEQ ID NO: 409916 - DNA, 273 bp, Homo Sapiens
  misc_feature (91)..(91): n is a, c, g, or t
  misc_feature (161)..(189): n is a, c, g, or t
ggaaagaggccaggcatctggccagggctgctgcctctccgcccccaggcccttgccttgccttcagatgttgcatgcctaagtgtaagangtgccttttctccaaacctccctccctcacttcccaccaggcagcctaggtttctagaatgactcattcnnnnnnnnnnnnnnnnnnnnnnnnnnnnncaacacatagacaaatattaagaatattatgatgaatactcaaataccattcctcacctaaatttaacaattcttaatgttttg

SEQ ID NO: 409917 - DNA, 301 bp, Homo Sapiens
  misc_feature (24)..(24): n is a, c, g, or t
ccctggtgttagtagactgttttnttgagagttcacttacattacttaaataatggaatgcttttgaaggattgacaaagatgtaaagaaggcagtaaccatagtttttgtaaaatagctacatgattaagagctcaagagagaacaagaacctcatgatagcaatgtctagtagacaccagaatgaagtttagcacttggaagcttgacggggatccatggcagagtttgtgaatcactttctactagtctactgctgagtaactttactcagtttgcctcttttctccatatgtgattt

SEQ ID NO: 409918 - DNA, 189 bp, Homo Sapiens
  misc_feature (93)..(93): n is a, c, g, or t
  misc_feature (136)..(136): n is a, c, g, or t
tgacagtggccttttcacagccttatggagagagatgctgagagggaagtggtacataaacaaaaagagcaaggaacgaagataatgatcaanttcgaggatgacatataaacctctagatccagctgtgcctgangccaccacatcaacattgtagaatactgttttgtgaaccaatgtgttcctttt

SEQ ID NO: 409919 - DNA, 280 bp, Homo Sapiens
  misc_feature (16)..(16): n is a, c, g, or t
  misc_feature (66)..(66): n is a, c, g, or t
  misc_feature (121)..(121): n is a, c, g, or t
tgaagcggcacatggncaggcttcattagctttctcaaatcattctgaagcagtggatgaattctncccttaattcaaagaaattattgtttcctattgtcctcagtgagaagcatctttnctattactcagactagggaaactaccaggacacccattcaacttgtttctttctcaatttgtggttatgaacaagaattctcagtaagtttggactcaaccattgacttggaggaggcatcagtgttaggagtcagtgacttgctctgccctagaaatt

SEQ ID NO: 409920 - DNA, 380 bp, Homo Sapiens
  misc_feature (238)..(238): n is a, c, g, or t
  misc_feature (282)..(282): n is a, c, g, or t
ggaaaagttgaggcttgctaagggttgagatctgttggtagccctggttcacatggggtcagcaccaggcagtgcctctgaaagcggagagaggtcctggacttcccttgtgtataacagttcctagtgtccaacaatgaggaaacggtgaagcatggttacaaaactgtgacaaaaatatttacatctagcactgttaccactcacatgccaaacattggctgcacacgtgcagctntatttgtaattaacatcaaaagactagatctgaagccttccatnaaatgaggaggccattccatatgggcattcctgggaacaaaacactggcacaggtaccagcctcttccactcctggaccgggttggtgcttgaacagt

SEQ ID NO: 409921 - DNA, 318 bp, Homo Sapiens
  misc_feature (15)..(15): n is a, c, g, or t
tattacctgaatgtnctttttagcatttaaataatccatttttagtaggcatttgtattgcttttttccatttcaggtagcatctaaagtgaatgtcccttgcatgtatactattcatatgtgacttaataagtagagcttgctaaatgggtaggaacttacaggaaaaggggaaactctagtttgagaaaattgtctgggctaagtttaggatgtgttcaacaaacaggaaagtcaagtttggctaaagcatggttgagtaatagtgggaaatatggtcagaaagtaggtatgttcaggactctttctactgaaatg

SEQ ID NO: 409922 - DNA, 368 bp, Homo Sapiens
  misc_feature (190)..(301): n is a, c, g, or t
  misc_feature (346)..(346): n is a, c, g, or t
ctcgattttaaggattagctaaattcatgtgaccattattatgtcttccatttgctaaaattgagtcccctaaatatagcctggtacagagaaggcacaccaagacagaactcgtaattgaggagagttttgagaatgcagttgtatagtttggtaattgggaacagaaaccttggaacaaacaggttannnnnnnnnnnnnnnnnnnnnnnnnnnnnnnnnnnnnnnnnnnnnnnnnnnnnnnnnnnnnnnnnnnnnnnnnnnnnnnnnnnnnnnnnnnnnnnnnnnnnnnnnnnnnnnnttcaagatcaacattgaaataggatagtttgtgtgaaaacctttnaatgccaatgcctgcctccagt

SEQ ID NO: 409923 - DNA, 261 bp, Homo Sapiens
cttataccattttatcacctaatattctgtcagaggaccctatgtaggcagctatggttgatatttcaaatgttttcagaagacacagaagaaggagaaagaagaaatatgtggataaaaccagtgttttctattcataacttatgtaacatatatagctgactatgtttatggtgtctatcataaaaatgtataaagatagtcttttgatatattaagttgtatattctgagaaagtccttttttgtgtatgtgtatatt

SEQ ID NO: 409924 - DNA, 326 bp, Homo Sapiens
  misc_feature (21)..(21): n is a, c, g, or t
  misc_feature (38)..(38): n is a, c, g, or t
  misc_feature (100)..(100): n is a, c, g, or t
gaattatttacaagtgcaggngcctttaggcctctttntttagaatggaattgttttgaaagcatttcaaataaatatttcatccattattacttaaaanttttgcactttattctactgtaacactaaaacttatctttgagtttagtattaccaagtgcatcgaattacagattaaccgattgaccagctgctatttagtaaggtctcaactcccttaagagtaacccaatccacaaacttgactatgactaagcacttatcttgagttatttgaaagaaatatgaaacggtcgtcttgcttttagagtaattttaatcaactg

SEQ ID NO: 409925 - DNA, 317 bp, Homo Sapiens
  misc_feature (169)..(169): n is a, c, g, or t
gcaaccactaatcacttcttattacattgccctatcttctcgaagcacttatcagtatctgaaattatctttcttcacatttgttttcacatttattttctatctgtaacctgcccccaatagaaattagaatataagctacttagagctgtatatgacatgcattttngtttaacactgtatctccaacaccaagacaatacatactcactgactaactgctcaactctttgcatacttaagtggaatccttccaagatgcaaataaaaatcaacctcttctgtataaccttcccaattccagtggatttctccct

SEQ ID NO: 409926 - DNA, 288 bp, Homo Sapiens
  misc_feature (97)..(97): n is a, c, g, or t
  misc_feature (167)..(167): n is a, c, g, or t
gtggttgcttggttccaatgaaataaagccacgagggcatcctataaatggtaagagggctgtataaatagaaggaattaaccagcacccatttgtnctgttgcagctgctgcagatacgtgccttgtaaaattaccctattatttagagaccgagaaatatttggntagtggtaatgtgctgctctgagaaaagcagtcgccagtgggatttttatcacataattagagggtttgttaaatgtgctagtgaaaagaagctgtttgctgctgccttgttttaacatgg

SEQ ID NO: 409927 - DNA, 414 bp, Homo Sapiens
  misc_feature (314)..(314): n is a, c, g, or t
  misc_feature (322)..(322): n is a, c, g, or t
  misc_feature (330)..(330): n is a, c, g, or t
  misc_feature (338)..(338): n is a, c, g, or t
  misc_feature (346)..(346): n is a, c, g, or t
  misc_feature (355)..(355): n is a, c, g, or t
acctgctgagccatgctgagggctattgggcacctccctgtggttagagaagagcgccccaatcagacttcaaacacagctgcctaatcagccagtggtgagcagccaggtggcctgggccagccataagattagtcttctcctcccagcctggtttggcccagcctccatgtatactatctttggatggaggtagagttgtcaatcagaaaactcctctcccttgacaaagactgccccagaggaagtccttttgtctcttgcctagcttctgccacaccttcctaatagatctttctgtttttctgtaaatncccagctnacttgggnaggactgngggcaggnaggaatcgncttggaacccagggagggcagaggttgccatcgagcagagatttgcactactgcaatct

SEQ ID NO: 409928 - DNA, 297 bp, Homo Sapiens
  misc_feature (266)..(266): n is a, c, g, or t
ccatacttgtgtgtaagccagagatcttcacacatgttaaagaagcttgaaaacaatgaagaaaaacccaggggagaccgttagagagagggaaagacagagatgagagtggtagggaaaaacagtgagggatcagagcagcaccctgagagcgcacctggacatcagccattacacgtgtagggggaggaacttttctgagtttccctaaaaggcttaaagtaagggggttgttgggtggaccacacatgacatattaagtaagntacaaaagtaatgcaccacaatttacctgaa

SEQ ID NO: 409929 - DNA, 297 bp, Homo Sapiens
  misc_feature (257)..(257): n is a, c, g, or t
cagccaactggcacgaggtgagacgcgtattgaaagactggcctcgaagtagccgtagactgcgggttgcgcgcaaaggcggagttctgtataaggttatataatagatcacttccaactagaaacgcgaaacttgccccgcttgaagcacgcactgaatgtataggaaggctcggctctgtatgctttctgggttacgtcccaaattgcgtccgcttactgctaggaagcaagtcccttaatctctccccacaccnccgggctcgaggccctctgtggtttctggttgtctgtatg

SEQ ID NO: 409930 - DNA, 270 bp, Homo Sapiens
  misc_feature (41)..(41): n is a, c, g, or t
  misc_feature (71)..(71): n is a, c, g, or t
  misc_feature (104)..(104): n is a, c, g, or t
aggtacccagtaaaatagaaggaattcatgacatataaatncttctttaatagagactccgattgtttttnttctttcatttacttttgtttccattgaatttnctattatcctgttccaatcaacagcggttttgattagaatattttctgatgtttcggaaatatgtcagtgaaggactaggggtgtgcttctcctgcatttttgtacataaactaaacatccctttcagccacaaccttcatggatggtttaccatttcagtagtac

SEQ ID NO: 409931 - DNA, 340 bp, Homo Sapiens
  misc_feature (121)..(121): n is a, c, g, or t
  misc_feature (190)..(190): n is a, c, g, or t
  misc_feature (306)..(306): n is a, c, g, or t
ttgcgaaaccattctggctcacttaggggccagccttgtggattgtcattattcatagaaagacacagtgtctgctcccaacattgacctcacagtatgagagttgagtaatatgaatganttatttattacttattcaaattttaagactcactggcctctaatagaaccaaaataagaaatttttttnttccttcttttccaataagttgatacctctatctatgcttctcacaaatggattctctacaatcaagtgattcctttcaatactgtggactcacaaactggctaattatacctganttaagggcagttccattcaggtgattctacattt

SEQ ID NO: 409932 - DNA, 338 bp, Homo Sapiens
  misc_feature (50)..(50): n is a, c, g, or t
  misc_feature (103)..(103): n is a, c, g, or t
caatcctcaggtaatctacaaattgacccttgttagagtatgtcataggntcttgctgctttaactgacctgggtttaggttcatggagacggaggagaattnttctatgatagatttgtagtggatggtggacagagggtgatggtgtgaggttgaaggtttccagaaatcaaggtgatttgagggctctatggggaccttctgcctgcatgagggggtgcagataagcacgtataacctccagcgtgtttcaggacccttcagagatcttacctccttccccaatttttcacttcaacttgttgggggaagacccccaggggttggtcgtattacc

SEQ ID NO: 409933 - DNA, 251 bp, Homo Sapiens
actttatatagatttagggggtacaagtatggttttgttacatggctacattgcacagtggtgaagtttgggctttgagtgtagccatcacccaattagagtacattgtacccattaagtgatttctcatccctcttgccctgtcaccctcccacccttctgagtctccagtatctgttatcccactctctatgtccatgtgtacaaattatttagctcccactttataagtgagaatgtgaagtatttga

SEQ ID NO: 409934 - DNA, 297 bp, Homo Sapiens
  misc_feature (186)..(186): n is a, c, g, or t
  misc_feature (201)..(201): n is a, c, g, or t
gaaaatcataacaaatacataatgagtgagggatactcattttactcagtcccattcctacctcaccagatagttttcattatttctaccctttcctcttaaattcactgctgaatattagaacttctattaatgcatatttgcaggatgattttaattattcatagaatcgcatttataaatttntagatccccacaggnaaatgttatatctcagcaagtaaacttttaaacggaaattattttctatgccactattgtggggaattgttatagtcatactactacttccaatag

SEQ ID NO: 409935 - DNA, 269 bp, Homo Sapiens
  misc_feature (29)..(29): n is a, c, g, or t
  misc_feature (50)..(50): n is a, c, g, or t
  misc_feature (52)..(52): n is a, c, g, or t
  misc_feature (116)..(116): n is a, c, g, or t
  misc_feature (221)..(221): n is a, c, g, or t
gttgggggcaggctgggcaaactggagtnagcaaggcctacttatatttnantactttaaagttatttttattaaactgtctgctgtccaaacataatacatgttgtaggccaaantggccatgaagctaccagtttgcaaaccctgaactgtgaaatcttttagccacttccctatcttctctgttggagccatcattagtacttaaaaaagtacctttnagtcagggagttctattctactctgtgtttgtgagaaatacggccctg

SEQ ID NO: 409936 - DNA, 356 bp, Homo Sapiens
  misc_feature (273)..(273): n is a, c, g, or t
cataggtgcatgacagcattaacctggggacgtagaatatgatcaaggcagcattactgctttaactttagaatgacttactatttattaatttaaacagactgctgtttccacaaccttagcattgaaggtctttcattttctcccatcaagctatgttagtttaggtaatgtagaaatatttaccctctggcttaagctggtttagagtaactaactagagctatagtttgcatgggaaagtctgcacgagcttcttgtcagatatttctngctcttctgtcgcattacttactaaacctcccaactctcatcatattcttcatttaaccacctcctacatgtttttcttttgg

SEQ ID NO: 409937 - DNA, 378 bp, Homo Sapiens
  misc_feature (130)..(130): n is a, c, g, or t
  misc_feature (154)..(154): n is a, c, g, or t
  misc_feature (215)..(215): n is a, c, g, or t
  misc_feature (330)..(330): n is a, c, g, or t
  misc_feature (365)..(365): n is a, c, g, or t
ctgggagccatccagtgttccctgtccaccccggacagcatctctgctctctgtagagcgttgcctggcttgttcctgctgtcccaagggggaggtggccatgccggttggtggagctgggctggttctnaggcgcagggtgggcaggccaganagtctggcttctgcctccctccacgccccatcaggtgccggaaactgtcccttcacctgcnatctgcctcgcccccgtcccagtcgcattcttccacacctctctttgacatggccctccgggacgaggagctggtgtcctagagattctggcctccgctcagggccatgcccgcnaggagatgctgactctgaaggcttggcccattctntgccccggggcta

SEQ ID NO: 409938 - DNA, 316 bp, Homo Sapiens
  misc_feature (275)..(275): n is a, c, g, or t
cacaaattctatcatattcattccaagaataaaactttcacttttctgcataggagtaagtggaaaatggactttcattccttttcccaatttaggatgaatatttattcagtagctacgttgttttggcgccgtgtcgggatacaggtgcagttcctttctagatttcacattgtctggaatgttccatgtgttgatccaaaatatactttatgttccgcaaatgagaggaaggagcttggaggcctgggattcttttaccacagtagtttttnaaacaattaatttgaaacaattcagtgttttgcatatttta

SEQ ID NO: 409939 - DNA, 337 bp, Homo Sapiens
  misc_feature (36)..(36): n is a, c, g, or t
  misc_feature (83)..(83): n is a, c, g, or t
  misc_feature (135)..(135): n is a, c, g, or t
  misc_feature (193)..(193): n is a, c, g, or t
  misc_feature (212)..(212): n is a, c, g, or t
  misc_feature (283)..(283): n is a, c, g, or t
  misc_feature (306)..(306): n is a, c, g, or t
attagatgcacagccaccctttcctccctggaagtnttttctgccgggcttgttttcagactctagaaaatgtcttgtttcanttaagaggggatcctttgccctgtatggtactggtgggggcgggaataaganttgcaaacccagagagcctggggtgccccttgcacccaccacgagcccattgggaaanttgcccttaggggcacctnttcacaaatcctggaggctttggaatgagtggcctaaaggcagcgggcagcaggggatcctaggccccgantggcaggctagcccgagcccggnctgggtctgggacagagcttagcatggtgcg

SEQ ID NO: 409940 - DNA, 190 bp, Homo Sapiens
  misc_feature (91)..(91): n is a, c, g, or t
catacaacagttggtattaagcaattacttacagatctgtgttgaggtagattaatatggcaccaatttgggtagactggaagccattttnctgttgactagaagatcagtttcttggaatagtgcaggcagaggtataataaaggtcttctgctttgtattttcaaccatgtgaaatgatctgaatttt

SEQ ID NO: 409941 - DNA, 326 bp, Homo Sapiens
cctttatgtaacagggctgtttccaggtcctggcagatggtccatagtaacagtgctttgctgatttggttggagctgagcctgtgaaatgaaaaatcctcagtagcagatgcctctcccaggccctggccatggaaaagtcctcctctccaaggaaagtactgtagcttgggtggtaactgtctctggtgggactaagtgtgagcaccctgaaagataatcttaaactgtgtcaagtttttacaaaaggtcacattggtgacttggaggttcttggcagttgagctgctagtagagggtgtttgtattctggggcctgagggaca

SEQ ID NO: 409942 - DNA, 382 bp, Homo Sapiens
  misc_feature (27)..(27): n is a, c, g, or t
ctttactgtgctttccttgaattgcangtctgattacttgcaacattctctttgtattatgttttgtggcttgagtgtgcctaatccagccagaggtaaagctggggaattgtcctcttctttggtcttgaggcacttctgcaggaaaatttagctttagaaaagataaggttaccaaagttctgactgcctagtttgtgagctgggcccctagtgtcatcatagggagctatggtttcattattacacattttgtttttcactaaatatcatagtttttttctctgaaatgctaaatgagctgtcatgtggctatatttgccttcaagttactggggaggattggatagtgtctgttaacagggcaaaacaaaagctcctg

SEQ ID NO: 409943 - DNA, 406 bp, Homo Sapiens
  misc_feature (95)..(95): n is a, c, g, or t
  misc_feature (120)..(120): n is a, c, g, or t
  misc_feature (173)..(173): n is a, c, g, or t
  misc_feature (328)..(328): n is a, c, g, or t
  misc_feature (374)..(374): n is a, c, g, or t
ggtaagtgaagggatggtgaagccatttagggaaatacagaagatggatggataagtagatttcagaaatggagtcaggtaatttcagatttgantttttgaggtattcataggactctncttgagatgttgtatgagtctcctgaaactgcggattgggttttggaaggctntgtgaaattccagttgcagatttggaagcaaatatgttcagctttaaaaaagcatctgagacttatgccttaaaaaagaacaaacttgccagtgaatgaaataccataccagtgaatcaattctgagaaaagtcttattttgccagtactctaantgagaaaagtccaagacattttgaaacagattccaagcttaaagtnttcattaaacatcttcgacacaaatttactaa

SEQ ID NO: 409944 - DNA, 438 bp, Homo Sapiens
  misc_feature (33)..(33): n is a, c, g, or t
  misc_feature (92)..(92): n is a, c, g, or t
  misc_feature (275)..(275): n is a, c, g, or t
  misc_feature (343)..(343): n is a, c, g, or t
  misc_feature (364)..(364): n is a, c, g, or t
  misc_feature (406)..(406): n is a, c, g, or t
tggaagtgcagcccagccagcagcttgcttttntcaccctgccttgtcgcagccagcctgactcttacttatacatctgagaagtgccagtntctataattcacatggctccaaatcctcataagtggttcaggttatgttctcccaagaatcctccatgccacattccaccctggtggccagatggagatgggtctgtacatttctgagcttaccaagtctctatctagagaatataatgctgaatgaatgtaatgcctctccctcacatgggnacacttaaatatctacaaatggttctattggagccctcctcacttcagttttaggaatgaagggagtncacttactccttttgtcttgncaggggagaagtttattccctatttcctaaaggtttcccatncaatggaatcttttatttctaaatcttcacat

SEQ ID NO: 409945 - DNA, 264 bp, Homo Sapiens
tgcagacctgggttaacattagcagataggttttgagaacctgctcatgggctaggccctacttcacacattctaggtgctaaggtttcaatctcagctttgccattgactacttttgtgagtttggacaaggtatttaatttctgtgccgcgttttcttcagttgtaccaacagtaccttactaataccgatagtaccttactaatgagtacttgaggattaaatgaggcaaacatataatttccttaaaagagagcattcca

SEQ ID NO: 409946 - DNA, 292 bp, Homo Sapiens
  misc_feature (268)..(268): n is a, c, g, or t
gaaaaagcattgaacagcagcatttttaatattaaccccatatctgaaagtttccatttccatcataagaaaacacagggctgacttcaaaaaaagttattacgtaatcaagaaagctgctaattatacaagttgggtatttcactgtgtttatcatactcagagaaaagtcgcttgaagttttcatttttttaatgtatccacatgtagaatatctagtagcttctaacatagtgtggtagctttccatgtagtctctctatctttnctttttaacctaaattcaccacat

SEQ ID NO: 409947 - DNA, 373 bp, Homo Sapiens
  misc_feature (62)..(62): n is a, c, g, or t
atactttatcatgtctgatgtcttacctgaagtaagtgctcagtgaatgctcaatgaacttnttttggtggcacgcagctacttaacatgacgttaggatgtagcattaatcagctatgaggctgtcactatctgtaacctaagccccttttaggaaaggtagcttctctcagtgataacgacagaccaaatatgacaaccctggtttactacaggtttgttcttcatgggtgtctgggtggggccagggggcctggtgcagacagttgacctggaaagagctggtgactacacagcgtgcttgcttttcggcggaggagggaagagcctgttttgcaaacagactcctacatgtgacatttggcatcatttt

SEQ ID NO: 409948 - DNA, 301 bp, Homo Sapiens
gcttcaaaggagattttaagagtgattttaacttggggaatttaagagctggagtcattgtttacttcactgtggcacctttgaaactgttacattaacataaggtaattgaagaattgttattcctcttgtattcaactgaatatttatggttagcttacagaaatttgcagttgtgaacagaacagaaacttgtgttgaattcggctactacttaaatatgcatttttaatactctttaacacctccttcctcctcatataatctctcaaggcctgtgattacatattgcatattgaag

SEQ ID NO: 409949 - DNA, 361 bp, Homo Sapiens
  misc_feature (48)..(48): n is a, c, g, or t
gtccaggtgagcctcacctcaagcagttgtcacagcttgataattgtntgtttctgagagggtttctttggaagcctgccacagagagtggctgggggaatggggggaaaatccatctcccattctgagcccagatgtacctcaacacccatgcctgcttccaggtgcccttggggggtccctccccacagagtgcagggttctcacagcagtcagtcttgcagaggacctgggtagacatctggtcaccattgaaggggctggggccaagccaggcaggcagccctgagcctaagtgctactcagaggcaggccccggagcatggcttgggggatgtcactgacatcccggttcctgctt

SEQ ID NO: 409950 - DNA, 465 bp, Homo Sapiens
  misc_feature (86)..(86): n is a, c, g, or t
  misc_feature (188)..(188): n is a, c, g, or t
  misc_feature (285)..(285): n is a, c, g, or t
  misc_feature (333)..(333): n is a, c, g, or t
  misc_feature (340)..(341): n is a, c, g, or t
  misc_feature (366)..(366): n is a, c, g, or t
  misc_feature (373)..(373): n is a, c, g, or t
gagaaatagactcctggcactataaaaatgatcctggagaataatttggctagactttgcaagaatgacaaaaatgattataagantcagttgtctcactttggggaatacattctgggaaaataatgtaagagaaaaaatatttgcatacagacatttgaggctgctctgtatattacaggcaaganctggaaactgttcggctgcagggtgacagctaactagattgtggtttattaggggaatgagcctttctttgtgtatgacaactatgaaaactattgngaagaaatagttacgtgatacagtcataaatcctcaaaaacgggagantccaggnnttatgatccaaatagtgattagtancaagggnaaacatctgttctaaataatttactgtagtaggaaattaggttcggaattttgtaaattagtcatttaatttgggtgatttgggtttttttg

SEQ ID NO: 409951 - DNA, 314 bp, Homo Sapiens
  misc_feature (164)..(164): n is a, c, g, or t
aacagacaaaaccatagtttccatcagaattaggcagcttggagctttgccgattaggactagggcagccctaagcaccaggagaacccgggctagagtgtctctagcctatcaccaagttctcccagctacactcacaacggtcccagggaagcaggcggggntctcttggggaagaaggtgcttcctaaagggaggggctcactgacggagggatttaggacatgggagagaccaggtccacctctgagtaactcttcactctgctggattccaagagaaatgtctggccatgcacaaatggaagtcctgtg

SEQ ID NO: 409952 - DNA, 344 bp, Homo Sapiens
  misc_feature (143)..(180): n is a, c, g, or t
tactaattcatcaatagattttctgaatcggaatagctcatttgcattgcaattaatagatgctctagaagttttgaagcaggaaggagctgagttggtactcctataaaaggtcttactgcataattgatagtgttcttacnnnnnnnnnnnnnnnnnnnnnnnnnnnnnnnnnnnnnncagttgtgggccacttatcacatacactcacaaactggattcacagtccatgttctgactaatcttaatcagaaactggtaaattaataaagataccgatcatatttcattccccttattagggcatctcgcaaacaaaatcttgttttttacaagggtttgtt

SEQ ID NO: 409953 - DNA, 149 bp, Homo Sapiens
  misc_feature (60)..(60): n is a, c, g, or t
  misc_feature (115)..(115): n is a, c, g, or t
agctctagaaaaacaaaatcaactcctttggaaggcagccagtctcctcaggcacctttntttgcagactttaccaacttcagaagaacccaccagtttggaagaactggttgantggtctgtcctctgtgaaactgtcattgtgttgt

SEQ ID NO: 409954 - DNA, 236 bp, Homo Sapiens
  misc_feature (14)..(14): n is a, c, g, or t
  misc_feature (49)..(49): n is a, c, g, or t
  misc_feature (71)..(71): n is a, c, g, or t
  misc_feature (73)..(73): n is a, c, g, or t
  misc_feature (80)..(80): n is a, c, g, or t
  misc_feature (189)..(189): n is a, c, g, or t
ttgcttagtatgtnactttgctgaggctgccataacaaaatgccacagnacaggtggcttaaacaacagangngtatttnctcacagttttagagcatggaaatccaagatcaaggtgtctggctattcttacatggacctttctgtgagcacacacactcctggtttgctgtcttcttcatgtgaggncaatagtcttacagaattaggccccactcttatgtcctcatttaatc

SEQ ID NO: 409955 - DNA, 250 bp, Homo Sapiens
  misc_feature (37)..(37): n is a, c, g, or t
  misc_feature (84)..(84): n is a, c, g, or t
  misc_feature (94)..(94): n is a, c, g, or t
  misc_feature (192)..(192): n is a, c, g, or t
  misc_feature (204)..(204): n is a, c, g, or t
ggagggcagggagctgtcaactcgcttaccacctgtntctacattcacaggtaaggggtcacctgtgagtctaccttcacaggnaaggggtgantctctgggaaaggggcatttgttcatagcgtcctgacttgagctgtttttcaccccagagctgccccacgaggccccttccccgcaggcactttccanttggtgaaccgnccagggtgcatggccctgcagtcagccccacgggtccgaggaggcc

SEQ ID NO: 409956 - DNA, 231 bp, Homo Sapiens
  misc_feature (152)..(152): n is a, c, g, or t
  misc_feature (191)..(191): n is a, c, g, or t
tcttaaaaataaaattatgctaagtgaataaaaactgagatattttaagctaggcatctttgttagcatagtatccggaacataactacttataatgcttaggtcttatttctttggaaaataagttacttattccagaagccttagaaggnattctgaaaattcttctaactggccattaagagtaaggnagttgaatggtactgctgaagatctgagttgactcactga

SEQ ID NO: 409957 - DNA, 352 bp, Homo Sapiens
  misc_feature (58)..(58): n is a, c, g, or t
  misc_feature (131)..(131): n is a, c, g, or t
gaagacctaaggtcacctgacatagattaattcaaccaacatgtactaattacatgtntgtggcaccttgctatgtgtggtagagatgcaaagatacatgacatggtctatacaccaaaacaagcttagantttgacaaggaagaaaagacatacacacaaaaccaaattcatatgtagctgagttataaaatgctacgagagtcaggaaggggaagattcctttggctggggcaggaagacaggaaaggggtggaggaaagaagagatttggtctatctttgtctaagagtttacacttgaaccaggcaccaaaggccataggactgcaaaccatatgagacagaggtgct

SEQ ID NO: 409958 - DNA, 211 bp, Homo Sapiens
acttttcacccaatttcaccttcccccatactcccatataattatgtttcaattttggttaaaccaatatgagatgattgcattgttgctgaacaagaggtacaatattacgttctctttttgtatacaaagactattaatttagagacctagagctttcagatcttggaggggttcttctatctcaataactacccaacccccatgttct

SEQ ID NO: 409959 - DNA, 296 bp, Homo Sapiens
aatgaaggtcagggaaattaaatgattgagctgcagatacacggccagtaaatgagagaggccaaatattttgacaccttgccatgtgtggtttttattactctgagtagcctctagagggtaaatgtaggttttacaaaatgagtagccgtgattcctttcttcactaggaattttcaacatgctcaaatgattttggtgggggatagacataagtagtaaaaagcaggtttcataaaagcttaacttttgactggagtttgtaataactgcatcagttaagattaggttcacta

SEQ ID NO: 409960 - DNA, 126 bp, Homo Sapiens
tttttaattgggattatattatagatcttttaaaagctgctatataacctgatatattgaggaacattttacttcaaatagttaaaaacacacaatcacccattatcctaccagttagaggagaac

SEQ ID NO: 409961 - DNA, 318 bp, Homo Sapiens
  misc_feature (67)..(67): n is a, c, g, or t
  misc_feature (212)..(245): n is a, c, g, or t
cccctcccaggtttgcttcctcacctctctccgtcttggtagaattgaagagagtttgtgccttgtnctggattcggctttgacttaagggagtatggtggctggtgtgatctttcagaccacccagactttctccatatcaacaataagcctgtttcactttcttatcattcatgtgtttgctggagtagcacttgtaatttccttcaagnnnnnnnnnnnnnnnnnnnnnnnnnnnnnnnnnngcattcacagcttggcttcttgggctcaaaagcactagttttcagcctatcttggctttcgacatgacttctt

SEQ ID NO: 409962 - DNA, 210 bp, Homo Sapiens
  misc_feature (144)..(144): n is a, c, g, or t
caccctttttgaagggttgatgtttcaagtctgtgaactgtggatgggccttgcctttagccctccagtcagtgctgctcttaggattccaatgaacacaacacccaggacttgcctttcatatctggagctcaaaatgctcancttcaggtctgagaagccccagaatttgccatggggctactggacggtcatgtccttggagccaag

SEQ ID NO: 409963 - DNA, 345 bp, Homo Sapiens
gacgtcgggaaaggaaacagaattccgctgtttttcccgctccctcgccgcccctccgcccagcgcctcctcccactttacagcggcggggtcactagaccaggcgctcctggaaagtttccctgaaagccaggggcggcaggcacgaccggactggggctcagcatgtgcagtctgagggaagccggacctggagggaatcatgcggacagctcgggatgcagctaggagctagatcccggccctttggagagtggaacctcctggcccgcggtacttgctcgacaagtcggggaagggatgaatggggaagcaggaccccggaggcaggtgcggccactgtgg

SEQ ID NO: 409964 - DNA, 337 bp, Homo Sapiens
  misc_feature (99)..(99): n is a, c, g, or t
atgggctctcagcctcccctctcttctccctttcacttcctcactacctgctctcttctcccgttttccatgcaccttcttccaaatttttcctccctntcctcctcattcctcatgcaaagcaaatgctcagctgccttcgctggcctggttatgtcccaggatgcaagttattttacaaaactgaaattcatcagcatttttagtccttctactttgttctatctctagtgggttatttaattttgggaacccaatatcatatctaaatgttcattagctttttaaatgaagcagtgggatcctagagcatcaaatagatgtgtttttgatagcc

SEQ ID NO: 409965 - DNA, 313 bp, Homo Sapiens
  misc_feature (21)..(21): n is a, c, g, or t
  misc_feature (135)..(135): n is a, c, g, or t
  misc_feature (163)..(163): n is a, c, g, or t
  misc_feature (264)..(264): n is a, c, g, or t
aaaaaaagtaatatatatgantcaatacactttcattagtctgtggacattaccaagtacttattctgtttgtattctaaaacaaatggtgctactttcaaaaatattcttaactagtaagtataatcttaaatngtctttcttatttacattagatattttngcctgcacacttatagcaagaaaattttagtaacacatatcactatcccatttatttaattgactttaagattgccatcttgaattttgaaagtgattttnttctgatcaagaaacctctcattcactaacaacttatttactataaaaa

SEQ ID NO: 409966 - DNA, 203 bp, Homo Sapiens
attggcctcccacatgggcacaagggcaaggctggggacattgggtctcctcatcttatttcccaggtctaggctgatttctattaataattaaattaatcgtcgttgtcctggacctcacttcttaatgtgattccagggaactggccacattccaaaattcataatctaaggtagtgaaagaacgtgaacatcaagacagt

SEQ ID NO: 409967 - DNA, 249 bp, Homo Sapiens
  misc_feature (29)..(29): n is a, c, g, or t
  misc_feature (68)..(84): n is a, c, g, or t
  misc_feature (128)..(128): n is a, c, g, or t
  misc_feature (135)..(135): n is a, c, g, or t
gtagcatatggcttcctctactgtatgtnggcatttgccacttttggggatttgactcctgcaggtannnnnnnnnnnnnnnnngggggagtgtgacggcagtggatatagtcttagatgatgttttnaatagtncaagtccattagtgtcttactctagagaaaacgaaagactcactgtgtgagttttcttgccctctggttttcagaattctgtgtagtttctcaacatttcctttctacctgtcc

SEQ ID NO: 409968 - DNA, 295 bp, Homo Sapiens
cttatatgatagaaaaggccgcttctccatttttcataaatttgagtattgaaaggggttaaattcaggttggataacattgcacagtagaaagaaaagtacacttattctacatataacctgattaatttagtataggagagttacattccaccaaaagaaagtgttcctgttcatagtcttgggctttaattacaaatgttgacttcgtgacattttgagatttgagaagtctaagagcagaaagaattatagtttatattgatcatacataagcatgttcaaagactgccag

SEQ ID NO: 409969 - DNA, 305 bp, Homo Sapiens
gtgacagggattgatctgagaaaggagaggtgagggaaggaacagtggccttaggtggaggtggactcaagcccagaaccacgctggcccacccaggtgctgtaggaccacctactccttgagagcaagactcccacccgcattggggttttcgcctagaaacagttcagcttgtccagaatctcccagccttgaagaccccttagagtcctaccttctttgggtcctgcttccttccaaatagatagtatcttaagcactgtcctagacaagtttgtttctccctctgctcaaactctcctttt

SEQ ID NO: 409970 - DNA, 226 bp, Homo Sapiens
  misc_feature (117)..(117): n is a, c, g, or t
ggtgattcttaaagggccaccgcacaattagccccctcagcaaggcccctaatgatacgtctaattagcagccccctaattagcaacaacttaggcataattacaaacccaccaggntccaaagcaaaggctcatgctcccttctccctccgcctccctggctttcaggagaaacaggggccagccgggagtcaggaattcttctaaagcatcaaaccaaaccccg

SEQ ID NO: 409971 - DNA, 288 bp, Homo Sapiens
  misc_feature (125)..(125): n is a, c, g, or t
  misc_feature (198)..(198): n is a, c, g, or t
aggcattcaaggaaccatgggaagctgacttttcagaaggaggacatggacttccaattcaactgagcacgttgtatcccagaaagagaaacatagacagagtgacccatgctgaagcataactntggttagcttctgaacacagtgacaaaggcagaatcctatcaaccaaaaagccaaaggaaaccaaagcacaanttcccccacagcattcagcacccgaggatggtggccacaatctacagtttggggggaaaggaaatgtggatcagcagaccctgggcacgt

SEQ ID NO: 409972 - DNA, 180 bp, Homo Sapiens
gtttctgcttgctgttatgcaatattagctttggaataatctggtaattcttacttaacaccaattaataaggaattagagtaataattttagatgtgaataaattgcttcaaattataacatgttttgtagtttatataaattgttattagtgatgggaaaataatcaacaaggcatgc

SEQ ID NO: 409973 - DNA, 347 bp, Homo Sapiens
  misc_feature (101)..(101): n is a, c, g, or t
cctaaccacatcccaaaggccccacctgctaacgctatcacattggtgattagctttcaacacgtgaattttgggggcatagtgggtccacctggatggtncaggataatctccccatctcaaaaaattgaatcacatcttcaaagtcacttttgccatataaggtctaatcttgggttctagggattgggatgtggatatatttggaggttgtatgtgggagaggggctggatggggctaattcctaatctgggcttgactgcatggctggaagaggtggtctggcagactaggaggaaggtctgggagcaaaacatggctcactttgagatgagggggccaagcc

SEQ ID NO: 409974 - DNA, 408 bp, Homo Sapiens
  misc_feature (95)..(95): n is a, c, g, or t
  misc_feature (113)..(113): n is a, c, g, or t
tcatttcttgactttcatgtgggtaaccagttccccaccctcattcgaagtttccaggtagtaatttattcaatgatgcaggtctaatgactgtntttggaagagggccagantctgtcctgtggaggaggtggtggtggtatggtgagggtagtggcctccctgctgttttcaaaatcacagactaaaagcctttgattgtgccaaagaaattcattcagagcaattaactgcatggctagaaatgctttcttctctgataacttaacaaaactccagctgtcagtctttatgaagctggttaagtgtgttcatcttttccttgctcaagtgtgggctatggaaagaggtgaattgcggtgacttctgtgggtgaggaggctttcagtgttctgagaccatgcttaa

SEQ ID NO: 409975 - DNA, 330 bp, Homo Sapiens
  misc_feature (165)..(165): n is a, c, g, or t
  misc_feature (302)..(302): n is a, c, g, or t
caggtctgtttctttattctgttgccctcgtggagcatggtatgttcccttcctaagaaggtttagaactccccttgaggtaaaaagctgcctacatttctgtaccgtaccttacatttgggtggtttttctccccagtctctcctgactcaagtcttgattttnttttgctttatcagaatcttacactttttggttccttttattagttattcatccctctccaggagctctttattacccaataatttacaacacagggaagtgttctgtgacccttttaacccttcttgagcatgatnaacccattgcacataaaaatatatctgg

SEQ ID NO: 409976 - DNA, 366 bp, Homo Sapiens
  misc_feature (344)..(344): n is a, c, g, or t
gagccacctttatgttagtgcatgccatgagaatacctacagtgcatgccatgggaatctaatggtgattcgttccacttctaagagttgactaaaggccaggtttatcagatgtgcagtttatatttggactacagatattagtgactgggaaaagagctttcatgttaacttctttgtaatgtagcatcatcctgcaacttcagattttacaggttagattatgatttcagttttcatagaatagttgttggcctttaggttggctagagtcggaaagaactaaaatgaatcattttgtccttgtgtgcttagtatagttgatagtgttcttcctaattctngtttttatagtatccataaagc

SEQ ID NO: 409977 - DNA, 329 bp, Homo Sapiens
  misc_feature (48)..(48): n is a, c, g, or t
  misc_feature (76)..(76): n is a, c, g, or t
  misc_feature (89)..(89): n is a, c, g, or t
  misc_feature (98)..(98): n is a, c, g, or t
  misc_feature (291)..(291): n is a, c, g, or t
aaacgagagattttattttctcccaggtaggtagaccaaatctggcanggcagggacccattcttatgcagatgtntcctgccattttnaaaactggntcccatcttgaggcgcagtttggcaattccagctcctgccctcctgtccgtattctagccagctggtcggggcaaggtagggaagctaaaggttcactccttccctttaatctagacgttgcacaaatccttgtccagaatataggcacatggccacacctcgccacagaggagactagttactgtgtatganggaaaaaataatcttgggagggcacgtagcattctctg

SEQ ID NO: 409978 - DNA, 524 bp, Homo Sapiens
  misc_feature (36)..(36): n is a, c, g, or t
  misc_feature (140)..(140): n is a, c, g, or t
  misc_feature (148)..(148): n is a, c, g, or t
  misc_feature (341)..(341): n is a, c, g, or t
  misc_feature (368)..(368): n is a, c, g, or t
  misc_feature (391)..(391): n is a, c, g, or t
  misc_feature (452)..(452): n is a, c, g, or t
  misc_feature (461)..(461): n is a, c, g, or t
  misc_feature (495)..(495): n is a, c, g, or t
cctaatcatactgaaatattggtgcacacctctctncattagatttcacttttttaaaaaacccagtggacattgctataaataagatttatttggctacaaataacctgggatgttgcttattatgattgatgcctgcnggtttgtncccaagctgagtgaaattgaacctcgtcctccctactcattttgatgactgaggctggtttataagaaaaggaagtttggagaagaaaaccgagattagaaaatatcatgttttggttggagataagaaccagggatggcaagtaccagtgtgtacaaatgtatttcacgggagtttgaaggaacgcataatncaagagggaaaacaatttggtcccttncattgggacgtatttattttggnatttggggtgaggcaacaaaatgggaatgtgggtctgttaaggaggcattctgtttgtccntttgtcccngatgtgatgatcattgccacatgttagatggacncttcatatccaggttttttccctcagggg

SEQ ID NO: 409979 - DNA, 356 bp, Homo Sapiens
  misc_feature (225)..(284): n is a, c, g, or t
gtttttaaagacaatagagtcttcatgatctaagtgttagcacaacttcttgtttaaaatattttggacgtctatatgttgttaaatgctctgatacgtattctaaaaaggactggttctatgtgattattataatacttaagataaatggaaatccctagattgtcagttttaaaattagtttcaagtagtggaacaatgaaaaggtaaaattttaatatgctnnnnnnnnnnnnnnnnnnnnnnnnnnnnnnnnnnnnnnnnnnnnnnnnnnnnnnnnnnnnacatttgcatgcattagtcttaatagaaatctgacaaacctttcaaagaagatgatatagggaagctttcct

SEQ ID NO: 409980 - DNA, 298 bp, Homo Sapiens
  misc_feature (144)..(144): n is a, c, g, or t
cttgacaattgtatatttaatgtgtctttgactagaatgtcttaaaaattttatcatctacaattattgttttattggattcttctcaaaaagcggcttacagtcaactacagtccaaaatttgctccttggaagactcctgantgcaggtttctgatgatgtcagaaagactgtgctgttggattagacagaaaacttctaggactctaattaaaaggctgatgtggtcataaagattgctaacccagtatggaagcaaaaccaagagttaattgcatgggcctgagctaatagggg

SEQ ID NO: 409981 - DNA, 377 bp, Homo Sapiens
  misc_feature (64)..(64): n is a, c, g, or t
  misc_feature (116)..(117): n is a, c, g, or t
  misc_feature (191)..(191): n is a, c, g, or t
  misc_feature (285)..(285): n is a, c, g, or t
cttgaaaaatcagaacacaggcccttcattcattcatttgttaattctgcccctactgattganttcctgctgtatgctaggcatagttaaggcactaggaaatcgaaagtaagtnnggcaaaatcccagtcttcctggagcttaaagcctaggcgggagagataaaaacataactagtaaaacaaataantttatgtgtcaggcgatgtattgtagaaggaaataaggtagagtcagaggtttaagaggtgtaggaattgaagtaggggcatccaatatatgtngggtggtccaaaaaggccttaaaaaacttaagagagtggataaaaccaagtggatgttcaagggagagaccattttcagagacaaggtacag

SEQ ID NO: 409982 - DNA, 142 bp, Homo Sapiens
attacatgttttgaggaagcgaaaggctgccactcaaacttaggtctagagattacagccaaactcagcctcatctacttgtaaggaaatcaagaggaatttggcttaggaaagctatgatttgatttgatttactgttaag

SEQ ID NO: 409983 - DNA, 325 bp, Homo Sapiens
  misc_feature (46)..(46): n is a, c, g, or t
  misc_feature (232)..(232): n is a, c, g, or t
ggaagatggtgacatgcacaaggctacacaaatgaataaataaggnttgggaaacatacatttgggtctcttgactccaatttggttgctcttttaatgataccaaccactttgaccattcaaaggggtcattgtggtcccaccagcccccctccatacctgctgagcccaagtacagactcaaaaggaatttcccttgtggctagaggatgtactgtataaaagatcaggntcccatttcacctttcctttctttcagaactatcttagctttacctttggataaatgtatgtcattagtgggagatcatctgcctcttaaatt

SEQ ID NO: 409984 - DNA, 179 bp, Homo Sapiens
  misc_feature (95)..(95): n is a, c, g, or t
gatttgataacaacagtttttccaacttagatacttctttctccattccaaatagattctgacctaccacagtgtagaatgtcactacatttttnttattatttgagcttttctgagcaaggtgattctgcaacagatctttaaacagctttccaacagtgcaattaaacaatcttacc

SEQ ID NO: 409985 - DNA, 463 bp, Homo Sapiens
  misc_feature (452)..(452): n is a, c, g, or t
gttccaagtagcagaatttcctgctttttaaaggctgaatattattccattgtgtgtgtgtatatatatatcacatttaaaaaaattttattcatccattaatggaaaaccttcattcttgaaaaaatagcttataaagctatttatgtccctgatacctccaaagatcagaatgagtaataatctcacaaggatgggaaatacttcctctcttccaccttttgcatgtccatcctttgaacatgactcctggtgtgttagtctagtctgttctcatgctgctaataaagacatacctgaggactggctaatttataaaggaaagaggtttaatggacttcacagctccacatgactggggggggcctcacaatcatggtgggaagacagaagaagaggcaaaggcaccatcttacatggtggcaggcaagggagcatgttcagggggactnccctttataaa

SEQ ID NO: 409986 - DNA, 476 bp, Homo Sapiens
  misc_feature (96)..(97): n is a, c, g, or t
  misc_feature (184)..(184): n is a, c, g, or t
  misc_feature (285)..(285): n is a, c, g, or t
  misc_feature (307)..(307): n is a, c, g, or t
  misc_feature (431)..(431): n is a, c, g, or t
gtcttttgcctactttttaatgatttttttcttgtaaatttaagttcttgtagattctggatattagacctttgtcagagtgattgaaaaaatttnntgccattctgtgggttgtctgttcactctgatttcttttgctgtgcagaagctctttagtttaattagatcccatctgttaattttngctttggttgcattgcaaccaaatcaaaatgttcgctttagaagtttttgtcatgaaatctttgcctgtgagtatgtcctgaatggtattgtctagatttncttctagggtttttatagtttngtgttttacatctaagtctttagtccatcttgagttaattttttataagaaagggggtccagtttcaattttcctgcatatggctagccagttttcccagcactgtttttatatagggaacccnttcctcattgcttgtttttgtcaagttttgcaaagaccagatggt

SEQ ID NO: 409987 - DNA, 243 bp, Homo Sapiens
  misc_feature (81)..(81): n is a, c, g, or t
  misc_feature (164)..(164): n is a, c, g, or t
  misc_feature (186)..(186): n is a, c, g, or t
cttaaaggagattggtcagagtgctcaactagcaacaccctgtctagcacagaagtcattctgagcaacggcatgcagttntcctaccaagagagcgtgcaggtcatagagtggtgagaccactgggaggaggtactggaagaccaggggaacacaggaaaganttcaggtccatttacaccaggngcctgccagacaggcacccaagattggacagtgggttactgatggtcatagagaggg

SEQ ID NO: 409988 - DNA, 318 bp, Homo Sapiens
  misc_feature (113)..(113): n is a, c, g, or t
  misc_feature (185)..(185): n is a, c, g, or t
aaagggtaggactctagaacatttaggtcatggctttggaatcagagctctcagcagtttcatgctttgtggataattaaaatcaatacaaaataattacagaactagaaggntctccagatacctaatccagtcccttgtctccaggagaaactagatctagtttaaactaacttccacacagntacttgagttgtatgagagaaactgggactctagattcactttctgcactttaccaaggaatattgcaaatgtgggcttggtaaccagtgttcaaaaagagattatggttttttattaaggcattgacattgg

SEQ ID NO: 409989 - DNA, 291 bp, Homo Sapiens
  misc_feature (125)..(125): n is a, c, g, or t
  misc_feature (175)..(175): n is a, c, g, or t
gaacagtgttcagaggggactgagagctcaaggagggaaaagtggctagtattccttcaaggcgtcaggtgctagggcagtcgagcaggttcttagccagctatgttagcttgggggtgcccttntacttggcacttaagagtcccattagctgacctcccccacacaccttgantgccccctcctatagaggcggcagatggcgagagggggaaggggtgctcctgtgtacccctgctgttgagaaccaaggctgccttacaggggaccttcagcctgggggacagccat

SEQ ID NO: 409990 - DNA, 246 bp, Homo Sapiens
  misc_feature (28)..(28): n is a, c, g, or t
  misc_feature (72)..(72): n is a, c, g, or t
  misc_feature (76)..(76): n is a, c, g, or t
  misc_feature (160)..(160): n is a, c, g, or t
  misc_feature (208)..(208): n is a, c, g, or t
tctcctctgagaaccacctgtgcctctnggcctcctgcctagcctgggccttctggcacagggacccctgcntttnagccagcaggctaatggtagggagtgagggttgggagacagctaagggggctgtggtcagtttgagggggctcaaattccagtntgcccctttaaggcccctggttggctcagaatctcctgaggccctggncaggttaaatttgtcctgtctgtcattagccttgactt

SEQ ID NO: 409991 - DNA, 215 bp, Homo Sapiens
ggatgaaaaagaataccccgtgtccaaatagcaaaacactctgaaatgaggcaaaccgtggtttgttgaacaggtgttctgggacaaggttgccgaatatgcattagccgtaatccccaggacagccatacagggtgggtcttaaacagttttttagattctcgagtataaaggtataatattgaagaataagcacaaataatgttcatcataca

SEQ ID NO: 409992 - DNA, 113 bp, Homo Sapiens
  misc_feature (43)..(43): n is a, c, g, or t
gagatttgtcctttcacctcctgcccttgattctcagaggctnttactgagcctcctcagttttcatggcaacgtaggtatttgcatggtgtcttgtgggcggaggattacct

SEQ ID NO: 409993 - DNA, 309 bp, Homo Sapiens
  misc_feature (221)..(221): n is a, c, g, or t
attctccagaaaacccctctggtcatcagatgtccaccatgctctgagagggaagagtaatttggtcctagtctgctctctcattttttattagttagaaccaagttattttccagtcttgggattaggcaggttcaagattgactaaggctaacagtagactatgtttagactgatttataaacttcctcaaaatttaggccatgatgaaaggaccaganatagaccttttccagttatagcctaggatatgatacactggtaaatctaaattccattctgttaattgactttaaaatttaatggctc

SEQ ID NO: 409994 - DNA, 363 bp, Homo Sapiens
  misc_feature (94)..(94): n is a, c, g, or t
  misc_feature (97)..(97): n is a, c, g, or t
  misc_feature (109)..(109): n is a, c, g, or t
  misc_feature (111)..(111): n is a, c, g, or t
  misc_feature (114)..(114): n is a, c, g, or t
  misc_feature (175)..(275): n is a, c, g, or t
gtgcacaaaaggctgtctgcaagctgaggagccaggaagccagtccgaatcccaacaactcaaaagttgggaagccgatagtgcagtcttcagnctntggccaaaggcnantgnagcccctggcaaagcactggggtaagtccaagagtccaacagctgaagaacttagagtctnnnnnnnnnnnnnnnnnnnnnnnnnnnnnnnnnnnnnnnnnnnnnnnnnnnnnnnnnnnnnnnnnnnnnnnnnnnnnnnnnnnnnnnnnnnnnnnnnnnnnaagctctacagggatgccaaagcagctcgtaaattagaggctagctgtatgcccagggtgaaaagactggcaatgcttacttagacaa

SEQ ID NO: 409995 - DNA, 139 bp, Homo Sapiens
  misc_feature (23)..(23): n is a, c, g, or t
  misc_feature (52)..(52): n is a, c, g, or t
  misc_feature (101)..(101): n is a, c, g, or t
gggatggcaggcgtgagcattcngacccggtctgccacagtcattctttttnatgctcagacagtcacaactttggccattcaagaccctttcataccggntcttatgttcttataacacgacctgatgaatctttaaa

SEQ ID NO: 409996 - DNA, 283 bp, Homo Sapiens
gttcatcattccaaataaaatcaaaataagatatctttaaaggtttctcactagaaatgatgatgaagagagcaccatcaataaaagagacagacgtgcctgaaagctccttccctgccctgccctttccagtttcctgtggattctcaagaccatgaaaggttagaaatattagctgcagagagaaaagaaacataacatgaacatattttcctatcagtgggatttttcccctacaagatccatttttgaggaagctaatgggttaaggagcacggccttt

SEQ ID NO: 409997 - DNA, 123 bp, Homo Sapiens
  misc_feature (25)..(25): n is a, c, g, or t
  misc_feature (34)..(34): n is a, c, g, or t
  misc_feature (61)..(61): n is a, c, g, or t
caggcgctctccctgtggtcaggangcagcccgnagaccctaaaactccattggcctcatntccagaactgaatcaggtaaagaacggagcagagcccgatggggcacagaagccacacagct

SEQ ID NO: 409998 - DNA, 282 bp, Homo Sapiens
  misc_feature (26)..(26): n is a, c, g, or t
  misc_feature (168)..(168): n is a, c, g, or t
  misc_feature (184)..(184): n is a, c, g, or t
  misc_feature (188)..(188): n is a, c, g, or t
  misc_feature (192)..(192): n is a, c, g, or t
tggaaaggaaggactctacatttttnatactctgccactgtggtgccaactctacacaaaaacactcccagtcatcatttttaggagcagctagaccttgatacagagcaagaaacactgggatatggtcgccttcatagtaatggtgaacgggcatccccaaatgcntcggtagcagcatgantaantganggatttaaacactgctgagagtcttctatacctgcacacttgctactgaaataggagactggattcacagacctttacaggttaaaagct

SEQ ID NO: 409999 - DNA, 230 bp, Homo Sapiens
tgcaggcactagtgaccttgacaggccattggtgacttttttacatggtgggggtaaaagtctgattgaaatgggttgagaagagcccgaatgttcttctgattccaaagtcaatgcctactttgttttgctaagctgcatagaaagttctcgtgtgcaggatgcagtcactgaaaatgttgtagaactgaagaatttgtacctcattcttggaaccactcaacctggga

SEQ ID NO: 410000 - DNA, 306 bp, Homo Sapiens
  misc_feature (273)..(273): n is a, c, g, or t
tagaaatggcaatggctagagtgaaaaacatgaaggctgctaaaccaatcacacattccagaaaaaaatagcgcttttataaaactcactccattgtggcccacagaacacccaaggccaaaaagattagaaagtttagaaagggcagttatctcaacagaccgatgctcgcaaagaggccgctgttctctgcagcaaagagcctcatacattcgcaagggattttttcatccttaggagacctgagtcctcaaggaaaaccctcttcttggnaagttagtttgctcccttccaggaacgtttttt

SEQ ID NO: 410001 - DNA, 265 bp, Homo Sapiens
cctttgggtgcctacgccaacagggccctcctgggtttccagcacaaaactggccggccgtttgggcagataccgagctagctacaggagttttttttcatatcgcagtggcacctgggaatgccagcaagacagaaccgttcactcccctgggaaagggggctgaagccagggagccaagtggtgtagctcagcagatcccaccccgacagagcccagccagactgcctcttttagatttctcctctctggggcagggcatctt

SEQ ID NO: 410002 - DNA, 247 bp, Homo Sapiens
  misc_feature (13)..(13): n is a, c, g, or t
gtccttctttggntcttacatctagctgagaataaggtgacattaacctacttggtctatgtcctggccagtcttcaataaggagttgaggagtaagaggctgaatatagtctcagtttttttcacatccctggttggtgccgattgactagcagctagactccagtgccagttgtgaccatgttttcagtgacacttaaaagaccatcttagatgtggtatgggtatcataatccttccctccctg

SEQ ID NO: 410003 - DNA, 135 bp, Homo Sapiens
cttaaatcttcataagataattattcaaataaatgttttttggataaattgaccttttgccacatattgagatgaaatagagtcaattagaatgtctgcctatggtcacatcagctgaataaaggacagactatt

SEQ ID NO: 410004 - DNA, 233 bp, Homo Sapiens
  misc_feature (62)..(62): n is a, c, g, or t
  misc_feature (109)..(109): n is a, c, g, or t
  misc_feature (173)..(173): n is a, c, g, or t
  misc_feature (188)..(188): n is a, c, g, or t
  misc_feature (190)..(190): n is a, c, g, or t
  misc_feature (207)..(207): n is a, c, g, or t
gttagcatagggctacattattagctattatatcagttatatattatggttagttggcaggncctcttaataaattgagtagagggtttcagggaaagagaatcaaggntgacttataccttgaataactgggaaatgaatggttctattcactgaaatggagatgactagangaaaagcaagttttngngagaaaaagcaagagtnctggttttagacatggtaaattttgg

SEQ ID NO: 410005 - DNA, 235 bp, Homo Sapiens
  misc_feature (76)..(76): n is a, c, g, or t
gacagggtctcactttgtcgcccaggctggatgtagtggcagaatcatggctcactgcagccttgactgcccaggnccaagccatcctcccacctcagcctcccaagtggctgggactacaggcttgcaccaccacaccaaggtgaagtgttgttttgtttgttttttgtagagacagttttgccatgttgcccaggcagtgatcctcctgcttcagcccccacaaggtgttggg

SEQ ID NO: 410006 - DNA, 101 bp, Homo Sapiens
gggccagaaacccccagttttgaagtgtgtgtgtcgtcacttcctgcccggtatcagtccctctggtgactgctctttgtttcttgaagaattcagcccct

SEQ ID NO: 410007 - DNA, 271 bp, Homo Sapiens
  misc_feature (58)..(58): n is a, c, g, or t
  misc_feature (93)..(93): n is a, c, g, or t
  misc_feature (129)..(129): n is a, c, g, or t
  misc_feature (133)..(133): n is a, c, g, or t
  misc_feature (216)..(216): n is a, c, g, or t
  misc_feature (246)..(246): n is a, c, g, or t
ttaagctaaaacatttcaaaataagatagaaacattaaatatctaatgattggaaaantaacacggaatatactgaagatacaagtgaaacangtcaaaaatacaaattccaaaatgaaaatatctgtnccancctcacgcaggtggcgtgaggtggtgctgaggaaccagcaggccttctttgggccaaatttctggttacagatcccacaagtnggaaaacaggacctttggggctctcccgtnttttgccaggaaggtttcaacactt

SEQ ID NO: 410008 - DNA, 141 bp, Homo Sapiens
aaatcttgcgcaaattcctatgtaataggcctggggtgtcatgctctataaaacataaattctcattctatgagttttacttaaccctatatatcagacttaccttccagtctgactcgggtgtaacattacatgatgaag

SEQ ID NO: 410009 - DNA, 353 bp, Homo Sapiens
  misc_feature (39)..(39): n is a, c, g, or t
  misc_feature (185)..(185): n is a, c, g, or t
  misc_feature (282)..(282): n is a, c, g, or t
  misc_feature (335)..(335): n is a, c, g, or t
aatggtggttacctttggagacaagcactggcatttgantgcaagactgaaaatcttacttttcactttacttttgtatattgtttagagtatgcagccaatgcatgtatttcaaagaaatgacaccctgatataaacattactgggaattctgcacatgacattcccaactatatgtgtaagcnctggtttttaagaagatgatgtatcaggctattggtttgttaacgccgttgttttgcttgcttatgactatccataaaccatgacaaaaagacaatnaactttctgcatcttccgctgttttctggtagcatgtttattgctccagtccngatggtttccatatagag

SEQ ID NO: 410010 - DNA, 320 bp, Homo Sapiens
  misc_feature (87)..(102): n is a, c, g, or t
gaaacactaactcatacttctctttattggttgcaagtggcacgcaggaacagagggagagtggggggctggtgggggaggggagannnnnnnnnnnnnnnncttgaatgtgcttcgcaagccaggctatcttccaaggaaggcagacagtgggagagcagagggactgactgcaggcaagcacattgaagaaagacactggcgggtttccccaccctcaccccaaagcagaaaactagcagacgtcagctcagccccgtcctgggcacagacactacacaaggagacgctggaagtttaagcaatacttttaatactgt

SEQ ID NO: 410011 - DNA, 369 bp, Homo Sapiens
  misc_feature (97)..(97): n is a, c, g, or t
  misc_feature (139)..(139): n is a, c, g, or t
  misc_feature (200)..(200): n is a, c, g, or t
ggaagcagtgagtggataagtgcctgtcctgggcagaagggatataggggaaggtggccaaaggtaggatggggaagtggatcccaggaagcttttntttcttctgaggccaatttaccaccacctcattgggaaattnttggtagggaggcacccatccaattgccttgcagaatacagcaaggcagggagcccaagantcagagccaagggaagaaacgaccagttgaggttagtaatgtgaagtctggcaaccgtgcccgtcattcctccctggttcctctgttcatcaacgttggggctagtctggctggggcatggtgggcctgcctttccatcctttgggccccttggaacaagggggcaact

SEQ ID NO: 410012 - DNA, 329 bp, Homo Sapiens
  misc_feature (151)..(151): n is a, c, g, or t
  misc_feature (209)..(209): n is a, c, g, or t
  misc_feature (211)..(211): n is a, c, g, or t
  misc_feature (243)..(243): n is a, c, g, or t
  misc_feature (245)..(245): n is a, c, g, or t
agctacagcaccgacctccaggagttggtgcagtggcctggggtggcagccggtgtgcctgattgccctggtcgggcgttcagggcagggagcagaatggccactgcagaagggatgtgcctgtaagtggtttgtccccagcaccaatctnctgtttgcggacatactatgggcagtgggtgctggccaagagctgcacgtaggttttntnttgactgtccatgcagggctacatggcccatnantgtcagtcccagctgtggaagtgggggctcatgaatggagtttctcatccaaggtcagtcgcgctggtggacggccctggctgg

SEQ ID NO: 410013 - DNA, 322 bp, Homo Sapiens
  misc_feature (12)..(12): n is a, c, g, or t
  misc_feature (85)..(85): n is a, c, g, or t
  misc_feature (97)..(97): n is a, c, g, or t
  misc_feature (112)..(112): n is a, c, g, or t
  misc_feature (263)..(263): n is a, c, g, or t
ctcgtgcgagangtttaggcctttaactttcccagagccacatagcaagttagttgcagaattggtacctattccagagactttntagtcttctggngtcccagagctctgnctcctcagtgggcttttggccatctgagaaggaaggttcaattatagtttttggttcccggatacctgagggctggtactaagtctggttcttaatgggaaggggagaactgggcgcctcctatccctgtccagtgagagcatggctctgnatttgggtaaactgtaaaacaagaccagtgcttgagagccacctccacttcttcagatt

SEQ ID NO: 410014 - DNA, 300 bp, Homo Sapiens
  misc_feature (18)..(18): n is a, c, g, or t
  misc_feature (94)..(94): n is a, c, g, or t
  misc_feature (157)..(174): n is a, c, g, or t
  misc_feature (185)..(185): n is a, c, g, or t
cagatcatggcacctctnttttcagaggagaaagagaacagtgcagatgcctggccaaggacacacagcaatcagaggcaggctggcttctttnccccggtcccgccacccggcgacacctgtcagcccccttgcaaactctgtgctccttgagggnnnnnnnnnnnnnnnnnncggggtgggtntggaccccgttacaagggattcctataaatggcgtggagaggattaataatgtatttataacacattttggtggtagtcgaaaatgatctataaaatgtgcagtaaatgttttat

SEQ ID NO: 410015 - DNA, 408 bp, Homo Sapiens
  misc_feature (150)..(150): n is a, c, g, or t
  misc_feature (262)..(278): n is a, c, g, or t
  misc_feature (315)..(315): n is a, c, g, or t
agagactggcgggtctggaaagaagctctgagcccatccgcgtttctttgttggaccctgtcaggtctcttgttccgtgtccaatgtcagtcgggtagggaggcagtggggcagtcttggttctcatcccaccccggagtctctgcgcancacaattcaggaaaacaatctggaggcggttcaaaacactaagattgattgaacgcgctgatggtttggttttctcctatagcgctttggtagtggcttttatccagaccgnnnnnnnnnnnnnnnnnggaatgaaccctggtatagaaatgttacccgtatgtntgcatatgattgtttttaatatatttcaatttgatgaatcagcctttttcaaggtcagattccagaccgacccttctggcggccaccccccgc

SEQ ID NO: 410016 - DNA, 343 bp, Homo Sapiens
  misc_feature (26)..(26): n is a, c, g, or t
  misc_feature (236)..(284): n is a, c, g, or t
cttgtaaatattcttgtttggatttnctgtatacattgaggaagcattaccggaatgaagagaaacaacccagtgttgcctttcaagtgtgcattgtgccctgtgggcccatgtcccctttcaggagcttcttgactagagagttactcgaaagaggccagagctgaaacttgtgtgtacattttgattgccagtatcagtttggaaaaatgtttaaacttaggtttaactttttnnnnnnnnnnnnnnnnnnnnnnnnnnnnnnnnnnnnnnnnnnnnnnnnnaaggagaatttttttgagtctaaggagtacgttacccaacctagggtgaccataacaag

SEQ ID NO: 410017 - DNA, 237 bp, Homo Sapiens
  misc_feature (89)..(89): n is a, c, g, or t
  misc_feature (137)..(137): n is a, c, g, or t
  misc_feature (195)..(195): n is a, c, g, or t
  misc_feature (211)..(211): n is a, c, g, or t
  misc_feature (226)..(226): n is a, c, g, or t
ggatgaccacatcagttccgtctgacaccagcatccgcacaatacaggcaaagccccttccctctcttcggaggtcggcaccacttttnttccaaacggtatttccaaaaggagcacaacttgaaagaaggagcccnggtgagaaaagtcgagtctttgacggttagtccccctcacggggagcagcgtcaaganaagacacacatgtcangcaggtgtacaaagncagagaaggac

SEQ ID NO: 410018 - DNA, 299 bp, Homo Sapiens
  misc_feature (194)..(194): n is a, c, g, or t
  misc_feature (213)..(213): n is a, c, g, or t
tgagcaccgtgcccagcttttctggctgttctcacgtttattcttctcattgagctttagattattttatcaattcctccaaaaggtcttattgagctataatccaatttgactgaatctatggattgatttacatagaaatgatgatttacatgtcagttcttagctttgaaagattttgtctgtacttattntcatggttttatagttttnctatgtagacactatacatttcttaagttttctccccctggaacaattttgtttgtaattgttattgtggacagggctcttgcggt

SEQ ID NO: 410019 - DNA, 376 bp, Homo Sapiens
  misc_feature (207)..(207): n is a, c, g, or t
gaattcagggcttttcgggagaacctctcttcttacacatcagtggagtactcactgataacactacgcttaatagtaatgttgccattattagtgttacgacccactgatatagagacctatttgacaactaacaggactttcttaaaagtccaaaaaaggatctgctttgataattctgctaggagatccaagtgggtgggtggntctgctagcaccactcctcaagtgtttcaatgttcagtctggggtagatccaattagcagagaagaatttttatgcaatggcttggactagagtttggaatttggcagtcatcactgggaaaaatgaatttcttgcctgtccctggaatccaaaccaaaccaagccatt

SEQ ID NO: 410020 - DNA, 283 bp, Homo Sapiens
  misc_feature (81)..(81): n is a, c, g, or t
  misc_feature (89)..(89): n is a, c, g, or t
  misc_feature (144)..(144): n is a, c, g, or t
  misc_feature (228)..(228): n is a, c, g, or t
  misc_feature (262)..(262): n is a, c, g, or t
agcatgtgtgcggtgtgagtaatgtcactactaggagtagtcatgtggactctaatactgctccggctactacttcaaagntgtaaatnttctggggtcagtctccccaggtaccccctcattgcctcctctgtcacatttctnagtcttggccacttccttaagagtgcccatgacacttcctttcagtccctcagttcctgatcattttctacgttctccatttgntttgggatgctcagctagctgatgcccgagaagncagctgggttggtaattacac

SEQ ID NO: 410021 - DNA, 338 bp, Homo Sapiens
cctgcccacaccagggagaggaggctcctaagctgcatttgggtcgttttgtttccagtgttggcattcaggtagcagaaaattccaccgcctgactgcggtcacctgttgtcatttgtgatgctgggtttttcctagaaatcacctcatcaaaccttttccatcttaatgtcagcccactctttcatttgagttgccatataaataaggactgtagtaagggcagatcaatgctgcgtgtcgctgctggggccagtgaattgacctcagagggtctgccattggcacccatccattcgtttggcagcataacgtacaaggagcaaaggacacgtttt

SEQ ID NO: 410022 - DNA, 501 bp, Homo Sapiens
  misc_feature (345)..(345): n is a, c, g, or t
  misc_feature (365)..(365): n is a, c, g, or t
  misc_feature (372)..(372): n is a, c, g, or t
  misc_feature (473)..(474): n is a, c, g, or t
ggaaaaggctgcatttgtcttggaatttataaatgtattcaaaaatttttttcatctttgttgatgcatatttctgtaatagttttttcctgtcttaattttctctcataaaaggaaaagatttgatattcctgagtcatcactctcctgaaatctcagttttactcagacctgtgctatatagagtattatgttcatgcccatgtctgatgtggagggagagacacagacaggagagtgggtgactgactcagatgtaaatgatcttattatacttgagctgcaaccacacctagaaaccttgacaacaacagggcctgtgtttggatatattctcacttgttnaaatcctgtctgggattttngtatgtncatatgtgtgttcatcagcaaaattggaacaggtgctgggaacaattggcaaagctttaatcagacttatggattacactgttttctcgttatgattaaanngttttctcaattttggccaaggatatg

SEQ ID NO: 410023 - DNA, 324 bp, Homo Sapiens
  misc_feature (123)..(123): n is a, c, g, or t
  misc_feature (129)..(129): n is a, c, g, or t
  misc_feature (180)..(180): n is a, c, g, or t
  misc_feature (291)..(291): n is a, c, g, or t
attgggcgagagggtcgagttgcatttagcgcggcgggggaagttttgcatcagcctcctgggctgtgcctggaacaaggagcccagggcaaccaggtacatagtcacagcccttcatctctnaccgtnttcttattgcatttggcaaaaaagtagaagccgcctaatacaggggttttntgttcaagaggccccaaggctgtcctccgtgggctctccctccggcaggtggattggaacgagatggggattctgggacacagcttcaatccacatggccttccccacggncagggatcctcatttgaaactgctctttgggct

SEQ ID NO: 410024 - DNA, 375 bp, Homo Sapiens
  misc_feature (69)..(69): n is a, c, g, or t
  misc_feature (301)..(301): n is a, c, g, or t
  misc_feature (320)..(320): n is a, c, g, or t
  misc_feature (337)..(337): n is a, c, g, or t
  misc_feature (345)..(345): n is a, c, g, or t
ggaaaatagaatagatgccaaagtcatttattcagtccttagttttcttatgtggcattactgcatctnctagttagtgagaaagcaccctcagcttttactgctcccctccctgcctgccaacacacttgatgtgtgcaaacagccctcaagtatctgtcagatgacctatataaggtattgaataaggtattcttgtcagtttagaaatggactggataaaacttacttggttgtcattattttatctcatttgtcctgttacatgccctatgttaagataattatattgccactaatnaatcaagatgctaaaatgngtattacaactgggctnaatatccntttttatatacaagggtatgtggtatattt

SEQ ID NO: 410025 - DNA, 338 bp, Homo Sapiens
  misc_feature (144)..(144): n is a, c, g, or t
tatagtctattttttctgcatcagagctgtaagaggtcgttctatagtaggtgaacatcattaatatcaacttattttcatggaaatttaatggcaaatgtaaaatacatgaagaaaatctaaaagaggctctttgtgtttgantcattaaacagtaatatgtgtaaacatatagtacatatttagggcattagtattctatactaaagtaaaagaggaatattctgaatttatttattacatcaattgctccttaagtagaaaaacactggtcagttatttaaaatactggcatacctttatagtacaatgaagtagtaatcttggaatattatttg

SEQ ID NO: 410026 - DNA, 323 bp, Homo Sapiens
  misc_feature (124)..(124): n is a, c, g, or t
aatattcaaataataacaaaagattacatttaaaaacaggaatgactcaggcgcgtactcctccctgaactccggagagtgaggcacactagccagcatggtccctgcagtgcccagttttgantttagaattcatagcttgccgttttctccgtgaatggtaaatactttaatgttacgtggaatactatttgtacaacatttttgtctgttgtaagcctaaggtgggtctaaatttcatcatcgctagaaatacccttttcctatacagacagtcggggtttaggactgtccggctggcatgagagtgacacacattcagt

SEQ ID NO: 410027 - DNA, 436 bp, Homo Sapiens
  misc_feature (19)..(19): n is a, c, g, or t
  misc_feature (102)..(102): n is a, c, g, or t
  misc_feature (236)..(236): n is a, c, g, or t
ctggcatgtaccagatgtnttcttagaacacataagcatgcattttcttctctgcattccctacagttaccctttctgggccacagtactttcagatatttnttgataatgtgttctttgcgatcctcatggcccaagattatacagttattcatacctgaagaaagagttgttaaatagggatctgtggccatatctctacacaaagtgaacatcgggtctggggaattaaaaantgaacaggaaagcacacttgtggcattgtactagaccctttacacatattatcttatgatcagaatgtattattattctgctatacatttttctaaggcaaatctattctattatttccatccagaggatgttttcccagttaaaggagatttgactgactatatagtgttaagtcacaataaatttttataatggaaat

SEQ ID NO: 410028 - DNA, 272 bp, Homo Sapiens
tgagcaccacgcctggccatccttaatttttaagactccaaattaagttggaatagactgatatatctaaatcagatgaagcatgtttccctttaaacgagggaacttacaaaacagaagtatttttgttacgtgagctaagaggcaataaagccttatttgacagtgtgcttaggtacccacgatggcagcatgaagacaaaaacaggaggaatcaaagcaattgtactgtgcagattaacatggtttcttttagggtcaaaggaaggctt

SEQ ID NO: 410029 - DNA, 210 bp, Homo Sapiens
tggcatttgcttctgttccttgtatctgtggaagtcaagtagcccttctcaaaaatgagaagccaagctttaaatagcaaactacagggtattaaaagactaactcttcagttaagaacactgtagaaatggtagaccaacttaaagtctaccttttaacaatctttaccccaaacctaaagattctaggggtcacttatctctattacg

SEQ ID NO: 410030 - DNA, 316 bp, Homo Sapiens
  misc_feature (34)..(34): n is a, c, g, or t
ccaccccttagcattggagccaaacaaacctganttcaaacctacacacacactgaagtccccatcttcctccttggagccataatgaagagccactacagtcaaatttctgtttgtggcctcccccaacccctcactatggctgattggaaccaaaatggacacctgacccatggtggcccatgctttccctgagaaatcagggcagatccagctttagttttttcctgtggttggacccataacatgggaatatgggaagttttggtggccctcttctccctgccttattgactgagcatcagaaaaagccagt

SEQ ID NO: 410031 - DNA, 339 bp, Homo Sapiens
  misc_feature (213)..(213): n is a, c, g, or t
  misc_feature (239)..(239): n is a, c, g, or t
cctccagctctattcatgttgctgcaaatgacatgatttcattcttttttatggctgtgtagtgttccatggtgtacatgtatgacattttcttaatccagtctactgttgatgggcatttagactgattccatgttattgccattgtgaatagtgctgcagtaaacatacgcatgcatgtgtttttatggtaaaccacaagttatatttctncgggtatatacataatagtgggattnctgggttgagtgataattctgttttaagttctttgagaaattgccacactgatttccacaatggctgaactaatatacactcttaccaacagtgtataag

SEQ ID NO: 410032 - DNA, 313 bp, Homo Sapiens
  misc_feature (77)..(77): n is a, c, g, or t
  misc_feature (93)..(93): n is a, c, g, or t
gtcaaagtctatacactgttaggatgggactgtacagttttaatatgagtctttcgggttaggctttaagaaaagangaagaatctgcttggnttgtgattattgaagccaatgtttttaatgccagaactgattcttctaccacttgtgacttctgtttgaaagttgctattaaggtcttaaggaaaggattttcccacacacatgtttctgaataacctattctggtcaagttcacagtcttgacctgccaccatgtttcatcctacctggtctgggtgcccagagacctgggagcatctgagctggcagg

SEQ ID NO: 410033 - DNA, 180 bp, Homo Sapiens
  misc_feature (23)..(23): n is a, c, g, or t
  misc_feature (51)..(51): n is a, c, g, or t
tagccacatgatttgggggtttnatttcttcccagtccgctgagtattatnatttatccattaaagcaggaaattcaagaataattgaataactaaaaaatggaggaaaaattatgttatatttttacatggagctttttattacaggtaaatagtaatcactaaaccatgtatactggc

SEQ ID NO: 410034 - DNA, 277 bp, Homo Sapiens
  misc_feature (207)..(207): n is a, c, g, or t
  misc_feature (249)..(249): n is a, c, g, or t
ttgggaggtgctgagccttgatgacttgtccctacagtggagatttccaaggaggtacctattgttttcctgcgactctgggaacagttttgaataatgtgatccaacaggttttctccccatcatctatagcgctatatggtttaagtcaacaaacattacaacgtgggtgaaaaagaatatacacttgggaaattagaaccatgnagccagactgggcagtaagacaacaaagagggtctggttttnaatttaggaaagacctttatgggccagg

SEQ ID NO: 410035 - DNA, 278 bp, Homo Sapiens
  misc_feature (37)..(37): n is a, c, g, or t
  misc_feature (154)..(154): n is a, c, g, or t
  misc_feature (167)..(167): n is a, c, g, or t
  misc_feature (211)..(211): n is a, c, g, or t
catagctctgcatggtaaagccgtttaaacatatttntttggaaaaatggttaagagggtgcctgtggacccatttttcacggttaggtttaggtccagatatactgttttttgtcttacagtaaacagcttgctctagaaatgtttaatagantgtaagctaagancttaatatgggcgatttctgtcagctaacctatcctagaaaatntttttagaaagttagtttgagcttattggtgttaaaatgacatatctttctgcagtgttgattagaa

SEQ ID NO: 410036 - DNA, 467 bp, Homo Sapiens
  misc_feature (53)..(68): n is a, c, g, or t
  misc_feature (70)..(70): n is a, c, g, or t
  misc_feature (72)..(72): n is a, c, g, or t
  misc_feature (117)..(117): n is a, c, g, or t
  misc_feature (163)..(163): n is a, c, g, or t
  misc_feature (206)..(206): n is a, c, g, or t
  misc_feature (229)..(229): n is a, c, g, or t
  misc_feature (415)..(415): n is a, c, g, or t
aaataaaatggtttattcatatactgaaataaagtagcggaaatcagctaatnnnnnnnnnnnnnnnnantntagatgatattctagaaacaatgttgagtggggggaaaagaaaanttagagttgaataccactgtaataaaattttgtgtacatatataantctgtagaaaaaaattaacgatttcaaagttttcaggataganggtacttctgagaaggaataggntcaagggagaagaacatggtggggttgggggacttaaactgtcctcaaactgttcagtgtcttacatttggtgccagatttccaagttcataatgcttcattacattactttctgtacataatatatttccctgataacattttctaacgttcggccaaaaccacattaatacaaagttattagtncaaggaaaacaggtggtttctttgaactttactttgaggcaaattgggtaag

SEQ ID NO: 410037 - DNA, 489 bp, Homo Sapiens
  misc_feature (18)..(18): n is a, c, g, or t
  misc_feature (50)..(50): n is a, c, g, or t
  misc_feature (252)..(252): n is a, c, g, or t
  misc_feature (392)..(392): n is a, c, g, or t
  misc_feature (438)..(438): n is a, c, g, or t
gtggtttctctatctggnggcagaggcttcttgcctttccaaagcccctncctggcagtggaccttgagtagagaggagttctgctctactccagcacacaccctgggggttccaggtaaacagagacccagacctgtcctcacttagtccagagccctggggtcttctagctgaggctgtctggggcccatgggacctggagccaggcccggcctaatcccctccaggggtaggggtggtgagtgattcanccgagctttgttttgcctgtgggactcccctctttaattggcatcccaaagggcattacctgtttgtcaactgctttacccacagcagacagaagttgggggttgctttaagtctcaggaacagaatataaagaaagagncagataatagaaagtgatgtttttatgtttactatctgaactcaanaagtggggattttaagaagatatctagatgagtccaggatcttttttcttt

SEQ ID NO: 410038 - DNA, 255 bp, Homo Sapiens
  misc_feature (40)..(40): n is a, c, g, or t
  misc_feature (82)..(82): n is a, c, g, or t
  misc_feature (90)..(90): n is a, c, g, or t
  misc_feature (125)..(126): n is a, c, g, or t
  misc_feature (223)..(223): n is a, c, g, or t
cccgatcagatcttagcctttaagcccaatgccacttctnccaccatgttgggtgcacctactgggcatagcacccactgtntgccagtnaggggtggaacccatgcagggtggggatggcagtnnccgcacaggtgggtgagcggggcttctggtgaagcaagcatgacggtgccaccttctcaggaccatgcacccacagcccacactcctttttggtttnaggctaagtccagggccatgggtggggcgcgc

SEQ ID NO: 410039 - DNA, 200 bp, Homo Sapiens
  misc_feature (78)..(78): n is a, c, g, or t
ctcccctattccagatttatcaggcattgcctcttcaaagttgttcttcaccctcagggatatggtgtgataataatnagcaaaagagataaaaaaggaaagccctactgattataggcaggtggcttaattctacaattcattccttatagttgagccctatcttagcgtcttctcttccatcctctctccaacgagga

SEQ ID NO: 410040 - DNA, 264 bp, Homo Sapiens
  misc_feature (29)..(29): n is a, c, g, or t
  misc_feature (51)..(51): n is a, c, g, or t
  misc_feature (76)..(76): n is a, c, g, or t
  misc_feature (105)..(105): n is a, c, g, or t
  misc_feature (133)..(133): n is a, c, g, or t
  misc_feature (163)..(163): n is a, c, g, or t
  misc_feature (215)..(215): n is a, c, g, or t
  misc_feature (224)..(226): n is a, c, g, or t
cctggagttataaatgtcttatgtatttncttagtgtccacagtgtctctncctttcacagtgtcttcttgttttncctggagttatacatgtcttatgtatttncttagtgtccatagtctctcttcatttngtgctgtcttcttccatgtggccgtcatgnctctttcattagaggctttccataagtgtccagtgatcctgggatgcctgcncatatttannnaggggcacaaagagctgatttagaattgtgtcacctgg

SEQ ID NO: 410041 - DNA, 169 bp, Homo Sapiens
gaaatttaggggaggcacaggcattaagtccataacattggggaagtaggttctcagtggctcctctcccttgggttatatgagggtctttagtagcttcagaattccctgagttgtattcagagtcaccatttgctttggagaattctaggattgctacatagaccag

SEQ ID NO: 410042 - DNA, 199 bp, Homo Sapiens
  misc_feature (132)..(132): n is a, c, g, or t
  misc_feature (161)..(161): n is a, c, g, or t
ccctgggtccatagtccaacaggacagagtttatagaacaaaggaaaagtgagcagtgacaccaacatcagtcttctaagcaaacatttcatggagagagcagaatttttaccttaggtgaattcatctgangctgtttcaacaaattaaaagagcaattngagctccctttcaaaggcttagaccccacaactatatg

SEQ ID NO: 410043 - DNA, 262 bp, Homo Sapiens
  misc_feature (49)..(49): n is a, c, g, or t
  misc_feature (78)..(78): n is a, c, g, or t
  misc_feature (115)..(115): n is a, c, g, or t
  misc_feature (119)..(119): n is a, c, g, or t
  misc_feature (204)..(204): n is a, c, g, or t
ggaggataaggatgggcattcccaggacaaaaaggtttcctaacatgtnaccttgccttccagccacatctgactganctagagactgctgctcacactggatggccagaatgantcanatcatgctttgtgtgtatcatagctcaggtgcttatataagcaaaccaattaggtgttcataggatctggaattaagggtaagantcacggtcaaattgatcacaatggcaggtctaaatccttaagatgaatgatgaggcag

SEQ ID NO: 410044 - DNA, 217 bp, Homo Sapiens
  misc_feature (47)..(47): n is a, c, g, or t
cggcacattagagctccactctgagggtgtaagccatgccatatttnaattgtcattagcaataaaaaactagcagtgaggaaacccaacctccacacagaagagggcatgggccagggtcattaaccaggctgatccagcctctgacatgctgcatttatccttatttcacgtgtacgcgttcaaaccttataattggtagcttttactcacaggc

SEQ ID NO: 410045 - DNA, 371 bp, Homo Sapiens
  misc_feature (295)..(295): n is a, c, g, or t
caagaagcgtggagaaagcatgttgtagaggctcagtgttgtcacagaggacctaggacgcttccaccttcctatgctgccatctcagtgttgggggatgacttccctcatggatgcaagaaggttactgaaacgccaagtataatgtcactacctcatgtggcaccgcgctttacggtaagggggtgagcataaacagaggggattccaagtgctgttctctttgagcaggggacatttttcccagaagcccctggtggtttttttcttgggacctgcttgcttgaacagcatnacctgcctctggcataggggaaagagatttccgttattggcttagaccaatcactaccttccctgggcactggaca

SEQ ID NO: 410046 - DNA, 273 bp, Homo Sapiens
  misc_feature (87)..(87): n is a, c, g, or t
  misc_feature (91)..(91): n is a, c, g, or t
  misc_feature (143)..(143): n is a, c, g, or t
  misc_feature (173)..(173): n is a, c, g, or t
  misc_feature (233)..(233): n is a, c, g, or t
gtgggagctgggagaggtgggaaatggccagaagcaacatccaggagcaccaggcatcccttgcttaccgtcctcacccttgcgcanaggncagtatcagccctgcctgaaacttgctctgcagattgtgggaagagagcggntccatgttctagacccaacaaacgaacacntgcagttcccaagccttcctcactccctgtttatgggagactccttgtttctcacatttnttttagtcttagagacaatttggtcaggagacatggggag

SEQ ID NO: 410047 - DNA, 209 bp, Homo Sapiens
  misc_feature (16)..(16): n is a, c, g, or t
  misc_feature (62)..(62): n is a, c, g, or t
  misc_feature (196)..(196): n is a, c, g, or t
gccagggctctgccanatctccccaccccgagactctgcgggctccgttctcaccccatttnggcttgccagtttccttgtgactgccaacaggaatgccctggcctcagggagtgtggcggtgacagagatctcaaagcttgccaggtccactgtggtgtccttggggtgtgctgaagccgatgccaagcttttnacatagtaatcct

SEQ ID NO: 410048 - DNA, 123 bp, Homo Sapiens
  misc_feature (18)..(18): n is a, c, g, or t
  misc_feature (60)..(60): n is a, c, g, or t
gggggggaggtgccaggncaacccacagacatcggaacagcatggcctgcccacaaaatntggccagcgctgggggcctggggcatgtgctcagccaagatcaacaggctctgtttaaagctg

SEQ ID NO: 410049 - DNA, 124 bp, Homo Sapiens
  misc_feature (102)..(102): n is a, c, g, or t
  misc_feature (107)..(107): n is a, c, g, or t
ctcaccattactgcgtggccaaatccttcccttatttcaaggcttagttcaaatgttacctcttaactaagccttccctgctaaccccaaatattaataganttggngtcttccttctctgatg

SEQ ID NO: 410050 - DNA, 249 bp, Homo Sapiens
  misc_feature (165)..(165): n is a, c, g, or t
  misc_feature (216)..(216): n is a, c, g, or t
aaaggggctcccactcaggctggtgttcacagaaggcttccagccagagaccaggacagctggggtttgaaggaggagcaagactagtcagggaaaagatcccctctgttagagcaggaagggatggagagcaggtggaagcagcatccaagaaaacaggttttntcagagctacagacagaaaggtctcaagcagctcagggctgcctgattganctttgaaagcgtcatgccctctagacttaaaat

SEQ ID NO: 410051 - DNA, 211 bp, Homo Sapiens
  misc_feature (107)..(107): n is a, c, g, or t
  misc_feature (167)..(167): n is a, c, g, or t
ggccggacatgtgcttatccaacatttggttctagatttatctaatggggacttcagttgtgagagataagtcagtaggttttggtctgccaaaagcaaccattgtncaaaaaatcttggccgccctcacctttctgagttagataatcttaactggcttgcatttnctaattggattaacagctgatctgagcttggattccatttatca

SEQ ID NO: 410052 - DNA, 190 bp, Homo Sapiens
gccctctgggagcctgacgtctaaaggagagaaggtatttgtgagaacaacactactagaaagcatatgactgcatgagggtgggggcttgagaaatatacgcctgatcttctggaaggctcgctgcaggacctcccgctgagaagttgggaaaatactggtctgtagaagccatactgagctagtgatg

SEQ ID NO: 410053 - DNA, 219 bp, Homo Sapiens
  misc_feature (12)..(12): n is a, c, g, or t
  misc_feature (65)..(65): n is a, c, g, or t
  misc_feature (195)..(195): n is a, c, g, or t
ctcccacctcancctcccacagtgccaggattcccggtgtgcaccaccacgcccagctaattttnaatttttttgtggagatggggtcttgctatgaggccaaggctgatctcaaactgctgggttcaagcgagtccgcacctcagcctccaacgtgccgggattacaggtgtgagccaccacgcctggcctttnatgacattttgatctaataaccaa

SEQ ID NO: 410054 - DNA, 226 bp, Homo Sapiens
  misc_feature (53)..(53): n is a, c, g, or t
  misc_feature (93)..(93): n is a, c, g, or t
  misc_feature (117)..(117): n is a, c, g, or t
  misc_feature (141)..(141): n is a, c, g, or t
  misc_feature (179)..(179): n is a, c, g, or t
  misc_feature (188)..(188): n is a, c, g, or t
caaagggagaaacccagagctgaggccggtctgcagcaggtgccgggcctganacctttatgttgtctgagggaaacacctccatcccctgtnaggctcagagtgtcctcttttgtnctgggaaccatttctgtgtcattnatgtggaggctgaagttgcccggggtcgtcctgcaagngtctcccanagcgaagtccctccgacgtgccccctggtgatgatgtt

SEQ ID NO: 410055 - DNA, 196 bp, Homo Sapiens
  misc_feature (36)..(36): n is a, c, g, or t
  misc_feature (38)..(38): n is a, c, g, or t
  misc_feature (115)..(115): n is a, c, g, or t
  misc_feature (171)..(171): n is a, c, g, or t
  misc_feature (177)..(177): n is a, c, g, or t
tcctcctacccatgctctcctgccctgacccttctntnaccactatgatccacaccaatgctctccagaccaagagctctcaaaccttcatgtgttaaaggtcttacagattctngggtcccacccttagagattctaactcagtaggttaggctgggctctaagaatttncatttnaaacaagtccccagataat

SEQ ID NO: 410056 - DNA, 299 bp, Homo Sapiens
  misc_feature (50)..(50): n is a, c, g, or t
  misc_feature (86)..(86): n is a, c, g, or t
  misc_feature (88)..(88): n is a, c, g, or t
  misc_feature (218)..(218): n is a, c, g, or t
  misc_feature (260)..(260): n is a, c, g, or t
tccgtggccttggagtcgccctcggcagagatgatggccgccgtcttctnctgctcagcccttgccaccacagatctggccctctntncttcctgctgagccacctctttggttccactgcttctgcaaattccttcccgaaggtcagatccaaggtcacagcatccaggaggagcccaaaggttgctgcttgcttcgaagttaattgctcacctgtntggagcccagctctccctgcgtgatcagttctccagcgtcanctgagccgcccccagcttgaggagctccgcagtgatggg

SEQ ID NO: 410057 - DNA, 296 bp, Homo Sapiens
  misc_feature (100)..(100): n is a, c, g, or t
aggggatatagaatgtccaataccagagccctcacacagtggaaagcactgactcaggcacaagccaggccactggcaatcaaggtgacacaccttcttnccaccatcgccctcctagcagggtcccttcaatggtgtctcagagccaaccatcatatcctcttatcaaccacctttacaatctccggagctatttatgagctaacgccctcaacaagtcagctttcagtacaaactcctagaaaggcaggtcaaaggtctgactccagagaaaaaggcaacagctccctctcaca

SEQ ID NO: 410058 - DNA, 169 bp, Homo Sapiens
  misc_feature (13)..(13): n is a, c, g, or t
  misc_feature (38)..(38): n is a, c, g, or t
  misc_feature (82)..(82): n is a, c, g, or t
gcttgcttctgtnattgtccaaatcttaactgactctnacttggcctataaggcaggttcacccacccggtagagccatgtnagtggctcctagcagcccaagagcccagcctgtaaccattcatccctggagggaaaggagctgaacctaaagtttccagtacaacct

SEQ ID NO: 410059 - DNA, 132 bp, Homo Sapiens
  misc_feature (16)..(16): n is a, c, g, or t
  misc_feature (28)..(28): n is a, c, g, or t
gctggatggggcatgnaaaccccatgtntctaactcaggtcccacctgaggacattgggatgggtggacaaagaagcaaatcagcaaatgcagcgagatgaggggcttgggagagcagctcgtcgtggggaa

SEQ ID NO: 410060 - DNA, 249 bp, Homo Sapiens
  misc_feature (44)..(44): n is a, c, g, or t
  misc_feature (76)..(76): n is a, c, g, or t
  misc_feature (86)..(86): n is a, c, g, or t
  misc_feature (96)..(96): n is a, c, g, or t
  misc_feature (116)..(116): n is a, c, g, or t
  misc_feature (131)..(131): n is a, c, g, or t
  misc_feature (144)..(144): n is a, c, g, or t
cctcagtcttcagccaacaccacaggcacagcttcagccctctnactcttgctgaccacgggttaccttggatctnctctcctttnagggcaactnagccacatttggctcctttnagaacatagaatctnggctttgtctttncctgggcttggggtacctgggactccagcttcaggcacagggtccagcacacattccttcttcttcaccaaaagccaatgagatcagcatagttgcaaagctgcc

SEQ ID NO: 410061 - DNA, 294 bp, Homo Sapiens
  misc_feature (111)..(111): n is a, c, g, or t
  misc_feature (124)..(124): n is a, c, g, or t
  misc_feature (208)..(208): n is a, c, g, or t
  misc_feature (265)..(265): n is a, c, g, or t
ccgtgagcaacaatatgagcaactacaatatgagcaacgacaccatgagcagctacaccgggagcagctacaccatgaacaactacaccgtgagcagcgacgttgtaagcngctacaccatgangaacaacaccatgagcaatatgagcagctacaatatgagcaacgacaccatgagcagctacaccgtgagcacctacaccatganctacaccgtgagcaatgacatcgtgagcggcgacactgtgagcagctacaccatgangaacaacaccacgagcaacggtatgagca

SEQ ID NO: 410062 - DNA, 263 bp, Homo Sapiens
  misc_feature (24)..(24): n is a, c, g, or t
  misc_feature (51)..(123): n is a, c, g, or t
  misc_feature (130)..(130): n is a, c, g, or t
  misc_feature (138)..(138): n is a, c, g, or t
  misc_feature (238)..(238): n is a, c, g, or t
cacaaaatgatcaaagagcatgancgtacaatttatgagataaaaaagaannnnnnnnnnnnnnnnnnnnnnnnnnnnnnnnnnnnnnnnnnnnnnnnnnnnnnnnnnnnnnnnnnnnnnnnntggtttntgaaagtnaatgcctggtgcaggagagagtcatgagaagtagctgactccttcactcatggtgtaaggggaaattgggacaaactttctagaaggaaatttggaaatntgggttagaagcctttagcctggcc

SEQ ID NO: 410063 - DNA, 242 bp, Homo Sapiens
  misc_feature (189)..(189): n is a, c, g, or t
ccagccagctcacactcttttgcacagctcctgggactcccgttgacacacagggaacagccacccacaatggactgcactgttctatttgcacccttaaatttatcgtgcttacagaatgacacttctgcaaactagtcaagtagggggaagtggtttgtggatatgcacccttgttcattctctttnaaaaggtaaccagctctgaattctttctcctttgaggaggagtttcacttgtg

SEQ ID NO: 410064 - DNA, 296 bp, Homo Sapiens
  misc_feature (178)..(178): n is a, c, g, or t
  misc_feature (236)..(236): n is a, c, g, or t
ggagaaagttttgtctatagcagaaaggctttatgtgtaatgcttgtcaggtttacgaacctgtaaccagcaccatgcctggcatgtagagagtgagtaggaagtctttataaacctataataatagagggcatctcattgtcccatcaaaaacgtaggaaacccaaaagaatatgangttgttatgttgttatttccttcttaagcttttaatttgaaaggtagcaaaggttctnctgtttgacatttctaccccctgcaattctgtcaggagaaataggtcacatcatggtggg

SEQ ID NO: 410065 - DNA, 294 bp, Homo Sapiens
  misc_feature (80)..(80): n is a, c, g, or t
  misc_feature (94)..(94): n is a, c, g, or t
  misc_feature (118)..(118): n is a, c, g, or t
  misc_feature (133)..(133): n is a, c, g, or t
  misc_feature (159)..(160): n is a, c, g, or t
  misc_feature (199)..(199): n is a, c, g, or t
  misc_feature (244)..(244): n is a, c, g, or t
  misc_feature (264)..(264): n is a, c, g, or t
gggaggaagagtcatggggaggtgattaggtgggcattaaaggagcaactggagaaaggagaaactaggaggctgttttnataatccacatgtnaggtagactaccccttcctgagtncctgaggggcacttncaccttggggcagggtcaaggttttnnctgagatagcagctcccacaggcctaggagccttctttnatgagcttgctgccctggttcatgagggggggattgatggttctntgccccgttctgtttttttnctagcactgtcttcacaccctgttgccgtt

SEQ ID NO: 410066 - DNA, 328 bp, Homo Sapiens
  misc_feature (14)..(14): n is a, c, g, or t
  misc_feature (45)..(45): n is a, c, g, or t
  misc_feature (51)..(51): n is a, c, g, or t
  misc_feature (77)..(77): n is a, c, g, or t
  misc_feature (130)..(130): n is a, c, g, or t
  misc_feature (158)..(158): n is a, c, g, or t
  misc_feature (163)..(163): n is a, c, g, or t
  misc_feature (259)..(259): n is a, c, g, or t
  misc_feature (270)..(270): n is a, c, g, or t
tggatgtggatgtncagtatgtgtaggggctgctgttggcatgtncttgancttcagcacacattgtagaaggtttnctgggaggaccccatctcaggatggccaacatgtgcatcgagtgttggttttnccagctgagctctaaaaggataactttnatttnctacatatttaacatagaagagacctgtgcagatgaaccttctactgcccgtgtcagagtctccaaacagcggaaggctgcccttgggtgccattnatttggatttnaactgtcagatgtgcctttttctagaaaagctacaatgacatttcagggtgatgcggg

SEQ ID NO: 410067 - DNA, 304 bp, Homo Sapiens
  misc_feature (55)..(55): n is a, c, g, or t
  misc_feature (131)..(131): n is a, c, g, or t
  misc_feature (213)..(213): n is a, c, g, or t
  misc_feature (260)..(260): n is a, c, g, or t
tggatcctctagaagatgagggatgaggacgaggtgattgacggcaccagttttnaggcttgggcttttaggtggtgccatttattgggatagaatcttgcttcggtcaagttgagtttaggctgcctgtnagacattgaggtggagatatacagtaggcagatgtatgggtctggagtctaggagagaagtctggaggaacatagagatttntgggcccaccatctactgtggtagttaaagccttgggtataactcanattgcttagtgagaatgtttagttgagaggaacagatggtccag

SEQ ID NO: 410068 - DNA, 203 bp, Homo Sapiens
  misc_feature (13)..(13): n is a, c, g, or t
  misc_feature (58)..(58): n is a, c, g, or t
  misc_feature (74)..(74): n is a, c, g, or t
  misc_feature (77)..(77): n is a, c, g, or t
  misc_feature (109)..(109): n is a, c, g, or t
  misc_feature (132)..(132): n is a, c, g, or t
gaaggggatttanttgaaggctcaccatggagcaggttttacatgggttatctcattnatccctcatctgtttnctnaggtgtgtgctattataaccatcagtattttncagatgatgaaatagaggctttnagagggtgagccccaaagactcctgctggtaagtggcctgtcctgggaatggggacaggaatgtagctgag

SEQ ID NO: 410069 - DNA, 281 bp, Homo Sapiens
  misc_feature (35)..(35): n is a, c, g, or t
  misc_feature (177)..(177): n is a, c, g, or t
  misc_feature (191)..(191): n is a, c, g, or t
gggaaatatattcaaaaattgtcaccctaattttncattaatttactcagcctccacagctgtaggtgttgaaagtgtctgggtgactagctcttcattttgattgcaggatgtctgtctccactgagttttgtgaggagatgatggaaggatgatctcagaagcagagggcatctnctgtgaaagatgcngcacgccaagcggggctggggtgcatcctgggcaggggactgaaatgtacctgtcagggtttgcctcagaagtgcctggtgagctgaggt

SEQ ID NO: 410070 - DNA, 274 bp, Homo Sapiens
  misc_feature (21)..(21): n is a, c, g, or t
  misc_feature (34)..(34): n is a, c, g, or t
  misc_feature (88)..(88): n is a, c, g, or t
  misc_feature (101)..(101): n is a, c, g, or t
  misc_feature (158)..(158): n is a, c, g, or t
  misc_feature (164)..(164): n is a, c, g, or t
  misc_feature (193)..(193): n is a, c, g, or t
  misc_feature (197)..(197): n is a, c, g, or t
  misc_feature (216)..(216): n is a, c, g, or t
  misc_feature (226)..(226): n is a, c, g, or t
  misc_feature (228)..(228): n is a, c, g, or t
tgaggggtcagcctgtctaanaggaagacttccnttgggcagaggggtgtgggtcggatgatgcccatgttgctcactctggcttccngggagtaatttcntgtcctgggaaaatagaaatgggtggaaaatgtctgggcttgggccgagcctcagcnacaccnccacactcgctcactctctggcctctgcnattnattcccccccgccccaccncaactaaccngnttcctccatccttatcctttccaggcaccaggctgtctgggggaca

SEQ ID NO: 410071 - DNA, 291 bp, Homo Sapiens
  misc_feature (53)..(53): n is a, c, g, or t
  misc_feature (164)..(165): n is a, c, g, or t
  misc_feature (253)..(254): n is a, c, g, or t
gtcttgaagtaggagagaaagcaagcagtctcctgccacatggagagattgtnattggataggaacacccttaagtcatccactgtccaagaaacacatgcaagtatgtggtttgttatgatggcaggagcttgtggaaactctcttttgagtgtttctatttnntctggaagcaaggtcatcagctaggagttagggcttaggagaaagtattagaagttagaagagagaataaaaagtatggaatattttnnagggggagtgggagaacgaatgatgtgaagaaataag

SEQ ID NO: 410072 - DNA, 295 bp, Homo Sapiens
  misc_feature (12)..(12): n is a, c, g, or t
  misc_feature (165)..(165): n is a, c, g, or t
  misc_feature (178)..(178): n is a, c, g, or t
  misc_feature (180)..(180): n is a, c, g, or t
  misc_feature (219)..(219): n is a, c, g, or t
  misc_feature (253)..(253): n is a, c, g, or t
  misc_feature (267)..(267): n is a, c, g, or t
ctcaggtctctnacttggctcctctcacttggaagttgctgctgtttcatgggccctctcacagaggggagggggtctaatggtggaagtagttagtaggggcggtggccctggggctggtgacttggggagacttggagcagagtcagggaagatctggaattnctgattggatttntnaccaggtatccctgttccagccaagtagtcttgtatccnctccttgttgaagctgactggctttctgtttcantgtgaattcctgtnctcctctcctctttactactacacacac

SEQ ID NO: 410073 - DNA, 156 bp, Homo Sapiens
  misc_feature (93)..(93): n is a, c, g, or t
aagggaagaaccaggggaaagttaacgcaagccccggaaggatgccaacctatcaaaccccaagtccaagatcaaacagtgcacttgactctntcaagtcacctgcttgaccctcttccaagtgtactttacctcctttccttactgccctaaaac

SEQ ID NO: 410074 - DNA, 284 bp, Homo Sapiens
  misc_feature (59)..(59): n is a, c, g, or t
  misc_feature (127)..(127): n is a, c, g, or t
cggaggaacaggatgatgagattttcctttaggggaagatgacggcagcaataagagtnttggaaaagtcaccctgaacaacttttgtaggtaacttaagggcagaaaaaaggaactctttattttncaagtggcatcatggctatcacagctcatcagtgcctggaacaacacctttaataatgtcaataggaacgcttcgaactgctgcagaaattctgcttcctgaatgtttgaacttaccctcccatttaatctttaaaccatcccttcaagagagggag

SEQ ID NO: 410075 - DNA, 268 bp, Homo Sapiens
  misc_feature (60)..(175): n is a, c, g, or t
  misc_feature (180)..(180): n is a, c, g, or t
  misc_feature (184)..(184): n is a, c, g, or t
gtgatgtctaaggggaggcaggatgggtagttgtttgatgggaacagagcctcagttggnnnnnnnnnnnnnnnnnnnnnnnnnnnnnnnnnnnnnnnnnnnnnnnnnnnnnnnnnnnnnnnnnnnnnnnnnnnnnnnnnnnnnnnnnnnnnnnnnnnnnnnnnnnnnnnnnnnnaacantgangaggagcagcaggcaggcgggccagcaggaagagaacaggggccttggtcttggccttcaccttgcatgtggtctgaggctcta

SEQ ID NO: 410076 - DNA, 294 bp, Homo Sapiens
gtgctgtgctgaccccaagagggacagcagaggaaatgggggtggaggtggagggacttcacagagcactgaatgaccactcacttttagccagcctgatctgagcccaaggcgggatggagagaccctgccagaccttaaggagacctttagaattaaaataatcctgaaccccaaccccttcaaagagaaagtttctttatctgttattctgtaagcatcaaggaaccatgacctagagctgaaacttaaatttcctagctaaattctattctccaagctcttgcttctcaa

SEQ ID NO: 410077 - DNA, 212 bp, Homo Sapiens
  misc_feature (110)..(110): n is a, c, g, or t
  misc_feature (112)..(112): n is a, c, g, or t
  misc_feature (114)..(114): n is a, c, g, or t
  misc_feature (122)..(122): n is a, c, g, or t
  misc_feature (128)..(128): n is a, c, g, or t
  misc_feature (160)..(160): n is a, c, g, or t
  misc_feature (171)..(171): n is a, c, g, or t
  misc_feature (195)..(195): n is a, c, g, or t
cagagggtcatccagtgcggacagccctgggggtctggcctccttggtattgtgtcctggaaggaggccctgccagaggccccagctcccgtaaggctgtgtggcttctntntncccaaatntagatncgggcactggcagggggatgcccacacccgtntaagatcagtntcccacgggccgagtgtgcaagtnaggctgtgtactcgttg

SEQ ID NO: 410078 - DNA, 217 bp, Homo Sapiens
  misc_feature (25)..(25): n is a, c, g, or t
  misc_feature (74)..(75): n is a, c, g, or t
  misc_feature (84)..(84): n is a, c, g, or t
  misc_feature (124)..(124): n is a, c, g, or t
tgcaaagcacgttcaattggctganccgaattggctgcaactccagccccaacgggctctggggaataggattnnaggcttttnaacagctgctggaggaggagggtggactgacgagtatgtnagccagcccctgggacctttccctgttgtaaaattttataatgaatatgtatttaaccagcaaaacacatccagaatgccccatttagggacc

SEQ ID NO: 410079 - DNA, 253 bp, Homo Sapiens
  misc_feature (21)..(21): n is a, c, g, or t
  misc_feature (68)..(68): n is a, c, g, or t
  misc_feature (131)..(131): n is a, c, g, or t
ggtgaacaagacaccactgtnaggcttaatgggatagacagacaacttaaatatgagttcagataatnagaaatacaaggagaagaactgggcaaggtgaggggacagtgacagcaggaggaggagttttnaggactgcccattagctaggtttggtgtctgtaccatcgttctcccagtctcctgtctctcaggagccacaagctgaggttttaaaattggagacaccataaggaaagtagtgtttggggtg

SEQ ID NO: 410080 - DNA, 281 bp, Homo Sapiens
  misc_feature (75)..(75): n is a, c, g, or t
  misc_feature (131)..(131): n is a, c, g, or t
  misc_feature (168)..(168): n is a, c, g, or t
  misc_feature (271)..(271): n is a, c, g, or t
ctccctgcccggctctttgcccagcaatgcctaaggtcgggacagcctggcatccctgctgcaggcgtgcctttncccaacgtgcttgctaaaccccacagccacactaagcacctgcaaacgtggttctnatgacctctttggacccatagaatgtaaacacatttngagtcaccgtcctatgagcctgggaggtagactacccttaaattccagatgcgctgttggcaccaaacttctgataccaccttctcacctggaaggccctggncacaatcctc

SEQ ID NO: 410081 - DNA, 290 bp, Homo Sapiens
  misc_feature (98)..(98): n is a, c, g, or t
  misc_feature (132)..(132): n is a, c, g, or t
  misc_feature (172)..(172): n is a, c, g, or t
  misc_feature (242)..(242): n is a, c, g, or t
aaaaaaatggaggtagaactgaactctgaggatgtttaggatttgaataagagaaggagagagcatcgcagatgaagaaagcaacatgcacagaagtntcgagtaaggagagtattgcggtgtgcacaaatnacagggaagggtcagacctaaaagaagaggatgttatganctgaacacagaaaaacatgatggggtaagggagggcagctgtggggccttgggagcaattagaatttggnttccgtgtgataggcaagttggttcttgaggaaagctgtgggatgatg

SEQ ID NO: 410082 - DNA, 244 bp, Homo Sapiens
  misc_feature (68)..(68): n is a, c, g, or t
  misc_feature (73)..(73): n is a, c, g, or t
  misc_feature (82)..(82): n is a, c, g, or t
  misc_feature (105)..(105): n is a, c, g, or t
  misc_feature (115)..(115): n is a, c, g, or t
agcgctttgcacatgcccttatggcaggggcaacgtgacctgagtcaaatctcaggctgatcactctnatttnaaggaaatnagggcggggggcagaccctcgtnagcgtttttncacccaaaacccggctgctttaactgtttcccaagttcccccctcagaaggaagtccttttcgaaaggaagggcaaagtgagagaagagaggagtcagtgagaaagcaagtgggcatgtagatgactga

SEQ ID NO: 410083 - DNA, 290 bp, Homo Sapiens
  misc_feature (98)..(98): n is a, c, g, or t
  misc_feature (155)..(155): n is a, c, g, or t
ctggagacaaaactctcagagaaagagcttggaataaatggcattaattcacatccatcagggaagccagttgtggtgcccacaggaggaggcttttnccagtttcatctgtgttgaccacttcccagttccctgcggtaagggaagcatatganttactgcagatacgtgtgggaatgcctcctccttacaaacaagttgtcaggaaagcagtttttaaaatgtgatcaaaagcgagaagaccccatgaatggtctttcacacactcttgttaattccttgggtcccat

SEQ ID NO: 410084 - DNA, 161 bp, Homo Sapiens
  misc_feature (139)..(139): n is a, c, g, or t
gcagccgtcttgttaattcctttacccaaacgccaaagtcaccgctgtgtgcactctaagtagagagaaggagccgggactctgtaaaagactggttatttcaaatgagaaagagagcaaggagccatagggacctttnaggtttcgagcctggatgaatg

SEQ ID NO: 410085 - DNA, 284 bp, Homo Sapiens
  misc_feature (137)..(137): n is a, c, g, or t
  misc_feature (190)..(190): n is a, c, g, or t
  misc_feature (243)..(243): n is a, c, g, or t
  misc_feature (248)..(248): n is a, c, g, or t
  misc_feature (250)..(250): n is a, c, g, or t
  misc_feature (271)..(271): n is a, c, g, or t
ccctgagtcatagagacaaggaggggaatgcagagtgtggggttcccccccaaaccccaaatcatagagatgaggaggggaatgcagagtgcagggtcccctctaaaccccgagtcacagagacaaggaggggaatncagagtgcagggtcccctctaaaccccgagtcacagagacaaggaggggaatncagagtgcagggtcccccctaaaccccgagtcacagagatgaggaggggaatncagantncggggtccccccaaaccccgngtcatagagccaa

SEQ ID NO: 410086 - DNA, 293 bp, Homo Sapiens
  misc_feature (137)..(137): n is a, c, g, or t
  misc_feature (179)..(179): n is a, c, g, or t
  misc_feature (221)..(221): n is a, c, g, or t
caggggcattatgggcagtttcatatggggtacaataagatctccaattctatagggaggctgaagctgacctcctaggagccatctcctaaggaaagtgggggtctatccagaggggcttaggggtcgggcttctnttgagacacagcggcagtccacaggggtgtcttgttccagtnagtcgtcagcctgcacagccaccgacacattatgtgggcttncggtgtggtggggagagaggaaaggccaggagggctgggagaagggagagcagtgggcgaatggaagagaga

SEQ ID NO: 410087 - DNA, 161 bp, Homo Sapiens
  misc_feature (83)..(83): n is a, c, g, or t
ccaagagaaaagcccttgctggctgcagggtggtcacgacgggccagctcccctctgggcttcgttccaggcatgctacaggngccattccctaatctttctaataattctgcaatgcaggcactagaatccctgatattacagttttgattttaattttt

SEQ ID NO: 410088 - DNA, 204 bp, Homo Sapiens
  misc_feature (98)..(98): n is a, c, g, or t
  misc_feature (120)..(120): n is a, c, g, or t
  misc_feature (130)..(131): n is a, c, g, or t
  misc_feature (133)..(133): n is a, c, g, or t
  misc_feature (137)..(137): n is a, c, g, or t
  misc_feature (145)..(145): n is a, c, g, or t
  misc_feature (150)..(150): n is a, c, g, or t
  misc_feature (162)..(162): n is a, c, g, or t
  misc_feature (164)..(164): n is a, c, g, or t
  misc_feature (186)..(186): n is a, c, g, or t
cattacccacataaacagcacacacaccaaaaagcatcagcagcccctcatgcacccctccatagccgctctcacccccaaaagtaacccctcttganttctatcccagtagatgatttnggcctatttnntncgtnatgttttnatgtngatttgtttttntnggtttgcgtggctttacatttnacataaggggactcaaac

SEQ ID NO: 410089 - DNA, 290 bp, Homo Sapiens
gaacatcgtaggacttcggcaaatgtcggtccctttcccccacactccaaaggtgacgttccctgagacatcttagtctgggcaagtgtgttgttgtagcttgggggatggcctggtcccttggcctgtcctgctcagccagcagcccttggctggctcagtatgggaggttcagacacggtctcagttcttgacaagctcctagccagaggaaaggcgatttcattccggtgtgatgagcactagtagaagaggatgttagaacggagggactgcacgggaccaggtgg

SEQ ID NO: 410090 - DNA, 232 bp, Homo Sapiens
gccctggagcggagtctgccctggagtggagtcgtctaccctggagcggagtctgccctggagcggagtctgccctggagcggagtctgccctggagtggagtcgtctgccctggagcggagtctgccctggagtggagtctgccctggagtggagggaagtgaagccagatcgctgaggagtgcgaggaaagctgttggttgttatggtcaagccccagaactcgtagatg

SEQ ID NO: 410091 - DNA, 291 bp, Homo Sapiens
cctcaccaccctctgatgtcccctcattactctctggtgtcacttcaatactcaccagtgtcccctcactgccctttggtgtcccctcattactctctggtgtcccctcgccgccctctggtgtcccctcaatactccccggtgtaccttcaccaccctctggtgtcccctgctctctggtgtcccaatactctctgatgtcccaatactctctggtgtcccctcattactctctggtgtcccctcactgccctctggtgtccccgcaatactctctggtgtcccctcacc

SEQ ID NO: 410092 - DNA, 292 bp, Homo Sapiens
  misc_feature (18)..(18): n is a, c, g, or t
  misc_feature (42)..(42): n is a, c, g, or t
cccaggggtcagcacccngattcctcctcatgtgaagaaatnggtcctaaggttctttaagtgtccaggggtcagcaccctgattcctccccacgtgaagaaatggatcctaaggttctttaaaggaagctccagagaacacagatactattattgaaatgccaaagggacccaaaagataagaaagatagtatccatcctaagggctttgctgtgtccccagttctcctgagtcctcctcagcacaggttggcccctcccgacctccacacacaagccagggtgaaatgct

SEQ ID NO: 410093 - DNA, 291 bp, Homo Sapiens
atcagatctcgtgagaactcactcactatcataagaacagcatgggggaaaccaacccccatgctccaatcacctcttaccaggtccctccttcaacgcgtggggattacaatttggattacaattcacgatgggatttgggtggggagacagaggcaaattatatcagtggtggtccactgaatgagaggagtgaatgaggaagggattatttaagggtatctcccagggttcccagcaacttgactgcaatcccctaaatagagggactctggtagggtaggtttgtca

SEQ ID NO: 410094 - DNA, 295 bp, Homo Sapiens
ccactaactagcatggcatcatttctatcatcttctattagtcaagcatcacaaagcccatattcaagaggagacaacctagacccagcctctcaataaacagtgtcaaaggctttagagagcatggtgtcaagctcccagattctaaggctgtgactcaacccagtgcactgggctgcctgggctgtacacaggtgtccatatttgatgcaaagcccccaagctgctctttatcctcttgtggaaggcacccttagcttggttagtatttaaataattcaggaatctttcccct

SEQ ID NO: 410095 - DNA, 290 bp, Homo Sapiens
  misc_feature (16)..(16): n is a, c, g, or t
  misc_feature (66)..(66): n is a, c, g, or t
  misc_feature (84)..(84): n is a, c, g, or t
  misc_feature (118)..(118): n is a, c, g, or t
  misc_feature (133)..(133): n is a, c, g, or t
  misc_feature (194)..(194): n is a, c, g, or t
  misc_feature (207)..(207): n is a, c, g, or t
  misc_feature (256)..(256): n is a, c, g, or t
agagaaagccgcagtnggcttagcaagggcaggctgatgtgaggcggaagatgagcacagcatttngggaggctagtgcaactntccctaaagggcctgccctcagacagtggtggtnggaaagaagagaagngcctgatgcaagaggtgtctgaggggtagcattgatacaggactcagtggcacattggatngggacatggtgtntgggctggtgtgtgtggtgtgttgagggcagaaagacacggcaggactncatgaattatctgagtgccatggttggagggagg

SEQ ID NO: 410096 - DNA, 291 bp, Homo Sapiens
  misc_feature (110)..(110): n is a, c, g, or t
  misc_feature (161)..(161): n is a, c, g, or t
  misc_feature (237)..(237): n is a, c, g, or t
tgagaaacattaattcacatttcaggaatgataacacactgtgaataggcttttggcatatactcagtgaattcacttacgttgactcatttgtcacccagaactacccngggtgccactgcaagtgtatggctgtagaattaggagtgactgctgtaccnaaggtgctgtaactcactgataacccgcatctgcctgcctgagtttggtctgcccacaccaggctgcttttgcacngccaggagaccataagaaactaggccgagcggcagcaaccaactcttcagcaca

SEQ ID NO: 410097 - DNA, 213 bp, Homo Sapiens
ggccccagtcaagactatgggcctggcacaaaggtgcacttcaggcacacatttcaaatctgtcagtgctgggaggaagcagatgtaaacaaaataagacccaccaactggaaaagagagcatgccctgactagaggcaatgacatcttaatcctccagaaggcaccacaaatcccacagacataaccaaggatgtttccccctcaaaacccc

SEQ ID NO: 410098 - DNA, 223 bp, Homo Sapiens
  misc_feature (42)..(42): n is a, c, g, or t
  misc_feature (58)..(58): n is a, c, g, or t
ccaacatggcccggcccgggagaactgtgcctaccgccaggntgggacctcccatgcnaccattgtcctagacctcccacagtgcccacccccagtaggctcctaagagaggggccaggggctggactcaggcctcccacccatgcccatggggcatagagttgccgggaaagcttcctggttcataccggacctgacctcccaggaagtgcccgtaacttgg

SEQ ID NO: 410099 - DNA, 180 bp, Homo Sapiens
  misc_feature (37)..(37): n is a, c, g, or t
  misc_feature (117)..(118): n is a, c, g, or t
gccctgtccctgtactcccaggctcctaaacactccntcaggctctctactccatcagaacaaccaccctcaagagcacggagcaaggactccctgtgactgcttttaatccatttnncaggaagaactctaggcttggaaggtgaattctgcatagcaaagccacagttattctttggg

SEQ ID NO: 410100 - DNA, 205 bp, Homo Sapiens
  misc_feature (55)..(55): n is a, c, g, or t
  misc_feature (57)..(57): n is a, c, g, or t
  misc_feature (112)..(112): n is a, c, g, or t
  misc_feature (121)..(121): n is a, c, g, or t
  misc_feature (185)..(185): n is a, c, g, or t
tcccgggcctcagaagtgagtcactcacccagaactgcagcggaggttatctttnanttctctgctgcccttaggcaggacgcttaactcagtccagacagatgagtatctnctggatttnataatctccaaagaagacagcctcagtcaccaacagaaaccgactgtagcagccagcaactctngacctcagaatgtcagagcc

SEQ ID NO: 410101 - DNA, 136 bp, Homo Sapiens
  misc_feature (18)..(18): n is a, c, g, or t
  misc_feature (36)..(36): n is a, c, g, or t
  misc_feature (60)..(60): n is a, c, g, or t
cctggtccagtcaatctnttgggccctaggtaaatnagataccacctcctcaagcttgtntgtaaaaatcccctgcatttcaccacgagactagaagaccaacttaagagcccctccctctctgcagcagaaagag

SEQ ID NO: 410102 - DNA, 128 bp, Homo Sapiens
cttcctccctgtctctgatctctttggatctctactggcctctcacactgcagccaatgtctctggtctatccactctgtccccaccctgctccctaggtgcccactcagccctggctggcagctttg

SEQ ID NO: 410103 - DNA, 284 bp, Homo Sapiens
  misc_feature (56)..(56): n is a, c, g, or t
  misc_feature (108)..(108): n is a, c, g, or t
  misc_feature (125)..(125): n is a, c, g, or t
  misc_feature (159)..(159): n is a, c, g, or t
  misc_feature (164)..(164): n is a, c, g, or t
  misc_feature (170)..(170): n is a, c, g, or t
  misc_feature (175)..(176): n is a, c, g, or t
  misc_feature (178)..(178): n is a, c, g, or t
  misc_feature (190)..(190): n is a, c, g, or t
  misc_feature (197)..(197): n is a, c, g, or t
  misc_feature (233)..(233): n is a, c, g, or t
  misc_feature (253)..(254): n is a, c, g, or t
  misc_feature (274)..(274): n is a, c, g, or t
aaactgttccatgtcagatcatcaggcattagattctcattaggaacatgcaaccnagatcccttacgtgcgcagttcacaatagagttcacgctcccatgagaatcngatgccaccgctgatcngacaagagacggagctccggcggtaatgctcccncaccngccacncaccnncngctgcacaaccngattccnaacaagtcacggaccagctggggaccatggaccccngccttggagattcctccacnncactgtgggaaggggcaccntctgaaccaa

SEQ ID NO: 410104 - DNA, 284 bp, Homo Sapiens
ggcgtggagccttccggcaagtcaggccatctgactgagccctacgggtgcaccccttcgtaacctggtcatcacagctcacaggggagagccagagtctatgttcccaaggaggttttgaggggtgatgcgtgaatatgggagacacagtaggaggtgtgtgcccggggatggggtgcaggacggtctcagtgtttcagtagaggaagagggtactggaaagactcctgagttccctcccacgctctgtggctgcactgcggttctgggaggatccagaattc

SEQ ID NO: 410105 - DNA, 220 bp, Homo Sapiens
  misc_feature (50)..(50): n is a, c, g, or t
ctggaacgctgctgcctctcccctagagcgtgcgtaatgctccctggctntgtccctgggctgatttctcgttgcaggtctttgctgggttgtcactcctctctgcaaagcttccctgacctcatctccctctccaggtcacgttaggtgcctcttgttgtgtccccagccacagcccgcatcacaaacaagactataattgccctcgtgcttgtctgtc

SEQ ID NO: 410106 - DNA, 167 bp, Homo Sapiens
  misc_feature (32)..(33): n is a, c, g, or t
  misc_feature (50)..(50): n is a, c, g, or t
gcacagtgaagttcccggtaatgactcatttnntgatattggtgcctganttgcagcttccgtggctgccacttcaggaaaataacgtgtgacccggagcaaggttatcagaaactgccgatagaggtttgccacctcccaccatgaatacggacgctgataggagg

SEQ ID NO: 410107 - DNA, 149 bp, Homo Sapiens
  misc_feature (105)..(105): n is a, c, g, or t
gtcccagtctcaaaaaaagagaagccaattcattaccttgaaaataggcaaaaaatgggaaagaatcaaacattcatcttgcctgccctatacaaactatatctngcagcgtaagtcacaaaaacacgctatgtccctcataaggaagg

SEQ ID NO: 410108 - DNA, 205 bp, Homo Sapiens
  misc_feature (78)..(78): n is a, c, g, or t
  misc_feature (132)..(132): n is a, c, g, or t
  misc_feature (183)..(183): n is a, c, g, or t
gggctcagggctggccctggcttctgcagccacctcctcaggtcagacaagcccagcacccaaataccactatctggngcacttcccccacaaggacctggagatgggggcagaatgtggccatgttttgcntcccgtcaggtcaagtgctcacccaggggcctggtgggatctgctgaaganatgtagcaacaagcaccaacag

SEQ ID NO: 410109 - DNA, 197 bp, Homo Sapiens
  misc_feature (155)..(155): n is a, c, g, or t
gcccccatagctatcattctgctcatttttaaaggtcagcatttatacaactgtacactcaggagtgcaggaaatctcactgcttttaaaggtaacagccttttctaaattcctacctcaacgtcatgctagagacactcagcaacctgtatgtnctcagaaacaactaaaaccaatctactctctaatgacctcta

SEQ ID NO: 410110 - DNA, 168 bp, Homo Sapiens
  misc_feature (122)..(122): n is a, c, g, or t
cacacgccctctgcaccctccacagcacccaccagaaccctagtaaccgcgtccacgtgtggctgtgaccacagtccttctgctcctccccaggtggcagcaaccccaagcctgcttcattnacagctgcatcaccgggacccagcaggggcatgccacgtggtgagt

SEQ ID NO: 410111 - DNA, 127 bp, Homo Sapiens
  misc_feature (13)..(13): n is a, c, g, or t
  misc_feature (38)..(38): n is a, c, g, or t
  misc_feature (68)..(68): n is a, c, g, or t
  misc_feature (81)..(81): n is a, c, g, or t
ggcgcatggagtnacgcggaagggcgggcgctctcgtnacaacccacacgggggttcacccacctttntttggcccaagantcctggaacatccagccaagcccggctggaggattagggtttggat

SEQ ID NO: 410112 - DNA, 228 bp, Homo Sapiens
  misc_feature (23)..(23): n is a, c, g, or t
ctgccaccgaataagtgaaacanctgaaaatgagagccagggctgatccctgtggcttgccaaactttgatgtccatggaattggcagcttcccccagtctcccagctgaaaataggtcagtgattaagagggtagaacttcagggtagaacttcaggaattgtaagatggattgatgggagcatttggaaaacttgatttatcccaaatcaccaaccctacctaatc

SEQ ID NO: 410113 - DNA, 157 bp, Homo Sapiens
  misc_feature (45)..(45): n is a, c, g, or t
  misc_feature (83)..(83): n is a, c, g, or t
gctacaggtcccccctttgcctttggattacatctgctgcatttnttgtcttatcaagcttaaccttcctatctttgcttctngaagtcatctccctattgctgggcagttggccattccccagtccaagcacagcacccccttgcgggccatcctt

SEQ ID NO: 410114 - DNA, 153 bp, Homo Sapiens
  misc_feature (74)..(74): n is a, c, g, or t
cccaggcagtgtgctgagccgccaggcttgagacaccaactcatacaggtttctccatgtcccaggcggttctnatgtcagccagggttgacagtcactgaagaggcaagctgggaggttccttccaggttttggggacatccatgtttaatg

SEQ ID NO: 410115 - DNA, 242 bp, Homo Sapiens
aggaaaggaagctgggacagtagcaggaggaagttgtgttttagagccaaggttgtaaaatatgaaaccacataaaagcatgaaaaattattacagagttaaaaataaataagatttgttttgtgaagacgtctgggcatgagttaagccttacagagttaatgggtagttgacagtctgagtaaagtggagaggttattccaggtatggaaaatgtaatgcaatgaggttttggaggattt

SEQ ID NO: 410116 - DNA, 208 bp, Homo Sapiens
ccccccccttctttggaatccaggttttcgttccaggaagtgcattaacttgctggataatttgctgatcacactggtacggaaaccattgagaggctttagactcctactcatagggatcaagacctggagacaaaggagtcaagggaagccccatggcctaaccacagccctaggaatatccccaatgcctaaggaaacccattca

SEQ ID NO: 410117 - DNA, 298 bp, Homo Sapiens
ctcacaccgagggaaacgtccctcctgttttctgcttcccatcgagcttgtcctgattgtgccctctgtggtgcttttccccttgcgtccgtactatctgggcggagacgtgtgtccagggctttgtgtcctgtggtgataagagcactggctggggcatctgtgccactgtgactctccatgcctgacccagctagaaccctacaggagaactgcctctgcttccttcgtgcctggtgccaccacctgcctagaaacgggcaagggtggcttgggctgtgagctgctgctactctca

SEQ ID NO: 410118 - DNA, 162 bp, Homo Sapiens
  misc_feature (113)..(113): n is a, c, g, or t
gtgggagggaggacaggtaggaggatgggtgggaggagagatcggagaagagatggaaaaatagatggcaggacaggagtgagggcaggtgggaggatggatgggaggacagncgggacgatgggttagaggatgggtaagagaatgagtgagaggagagaa

SEQ ID NO: 410119 - DNA, 287 bp, Homo Sapiens
  misc_feature (93)..(93): n is a, c, g, or t
  misc_feature (135)..(135): n is a, c, g, or t
cttggctgatggcagcacacaaccatcccctcagtaggtaccaatactagccaatctggacccatgtgttcgctgctctctgaatctctcccntgtgtatacaaagagacccccactggaccgtgaacccctggncagagacaagacttctgatcccattcctagggggtgcagagcactcttcttggcattgtgagcgatccaaaaggagacatgtccctgtccttgagctgcttgcaatctagttggtgctcctagttggtgcaccgggagacaaggcaaatgca

SEQ ID NO: 410120 - DNA, 169 bp, Homo Sapiens
  misc_feature (48)..(48): n is a, c, g, or t
  misc_feature (104)..(104): n is a, c, g, or t
gacggagagaagatgcccccattctagagagctgcagaggagcctgtntcctcccaggacagtaggatggtgaaaggatggtccagagaagagagatggatatnagggcttaggatatgaggaaggtgggagatggaaccattaggacttgacactggggataaggcat

SEQ ID NO: 410121 - DNA, 160 bp, Homo Sapiens
  misc_feature (56)..(56): n is a, c, g, or t
gatatactgcaccgggaccagcctctatatgattccaagtgttctatatgattccnggtgtgatatactgcaccgggaccagcctctatacgattccaggtgttctatatgattccaggtgtgatatactgcaccgggaccagcctctatatgattccag

SEQ ID NO: 410122 - DNA, 206 bp, Homo Sapiens
  misc_feature (52)..(52): n is a, c, g, or t
  misc_feature (99)..(99): n is a, c, g, or t
  misc_feature (188)..(188): n is a, c, g, or t
ctccggtgcacttgaaattcaccgtctgcttccccagtctggaagactgatnatcttcattcccactggtcactctcagcttgggctaaagcacatttnctggattcctggggccagaggcaaaggcaaccacaggaggaagaagttggttgaatgttacagccagagagcacgttagaggcattttnaaccaacctccctttgct

SEQ ID NO: 410123 - DNA, 176 bp, Homo Sapiens
cttcatctgtcacattttgacgctctctgcgttgaagacttcccaatggactcattaaatttcccattcaaagctcttcatttatcactatcatggtagcaagccaaccaaagagagacccattcactttgtctctgatcttccgagtgtaccagcaaagattccggctttgaatt

SEQ ID NO: 410124 - DNA, 247 bp, Homo Sapiens
  misc_feature (36)..(36): n is a, c, g, or t
  misc_feature (79)..(79): n is a, c, g, or t
  misc_feature (108)..(108): n is a, c, g, or t
  misc_feature (158)..(158): n is a, c, g, or t
  misc_feature (193)..(193): n is a, c, g, or t
  misc_feature (205)..(205): n is a, c, g, or t
  misc_feature (224)..(224): n is a, c, g, or t
cttagtgaggcgggtctatagtcaggggcaattgtncctcgtcagcctggctggagaccttccacccattgggattttntaaaacatctactttaaaatgtggccgtnaggaaagcccccattcctccccaccatctgttcgcctctccccgattttntaggattaaagtataggcctgcaatcccctacctncaattctaaagnccacaaagctctggaaaanaggaaggatgttccccccaagtt

SEQ ID NO: 410125 - DNA, 148 bp, Homo Sapiens
  misc_feature (127)..(127): n is a, c, g, or t
ccacccttccaagcagccatgctgataggggccatcgtaattgtccagcagtaattcatccagagacagattcgtgttggccatatctaatggcctggctctcggtccccttctgtctcctttatgnctcaagctaattcacgatgtg

SEQ ID NO: 410126 - DNA, 145 bp, Homo Sapiens
  misc_feature (81)..(81): n is a, c, g, or t
  misc_feature (113)..(113): n is a, c, g, or t
gtttccactatggcaaattagcgatgatgagaatgtatagtctggataacggaatggcgtatatggtgaaatataccaggnggtatactggcaggagcaagggactgggtttnctcccccgtgcaagctgttcttgctgtgtttc

SEQ ID NO: 410127 - DNA, 181 bp, Homo Sapiens
  misc_feature (153)..(153): n is a, c, g, or t
cagaaattggagaagtgttaaagggtcaggttgaatgaggaccgtctaacctggagctggcatcagaaacaactaccagaaatccctgtaacctgcttctcctttggggtctgtgaaccgcagactaagacactcccacattctgaccctggnaccagcaacagactacttgccatcggat

SEQ ID NO: 410128 - DNA, 296 bp, Homo Sapiens
ccccattactgtttcagctcctctacccaagcccgccagccctccagctactctataaacagtcttcttccaccttaaccttgccctgcaagtctgcctttttatgactccttgtacatttgaaggccagctttcccctaaagccatccctccccttcaactcccagaacagagggtggggtcaccttctcagtcacatcctccatgttgcccccaagccccagctcctccgccatccctccctgcttccctctctcaaagacatctccttccaccactctctcaccattcatgtc

SEQ ID NO: 410129 - DNA, 200 bp, Homo Sapiens
gtgggagggtgtgtggggtttgtgtgaagctgtgccaacctgtgggtgtgcaaccatgcaccctctccactttccccacacctgagtggtctgctggtcaccgtcagtagaccatgcatgcaaaatcatttttctggacgtgcaggagaaactgaaaaccagcactgtcaggtgtgttaaaacccttaagatttgttctc

SEQ ID NO: 410130 - DNA, 237 bp, Homo Sapiens
  misc_feature (144)..(144): n is a, c, g, or t
ggcacggccactctggagaagcgcagaacattcgtaaacatctaaacatgcatgcaccatgcaacccggcagccacgtcctgggcacttaccccagagcgatggaaatgtatgctcaggcatatttacagagctttactcacanaagccaaagcccagagatccaaatgttctttgcactgtggatgaataagggtctataaagcagcagcaccaggagccatgcagtgcaggatcc

SEQ ID NO: 410131 - DNA, 295 bp, Homo Sapiens
cagagagagacatagagtgcagtgccagcctggggtgatggggcacaaaggcagttttgcccccttagccattctgatgcaaaaaagaacctgaaagaaagtccaggcctgagcagagggactgaaatgggaagctctggggttctccgttcactcagcactcagcagcccttcccaggaagtcctctgcacaccacctcctaccagaagccctcagcccaggtcaagctctacagagcccatgctcaagaagtaacctagaagcacagatggtggagaggctgtgaaggagggg

SEQ ID NO: 410132 - DNA, 124 bp, Homo Sapiens
aggccggcaagtggggcaccttagaggcacctgtccccttccttggagcccacttgaggtactcccgaggtcagagaagaaagccaggtgtgtggcatctgtactgcttgtcagaacctaggag

SEQ ID NO: 410133 - DNA, 196 bp, Homo Sapiens
gacacgtgccacccggggcgacaagcgcatcccaggaccggccacaggagctcgggacgtgtcccccttgtctgtccccactcgctcccccctcgcctctgcagggccccccgctgtcacagttgcggtggtggcgtgcgtgtgttgggtttggtgctgagtctctgggtggatcctgcatcctttttggtccagt

SEQ ID NO: 410134 - DNA, 104 bp, Homo Sapiens
gattagagatgaagtctagtctgaattattttatgcttcagttcatatttcctacctaagggagtctgggagggagacatgattagggatgtgaaggaagaaac

SEQ ID NO: 410135 - DNA, 298 bp, Homo Sapiens
gtgctacaagtcagggctgcaaagtccttgaccacaccgagtggagaagtgataacacacaaaccacaagtgccattggcccaagtgtggcgacaggacactttagataggaggtgggtctggagaaaactctcgttcagccaaatggaaacattttgttgcgttttcttctcctccacatacccagatgtgaaagcaatgagtcttgggtaaagtccttggctggggccacatctttattcccactctgctaccttctgtccccagacacagcctctctcaggcccacaacccttct

SEQ ID NO: 410136 - DNA, 295 bp, Homo Sapiens
ggccccttcctaccaccgacgggtgctctcttgagaaaatgcacgttcacgttagcctacccacaaaccaaacgaaccaaaattaaaactccagggggggaaaacaagacattatacaacctcgaggcaaacaacttctggcttagcccttgcttgagttatcagtacaaaggcgccgttctgttagatgggtggaacctgagagctgcccgcagtttggggttgaactggagacagagaacctctgctgggctcacaccagggccaccgggcttggtaacttactggtcagtgc

SEQ ID NO: 410137 - DNA, 300 bp, Homo Sapiens
ggagaacccgcagaaacggcaccatgcgctgttctccgggtgagacttaagcacacacagacctcgggggtggccaggtcttgctgcgtcccggagccattggggcctgtggctgccacaaggggcatacctaccagagaggacctttccatcgtgctgaagggacggttccggtggcgcaggccagagaaccgccttgagtgctgcctgcgggcagtgctgccggccggccctgagcctgcacagacgttcacactgactcctgcttgcctaagacactgctgcttggtgatgctgcgc

SEQ ID NO: 410138 - DNA, 167 bp, Homo Sapiens
  misc_feature (61)..(61): n is a, c, g, or t
  misc_feature (100)..(100): n is a, c, g, or t
  misc_feature (122)..(122): n is a, c, g, or t
ataagccaccatgatggccaggcccaggctctcagaattcaaacagatgtgcttcccaggnccatgctccaggtctgccctgcctccccctcaagctctncttcccactccctcatcacatntcccattcagtaacttgttccaagaaccagtttccacttcctccc

SEQ ID NO: 410139 - DNA, 256 bp, Homo Sapiens
caccttttgatcagtcactgcctgctgaccatgccttgccacgcgtggcatggaccacaatgatgtactgctgttcccagttcacagacaaggggactgtgatgggtgagggctggtgatgtggagcctagataagcactgggcccctctaactccaagtctaagcttctacccattacccagaggcttctaacgttattctgaatctgtcaggacacccagcactgcacacagtgctcattaaatacttaaaaga

SEQ ID NO: 410140 - DNA, 229 bp, Homo Sapiens
caaggggtagatgggccccggtggcaggaagggggatttctgagctgcatgtctttgctgagggtgagtttgggcagaggtcatctaaggatggggccagccgaggggcccccaggaacacccagccccacaggccagcagtacacggtaggattggagtggtggtggccgcaggagatgagtgtgaccgggaaccagggccactcccagagttaccatgtgacaggac

SEQ ID NO: 410141 - DNA, 291 bp, Homo Sapiens
cccagtcactctctacaaggtaaagctgtctgacttctcagtctagcaccaaagtcccctcagtctgaatctaacccactttctaactttagctctgtgcattgcctcgcttggaatgtctcctccagccagattcatatcattttaatcacccagcctacctcgcacctttcctctatctacattcccagtctttagatcctgactgcacacttcctcccaccaacttagaatctacccacccataaagtcgcgattcacgttctctttcaggaaggatttcctaaccac

SEQ ID NO: 410142 - DNA, 299 bp, Homo Sapiens
ctctggcaaatacttgggttgaaatctgggtcactctgatggtcagaaatccatcaaacagacgtttactaagtgcctacaaagcagggtgctacacgcagcggagacgggacctagtccaaatcccaattctgtttctttccagctgtgcgaccttgccattgtacttctccaaagctagtgtcttcaccgctctgcaaaatatggcaaagtcaacggtagctctcatcaccactggtaggtactgtggtgatgtggtgggaaggggtggatcaaatcatgcacaaaaaacttgaagg

SEQ ID NO: 410143 - DNA, 276 bp, Homo Sapiens
  misc_feature (77)..(77): n is a, c, g, or t
ggtggcgagtgcagtggcaggggccgcagggatgcagacaaagccacgtccccattggtcctgctgctgtgagaatngggaggaaagtgactgcacaccctctggaaccttctgacggccaggggactttgaatagtttgccccacacggcaggagggtgggggccgcgctacgaagcgttggcttgtggactgaaacaaagcgccccaggaaagaacaagctccgggataccagctccgggctccttgctggctgcaacttgaacgtggtctgag

SEQ ID NO: 410144 - DNA, 287 bp, Homo Sapiens
ctggggatgggacagggagcaggaaggggttgctcagtcagtcagtgctggcagagggaggggcgctgggaaggcactgcaggccctgtgtctggggcctctcagcacaaggactgggctttgcacgcgaggactgaagggtcaaaggcgagggccaaggtttcctacgtggcattcactcgggagggctcctgaagctggagacacactgccttactttgtgcgtgtttttctttatgcattatccagtatttggctatgtgtgcatttagctcaataagcaatga

SEQ ID NO: 410145 - DNA, 223 bp, Homo Sapiens
  misc_feature (44)..(44): n is a, c, g, or t
  misc_feature (49)..(49): n is a, c, g, or t
  misc_feature (61)..(61): n is a, c, g, or t
  misc_feature (67)..(67): n is a, c, g, or t
  misc_feature (71)..(71): n is a, c, g, or t
  misc_feature (78)..(78): n is a, c, g, or t
  misc_feature (118)..(118): n is a, c, g, or t
  misc_feature (174)..(174): n is a, c, g, or t
  misc_feature (179)..(179): n is a, c, g, or t
agcggatagcctcaagcccccccaacaacctgcactagactctnttgtnacagtacacgtncctgtntctngcccgtntgctgactgtgcatcaccaggcgctcagccatgccttgtntgcactttggaccagctttgcaggagagaggcctcctgtttccctgctgctctttnatctnaggaacaaaatcatgggccttcttgcctacagtccaactggtca

SEQ ID NO: 410146 - DNA, 290 bp, Homo Sapiens
  misc_feature (78)..(90): n is a, c, g, or t
  misc_feature (273)..(273): n is a, c, g, or t
cttcttcatcattgcgttcatatgcaacacctgaatgactttataatggagatatattctgacatttatcaataggcnnnnnnnnnnnnngcctttcccagtaacgatcaatgtcctagtcaagccaagacatctatctgcctgaggaggagatgggagataaagataggaaaaggccgtgttacaggtggtgttcggtttctgatatgcacctcagtgctatgcatccatggaatagccttgaatgtggctagaatggaagtcttaattttnattccacagttcctaaa

SEQ ID NO: 410147 - DNA, 291 bp, Homo Sapiens
ccccccctcaacataccagtgtgccccagggctttgtcctgccttccattctcttctttgtctctactccctccctgggttatctcagccagttctacggcctttaacactgcctataagtgttacaaacaactcccgaatttatttctcaaagtcagccctctttgtagaattctagactttatttccaattgcctgcagccccacatgggtatctaatgggcatctaaaacttagtatgaccaaaacagaactcttgatattccccccacatcctggcaaatggtactt

SEQ ID NO: 410148 - DNA, 144 bp, Homo Sapiens
tggcagagccccatggtggggtggggatggctttgcttatcaaaatggcttgggaatccggtattccgcgggcagcctagcacctggactcttcagaactgcgttgtctgtggcctcccgcatccaggggagggaggcggaagt

SEQ ID NO: 410149 - DNA, 291 bp, Homo Sapiens
cccccaccccacgaatacacatggtgaagagaggttcacttctgttcctgttgctgagtttcagctatgcccctcggcctcggaggatggctcacctttactgtgaatttctagctgaaagaacaatgctgagaacagggataacaagaggacctctctaacaaatgcatctgctagttacaaaagggctgggaagaacggctcagggacattcctcccagacccaaggaaagggaatggagacacattttgatgttttctacatacttggtcaacttgcagctactataa

SEQ ID NO: 410150 - DNA, 301 bp, Homo Sapiens
agcgagggcagctcgcttttgaggcagggattgctgaatgaggggagtggctttccaagttaggcgtttaggggaagaataccaactgtcagggacgaatgagagaacaggccaagcagccctggagggccaagtgaggaggcctctgttggagtgcctgaaatgtctggcttcgggaccttggattctttaaatgatgcaatctcctggcttctgcagagttgaaatcaaggcttagatccccaaaccatctgtgagcctggatacttatgcatggaagttgaagtttacagtgactcta

SEQ ID NO: 410151 - DNA, 301 bp, Homo Sapiens
tacgtggcagagtatttacaaatgcagcagcaggcagaaggtagagagagtgggggcacattccctcttatttactgaaaataagaccaaatccctgcaaaggggggcaaggatcccttgtctcttgcagtgagtcagtggcagaaaaaggtgagaacttgtcaccaggtgcaaaccccaaatcttgccactggctcaagctacctctgcatggctctgaagttggtttttctggcttccttagccggacacttttgctggtcagtttccctgcagtttcttagtggaggatccagaattc

SEQ ID NO: 410152 - DNA, 300 bp, Homo Sapiens
gggtgggggcaggtgactgggatcacgaaatcaccatcacctggagaaggcagggtaagatgtggagaagagacagatgtgggaccctgggcagatcctgaatgtctgtggagacatctagaatgccatcgtggctgggataatgaactcgaatgccctcactgtttctttatctcttaaccagagctcctgaaggagattctcaagaggacagctagacgggggaggattgcagaaagcttgacatctacagaatgctggagaaatgtgaggttgcttaccctgaagaaatacgggatg

SEQ ID NO: 410153 - DNA, 298 bp, Homo Sapiens
  misc_feature (95)..(95): n is a, c, g, or t
  misc_feature (122)..(122): n is a, c, g, or t
  misc_feature (125)..(125): n is a, c, g, or t
  misc_feature (131)..(131): n is a, c, g, or t
  misc_feature (186)..(186): n is a, c, g, or t
  misc_feature (222)..(222): n is a, c, g, or t
atttgatcatgtgtgtttcagatcacaggatctcgtgtgtttctcttctaacactgaaggccaccagatgtcagtgtaacttaacaaatcacatnctacatgtcacgttgacttcagcattnggnctaagngttgccttttcctttcctatttcaacttctgaagatgaagagggactttaagggnatttgcacacaagctccatagacttgagtcattggntatcttctgaagatgaggagggactttaagggaatttgcacacaagctctgtagacttgagtcactggacattgtg

SEQ ID NO: 410154 - DNA, 299 bp, Homo Sapiens
agaaaagcttggataattgttctggtaagaactcaaccaattggtgtttgcctttggctgtgcatagggaatccttctcacttggtagttgttgggcagcatacggttttagggtgtttcagagtccttagtcttgttgagatttatccctcgactagaggggatcccggaggtctttcccaaaacttcccttagaaatggtcctaggcttactccaaacatgttcatccaccaacttttggagtcctccagcccaatgcggaggtgctggctgctggtatcttttgaaccgcagattc

SEQ ID NO: 410155 - DNA, 286 bp, Homo Sapiens
  misc_feature (21)..(21): n is a, c, g, or t
  misc_feature (37)..(37): n is a, c, g, or t
  misc_feature (46)..(46): n is a, c, g, or t
  misc_feature (80)..(80): n is a, c, g, or t
cccaaatgttatcattcagtnaagtccccctccttanactttttcntttaagcgtgcttgtgcccaggccctgggctaancacgagatgtggaaaactgaccaagacaaaaaacagtcccaggccaacctgacctcacagtgtcaggcattaagcaagtaaccaagctgcccgcatcagcaataccttctggcccctgatttttctgtctctgcgatttaccttgccctgatctagcagacttaaagggatcagtttttggggctggcgcggcctgagaggtcaaa

SEQ ID NO: 410156 - DNA, 294 bp, Homo Sapiens
  misc_feature (28)..(28): n is a, c, g, or t
  misc_feature (30)..(30): n is a, c, g, or t
  misc_feature (87)..(88): n is a, c, g, or t
  misc_feature (92)..(92): n is a, c, g, or t
  misc_feature (137)..(137): n is a, c, g, or t
  misc_feature (152)..(152): n is a, c, g, or t
  misc_feature (188)..(188): n is a, c, g, or t
  misc_feature (204)..(204): n is a, c, g, or t
  misc_feature (206)..(206): n is a, c, g, or t
  misc_feature (213)..(213): n is a, c, g, or t
  misc_feature (218)..(218): n is a, c, g, or t
  misc_feature (229)..(229): n is a, c, g, or t
  misc_feature (266)..(266): n is a, c, g, or t
  misc_feature (274)..(274): n is a, c, g, or t
ctcctttccccctcttcccggcgcttgncnccctcttctctttcctgctcgtctccgccccccttcgctggcggctgccggcgtttnngtgntgtttgccttccctggtcgcggtggggcctgggcccgcgcttgcnccctccccctcctgncccctgttccccgccgcccccgcggttcccttttcntgccccccccgtttgncntccgctntctgngctctgtgttnccggcctttgtcgtttgtcgtccgccctcgcttgcgnggtttggntgcttgttccgggccggcgc

SEQ ID NO: 410157 - DNA, 288 bp, Homo Sapiens
  misc_feature (33)..(33): n is a, c, g, or t
  misc_feature (52)..(52): n is a, c, g, or t
aaatgttaatccagagtctgacttttggctganacatgactgtgcttgtctntgtcgggcaacttgagttctagatccttcattcatttggacctggccatactctttaatctttcctggctgactagttatcttatgtgtttgagaatgatggtggcagtgtattgtcccctaatgctgcatgataaactctgttgttcctagcctatattttggtagatttattatatcaaacattcctggaaataaagccaaaaaaagcaagaatagaaaatgagcaaaggatac

SEQ ID NO: 410158 - DNA, 224 bp, Homo Sapiens
gatcctctgggaaagggcttggtgtcgtggggttgtctaccctggcaaggagtttattctttgtgctgtataggcaggaggaatgtggcaccatttctaggagaagtgtgacatggtccagtgtgtttctgaaagttagttctgatggcacagtgaacagagggactagaatgaatgggtgggagacaattgtaacagtccaggctagagacaaaggtggtgct

SEQ ID NO: 410159 - DNA, 206 bp, Homo Sapiens
  misc_feature (150)..(150): n is a, c, g, or t
cccactggaagggacaccacggctaaccccatgcctcctggacatgaccactcagctggcctgccacccggctgtccacctccccatggccctcgggttccctcaccccctccggtgctcagatagaactacagctggttggtgggagtncctatgtggggtgccagcggtccagcgtcttgtaacagatctctgctcctagcttc

SEQ ID NO: 410160 - DNA, 373 bp, Homo Sapiens
  misc_feature (131)..(131): n is a, c, g, or t
  misc_feature (159)..(159): n is a, c, g, or t
  misc_feature (216)..(216): n is a, c, g, or t
  misc_feature (233)..(233): n is a, c, g, or t
  misc_feature (276)..(277): n is a, c, g, or t
ggagggatggggtgggcccctggaaaggtgaaggccccagatcggaggcagaggcttctcagagcgtgactttcagaagtttgctgctgggtgatacctggtcgtcactttgtggctgtagatactgggtnctcaatattcacatgtaagacagacacnacattccttacgtccctcttatcacctagcctagctccaaatacctacacgcttganttctctgaaagaaaaantgttcaaggaggattctgtaacctgttgtttccctaatatttnncttctgtatggatgttccaacagatttcacccggtggcatctccactcatctgtatgggagagccctctgtatatgcgggactcccctttcctctt

SEQ ID NO: 410161 - DNA, 319 bp, Homo Sapiens
agcaattctggatcctcctttatagcgcatgtgagaatggaccaatacagtgtgtgtatgttgaactgtccttgcatttgtgggataaagctcacttgatcatggtgtatgatgtttttgatgtgctgttgaattcggtttgctaatattttgttgagaattttggcatctatgtttatcatggatattggcctgtagttcattgttgttgttgtatccttatctggttttgatattagagtaatgctggtcttatagaatgaatttggaataattccctccccttagatttttctggagtagtttggataaaagttgg

SEQ ID NO: 410162 - DNA, 172 bp, Homo Sapiens
agctacttagagctgtagtcctttaaagctggttctcttctttgggtgtttgtgggttctgcagtacccccaacaggcactgagaccctctcgcttgcagttgcctggacatgggtgaatgtctgccctggcagcctgtctatataggcgccttcacaggggagtatcacac

SEQ ID NO: 410163 - DNA, 232 bp, Homo Sapiens
  misc_feature (71)..(146): n is a, c, g, or t
  misc_feature (198)..(198): n is a, c, g, or t
cctccaggtgtatgtaatttgagcatgtgtgtgtgtaggcgtatgtaattgtgtgagcatgtgtgagtagnnnnnnnnnnnnnnnnnnnnnnnnnnnnnnnnnnnnnnnnnnnnnnnnnnnnnnnnnnnnnnnnnnnnnnnnnnnnagcaggtgcatgcaatcgtgtacgtgggagcaggtgtatgtaatcgtgtgtnagcatgtgtatgggtaaacatgtatgagcatgtg

SEQ ID NO: 410164 - DNA, 299 bp, Homo Sapiens
gactgtgtgtggcccttgttctcacacgccgtgtgtgtccgcgcccttttgtggccgtggcagcttatgtgcgtgcagacagacgccctgtatgtgtgcctccctccacgacagcctccgtgcgcgcgcgcctgcgtgtgtggcaggacatggcctgtgcctttcagctctgtgagaggctatttctgggtatgtgagtctttgtttgccgctctgtgagaaagtgaggggcaataggggaagtatttcagaaagagggacagggattgtgctcatgagaacaggaagagaatgaatgt

SEQ ID NO: 410165 - DNA, 224 bp, Homo Sapiens
  misc_feature (97)..(160): n is a, c, g, or t
acagggactccccacccacaggactccacttcacccacaggactccactcacccacaggactccacttacccacaggactccactcacccgcagacnnnnnnnnnnnnnnnnnnnnnnnnnnnnnnnnnnnnnnnnnnnnnnnnnnnnnnnnnnnnnnnncaggactccccacccgcaggactccactcacccacaggactccccacccacaggactccactca

SEQ ID NO: 410166 - DNA, 219 bp, Homo Sapiens
acgccccaagaggggagtcagggtaggctgcctgtgaggatgagagagcaaagaccggctggagggaggatccctttttaggagtcttacctgattattcatgagcaggtgggcaagggggttgctgggaagcatgttctgggtgctcatgcacagtggctgtgcatccctgttcatacgtcacatgtctcactggcatcttaaatctccatccagggg

SEQ ID NO: 410167 - DNA, 146 bp, Homo Sapiens
ctgtgtgcatggttttagggtctaatgaggagtaaaacaagatttgttgataacagagaagagttgagagtccagtgggtaacactgacatatcaaggagtagccgatgatgcctggatgctgtttcatgtttagaaagcatcaag

SEQ ID NO: 410168 - DNA, 246 bp, Homo Sapiens
gtccccgaggaggtcacagactctgacctaggaggcagcgtcgtagcactgcctagtcagtttaagaaataaaaaggtacatcccgtttaaaatgttcatcagactgcagtggaaaaggcgactgcgttttacagtgatgtccactggggatgatatgagggaaagcttcgttacatagtgtcgtaggcttccctcatgaggcaggttaatttccacgggacactcattccccgcactgtgggagg

SEQ ID NO: 410169 - DNA, 275 bp, Homo Sapiens
ggagaaaaagaagagttaggcatcaatgtaagggagtagatgatatagaagggtggaagggtagggtcctgtagggaaagtggaggggaataaaagaaatgggcgtgtggagggagagggcttgcagtttttaatcagggagacagactgtgcctcattgagaaggagacatgtgaacaaaggcttttgggaggtgaggagtccgccatgtagattgccagaggaagagcatcctgggctggcacggacctgggagtttccaaagcaccacaggg

SEQ ID NO: 410170 - DNA, 215 bp, Homo Sapiens
ggggcaggacagcttctccaggagtggggatgatgaagagattcacaccaagtcatcatccacacccctcctgacttcctgggccccctaaggggctgcatgtagtcaagggaagcacagtttactggaccataaagggtctgattcagacagtgtaagcgcttgttctggctaagcctgaggcgctgcaagtagaaactgtgagtccccacgag

SEQ ID NO: 410171 - DNA, 306 bp, Homo Sapiens
  misc_feature (33)..(33): n is a, c, g, or t
tttgtggttgccccttggggaatctgctgcaanagtgaaagggttagagtctggatttttcagagtcccccacgcaggcacagttgtctcctaggggcctcggggaggagcagacgggagtgcagcccctccgggtgagagtgggagcagcggccgtggggcggggccagtctgggtgtggaggtgcagggcagtgagggctggatggtgtaactccacggggtgcacgaagctgctttgctttttcccagtcgttgccttctgtcaaccaccctgcccttggccacactccaccgtgtggcgttg

SEQ ID NO: 410172 - DNA, 167 bp, Homo Sapiens
aagggggcctgcacagatcaatgatgacaggtacagcaccatcaactaacgagcattgagtcagcactgaggtcaagtggtggtgagtaggtaatgataggtgaaggaggcaatttcaaacatgttggcaacattttttacttacaagatttaaaagtcctttacgc

SEQ ID NO: 410173 - DNA, 264 bp, Homo Sapiens
  misc_feature (77)..(172): n is a, c, g, or t
cagggagggagtgttcagatcagctcacatggtgaagaaagcggaaagaaaatatgcaccgagagggaatgtgtgcnnnnnnnnnnnnnnnnnnnnnnnnnnnnnnnnnnnnnnnnnnnnnnnnnnnnnnnnnnnnnnnnnnnnnnnnnnnnnnnnnnnnnnnnnnnnnnnngttttaaagaaggaatgcggtagaaaaagcaacaggtctggatgcacattggaggacagccgagaaagaaaggtgattgcagctgggcgtgg

SEQ ID NO: 410174 - DNA, 118 bp, Homo Sapiens
ggggatcctgctctgcatggagcctgcccacttcctgggaatcagacaggtcttcttccccactccgaccacttcccgaatctgtaaccatggcccgcccaactcccttccagttgcc

SEQ ID NO: 410175 - DNA, 197 bp, Homo Sapiens
agaggagctttctcccgtaccatccactatgagaggaactggagtaggcatagtggagaggagctttctcccgtgccatccactatgagaggaactggagtaggcatagtggagaggagctttctcccgtaccatccactatgagaggaactggagtaggcacggcggagaggagctttctcccgtgccatccacta

SEQ ID NO: 410176 - DNA, 286 bp, Homo Sapiens
agttgagagacaggatagccaagtggacaagagtccatgccgagggagcaactcgtgtggagaccctggacgggaagtctccccgcacgtcgattcagagaaaggtaacggaataaacatgggagatcttggtgggagaggtcagagagagcgcagagggccagaccctggcaccttacagcatcctacatacttgggctttacctccagagagatgacgtgactggaaggtttgagtcgaggagtgaggtggcctgaccaaggtttgatgggactgccctgtctg

SEQ ID NO: 410177 - DNA, 290 bp, Homo Sapiens
caggagactgtaggatttgtgacagataaaagtcaggacagcagagtcagagggcagccatagcacgtgtaaggcggcggggatgctgacagcaagacgttttctggagaatctgggttttactgcaaatacaaattcactgttctcaggatggcggagggaccagctccttgggaaggtcacccccttggccacctattgtccctgaggggctgatggagggaggaggccaccttatgaactgcaccaggtccgtggctttggcggtggaggccccatcactggcaact

SEQ ID NO: 410178 - DNA, 285 bp, Homo Sapiens
  misc_feature (167)..(186): n is a, c, g, or t
  misc_feature (192)..(234): n is a, c, g, or t
ctagaaggtgcaaatgtgtgaatggccactgtgaagagccggtggaccctgaccacgtgcctttttcccctcccatcaacctcttttgtgcttccccctccatgtaccaccttctccataaccacccctggccttacaactctctcctttgggcactatcgtctccnnnnnnnnnnnnnnnnnnnnggagtnnnnnnnnnnnnnnnnnnnnnnnnnnnnnnnnnnnnnnnnnnnggggctttttcctggctttttggctgccttctcttccatcgtttccatttg

SEQ ID NO: 410179 - DNA, 173 bp, Homo Sapiens
gagaaattctggatcctcccccgacccagacccaaccctggggactggggcatggcgtgcagcgagagtcttattgaaccttctgggtactttcccctttgttcctccccgatctagagaggcccaaattctggctgtgatccagctctcatgcccctcctagccctgctcct

SEQ ID NO: 410180 - DNA, 203 bp, Homo Sapiens
tgagtttctgaaggaaatggggtagggcaggctctggtaggggctggattgttcgagctcctgcttgaattcctgcatacactggggaaaagggggatccccagggccaggaatggggaaggtccctggctcattagacaggaaggcaatcttgattctaacccctaatgctgtgtggtgtacggaaagtcactcaacctctc

SEQ ID NO: 410181 - DNA, 204 bp, Homo Sapiens
gcgggagtggttgtttagatattttcttcctcacgtgaaacctagactaatgagttatcatctaacaagctgtaggtagtttggctgggctggatccagacggtttgagttaaatctagattgtacttgcctaaaattctgtaaacctctagctacgcaaatcctatttccaaaaatgctgggaagtcactgtataagagttta

SEQ ID NO: 410182 - DNA, 254 bp, Homo Sapiens
atctccacgttcaggagcatccccgtaactggacagtggcacagagccaccgctgcacacagcagtaaaaatgtacagccctccctctctgcgttcaggagcagagggcatgagtttcacctccctacaggacaggaaactacgacagtcatctttgcacctgaagaaacaaattatttaaactttctcatcctgcagtttacttcttagacatgtctactttctatagcaaaatagatctgggacacgaataa

SEQ ID NO: 410183 - DNA, 220 bp, Homo Sapiens
gtttgcagaaatacaccaaacgtgtgaccacccttcgtgaccggactacagcaataactaagccagtggggtaggaaggagaatcggatcaaaagttcacattttgatcaacgtcacatatgcttgagataaaacgctgctaacgtcaacactggactcaccccagtcatattaacattgacacgactcaccccagtcatattaacattgacaccaaaca

SEQ ID NO: 410184 - DNA, 286 bp, Homo Sapiens
cctgcagtcacaggggcttggcctcagatgtctagggtgtactgagggggtgttgccatgttgaccatgtgcgtcctctctggctgccacaacagaatactgcagagtggggggcttcagtcacaaacctttattgctcacaatcctggtggctgaagtccaagatcaaggtgtgggcagggctggtctctcccaaggcctctctcctgggcttcagatgccgtctctgcatcctcaagtcctcacccctctgtgtgcacctgtgtctgcatctcctcttcctaca

SEQ ID NO: 410185 - DNA, 216 bp, Homo Sapiens
ggaggaaacagcagccatgggcaccgttggaggcagaggcattctgactcaagggacgggcccacctctggtttctggcgctgttgactttagcatgtggtgagtgttgtgcccttgggcatatgtgcactgagatcttgaggacttctgttggagaagtgtctgtcttcttctttctgtggaatagttttttggaactgcctcacgtgtgccctg

SEQ ID NO: 410186 - DNA, 285 bp, Homo Sapiens
ctttatggaagacccgagtcttccttctgcaggatccacacttgaactgtgcaaagcaccaacatatcattgcctcccaaatcctggagatcagaccttccccactcaccccatctcctgccccaccatctgtcgggagctcctcacctttaaccttccccactccatgcgagtgtcccacatcctggggacacaaatcaagctttcagggcagtctccttggaagcctccctcacttggactttaggagtggagattcaccctctctggctccccatgggctag

SEQ ID NO: 410187 - DNA, 128 bp, Homo Sapiens
  misc_feature (12)..(12): n is a, c, g, or t
  misc_feature (31)..(31): n is a, c, g, or t
  misc_feature (64)..(64): n is a, c, g, or t
  misc_feature (105)..(105): n is a, c, g, or t
aattggccccanggagctccgctctggcttnagagttgtcgctgatatggcaacgctctccganctctctggaataggcaaagatccacatgagaagagcttttngactggatgggcctggctttgca

SEQ ID NO: 410188 - DNA, 272 bp, Homo Sapiens
  misc_feature (78)..(78): n is a, c, g, or t
  misc_feature (85)..(85): n is a, c, g, or t
  misc_feature (108)..(108): n is a, c, g, or t
  misc_feature (116)..(116): n is a, c, g, or t
  misc_feature (125)..(125): n is a, c, g, or t
  misc_feature (137)..(137): n is a, c, g, or t
  misc_feature (142)..(142): n is a, c, g, or t
  misc_feature (154)..(154): n is a, c, g, or t
  misc_feature (165)..(165): n is a, c, g, or t
  misc_feature (176)..(176): n is a, c, g, or t
  misc_feature (201)..(201): n is a, c, g, or t
  misc_feature (216)..(216): n is a, c, g, or t
gcttcacggcgtcttgtcctgctcatttaggaggaggatggatacttccacggtatcgatatactcctcttgctgctnaagcttnggcatattgctgctggatgtctnaattcttnagatttctnataggcggggtnggaantctccgtccctnatatgcttttngagacatgctnactctgcgctttttgatatccgctngattgctccagattnaatgtctttgctttttattggcgatttaaagctagaacgagtttgataattgtaat

SEQ ID NO: 410189 - DNA, 264 bp, Homo Sapiens
tctcactgaaaattatgacaaatgacaaatctgatttatgaaaataggtcctagtagtggatcataggattctgagttcccctttgtccaatcctacttcagaacactttcgggaacttgagagagagattatgagctgtgaatgaagtatcacttgaacttgagatgtgccccaaagcatctcagggtgtaaaacagtgaatcagccaaaagttcatgcttcacaaattaatcagggtgcctctaatgaggatccagaattct

SEQ ID NO: 410190 - DNA, 279 bp, Homo Sapiens
  misc_feature (155)..(155): n is a, c, g, or t
  misc_feature (252)..(252): n is a, c, g, or t
cctgctcataaccctaaacctagcctgaatcctagccgtagccatcacttaaccctaacttaactctagtcctatccctaaccctacccctaaatcaaatcctaatcctaaaaacagccctagcttcaatcctaactctaccataagccctactntagccctaaacctaatgctaaatctaagtgaggtttgcaaaatgaacccggtgaagctgatactaaactttcctcttttattctgttgcactcaggncaaatgaggtcttgaggagttgggaaa

SEQ ID NO: 410191 - DNA, 168 bp, Homo Sapiens
  misc_feature (137)..(137): n is a, c, g, or t
cctgagccagcacccggacagtccaccattgtgacgtggacctccctcccgagccagcacccggacagtccaccattgtgacgtggacctcccccctgagccagtacccggacagtccaccattgtgacgtggaccnccctcccgagccagcacctggacagtccacc

SEQ ID NO: 410192 - DNA, 301 bp, Homo Sapiens
  misc_feature (104)..(148): n is a, c, g, or t
ggtgggacttgtaaagtgattcatggttatgagtgtagacccgggaatcagataaactgggctcaagtccaactccagcacttactccctgtaaatgatcagtnnnnnnnnnnnnnnnnnnnnnnnnnnnnnnnnnnnnnnnnnnnnnaatggagtcatcatctcacagggtccatgtgaagctgagatgtggttaaacatgtgaagtgcttaccctcgtgccctgcatggagcagattctcaatagaaatttgctaatcttggtcaaattctgtccattggccaggagtcccagtcaggc

SEQ ID NO: 410193 - DNA, 273 bp, Homo Sapiens
gcccagggaacatgagatccaatggtctaggacaacactggggatactgaagtcttgggggaaagcaatcgggagccaggggctctggaagcgagggaaacgggtgtggaaggacggaccctggaagagcatggggcctgggggcccaaaggagggggaatgaagcggcactagggagttgctggggacaggaggcctttcacctgagccagcactgtcagttgaaaaggcaagaacgcaacagctcttcactggagtttcttgcctccagat

SEQ ID NO: 410194 - DNA, 276 bp, Homo Sapiens
gtgttgttttcatcttacttggttataggccagtggtgatctgggagccactggtggaccacactggcttagttagtcttccttctttcctccaccaaaagacatgcagagcgttactgccttcccacccaataaagaggatggtaggtgagaaaataaagagctatactgtaagcagagcaactgggtttccaaggagggagtgtaaaacaaaggatctcagtgtgggagtgtctaaggttgaagctgtcccaaggcaataccttctacccctag

SEQ ID NO: 410195 - DNA, 249 bp, Homo Sapiens
  misc_feature (35)..(35): n is a, c, g, or t
cgtcctctctatgcacacgggaagatgtccacaanccccattccccagtgcaaggtcacccagcagccacccattctctctatgcacatgggaagatatccatagcgcccccccattccccagtacaatcccacccagcagtcacccgtcctctctatgcacacaggaagatgtccacgggccccattccccagtgcaatctcacccagcagtcacccattctctctatgcacactggaagatatccat

SEQ ID NO: 410196 - DNA, 296 bp, Homo Sapiens
tgctcactgcccactgtgacgtgtctgtcatggtcccctcggccctgcacacgtgtccactgtgacgcgtcggtcactgtcccctcggccccgcacacgtgctcactgtccactgtgacgtgcctgtcatggtcccctcggccctgcacacgtgtccactgtgacgcgtctgtcatggtccactcggccctgcacacgtgtccactgtgacgcatctgtcatggtcccctcggccccgcacacgtgctcactgtccactgtgacgtgtctgtcatggtcccctcggccctgcacac

SEQ ID NO: 410197 - DNA, 248 bp, Homo Sapiens
  misc_feature (65)..(126): n is a, c, g, or t
gccagaggagaggagaggcgcggggctagagtgggagtgtggccaggggagaggcgcagggctgnnnnnnnnnnnnnnnnnnnnnnnnnnnnnnnnnnnnnnnnnnnnnnnnnnnnnnnnnnnnnnagcagggctggagagggagtgtggccaggagagaagcagggctggagagggagtgtggccagacgagagaagcagggctggagagggagtgtggccagaggagaagagaggcgtggggctgg

SEQ ID NO: 410198 - DNA, 224 bp, Homo Sapiens
ctgcagacgtacatcagccacgtaaggcagaaaaatcctgtccaaaagtctgacagattacagcggaaccttctcaaggctcccagaccacacagcctacttctcctgtaagactgatcagagcgcttggagaatgctggtccatgcaaaactgaatccccaggtgtgtccagggccccagagccggagcacaggaggcactggcttggctgccgtcctttctt

SEQ ID NO: 410199 - DNA, 300 bp, Homo Sapiens
ggcctggtgacaactacagaaagacaataccttcaactcaaaaagagcaagagagtagaactacaatcaaatagcattgatttagatggaaaaatacgtctttgggatcatgcagaggtgggaagaaccaatgtttaggctgatagcagcttgtctaacattcccaagaaaatcaactttcaagccaagagaggaagtttggcatcaaaggacatcaacagtttccaccccgggaccagcagacagcaggatttgttaagccttaatgatatcatttgtgctttgggcacacacaatttt

SEQ ID NO: 410200 - DNA, 263 bp, Homo Sapiens
gggccaccatgcccggctggaaaggagtcttaatggacaagccaaaagctgtttcaggtggtaataatctctccacttggaagatgtatatccaataaccagccttacagcttagctatgcttttgatcatcaatgtatcaatacaatgtcattgtaattctggacaggaaattggattcagccacttttcaaatgccagggtagggcacttcccaggttttaacttacagaaggaccctgggtgtcgagttgataccattcc

SEQ ID NO: 410201 - DNA, 312 bp, Homo Sapiens
  misc_feature (73)..(73): n is a, c, g, or t
gaattctggatcctccctctcaccccgtattttagctcttggctcgatgacactccctcaacttctatcttanttctcaatattttcaacatacttatccttcaatatactgatccttcaaacactaaggcctccaattacattaactcatctcctccgatggcctttctttcatccttcctcagccactcactcccatggtcacactctagactttacttgccattaccaaaaactcctttttctcaatttcatgcatctcactttatggccactatattctagtcttcctgttcagtccctcataaacac

SEQ ID NO: 410202 - DNA, 295 bp, Homo Sapiens
ttcagaggccacggacaataaatacacgagtgtattcagccagagaatgaggttcctaagaggcctggcttcctgggtgttcctcagaagtccccaactcctagtgacagtggaggaggagcgtgtcccccttcggtcaccctgtccgttccttatgctctgctgataaatgccgcttgtattgcactgagccctatccctccatcgtgccttgtgtcgaattccacattagttactcaaagacacctggccttaaacttggcgtttttatctccttctgatcccaataaatgga

SEQ ID NO: 410203 - DNA, 254 bp, Homo Sapiens
gtgggactcacatagtgtggtatgattggtttacaaagaagacatttaggttcttgtcgatgctatcagaagaggacaaatggtttcgtatttattattccatgcttcaggggcattggtgggagtgtggaacggaaaatttaaacatcagaaactccattaggggacgttgatgcactgaatggaagtcacaccagcaaattcttctgctgtgagggcggaagtcacaccagcaaatcctgctgtgggggcgg

SEQ ID NO: 410204 - DNA, 296 bp, Homo Sapiens
ccccaccacgtgtgctctgagtttgtctctcactgacctgcggggccaagagggcagagggtggttccatgccaagctgctgagacgcagcgcacacctgccctactgaggattcgatatgcttctccaacattgggaaggaagtggcccaggtaaagtcactgctgtctggatcccaacctgctgtcactcctgaggggttctttgaaaagctctccctttgccaacatgtacgatggactaaataaataaaactagatacttacatttaaaattttaatgccaaacaattatac

SEQ ID NO: 410205 - DNA, 292 bp, Homo Sapiens
agaagatatgggaatatgatgggacaaacttgagacatgctgttgtagtaaacattgtttttttaaactaagcttaaaaagatttgctaatttctgaatacagattggcaataataattgaaatcatgcaaggagaccggggagacttcctaggagcctcgtattcaagtgctgattaccgtaagctaagcacctgaatgtagctagggaacatttggatgaccattaattaatttctgaataggtatccattatgattgtcaagatatgatatttacttatgagaggaaag

SEQ ID NO: 410206 - DNA, 248 bp, Homo Sapiens
gggatttggatggcagagagaaacaggcactgaagatttttggtcaggacagggcagagaaataagaagagttgaaaattcaccaaaggatagataaacccaaggcgtttagagaaaacctgtagtgtgcaaaggagcccagaatcctggggaaacttggagggaaatatacttaatttgattcactaagttaggcccagtgaagggattgggtggcataggtagaagccgaaaaataaagtatcttg

SEQ ID NO: 410207 - DNA, 295 bp, Homo Sapiens
gggaggtgttctgcaagatactgggttagtcagcagacaagtcactgaggatttgacatttaaatggaaacttcaaggtcaggtaggcaaatattggggagcatcagatcaagtcaggagagaggtcctagtgtctgaaggagtggacaaggccatcgcagctcatcgttagtgcaagagagaactgccatcagccagcgcctgaggaaagctcccagtggcattgggaggccattggagagactgacgcaaggaagtgatgagatactggttggttataaagatgatttgttat

SEQ ID NO: 410208 - DNA, 235 bp, Homo Sapiens
cctacagcttgagggatctgggtcagtgatagagaatggagagaaagtatagggaaaatgagatttgaaagcctgctggagagaagtctgacattttagctgttacatgaatatatctcccagcctctataaacaagggcatgctggttagggccacctgtacttagagccagttatggtttgcataagcatttcataggatgccatcctggggaaatcctcatggggagcccca

SEQ ID NO: 410209 - DNA, 294 bp, Homo Sapiens
atccagtgtatgcacttagcatggtacctggtatatgcacttagcataacatttagtgtgtggactcggcacagtacccagtatatgcacttggcatagtaccaggtgtatccactatttccagtgttcccatcagtccagtggcagaagtagtgaaggagttgagtgtcttgtcactggaggagtttaagcccaggtcacctgacaactcacacagatatttcactgtttacactacatgaacttttggggccctctgacaatctacaattaatctggaagcctgaaaatgat

SEQ ID NO: 410210 - DNA, 173 bp, Homo Sapiens
tggggtttatggtttcggaacttaccgaatcccgttctgccgggaatttaccctacggccagaatggctgttgtgacactgcctgtggtggggttatggtttcggaacgcacctgaatcccgtttctgccgggaattttaaagtatgggaagtttagggcatactttgcaagt

SEQ ID NO: 410211 - DNA, 132 bp, Homo Sapiens
tccaaacagcccctgaactttgactcacccacagcttcagcaaacctacaacccttatttatacataaccctcctaagaacaggctgagttcaaggtgaaacattatcttatctgggatctcattttgctac

SEQ ID NO: 410212 - DNA, 249 bp, Homo Sapiens
agagggataaataggccactgtctgaaggggtttgattcttgaagaatcacagggcatcattcaagagctttggtactatttgctatgacttattcaaaaatcctactaaggaggaaggtggtttgctctattataatttccaagtgaatcatgcctcagtactgtgttgcctttgtgaccaggcaagctttgagttttacattctgagtggcttgctccaggctctaagcagcccccttctataagac

SEQ ID NO: 410213 - DNA, 169 bp, Homo Sapiens
  misc_feature (91)..(104): n is a, c, g, or t
gggggaaactgtgcgtgtcccatggcattaaatgaattcgggcccaacgtgtgttaggaaggttttttgtttttgggccccagggtggggnnnnnnnnnnnnnncaaccattgacgggtgcaaaactggtttgtccttacccttgtccctagaagtttttcaaaatgtg

SEQ ID NO: 410214 - DNA, 175 bp, Homo Sapiens
agcgttttcccttggtctttgggccagggggaaggggcccttttgggtgccagtgggggcgggtttctccctgccaggggggggttccagcccaggggggtttttggcccatcggggactctaagcgttgccccccgttgggaccccagttccagttttttggggggggaaaaaa

SEQ ID NO: 410215 - DNA, 319 bp, Homo Sapiens
gcacaaccaaaaaggtggaggcaaagagagggcaaaacgggattcctaggtcactcattatacttggggccttcagatcctgctacttttatcccctaggaaccttgaagaaccagtgttcttgaggacagaaaaatcaaggtatcagaatttgttcggtagtgctcctgcttggggctgtagggttagtgatggccaggaggtggttacagcctactgtgtttctggtgcccactgagctttgctggagcagctggaacaagtaacagtcacacaactcatgttgttatcagtgatgtctacattatcaggcggtcaa

SEQ ID NO: 410216 - DNA, 317 bp, Homo Sapiens
agacccctatgatggctgctcctcagcacagcccgagaaagaccgggaaagaaaccaggacccagactcaaatatgaaaaatctctgggctttgtcctacggccttcccatgagtaactcatagccttgctccagtggaatctggccttcactagtctcagtggcaagttggttatgtggaaagatctctcttcacacacttgtgcgaataacggtaaagaattttgtattgttttcactctacattagaccatgagtatttatgcctgtggctgcagtttgtattagtttccggccccggtatctccttcagcatg

SEQ ID NO: 410217 - DNA, 136 bp, Homo Sapiens
agctagtaaacacatcgccacagatggtcacacaataagaaccccaacccaaaaacataacctaacatgtaaagatgacagaggtttttgcccaaaagttattttacgcttcagtaaggggaacagaaaactgttc

SEQ ID NO: 410218 - DNA, 287 bp, Homo Sapiens
  misc_feature (143)..(143): n is a, c, g, or t
gtwattttaaaatagtctaatgkgtatatacaacaaatagratatatatgttwtttaawadaacaaggcaagamgtttttbtwaaaattttggcccatctagtcttacattgtaagaatgtagtaccttgtgaaaaataacgnyccatcagtaaaaatttaaaaaacgattcactgtgaactagagatttagaattcaaactgtccaagatgaaaatgtcatctcaagryccacttatgrgtaattgttaaagtttttggaatttcatgctagggggkgaaatctgt

SEQ ID NO: 410219 - DNA, 266 bp, Homo Sapiens
agaatgctgaaaccytttgaggctttatatacattattthaaaggcaactatatgaaaaacacaaaaggtaaaattacataccaaaattattcayttccaaaacaagccaccactttatwatagcttattttcttacattbtcttaattttaaaavmttattacattagtkcattacaacaaccacaaaattttttacagttywttttacaaaytttttttytkwcctttgccaggggtttaaattwaattttttyaaacacwttw

SEQ ID NO: 410220 - DNA, 263 bp, Homo Sapiens
ttamgrtacaccaccaacygttmggccatactctcctctcccggagaagtgttctagamggaggagaaatatcagaatgtaacygmggtagataacttcctctcttygsctagamgaaygmgggtgcaatggtacttggaaagaaataatygaagggatgagtttattttaaatcattttaatdatmcgcctatcatatycacgbtcsahgctaaatktactatgtgatttatagcctttmvgaaacaaagtctattctctaa

SEQ ID NO: 410221 - DNA, 229 bp, Homo Sapiens
  misc_feature (69)..(69): n is a, c, g, or t
gcgctaccgcatgtttcctcgttcatttyttgcgggccctaacgtacactttgaatgtcaacttcactncacaacttcattggcmacttvacacataccttarggccactcccttcaccmmgcagcgcaagyatatwttcccacaacactttccttwttcctcaaccctaagwwgacatcttcacgcgcgtgcaaatttactgtacacgtctccctttagactatcaac

SEQ ID NO: 410222 - DNA, 348 bp, Homo Sapiens
aagactttacaaactttattttgaaacaagctataattacatgaaattaagaacagctctagggccaatattattgtactattttagggtctagcaattacacactatagaagatggatayyttattcttgctgtggattaaattatgaaatacttttggggtgccttctatatttaaggtattctggtaggatatgaaagaaaaaaataagaactgaatctaaacyttcaaagactgtacaatatagatggtaaacaccccctttaactttcaaacataatgggcagatgttcgtggtccaggggtaacttcctaactttttgaccctcatatttttctgcatgtaa

SEQ ID NO: 410223 - DNA, 289 bp, Homo Sapiens
csgagtcgatgacagccacttcacaggctcacgcgctcctagtgtsggcttgamggggacggggaccgattaccaaaggagagcgctgagtacggaagacacagggcagcctttgycttgggtttagcgctgatgcgctcaaccctgagtcgggttcactgcaactgttgtgtccgatttcggttccctgcaaccgscctcctgggsgagagatktcattgtgttcctgcsgccagcgggacttagragctgggcttaagacgccmggagggtcctcgvtyacgggaat

SEQ ID NO: 410224 - DNA, 387 bp, Homo Sapiens
gggatacytcamtatattamyytggtcagaatatagcctacagatagccagaacactatgccatgataaagctcaymyytctagcagtkccaaagaacaaatcatatcatggcctggbtatcaggttgamagagctcatacttatgacaaatggtccyttcacagcaamtttcatagaaacagamttttattggatgtcacaagatgcttttatatgtgamcactccttagcagagaagatataamcbtctttagaattgatgaaaagaaaatataaaamtctgcatttatttcaatcgmagaagccagcatcctcybgaggtataagagtagtctattacataaacaccgstcacatctctcccatgyytatkbtactgaagcaag

SEQ ID NO: 410225 - DNA, 207 bp, Homo Sapiens
agataatagtgaattgaatgaaaatatcattctatttacccaacctcatataaaccgttaaaygtttccmgtgagtctcttctgtaaattcatttaacaaatmyyggactcmtcmgcggttttgcaygtttcacygtttcccacggtaatccygtctgmcagcatgtattcacaaactcaacctvttcmgttgbtcammggctcaag

SEQ ID NO: 410226 - DNA, 273 bp, Homo Sapiens
ggmmaatggvaaccacagmvaagaaaacaatcactatctctctgbcagcaaaggtgtgttgggagcsaattacmtgtggvaattgagttgtggatttccttcgaaggatcytbttggacgacgacgaactgactymgattsagatggtcttttrsatcgacgacgacttcgaccctkktacgatcsttcgmmgaakgacgaccgatgaagcgaggaagcsaggattggttcttgsgcgagacgaccacgaaccctgacgattbgccgattttt

SEQ ID NO: 410227 - DNA, 270 bp, Homo Sapiens
ggatcggcacgagccacgacgaccacaayyccaakccttccagkggcaktcadkkkcktkcctacctcttcaactcaktktkagtatctgtgtcctcccttcttgtctttccctgtacctctgtttgttgtacctgttgtacccctgtgtcatcctgtctgtagtactcccagtagtttccccgtgttgtcaggtcagtgtaaaattgtgttgtaacgttgtgtgtctgtcgtktgtcccaatccgtagtgtagtcgtktgttgtctgtc

SEQ ID NO: 410228 - DNA, 201 bp, Homo Sapiens
atatcctttaagttaatggggsaaaatagcaatacaaataaaaggaaaatagatagttccatgacagacatttcatatatgtattcattaaaaacaaactttaggcatcttctacacacaataaattgtggctagatgcaatagcacagcaaatataaattggacatgggtattgactttaagaggctcagaactctgggg

SEQ ID NO: 410229 - DNA, 226 bp, Homo Sapiens
cggctcgacggtgctgcttcgtctaggttgagggctaagcttgggaaatggtgtgattccttgatcgtattcagttctgctctggactatcaaaaaattcctgggcaatatatacccyccggtttccccytccgttagtcgtatataggccaagaaagmataaaagaatacmatgatamaamaaggaaagwaaacttaagggtgaagatmtgaatggattacccaa

SEQ ID NO: 410230 - DNA, 293 bp, Homo Sapiens
gtccagcagagtaactagtcgtttgtggtcaagtgtaaaaatgaatgattgagttgtctatctggatgagcctttcgtttatttcatagttaacatgttaatgaacatgcaattaaaacatccatatcagctcgaatggctcctctttttcatcaggtatggtttagcagttgtttgaatctttagcaccttaatttttgtttcattcaagtgattttcctgaagtcattgwaagratctaccttgacaccaattttahctagagaaattcaattatttgctgraagdtaata

SEQ ID NO: 410231 - DNA, 355 bp, Homo Sapiens
cgtatcctgacatgatgatggaccccccgatttgttacattacacgaccaatatctcgccactatagaccatcttacacagcgacatcaaggacacccacatccccaaatatgcatgcgcctatgaccatcgagcaggccgatgcctactgacttcgagccgcccagcacccaaaacagcagagacctcagaaaacacgtaatagagcaggacactgcaaattaataaacgcatgctttacacattacccckycctccccctccccctcbycccctgcacccatgaacaagacttcgaaaattgaacgataaaccccaaagagatccaaccttcagacccttgaagaaccccggg

SEQ ID NO: 410232 - DNA, 356 bp, Homo Sapiens
  misc_feature (149)..(149): n is a, c, g, or t
caataatttcagcaacacttatttcttgcttacatgacatgaaggttgcgggttgattgcagttctacacagctgtgcttagcttcacatgtcttcttattcttagccccaggttaagcaccagccccattcgagttatgttcttcctnagacaggggacatacaggtgcaaaagaatctaaaccaatctacaagatggcagttaaatcctttgttcaaacatggcacacactatattcattcacatgatatcacccaaccatgttccatttcaaatgatcaagtcattgatgcagaaagtatagccctcccacagctactggcggggtggaagggatgcacaagcaagtcatatg

SEQ ID NO: 410233 - DNA, 385 bp, Homo Sapiens
ggaatttgtatccccaggagtgtcaattttyttaccaaaatccaaacttaattttcatcagtgtgcccatttttataatgtgcttaccccagttgcaaatcactagttaacagtgtggagtgagaagttatactactgargatttcaaaatgtgcctcagcttatctaccttattatgactagaataattatagsvvtbavataatatgcatamgcacttagcatatygcctatbatcaytactatgtagagagatagamatgtgtgaaaatgggagtcttaccttaaggatgtaattbyycatccgtgtaagattaccaatattctataavatavgrgvtgttacataactagaaagttgtagccattcaaccatttbtctgga

SEQ ID NO: 410234 - DNA, 119 bp, Homo Sapiens
gtatggcattgagatttatttatatatyymactgcatgcatatctttagctttcacataaattttgcttcatacaggctattggtataagcatttcctcttttaagagtttgattcttt

SEQ ID NO: 410235 - DNA, 412 bp, Homo Sapiens
gtaaatgtgagtattgctataaagttagtaatgtttaaaaaatagcaccacaatcatcataactattaatacatttagtttttatccatgatttgccaaaataaaaattggcacatccttgaaagggagatttctaaaggaacttaagaacttctaaaagtgtctctggtgattcatttaaatgatacttacttttcctgaccttaaaactctgatttgaacttgcactccattttgtagtgatgctacctatacatattacacatgtgtgaagcctttactacagaaccaccaaaaccaggccttgaggactgtggagacacgggagctgcatctgaaggcagtcctgcatgggaattagtacctacgcctgaraamccctctctaccmagattgctctcagattgccttt

SEQ ID NO: 410236 - DNA, 224 bp, Homo Sapiens
  misc_feature (127)..(151): n is a, c, g, or t
ytctgccgaatttcggcacgaggtttgwtcatatttccyyctggcaaaacatctgtatctttctattyttaccgsagtatttaaccgtgaatgtgactagaaccgctcytctatatawgcaakatcnnnnnnnnnnnnnnnnnnnnnnnnncggcgttctaawattcattcttagctkttctttttcaaakgtgtttgttcctttawttgtcathcakgatagg

SEQ ID NO: 410237 - DNA, 322 bp, Homo Sapiens
ggtgtaaatttagagttcataagtaacaccaaagactgagacaatgaagtccatgcatactgtaaaamaataacataaataacagtccctagtatgcatcagtcattgtactagaggctttgtgtgtacattgattgtctcacttgaaaatcaaaacacggcagaagagtcaaatgcttttgaatgtsctgaaactcaaatttycttccaggtcatctctgwatgattcctgyctcttttacactgccattactggyttctaaaaccacwaargctatgcagaagagcckggcccaaacatgttctaamackgggayattag

SEQ ID NO: 410238 - DNA, 290 bp, Homo Sapiens
gatcactgaaatacactctgaaggtattctgaagaagttaaaaaattttagaaaacgaaatgttctgtatacacagacactacagtcactacgaactgcagavagtataggavagcagtaattgatgtagagtttagacagtcttggmtcttttttagagcactaaccatggatttagactcaaaatagctgctacataatagagccctttaataatttamacccccttgttgaaatacaagttggactcccagtgtcaaactctagactgtagctaatgtattwmmvgg

SEQ ID NO: 410239 - DNA, 193 bp, Homo Sapiens
atatactaataagagtttattcatagtatcattcctgcaaataattggcaaaaaaaccccacataagactaataatactggtactaataactggcaatacaaatatcttactcttaatacacaaattttatcagttagctacagtatgamgtaaaatttgcatggcaatctaaccagatataacaagtcaacc

SEQ ID NO: 410240 - DNA, 271 bp, Homo Sapiens
gsgtcagtgagatgagaaacaagaaggtcatatcaaaaacgactacggggggaagagaagttttaaccaggccgaaagtaatggggtattactgggtttraaacaacttatgtgrggcctagaaatggatgtcaaggmagtaaccatkttaaacaaatttatgacacaccatgtyytggctgragccagyttktcaaaatgttcactgtatccatctctctggyttcagactctcactatcatttaactagtgtcatctttattttgtytt

SEQ ID NO: 410241 - DNA, 346 bp, Homo Sapiens
agcatagccagttgtcataaactgcaaagmmattyamacttctaaataamagtggaaggtaaatattcaagacaaagtatcaactagccagmcatattacaacctaggaagaaggataagtatttgtyactagaaagaacctcaggggaaacagcatgttcaagamagtaccaggttttagttaagacaagataaaggttggtattgcattgtgcatagtgaaaagggttccacttgctatggtgtcaccacactttcagggtgatcatttctactaactgttatatttcymttcaataccatatctctcttcattgatatgmmattggacatcagtgttaattma

SEQ ID NO: 410242 - DNA, 249 bp, Homo Sapiens
aaagtaagggatcatggctcatcaaacagtaatgaaacaaaggsctcgagccagcttctctaagaaatataaatcaaggtcctaaatcacttcactaatacttgggtggggaaagttgaaacgatatgtgcttccybggtagctgtgattctaattttytccaaaactgagttatctgccatcacacaaaatttgctaacagcctcactcattattacagattcatgtcactgcttgtgwgagatgctt

SEQ ID NO: 410243 - DNA, 250 bp, Homo Sapiens
gcatkwcagatgaattcyagattacaccactgagyattttaaagwaacagtatggyttgattgacttsacaaacawyatattattgatggatattattgtaycmcttgtmtatgatgtttagmtgatctctcatgtgttgattatgmatctgaatatgggatcagcgtatgwtaktatcatcacagctgtagcatatctkggttttrgctagattgggggactaacatctggagacaktcattcatcttg

SEQ ID NO: 410244 - DNA, 503 bp, Homo Sapiens
ataacatacaccctgtctagggacactcttcaaataattggaacatataaaaacaaaataaagtactgaaacgatactgagcatagtcaaatgagacaattggatctttgatggtttcccgagccctttcattattacaaatgtgttatttcatgcactaccatttaatcaaatgtaccattgactttaataaatggtataacactaattttcagaacatcagtaaaaatgtaggtcattgtattataattattgttcagattttaaaactcaggacccattacgtctgtttaatatcagtatttttgtgaaaatcatcctgagagtgcacttatgttcttctgtattatctttgctttattattttatctttggkttccaactttgaagagatgttacaatttacaatcagattgttattccagggggrgatataacaattctggttttattttttggcattctctcctgtaacttcatttcatcatctaagaaacacattg

SEQ ID NO: 410245 - DNA, 388 bp, Homo Sapiens
aatgaaatgggcacatgtgaagcttcaggacatagcctgggagcatgttttccctgtctacacacgayccagggttggcatccacaaaatctcagccaacatctccagtccacctgcactcaggttgtcagtsaccytgatatcagktbgtgaaatgtttactttccgaggtctaagggtacagctgttcaacaatttttbaactcctycgktttcgscaaataawtggggtcattgccacatggdttagbtttttaatctatmaggttyamattcaggggaacagtttcaatgttycatgtkttaccaaaaakkgggawtccascacatwttgattagaaacacttagtggtttgcgckacagtgtgtttcccargttttttggrgg

SEQ ID NO: 410246 - DNA, 358 bp, Homo Sapiens
ttactaaccttcattatacagcaaagctaaaaagtggtgggatatttggggtcttaatgaaaattgtatcatttaattccataaatattaaaatatttgggtaccttttaagcttttyttctttccttctataatggtggtacaagttctatattcattcagtttaatctcatttgaaattgtttaaatcagagtacatgtaaatatttgtsggtttttytttttggtttatagactcgagctttccttttacacagttttttttagggaaaaactaaagctattaggaaattctaaatcttgttgatgaagagttgggctttctttgatataattmataammgggatgtatggtatt

SEQ ID NO: 410247 - DNA, 309 bp, Homo Sapiens
gtaaaatgtgacttcagacaggttgaattccttcatgggctgtgataataaagtgtctaattatcagtcattttagttaatagttactataattttatgacagascaagcagctagcttgatttgtataatatctagggaatatataaagttgactcagacaaacttggacttactttccttccagtaattaaagrgtagacytgataatactgattattcattaattgggggarggccattagwtattgaaaktgccgtwaacatttaaaaaatawtatttattatcatagccttccctgaaaccctg

SEQ ID NO: 410248 - DNA, 397 bp, Homo Sapiens
  misc_feature (68)..(68): n is a, c, g, or t
gattagtgcaaactctaaaatgctcatgaagggggagggaaattgaatgtsaacaaataggaaaatgngaaaaaaactyccagtttttttaaatgtactgcmggcagaagagttgacagctataatctyctactgataaatttyctgttgtaaggctagataatgatttctagaagaaaggtaaaagaragtagaattgttttgataagaatggggmccagtatagargataaattaaaatgatcaaataaaggcacaggtgacaggttcgtctagtattttcaaaaatgtaaatgggcttgamctgaaatggggagaggagatgagctccaagggcataattctggtagtagggctcattttaagctcttcttatgctcaaaccacctgtmcccaa

SEQ ID NO: 410249 - DNA, 156 bp, Homo Sapiens
cttttttatgtacccaatatatttytattcaagaacacaacaaattataactactagcaaactgacagctttatacaccgaacatttgttaaatgccatttttttctgagaaagaatggaagaaatgtatgagctttctatgaaatgtacaaagtt

SEQ ID NO: 410250 - DNA, 232 bp, Homo Sapiens
tttcggtacttmtttsgtcrcgtctttahtgmtgtttgagttmgttthccggctttccctatmrgatgggtttcmtcttgtttgchccgcgctgcctcgtatcatmgggdckttctgbtacctttmttccstgcccgctacggaacgcccggrcgmttaggkcccakaggcccggkagcaccccmaagttgattttgtcrgggttctgcamcgggccgggggtctgctccgc

SEQ ID NO: 410251 - DNA, 258 bp, Homo Sapiens
aattcaaataaatatcctttattaaagaaaaagaggaatattgttaaaagcaccaaaactgtaggttgttacattgcatgtacaacaagagaaaggtgattgcaatacttggtgtacaagtacttaactctgaagtcatgagtgtaaaacacatgrahatacaaagsaatacaattacaatgcagraaagctgcactaaagagcaaaaggcaacagtcaaaacgrttactygagatttcatgtgtattgctataaatg

SEQ ID NO: 410252 - DNA, 255 bp, Homo Sapiens
gaagggagggttagggtgamgttttthtggttwtaggaatttagtgttaaaaattagatmaaggaaraagaaggtawaggaaggwaaagwtttaagtaagatmatggggtggaaggkrgaaaggggttagtawtggatggagatggagggttgtaggggagagatttataaattttttttgtgtawrtattggagggtgaagagttvaagggtgatttgtttktwaaaggtaaaagaattggkttggaagaaagg

SEQ ID NO: 410253 - DNA, 252 bp, Homo Sapiens
cggcacgaggttttgtagtcacttgactttyttyytttatttaaatgaaatttaatttgaaaatagaaaataaaattaggtaaatatgactggcaacctgamtttgagttgggattctytgtgtattctccccttgaggttattgtttcttccyaatttatatttcagatacatagtgtagaacaggaatttgcagaagccatttaagttatctyttgaggtaagctctgatttagcatttattctgataaa

SEQ ID NO: 410254 - DNA, 221 bp, Homo Sapiens
ctcgtccstgtcaaagtaagtataaatsggcatagacatgattaggttaggctgamaggttggttggtcattgtttacagttggtggtagmacatgccamgccaggatgagtccaaagagattttatagctatgagatatcatcttgtgtgttcctggtttcagattggtacttgtcaccatggattctagagcagcaaggaagtgcagatcttattattt

SEQ ID NO: 410255 - DNA, 322 bp, Homo Sapiens
cttctgtagatgtccagaagcagagtgactggatacttcactcaggatctcatcagactgaaattaacgggtcatctagggctgtggttgtcatttgggcttggtgttctcttctaagttcattggctgttggcagaatttcctttcttgtggtcattcctgctagctgtcagcagggmcacctgtcagcatctagaagccactcatggvtccttgctacatatcctccataggcagttcacaatctgggtgtttgcttccttttaggctagctggagcacatctctcagacttycttttttatagccagtgaaacgtgttt

SEQ ID NO: 410256 - DNA, 229 bp, Homo Sapiens
ctcgtgccbktaaactacatgagaggttacagagccctttvaaacmtmgacasgatmttaatggcccatttcccctgaaaawgtatgtatggactcatgtattamtmttttagtatgcagtttcctavgaattsctagatttcttaamtttcataaygrtcggctctagattgggaatctctvaacbtactgkcttttaaaataaagagccacatcttgtcactaaagg

SEQ ID NO: 410257 - DNA, 417 bp, Homo Sapiens
gagaaaaaaattgggctttwattggcaattacaaaagtaatagattttcttacataatacgttccttcagtaatatatttyycaagtattttaccgtagaatttctaaagtactttgtcattgaccccataatttattataaagtaggtcccataatcacattttttggaagttgctgaaattgagataaaaaatattgtttttttatgagaaaaactggacaaaatacagaatggccaaaactagattaactggctcagttatgtctactaggtgaaagaaaatacagaatctgttactgtagaaattttaagaggttttgagtcagttccagtataaaaataaggccaaagttctcctgtaaaatcatcattaaagtacagrgagggatctatcattcaaattataamgggaacc

SEQ ID NO: 410258 - DNA, 366 bp, Homo Sapiens
aaagcagatgaaaatatataamtcamttttattaaattgtacatcagtactgtcaagtaacatttattgatcctcatcaatataaagtacaaataatacaatgagcaagttaatagaatatttaagaataamacaacaaaaagcatggataacttttataataggtaaatcagtcattgctgttgagattttgatttctttaggttaattctcttcatttaatccaaaataatgtatagactgtcagccaacacattaaaaaaactattaaaaattgagtgattttttttaggataatatattavacagtataagcaaacatttatgggccatttatggcagttatcaatarggttatgaataata

SEQ ID NO: 410259 - DNA, 376 bp, Homo Sapiens
cttctcaactccttttcctttctccttgttggtaagtatgtaccctaaacacagattccattactgtcaacgtaatgtgttttcaggagagagtggaggtaagctaaaggtcatctactctgtataatcagaactgaataatatgattgtggtaaatgaaaaataaagagatggtaaaaggcttcagattgtcataatgattctattttgcatgtcagctctgaggytcagtcgaaatacttggtgtgtataatgtctgcagagcgtrgagtaactcatacttggtgttctttggttggtggcagatcatgctgcaatcagtgggactgaaagttaaatttggaaagttatttamctcttctgttgcatgcaggtt

SEQ ID NO: 410260 - DNA, 299 bp, Homo Sapiens
ggagtstggtactwcycctcasctygcagtcarggcttcataccgttattcgtcctggcccgttagavgcaggccagcsgggtacacgaattggamtttyggamacgagggagtcaccamctgcgaccctcccmagacasgccaccgtgmcacgaccactcctacamaccctttcygattctccctgaccgacgtttactttgttgggccmacaacccccggctttsrbttgaacccmcggactgaamttgccgcggtgcttyggaacgtagaactactatatactaccmcactacacc

SEQ ID NO: 410261 - DNA, 231 bp, Homo Sapiens
gagagtgcatagaaatatgcaabstaaaatbtttgcatgaattcatccrcacatrvcabgtgaagtbctcccchyattccataagatggaacaytatagaagtctcatttctctgtgaycttctgtccattaggaaagtaaggagattgttatctatatctagtctcctttccatattgaaytgcatggctctawatcctcagtgtatttttatccctyctcgagttattt

SEQ ID NO: 410262 - DNA, 194 bp, Homo Sapiens
ccgrggrtacgcccmcagmacactccacatctgtgccmcatacagggactcccmaataarcacgagcaaaacagacagccctgtwtatwtataggcctttwcargaagagactagcaggagcagtaataaaracaggaaacccagwwcmmcattwtkagggcttccwaaaaaacaggcttctragagtcgtatc

SEQ ID NO: 410263 - DNA, 373 bp, Homo Sapiens
tttatgtctttcccacccataatttcaagacatcaggtgtacctcaaggaagcaaccactattactaccttttggctatccttccagaaatattctaaacatatacaagcaaaaatatacctacctttatccatcatctcagtacctcttcattattaatagamatcatagaatgctatatacttygccttttccagttggcatataamagatgttttcatatttgaacacaaatatctaccttattttaaaaatagccactgagcactttcctaatgacagacattcagaatgtttctacctttgcttttatggacaattatgcacamatacyttatatgtacatcactttacacatgttcaaggtatataa

SEQ ID NO: 410264 - DNA, 234 bp, Homo Sapiens
ttgaaattsattaaygtgttggtctcccagagtgtagctgtcgtaaagcagaagacagagaaacctaagcatgycggggaaagggtgtaaatgtgaaagasgcaaagagatactgagttatacatgctcagtacgtttcgcagtaccaggcaagagaaataggatggttagatagamggmaaatataaattgchaagtttaagacaacagacgtactactaattthhgacmgaa

SEQ ID NO: 410265 - DNA, 385 bp, Homo Sapiens
gttttacatgatcgayttttctttgctctgattagtgatttgamagatggtgatggaataatctgattttcatagactgatttccaagtattcttgtgaatgcatattatttaccacaaaactttyctcttaatgtgcctttcaaagatgagggcaatcaacagacatttaaactggaaaatctttaccccaaattaatttgcttcttggttgatgactactgtttactaattgtgtcatctgtgtctcaccaaagcagaaggtacactcttcttgcaactgggtagttgatgtcaatgaggagttattgcattttctgtgaaacaactcaaaatcactagggktcaatcccaagctatttcctttcctacaatgwtcccthtgt

SEQ ID NO: 410266 - DNA, 275 bp, Homo Sapiens
  misc_feature (158)..(158): n is a, c, g, or t
ggcaccaccctgagctggtcaccatgttttyattactttagtcattgacatcttgtcagcagtatcaccacctttgccccggggcctgtcagtatggcaattgttacctttbtgrttgacacttttgavaatttgtcaacatgttattkattatttbngggggatctctgtctaacttaaagtcatttcttgaagttaatttactgttttattctttgaacagactctttggtttgtatgcagtagaggctataatagtctacawgctattatat

SEQ ID NO: 410267 - DNA, 220 bp, Homo Sapiens
atggaattaggtccttcagtccatttctatgcttatyyytgacttyytaaattttaatgtcacatggtcatctttaatgttgcattttctcttaatgtgaaagattaatatatbtctsatctttcaagagtagctgttccagtytyttaataagcagaacccttatttatgtattcbtcttatttmttcaagraaacctttttgttggatattcttttaa

SEQ ID NO: 410268 - DNA, 372 bp, Homo Sapiens
ctatagcagttaatcttattamataamacatagcaatttamatgcactaaagtcttaagacttttccagttaaagtttgttgagcatgtagaaattacttagtatcttagagttctaggtgcaaaatatacttyycmatatcattattytsggaggttagtctttctactccctactctcctctctaccagcctcatcagagaaataactcttcaaggtatgataagagatgccacagtcaggctagtcaatggagtgaaagatgtcactgccagatcccctgtatagtggcacagactcctggrattgaaacggagctagcttaaggrgtcatttaatccagacctctttcttcctgaaggggtctsctaa

SEQ ID NO: 410269 - DNA, 229 bp, Homo Sapiens
cctttattatcaccacagaatttgaaatgatttctgtagtggccatatttcatatcagaacaagaatttatactttggatatttttaaattgttaaatgttattgaaactttatgcaccaaaactgtatggaataatttaattttgcagttgtgtttctatattctatgtaattaaagctacttttatactatattgatagttttaaataaaacttgtttggagggttg

SEQ ID NO: 410270 - DNA, 327 bp, Homo Sapiens
  misc_feature (104)..(106): n is a, c, g, or t
gaaatctcatgtatgagaagcttagatcataacattaaatgcttaaggtattttgaagttaactatttacttgaacacttaaatatgtaacattttacatatannnctgctgttatagtatatgacaaagcaaaggtatgattttbttcataatccccaaatcttgtactgttcttttattggcttttattagctaaaaatgaatgccaataacagacgtagtatttaatttagttcttttaaacaccacagaaatgatgcgcattcctagtcatagattagtgataagatagagataaagggaggaaaagtttatatgaatatatg

SEQ ID NO: 410271 - DNA, 446 bp, Homo Sapiens
ggtttaagaaaaaccatgaaataaatattataataaaagaggttatgccttttccaacaatgttttctaatcattttattctgttagttattgtgagattctgtaatctgtttctgaaagccaatttagttgattgtttgccagatagtttttatattttagaatagattgcatgcacacttttcctcatagagtcttatatttctgaagtattttggtgctttcaaataaccttatagtaataaatgtaaatyacattgctatgattttccatatttattaatgataatcagtattgtcgcgttcatggtaacttgaaaattgccttagttcttctatttagttttcaaactgatggcagtttgcatgacacaatttttcctaatgtctgtatttcagaagaatgcatgagtgtttgttttataaccagatttgtttctgttttt

SEQ ID NO: 410272 - DNA, 252 bp, Homo Sapiens
attgacagagaatttcaaaaggcaggtatcaggctgatattatctgaatgtgtaaataagtctcagcattactaaaagtaatgccttgttgtgtgatgcaataggaaaaggacagtgcctcatacgaactattcttctattaaaaatcaccctaacgttttcaagactttgghtctaattaccaacttatggaaaatagtgagaatagtggaaaaagtcaaccactaccacaaaawagtgagtsactagtac

SEQ ID NO: 410273 - DNA, 181 bp, Homo Sapiens
ckgcggcccattgcccagtkgcactcgctgcggcccccggaccgakttakgctgctgctgctyccygaytcccaccccaagcccccggccaagtctggtayyctagcccctgtccccagtyycccgtgaccggccaaagccaagtccagtccccacccttatgtgygcctctgtgsggtga

SEQ ID NO: 410274 - DNA, 274 bp, Homo Sapiens
  misc_feature (105)..(105): n is a, c, g, or t
ctttaccyacgcatccgttttgggktatkskkccgscgagabtaatctaccgtttaccgaatagggggatacgtacgtgyttggcacgttaagaaaaattaatanacaaatatcaggtcattcagctttycgtgcacagggtacaatagcaaatcgtcattaaaagttacatgtattggcatatatagttaattagcggttaggktaggtagtagkcggtkctakaatacaatcgtccggagtattagtgctcaagaccacgtaagtatcggcc

SEQ ID NO: 410275 - DNA, 200 bp, Homo Sapiens
  misc_feature (23)..(23): n is a, c, g, or t
  misc_feature (107)..(107): n is a, c, g, or t
cattataccactgccgttaatgngcctttacgcbctttdccgtgttcgtcatacccytccttcactcattcccatatcgttctcacgccgtattagtatacgcgscnctyccccgatccttttgccacyttatttcgtgccggccyycacgcgattagttcggctggcgttcccttygcacggcgttatcgtgtataccc

SEQ ID NO: 410276 - DNA, 222 bp, Homo Sapiens
aggggsggttaaaccgcgtctccagtatatccaatgytattaatamtcyaagtctcattcgtaatctcaaaayaataaatagtattcatattgccaatgaaacctcgatcggtggstcacctgttattccacattatcataaacagttaggtccatactbgttttagtsgttgacaatggtgtttacgtcagtcgacgtgcgatatcggtgcgcaagttagc

SEQ ID NO: 410277 - DNA, 315 bp, Homo Sapiens
aagtacaaatgsgtcgcttggcctttacggtgrtgbktatgctaaagggcatttaggcataagtgtattgggtaacggtggaggggttggtctccaggccggagctaaggcaagcattgatggcagtgatcttgactcacatgaagccagtagtggttcacgggccagccatgatgctcgtcatgatatcgatgccagagctacacaagactttaaagargccagcgattactttaccagccgcaaagtcagtgaatccggcagccatactgacaataatgstgattcccgtgtggatcagttgtctgmagccct

SEQ ID NO: 410278 - DNA, 245 bp, Homo Sapiens
gggaaacggcctggttgagaggcttttgatggaatcccattctctgcctgtggccagaaggtggtgctagaggccagtcccacttggatgtgaccctgggctctgccaggattcaaaccacaaagracatttggractgggatgtttgctttgaaggagcccgaaaacaagtgaaaggraaccaagrtaactctctctccctccgstggcaaggrtcaaaaataccttgtgcaggggagsccgag

SEQ ID NO: 410279 - DNA, 196 bp, Homo Sapiens
  misc_feature (117)..(131): n is a, c, g, or t
ctcttctggagactagattaggaaataaccgatgtcctggcttgtgcagaaaacataagtatacacatttatatacactgtaagactgaaatttgaaacgtgtgcatgtgtatgtannnnnnnnnnnnnnnacatgggagaggctggttgggagaattgggatgtttaatactccactctattccagcccaggggc

SEQ ID NO: 410280 - DNA, 321 bp, Homo Sapiens
ctcgtgccgttcatttttccacaggagctcacaaatcaaaagttttcatattattatagagattctaacaaagtctgtggtttatgcataaatactctcctctgaaatatatcaagtgcagaggtgggaaaacccacagataatagctagcttttaaaattggcattttcatgctaagcattcattgagtctttcaatatgacagcatgttttgggttgtgtgaaagagaaattgtcttaaattagtctgtcttctcagtggaaaggaggacaaattgccaacttcctagtgcgtcaccacagtaagttatggagttaggg

SEQ ID NO: 410281 - DNA, 338 bp, Homo Sapiens
aaaacaaaaagacagggttatgtagttgattggagagttcctagagtacaaggagttgagggagaatccataggggggtaaattgggaataaagccaggtgacctacagatggctagaagaggaataaacaaacaaaaaggggcctatgcagttcaggctttgggggttgagttgtagtaccatgtagagctccccagctactaataaaagacctggtttggagatttgaccctatagtatgtagttaggcaataattctgwtaccacataatgaacaggtgagtccaagagaaactctcatgtaagataatgtttcaaacaaaatgccagtacaaga

SEQ ID NO: 410282 - DNA, 653 bp, Homo Sapiens
catcacctttctaatctgtaatatcggtattcgtacctccctatcctcttactaagccagtgctacatgttttaggtttgttatggtagcaccctacttttaataacaaattttgtatattcaaggtctagttgaagggaacaaaattcactctagcgagtttatgcacaaaggtatttgcacacaataagtattaaacggcttacagaatcattaggacagttgaaaagacaggctttaagttaagttttcaggaatgattttgagaggtttgcctcaaaccagatcaccaaagatgctcccagctattctatcatgaagctaacagctgaattggaatctatcatgaaagctgtcctctctagaaccgtgctgtcactgccaatattggaaaccctgtatagaaaaccaaggtgatatttagcatcagaaatagtggaatggtaatgcttctgccttatttacacttcccagatcttgcatgtaattgccttattttaaatctgatccagaacactaactaagaaatgtagggttactttattagcattcttgtttctgcacatcagggaggtacaccagaatgtggttgtgcatgccagtctagcatgttcactacacttttgggagtccagttgttccattggagcttc

SEQ ID NO: 410283 - DNA, 291 bp, Homo Sapiens
ttcagtatttgcatggagtatttgattatatagcacatgcaaattctttggaatgacatacaaggccctgcaagatctgattctaggccactttcccagtttcatctgctactctcccacggatccccccacatcccagacatactgaggtgtgtgcagtcctctgagcccaccatgcttccaatgtcaccatctctttgtaggtgctgtttcttcttcctagatgcctgtcttgttcctatctgcctggcaacttcttactcatcttttagaacactgtctagtgccagt

SEQ ID NO: 410284 - DNA, 318 bp, Homo Sapiens
gaataaccaaatcctgggatatttctgaaactcagtcgaggtcagtagatctgtctgggactacattttccatcccagttcctaacaaagtttcattttcttttctttattctctgatgtaagagttaacagtgaaatgaccaaaatcctgaaagccaatggagcaacaataaacatactcagatagattgcctcataaattctttcaagttagttttaaaagtaacacattttttaaaagtccactttggaaaaattgataatttaatatctggttatcagcctctccaaggtattccgggaaagttattttctttt

SEQ ID NO: 410285 - DNA, 251 bp, Homo Sapiens
gggtactggggattgtccccgggagagtcgggaggattactggaggccggatcggtacactaaagtgaaggtgaggtattgcgaggagtatgatccggatgattggttgtgtgattggtatatggttactaccgcgctacattgtgccctttcgtgtatggttccsgtggtgtgtggtggacaggtttttccggaagctatgccctattaggataaataatggagtcttcmaaaaaaagaagcgtcctaaa

SEQ ID NO: 410286 - DNA, 309 bp, Homo Sapiens
cgaagttgtggaagaagttgaagctcctgtacgtcctctagtggttcgtgaaacaccacacagtgcacctacggggacctgttgtccacccccgcagcgtcaaaggagtccccatggtcaaggggaggtacctcgtcgaccgacggtacgaggggtcgcaccacgtcgtaaagcccaagttcatacactaaccgtagcctcamccgcggcctcggatacacgaccggttcaaacgtgagtagaaggggctggaccacctccccgaccacgaccacttgtagctggggttaccgtttccgacctatctga

SEQ ID NO: 410287 - DNA, 392 bp, Homo Sapiens
  misc_feature (175)..(175): n is a, c, g, or t
  misc_feature (198)..(198): n is a, c, g, or t
aaaattggatctcgtatattaccgtttaatttaaaattaaactgtgagtatggcttgagtcttttcgaacaaactagaagagatttaagacatacatcatgaaaaaaattaacagtgtaaaraaacaatgtagaaacacaggttgttttggacacctttagacamaagtaaaaanaccactccctacccccawttwdncccctctgaacragattaatacgtatatgtaaactgatacatttccatcaacatctgatatacatatttattgatctattgtgaattataagatttaatatgattccttgtcaccggactcggtactgatcaaaacaccccgacgaccgagaatattgtctcgactggataacctaatttggactctgacttta

SEQ ID NO: 410288 - DNA, 341 bp, Homo Sapiens
ataaagcatctgtcctcttcaaggaaacaaggaatgtctggttctcctttctagcctgtgaagtaggagatggtgtcatttgttgtacagaagcaggagccccatgttactgggctgcaagctactgactgctttggttaacatactgaaaatttcatcagttgtctttaataaaagaccatgtgtatagggaaagatctgagcagttgtcattgagtttctcttccccagcccatgagctacagctggcagagagcaaggmcaccagtatgtaatccaacagccagttacctgaaatttttgcatttcagtattagagttaggtagactttgagtctgtt

SEQ ID NO: 410289 - DNA, 275 bp, Homo Sapiens
gctttgcctaactcaaattcttttctgaactctcttggtcaagtatctktktctcacatttacgagttatacaaaactttagtttgtbctgtgtatttgtatgaagattatstytttaatatttaaaacattgtgctttgatacagttgatgttaacagcaatttggaagccattttagaatttgaccttttattcttgaccattgggtatatcaagatataaggtagattccttacagagttggatcatcattattccaatgatggatttggag

SEQ ID NO: 410290 - DNA, 315 bp, Homo Sapiens
cacactgcacttcccaaatgctcccggcactggcacagatgcacaccctcttggccatccccacctgtgctccgccactcttagtcagccattcctctcggcttccgggagtcccctccttctctaaggatctcacccccatccgtgtctctgctgtctcctaactaccgatagcaagggcactagtgcccctgtttgccggggacaggccctgtctggggccctggtgtggcatcattgttaacagagcttcttttcactctgaggtgttcagttaggccagtcacttacacagtcccctcactggtgacacag

SEQ ID NO: 410291 - DNA, 401 bp, Homo Sapiens
aaacattaaaaaaagagaacaactaatactctttttacactaattagaacaatgtaagcctttttgttttattaccaaataatttgtatttcctatgtaattgctgcagttttattttgcatatagattttbtttccgtaacatctttgtctgttagtggttttatttatgtatttbbttaatatccttagattcatcccacttctgaggtcagacatcacatcttttcactacatgcctctctttgggaggtttctttcttgctaatccaaacaagaacatctgcacaattgtcaacctggratttactttattaatctcctggtttggaacactttttcttggatgttatatttactttggtttactattttgttggcttgcactaattttatatgatt

SEQ ID NO: 410292 - DNA, 320 bp, Homo Sapiens
gcaagatccagttccaaatcaggctaacctgtgctctctttgtatcttttacacctttctttgatggcatgacttacactgtgctgtgaataagataggctttttgccttcaaaggattcaaagtctggcaggctgacaaatagctatgttgcagtcttcaaatctagggctcactcttaggctccacacttcggtgtggtaaaaattcaaatagtattatcaaagcaggtaatgaaaagtttccctctctaaaatcagagcttctgctatgttgcacagttccaggggacactgttgccattatgggctagatatgtgg

SEQ ID NO: 410293 - DNA, 287 bp, Homo Sapiens
ctaatttgagttgatgaaactgtgctttcctatctggattacaggtaagctcttttctacctgattggatcctgcatcctgcctatattgctttttaatctggctcatccagctaccattgtgtaatcattctgtgactaagataaacatggttccttagtcaaactgttttaaaaagctatttcagattaaatgattagtcatcgaatgcttattatagtcttttagataactaaggtaagatgcattctatttgaactccagatttattttatttcttttcattt

SEQ ID NO: 410294 - DNA, 208 bp, Homo Sapiens
tctttagtttgatcaattttatcagtaatacattttaacatccaatattataattaaaaggcctctcaacaattattgattgcttgtttctctaagtattaataattaactcagttatgatttctataaaaaatgcatttgaatcttgaattggtatttaattagaaacttctttaaagccaccataaatgttctttaatattatgct

SEQ ID NO: 410295 - DNA, 209 bp, Homo Sapiens
  misc_feature (80)..(80): n is a, c, g, or t
aaaataatgaaatctgagttatgtactgtccattgtgtcagggctatgggctgattttatcaaaactcatcttgggactnaaaaattgtttggaatgccagaaataagaaagttgttctccagagctggaaacccatctttcgtttgtagbstcactgttgtggctccaagctcagtgataggaaggccggtggttacaacccagcctt

SEQ ID NO: 410296 - DNA, 394 bp, Homo Sapiens
gacaagtcgagagctgatgcagcttccacaaaacctcggccaacccagcagacaactctggagtggatttatccaacagagatgatccctttgggcccaaattgctgtgcttctgtaccccacctcactctgtcaccagatgcaggctgtcccaggaagggtgaccttggctgaagctgtagctgaggctgagcctgaaggaaccgacagctgggggctgtttgcaaagccgtctccctgaagctgggcctcaagtccttcttcgaggtgaggttgggggcagcacatctccatggcatgcagagcttgatgaggagcttgagtttgacctsaccctgaagggcaagtgggctttggaggagaraggagcaggaaggactgccagctaagcaaa

SEQ ID NO: 410297 - DNA, 472 bp, Homo Sapiens
  misc_feature (124)..(124): n is a, c, g, or t
cggaagtcaaagactggattgggtggaaactgcaagtaaagcctccagcaaagaccattaaactcatctagttttattctcatccaggcccagtcagacatgggctatctctgaccctccccanccccacagccctcctgccctgtgctgtggggccatgggtctgcagcactgctgcctagatggagctcagcactgggagtactcatctctccccttcctccctcacctttcagctcttactaggaattgtcccatttggcctttctttatctggcagtcttccccatggactcagaccccagaactcctgatgagttctttccttttaaaaataaacctgcctccaaatgcaccacaatcattttgagttatttgcattttaaacaaacctgtagtgaacttacagtgttttcttatgggcagaagccatacctaatggagttttctagggaattatcttttttaagca

SEQ ID NO: 410298 - DNA, 483 bp, Homo Sapiens
atttcagtaaacctctgcttactgctattgattaagatatttcagttttatgtaattttcaggatgggagctggaaggcttttaattgatgaaggtaaagaatgtctcctatgagcaagagaagtcaactggacatacaatagcatgatagaaaatttgggggttttctcctataattatttgtattcttactgagagttgggaggaaaagggacaaatggttacaggagagctctttgaaaatgaataccttgaaaaagaggttgtgattttagcagtatcgtgaaccacagagaggcctgggaagtgaagtagatgtttatgcatttgctggtagttgagtttatgatggagaaaggaaaatgcaaagacaaaaacacttaatccctctcacattagtatctgattagcaaataattattccagataattaaaaataattgttttggcctactaggttgcacaaaagctgtaacaaaattt

SEQ ID NO: 410299 - DNA, 342 bp, Homo Sapiens
ctcaaaagtaaatatttgtggaagatacatgaaaaggaatttaatgacagaaaagtaatttttttaatttcctctctcattgcctcaatttggtatgattgttttccaaattttgggatgtctgtacaccgtaacttgtaaggtatgttgtcttctttacctagttttccatctctttgtttactgaattcagacctcagagaaaagtggaaaacataatcattaaatctagcaagagaatcattttttccatttgtttcttttaaacacaaattcttctagtggagtaaataaggtatagtaamcattttgactgcaggttttaaataaaatggtcagcgt

SEQ ID NO: 410300 - DNA, 364 bp, Homo Sapiens
  misc_feature (59)..(148): n is a, c, g, or t
catcatcatcatcatcatgctagtacgactcactataggggggatgggggtaatggtannnnnnnnnnnnnnnnnnnnnnnnnnnnnnnnnnnnnnnnnnnnnnnnnnnnnnnnnnnnnnnnnnnnnnnnnnnnnnnnnnnnnnnnnntgactagaccgaacttacaagaaatgcttaaggaagtaaaaggatggtaactaccatctggaagtaaaaggatggtaactaccatctggaagtaaaaggatggtaactaccatcatgaaaacacacaaagtataaaactcactgatacagcagatacctatgagaaagtgaaagaaatcaaagcttatcactgcaaaaagaaacccacgaaactgt

SEQ ID NO: 410301 - DNA, 185 bp, Homo Sapiens
cacagtttagtgatattttgaaataaaaataactgaaaaatactttttgctctacaattaagagttacttctgccactgctataaatttttctattatgtcctttcctaggttgtatcttaagagcatcagtacatatatgcattcacactgcctagcagtaataacttaaaattttaaaactac

SEQ ID NO: 410302 - DNA, 477 bp, Homo Sapiens
  misc_feature (28)..(28): n is a, c, g, or t
cttttctaattaattggctagtataacntggatgaaaatattatctatactgtaccccaacaaaaatacgttgaatgctagtttacttttatgtgtcttgtaactagttcatccgtgtgcttgcatcgcactgctcataagttttcaaatatgggacggagtgctcaactctcgaagacatcattttcattacccgtttcccaaataaaatattaaggttgaggctctggtatttcatttcaaatagtactggtctgtttttccagccatgaaaacgtttacattctaagtaaaaatcctagcgatggttaagtcttaaatacaaatccccaaactcttgcactgccttcagctttcagcttgaatgtataaccagttcccataattactacaatattactattatcttagtctcattgccaaaaacccagctgcaggctaactatgcgagaatgagacactgttgaaatgactcgg

SEQ ID NO: 410303 - DNA, 512 bp, Homo Sapiens
gcttctcctgcgggctaagggtgtgggcgacagctcgcacattcaaataagggagcgattacaccgcgcttgctcctgaagacggatttcctgagactatgcgagtgtgagggccagcaggtgcacatttgaagctcagtgggaagtgttttccaagcaacaggagacagcagatgcagacggggtccaattactgctgctcacggctgatcacgccatgcacttgtgtgcggatacctggctcctggtctcaggcacctagtatggggctatgcacacgggaacgctcatggattcctgagaagttgtctggaactaagggagcattcagagaccacagatccagttgactggtccctgctgacatccagtccacgttgttggccacatcagctcctcttcaaactcatgatgcaaatcaacagctaaacgtgttgatattttttgtttctctcagctaagtggatccctgagtcctcctggtgcagtggaaagatttgagttttgcagcc

SEQ ID NO: 410304 - DNA, 159 bp, Homo Sapiens
gtacgttgagctggtcctcccagctctttaggagtgctggaatgtgttttaaaagagggaaagaaagagtcctaattttaggaggttgtctgcaaattcctgttctgatttaatagataaagctgcataaatttacaagtccgtatagctatacctacc

SEQ ID NO: 410305 - DNA, 186 bp, Homo Sapiens
gacacagtccacggcaaagattgaggctctcatggatgtatccagtccaccgttgagattgtgacttgtgtacttggactcaacatacaacatgtgttgactctaatactaagaaatgggatgtgtgggattgttcattcctacatttttttgtgactgtgattgtaacatacacctttgcccagc

SEQ ID NO: 410306 - DNA, 103 bp, Homo Sapiens
caccaaccccatttctgcccagcccctgccctagcactttctaagtactagtttggcctcctgtcatgggctctgagatttcagggtgccattaaaaagcctg

SEQ ID NO: 410307 - DNA, 126 bp, Homo Sapiens
tgtatcttgatgtttaaaaaattattctttacatcttgtaacatctactttttcaacttttcattccctataattcacaattctgcatctactaatcctctaaaaatacgttaaactaaaacaact

SEQ ID NO: 410308 - DNA, 344 bp, Homo Sapiens
gcggggagaaaggaggtttcaaagagcttttgcttctgctgagactgtaaaagactaagttagtcaggactggagcagtttcatcataaattctttaggaaaataagtcagattgccaatgaaaatgttgatattgccgtagatttatttggctacctaaagaaacaaccataaagacattctcaaatactgatgcacactttgttcctattgagtgtcctattgagtgacgcttgcttgattcaagcttgcttgatgattattgttcatcatcatgtcaaattgaagaaaagcaagaatgtcccacattttaaaattgacaaaaggcaaacaggcagggtgag

SEQ ID NO: 410309 - DNA, 115 bp, Homo Sapiens
gtggtgaggtgatgaagaaccataaccacgcccccactttgtcccatcacaataacctgttttcttgtcctaaccggaccctgcacccaaacccataacccttaataaacaattc

SEQ ID NO: 410310 - DNA, 591 bp, Homo Sapiens
catgcaaaagacagctagtaggatctttaagagactcataaaacttatgatctaaagaatagttgaaggaacaagctctatttagaagagaagagccagcagagacatcatcctatacacaattatctgagacattaacatgtagccagcctgtatatagtggtcctatttgctcacagacatctatcccacactttacagtagatgagtatatttttctaatgcacacaaaggtactatatatggcagcagtcctgagcgtagaagtaggaaatcagcatattctttattgctccaaaggacggagctgaccaaacaaatgcaagttacaggaaaacatatttttgctcagcctaaagaactgtctaagaatctgcattacaatgatggaatgagttgcctcttcaaataatgtagcccacattaccaagagtgttcaaacagtggttgggcagccatctgatgaaatggctgtaggagggatttctacaatgggtggcagattggatattatgacgttgaggtgggcttccacctctatgtgtctagaattgtcagcgattcagctggtattcctactcttacttcctg

SEQ ID NO: 410311 - DNA, 254 bp, Homo Sapiens
catggtgatttggggagacgactacatggtgatgcaaccgtagagcgtgaactgatcaacgatgcagaatagagaaaaagattgcctggtgcatttctagttcccttagtcttcatacaaacacccatgcaggttcatttatcaaccagtcttaagagacagctcacaagattgacagaggatgtcatacagatgcctaattaaggccattagcataatgaagccatgaaatcttatgaattaaaagcattctg

SEQ ID NO: 410312 - DNA, 190 bp, Homo Sapiens
ctggggtggggaagggtgaccatggccagaccaaacctacacagatccatcggcctgcagctgggtcttaagtaggctgggcctggcgaggcacccaattctctctcaattgttcataaatttcttgctgtactgggaattaaatttcttcagtgcttaagaactagaccttctacagacgttttagagc

SEQ ID NO: 410313 - DNA, 327 bp, Homo Sapiens
ctataaatcatatttcaacaaagctgtttgaataaaaatcatatttcaacaaagctgttttagtaaaccaaaaaagtgtttactatatcagcttggaaacatgctttgtttccaggagataaaaggtagagctgacaagatgctttcctttgactaaagacattatgtcacctatgaaatgttagtagatgcagagcaatgctgataaggtgtgtagtcttagactactgaaataagaaatgtaacgtcttcatgttgccgcattttaagagcataatgaaccaggtaagtggaaatgcttgtacctgaaatgggtattttgaaaat

SEQ ID NO: 410314 - DNA, 136 bp, Homo Sapiens
ggcacattcttttcatatgtgtgcctttcttccacttggaaaaggcccacagggaacaatgtgggacagacatagagcaaaaaattcacaaaaatggtgtaataacaataacatcctacaaataaagtaggagccc

SEQ ID NO: 410315 - DNA, 240 bp, Homo Sapiens
  misc_feature (161)..(196): n is a, c, g, or t
gattacacctttgatcatgaaatatcgattgcttgttgaaccctgcgaatcacgtgaaagtagggtactccaaattcgggggtcaaaaagtttcataaagcgttcttgatggaaaaaaatgtatttgatccacgaatctaagaaatagtgagaattcttgnnnnnnnnnnnnnnnnnnnnnnnnnnnnnnnnnnnnaattcgacgatccagaatttgaattgatgtcgtctcataaatca

SEQ ID NO: 410316 - DNA, 273 bp, Homo Sapiens
ggccctagggggcatttgaatttatgacccttgccttgaatatgctctaaaaaatatgggacttaacaattatccaaagcacacgtgaagggtattcattggatgtctgggtgcatggtgctgttctcagtgatctggggctgcagaggtgtttaagaacaccccgcttcacaggagcttagagaagggtgaaaagataaggcacattcagcagagaagcacccaaggaggcagtgtggtactgaggccctgctgctaagcactggcatttgg

SEQ ID NO: 410317 - DNA, 620 bp, Homo Sapiens
tgtacaatcagaaaagggagtctacagcccttactttgcttaactaagaaagggtgtatttccatgaactagcctgcaggcaccactacgctaataagcagcagggttaaaggaaagggcctagtctcctaaatctcaaactagtgttctaagtttcttgagggggggaaatgcaagtagaaatgaaatacatgatgaaaactaagtgaaaggccaacttttggatgatccattagacacggaattagcttgagaaataggcacaaacggaggacaatgattcaggacttaatgcagtctggtaaaaatttactctctataactcagtaacctccaaattggatttagaaatactagaacttctatttatcatgtaattgctttttactttctatttttgtgtcttatgattacacaatatgtggttatagtagtccaagtatgttatttataaacacatggggtatgcatgatcaaaagtttactaacagggtgtacaatcagaaaagggagtctacagcccttactttgcttaactaagaaagggtgtatttccatgaactagcctgcaggcaccactacgctaataagcagcagggttaaaggaaagggcctagtct

SEQ ID NO: 410318 - DNA, 194 bp, Homo Sapiens
catcctgtgtgctctctccggatggctgtcacgtacttgcgtctgagaacagtgtatggacctgcatgagcactaatcagtcttcctagcagacttgctctttctctggtcgtatgccgccagatcctctgagaagagagtgggcctttcccctcaatgggcaaagaaccagcttccattttaaaagctctcag

SEQ ID NO: 410319 - DNA, 194 bp, Homo Sapiens
gcaaattctcattttgagatttccatctagatattctaccatatcaatggttgtcatagtagcagtctcaattgagaatcgtgattatatactttatcaaataactacttgatgaaagctcaattattctaatgtagttcagccagaattctgagccatcatcttgcctggttaaggaaataattaagcaacct

SEQ ID NO: 410320 - DNA, 304 bp, Homo Sapiens
ttagagatggggaattagctttatcaagcctttgggtaaaatgtaaaaactgagctgatttgtctttggcatctcagtaacaaaaatatagatctgattttaacatttacagcactgcctgtgtgctgactgcctataggtgtgcaaagatgaaagttattctttagaataatattaaagaaaggtttattaaatggcacagtacttctgaagacatagaaacatataaatgatgcaatataggttgctaagcctttttcctcccatttaaaattatcagaacaattttaaatggatttaagcc

SEQ ID NO: 410321 - DNA, 591 bp, Homo Sapiens
gcaaggttccttagagcaggaaggccaggagacattcagtgccttctctgcaccttgtgatgaataggatctacttatgacagactaactctgtcctcaacctcaaccaggcagcggctcctagcctggttaactttcaaatgtgctagtgagggacaaaggcacaaaaccaaatggaaagtattgcacacattcagtgagagaggtggatgcagtcagccaattaggggagacgtggaacagatgactcctgacacggctggagaaggcggggagttttctaatacatattggattccgttttcaccaaaggtcagctttaatcaagttcccaatgtaaatattaccaatataaaccaagtaatggaggttaaacgactgctctcgaggtcagcgactcttggtcaagctggaacatttcacatgaaatggaccagttggaatttacctggagggcctcagtgcctggccatgaaactcgagcccgccctgactctcttagctgttggatggagtgcagaccgatgcagagcatggcagggtagctctgctttccagctccatggctgaaaaccagatgcattgggccct

SEQ ID NO: 410322 - DNA, 525 bp, Homo Sapiens
taaattagctgacagggtggatgtttaactaatttttaagagcaaatttttaaaatcctgacattatattcaagcatagattatcactaataaccattactaataaagccgtaattgtctactgcccagctataggttctaaaggaattgtcacttttagtcattcaatcttataactcagatacttacttaaattagagcagcttgcttcactcatcttagccaaaactgatagggtttactgtatattatttaaaaattgctagtatcatcagttctcacttgcctttaatttggccattaatgttactatcaacaaatctctctaatctcatctacattaatctgttttggctactgcagttcctcgctgcagcactttcgtggagatgtgaaaagcagcaaccttaagaaatgtttgcactgctaattacaaaaaatagccagactctttccctgagacaggaacacctaatagtttctgtgtagtatctggcattcttgatcaggaaagataatgcagta

SEQ ID NO: 410323 - DNA, 151 bp, Homo Sapiens
ttcttatgtaatcctgagagtgatggaggagttgctggaggactgagtgatctggttcacttcctgtgtttggaaaaaatgatttgaggtctagcatccagaaaagtttggaactaaatgaaggagaacctacgtttccagggagctaaag

SEQ ID NO: 410324 - DNA, 369 bp, Homo Sapiens
catcatcatcatcatcatgctaatgcgactcactatagggccattaattaccagaatatgtcatgcacaaagtgtagtgtttctattaatggaaaaacaaattcaggcttctaagttttagtccaacctggactcctaattgcatgctgcttttacttgtaccctttttcattatactaatacaatataaaagttcctaataatgatgatctccatggtaccagttggggaataccaatataggggttagatgatgatgtagcccagtgaggaaatatatgagactggcaatcaaggggaacattaagatggagagagaaagaagaccttgatagatagactgcacttggtgacaaccctgcattagcc

SEQ ID NO: 410325 - DNA, 267 bp, Homo Sapiens
gcattgaaatgtttttctttttcagatagtctggggctatttacttattttaagtaagccaagtctaccatttgaaaaatggtgctttatttccatatctgaagcctgaagttattttttagtttgttttcatctaaaagtggaaagatttttgcttctgcgttattaagagcctctttgtttggaggagatggttatctccttcactcattaacctttgagtgcttgttatctacaaagatgaataaaatctttcatttattattt

SEQ ID NO: 410326 - DNA, 438 bp, Homo Sapiens
tggttgtaaggatgaaaaatgataatgtattcaaagtggaatacattaggactgtgcctaacatagtccactttgaatacattaaaggactgtgcctagatccatcataatataaatacacgtgggctgtttgctattacaaagctcaagtactttaaatggtaggagtgatggtctaccagacagatttgtatgttaaactgacagattataaaaagcacgctggcgcattaggaaagctaatgtaaagtcatgagcccaaaaagttattacagcacttcagtaacccttgacaaaaacaggttattacagttcaatgaagttatgaatgtcataatcaacttgcatcatctgaggaagttccaaatcgttgtacttggattatgaagccaggaaatgtgtaaattaattttttaaagatttctatctgaaatcagt

SEQ ID NO: 410327 - DNA, 626 bp, Homo Sapiens
cttagctgttacctttattcacataatgcagtaaaacttcatgaactagtataaagggacttattttgaatatccccattttttaaaaatgtgcatactagtgttgccttccacctagatttcaaaaagactgtatgaaagacactgtcaggaagaatatatacttaaaatgactattttttatcataatcataattttattaaaatctgcattgaaaaacatgttatttcttatcacaatgccactatcaattcacacatgctgttctgtaacttcttcatatgtcatagataaaatatttcaaatacggtaataaagattgagaaaccttttaacattctgaaatgcttataatgaaagaaactctaggctcctcaaactccagaaatcatcatctccattttctgaatcttcacagcaaacagtaggtacttaatacttaaacactagaactcgtatagctaccaacattaatgtcttcatctagcttataaaaattgcattctcttattatccctaaattgaccatgctatattatacatttatttgtacaaacataaaaagatgtgtgcatttaagggctagagacagatatgattactcaatacaaattactgaacacta

SEQ ID NO: 410328 - DNA, 195 bp, Homo Sapiens
tagttgtgaaaatcatgtcacattatgtgtaagagttctgtaaactactctatgcaaatgttaagttactttaggacagacaagaaataagcatttggtatgacggatctccctcaacaaaaactttcattcagtcctgttgccaattcctactgacaagctaaacaagcatgatctacctagatctacaggttt

SEQ ID NO: 410329 - DNA, 292 bp, Homo Sapiens
tctcatgcttgactagagcttattgtcacagaaacattacagaacattgttttctctgctttcacccgatgcggctgctgcccggccattgcagccacggtaggcgatgctgccacattacattttggcctgtttacggagtcggaatgggcacttgcaactgctcattacagtgatgcatccgtcctcaccatgaagccttgtgtttctcagcagagcatgaccacgtctcccagggaatatggccctttcctcctttgttctagactggcctgaagttgaacttggaccc

SEQ ID NO: 410330 - DNA, 364 bp, Homo Sapiens
tctcaataatcttgacactaaagcgggtagatcttacacacatggcatgatgagcatacgactggaataggttatgtccacataagacgggttcagggcagtccaaagacctctgtgcaccatgatctcacaaggatgacatgtaaatgcttctggagacacggacaagccatttcaacatttatcattaatacacagtgactctgtgacaaaacctgccatctcatatagatgcacagggacttttaactcaccctagatatactttaagttgttttaaaaataaatagttttgcaaaaaaataggtcaaatgtcttgcattaatttcataacaagcttacaactctgcactagttcttaatc

SEQ ID NO: 410331 - DNA, 323 bp, Homo Sapiens
  misc_feature (193)..(206): n is a, c, g, or t
gcctaccaaaaggactcaagagtccaccctactagccaaagagaccatctgagcattaaggataatgcagcaatgaaaacatcagatgtgtttaaatccatgtgttcacgatgatggacgacaagcagcaacagagactctccctggtcatctctggaggaccccagggaactgacctatgaaaattataccnnnnnnnnnnnnnntccaacgctgatcctctctgtcctccatgatctgtgacccagaatgtgctttggctcccttggttggagaagccagggtttggtccttatttgggactcaattcaagcaaactgttt

SEQ ID NO: 410332 - DNA, 437 bp, Homo Sapiens
cgggaggacgtatagggagtggtattagcggccggccctatagtgaggcgtatgagcggccgcctttatagtgagcagcattagcggcagtaccaatagagcgctgtattagcgtaaggctgtagagagcgccgtgatttgctgaagcagaagtctgcagggatctatcgggctggctgaagcagatgtggaagagatctaaacagagggcatgactatagcttgacgaagtcctgtgtaaaaagacctcagaaaaaatctcagtcatcctctaacaatgagtaaactattctcaaagcagaactcaaattagcaattatgtgctactttattatgtcactggctcagaaattaactcagaaaacaaatccccaaaattggtttcaaatgctgccaggcaagcaacacaatctgctcacttcaccatattttttgag

SEQ ID NO: 410333 - DNA, 190 bp, Homo Sapiens
tttttgaaaatggtgtactaagagaaatgcagcaagcctagaatgaaggagatatacagcaagcctaggacgaagcctaggatgcaggaaaaataaatgaaatgaagaatgactgtcagactgctgagattctacagggaggaagtaggctcattagactaggaagctataaatatgtgctaatcttcag

SEQ ID NO: 410334 - DNA, 211 bp, Homo Sapiens
gcggccgctgctgccatggactatcaggaggagacttaccggttctggagttctcgactgatgcatgaggttgggtgttgtcaaatggcaaagatgttttgagccaataaatttgcttgatacataaaccagtccgcctagtcaccccatacgattctgatcggctacaccctgggcggcgtgctgcgtgggttgctggaaaataacaact

SEQ ID NO: 410335 - DNA, 107 bp, Homo Sapiens
catcatcatcatcatgctaatactactcactataggggccacacaggatcatgactcctaaacggaaaacctcctaaaaagaaaacctcatcacaatttgcatccct

SEQ ID NO: 410336 - DNA, 364 bp, Homo Sapiens
tgagatagccataggggctttgaaaacctcagctatctcctgggaatctggaaggccatactcatgcccagggtcatgctcaggaaagacactgagaaggccctaagctctcacctctaattgctctatgcgagcaggacctaaaggttaaggcacagttgttaactgcctggctgagtgttgaagatattctcctgaacacttctatacacacacagagtcccttggcaaagactgggaaacttactgattccaggtatttgaggaaatctcagtccagtcattagctgaccactaagctaaatgagcagagacttcagaagccacacacaacaaagaattcaaacttaaaagaattaactct

SEQ ID NO: 410337 - DNA, 537 bp, Homo Sapiens
  misc_feature (373)..(373): n is a, c, g, or t
ccctagtgtctgaaaaaatgcacagacgacaatcaaacctttcatttcaaggccagtttcccaccataccccttcctgttccaatcaggtttgcgcaacatttcccctattctgcatttcatgaatcaattgcaaaatctgccaacctctgccagttcctcttgtactcagctgagaggttccccttccttccctgggtagcacaaggctgctctggtttttaactggcgtaacgtggaaatgcactgtaggaactcactaactctttcacagccagatgtaagtgagagtctgggcggcaaccccacctactaggaaactggtccaccaagctcaggataaagcagatttgtggaatttagctttgactccnaatcccgtgtcagttactgtcacggggaaggaaaaaggaagagtgaaaaggtctacaaagtaaccaattcagttacttagcaactggacaaaacttgcctcactacagagggtaaggaggcacctcacacccattcaaagagtaacagtctacaatttacatgc

SEQ ID NO: 410338 - DNA, 308 bp, Homo Sapiens
gaatgaaggctttctagggctcttcagcttttagataatttctagatggtacacctctgcagatacttgagtttgtcttctctttgttctgtttgtcatgtgccattcctctgtctattccatgtcttgatagtttgtggcctgggattcagatgtctcttagcatcactgaacactgagcaagtttctggttgttcctgcttgaacgattttcaaaaggagagtagggtgggaacagcttaattctttcaacttaaaacctgtccagatgacttgactactacaatttcataactaaattgacatta

SEQ ID NO: 410339 - DNA, 310 bp, Homo Sapiens
tctatcgggggaatgtcctgaaatgctacttctacatatttacatacagtatgttttgttgtttaggtgagatactaaaaaattcagaagtcagatttttacagggttttgtgcctctttaatttcagtttaagaaaggaggactaaattcagagactgtcagagttcatcctctcttctatttgatctgcacatacatcataatgccacatacatataaatatggcatacagtctacccaggggttctgcaactggggtccagactcccaaagggctggtggataaaaattttgggaatcccttttagg

SEQ ID NO: 410340 - DNA, 511 bp, Homo Sapiens
  misc_feature (331)..(377): n is a, c, g, or t
gtatgttcatggattcatctattataatagttctggatgttattgaagctatttgatgaattatttattaaatattcagttatgaactgttaatacctttgggactttaaaaaaaagttatggaggactactctagaaccttaatttgtaaagcctttgttagttaatttacatagagaatatagactatggtattcaaaattaacacccctaaattttttgtaagccaagatattcttctagatagtaaataatatcttgatttttgttatcccatttaaactgtagagaaattctggggaaagcgtctaaaaatagctctgtctctacnnnnnnnnnnnnnnnnnnnnnnnnnnnnnnnnnnnnnnnnnnnnnnnggccacaagtcttggtcagatcaagaactttttagtttagttgtctctatgcattcataatgaaacatgtataatagtaactgatttaattcaaatgttatcttaataatttttctagtagattttaggagaag

SEQ ID NO: 410341 - DNA, 481 bp, Homo Sapiens
  misc_feature (85)..(415): n is a, c, g, or t
tacttcgaaaaaagcctgaaagtttcatatttgatggaaactgtaaactcacaaatcaaagcagcacaatgaacctaaggcagannnnnnnnnnnnnnnnnnnnnnnnnnnnnnnnnnnnnnnnnnnnnnnnnnnnnnnnnnnnnnnnnnnnnnnnnnnnnnnnnnnnnnnnnnnnnnnnnnnnnnnnnnnnnnnnnnnnnnnnnnnnnnnnnnnnnnnnnnnnnnnnnnnnnnnnnnnnnnnnnnnnnnnnnnnnnnnnnnnnnnnnnnnnnnnnnnnnnnnnnnnnnnnnnnnnnnnnnnnnnnnnnnnnnnnnnnnnnnnnnnnnnnnnnnnnnnnnnnnnnnnnnnnnnnnnnnnnnnnnnnnnnnnnnnnnnnnnnnnnnnnnnnnnnnnnnnnnnnnnnnnnnnnnnnngtagaataaacacaaagaaatcaataccaagacatatcacaattgattcactgaaaaataatgatg

SEQ ID NO: 410342 - DNA, 522 bp, Homo Sapiens
catcatcatcatcatcatgctaatacgactcctataggggggatgggcctgcacaggtaacccaccaggctgcggtggggagaagcaggccctacacgaggtagtggaactgtggctgcttgctcttctgatgggctctgctgcttgccggggaaaatgtagctctgaaaagagcccttggttggtgttagagtattacagctctgctttgctccctctctgctcctcatctcgtcaattgccatccactgactgctgtcctgtcttcctgccctcccatcgatgattgccttcctgccaactgctgtccagatgattactttcctgctgaccatcactctgtggattgccagcaggcagatctctgactgctgcctggccagtccttgactactgccctgctgactgtcactggccgactgccaccttacagactgtggctcccagatctccgactgccatatctcatgaagccatcttctttcttcaccctgcattgggtaccaagctgatgcagggcag

SEQ ID NO: 410343 - DNA, 414 bp, Homo Sapiens
taatctaaaaaagaaaatgaataaacatacatcccgatctaaattctgaataaattaaatctgaatctgcttctcaatgaaactaggaaaaaaagcaaaggtgttaaccatcatgtgtataccatatagaacagaagcatctttcacttatgctctggaaaaaagacttttaaaagctttgaaaaaagaccagtaagaaataccagtgtgcctaggtcaaaagccattaaattacgccattttagcacaagtgcggcattgtagctcatcactgttccgtactagaggcagagcctgacaaatgatttgctaccgtcttaagaatgctaatctttgactttggtgtccttccattcagtttagtcagtaaaggaaaacttctaaacgctccagatactaaactttcattagctt

SEQ ID NO: 410344 - DNA, 533 bp, Homo Sapiens
  misc_feature (190)..(218): n is a, c, g, or t
  misc_feature (231)..(414): n is a, c, g, or t
ggtcttaaataattgtacaaaagacagatgagcaacaatatcattgtagcagtgttctgaataacaaaaactggaaataaagtgctcatcaattaatatcaaataaattacaacatttccatactttggaatataatgcaagtataaataaacgttaacaaattttaatttgttcaccaattaactctgnnnnnnnnnnnnnnnnnnnnnnnnnnnnngacacagaatctnnnnnnnnnnnnnnnnnnnnnnnnnnnnnnnnnnnnnnnnnnnnnnnnnnnnnnnnnnnnnnnnnnnnnnnnnnnnnnnnnnnnnnnnnnnnnnnnnnnnnnnnnnnnnnnnnnnnnnnnnnnnnnnnnnnnnnnnnnnnnnnnnnnnnnnnnnnnnnnnnnnnnnnnnnnnnnnnnnnnnnnntgttcaccaattaatgcctgatcccttgatatgcaatgcactgttcaaggaactgagaatctatgtaacaaatggaagaatcttcaactgcgaacatgcttacttctgaataaaggaag

SEQ ID NO: 410345 - DNA, 170 bp, Homo Sapiens
ccttcccccctccctatccccaagtaaccactgattggctttatgtcactacacattagtttacattttctagtagttacataagcgaaatcatacagtacgcatgcagtcttttctgtgtggactcttatttattatgattattttgagatttatgtatgttcagtgtg

SEQ ID NO: 410346 - DNA, 261 bp, Homo Sapiens
  misc_feature (51)..(51): n is a, c, g, or t
  misc_feature (93)..(93): n is a, c, g, or t
  misc_feature (118)..(118): n is a, c, g, or t
  misc_feature (122)..(122): n is a, c, g, or t
  misc_feature (150)..(150): n is a, c, g, or t
  misc_feature (167)..(167): n is a, c, g, or t
catcagcggggcgggggtgcccacgacccccgaagccccagaggaactgtnacagtactcttttagctctgccctctgtggatggcttaagtnttaacagctcagtggaccctatgtntttnagcataaggcggctaccttctgccagcnagggcaaagggtcagtntggcagccttttgcctccacactcactgcacctgagctgttgtcaagcatccaggagaaatgaagtagcacaaacgaattggaggatggtaaat

SEQ ID NO: 410347 - DNA, 294 bp, Homo Sapiens
  misc_feature (192)..(192): n is a, c, g, or t
ttccgggagccgtctggtagcagggagtaccgtgggtggcaaggccgtgctgctcaggtgaggggacatggtgtcattctgggaacagatgagccagtaaaaccctgacaggattcaatctggaggaaaaaaatcccagctgataggaactgctgagcgcttgcagcttttaaagcccctctagcaaaaggntctgcaaaagttttgcaaactctgaccacgcagccagtcagccacttcccagcccacagcaacgagagagtttttgctacatcagaacaaacccactcacaa

SEQ ID NO: 410348 - DNA, 323 bp, Homo Sapiens
  misc_feature (246)..(246): n is a, c, g, or t
aacagattcctaaaggatgaagatgcatgaataaaaaaggaagtagaaattactgaaaaaagtactgtgggtatagaaagtaggatgtacaaatacaagacaactgaagcagatgtcttgaagaaagccagagtcttaggagattgggattaatagagataatggaatatgataggctggtaagaaagtccctgctatgctgtgttttctattaatatgctaagatcacggtctttatcttaagancaatgggaggacattatagggttttaaacaaaggttgacatagccatttttcattttagcaagattgtctggaggca

SEQ ID NO: 410349 - DNA, 332 bp, Homo Sapiens
  misc_feature (313)..(313): n is a, c, g, or t
atgtccgtcttacacctgtaacttggtactaagcattctttatctctgagaaaagcagaaaaaagacagacatcagatctggaccataatttttgcaaatgagcgaatgaatatatacagaataatttcaagttttttaatgaaaataacgtgtgtttattatacaagagaaaagatatatggcttgactttgtttatggtacatttggttgttactggcatgatatttatggataaagtcaattattacattacagtagcctaattataacatagcatcattgcaataatagttccagaccttagcgtggancttagttaaatatatatgg

SEQ ID NO: 410350 - DNA, 147 bp, Homo Sapiens
  misc_feature (63)..(63): n is a, c, g, or t
ttttttttacgggagggagctaattgaaaacaaagatctagacttaaaatccaattagctccntcccgtaaaaaaatccctcccgtaaaaaaaggctatatcttaatttagagtaattgagaaatgatgcaggtcttaaagagtaca

SEQ ID NO: 410351 - DNA, 592 bp, Homo Sapiens
ggctgactccgccagccttcacgttgggcaggcccggggtggctcactgtgggagcccttgtgaaataccctggatggggtggggcaggggctgcttcctgcaacccaaagccacaggatggttactccatcagtggaggaggccgactgggaggtctagaggggcctcgggccaggctcctcccagctgatggcctgccacctggaaggtgggggaactccctggtcagtcctgccaacagaccagagctagatggacggcccacccccagcttttcaaagttaggaggctgggagactcggggttccctgtagcctcctctctggccaggtcccccgtggggcccctgtgcacccagggagcagggggctttgtccgaggccggctcaggggaggtggctgtagaaggtaggaccctggaagatgcacacacagggtcactggctggccctcacctgctattggccaggctgggggctgcggctctcgtggggcgctgttggctggcgggccatggagtgcgggcgcggcggggaggcagaggcaatgtgctgagtcagcgtgactcgccacgaacagcccgcgctctgg

SEQ ID NO: 410352 - DNA, 689 bp, Homo Sapiens
  misc_feature (404)..(404): n is a, c, g, or t
ggacttcaatcttttgaatacatctaccctaacattttcatctctgtacctgcaatatccttgtaggctgcctttcaaggaagtgtatgaagagaaagagaaggcgtgggggagaaaggcagcatgggtgaataaagatgcattctttccagatgctcagttgcactgcctctctttgtgcagtgttcactgaaggatttaaggatgaagcataggaatctgctgtgtgaactaattccctggcttttcctaatggtgtgtaaatttctcattccctaaggcacagtattatttccagagttttctttggttttcataactagtttttctgagttctgtcctcagaatatagtaaatggaagaaatgagatgaatctacaaaaatgctttttaaaacctcctcnaaaaattatttacacataaaataattaaatattttggctcttctgcaacctattggttaaagtacatctttaatgtacaactataactaagttataactaattgtgtccttatatttcaaagacaggtacttgtctgtcttctctcaccccaaagggaatgactacaaagtaaaggaaattggtttaaaacaaaaagcttgagatttcagagaaaggaacatttacataatagcatatctcagcctatttcttgaaatgcattgtttctctgtagctctctttcc

SEQ ID NO: 410353 - DNA, 418 bp, Homo Sapiens
  misc_feature (247)..(247): n is a, c, g, or t
gaaatcctcatttctgttgaactaagtaaacatagagttctttaagggaattatttcacgtatgggttaaatagcttagcaggaggagtcaactgggctgttatctccaagaagcctgcacaaacaggttaatttttaaagtctgtgtaatagtttttagctggattttaataaagtccaaagttcaaagtcacattactactagaatattcagtctagtagaaggaatttctgatacacacacacnaactttgtcctatctcaaaagtctgacaacccaccaagaatcaaaactggtgcctcataaaataacgggggtgatttttagccttggagcaaaagcaggaggctgggtccaggctggttctcccagtaaggaggctagaactcgtgcaaatacaccacttagcctcactgg

SEQ ID NO: 410354 - DNA, 411 bp, Homo Sapiens
  misc_feature (256)..(271): n is a, c, g, or t
  misc_feature (396)..(396): n is a, c, g, or t
agaggaaaagactccctcccccgaccaagagacaaaattccaaaacattcttttatttccagctattctctacctaaatgagttaccgggttaaatgccttgttctcagtgtatatatcaacacctgaccaaagggggcgccattgttgagacagggccatgaactcttctcatggcaaacattcaataaagcatcattttcaacatgactgagtctacaacatacacggcataaactggtctcttagtgtgaacnnnnnnnnnnnnnnnnaacttgtaccttcaagatttgagaaataaaggcagtggcactgctctttccactgtcatcgtggagggaaaggagaccaccaccactcacaggagcccagttcttccttccctattggtatgatnaggagaggcctttgt

SEQ ID NO: 410355 - DNA, 355 bp, Homo Sapiens
  misc_feature (168)..(168): n is a, c, g, or t
  misc_feature (244)..(244): n is a, c, g, or t
  misc_feature (300)..(300): n is a, c, g, or t
  misc_feature (304)..(304): n is a, c, g, or t
  misc_feature (339)..(339): n is a, c, g, or t
ggtggactgtgctgttgaactgagctgaactgggatcaggagaaggagaagtggggattgagcccctcacctccacacactcctctctgtgcctgaaattcctccattaagcagcatcgctgtcccctgtaaacacccacattaagccattattcatcttatggcttnagtaggcgttagtccctcagatcctttcctgctgaaagcggatcctgatagagagaagggaagagagatggatggntctggggacggcaggctggtccaagagtggggaggaaagatgtctctcggactctngggnaagaaatattttctgggggaatatggaggcaccanaggcaagctcaagagg

SEQ ID NO: 410356 - DNA, 322 bp, Homo Sapiens
cccaacgttgccccgcctttgtctccagcggactggaaagaacccaccattgtgaagcacagaaaattgcccgcactcttattggctaggttccccgacttccgctctcggttggtggttggctttgcctgttacctgtgttgcccactaccactcgctccgccgagccccaaggatggatcgctatcccgtagccgggtgttccggagcgctgcgggcaaagcagaccgccttgcgcctattatgggttgagtggctctgtactctagatcggctctgtcacttactaatgggccgtgttgccttcgcgactgcaggtttt

SEQ ID NO: 410357 - DNA, 245 bp, Homo Sapiens
cgtggagggaggcaaaggggcagcaagagagagggaggaagccccactcttttaaaacaaccagatctcttgtraactgagaactcccttatcaccaaggggacggtgctagaccattcatgagggwtccgcctccatgggccaatcccctcccaccaggcccacctccaacactggaaataacctcccagcaggcccgcctccagcactggaaataatgcttcagcgtgagactggaaggggac

SEQ ID NO: 410358 - DNA, 192 bp, Homo Sapiens
  misc_feature (110)..(110): n is a, c, g, or t
  misc_feature (138)..(138): n is a, c, g, or t
  misc_feature (158)..(158): n is a, c, g, or t
ttcaaaccctggcggcacggcttgtccctcgaggcccggccccttccccttccggagagcccaccgctgggtcctaaagcccaccgctgggtcctaaagcccgccgggtntttacccaggacggggctggggaaaccnggtctttcctagctcttggnttacttcctggagacttcttaaaacgagaggaga

SEQ ID NO: 410359 - DNA, 249 bp, Homo Sapiens
  misc_feature (123)..(123): n is a, c, g, or t
  misc_feature (211)..(211): n is a, c, g, or t
gggcaatgttgtcacagatgtgtgcagattttscagaggacataagttggctgtgaggwagaacacagaggttscctattttttaggcaggaaagaaagcctgcacttttctgtgtgtgtgtntcaataaatctgaataacaccttgaaagggttaaaaagctgagcaccaggtgttttctttccactttccagagtaatttaagcacacnscaaagttatctcccttccttccccacgagccagctta

SEQ ID NO: 410360 - DNA, 155 bp, Homo Sapiens
gccgcggtgcgtcggatgcccagctcgcgtccagacccgcgggatgcagacccggttcagtcaggcttgagggctgctccgcatagaccaacgtccggggaaggcacacagtggccgagggcccgcgcgcttkggctacggctgtratggtatct

SEQ ID NO: 410361 - DNA, 370 bp, Homo Sapiens
  misc_feature (346)..(346): n is a, c, g, or t
cttagactttaaattcctatgctcattccacattgtcagtagtgactgacatttgcattcagaagtctttctctcacaccttatctcatttgcacccctctgtggccctgttaattttcctcctaaattctctttcacaagtccaatcatcgacatttcttctgctgaagtaatgactgctgtagttctgctgaagtgagtgactcttgccggccagggattgatgccctccctccaggcatgggcagcatggaagagtttctcagggtttctacaaggcacagagatcagggctgggatgtctagggtggtggcacagatactggagccagattgcccactctantacttagtatcttgagccagttta

SEQ ID NO: 410362 - DNA, 396 bp, Homo Sapiens
  misc_feature (383)..(383): n is a, c, g, or t
ttcacctcatgcgtcaacatcttcaattttaacaagagctgtgtgtttcctttggttctggagaccctgcttttagccagcagaaaaggccttgggccacagccttccagacatacttccttttagaagtcctattcccagcaggctgcagttatttgcccccaaatttcagcagcagctgcttcactccagagattttattaatgaaaacctaggctataacataaacctatgctataacaaacctatgctaatgaaaacctaggctataacattagagatgatgttaaaaatatggaattataactaggtactcttaactctattactgcactaatataatccaaatattcgtaaaccagcagggaattaaaggttagcancaccctttttgtg

SEQ ID NO: 410363 - DNA, 200 bp, Homo Sapiens
  misc_feature (21)..(21): n is a, c, g, or t
  misc_feature (96)..(96): n is a, c, g, or t
  misc_feature (135)..(135): n is a, c, g, or t
  misc_feature (154)..(154): n is a, c, g, or t
  misc_feature (160)..(160): n is a, c, g, or t
agagctggaggcagccctggntcttctccatgggcaccaggcccagtgcccctgcagctcctccctgggccccacctgaccccgaagctgagtctntggcaaagggacatgaattggtgtaaaccgtcgtaattnttccctggggctgggaatnattttnaccctgaaggacatccaggttccactggcagcggtggagt

SEQ ID NO: 410364 - DNA, 399 bp, Homo Sapiens
  misc_feature (210)..(210): n is a, c, g, or t
  misc_feature (253)..(253): n is a, c, g, or t
  misc_feature (279)..(279): n is a, c, g, or t
  misc_feature (290)..(290): n is a, c, g, or t
  misc_feature (303)..(303): n is a, c, g, or t
  misc_feature (325)..(325): n is a, c, g, or t
  misc_feature (344)..(344): n is a, c, g, or t
aagcagtgagaccagcattaatccaagacagggtgatgctggcttgagccaaaggtataacagtggaaatgatgggaagtggcccgctatatttcgtttgccctcctctgctccacttaccattgactgatgtcattgtctttgtctgtgtggtacctagttaagaggggctgagtgcgggcaggttaaagaagagaggcctgggtcccnttgtgaaggcgcccggggcttttcagatggagttctgttaagngtttcttggaacgatttgattctgtngaggggcctgnggtcaaggtcttngcaaaatgccaaacttctgttnggtagagggcaaattgggncccagccattttttacaagtaggaggtacatgtttcttcccccagagaaggtgtt

SEQ ID NO: 410365 - DNA, 155 bp, Homo Sapiens
  misc_feature (40)..(40): n is a, c, g, or t
  misc_feature (66)..(66): n is a, c, g, or t
  misc_feature (119)..(119): n is a, c, g, or t
acctctcttcctttcctggctactggtcctatgattgttncaattgactccttagttctgtttctnacaaccagtttctacaacagtgtttcagggatctgcattcacagagataaggngataagacagattagtcagcaagccagtgtgcaact

SEQ ID NO: 410366 - DNA, 299 bp, Homo Sapiens
gcaatagggtttggcttagaagtagcatagcatcttttaagttagattaaacacttggattaaattttggaaagcctctatatatttattagggttattagagaacctgcccaggtccccctttatttgtttaaggtcctgcaatgagcaggaaacttgagccctagtagcaccattgggcatttcctgcaggggcaacagtgaagttgggaatttcttgaggggcactaccagaggagctaatgatctggctattgtggggcaggtaggacacccggaagtttttttcgaggggttcc

SEQ ID NO: 410367 - DNA, 475 bp, Homo Sapiens
  misc_feature (109)..(109): n is a, c, g, or t
  misc_feature (195)..(195): n is a, c, g, or t
  misc_feature (388)..(388): n is a, c, g, or t
  misc_feature (397)..(397): n is a, c, g, or t
atagaactcttctatacagactactgagtcataagaaaacaaatctggcacctgaacctgttcaggccacagggagagattaatatttacaaagccccagtaacagccnttgctgataaaaccactgttatatcatctcttaatctttctgtgacatgtgaacaaagactaagatggaaattcacagagaagtcnttggttgatctctttaagccaaccaccattaggatgttcctgaccatcattctccttttcctcactgccctcttttagcctggggtcttgctctgtctgatccagataaaatatttttgagaaaaaactacccataatttgatattcagacatttttgttaatgggaggcctatttcttgtgccagatgcagntttcctggnatggacccatagggattactgctcaggggttaggtagtttctgcttctaggtttaactacttctcaatgaaagtcaag

SEQ ID NO: 410368 - DNA, 436 bp, Homo Sapiens
  misc_feature (143)..(143): n is a, c, g, or t
  misc_feature (231)..(231): n is a, c, g, or t
gaggctagcaagacagatgcctttggtgagaagtcagcttatcatagtctgaggtagatggtaagagggagacagacttgcctagaatagcacaaggtgcagatgaggagagcccttgccagctaagttttcaaagggacccntgcccctagtggagacttcgccccttgagtgcacagctcctgatcctttcctctcagtgcacactagggctcagtgcatgagcaatgntatctcctcgtgatacttcagagctcagacctttatgctctgcgaagtgtgcaggatgtctctggttgtggcttgcatgccaattgtgctgcctgggttagtgggtactttgcctacaagctaatacaagtattttgaaaatattgatgaatgctgatggttggcatcattgttaaacggctgtgatgccaggactaatataggg

SEQ ID NO: 410369 - DNA, 187 bp, Homo Sapiens
  misc_feature (98)..(98): n is a, c, g, or t
  misc_feature (127)..(127): n is a, c, g, or t
  misc_feature (135)..(135): n is a, c, g, or t
  misc_feature (141)..(141): n is a, c, g, or t
tgagcaccatacccggtcgacagtgtactttttaactgtcacctttcattctttaaagtacactggtctggatcataaaccaggtggccgacatactnctagcctactgaaaggtctgctgtcaggncctagggncttagntactggtgacatttactctgtgcctggggcaggcccaaaaatcaac

SEQ ID NO: 410370 - DNA, 234 bp, Homo Sapiens
  misc_feature (73)..(73): n is a, c, g, or t
  misc_feature (78)..(78): n is a, c, g, or t
  misc_feature (151)..(151): n is a, c, g, or t
atcaaacgacttacatcataaattatcaagataactgatactatctatattgtacaatgacagaacatatgcnttttnactttatactcctaaattattgaatattagcaaagaaaggagggtcaacagtcatctaaatatataacttttnattttacagagaattacccaaataggtgaaatggcttagataaattcacattgttttaggtatagagccaggacctcagtttt

SEQ ID NO: 410371 - DNA, 408 bp, Homo Sapiens
  misc_feature (269)..(269): n is a, c, g, or t
  misc_feature (275)..(275): n is a, c, g, or t
  misc_feature (292)..(292): n is a, c, g, or t
  misc_feature (299)..(299): n is a, c, g, or t
  misc_feature (319)..(319): n is a, c, g, or t
  misc_feature (326)..(326): n is a, c, g, or t
  misc_feature (353)..(353): n is a, c, g, or t
  misc_feature (362)..(362): n is a, c, g, or t
  misc_feature (388)..(388): n is a, c, g, or t
aagctgcagggccaggaatttgccttgggagacccccactgaggaatatttccgaagcagaaccccttcctattcagagccagagtcttaacactggacaaccacagggtgttgctgcaaactccagagccaggtgccttccctctgacatttgggacatagcttccatggccacacagccttcgcccccttccaagaccccccttgacctttctaatcttagtcactgccttccagagctgggaggccacacggcagaggtgcctgtnaatcantccgtcatcagcctggncgctttnccctctgtggagagggactntgatggngcaaggggcaccaagtttgagcctttnagggttggnccagcataggccagggaagggacatnaattacaaccagcttttttg

SEQ ID NO: 410372 - DNA, 223 bp, Homo Sapiens
  misc_feature (108)..(108): n is a, c, g, or t
  misc_feature (158)..(159): n is a, c, g, or t
  misc_feature (167)..(167): n is a, c, g, or t
cactctagagtttataatagattaagagaaagctataaatcataaaccctaagatttatcacatctagttcgatgccttacatagttttaattcaataaatatttgtnctaatttgtttgtgctacatgattgctatgttaacttcacttcaaatttnnttattccngaaaacaataaacagttctaacacctgtataactctttatagttttaatccattcc

SEQ ID NO: 410373 - DNA, 272 bp, Homo Sapiens
  misc_feature (21)..(21): n is a, c, g, or t
  misc_feature (92)..(92): n is a, c, g, or t
  misc_feature (160)..(160): n is a, c, g, or t
  misc_feature (205)..(205): n is a, c, g, or t
  misc_feature (235)..(235): n is a, c, g, or t
tgttggcattgctgtttcctnccggaggctctaggtgagaatcccttttcttgcctttctcagcttctaacgctgcattcttggatcacggncccgttctccatctccaaagccagcagtgtagcatcttctctcctctttgccttctgtcttgctcttntaaagaccccagtgattacatagagcctgtttggataatccaggntaacctcctcatctcaaaatttttaaactntcacatctacagagtttccttttgccaaattaggtag

SEQ ID NO: 410374 - DNA, 254 bp, Homo Sapiens
aggaatgtagcagggcataggcacatatgtacagagtgacattagtgttggggggcaggaaatatgaagagatgtcaagtagaaagaagataatgccattcaagagttgtcaagggccaggatatttaagtagaaagcagctgagtacattacatcagatgtggccaagacaaccagggacagagagagcaatggccaggagacaaccttggcaggcctgtttcctggcacagtgggtatggactccacatttt

SEQ ID NO: 410375 - DNA, 382 bp, Homo Sapiens
  misc_feature (331)..(331): n is a, c, g, or t
  misc_feature (344)..(344): n is a, c, g, or t
ccggagtctgttttgagtaagaaaagtgggatctggccaagctctgcctagcccttgtcaaagatatctcattcaccttcctctggccgcaagccaaattgtctgggcccactctgggctcatatttctgtaataacaaaaactgtcttttatcatggaagcaataactgaggggtgtgtgaggtttaagtagtttgacaccaaggtcaaatgttgtgtctgtttcttattttacacacatggatttaacaaataggtacagctgccccttccacaacgccccaggatctgttctcagtgggaggacagcgcgaggccttctgcgcaaatnccgtcctcagcanctgaggctgtgaatctcagaccatttgccgaaacaaaa

SEQ ID NO: 410376 - DNA, 285 bp, Homo Sapiens
ttttaatagtaaaatattataataccgttacatttaactcataagattagttagataaattgaggtatgttttccatgaaactcaatatgtagtaatattaggattatagttttaacaattactggcatatcaccaggaacttttaagtgcagagaaagctaaaaatcacacagccagtggccaagtggcttacagtttacagcctagcatgtaagccgttatatcacggagtaataagagcagcgattcagttaagcttgtgatactatgacattttgattaaa

SEQ ID NO: 410377 - DNA, 367 bp, Homo Sapiens
  misc_feature (336)..(336): n is a, c, g, or t
  misc_feature (357)..(357): n is a, c, g, or t
aggaagcaaagcctaaggaaagcaagtcactcgaggcctggactcaaatgctgacactgcgtctgttcttcctctttctcattttctctctagtctctaaaaatcttaagtcctagtccctgaagttgatcacaggtgttggaattatgaaaacaaccttcaaagaacattatgtgtgattagcttgatgctctgagaggtgttggcctccacaaagacaactctgaaaatccaaataaatctctgactgggagactgaactgtggaaaggagtctcaccacaactgggagcctgctggttttccttgttcaattcaaattgctaccccacttcanctcgacctgcttataccacanatggccaccc

SEQ ID NO: 410378 - DNA, 272 bp, Homo Sapiens
cggggaatgtttcaaaggtgcttgataccaaagcataggtcctaagtcctcatcatcctgtatgaagcatgcacatgatgccacatggtagctgaggccatgctctgaaggatgtctacatgaaacaaccatgaaaaatcatataatatgggttacattcccaacccacatcttctcaaattcactagaaggtgtccattttgttgacaaaactgaatttgaagtatatgcaataaatgacaccaacattatttttatggctaaaagtactt

SEQ ID NO: 410379 - DNA, 309 bp, Homo Sapiens
ttcagtatatcgatttcctttttttaggggggtaggtggggaaatacctagcagtgggattgctggatcatatggtggttttatttttagatttttaaaggaacctccgaattgttctccatagtggtgttactaatttatgtacacagtgtttccaccagcactgtacaagggttccttttttctccacattctcaccagcaatcgttattgtctatcctttggataaaagccattttaactgggtgagatgatatctcattgtagtttcgttttgcatttctctgatgatcagtgatgttgagcacc

SEQ ID NO: 410380 - DNA, 152 bp, Homo Sapiens
tctcacctgcctgtgatgaccaacagcatttgggatacccagtgtggcactcattccagtgagttttagtgacacccccaccacacacagcttcccagtcacttccactaatactccagctggcttcccagcaagtcttatcgaagtcccag

SEQ ID NO: 410381 - DNA, 145 bp, Homo Sapiens
tagttcacagtaattacagagatgaggctaacagtgtgtcccatagagcaagaaactccaccatctagtccagtgactataccagcatctagtgcagagctgacagcagcaagcagtaacagctttacattgtgaaataagacag

SEQ ID NO: 410382 - DNA, 266 bp, Homo Sapiens
  misc_feature (137)..(137): n is a, c, g, or t
  misc_feature (224)..(224): n is a, c, g, or t
ggaggggggacatttaatttaactatagtgccaggtctctttaaaagatattgattaattccaattagtttggccttaaacatgaaaaaaatttagtctagggacattaccaaaagtattattttcttacacatgtnctcagtaagtcttagtaaaacatttcaaatgaagacctaactctgaagtctggaatatttgttgacattattgtcaacattattgtnctgatcacagagtgtctcctggagaataaccagctaaaaata

SEQ ID NO: 410383 - DNA, 295 bp, Homo Sapiens
  misc_feature (224)..(224): n is a, c, g, or t
  misc_feature (237)..(237): n is a, c, g, or t
  misc_feature (246)..(246): n is a, c, g, or t
atttgaatgactagtgtcccattgggcaccagaagtcagttcaggtatgattctgtctcaccaaaggcctgtgacagcaacttttcaagcatagaaatctctgggcccctggagacaacacatccctccaagccctgcgcccctggtggcaatccagcccttcaagctgtaacacaaggtggattccagtccagtggagagaaatctgccatgtggtgtcaggntacacaggctggnctcactgtnctcactcctagttcttgttggtccaacttttcaggaagaaaaagagctc

SEQ ID NO: 410384 - DNA, 298 bp, Homo Sapiens
  misc_feature (51)..(51): n is a, c, g, or t
  misc_feature (78)..(78): n is a, c, g, or t
  misc_feature (233)..(233): n is a, c, g, or t
  misc_feature (264)..(264): n is a, c, g, or t
  misc_feature (284)..(284): n is a, c, g, or t
cctgggtgtctgaagagcaggcgtgggctcagcactgtgggcatgtgaggngtgcactgccccggcctgtctcagggntgcctgctttctgtgtagggagctgcagttatgcacagccttgcctacaccagaacttcatatttaaagtgaacacatactaaaatcataggcataaagcagctttcccaccgaaagcaactctggatttttatccatccattactctacctgtncatctcccctgggggttgagcctgctgtgtnttcggatgcccttccagggnctcacagagtgcct

SEQ ID NO: 410385 - DNA, 264 bp, Homo Sapiens
taccaaacattatgctagaaactttcatgtatagtatctcatttagtccttacaattttgttaggcactcattttacagtggagaaaactagagtttgagaaagtccagtaagatttattaacttatctaaaagctatgtaggaagtaagaaataaagctgagatcttattaatgtccagaatgcttgccaccacacatcatgccatcttacctggaaaattcattttcctcattttaatattttagtcctattatgacttctt

SEQ ID NO: 410386 - DNA, 163 bp, Homo Sapiens
caaatgggttccttgctcgaaaaatctgtaataggttctgtacttaatatttcattgtaggtttaagtcaactttaaagtacttacgtgttctgagttgtatgttatatatgcaacatactgttatatattgataatcaccaataaatacattattttaaagg

SEQ ID NO: 410387 - DNA, 251 bp, Homo Sapiens
  misc_feature (78)..(78): n is a, c, g, or t
  misc_feature (90)..(145): n is a, c, g, or t
  misc_feature (214)..(214): n is a, c, g, or t
ggcggtgaggggtggggggatgttttccaaaggtcagtctggctccatggtggagagcggatggtagaattataaaancagagtcgactnnnnnnnnnnnnnnnnnnnnnnnnnnnnnnnnnnnnnnnnnnnnnnnnnnnnnnnnatgaaccactgcccttggacaaggcagggttttaacaaacttaatctatcagcaaaacagatgactgtncaagtttcaagaaactgaagaagaaagcacctactgg

SEQ ID NO: 410388 - DNA, 144 bp, Homo Sapiens
aagaccagcgtctgaatgataagagacttggaccttgtgtggcagcatttggtctcaggccctgctccgcctgcttgatattctactgtgatgaattggctatagctggtttcccaggagctttgtgatatccacatccgactg

SEQ ID NO: 410389 - DNA, 249 bp, Homo Sapiens
  misc_feature (82)..(82): n is a, c, g, or t
aagtaaaaattagttcctctacctgatactaatgacctataagacacgtgtaaggtttatacaggatgctatgagggaacgngacaattttatcaaattaatactgggaagttctatcttaggcctaacttaaatccttcatgttacagtttaagcccagtcccacttgggttaatacatgtttgtaaaaagctttcactccttacaatgaaaggtactagagcaaagccaagtattactaagctgagg

SEQ ID NO: 410390 - DNA, 155 bp, Homo Sapiens
  misc_feature (76)..(76): n is a, c, g, or t
attttacaaattgacttcatttacaaattgagtcattttacaaattgacttcaattttacaaattgactacatttncttcacagagctaaagcaataccttagaattaacccagtcctgtgtggggaatttctagaagtcccatctatggtacgg

SEQ ID NO: 410391 - DNA, 309 bp, Homo Sapiens
  misc_feature (182)..(182): n is a, c, g, or t
  misc_feature (286)..(286): n is a, c, g, or t
cctctcagaaccctaaggcaatttggagcccagaaggaaagtgaggcccccaggtggatgtatggaaggaaggtggtgcacctttgggcccttgtgatccaggtgagtgacagagtgactcacctaaaaagagagggaggtctctgcagttggaagctgcaaatgatgatggtagaattttncacaacccagggatcacaagcccagttttaggggaaagggctctaagagtagagacatccatataggcgcagattagtcctcctttatttaaatacaccagcanctgcaaggaagttaaagggtctt

SEQ ID NO: 410392 - DNA, 139 bp, Homo Sapiens
  misc_feature (20)..(20): n is a, c, g, or t
  misc_feature (34)..(34): n is a, c, g, or t
aaatcacagatatttatttnctcacaattctagnggccagaagtccaagatgggagctgaccataatcccaaatgccatcatccccaatgttaaaatcctgaaaaacaaaattccaaaaatattttagaaaaaactttt

SEQ ID NO: 410393 - DNA, 308 bp, Homo Sapiens
  misc_feature (157)..(157): n is a, c, g, or t
  misc_feature (253)..(253): n is a, c, g, or t
ccattcattctcaaggtgcctgaaagaaaaggctggtgtattcaaaccagtttgaggagtgcttcacaacgggacatttctagggggaccagcagggtggaaggaagccagcaaggcgtacggcaggcctgggggttaaggggatggcgaagatttntcggggagggggctgcctagtttcactgtagaggcagcagagaagggaccaacccaggctcttatgcctcatgccctctgcccacttgttcattancctcatcagccaaaccccacaggagccctcgatgtgccactattgggtgagtctt

SEQ ID NO: 410394 - DNA, 169 bp, Homo Sapiens
  misc_feature (116)..(116): n is a, c, g, or t
  misc_feature (145)..(145): n is a, c, g, or t
  misc_feature (149)..(149): n is a, c, g, or t
aggtagtgaaaattgccaagtttcttcagctttcctagtgtgactcatctccaggagagtaggaagcaggtgggtctgaacacagaaatccacacgactttgcttctgccctctgnacagaagcgcggttcttttatgccaggtncctnatttcccttttccacaacag

SEQ ID NO: 410395 - DNA, 193 bp, Homo Sapiens
  misc_feature (68)..(68): n is a, c, g, or t
  misc_feature (120)..(120): n is a, c, g, or t
  misc_feature (142)..(142): n is a, c, g, or t
aaagcgctggcctggcagccctggggagtgttccaggcccttggaccgcaggatgtggcaaccaaatngcagaggcggtaacggagagcatccctgaacggtaaaaagtcgtctaaaggntcgaagaaacggagtttgagcnagtccgtgggcgggacagcaccttcgggtcccggtcagaggagcgagcggc

SEQ ID NO: 410396 - DNA, 249 bp, Homo Sapiens
  misc_feature (163)..(163): n is a, c, g, or t
  misc_feature (168)..(168): n is a, c, g, or t
  misc_feature (188)..(188): n is a, c, g, or t
ttgaattgagttgcggtgaatatagcccagacttgaatcataaaaacagaaaaacggccataaggacaaccactgcaggttacccgagtcagcctgtcagatggcggggcccagtcccgaaaacctctaggggctcagatggtcgagcctgagtcggtgcttnggctnggacgggctcggagggagtnggagaggggaaggaagctgaaggcgcgccctgggtccccggcgcactttaaggttgtcaca

SEQ ID NO: 410397 - DNA, 312 bp, Homo Sapiens
  misc_feature (272)..(272): n is a, c, g, or t
aaaatcagtactttgggagccaggcagttgaagagtaaagaaagtgagtggttcacagtcaggggttagacaatagaggctggtggagaccatggataactagagatttggctttaggagattgttgtcatgttgtacccactgttgtcagatcatttagatttcaagagaagctgaaaatttgaattttcatgttaacgtgtcctaatttttaaatgttgatgactaattcaaggttttcaaaatagtgagatctaagcaaaatacatctncttgaccagatgtggctcttaggcttttagtgtgttaacc

SEQ ID NO: 410398 - DNA, 120 bp, Homo Sapiens
  misc_feature (52)..(52): n is a, c, g, or t
  misc_feature (93)..(93): n is a, c, g, or t
caccatgcctggccttgatgactagattttaaaggaagacctgatgcttttnagttgcaagagatacatatgtaccgatggcaagccattttnagccaaatgttctaagaaagtgaggtc

SEQ ID NO: 410399 - DNA, 302 bp, Homo Sapiens
  misc_feature (39)..(39): n is a, c, g, or t
  misc_feature (43)..(43): n is a, c, g, or t
  misc_feature (47)..(47): n is a, c, g, or t
  misc_feature (52)..(52): n is a, c, g, or t
  misc_feature (139)..(139): n is a, c, g, or t
  misc_feature (205)..(205): n is a, c, g, or t
ctaagtcgcgcgttcgacagctccctcctttacacaccngggngcanttttnccgctgctctgtcatgaagtgagaatgtgagcctctttcaaaccctagaaaaggaaagtttggtaaggcgggggctgcgcagatctnctgttctctggaacctaaactgggaaccctagacttgcgcagaaaattaatagttttccatttttntttaaaaaaattaacttcaacgaaaaattgtgtgtattcaaaaaaattattggattaccatgtctgatcagctgctgatgacctaccaataagcgtt

SEQ ID NO: 410400 - DNA, 314 bp, Homo Sapiens
  misc_feature (23)..(23): n is a, c, g, or t
  misc_feature (33)..(34): n is a, c, g, or t
  misc_feature (186)..(186): n is a, c, g, or t
  misc_feature (228)..(228): n is a, c, g, or t
  misc_feature (238)..(238): n is a, c, g, or t
  misc_feature (277)..(277): n is a, c, g, or t
agatctgaagtgggaaggccggncaggctcttnnaccatccagaggcaaaatgaggtctgggtctgtagagaacatccccagtgaagggtaagagaggagagtccagctgagatagacgatgggaaggaaagagagttttggaggtttcttgcagatgagagcagatatattttaatgaggatgangatgatcctagtgttgtaaatgttaaggatatcttgaatgtntttacatttngtagttattaacacacgtctgcaggtaaacatgattttnctggttatcctttgcctttaggagagaaaaagaggca

SEQ ID NO: 410401 - DNA, 291 bp, Homo Sapiens
  misc_feature (23)..(23): n is a, c, g, or t
  misc_feature (27)..(27): n is a, c, g, or t
  misc_feature (31)..(31): n is a, c, g, or t
  misc_feature (69)..(69): n is a, c, g, or t
  misc_feature (72)..(72): n is a, c, g, or t
atgatgtagtgtctcatgggccngggngaanttttagttttactctgagtgggtgggagccataggcgngtnctggacagaggagggacatgttctgatttggcctttagcaggactcctctcactgctaagtcccacaccgaggaggttggatgtgttttgcaggcagtgggagccatcgaaggtgttcggggacttacagaatcactctgggagcccatgtggaaggaaggtgggttggatgtggctggggttagagtttagaggggcaaaggagcaagtcagaaatgt

SEQ ID NO: 410402 - DNA, 143 bp, Homo Sapiens
  misc_feature (98)..(98): n is a, c, g, or t
agagcactgcacacagccatgtgtttgtcttaatggccttgtatcggaactcttggtgacagaggctaatgagcagccactggtgggagagtaggggnggcgctcaccctgccccctgacccaggggttgggctcaccctaca

SEQ ID NO: 410403 - DNA, 270 bp, Homo Sapiens
  misc_feature (18)..(18): n is a, c, g, or t
agcctcacttgggcgganctgtctccattgctctggcagggctctcacacctggtcttgtgtttgccaggcccacccacactcatctcgcccctgtctttactgttgcctgtatgtgccagccacttgtcagtcagatacccccgacaggcaggagacagaccaggcctctggtgggggacacgggagtaagttgtgctaacatcctgtggacagcagaggtggccgtgtgcctggggtcgtagggagaaccctagggtggctggccggg

SEQ ID NO: 410404 - DNA, 140 bp, Homo Sapiens
gctcaagcgatcctgtatccttagtctccctcggagctgggaccactggcacgtgccaccattcctggctaatttttaaattttttgtaaaggtggggtcttgccgtgttgcccaggctggcagatctacacttttcaac

SEQ ID NO: 410405 - DNA, 321 bp, Homo Sapiens
  misc_feature (64)..(64): n is a, c, g, or t
  misc_feature (106)..(106): n is a, c, g, or t
  misc_feature (263)..(263): n is a, c, g, or t
  misc_feature (291)..(291): n is a, c, g, or t
cctgatgatagcaatctgcagtggcatcataagcacattaaattcagactgaaacattcagcgnagttaatattgacttcacaatgttctaagatgtaagtgaagntatgctctttttgccttataaaattagactgcaaaaaaacaatttttgaggatattcccagtcaattgacttggttacagagtgagcaggaaatcaaactctagttaagttcatagatactggtgttttattcatttggaaacagaagagaaaaagngtatgctgtagtaaattgtttataaatnctttttaattctaaaggagggggaggaagt

SEQ ID NO: 410406 - DNA, 273 bp, Homo Sapiens
  misc_feature (196)..(197): n is a, c, g, or t
cacggccactcagctctgaactctaatgactgggtgaccccagggcctgctgcctgtaagtgtctcggctccctatgtcccattagctggcagagagcagggtccatctgcctcagttactctccaggtcactcagtgtcccctgcctggtggtcagttccatatattgatgtagctagttcatcatgctttaaannttttttttctgctttaatttagggacttaggggaagaacacatgttgagaagattcttggttcagcagcagtccct

SEQ ID NO: 410407 - DNA, 167 bp, Homo Sapiens
aatgttctggaagaatcaggatagacattacctcaggtgaaggaaggcaggagatgggatggtaaaggaattcattggggaaaacaggttatcaatgttccagttcttgtgtcagattgctgactccacagatttttattatgttatgtaaaaataaatacacacag

SEQ ID NO: 410408 - DNA, 270 bp, Homo Sapiens
  misc_feature (147)..(206): n is a, c, g, or t
  misc_feature (235)..(235): n is a, c, g, or t
ttatgagtacgaaatgaaaaaatggggcaaagggcttggcacatggtcagtatcaatagatcactagatggtggctgaggctcacatcaggacttacaatgctgcttttttaaaattattattgtttttgagacagagtcttgctgnnnnnnnnnnnnnnnnnnnnnnnnnnnnnnnnnnnnnnnnnnnnnnnnnnnnnnnnnnnngttcacaccatcctccggcctcaggcctncccagtgactgggactgcaggtgcccgccaccacg

SEQ ID NO: 410409 - DNA, 299 bp, Homo Sapiens
  misc_feature (31)..(31): n is a, c, g, or t
  misc_feature (36)..(36): n is a, c, g, or t
  misc_feature (72)..(72): n is a, c, g, or t
  misc_feature (78)..(160): n is a, c, g, or t
  misc_feature (174)..(174): n is a, c, g, or t
  misc_feature (230)..(230): n is a, c, g, or t
cattctccttgcatcacttccagcgcaacanaaggntcaatcccagtggatgatgcctaggccctgcctctnagtggnnnnnnnnnnnnnnnnnnnnnnnnnnnnnnnnnnnnnnnnnnnnnnnnnnnnnnnnnnnnnnnnnnnnnnnnnnnnnnnnnnngcagctagcaagtntcaggaagattaaatgacataaccttttatttgtaacaatctactatgtgccaggntcttttctggaaccatagagaccctgcccctaccccagggacaatgacagtgacaaccaatggtggaca

SEQ ID NO: 410410 - DNA, 336 bp, Homo Sapiens
  misc_feature (14)..(14): n is a, c, g, or t
  misc_feature (99)..(99): n is a, c, g, or t
  misc_feature (115)..(115): n is a, c, g, or t
  misc_feature (132)..(271): n is a, c, g, or t
ctcatctggatgtnactcgtgactcgagattccctctttcctctcactctcctttctgtacgacagtgggtttccagcatcaccttctgttgagccttnagaggaagcatggttncgctggcaccttgttgnnnnnnnnnnnnnnnnnnnnnnnnnnnnnnnnnnnnnnnnnnnnnnnnnnnnnnnnnnnnnnnnnnnnnnnnnnnnnnnnnnnnnnnnnnnnnnnnnnnnnnnnnnnnnnnnnnnnnnnnnnnnnnnnnnnnnnnnnnnngtttctaaagctctccttgctatagatgtgtatgaatagagttttatgaccaatgtgtataagtt

SEQ ID NO: 410411 - DNA, 212 bp, Homo Sapiens
  misc_feature (63)..(63): n is a, c, g, or t
  misc_feature (108)..(108): n is a, c, g, or t
  misc_feature (143)..(143): n is a, c, g, or t
  misc_feature (177)..(177): n is a, c, g, or t
aagttcttcaaaaggtggactccatctttttgctggtgggaagctggggagaccctgtttganagcttctttttgctctgtaatgtagaaggccaggcctccactganagtggagagtcagaagttcaagggaagggtaagantctaaactagtgattgattagtgagtagtatgtnctaactagagaatgtggttatgatttatgggtggt

SEQ ID NO: 410412 - DNA, 296 bp, Homo Sapiens
cccaggccctcaaactttccttctgtgattaattataattaatcctctcgcttgtcatttcgtctagtatcctgtcatacaacccagaagacactttgcaaaatttcaagcaggaaatctcctgcacatggtttaatgttgatgctgtttccaggtgtcatttatcttccttaagtaatccatacacaacccctccaagaaaggccctctctgtgctcagcaccagacatgctcagcaccacacatctttatgttgggatggataagaaagtttgcaaacttaaggttgccagatt

SEQ ID NO: 410413 - DNA, 226 bp, Homo Sapiens
  misc_feature (161)..(161): n is a, c, g, or t
attcattctttgagcatgtacagggtgggctccctgttgtatttattacacttttcaaaatgccagcaagtttttgtttgtatagagttggaatgtattgttcgtgcatgcctgtgatattcatcatcaaaatatacctgtaaaaaataaactactgcttnctctccacagcttaggtctgccctttactaaaatcaatagtagtttctgtagaagtttcagtgag

SEQ ID NO: 410414 - DNA, 351 bp, Homo Sapiens
cgatgcgctgcgaagacggactcctgtacaagacttcgatgactgacataggcacaattgtggcttctagtttttattttaactttttatttaaagtaacttatcgatggaagcgaaactctgcaaaggaacgtcagaccgctaccagaaagggggtgaagtcaggacttactggtgattattgtccaaggacacatttaagcagatagttttgaaattaattttggcataaccctgagacaatgagaagaaacaatgcatttataaaaaagttattaaacccattttttttgtcacagtcaaaacattcattagcttgtttctattaattaggtgccccataggtttgtt

SEQ ID NO: 410415 - DNA, 209 bp, Homo Sapiens
gaaaatagtacatggagggcatgcattttagtttaggaaacccccctcccttcccagttccagagggagaaattataagctatactgtgccaaaagtgagtggggctgcagagagaatggtgccttttctcaccttctgagttaatgcccgacatctgccattgggttcattgaccaaaggaagtcatttctactgtataactcaaggg

SEQ ID NO: 410416 - DNA, 257 bp, Homo Sapiens
  misc_feature (184)..(184): n is a, c, g, or t
caggctggaccgctgaaggcccagttccttgcctgttgcacagggaagcccctgacacacagggaaccccactgttgtaacgctgtgttgggcctgaggccaagggcaaccatcctcctaccgtgtccccagctccagctcctcgccctgtggcactgcatggaatgcgctctgctagacaagnagggtgccctcgaccagacccaatctgctatgggcagatgcctcctgtttgtaaggcaaggggcctagcaaag

SEQ ID NO: 410417 - DNA, 183 bp, Homo Sapiens
cttgtcttagcccaggcttcccgtggaaaacagagccagagagaagggctcacatgcttagcttttgttttggagactgacctggagaaggaggcaaggcttagatagagctgcatctttcatttagctgccatgggcagtggtcttgaccctgaggactttacaaggtgcatgaggaaatgt

SEQ ID NO: 410418 - DNA, 309 bp, Homo Sapiens
  misc_feature (32)..(32): n is a, c, g, or t
  misc_feature (55)..(55): n is a, c, g, or t
  misc_feature (57)..(57): n is a, c, g, or t
  misc_feature (63)..(63): n is a, c, g, or t
cttgcatattgtgggggctcagtcaatatttnttgcatcgtaaatagtgggtttntnagtttnccatttctcaactacaactctctgaagattccaataggagggagaaacagggtagtcagagagataataaacaaaatcagccaacgttgataaattcagagtatggaggaccaggtaggatgtgtcatcatacctaagaacgctgcctctgcttaaaaattattgttagctctagaaacaatgacatatctatttgtgtagccctttgcagtaaacacatatacattaattcattagattccccta

SEQ ID NO: 410419 - DNA, 340 bp, Homo Sapiens
  misc_feature (232)..(232): n is a, c, g, or t
  misc_feature (246)..(246): n is a, c, g, or t
cggaagttccttttttgcttcagtttttgaatttgactgaaggaaggtggaaatgatcactcgagcccctaatgaattctccttagtaaaatactggcgaggaagaatcaatcccagcaacaggatgatctgggaccagtcttcagatgttaattcccacttggccctactcttctcctttagaacgtttttcttgcaaaatataatttaatgcatttcagattccccttcntacctaaatagggncatagaataataattatctttcttatgggtcttggtatctaaattagtagcaaggacttatgagctggtttactgcacatctttgcaccaaaat

SEQ ID NO: 410420 - DNA, 311 bp, Homo Sapiens
  misc_feature (11)..(11): n is a, c, g, or t
  misc_feature (102)..(102): n is a, c, g, or t
  misc_feature (131)..(131): n is a, c, g, or t
  misc_feature (214)..(214): n is a, c, g, or t
  misc_feature (222)..(222): n is a, c, g, or t
ctgagggactncccacaccgtgagttggctgtagagcccagaccccaacaggagtccaggaaaactggtttgaaatcctgcttctgcttactgctgcctgtntggcccaggccagtcacttggcttctgtnagcctcgatttcctcttctgcaagaggggtcatcaccatctaactggtggagttattaggaggtaggcaggacactgactctntgccaggntccaagagtttacaaatattaattatgaggactaaccctcgtaacagctttctgaagtagatgctatttagagtccccatttaattaag

SEQ ID NO: 410421 - DNA, 240 bp, Homo Sapiens
ttatctgtccacagaagaatctcctcccaaatacagaacttgcagtttttccaaaatgagatgtccagagaccacaaataccacaccactgggatcaacagccacactgggttactgaggacacacctcaaaacagcgaggaggagtgcacgggagcagcaccgactctatgtctatgtaatgttccaatttctgcagttacataaatgaattcttgaaatcgctgtgtgtttggtgctt

SEQ ID NO: 410422 - DNA, 182 bp, Homo Sapiens
  misc_feature (80)..(80): n is a, c, g, or t
  misc_feature (108)..(108): n is a, c, g, or t
  misc_feature (124)..(124): n is a, c, g, or t
  misc_feature (132)..(132): n is a, c, g, or t
tgttgcttgtcggtgtctgtttccaagacggcagaaagcctgaccatcgcggggccctggcgggagctttgccatacaantttccttccaccagggggagcacgtgcnttctcagcaaacccgngacctgtnagcttcagaaccgggaaggaggggacctggggcttttccagcctggagcc

SEQ ID NO: 410423 - DNA, 302 bp, Homo Sapiens
  misc_feature (207)..(207): n is a, c, g, or t
  misc_feature (243)..(243): n is a, c, g, or t
caatcatggtggaagacaaaggaagagcaaggggatgtctcacatggcagcagacaaagagagaaaaatgagagccaagtgaaagggaaacctcttataaaaccatgaaatcttgtgagacttgttcccttaccaggagaacagtatggagaaactgcctccatgattcagttatctcccacagggttccccctaaaacacatgggnattattggagctacaattcaagacgagatttgggtngggacacagccaaaccatattaatcctaaatctcattatcaccagatattttaattttc

SEQ ID NO: 410424 - DNA, 348 bp, Homo Sapiens
  misc_feature (309)..(309): n is a, c, g, or t
aaaacatgtcatggacttcactggaagttgagcctggaactcattcagataatgccttctttatcccacgatcatatagattaagttagaggctctaagaaatttgggattgtgtgtccagagatatataatgtgcagttaaaatgctccacccttgctgggagattggtactggagagaaataatggttaagcctgaagcttcaaggtcccaggctaaaaagagacaagatcttttattccttgagtgaaagtagtaacaacaaactaggggcaatgaaaaggagttctcaaatttgctggagaaccntgctggcatcttaaaacttctaggagcttttggactcgt

SEQ ID NO: 410425 - DNA, 239 bp, Homo Sapiens
  misc_feature (153)..(153): n is a, c, g, or t
tgtccttcctttgagcagccactgagagggagaaggagttgcagagatcaggaaggagaggatttatttccagttttctggcagtttttcctcactctttcggagacctaggatgggttaggagagggcatggcaaaggcagaggtggctctnctagaggaggccgcagtccgcagccgaacctggggagccagccatgtctggcctgaggccctgctttgaggagaagataaagcctt

SEQ ID NO: 410426 - DNA, 171 bp, Homo Sapiens
  misc_feature (78)..(78): n is a, c, g, or t
  misc_feature (112)..(112): n is a, c, g, or t
ttatactccaccctctctcctccattctgggttcagctgggtaggcttcttgtgatccttgcttctttcctgaaagcntcagggatggagctgcccacaccagctgcccgtnagtttgggctctctttcatcaggactaagttgtagatgctacaaaacaacaatttcaac

SEQ ID NO: 410427 - DNA, 283 bp, Homo Sapiens
  misc_feature (35)..(35): n is a, c, g, or t
  misc_feature (162)..(162): n is a, c, g, or t
tttttaatggttgaagagtctgagaattagaattnattaatttgctccaggtcacatagataataacaaatagggttgaattttaacccatgtctgttgggttgcaaaatgtgtcttttctcccatattgttctgtttcctagttgcttctcagtatttatnagcacagtattcaatttgtttcattcatctttagatcctccatgttacaaacagtatatttagctgctgattgaatgaatgaaatacaaatacaaagtccactattttcgccaatgctgtg

SEQ ID NO: 410428 - DNA, 294 bp, Homo Sapiens
  misc_feature (41)..(41): n is a, c, g, or t
acagatgggttcagttataaggttatgcttcaacaaaaaantgcagacatggcagcttgtaactgaccattgccacagaaattaaaattggggagataccatggagcaaacgttcttaatcctctttataataaccaagttttaaggtttattatttgtagcctgatgcccattaaactattgagcaactttggaaatctatgtggagcaacagcttgtattttgcttgcactaacttgctagaaaatgcatatttaataagcttaatggatctctctagagaggcatattttg

SEQ ID NO: 410429 - DNA, 290 bp, Homo Sapiens
  misc_feature (189)..(190): n is a, c, g, or t
  misc_feature (233)..(233): n is a, c, g, or t
atcacaaggacaatttcttctccaccacatctatcccaccccatctattcctcttcacagtcctatccagttggcccactcctacttgctctccaggggagaccacattcaacccttacctgtgtcacttcctccagggcagaaattaatgtctctctttctgcagacttatacctcctacaaccaggnncacatgttcacttctgcaggactgaattcagtaccctcctctncagatttactcctcttactctacttcctttttcagtttcatttaggctatggtcttt

SEQ ID NO: 410430 - DNA, 319 bp, Homo Sapiens
  misc_feature (180)..(250): n is a, c, g, or t
caggccctgccaccacccagctcctagtgtatagggcactgtgctcactgttgtgggggtgaacacagagatggccataccgctgccccttccctggaggtactcagtgtggctggagaacccatgcatctgcagtccccacagttagcctggctggacttgcagagcctgaatcgctgnnnnnnnnnnnnnnnnnnnnnnnnnnnnnnnnnnnnnnnnnnnnnnnnnnnnnnnnnnnnnnnnnnnnnnngcatgccctagaagttctggctggtgtcatgttgtcattggcatatgtctgaccttacctcctgtgagg

SEQ ID NO: 410431 - DNA, 308 bp, Homo Sapiens
  misc_feature (151)..(151): n is a, c, g, or t
ctcaacttgtggccctagagttcaaaaacaccagcaggcatgaagccaaggcttcaccagtaacttttgcagctcagcacttgactagaaaaaagtgtcctcactgggtaattttccccccaatgaaaacctggcagagttctcctttttnacctgccttggttggatacccttgtagatcaagttcaggaagcagttcttaaacaacaacaaggccatgtcataggtgatgggtaagaagaggttattttttccctatttaaaaagaggctacttttagcgggggaaaccaacccttttaataaaaa

SEQ ID NO: 410432 - DNA, 208 bp, Homo Sapiens
  misc_feature (64)..(64): n is a, c, g, or t
  misc_feature (175)..(175): n is a, c, g, or t
  misc_feature (198)..(198): n is a, c, g, or t
cacacaccagccagcccgcccgaaagctgggaccagagcgggtgtcgtggctcccaatctgggnctccatctgcctcacttccctgcctccagatgagcagccacggctgtttgcggccccgtcctgacagcccctcactttggtcttactgggttcaaggtcctccaagcactnctgagtcaaaggcctggcctggnctctttgact

SEQ ID NO: 410433 - DNA, 313 bp, Homo Sapiens
  misc_feature (86)..(86): n is a, c, g, or t
  misc_feature (94)..(94): n is a, c, g, or t
  misc_feature (113)..(113): n is a, c, g, or t
  misc_feature (118)..(118): n is a, c, g, or t
  misc_feature (172)..(172): n is a, c, g, or t
ggcgccgcctcttccacgtggctttgcagcctccggcctggccccctctgcgggctccgtgaccacaggagggggcccctgatgtnaccatttntgtatctgggaggtttctnttctnatttgtgtcgttcatatctggattccattttcaagtttacaataaatgtttggncttggctagcccgactgcactttttttggcaagtccaaaccctggggctgctctgcctggtgttccgaggcgagggggacagagcgagcgccccaggacggcgactttccacggaggaagagcagacagagacgcagagca

SEQ ID NO: 410434 - DNA, 271 bp, Homo Sapiens
  misc_feature (109)..(109): n is a, c, g, or t
  misc_feature (156)..(156): n is a, c, g, or t
  misc_feature (221)..(221): n is a, c, g, or t
  misc_feature (235)..(235): n is a, c, g, or t
  misc_feature (240)..(240): n is a, c, g, or t
attttcccttcctaatagccgagtctggcatgctgtcgaagagtgtcacgggtaggtgctaagttgaccttgtaggtctgttttccatcctgacacaaaggggctactnggaagtttttagccagctatgatgacagggagggaggagttcacctntggacctggtaggggcatgaacgagaaaggcgggttttcaaacggagctaggacaggatgaattncttccgtagatgtnagctnaggtatggaaacctggctttgtctgtctgtt

SEQ ID NO: 410435 - DNA, 185 bp, Homo Sapiens
  misc_feature (175)..(175): n is a, c, g, or t
ctctcacgctgccttcaggatccccagcccccaactcttcttcctgaggatggaaatccactccagccccactaggactgatgtgggtgccatacaggcaggagcagcccaccaggaaagtgtaaggagggagctgaactccccagagtagctggaccacagagacttgggtcanagctgatttc

SEQ ID NO: 410436 - DNA, 153 bp, Homo Sapiens
  misc_feature (78)..(78): n is a, c, g, or t
  misc_feature (86)..(86): n is a, c, g, or t
  misc_feature (88)..(88): n is a, c, g, or t
cttctgcccatttttaagcccccaaccttcactgcagggagcccaagtttccctttattcatcctgcccatgtaagcnagcacctntnttcccctggggaatgcggtagtagtgaagtgggtactagaaagggccgtgcctgtatggggaggg

SEQ ID NO: 410437 - DNA, 213 bp, Homo Sapiens
  misc_feature (66)..(120): n is a, c, g, or t
  misc_feature (134)..(134): n is a, c, g, or t
gagacacgagtaaacccaaagccagtgtgtctgaaatccatttggcaagcatttgtgccatgtccnnnnnnnnnnnnnnnnnnnnnnnnnnnnnnnnnnnnnnnnnnnnnnnnnnnnnnngtccaatgcctgtntggggaagtcacttcaccattttgctcaatggcaatgaagaaatggcattcatgtaaacactttctcagtctctaaaaa

SEQ ID NO: 410438 - DNA, 154 bp, Homo Sapiens
  misc_feature (35)..(35): n is a, c, g, or t
ttttgttaatgtttctgagttgatattcttaagtngttctatgacttaacctataacattttttcatagaaacagattcggatgtatttggagagtctgaatctgagtcatcttttgcacaactcagtcctagtgttgcatttagcagtaagcg

SEQ ID NO: 410439 - DNA, 230 bp, Homo Sapiens
  misc_feature (108)..(108): n is a, c, g, or t
gtcacgcatgatcctatgtgattaaacagattttctaatattataatcaagattcttaaaatttaagtacagttaatcctccatttttaaacaacatgcaaatcaganatttaaaaagacataaatatatgatatcaaaggtgtgcttgtatgtgtacatattatctgcatacttgttatgaaagacgtaaaggtattttttgaagtccctgcttctaccttgtatttta

SEQ ID NO: 410440 - DNA, 305 bp, Homo Sapiens
  misc_feature (193)..(193): n is a, c, g, or t
cccagcccagagcctgacttgctcttttaggttttatacagctttctacctggctttgtcctggatgatgggaaggagattttcagtaattgttttttttctcactctataaataagggaaattttcagatcatgtctttgtgacattttagtgatttcctaatcatttcttggacatcttctgggcactttnggagacatcaactttctaagataccagaaatagcatagattattctcattagatcatgaggacctgaaccagaggaaactaagtgaccacagacaagtcagcttccaaaatg

SEQ ID NO: 410441 - DNA, 206 bp, Homo Sapiens
ttccttgaattcgtcaagttctttcctgtgtcacattgtcttccatgtttcctttatcagaaatgcaggccccttatttctgatggctcctactccaagttttcacattatgtgggccccatgcatatgtcctctaagcttgtctcatcttttagctttctgcttcaatgtcacttcctcatagagcccttctcagatcttccagg

SEQ ID NO: 410442 - DNA, 286 bp, Homo Sapiens
ttgaggtgccagcagggttgaagatggagcccccagccatcagctgaaccgtggacggggcacaagtaaaatagcctacctacaagcataattggaatcagaacttactctttaaatctgtgactgtgtgcctcaatttctcataccagctttctccataggttggaaacattaccacctagactcttatcattccactttcactaatcaggagagattgccctctttccttagttccaatttttaaaatcctcagaaaggagtctgaatggttcatcgtgggtca

SEQ ID NO: 410443 - DNA, 319 bp, Homo Sapiens
  misc_feature (264)..(264): n is a, c, g, or t
tttatatcagtaccgattacacaaaagtaaaatgtatttaaaatatctggttaaatccacatttagtatcatcattattttgactacattttgctgactgttgagccagtgtagaacactaaaattgcgcttttattggacaactttttttattttccttgagttcaaaatggcctcgtggtttcattagcttagtttatttcagatgtttgcttgagttccacggtctccaccaactctgctctccaccaactctgcggaagncttcaacaacactctccatagttaaatgttagattacattcgtcagtttcagttt

SEQ ID NO: 410444 - DNA, 314 bp, Homo Sapiens
ttcggctgtagtctgcaccttacaggggtccggagtgtgggcagctcctggcttgtttgcctgagagctcatagggcaagaagggtgactggactgaccttgaattcaggtatcctttggtccttcctaggccttcggcttaaaaaaaccaaaagtgctagtttgctttgggcagtggcaagaggagggagagctgacattgtaagatttgaagatgtgtaacagtggttagatttgtgataaatatgtgcttggatgtaaattgtggaaaactgagatttgaatgtaaaaataactgacatattagggtatca

SEQ ID NO: 410445 - DNA, 254 bp, Homo Sapiens
ggtgtggaggccccaggttcttttgctttgtatgattaggacagggtgatattttctgggttatctcttgtgggaactgagccctccaaagccctcatttgtgcattgttgtcatagctgcccaagtgtgtggccttgctgagtttgacggctgtggaccaggtgatctctcgggtggtgaaagggaggtgctctgtgagtgcacctcagctttagcctcttggcttctccctggattgggatttccagggagg

SEQ ID NO: 410446 - DNA, 304 bp, Homo Sapiens
  misc_feature (268)..(268): n is a, c, g, or t
ttgtccatgtcattcatttgcagatagtcatattcccctttgggcagaaaccatattttagttatctcaatgcttagggaaaaccttgtatgtagtggatactcagaatattttcttgcgtgaattaagtatgctttgcatttgtatctaactctgagtaactctgagtcctccaccctccagaagctcacagctttagattatcacctttcttcttgaaatcattgtgaactcctagagattggtctgtgtcttatttttcctgtancctttcagtaccccatatagttttctcagtcaaggg

SEQ ID NO: 410447 - DNA, 285 bp, Homo Sapiens
aatcattactgttattgtcaaaaacattcaaagtctccctgttgcttatgtgataaagttgatactcctcagcttgccattcaagaaccatcctagcttaaccttttctcctgtttacatctcacccatacacctttcagatgccagtgtcatttccctttcatgcctctcagtgatatttctttacccttagctatcttgcctgttttgaaccttatccaggatgttgaggctttactcagttttcaagatccaaatggaaatagtttattattcctcttatac

SEQ ID NO: 410448 - DNA, 415 bp, Homo Sapiens
  misc_feature (63)..(63): n is a, c, g, or t
  misc_feature (91)..(91): n is a, c, g, or t
  misc_feature (119)..(119): n is a, c, g, or t
  misc_feature (239)..(239): n is a, c, g, or t
  misc_feature (385)..(385): n is a, c, g, or t
catacgtccaaccttgctgctggagagattggggtttatttttaactgacttacatgaacgtnaccccatttccgaggcctggcgcctttntcctcctgtaagtcttcgctcgaatgtnaccttgcgagggaagttgttcctgatcaccctgactatgtcccctaccggtactgtatcctctgtctcaacaatctgttggtttcattcctaacccttaaagcaaagtgtttatattttnatatttatgtatttgttgtctgcctcccctactggactatcaaatcttctaggatagggcttgagtctgtcttaatcactattgatgagcagcaggtgcttagcacagtatttggtgtacctgtggaagtgcccaaatgtttgttngaatgactgagtaaaccttccccatataat

SEQ ID NO: 410449 - DNA, 251 bp, Homo Sapiens
attttaatcatttcctgcaggatatgaaataaagccccaaacactcttatgaagcctcaaagctctccagtaactttactaaccaagtgatatgtaagtcagtttcataaatttttgaatataggcatcaaatcagttccaagagctcagcagcagaagattgcagcagggacatcccactgcctaggaactgaggacatattttagacatctattaaagcatatccgggatttggcttttggtcagtcag

SEQ ID NO: 410450 - DNA, 341 bp, Homo Sapiens
  misc_feature (111)..(111): n is a, c, g, or t
caggaagccagccaagggcctaggagctcctgaagcttgggtcatgattgggtcataaaagtaatctgtggggatagagtggctcctgtttgtggtctgtgactgccaagntacaagtaggaagactgggccctccttgagacaggtggcagggtatatggagctggaagtggggtatggaaatgggtggttattttgcagcctttacttttcatctggacttgtattcagcaatccctccccaagtcagctctcagaaaaatattaaaatattgtgaaattggcagtgtctttcctaaatgttggctttagaaagcttttccattcctggttcagagagg

SEQ ID NO: 410451 - DNA, 355 bp, Homo Sapiens
  misc_feature (171)..(171): n is a, c, g, or t
  misc_feature (247)..(255): n is a, c, g, or t
  misc_feature (297)..(297): n is a, c, g, or t
  misc_feature (332)..(332): n is a, c, g, or t
tagcaacatgaagtcctaatttattgttcccaattgttttcctgccgtctgtgaacactggtacctccctgtcctgatcccccaggagcacctgtagcttctgactcaatgccttctccgaaggtgttggccgccatctcacccagggccctcttccagttcctgcttttntgagtcagatttaaagagcaccactgtcttccccctaccccttgcttgatctccaaagcagatattcttgctgtannnnnnnnncctccccaatacctctccctgaaaggtggagctgctattttnaggaaactgggaccagacaacaacttgggggcttnaagtcaaacaaacttcaaaccca

SEQ ID NO: 410452 - DNA, 203 bp, Homo Sapiens
ttagaagttgacccaaggatttggtgggagaactggataaattagttttaatctaaaagccttgacactaacaggatgtgggggaaaacataaacttctaggacttaggagacctgtgcagccatcttggttgcctcactagctcttcctctgttggaggataggtgaaattattgccataaccacctcagaaggccatttga

SEQ ID NO: 410453 - DNA, 154 bp, Homo Sapiens
  misc_feature (122)..(122): n is a, c, g, or t
atttttcaatgctcccctttccttctgtttatttgggaagtcacactctgtattctggtattcttactacttgagctcagctcatcgctgtcatcttcccctaaaccgccttaaagcatctnaggtcttttccctctgatcacatgtgctactt

SEQ ID NO: 410454 - DNA, 153 bp, Homo Sapiens
  misc_feature (52)..(52): n is a, c, g, or t
ctatcaccctcattcaatgatgcccaattcatgaccaatcatttcgcatttntatcccagcttttcaccttcccccgatcattttgaagcaaaccacagagatcacatcaattcaaatatacatattttgatatccctaagagacaaaaatga

SEQ ID NO: 410455 - DNA, 283 bp, Homo Sapiens
  misc_feature (113)..(146): n is a, c, g, or t
  misc_feature (265)..(265): n is a, c, g, or t
aacaggtgagagaagaagtttaagttctgcttacaaatgaggtgagagttcatttaatctattcaccatgaccaaagttacaaagggctctctggttattaagcattcagttnnnnnnnnnnnnnnnnnnnnnnnnnnnnnnnnnncagtctaagaaagtaaataaagcttatttctttcaatctttcaaaatattacaatgagattatttgagcctctgttctggtaaaatcatcactttttcaaagatggatttcttgctgtngtctcattatttacatgg

SEQ ID NO: 410456 - DNA, 300 bp, Homo Sapiens
ttcctcaagctgaacaggcagcaggaccacctcgcggtgtcctgggattcctctccgacatggcacgcagacgcttaagaaagcagagcagaactttccagtccagacgttttcctcagccccagcctgtggtggggatgtgactggaggacgtcctgctgcccgacctctgccgccctaggctacgaacctgccctagcaaggggcatccatggagaatgagaaggaatagtccaccccaactggtaagcagaaaacccgctgtcacctccagctctgcttggaacaagcaagaacccc

SEQ ID NO: 410457 - DNA, 184 bp, Homo Sapiens
cgaaaatccgggatcctcccccggcccggtacctaacctcctggtctaattccccatggcacccgcaaggctcaaaaaatgcacttgaaaaacgggtgaaatttaaaaattccctggaaaccccccgtttacccggccccgatttggagccccccctaggccttttccaactaacttgggttcc

SEQ ID NO: 410458 - DNA, 316 bp, Homo Sapiens
caatcctggatcctcacggaagccctcccgatctgcccaagaatcagtagaaggggcagaaatctccgtgcccctgcatagaccactccaagggtccaaccttgatgggggtaagcccaactggggccataactctcgcacaactacccaagcttaggccgaacgggttccatgcttatccacaagcaagaacgaaaattttgggacttcctcttacctggctccagggtaccatatctgtcatacaactatcattagctcccatgaacaaaagttccttcccccacttgaaacctgggccagtcccacctatcat

SEQ ID NO: 410459 - DNA, 137 bp, Homo Sapiens
aattctggatcctcgtccctgtctgtgtactgcttagggaactttctgaaaaacctagattttttaaatatatagattcttgggccaatcccagatctcttggattacagtctcttatggtagatctcaaatatctg

SEQ ID NO: 410460 - DNA, 297 bp, Homo Sapiens
ccctgctaaagccaggcggaagtctccccctgcccggatgtggtgcttgcctctgtttcccacccctggaggcctctctcctccaatatccgagctctccttacccccgaccctgcacccagtcccttaggaagagagaagcctctccagctagatttcaacctccaggaggggcatccatatacccagcgccccccagcccaccacggtaacatccgatcagagtgcactcaactgagtttggccctggccctgatgactctgatggaagctggtctccttcgaccaagagctgcc

SEQ ID NO: 410461 - DNA, 367 bp, Homo Sapiens
  misc_feature (228)..(228): n is a, c, g, or t
  misc_feature (249)..(249): n is a, c, g, or t
  misc_feature (266)..(266): n is a, c, g, or t
  misc_feature (306)..(306): n is a, c, g, or t
  misc_feature (345)..(345): n is a, c, g, or t
aaagtgttttctaatgctaactctgaaagatttgctcaaatcaaggtgacctccctatctgtcagaattttaagattcatttaatgactgtgttactttctccagagagggataaggaattgggccatgtggtcatgaagtttgagaagtctcaaaatttacaagtcggagaccgtggagagctgatgatgtgttgcggcatgagtccgaaggaccgagcattagganagccgatggtctaatctccantttgagtccaagtctanaggcaggaaaagaccatcgtcccaatgaccatccaggcanacccagtgaattctctccttaccctgtcttttgttctantccggcctgcaatggcttggat

SEQ ID NO: 410462 - DNA, 144 bp, Homo Sapiens
  misc_feature (59)..(59): n is a, c, g, or t
  misc_feature (67)..(67): n is a, c, g, or t
cccccaagtaatgaccacagtgcactctgttacgacagctatggcaaatactgacctanatcgcganagaaaacaacagctgctgtcctcacagctgccccgcctcactttctgctaacggacgctgcttctgtatggccatca

SEQ ID NO: 410463 - DNA, 426 bp, Homo Sapiens
  misc_feature (20)..(20): n is a, c, g, or t
  misc_feature (33)..(33): n is a, c, g, or t
  misc_feature (53)..(53): n is a, c, g, or t
  misc_feature (63)..(63): n is a, c, g, or t
  misc_feature (69)..(69): n is a, c, g, or t
  misc_feature (76)..(77): n is a, c, g, or t
  misc_feature (79)..(79): n is a, c, g, or t
  misc_feature (93)..(93): n is a, c, g, or t
  misc_feature (109)..(109): n is a, c, g, or t
  misc_feature (134)..(134): n is a, c, g, or t
  misc_feature (143)..(143): n is a, c, g, or t
  misc_feature (176)..(176): n is a, c, g, or t
  misc_feature (220)..(221): n is a, c, g, or t
  misc_feature (223)..(223): n is a, c, g, or t
  misc_feature (287)..(287): n is a, c, g, or t
  misc_feature (303)..(303): n is a, c, g, or t
  misc_feature (315)..(315): n is a, c, g, or t
  misc_feature (326)..(326): n is a, c, g, or t
  misc_feature (338)..(338): n is a, c, g, or t
  misc_feature (340)..(340): n is a, c, g, or t
  misc_feature (345)..(345): n is a, c, g, or t
  misc_feature (364)..(364): n is a, c, g, or t
  misc_feature (369)..(369): n is a, c, g, or t
  misc_feature (378)..(378): n is a, c, g, or t
  misc_feature (385)..(385): n is a, c, g, or t
  misc_feature (395)..(395): n is a, c, g, or t
  misc_feature (405)..(405): n is a, c, g, or t
tagggcttaaaatatacttngaatatgatgagncacatcggcatttctaaagngtcttcagcnatgggnttctcanntnttgcttctccaggnttctcgcaattctatntctccagaactcccgttacatgtgngtggacagntctcaacttatcctctgtgtcatttgaactgcngattaattgatagatacattcttctttttccagctctatgtgcnngngaactattcattaaaacattaactaagttcctcatcaactgggttcagtctaagaatccaggtntggacttgctcagtanctattttttggnccaagttttanaatttagttctntnaggangcccattttcctgtcatanttttnttaattccntcactgncctctttganacatcctaancaccccatttttaaaaatgcc

SEQ ID NO: 410464 - DNA, 300 bp, Homo Sapiens
  misc_feature (289)..(289): n is a, c, g, or t
accttgtcattacctttcagggagtagccccattacctctacctctgtacctctctcacctcccatctctgtgcccccatcactcccaagctctgtcctccccattaccttctacatctggccctcttcacattttatttcatctcatgtcagccccatcactttccacctcagtccctccacgttccatctcaggacttccgtcacttgcatcccagggacctcctcacctcccattttagtctattcatcacttcccatctctgcaccttgtcattacctttcaganggtagccccat

SEQ ID NO: 410465 - DNA, 335 bp, Homo Sapiens
  misc_feature (51)..(51): n is a, c, g, or t
  misc_feature (87)..(87): n is a, c, g, or t
  misc_feature (104)..(104): n is a, c, g, or t
  misc_feature (207)..(207): n is a, c, g, or t
  misc_feature (244)..(244): n is a, c, g, or t
  misc_feature (294)..(294): n is a, c, g, or t
tcctttcttcccttgggttccaaacacttcttcttcctggtttgcttctanctcactggcccccgatcaccctgctggttcccccanctcctgtcctccaggtntggcaagctcagacctcggcagctgcctgtctctccagtctccccctcggtactttccttccgaccatggattttaacattatctaaacactgatgactcccnaagtgacatctccaagccctacacttccccaggggtntttcacaggcatctccaactttccaaattcaaaactgaaactcctaagtntcccctccaggcctgttcttccttcgggcttccccagaaga

SEQ ID NO: 410466 - DNA, 150 bp, Homo Sapiens
  misc_feature (37)..(37): n is a, c, g, or t
  misc_feature (39)..(40): n is a, c, g, or t
  misc_feature (57)..(57): n is a, c, g, or t
  misc_feature (62)..(62): n is a, c, g, or t
  misc_feature (65)..(65): n is a, c, g, or t
  misc_feature (71)..(71): n is a, c, g, or t
  misc_feature (73)..(73): n is a, c, g, or t
  misc_feature (75)..(75): n is a, c, g, or t
  misc_feature (77)..(77): n is a, c, g, or t
  misc_feature (80)..(80): n is a, c, g, or t
  misc_feature (85)..(85): n is a, c, g, or t
  misc_feature (87)..(87): n is a, c, g, or t
  misc_feature (90)..(90): n is a, c, g, or t
  misc_feature (92)..(92): n is a, c, g, or t
  misc_feature (126)..(126): n is a, c, g, or t
  misc_feature (139)..(139): n is a, c, g, or t
gaggaatgcacaagggtgtctttgtgagtcattggcnannaggtccatgacagaaanggganagnaccaangngngngcnatggngnaanangttgcaaatggttctctgtgatcttcaggatccncgccctgatggtnttttctgttac

SEQ ID NO: 410467 - DNA, 342 bp, Homo Sapiens
  misc_feature (247)..(247): n is a, c, g, or t
  misc_feature (255)..(255): n is a, c, g, or t
  misc_feature (257)..(257): n is a, c, g, or t
  misc_feature (271)..(271): n is a, c, g, or t
  misc_feature (311)..(312): n is a, c, g, or t
gggtgcargtatagcaggtgggtcagggaacagcarwggtwcagtctacttcaggwtgtcaagggwactctcaagcccgttaacccataaatwtcaggcwcggtcwtagcgttaccctggcagwtractgccccagtctcctggtcaagwtgcatgcttactctgaaggccgggggwggaaaatgattaaagtwagwgagacggwagcctttcctttgatcagggaatattcacacgcctccacaanwaaggwanwnwtgaaaactcatcnaatttccactctaggtcagctgtctgccacttctgccatnnttwtcttatttgatcctcaaacacagccca

SEQ ID NO: 410468 - DNA, 280 bp, Homo Sapiens
  misc_feature (157)..(157): n is a, c, g, or t
  misc_feature (206)..(206): n is a, c, g, or t
gtgggwtgtgagtgtacaagcagtgtgtgtccagagwgggtgtggwttcatgtccgaatggtrtttcwatgtggaaattgataggccagtgwctctggwccccmaatcggwgttgtgactasgcatwtagaaaagwtaacwtggcttctcatagtanctgagaawggaggtgtccccmycgtgggctcactaatggggctgtwcanggtgggcrkyccccattgcttggtgccacttgcacccgacatgcstaaagaatacmagggggcgggaggwtccm

SEQ ID NO: 410469 - DNA, 113 bp, Homo Sapiens
cctccaaaaccgtgaaccacccactgcctgtcgggctggttggcatccagtcccacctcgaggggcaaggaccatatacctttgtagtcttagacacaggccaagaggcacca

SEQ ID NO: 410470 - DNA, 204 bp, Homo Sapiens
  misc_feature (79)..(124): n is a, c, g, or t
agaaaatgaggcttagcaagcctgacaagacgtagagctaggccatctgatcccaactctagtgtctgcatttggagannnnnnnnnnnnnnnnnnnnnnnnnnnnnnnnnnnnnnnnnnnnnngaaacacgctgtccgaagtccaactctcgacctattgatcccaaaccctgtcctcaggggggattcccgcttgcctccaa

SEQ ID NO: 410471 - DNA, 285 bp, Homo Sapiens
  misc_feature (170)..(170): n is a, c, g, or t
  misc_feature (225)..(225): n is a, c, g, or t
  misc_feature (233)..(233): n is a, c, g, or t
  misc_feature (252)..(252): n is a, c, g, or t
atcctccccccatacctctcccggtcaagcacctcacatttccaggtggaatctgatcgcacactgcacctcaacatctgtcccgacggtctagtcgcctcttcgtcgggatttccaggaccctgctccgaatgatcgtgttacccggcgtccccatgtgaccccgcaancaaccacagactggccaactaggcgcgggcaccacggccaacgggtacatacacntgatgacnaaagcctatcttccgctanacgtcttcaacaaatgtgtgccttgagaacccc

SEQ ID NO: 410472 - DNA, 139 bp, Homo Sapiens
  misc_feature (41)..(41): n is a, c, g, or t
  misc_feature (54)..(54): n is a, c, g, or t
  misc_feature (128)..(128): n is a, c, g, or t
aattgtggggaattggggcaggtcccggggagagccaacanaacctggtggtcnggggaatttaaccagtgtctgataaatggggctccgtactgatctttgagctaaaggaaaaatcctgggtaccntgattcaaccg

SEQ ID NO: 410473 - DNA, 299 bp, Homo Sapiens
  misc_feature (54)..(54): n is a, c, g, or t
  misc_feature (74)..(74): n is a, c, g, or t
  misc_feature (100)..(100): n is a, c, g, or t
  misc_feature (138)..(138): n is a, c, g, or t
  misc_feature (144)..(144): n is a, c, g, or t
  misc_feature (148)..(148): n is a, c, g, or t
  misc_feature (150)..(150): n is a, c, g, or t
  misc_feature (155)..(155): n is a, c, g, or t
  misc_feature (163)..(163): n is a, c, g, or t
  misc_feature (166)..(166): n is a, c, g, or t
  misc_feature (168)..(168): n is a, c, g, or t
  misc_feature (171)..(171): n is a, c, g, or t
  misc_feature (174)..(174): n is a, c, g, or t
  misc_feature (176)..(176): n is a, c, g, or t
  misc_feature (181)..(182): n is a, c, g, or t
  misc_feature (185)..(185): n is a, c, g, or t
  misc_feature (209)..(209): n is a, c, g, or t
  misc_feature (251)..(251): n is a, c, g, or t
  misc_feature (258)..(258): n is a, c, g, or t
  misc_feature (270)..(270): n is a, c, g, or t
  misc_feature (289)..(289): n is a, c, g, or t
tcctcccccctgctgctcatggccacctgctgggtataaccagtacaacttcancacatactttctgataatanaataaacgcatgaaatgactactttnctctctatcacccattctctattctcattatacagaantaaatnaaantngttanaaggaggnagnanagnagngnctttnnatngtgccagcactgtgcaatatctanttacccttgaatgacctgagcatgacggtattactagtgtcncgtatanctctacgcagcnaggaaccacagttcacaancaggtcaggg

SEQ ID NO: 410474 - DNA, 377 bp, Homo Sapiens
  misc_feature (21)..(21): n is a, c, g, or t
  misc_feature (42)..(42): n is a, c, g, or t
  misc_feature (46)..(46): n is a, c, g, or t
  misc_feature (48)..(48): n is a, c, g, or t
  misc_feature (59)..(59): n is a, c, g, or t
  misc_feature (69)..(70): n is a, c, g, or t
  misc_feature (88)..(88): n is a, c, g, or t
  misc_feature (146)..(146): n is a, c, g, or t
  misc_feature (154)..(154): n is a, c, g, or t
  misc_feature (175)..(175): n is a, c, g, or t
  misc_feature (180)..(181): n is a, c, g, or t
  misc_feature (233)..(233): n is a, c, g, or t
  misc_feature (272)..(272): n is a, c, g, or t
  misc_feature (278)..(278): n is a, c, g, or t
  misc_feature (319)..(319): n is a, c, g, or t
  misc_feature (342)..(342): n is a, c, g, or t
gatccgtatactgacctgaangggcactaaggtcccctgtgngtgngncaccccctgtngatacattanngccaggtgaacaccaagnaactggtgtaaaattttgtgtgtaatacacataaacgaaaacctagtacgacctgcanatcacgcntataacttactttactcaggngacannatccatatatatacaccggatccgacgtacgcagctcactccaatatcatanctggctactgcaacgtccgttaatgtaccccatcccacnacacgnctaattaacggtcatatactaccctatgctccccgccctcncgacgcgccctatacgcaccggnagcgtgcttggccagtgttctccataacgcccatg

SEQ ID NO: 410475 - DNA, 188 bp, Homo Sapiens
  misc_feature (85)..(85): n is a, c, g, or t
  misc_feature (104)..(104): n is a, c, g, or t
  misc_feature (108)..(108): n is a, c, g, or t
tgaggcacctgcgggtttgagccatatctctggggtgctctatcacccctggtgctcttggtggggggtataaaaggtgaggggngatgcacagtgccccaggncagnccgcgcacagcccccagctgctctttgaatggctgaggctaaactgctttgatttgctttcttaggagggaacaaaaaac

SEQ ID NO: 410476 - DNA, 250 bp, Homo Sapiens
tgaggtcgggacgaggttccccccaagagaggatgctgtcctcataaacggatgtacatgaaccattgagcgacatgtgagggtactacccagaaggaagtggtgccctcccgtcctcgccaaaaactcgggcatagttggcacgccgtcccaaacttcaggcctccacaacctacagaaatcactgtctgctgtgtcagccaccagtctctggctttcctcacgactcccgggtgactatttttgccat

SEQ ID NO: 410477 - DNA, 250 bp, Homo Sapiens
cactactacttaggggtgtgtgtcatacaacacatgtgtctgaacctggtccatatggacgaaacaaactttatctattatgtgccacactctatgcacgctcctcatcagtaatgggatggtgtcgactgacctacacggtaatctacgggcaaattccgggtaggctataaacttatgtctggatacaccccaactctagttgccagcgtcatgtctcgctcaggaacgctgatatgcccttaacctg

SEQ ID NO: 410478 - DNA, 283 bp, Homo Sapiens
gggcgtgaggcccacccaggaaaattgcgcaatcctatcaccgaagtcctgcaggggactctggaacccaacgatgtgcctccaaaagggtgtaaggttgtctcgacatccagtacaaggacacatcacgaaaaaagagtggcacacatacctaaaaaaagctccacagtataaagaacgtctgggctcccaagtgatcacgtcaacggccaaatgcatgtgccacactgtcccccgaaagcacctcctatgcctgcaggttgcaaggggccctgacactgtc

SEQ ID NO: 410479 - DNA, 131 bp, Homo Sapiens
tccacactatatcccctcctccttaattacactccctcccaccccgcacagaaattgtttcacttacttgacacctcatctccacattctcacactcaagggaagatccaaaaaccctcccagtactccct

SEQ ID NO: 410480 - DNA, 153 bp, Homo Sapiens
ctcaagaattctggatcctccaccatatcacgaggagggatgcatcctcatgcgtgcttagaccacaccacgaatgggttggactgtgcaatatcaaaacgggtgggaatgctgtacttaagagcttaggtcttctctctatatacccccgag

SEQ ID NO: 410481 - DNA, 248 bp, Homo Sapiens
  misc_feature (91)..(172): n is a, c, g, or t
ccgggttcacacctggcaaagaaaaggaacaggaacaggaaaaagggatggaacaagttaaaacagggcaaatccgggtgtcgggggacannnnnnnnnnnnnnnnnnnnnnnnnnnnnnnnnnnnnnnnnnnnnnnnnnnnnnnnnnnnnnnnnnnnnnnnnnnnnnnnnntccatgaaaacaggattgtaatggatcgtacctcacagtcttggaaggaccaaatgaaatcaatttacgtgaattt

SEQ ID NO: 410482 - DNA, 186 bp, Homo Sapiens
  misc_feature (54)..(103): n is a, c, g, or t
gaagcaataggttatgacattaagttccggagtcaatatgctctggaacttaannnnnnnnnnnnnnnnnnnnnnnnnnnnnnnnnnnnnnnnnnnnnnnnnntcctcccctctcatgtccccagtccaaccttcctctctgatacgccatgaggatccagaatcctcgagttagtatatatatcc

SEQ ID NO: 410483 - DNA, 189 bp, Homo Sapiens
  misc_feature (19)..(19): n is a, c, g, or t
  misc_feature (43)..(43): n is a, c, g, or t
  misc_feature (53)..(53): n is a, c, g, or t
  misc_feature (55)..(55): n is a, c, g, or t
  misc_feature (59)..(60): n is a, c, g, or t
  misc_feature (65)..(65): n is a, c, g, or t
  misc_feature (124)..(124): n is a, c, g, or t
  misc_feature (129)..(129): n is a, c, g, or t
tcatccagttaccttgaantccttgatatatctccttcaagcntcgacttccnanattnngtggncaatgaataggaaatcactgcgagaaaatgtcaggggtatgctggactcaggtttctanagccnaactttagttgagcttctgaacctgctccaaagctcatctgtgtactttcttattacaag

SEQ ID NO: 410484 - DNA, 202 bp, Homo Sapiens
  misc_feature (46)..(46): n is a, c, g, or t
  misc_feature (53)..(53): n is a, c, g, or t
  misc_feature (57)..(57): n is a, c, g, or t
  misc_feature (59)..(59): n is a, c, g, or t
  misc_feature (67)..(67): n is a, c, g, or t
  misc_feature (69)..(69): n is a, c, g, or t
  misc_feature (72)..(72): n is a, c, g, or t
  misc_feature (91)..(91): n is a, c, g, or t
  misc_feature (99)..(99): n is a, c, g, or t
  misc_feature (110)..(111): n is a, c, g, or t
  misc_feature (132)..(132): n is a, c, g, or t
  misc_feature (167)..(167): n is a, c, g, or t
  misc_feature (181)..(181): n is a, c, g, or t
  misc_feature (192)..(192): n is a, c, g, or t
gccttgcacctcctcccgtttgtaccagtgaagtggctgaccactncgcatanttancntcccatgnanttngtggtaataacctactacngggaagcnccctccatgtnnaaatgttaactacttccgaanagctcatcatccaatgggatttgggcactgtgaanataggtgggttaanaggggacaganggccaaattc

SEQ ID NO: 410485 - DNA, 181 bp, Homo Sapiens
  misc_feature (79)..(80): n is a, c, g, or t
  misc_feature (112)..(112): n is a, c, g, or t
tcatttggagcatttcacagtgtcaaggatatggcctggcgttcgaaccctgaagagccaatggctgggcaccagaacnngctcccacgattggagaaggctgatgaccttnactacaaaggatcttgaaaaaggtgttgcctgctggatatctggaaagctgaactgacagagggacttt

SEQ ID NO: 410486 - DNA, 292 bp, Homo Sapiens
  misc_feature (25)..(25): n is a, c, g, or t
  misc_feature (36)..(36): n is a, c, g, or t
  misc_feature (62)..(62): n is a, c, g, or t
  misc_feature (161)..(161): n is a, c, g, or t
  misc_feature (163)..(163): n is a, c, g, or t
  misc_feature (174)..(174): n is a, c, g, or t
  misc_feature (184)..(184): n is a, c, g, or t
  misc_feature (192)..(192): n is a, c, g, or t
  misc_feature (202)..(202): n is a, c, g, or t
  misc_feature (252)..(252): n is a, c, g, or t
gatttaattctgatagtaccttganaatagcctcanccaacctggagggactggtggctcanatggtggttttaatttcttgactttgaaatgttaggtggactgaaagtatgtaaaggtttattttaatctgtcttttctgtatggtggctgaagtccantnttacccactanaaaattgtcngttaacanttacgtaaangaatctacgtgtgtgacagctgtccaccttgcagtgggtcttctaaccanatgcttgttctttttgggtgactatactcgtttggtgctc

SEQ ID NO: 410487 - DNA, 302 bp, Homo Sapiens
  misc_feature (11)..(11): n is a, c, g, or t
  misc_feature (118)..(118): n is a, c, g, or t
  misc_feature (178)..(178): n is a, c, g, or t
  misc_feature (188)..(188): n is a, c, g, or t
  misc_feature (192)..(192): n is a, c, g, or t
  misc_feature (232)..(232): n is a, c, g, or t
  misc_feature (255)..(255): n is a, c, g, or t
  misc_feature (278)..(278): n is a, c, g, or t
cctggctgganaagatctgatgctctggaagccatgatgtgaaagctctgcagcggggacagggggtatcccgggtgataaaggttagaaagagaaactgctgatctcacgttcgtanggagctggccatggtcctgccctgcaaacaagaccgggagactgcaagaaaggctgagtnaagcccaaanaganactcttccccctggatgatgatcaagaactcattctgccngcttctggaggaatcttggccanaaaagaactcagaatccctttcnacctctttcaattttcgaggatcc

SEQ ID NO: 410488 - DNA, 171 bp, Homo Sapiens
  misc_feature (25)..(25): n is a, c, g, or t
  misc_feature (36)..(36): n is a, c, g, or t
  misc_feature (50)..(50): n is a, c, g, or t
  misc_feature (84)..(84): n is a, c, g, or t
  misc_feature (114)..(114): n is a, c, g, or t
  misc_feature (129)..(129): n is a, c, g, or t
tctgtgggggatgggatgtctttantgccggcctcntcttcttgaccccnacaccgtctgggttgcccatggctctgctaccanagccagggtgggcttggctggacagtggangcccacgtgtgtgtncaaaccgctctgtttcctctgctgagcctgctgtgtgtgtcg

SEQ ID NO: 410489 - DNA, 320 bp, Homo Sapiens
  misc_feature (44)..(44): n is a, c, g, or t
  misc_feature (47)..(47): n is a, c, g, or t
  misc_feature (107)..(107): n is a, c, g, or t
  misc_feature (132)..(132): n is a, c, g, or t
  misc_feature (152)..(152): n is a, c, g, or t
  misc_feature (156)..(156): n is a, c, g, or t
  misc_feature (174)..(174): n is a, c, g, or t
  misc_feature (176)..(176): n is a, c, g, or t
  misc_feature (265)..(265): n is a, c, g, or t
  misc_feature (270)..(270): n is a, c, g, or t
  misc_feature (294)..(294): n is a, c, g, or t
  misc_feature (306)..(306): n is a, c, g, or t
ggcgtagttgctatggttacaatttccagtactgtattgaacanaantggcaagggtgggcatccttgtctcattcctgatcttacagaatctggttgacagtttanaggctgtttctggctgcctgtgganaataatctgggaagtaacanggtnaaagggcctgtacaggtnanggacaataacgcttgggctacggtggtggaatgagcaaaagtcaatggtggaatttatttgggtaaaataaggtgtgctgattaaaccnatgtnaattttaaagttctttctctccangttggcttcaancttacattggtcac

SEQ ID NO: 410490 - DNA, 436 bp, Homo Sapiens
  misc_feature (46)..(46): n is a, c, g, or t
  misc_feature (56)..(56): n is a, c, g, or t
  misc_feature (118)..(118): n is a, c, g, or t
  misc_feature (122)..(122): n is a, c, g, or t
  misc_feature (173)..(173): n is a, c, g, or t
  misc_feature (192)..(192): n is a, c, g, or t
  misc_feature (200)..(200): n is a, c, g, or t
  misc_feature (356)..(356): n is a, c, g, or t
  misc_feature (373)..(373): n is a, c, g, or t
gtcctctgctattctgaaattctatcctcaccattgacactgtggngcccggttcnatagagccacttcccctacaacgaactccagcctacaaaggtcaccaccactgagcttcccnacanggccagtgccacctcactagcacatttcttattgctattatgatgggaagncctctggacgctccggagnacaacagnagctggtccatataatgaattcatgcaatcatacccacctccacgtgccttttgactcattcctcaatactctgccgaggaagttctggcatccccacttcatttactaaagaccatcatttttccaagcatcagctccagatgtccttgccaggncgctaaattctgagtcntgggacagtgtctccaaatcattgctcctcctttcccaatctcttccccacaagtccgaatga

SEQ ID NO: 410491 - DNA, 300 bp, Homo Sapiens
  misc_feature (108)..(195): n is a, c, g, or t
  misc_feature (199)..(199): n is a, c, g, or t
  misc_feature (206)..(206): n is a, c, g, or t
  misc_feature (230)..(230): n is a, c, g, or t
  misc_feature (250)..(250): n is a, c, g, or t
atggactcggggctcatggactcggggctcataaactcggggctcatggactcggggctcatggactcggggctcataaactcggggctcataaacttaaaggtgtannnnnnnnnnnnnnnnnnnnnnnnnnnnnnnnnnnnnnnnnnnnnnnnnnnnnnnnnnnnnnnnnnnnnnnnnnnnnnnnnnnnnnnnatangcttganctaccttgcctggcctaacatgtnggggcaactttggcaggcancctcaggcacagttcgaacactctggccacacctgttttgccctctgacc

SEQ ID NO: 410492 - DNA, 112 bp, Homo Sapiens
ctcgtagttcccaacgcctaggttatcccctgccagtgtttgcttaactgcggtctccccaattcatctaagcccctgattattatgcatccggaaggatggctatacccaa

SEQ ID NO: 410493 - DNA, 152 bp, Homo Sapiens
ccgggccagtgtgcagtcagcatgaggaaagcaagtgactggagaattcagagaaaggtggcctggaagtggggagtgtgagagggcttcagggagagcagccctcggatgagctttcaggcatgtaggctactcgccagtgaggccaaaaa

SEQ ID NO: 410494 - DNA, 235 bp, Homo Sapiens
cctctctgtggtcaggcgggcaaattgaggccagatagcacattaatgtgcattgtggccagaatcaattcctggggaaagttggagaaatctcctttcctttctaaattagtgtctaccaggaaaaaaagttgtatatcttaagatcatacttgtctcacagcaaactgatcctggtgttgagtcaaattgagcctgttgatcaggtgtgcatatgccccaaaggcggtcattt

SEQ ID NO: 410495 - DNA, 285 bp, Homo Sapiens
  misc_feature (67)..(67): n is a, c, g, or t
  misc_feature (109)..(109): n is a, c, g, or t
  misc_feature (116)..(116): n is a, c, g, or t
  misc_feature (184)..(184): n is a, c, g, or t
  misc_feature (200)..(200): n is a, c, g, or t
  misc_feature (230)..(230): n is a, c, g, or t
  misc_feature (266)..(266): n is a, c, g, or t
ccctgatcttctgttctccaaaaaactccctctgcctccatctcaacccttccactgtgccgtccanaaccacagttctactataaacataccttctactttatgtctnccccaanaacactcttccatctctgtgtctgggcaaaatgctaggtccttctctaaggacactgcttcctggcanccttggtgactggaanctgtacattgacccaggctccacacaccanaggacaagtaagccccacttcacaatctcctgaacnatacctgagatgatcctga

SEQ ID NO: 410496 - DNA, 165 bp, Homo Sapiens
atgggcgtgtggtggtgatgatggtcgaacagtcctgcagccctggtcccatacggcctattcccagcttggactggctccctgcaagtggacatggacaggaagggatgccagactcatagagaaccccttctcctccacaccacattgggcaggggaggatcc

SEQ ID NO: 410497 - DNA, 127 bp, Homo Sapiens
aattctggatcctcaagagactagtctctcctcccctgatcaccagcctgggccaggggatagcagctggtgctacttggcaccttttagctgaggaaactaaggctttattcacccaatcaatgga

SEQ ID NO: 410498 - DNA, 275 bp, Homo Sapiens
  misc_feature (47)..(47): n is a, c, g, or t
  misc_feature (97)..(97): n is a, c, g, or t
  misc_feature (101)..(101): n is a, c, g, or t
  misc_feature (116)..(116): n is a, c, g, or t
  misc_feature (122)..(122): n is a, c, g, or t
  misc_feature (126)..(126): n is a, c, g, or t
  misc_feature (132)..(133): n is a, c, g, or t
  misc_feature (138)..(138): n is a, c, g, or t
  misc_feature (152)..(152): n is a, c, g, or t
  misc_feature (194)..(194): n is a, c, g, or t
  misc_feature (242)..(242): n is a, c, g, or t
  misc_feature (255)..(255): n is a, c, g, or t
  misc_feature (258)..(258): n is a, c, g, or t
ctgacaggagtcattgtctccttaatctgtgacagtccctcagtctncctgtcttttgtgaccttgagacttctgaagggtactggtcagttacctngtangaatgttccccccanggggtngtcnaatgtnnctcanaagaaatgtgcatngtggcaggaaaaccccggggtgctgcgctcttcccagcgccncctctgtcaacacgttctggagaagtaaacctgggtcacgtggttaangtggtgatgccanttngttcactgcaaagtact

SEQ ID NO: 410499 - DNA, 248 bp, Homo Sapiens
  misc_feature (30)..(30): n is a, c, g, or t
  misc_feature (35)..(35): n is a, c, g, or t
  misc_feature (51)..(51): n is a, c, g, or t
  misc_feature (72)..(72): n is a, c, g, or t
  misc_feature (74)..(74): n is a, c, g, or t
  misc_feature (79)..(79): n is a, c, g, or t
  misc_feature (86)..(86): n is a, c, g, or t
  misc_feature (89)..(89): n is a, c, g, or t
  misc_feature (103)..(103): n is a, c, g, or t
  misc_feature (119)..(119): n is a, c, g, or t
  misc_feature (160)..(160): n is a, c, g, or t
  misc_feature (163)..(163): n is a, c, g, or t
  misc_feature (169)..(169): n is a, c, g, or t
  misc_feature (191)..(191): n is a, c, g, or t
  misc_feature (219)..(219): n is a, c, g, or t
  misc_feature (223)..(223): n is a, c, g, or t
tcctcccgtgactatgccctaggtggtatnctggnggtcaccctgctgaantggctggccttggtggcaaananctttnctggggnggnaagggctctgggtnctgggttgctcaggancccattggaatggatgctctgtctgcctttgcactgcaaancancttatnctcggaaaaggcacctggggtnctaatggctgcaaggcacccactggctnaatnaaacctgctcttggcatctctgctg

SEQ ID NO: 410500 - DNA, 259 bp, Homo Sapiens
  misc_feature (25)..(25): n is a, c, g, or t
  misc_feature (48)..(48): n is a, c, g, or t
  misc_feature (159)..(159): n is a, c, g, or t
  misc_feature (161)..(161): n is a, c, g, or t
  misc_feature (173)..(173): n is a, c, g, or t
  misc_feature (180)..(180): n is a, c, g, or t
  misc_feature (219)..(219): n is a, c, g, or t
  misc_feature (228)..(228): n is a, c, g, or t
  misc_feature (236)..(236): n is a, c, g, or t
cctcctccactctccttggaatttntgtcatacattctaacacactancagggctcacctcaagtttactgcaagtatcacacacatgtcctctcctacaactaaactagacatagggggccttaggaagcactttattgatcttagtttctctaaaantnaacacgaacttnaaactcntttaactgtttactgggccacccattctacagacctggntaacttcanctcctaanttctaattaaataaggaacagca

SEQ ID NO: 410501 - DNA, 132 bp, Homo Sapiens
  misc_feature (72)..(72): n is a, c, g, or t
ccaacctcgatgccataggaactgcaaccactaatttcctaaacttctagagccgactgatataaccggcanatatgagcaaccgcttcgtatcgtggactgaagcaaataaatacgaataaataatggtca

SEQ ID NO: 410502 - DNA, 144 bp, Homo Sapiens
  misc_feature (85)..(86): n is a, c, g, or t
  misc_feature (94)..(94): n is a, c, g, or t
  misc_feature (96)..(96): n is a, c, g, or t
ttaggatagcaatgtgtgatcatcacttggaggcatggggtggtcccctatggtgatgtgaacgtgagtacaatccagtcacctnngcctacanangtttggggtgtgtacctggaagtggcatcgccatgttaatatggtaat

SEQ ID NO: 410503 - DNA, 269 bp, Homo Sapiens
  misc_feature (223)..(223): n is a, c, g, or t
cctcggggtggtttgggatgctggtctcaactttatgtctcatccttccgcgatagccttatgtttgaatttgactcagtcttcaagcctggatcaaacagcacctcactcgacagtcttttgtgctcttccgaatggagctgatggcttcctcccttcacacttggatctgagcactttcctgcccactctcagtgcaccagtgcacctgctggatggtttnactgagtcacatttctgatgtgcctctcgggtgaacagatctatct

SEQ ID NO: 410504 - DNA, 364 bp, Homo Sapiens
  misc_feature (67)..(67): n is a, c, g, or t
  misc_feature (101)..(101): n is a, c, g, or t
  misc_feature (109)..(109): n is a, c, g, or t
  misc_feature (114)..(114): n is a, c, g, or t
  misc_feature (137)..(137): n is a, c, g, or t
  misc_feature (198)..(198): n is a, c, g, or t
  misc_feature (221)..(221): n is a, c, g, or t
  misc_feature (269)..(269): n is a, c, g, or t
  misc_feature (340)..(340): n is a, c, g, or t
tcctcctcagccagcatcactggtgtcctaacaggtgaggcaccaggcaccgggtggggggtgactnccaggcgcatgaggtattgtcctggcccttaaanactcatanctaantaagatggaaagacaggtaccanggaacacctatccagggggccacctgcaaaaattcacatcccacccgccacctgccaccantgtgaccttggacagccactgancacatctgagacccgtggtccggtgtgtaaatgtgacgtcaaatgccnggccaaaggttgctgtaaggtcatgggacaagatccaaaatctcaatatatatatatcaacccggaatccngacgtaccgcagctacacttccta

SEQ ID NO: 410505 - DNA, 221 bp, Homo Sapiens
  misc_feature (86)..(86): n is a, c, g, or t
  misc_feature (93)..(93): n is a, c, g, or t
  misc_feature (147)..(147): n is a, c, g, or t
  misc_feature (150)..(150): n is a, c, g, or t
  misc_feature (165)..(165): n is a, c, g, or t
  misc_feature (207)..(207): n is a, c, g, or t
tcctcaaaaaacctccaatctaacaattccaagtcaggggacactccctgcttcagctcacaaaatttgcaactggggaggaccanaaggaangttcagccaaccaggttaattcaggaagcatcaacccaccacctgccaaagcangtnaccttgaaataatanagtacgtactctatgtcagacaccaaggaggcacagataaanctgcacaccacctg

SEQ ID NO: 410506 - DNA, 339 bp, Homo Sapiens
  misc_feature (47)..(47): n is a, c, g, or t
  misc_feature (173)..(173): n is a, c, g, or t
  misc_feature (235)..(235): n is a, c, g, or t
  misc_feature (241)..(241): n is a, c, g, or t
  misc_feature (268)..(268): n is a, c, g, or t
  misc_feature (289)..(289): n is a, c, g, or t
ttcctcaaccttctgaattagtgttgaaagtcccggttttacagaanggggactctaaacttagaggagttacctgctttgccaagaaaattctcaaacacagacatgtcagcctccagcgcctgtgttctcctgattgcaaccctgaatagctccacctcttagcaacccanaatgataacaaggggacgtctgtacccttcgatcacacactccccacgctcagtcactgcancaccanaaacccctgttgagctggtacactcanccctggggaacctacgcctanacctaaggggctgaactccgtatctcacgacaggtcacctcacaccatca

SEQ ID NO: 410507 - DNA, 103 bp, Homo Sapiens
atttgtctccatgctgttgcacatgctgcttcctttacttgttctccaccagggatgattttgcttcccccacccttgcagggtatgtggcatgtctagggac

SEQ ID NO: 410508 - DNA, 191 bp, Homo Sapiens
atgtgctggcctgtcaaggaacgtgctcatgtaggtacaacacgagggtcacgtgtaaccaggttcctaatccacaccacaaatgtcagacaatctaattaccggaaggtatcatacaaatggttatcggaataataccagcagtgaacctgcttcagatatccttgttctcgacccgtgtcactcctgtg

SEQ ID NO: 410509 - DNA, 172 bp, Homo Sapiens
tcccccagtcttgccccatcagcagagctgagaccgataccacaatcactgccatcaagtggggcggctcagcccagaaacatggccctaggacctccttaatgggacaaagagtacaggccccactgtctttgataaggcaggcaggttccactctccaacctgaaaagac

SEQ ID NO: 410510 - DNA, 176 bp, Homo Sapiens
ggcaatggctcttgagggagcactcggactctgtggaggacctgactgggaacaggtggagcaatgatctggacacctgtcccatgactctgtatgtaccgtcctggctaggacatctggagctgatgcttggacaatgacggtctcttaggtaatgaatggggatcccgcaaccc

SEQ ID NO: 410511 - DNA, 196 bp, Homo Sapiens
  misc_feature (54)..(54): n is a, c, g, or t
ggtgacggagtcaactttgtgggcaatcaatcaatcaaacatgctatctcaggnagctctaataaaaactttagacaccaaaaatcagaaagatcctggtggacatcggcgtacgccacatcatacagaggtacaatgcccaccccatggaaagaaacggaaatccataaacctcccaactcgccccatggctcct

SEQ ID NO: 410512 - DNA, 148 bp, Homo Sapiens
ggctctgtggctcactcatcatgtcgtcctaagcaggtcacctgactcctgtggacctcaatttatctatccatgaaatggacacagtgaggggaaacacgtatcctggtgttacatcataatcccggaatatgcttcatctcattca

SEQ ID NO: 410513 - DNA, 135 bp, Homo Sapiens
  misc_feature (97)..(97): n is a, c, g, or t
cttcctggtggtgccgctatactgaattttttgttaatcaatcccatgcatattctactattcttactagatatatacttattcatatgcactcacntaaacatatatatattaagttggtttcaaaatttatgg

SEQ ID NO: 410514 - DNA, 139 bp, Homo Sapiens
  misc_feature (24)..(24): n is a, c, g, or t
  misc_feature (49)..(49): n is a, c, g, or t
  misc_feature (55)..(55): n is a, c, g, or t
  misc_feature (63)..(63): n is a, c, g, or t
  misc_feature (84)..(84): n is a, c, g, or t
  misc_feature (87)..(87): n is a, c, g, or t
  misc_feature (111)..(111): n is a, c, g, or t
  misc_feature (122)..(122): n is a, c, g, or t
aactcgaagaaatccgggaatccnccccaaaatcccacctcctggaacnctaccncccaagcnccctcctccctggacacgtanccnatcaaccgggtacccggggtccanggtccccccanataccaccatggtcccc

SEQ ID NO: 410515 - DNA, 176 bp, Homo Sapiens
  misc_feature (125)..(125): n is a, c, g, or t
ctccaggtgtgtgtatgttcagatgtatatgtattctatatttatcattacggagagagaggagaactcatggggaatggaagtactattctgctgaatgtcagaaccgctgtgcaagccagacncataatttgcccaagttttcagctggtttggacagattcaactcaaccgct

SEQ ID NO: 410516 - DNA, 180 bp, Homo Sapiens
tccggggggaaatggtgggaacacttgaacttggggagtatcctgcttggcaagccgttacggcagttggcccaggccccctacctaacaattcgaccctcccttcccaagaatctgtccccaccatggttcccagtccctccaaaattcccttcctaaacccctcccggaatawawamc

SEQ ID NO: 410517 - DNA, 129 bp, Homo Sapiens
ctcagacaagtggtataaaaaataatttatgtgttctgaatggaatgttttcgtctccatagtccaaaagaggaaccaatttctgtcattatcattggtccactgattaatgacgatggactgcgctca

SEQ ID NO: 410518 - DNA, 254 bp, Homo Sapiens
  misc_feature (62)..(62): n is a, c, g, or t
  misc_feature (178)..(178): n is a, c, g, or t
aggcgtgaagggctcaattttgtaactccttcaggagagcctctaaggcacatttttcagcntcatctaaaagatggagaaactcagtttcaaggcagttgccaggacgagggaaaggtccacctacagctgcacttcctggacattcttaaatgccgaccacgtggcagagcctgtnggcgtccacagcaggcgataagacacgcctcccatcagagagcagatgctgagcattcttggcctcgcaggccgta

SEQ ID NO: 410519 - DNA, 299 bp, Homo Sapiens
  misc_feature (53)..(53): n is a, c, g, or t
  misc_feature (110)..(110): n is a, c, g, or t
  misc_feature (179)..(179): n is a, c, g, or t
  misc_feature (288)..(288): n is a, c, g, or t
tttgttgcttaccacacacaagtaaggaagacggacaggcagtatgtcccttncaggtcagggactgaggcgcaggagttacaggagctgccggtcccgcagctgttgangtcagtatgcagtcagggtctcctggctctaacacagtttctcctgccccaccatactacactgccctnattttatccttgttacaggtataatcacaaaattgaaatcatctggatgcatagccccatgttgtgaaatccagcatgggtattgatcctgtcactttaaatatatctnagttcacaact

SEQ ID NO: 410520 - DNA, 279 bp, Homo Sapiens
  misc_feature (197)..(197): n is a, c, g, or t
  misc_feature (202)..(202): n is a, c, g, or t
  misc_feature (204)..(204): n is a, c, g, or t
  misc_feature (247)..(247): n is a, c, g, or t
ccaagaggctcaacaggaaaggctgaaattccctgctatttttttaaatacatcagctccccaatatagcacagggccaggactcaagctctaaaaccagccacctggattcccacctctgccactctattagttgaataaccttccagaaatcacttaacttctcaaaatctcactttcatcatataaactggtgnaagtngngtcataatactcactggaggcatttaagccaggaaggcaagcnctggttttgtcttagtcatcatgtatcacagt

SEQ ID NO: 410521 - DNA, 169 bp, Homo Sapiens
agacaaagaggcagtttctgtagttccagcagggccagagcagttatcagaacgggttggtttgacctgcatagattttttgacgactacgtggccatgccattcctgtaagtgaaattaatgaacatcatactaaagtgttatatgatcataggaatagtagaaaagg

SEQ ID NO: 410522 - DNA, 350 bp, Homo Sapiens
  misc_feature (303)..(303): n is a, c, g, or t
cccccgatttcaacaccgcagtccacaacaccacgccaacaaagaatatagacgccgtccggcgtgcaccacacagattcaataccgcgagtaccgcaattcctacagccgcgacgccaagagaggccatcgataagtcattagtgtagaacaatgcgatgataatgatggccccaagatcgtcgataatagccagagccatcaaaaagatcttcagcgctaacggaacacgacttcccaacagtgtcagtacaccaagtgcaaaagcaatgtcagtagccgtcgggatcgtccacccttcgngggtaatcggatcgggcatagttaaaagccagatagagtaatgccgg

SEQ ID NO: 410523 - DNA, 473 bp, Homo Sapiens
  misc_feature (376)..(376): n is a, c, g, or t
tgcggcccaggcccgatttcccgcttccattcgaaccgacaaacgccaactatcaaccggttttaacgttaagttggaggcaattccagcgtttttttgtcgatattgctgcaaaccaccgggctaatcatcgagcgggcgttaggttcaggtaatccagatccatttccagaatcggttgccctgcgcttacctgcgcaccctcttccaccagacgtttaaagcctttaccttccagcgctacggtgtcgatacccatatggacgacgatctccgagcctttttcggtttccaggcagaacggtattgaatacggcgatatgcagctggattgctgaaagcctatttctcttgcttaaaggtggccttaaacctnaccaacgaagaactggcgcagacctttaccgagtggaataaacggtgaaactgagcagttacctgattggacattaacaaaagatatttttaacaaa

SEQ ID NO: 410524 - DNA, 133 bp, Homo Sapiens
  misc_feature (24)..(24): n is a, c, g, or t
  misc_feature (26)..(26): n is a, c, g, or t
  misc_feature (42)..(42): n is a, c, g, or t
  misc_feature (46)..(46): n is a, c, g, or t
  misc_feature (102)..(102): n is a, c, g, or t
  misc_feature (105)..(105): n is a, c, g, or t
  misc_feature (121)..(121): n is a, c, g, or t
gatatctccgcactgatcacccangngatgtcacttgggttnaagnttatggctacagggacattgtgacgtgtcactgcactgatcacacagctgatgtancanttgtctaggctctggntacagagggctt

SEQ ID NO: 410525 - DNA, 186 bp, Homo Sapiens
  misc_feature (52)..(52): n is a, c, g, or t
  misc_feature (102)..(102): n is a, c, g, or t
  misc_feature (151)..(151): n is a, c, g, or t
  misc_feature (153)..(153): n is a, c, g, or t
gcctctttatatccacactggccaactgcagcttaatctgacaaggataatngtcgcacgaatgtaaatattaccatttggttccatgtcatctcagatcangacactaatttgaaatgtaatttatcatgtctaaacgaaaccaaatagnangctcttacccgtatttggattttttcgtgttaa

SEQ ID NO: 410526 - DNA, 278 bp, Homo Sapiens
  misc_feature (215)..(215): n is a, c, g, or t
  misc_feature (232)..(232): n is a, c, g, or t
cttgcaaatgttccgacattcatttctacgtgcattgaacatggggagagggagggtaatgtagtctgcagaagagaaggatgtcacgtagggagaactagactgtaaggccctggtgagtagaaagtctgaagaatttagctttatgtataagcacttcctacaggtcaggacatgaaaagtgatctttaagaggtagtagtgaatagcctctnaggctccttctgttgtnctcttgacacaagaggggaaatcctaaatggctcagtgtgtggagt

SEQ ID NO: 410527 - DNA, 204 bp, Homo Sapiens
  misc_feature (71)..(71): n is a, c, g, or t
  misc_feature (79)..(79): n is a, c, g, or t
  misc_feature (165)..(165): n is a, c, g, or t
cttctggtccaggtgtggccatctggccatatcagctctctgctcacaggacagagagaagaggctcaggnggaaatanctacatagagtcaagtggctgcctccaagagatgctgtgagcccaaactcactgtcacgtggggtgtaagtgggattagtgcctanttccatggctccagaaaaagggtaaagacagtcatttct

SEQ ID NO: 410528 - DNA, 145 bp, Homo Sapiens
aaattttttgttgagcttttatattctgcagacaaatgagccattaatgttattagagcttcaagtatgcaaatcagggtatattgttaactgtgctctctttagaatgaagaatacatgttaaaggttacttgtgcccaggcac

SEQ ID NO: 410529 - DNA, 365 bp, Homo Sapiens
  misc_feature (70)..(70): n is a, c, g, or t
  misc_feature (85)..(85): n is a, c, g, or t
  misc_feature (184)..(184): n is a, c, g, or t
  misc_feature (218)..(218): n is a, c, g, or t
  misc_feature (234)..(234): n is a, c, g, or t
  misc_feature (345)..(345): n is a, c, g, or t
cagcctggccctctctatggtctcaggcaagctcccttccttgagaagcaaggggctgagggcataattnccttccccaaatgtnagctgattgaagctgtggagtctggagaggcaatgctgaccctaaagaaggagaactattagggagaatttagacatgatggatctcttggtgcccgtnacctcacatgacaaaagcaactccctctgatgtnccctgcgggatctgtnctgtttggaggtctaaagatttcactataaaattcacctctccaccttgcctccaaatcccaggccaggatggatcctggcaaagttgaatgggacaggggaatgggaatntgggcagagacctgcaggct

SEQ ID NO: 410530 - DNA, 364 bp, Homo Sapiens
  misc_feature (49)..(49): n is a, c, g, or t
  misc_feature (114)..(114): n is a, c, g, or t
  misc_feature (165)..(165): n is a, c, g, or t
  misc_feature (194)..(194): n is a, c, g, or t
  misc_feature (214)..(214): n is a, c, g, or t
  misc_feature (232)..(232): n is a, c, g, or t
  misc_feature (239)..(239): n is a, c, g, or t
gtcactgcagatcacattatattaagtaagggacaataaataaattaancaggtttctagccacatgtttcccttcttcaaaatgattacattttactgagtccaatgtaaaangtattcattcttacaacctagatggcctattttaaatatccatattctttnccattcttattaaaatgttcatatttcancacattagagaaaggaaaangtcaatatctcgcaggangataggncgaattgaaacgtggaaccagagaactgctccagtgtaatgactgtgatgcttcacgggagcttatttcagtcacctcctttgcaatatagtgagcacaaatgctttccactgcagctgcaaatg

SEQ ID NO: 410531 - DNA, 431 bp, Homo Sapiens
  misc_feature (79)..(79): n is a, c, g, or t
  misc_feature (229)..(229): n is a, c, g, or t
  misc_feature (252)..(252): n is a, c, g, or t
  misc_feature (341)..(341): n is a, c, g, or t
  misc_feature (347)..(347): n is a, c, g, or t
  misc_feature (378)..(378): n is a, c, g, or t
gctcattcctgtggtgggtttccctcgatccccgcaccttgcatgccttcggtagattctccactggaggaagcaagtncagcacttatatccaaagcaacttacgttgccggtactagtttagatcctctcggctgtatttagcatatttccataagaatgctggttctgtcctatttcctcatgacctgagccctggtgtgtgcctggcaggtgctgtggatagcantgggacatagctggtgctccttnctggctttccagccaggcctgtctccagactgggggatcctaggtggacactggggtggagtcactactgaaggtaggaagttttgggntctttngacgggggaagctgaagcagtaaccacgttntacagcaaggtaagggagttttaggtagaggcatttctgaagggccagaagga

SEQ ID NO: 410532 - DNA, 349 bp, Homo Sapiens
  misc_feature (136)..(144): n is a, c, g, or t
  misc_feature (310)..(310): n is a, c, g, or t
  misc_feature (313)..(313): n is a, c, g, or t
ccgcaaacattcagtctatagcggagacacactgcttcataggagagcacgaggaactcctttggcagctttctgcgctatctggggacattgttctcaaaaatttgttttctatcaggccttgtctctcaagtgnnnnnnnnncctgggggttgaggagaatggagtgttctcatcagtgccatgggctgcttctgtccttctctcttctcttccacctgacacactctggtgaagcagctgctgggatagttctgttgaacccactattgggtccgggggctttggggtttcctgggaagacccaccntgntaagcaggaaagccaaccatccttgttaagggcttt

SEQ ID NO: 410533 - DNA, 240 bp, Homo Sapiens
  misc_feature (37)..(37): n is a, c, g, or t
  misc_feature (42)..(42): n is a, c, g, or t
  misc_feature (136)..(136): n is a, c, g, or t
  misc_feature (226)..(226): n is a, c, g, or t
gtgtgctccgtggggttccatggagaccaaggcacangtgcntgtcctttcaaggatctagcaggagagagaaaagcacactagtaattcagacactgggtgacaagttctccacccagtggaagcagaggatgtnatggaaaaatgtggaagagcacctgagtcttcatagaaagctttctgtgtgagcttttcaagagtgctacgtttaggtggagggaatttncactgtagatattt

SEQ ID NO: 410534 - DNA, 367 bp, Homo Sapiens
  misc_feature (39)..(39): n is a, c, g, or t
  misc_feature (52)..(52): n is a, c, g, or t
  misc_feature (69)..(69): n is a, c, g, or t
  misc_feature (84)..(84): n is a, c, g, or t
  misc_feature (101)..(101): n is a, c, g, or t
  misc_feature (117)..(117): n is a, c, g, or t
  misc_feature (124)..(167): n is a, c, g, or t
  misc_feature (172)..(172): n is a, c, g, or t
  misc_feature (184)..(184): n is a, c, g, or t
  misc_feature (190)..(190): n is a, c, g, or t
  misc_feature (195)..(195): n is a, c, g, or t
  misc_feature (199)..(267): n is a, c, g, or t
  misc_feature (308)..(308): n is a, c, g, or t
  misc_feature (319)..(319): n is a, c, g, or t
  misc_feature (322)..(322): n is a, c, g, or t
ggcggtcagaatcagccttgtttctaatgagggcggtanggccagtcgattncaatgcatgtttatttnaagaaatgctctgcnaagggggtcttggagtntggggcgggcatccanatgcttnnnnnnnnnnnnnnnnnnnnnnnnnnnnnnnnnnnnnnnnnnnntcttnatctccagtgtnacagtnttganagtnnnnnnnnnnnnnnnnnnnnnnnnnnnnnnnnnnnnnnnnnnnnnnnnnnnnnnnnnnnnnnnnnnnnnccactgtgtgaggtcacatggaaggcgccatctgtaaggantacctcttccnctntgtgaggtcacatgggaggcgccatctatgaggtacacctgttcc

SEQ ID NO: 410535 - DNA, 263 bp, Homo Sapiens
  misc_feature (154)..(154): n is a, c, g, or t
cgaaggagtgggttttgtacactgaggtgtgagtgcctggggtgagcgtgtgagtgcatgcttgttttggtgagcgacacgtttgtcacgtgtgtgccggtgtatgtctatcactgtacatgcatattggtatatgtgtgtgcaagtgaatgtntccctacgactgtatcaggctatgtgtatgttcacagctttgggtgtcacccagcatgtatgtttgtggttagcatttgtgggcatgtcactggtttgcagctaagtct

SEQ ID NO: 410536 - DNA, 409 bp, Homo Sapiens
  misc_feature (63)..(63): n is a, c, g, or t
  misc_feature (65)..(65): n is a, c, g, or t
  misc_feature (236)..(236): n is a, c, g, or t
  misc_feature (240)..(240): n is a, c, g, or t
  misc_feature (242)..(242): n is a, c, g, or t
  misc_feature (278)..(278): n is a, c, g, or t
  misc_feature (312)..(312): n is a, c, g, or t
  misc_feature (320)..(320): n is a, c, g, or t
  misc_feature (353)..(353): n is a, c, g, or t
  misc_feature (367)..(367): n is a, c, g, or t
  misc_feature (369)..(369): n is a, c, g, or t
  misc_feature (379)..(379): n is a, c, g, or t
agccggttccctgacaaccacatactcttcctccctgggtgttgcacggtgttgtggccacananagccttccccacccccatccctggctcaggccaaggtggaggggacctggggagcccaaccaaggtgtggggcggctctaacggacctgtaaatcaaaggaaacaggtggtgaagcctgaaagcaggtgcccaccttcctttccagcctcacacagagccgacggcacctncttntncttgaagccctccttggctccccagtgcccacaggntcaaggtttaggctcctacctgtagctgaccagntccttctnaatgggtcccaaccagcctgctgctgctgcctnaaacacgcaagttncncttctgccgnacaattcagcccccttactgctgggcccta

SEQ ID NO: 410537 - DNA, 104 bp, Homo Sapiens
  misc_feature (48)..(48): n is a, c, g, or t
  misc_feature (81)..(81): n is a, c, g, or t
  misc_feature (85)..(85): n is a, c, g, or t
gcatccagttgttaataggaattgaatcatcatccaaatgggaatcgnattagcatttattgaatgggatccgaatgggantccntcaaccggatggaatccga

SEQ ID NO: 410538 - DNA, 161 bp, Homo Sapiens
  misc_feature (60)..(60): n is a, c, g, or t
gatggatgatgagccccggcaatgtttaaagaatattgacttccccaaaataacaagcgncacagaggttccgcgaaccctaaagcgggataaacaaataaatctacacgcagacacaacacagggacacgacacaacaacaagtcggagcaggctcgtcc

SEQ ID NO: 410539 - DNA, 429 bp, Homo Sapiens
  misc_feature (44)..(44): n is a, c, g, or t
  misc_feature (417)..(417): n is a, c, g, or t
tagtacaatgttggaaataaaaatatgattttaagaaggtatanagaaagacttactgcaattgttggctctaaaagctgaactgcactatgttttatgcttacaacaggaaggccactgatgacttcctagggtgtggaagacccacggaagagatggctttactgagaatgttcctttatgtctgcataatggaaatgaagtttttgactacttccttttcttgctttttgctgttgtttcaaaacgctttatcttggggaattttaaaactagaaagaaaaatcagccccactcatttcacagaagaaattgtgtctcagacaggttaagcaatatatgtttaagaactaccatctagtctgggcagtgtcctgatagtacttgtatgcctttacccaaggtctgcagattttnctagtatttttt

SEQ ID NO: 410540 - DNA, 413 bp, Homo Sapiens
  misc_feature (359)..(359): n is a, c, g, or t
atggactaagcctgtttttaaccatctaactccaagtgcaacttgtgcacaacgctgaccctgagaaccctcagaaatcctcaaatttaagattacccaagatgactttatccatataaacccaaagggcagagaagaagcagaaccatccctcccatctcccagtatcttcagaatccaaggctagacccgtcttgatttgcagatgttcaatgagtagcccagtctcatacatctccttggatggctttcaaatttattgcttcatatgccaaacaatggaataatctataatccacttaatgaggtagacagtgattgttacctaatttttttcctttgctatttttaattcaganggagggattattaaaaatgattttgggacttggatgaggttctcaagggttcaa

SEQ ID NO: 410541 - DNA, 345 bp, Homo Sapiens
tgattgtgggtctgggagcaggtgggcagttcagtgaggagcagaggaaagtagacgcagtagaaatgagactggaatcaatagaacagaaaatgtactaggctttcatatggccattttaataagtggtatgctttctgaacacctgccatcctgggctataatatcacaacattataatttggtttacaaatgagtgtatcacttcaaagtgtacagaaatactctgtagcattaatgcaggggagtctttgatatttgaaaatgcctgtttactgggaagagcctgagactttccacctacactgtttgttttccttctcttcctacgtcatccacctgcat

SEQ ID NO: 410542 - DNA, 453 bp, Homo Sapiens
  misc_feature (270)..(270): n is a, c, g, or t
acaaagtatgtgcaattctcaagtttttctctacttttgctttgtgctgtggcagtgacattgaaaattgatgagattattcttgccccaaatctacctataattttgtataattattccaaattctgtgccacagaactgaatttttggggtaaatgtgtagggcttaatgactcgcagtctggatttcctatagaagaaaaccctgtatgattttaatactctttttgctctttcatcatagatttggtcacaggcttgccatatttnatttagtgagatactttcagtcccttcaaaaaatgtttatgtctgcttttttctttctagaaagagaaataaaacatcttaattttttccttagtgcacaaactattatctaaacataaataaccactgagtatgatgacggtccatccgtgggttttctactggtgtgaatttccttctctg

SEQ ID NO: 410543 - DNA, 421 bp, Homo Sapiens
  misc_feature (14)..(14): n is a, c, g, or t
agtaggggcccgantttaagtgacccagtagtgaccggaatagaggtctgagcctgaaaaggcagctgtaagggggtggaagagactgagcacatagtaggtgtggggccaggggtgatagggtggggacaggcctggagtgcctagggtagagcgcagctgcagtcgccagtggagggtcgggcctttggccggtttgaaatggagcctcgacagacagtgattaggacgcagaaccaggctaagagagcgtaaggagcctagagcgacccaggcgagaggccagggctggaggggagtttagggacggagcgatggtccgctggaccagggcctgtaaacgacttcagggaccaggcagggactcttcgacgatcaaagccagggctgaaacgacctgcgagttcctttttccgtccca

SEQ ID NO: 410544 - DNA, 478 bp, Homo Sapiens
ttacagagtgcctgccagaggaccatgctttgtggagagtatgcagtccccaccctcgacatgcagatggtctagcggggcgtaaccagttaaaagaaggtgctggagtccccatctcactcaggtgcatctcctggctccctagtcccctagtcaagagagagacacatagcaagtgccctgtgccctggcatgggtcctgcggcagggggcagatcagcatcacatctggctaaatattccatgtctcacataggcactgaggtgtaaagagaagcccctttatttcccttaataacccttcaagccccaagttactgaaactctttagattcagtgagcacagtactaggaaccaacccattgcacatggactgtgtgccaggctctgcttaagtactttgctagattatctcggtgagttttaccttaagccttgcggagtttggttgcttcttggtggccggattttcttgga

SEQ ID NO: 410545 - DNA, 398 bp, Homo Sapiens
  misc_feature (152)..(152): n is a, c, g, or t
  misc_feature (168)..(168): n is a, c, g, or t
aggcacggatttcccgcctccgtgcacatcttcaagcgaaattccttcctctaatttgatagtcacttcctttctctaagacctcagatttcaaaataagtgaagcacttgttttgagcaagagtctaaagaattagactccgccttaagcncccttgtgaccttganctgagacctcatcccctctggccgtcagtctctccatctgtgcagcagtgttgtgacatctaagcactagtcacccagcgcctgtgataagacggcaccctgagtgatacgtgacctgtgcccacaaacccaggaggagaggttccctgcgccgtaagaggaagtggccacggggaaagaggaagctgatgtgaggctgatgggggcagggttttcgattgttttcaagg

SEQ ID NO: 410546 - DNA, 305 bp, Homo Sapiens
tggaggcgacgctgaatggccctcttggccctggcacatgccagtaaggctcactggtactatggagggctgtgggatccctgtggatggccctagaactagctgccgatgggaagaaggcagcaggtcaccagccagcctgacctgtgcctgccctggaatactgtcagccaagttcaccgcaaatctgacctagagaagataagggatcttgtttccaacaaatcctgaaaaagtgaggtgcaaaatcgaagtgctaacctgacaggcaaaaggcaagggttaccaaggaagcttttacaagt

SEQ ID NO: 410547 - DNA, 347 bp, Homo Sapiens
cagataccccaaaagttagctgcagtggatgacctagggcacgtaaacaggctcttctcttcttggcaaatcttttctccctttccaggactaaaggaggaaaatctgacagggtcgtgtctacagaaaaggtgatgataggacatcccagagccagaaggggcagcctctggttaagcaaagactctgagcatgaatgatttaaccaaatagcaatcatattgtattatgactaactggtttggtcatttgtatgtagtgtgatccacaaattacctaacatgtcaactcaagttttagggtgggttgttcgatttgaagcttttaattcttttgggcagtcttag

SEQ ID NO: 410548 - DNA, 390 bp, Homo Sapiens
  misc_feature (231)..(231): n is a, c, g, or t
  misc_feature (366)..(366): n is a, c, g, or t
ccacaccagtcctacttgatgcaaaatacattccccaattcctatgccccatgggtctacccatttcacagatggctaagtcatggttacacgaacttaaggcttcacagagcaacttaaggcagcatttcccaaactgtgtactgtgagactccatttggccatttagtgagacgttaatagatagtccattaaccaagaggaaaaaagcaaagctggtgatagtttttncttccattttatattttaaaatacaaactgtagagaaacttttatatgaagggttatcttctaaagttggcacttaaggatgaaaatcatggctcatcaaaattgccttttaaaccacttaaatttgtccacaanggcatagcaaacacctcccacttt

SEQ ID NO: 410549 - DNA, 285 bp, Homo Sapiens
aatgcggtggggggaggaatggtgtcaggcctcttggggaggcttaggagagttacccacaggaagggagagcctgccaggaggagtaggtgtttgtcaggcagaccgggtgtgccaggcagaggggagccgctcatgttggggcctgcactcacagaactacagggcgtggaagggaactgcgcgaagctgggtatgatggaggcagttggctgccacccaggagtggggaaagtgaggttggcagtgggaatttcccacctctgtttaccctctgctttaagg

SEQ ID NO: 410550 - DNA, 477 bp, Homo Sapiens
  misc_feature (244)..(244): n is a, c, g, or t
  misc_feature (416)..(416): n is a, c, g, or t
  misc_feature (446)..(446): n is a, c, g, or t
gaggaaggctcagggagtgctcgttgactgaaggcgtgtattgtggctcagggcctggtgctgaatgagttctccatggctgttagctactgctgttattattattgttgttatgaaatcttccctatcttctctgtgaagtctctatggggttccctagaaaaagctaatgcctccccactgtgttctcatcacagtttgcaggtgccactagtatagctcttaccacgttgtattataactncttgtttcccccaccttgacagttgttgtagaaatgaaaataatgtatgtgaacactaagctccgtgcctggcatagaggaggagatcaataaatgtaacttcattttacttattaagattctcacttagtagacacaatttttttccaacaaatgctcatgggatatctancttgtaagtggatacttattactttccccntttcataatggagggaaaggagggcttgaag

SEQ ID NO: 410551 - DNA, 239 bp, Homo Sapiens
  misc_feature (48)..(48): n is a, c, g, or t
  misc_feature (173)..(173): n is a, c, g, or t
tcggcgtccagggaactgggaagaggaagccagcaagggaaggaaggngtgaaactcccgccgggctgggagcacggggaccctgaaatccgcactgcctcacccgggtcacgaccctggacgagcggattccactgtacagagttgggggttgcttgagacctggacctgtnctgaccccaaattcccgtccgaagctccgccgggctccagcagtttaacgtgggacctacacccgt

SEQ ID NO: 410552 - DNA, 456 bp, Homo Sapiens
  misc_feature (23)..(23): n is a, c, g, or t
  misc_feature (37)..(37): n is a, c, g, or t
  misc_feature (406)..(406): n is a, c, g, or t
aagctctgtggtgtgatccccanactggaccattttnaggtgatgggagcgcctgactcaatgctggggcagtaaatgtgcatgtttagaagtctgagtccccagctcggtcctgcaaggccagccccccaacacaggcacagtcagaaaagcaccctcccttgccgccccactgtggggtggtagcgtgagggatatgaaggacgggtcttacctggcacgccagactgcacccacccccaggcatgcagtcctgttcttctgatcaaggacctaagaggcacgtgaggcagaacaggggtgctcactgccgacccagctggccgcacgcccacgaagggagggagaagatggccctgggagacggtacctgccatctggcctccccggttcccaacccttgggntttcaacttgattcctttttgcccctggattttaaaagcagattgggttt

SEQ ID NO: 410553 - DNA, 383 bp, Homo Sapiens
taccccattggaaccctgggcctctagggaaaggaagttgaagggtgtcgtccactcagcaggtaccacatgatctttgggaaaaatttgtgttatacctgctcctggtgggataggagcctccggagctgggcagtatttggctgtagaaaactgagaagcccctgacccatcatgcatcagagcccactcccaagatgtggagctgtcagctggaagagctgggcagtggcagggggaccccgggaccctgaaggcctttcctcccttccattaaggtggacccctaccatggtgggcctcagctctaggggaaggtgggcccttaggccaggagggaacctgcacagcaagcattcttgggtagaggtggcccggaggag

SEQ ID NO: 410554 - DNA, 339 bp, Homo Sapiens
  misc_feature (70)..(70): n is a, c, g, or t
  misc_feature (144)..(144): n is a, c, g, or t
ttaacaggcatctccaggtcccacgccttgggacagaagacacatgagtagaagcacttccttctccttnctctttgtctcaaggagctccccgcctggccaacccaggactgtaaggaagaatggtaaggcctggaccttgtnagggaggaggcaggaaccagaagggctggaaaagggcacaggacaggctgacaaacatggctttcttggaggctatctcttcaagcctccaagaggagctttcttggagacagctcttctctggcctattttcatcattttctataggggcaaaggacacctgggggaactgcacaaaggcaagggagtgttttt

SEQ ID NO: 410555 - DNA, 479 bp, Homo Sapiens
  misc_feature (316)..(316): n is a, c, g, or t
  misc_feature (425)..(425): n is a, c, g, or t
gtcatagactagtaagtggcaagcccgattcaaatccccgcaatctgactccagaagccagcaggggttccgcagatgttggctgaatgaatcactgaattaatgaatgtgtgctcagccacccacacacactggggaaaaactgagctgcgcttaaccagctagttggctgttgtctttcaaatgctctagaatatcattaataccttcaggggtcacaatatcctaaggttaaaaaagggacattttgacaacataaggagctttctttggctccaaattcccccaccaatggagaggtcttcctcaagggggngcctcaagcacctccttggataaggctccccaaggtctcccgtgtcccaggctttctgtcacccatgggagttgtccagagaggctgggccttgctgcgagccactccncagccactggcttcacaacctacttacagccgattgggaacctgtaggcactgt

SEQ ID NO: 410556 - DNA, 345 bp, Homo Sapiens
  misc_feature (28)..(28): n is a, c, g, or t
gtgtttgaggattcctggcttggacttntgggtcccaggatcagcctcattattcggcaggaagttacaagagagtgggctgaactcccagcaggggcctctaaaggcctcagccgctcctttgaacaagagccaagaccctccacaaagagaagtcccacaccctgtccagcctctgtccctcctcctcttccattagatgtaaagccaccccccatccccgctccaccacgtggcctcatcatttctttcttagcatctcccatcttcctttcagccagtgtaatttgggaaaatgtggacctgtaggggttttggcagaaaacctttggattgaatcttctt

SEQ ID NO: 410557 - DNA, 284 bp, Homo Sapiens
  misc_feature (67)..(67): n is a, c, g, or t
  misc_feature (133)..(133): n is a, c, g, or t
  misc_feature (235)..(235): n is a, c, g, or t
ggtgggatgtggccgaccgtctcccacggtgggacagcaacaacacaaatgtcatttactttacatnccaaagtggcgcctttattgcgagctgacagaatgccgctggggcaattcccgaaaattatttaancaatgtaatgagttaaatgtcagccctggctaattatgtttatgctaattgttaattagccctataatgcagacagtcttaattaacaatgggtcgtgagtntgggtgggggctctggtgagctgacacagactgtgtgggctcggaacgg

SEQ ID NO: 410558 - DNA, 333 bp, Homo Sapiens
  misc_feature (45)..(45): n is a, c, g, or t
ggcacgagcaacaattatccttgtacacagttcttatagattgtnaaccttattgaattgagtttgtgaactttagttaatggagttttctaaactcgggagtaggattgctgaattaaaggatttaagtcgctttttaaaatatttaaatcagtgttgctgccttgtcttttgaaatgctggagtatcttgcatttaattggacatattagtagatccatttcataatggcagaaactgaggtttcggtgggtcacccttttagttaagtaggaaagtcaggccgggggacccaaaagcccctgggacctgatacttcaactggggaacctg

SEQ ID NO: 410559 - DNA, 257 bp, Homo Sapiens
gcgacagagtcacgaagggccggaaggacgtcagcatggccttgcatcaggttcaggctgggagccccgggctggggcgcacacatagggcagccggggaaaggccagagcaggtggagccaagatcacactgcggactggagcctcaaccctgccccagaaccaaacactcattggagatggaaatccgtgttttctaattcacggaggatggctggtgaaaggcgagatgagcgcttgccgaaccacagggccag

SEQ ID NO: 410560 - DNA, 292 bp, Homo Sapiens
ctggattttaatatttctggcctaataaccaaatgtaatcaataaaatttggtcaatatctccacctcatttctgctaacatgttttgcaagattccctaagtaaggtattgacgactgagactagtccggcaaagtcatgagacccttagctgatctcataaagtccacctcatgaaggagatgattcaacatctcaagctaaggtataaagtgtggacatacaaaggcttacaagttttacacttcctgtacatgttacatgttactccatacaatcttcattaccatat

SEQ ID NO: 410561 - DNA, 317 bp, Homo Sapiens
  misc_feature (306)..(306): n is a, c, g, or t
ctgattcaaaagctcaaaaagcagcgtctaccccttaccgggcattggtagcagcccccttactcccttaaacacctgacctggtacctacctattctacggacgaaaaagactttttccatgcaggagggaggtaagtaataaaaggaggatggatcagactgccagatgggagagtagctgtgccgcagttgctgggagccacattcatattggccatgcacgaaaccacttatctaggtcaagagtcacttgaaaattgttaggccagtacttctacatctaacacttgccgcccttgccaangcagttgcaca

SEQ ID NO: 410562 - DNA, 421 bp, Homo Sapiens
agctgagcgagacaagcggagggcacggcaaccaatgccggctgccacagcgcccccggtaggcttgaatgagtggcgtccgtcccgtggccctcagggctgaaccgcagctgccttcaacaaagattaagcggctctgcgatagtcgctgcatatacgaggaaggaggcgacagggcccagctgtcacacagcttggtgaagaagccaggagacataaacacaagagtgcaacgaaaaactttatatgataaacatttatgtcgggttagtggagcgcgaaggaagaaggatctcttgtgggtggggaggagactcacagaagcgggtgcaagctcaacaggttaggcaaggaagggcagaaccacgtaggccccattttagatcttcagtgtattgtcagatgacttgtgtttagggag

SEQ ID NO: 410563 - DNA, 303 bp, Homo Sapiens
  misc_feature (237)..(237): n is a, c, g, or t
gatcttgaaagtctttaaatctatttgtagcttttaattattgagtaacgaagtgctactgatatactggaaccaatctgcaaaacacatattgaatgaagcataattaaaggatagtatatcccccaaagactgaagagaaaggtgcaaaatgaatttatggaaagtaaacttttaattatttgccatgaccaagaagcagagttttctggttaatcaatatagtttttaataganttgccatgtatgagatatacaaatgaccagtttttaacataaagaatatattctgccttaacacta

SEQ ID NO: 410564 - DNA, 423 bp, Homo Sapiens
gttccagttgatttcgctggaaggttctagtggactgaaacacaatagcctcaggaatggagagttattttcaaatagttctctataaatcataggtgttagatagaaagaaagattagtaagaagatggggcatatgaaaaattaaaattaacacagtatctctcagattaaccttgaaaggtcccaggacaaataatgtatgtcttattcacacctgatcctttcctgggtactacttaactctggctgctccataacctggtaaatttcaggatccacttatcaattaaacagccttgtagttttccttgagttttcctctcagcactttcaagtggaataacagttaaaatgcaaattttctttaataggtcaaaaaggtcactgtttggttttttcaaaaatataaataggtcacccg

SEQ ID NO: 410565 - DNA, 222 bp, Homo Sapiens
  misc_feature (99)..(99): n is a, c, g, or t
tgggggcttctacacggaaactcagtgctgtcactccggctcctggctgggtccaggggaatgcccctctctcctcgcagcttgcagggaactcctggnatcctgcattccctgggaacttcaggtgtctaggaaggctccgtcatgccaggccagttgtgacctagggaggatcttgcagctttgcttttcaagccaaatccatttccacaacgttctact

SEQ ID NO: 410566 - DNA, 197 bp, Homo Sapiens
  misc_feature (114)..(114): n is a, c, g, or t
  misc_feature (177)..(177): n is a, c, g, or t
tgctagttagcagcacactggatatagagattccgcatgttatgcaatagagcgacttacgaaactagttgtgtcttaacagaaacacatttttaaaggcctaacaggagcttncttggtgaagaatttctatagtcgccacttgtagaatagttatgaaacccaccctctttcttntcttccgtaaaattggattt

SEQ ID NO: 410567 - DNA, 179 bp, Homo Sapiens
  misc_feature (153)..(153): n is a, c, g, or t
tcaggtcatgttgcagctctgcccaaagccaagtcactcagagtaatgactaaatccttactaacccagcacggctgggatattcctagtttatatctgtggtcccagcataattttaacagtgaccacttagccccatttggcttacaaatnatgtggtcaccctacctcctgatacc

SEQ ID NO: 410568 - DNA, 289 bp, Homo Sapiens
  misc_feature (51)..(51): n is a, c, g, or t
  misc_feature (128)..(128): n is a, c, g, or t
  misc_feature (268)..(268): n is a, c, g, or t
tttcctcctctgtacaacgggaataatcgcagcaccgtcctcagggttgtnatgctgactttgggagttcacatgtttagaaagctcttggacagggcctggtacttaggtcacgatcaatacctgtnagctgtcattatttatgggatgaaggcgtgaatcgcagtcttcagctgtcttagcaattcttttggatacgaatttttagtccctgcttggcagagtataatccggaggcttaactcaccttccacgactcttctctcgncgaggctgcccagggaaaatg

SEQ ID NO: 410569 - DNA, 399 bp, Homo Sapiens
  misc_feature (380)..(380): n is a, c, g, or t
ggtctcacgacatatgtagatgcattacttacaacaactgttattaagggatgggggtggttctgggggctataatgaagccagatgtccatactttatgtgaagggcctatgattaactgtaaatggactgtgaaaagttaaggatgtatgatggaatcctagcacaaccactgtcaaaaataatgcaaagaatagctaaactgctgacagaaaaattaaaactaaatgcattctaagaaaaagtattcaagtcattttaaaagatggggaaggaggaacagatgaacaaaaaccagaggagtcaggcagaaaaccaaaaattaaaattgctagagggaaacccagctaaatcaaggatttccattaaacatcaattgnccacttcaagtaaaaggaa

SEQ ID NO: 410570 - DNA, 354 bp, Homo Sapiens
gaatcagaaacacacggccgagcagcccagtgccacgccaccagtccacaggcgctcacccgcagccaccaccagagcagacccagacagcagggacctgccgggcgctcctccctccacccgcaccatccctgctggggacgtccatctgtgttcccaccaccctgccaggctcactggctatccaggcccggaggctcctgcctgtgcacccagctctccaggttaaggtgcgcctgccaagcagggagctgctctccaggagagtgtcccctcctcagtccgaacctgtggcctggaggagcttggcctccctgaggtccacatctgtagagctcagggggctttgtcaac

SEQ ID NO: 410571 - DNA, 347 bp, Homo Sapiens
  misc_feature (210)..(210): n is a, c, g, or t
  misc_feature (323)..(323): n is a, c, g, or t
  misc_feature (335)..(335): n is a, c, g, or t
actgaagtctcacagacgacatatgccagtgtcaggctccatctcccagccaggggccagccctgttttaaatttcctttcctggagctgcataaataaataaccacacgagtgtgtggaacggatcctccctgagttggattcctaaccccagctggtctgctcctcaggtgccaagatctgaataattaagaggagagaaaacctgtnactcctctaatctgccatttgcaggagaacagaggtccctcctagaagacaattctttcacaattaattgaattgcgttgatttgtgattttgtaccagccccttgcttaagntccaagcttcanaacaacttaaag

SEQ ID NO: 410572 - DNA, 332 bp, Homo Sapiens
  misc_feature (262)..(262): n is a, c, g, or t
ggactacaggaagttggatcaggctgcttctccccaggctgttgcagaggcacttaagggtttctcctgtattagccccgacgccctcttgggtcctccctccagtctctccccgactctctcaaagccctagaggccggatgatgtggcatgttgaccttaatcacctagtttgttttcctgtctctcctgtcctgctgagtgtcctacatcttagggcacagccacagcccttcataaaaaatatgcagtcactgccccnaggacacaggaggccattaaagtaaggaggtcaagtgtccagctgtaagttgggacatgtcacatttcag

SEQ ID NO: 410573 - DNA, 370 bp, Homo Sapiens
  misc_feature (144)..(144): n is a, c, g, or t
  misc_feature (261)..(261): n is a, c, g, or t
  misc_feature (323)..(323): n is a, c, g, or t
  misc_feature (354)..(354): n is a, c, g, or t
tgaccgctgaactttttagttgaaaatttaccagatacgaacagggagtttttgtactgggtgtttatttcctggaccatgggtactgccggtcggggatgggaagaggatgacaaagcagcaaacaaaaagattttccagccngccacctgccgaggactccagcgaaagcttgagttgctgaggattactgagaggccgggggctgccatcggagctagcagccggagggcagagagagtggagtgctcagtgcagcgngcggaggctgggaagagctgtcccgggctgttttaaggagcagctgctaagatttcagcggnctctttccctgggcttgaaagggccacaggnattggaaaaaccgggc

SEQ ID NO: 410574 - DNA, 474 bp, Homo Sapiens
  misc_feature (78)..(78): n is a, c, g, or t
  misc_feature (297)..(415): n is a, c, g, or t
agttcaggctgcaggggcggggggaggaggcgcgagtccaggcgggcggctgcctcctcatcaggatggattttcctncttctttgcttgtaggaagagcaggaacaggatacgggaggctgctcaaggagtaatcactgtgccggggtgagggcatgtcaggggctggctttgtgatggagggaagagaaagggagggggggttagggcagagaagcctcagggaaggctgagaccttgggggacctcagagaaagtggaaccaggggttcctccagctgtatgtatgtgccatannnnnnnnnnnnnnnnnnnnnnnnnnnnnnnnnnnnnnnnnnnnnnnnnnnnnnnnnnnnnnnnnnnnnnnnnnnnnnnnnnnnnnnnnnnnnnnnnnnnnnnnnnnnnnnnnnnnnnngtttaatttcatctgtcaaccaaccaatccaaccaccaaacccatttttccttacagtg

SEQ ID NO: 410575 - DNA, 272 bp, Homo Sapiens
  misc_feature (99)..(99): n is a, c, g, or t
ttaatgattgactgagacagggtctcactgtgtcacccaggttggagtgtagtggcacaatcttggttcactgcagtcgcgacctccctggctaaagcnatcctcccacctcagcctccaaagtagctgggaccacaggtgtgcaccaccatgcctggctaattttttgtagagatggggtcttgccatgtttgcccaggctggttttcaaactcctggagtcaagcaattcggaagttttagccttccaaagtgctgggattaattgatgt

SEQ ID NO: 410576 - DNA, 386 bp, Homo Sapiens
  misc_feature (162)..(162): n is a, c, g, or t
aagaagggggccaaagagcccagggagctgaaccttcatgcattgcccttagagttttccagggctgtgggagaaagctgcttgagactacccctgaggctgcctgatttcaagggctactaagggtgggggtgtgcactagtgcccttggtaccacttggnccccattcccaagctgctcaatccttaggaagaaaagctttaggaagtctgggaagggagcaggactggggctcagtgttgagtggtgatgacctgcactcagggtgcctgggccaggacctggcaggcatggcccttaattacagcaggctgtctaactaagcacagggctgtggggccgggcagctcttccgagtgccacaaggagtcaaagcattctgcct

SEQ ID NO: 410577 - DNA, 287 bp, Homo Sapiens
  misc_feature (189)..(189): n is a, c, g, or t
  misc_feature (230)..(230): n is a, c, g, or t
  misc_feature (244)..(244): n is a, c, g, or t
ggtgggttgatttaagatgggaccatttaggccaatagaagagtagtgattggagaaattggagaagaaaaaaatggttaaaatactcattttggaggtaaaattgagacagatcatgaaggctatgagtatggaagctcagataattctcctaacctactgcacaattgcatatgcctatcacataantcatattaatattcttactctaagctttgcatctagatctnatctgctttccttnataatctacatgaacctccatgcttttctccattaggtgtcag

SEQ ID NO: 410578 - DNA, 495 bp, Homo Sapiens
  misc_feature (206)..(206): n is a, c, g, or t
agccaggctcctccaaggctggtcttgaggcacttctctagtagcttctccaaaagactgagagtcccggcgtaggtatgacagtaagggtacctcaaggacccttctccaaagtctggcgggccttggggttttccggggccaccaggctcggtggaatttttaaaacgctttcgaaatacatagtttcctctgtggagtgagtncctacaacgcgcaggccggactgatcccccgttgctgcaggttggtgccccaagctgcgggtgctcgggcgccaactaaagccagctctgtccagacgcggaaagaaaaatgggctgtgaaaaagcaaaaggcctcgtcttttgaatgaaagttaaaccattaaaatctgaccctagagttttctaaagatcgcggaatttttgaagctccggagagcggactaaaaaacggtgctatggagattgttgagattcctttaggcattgacgtgtgcgtgtttgttttttt

SEQ ID NO: 410579 - DNA, 290 bp, Homo Sapiens
  misc_feature (225)..(225): n is a, c, g, or t
gcgcgcacggcgggaactacttcggtgagctcgtcggcccggcagttccctgcgcgcatggctggggtccggggttccgagactgcctcgggtaggcggccggatcagcggaggagagcacggggctggctgggggtgcagcagtgcacggggttgggacgaggaaggtgcatccctcggggactggggagcgcaaagggtgagtaagtgcgcctggatccccancagcggcttcaccccttcctatagattccccgacacacgaggagttctggcccgagtgagttgat

SEQ ID NO: 410580 - DNA, 155 bp, Homo Sapiens
aaacctggccctagttctagactatggaacctgtgcctagtcttgtttgactggatgagtgattaacaggagttgctttttagcccatctctgatggtggaacaatctgatccctgtttcctctcttttagtgaaagtcgtaacttagataatta

SEQ ID NO: 410581 - DNA, 357 bp, Homo Sapiens
aaggtcacagctgcaagactcggccccacaaacagtgaaaacgagcgagaggtaaacgaagatagggggtagcagcctaaataggtgaagtatgactaggcactctcttagatactataaaggaagttatgagaaatggagaatcggagttaaaagtgctgaaatttcaattaactacgatgtaccataacgagacaaatagggtcgagagtatatttgcatctttgtctagtgagctatatttttctgaaaatcttcttttcagtagggatctcagttaaggtgaaagtcccttcgtagtgatgagattacgggaaaaaggccctccatttttggccattccttttttaaaaggtt

SEQ ID NO: 410582 - DNA, 345 bp, Homo Sapiens
  misc_feature (19)..(19): n is a, c, g, or t
  misc_feature (225)..(225): n is a, c, g, or t
gatagagcacacaccagtnatatgcatagccagacctagggtctatgccattgagttgtaaaaggtgggttatgggatgttagcaaggactagatgatggacaccctttgtttgactttgtggcaggcctgtaagcaggctgctcagttctccctccaaaaaatagcctgctgcaaagactattaactcactgagagccactgactgtaacactttttgattctnatggagttcgtactctcccggacatgctcccagccaatgtctggcatagtggggggtatcagagctgggccattgctacttcacataggacttctttaacaggaaatgttttgcctgagg

SEQ ID NO: 410583 - DNA, 490 bp, Homo Sapiens
  misc_feature (104)..(104): n is a, c, g, or t
  misc_feature (448)..(448): n is a, c, g, or t
aaaacttggacctttggcaaaagagagattacgggagggggcagggatgcagcgtcaaatcaaagaatgtctggatgaaagtcagccagtactaaacaacattnctgaagaatctaatgatgtgtgttttagttgcagagaaggctgagtagcagtttgggacatctattacttattttccttattgtgccataaaacatataaacttctaataaaaatcattctgaataatttctaattaagttggggcagaaaaagagtgtgagacttaaatgtagatctttatatcttgggaatgacatattttcacacccacaagatggacttgagtgatttacgctaccctcctaggttatagaattcctataactgttggctcatcaggtgagagagggaattatgaccaagggtttctgttttgagcccttagggaaggcttacaaaaggngggcaaagctacccttggggttaccagtttgccaggtttttt

SEQ ID NO: 410584 - DNA, 373 bp, Homo Sapiens
  misc_feature (27)..(27): n is a, c, g, or t
  misc_feature (310)..(310): n is a, c, g, or t
agaatcacccaactcacaggtagtttnatggcacacatccatggcttggctcagctttaaaaaagtgttacccaagattccttctatgaaacaaagtcccagcaaagccaatttaaaagcctatgtaaaaaataattactcttgctgcactgtatacaaacaattaggccaagtggaataaagcaagacaattctaccatgatttgtctttagcaaaaataggaaactggagagataaaacttatgtttccaaaattatagtacacctattgttaggattctcatcttgcctaatgtttttcaatttttnctattttctacaaatttggggcttaaattgtaaattttttccttgggctaccaggtcttcaaa

SEQ ID NO: 410585 - DNA, 361 bp, Homo Sapiens
  misc_feature (23)..(23): n is a, c, g, or t
  misc_feature (59)..(59): n is a, c, g, or t
  misc_feature (87)..(87): n is a, c, g, or t
  misc_feature (107)..(107): n is a, c, g, or t
  misc_feature (127)..(127): n is a, c, g, or t
gaagcttcagggcatcatggcangagcttggcctgtggagggctgagcgtgggtctccntttaaccccagctcctcctgggggagtnactgcagccaagtgcctcgnaattcctcttgatgtgaggnttgggacctccatcccccaggagttttggggatggggaagttgggtgagatattctaagtgaacgcactctgaatgtcagctatcacttttttctcagcaggtcaagtggaagtttgttttcatttcagttaaggtacgagttgttctgactgctgtgcagacattcacacggccgctgctagaaagctggagctggaagggagcatcgggggcccgctgagtcctcctattct

SEQ ID NO: 410586 - DNA, 500 bp, Homo Sapiens
  misc_feature (170)..(170): n is a, c, g, or t
gtgcacctggattcccagacagggccatcggaggccaggcaaggaccattgctggaatgtaatggatccagaggggcagctgcggtctttcccagcccttaggagccctgaaaacactcgtggccatgtggacgactgaaaggtgtgcacacctcactcgctggcctganagggaagatgagagagcagcagtttctggatgcaacagccccagaggcctccccaggtcccatctctcccactctcgggtccgactactggcgagtcactccaacaggctgacttcctgggcccagggcggccagcagatgctgagatctgcaaggcaggtggaggtggcagggggaaggaaggcccgggaaagagggcagcagggcgggacggcttgggaaggggacttggcaaggtggggggcttaaaaccacggtcttcttggagttaaccaccttgaatcttaacagctttaatttaaaattttcctttccagggggaaatttgtt

SEQ ID NO: 410587 - DNA, 364 bp, Homo Sapiens
  misc_feature (71)..(151): n is a, c, g, or t
  misc_feature (170)..(170): n is a, c, g, or t
taacgcccacctccactgctgactaccatgagacccccacacattcctgaccctccttaagggttcccctnnnnnnnnnnnnnnnnnnnnnnnnnnnnnnnnnnnnnnnnnnnnnnnnnnnnnnnnnnnnnnnnnnnnnnnnnnnnnnnnntaagcgtacagtgaatgtnagttgctgtcattatcatcacagttacatttaatattctgaacattaaacaccacgagcctctatacaaagctcatatttccaggccacaattcaggatcatttttgtctttcactccttgctacagctgcccacgagtgattccaggcagggccatgacggctgctggggtgggcggtgccagcccttttccc

SEQ ID NO: 410588 - DNA, 417 bp, Homo Sapiens
  misc_feature (49)..(49): n is a, c, g, or t
agcatcgattagtgctgggggcaggagttggcataaatcggggcttctnttggctctaatggggatcaggagcaagcttcaagctcagaacctctaacagagccccagagccactcaggggaaccgtgggaccctgaggagggttgagcagtctggggtcccactgtccatcagtccatcagtccatcaggcactcagccaataaactctgagtgctcatgattgtgctgggcacggggccccctggctggccctggataccccggaacctttcctaggaagagaaggctgagagcagagccacttgggggccgggtcccggttgtttctgctgtgtcgggcttcaagcttggggaaggcgtcttgtgggttggggttcaattttgcccttttccaaggtccagggtttaaaccctt

SEQ ID NO: 410589 - DNA, 296 bp, Homo Sapiens
  misc_feature (29)..(29): n is a, c, g, or t
  misc_feature (200)..(200): n is a, c, g, or t
  misc_feature (206)..(206): n is a, c, g, or t
  misc_feature (249)..(249): n is a, c, g, or t
  misc_feature (256)..(256): n is a, c, g, or t
ctgggagtggaacgtcttccctgcctttngtgtgattaattacatttccctctagtggcaggaagaatggcaactcgaaggcgtggctccaccaaaagaatcctctcaggcaccctaaggaataggtaatacctcatgtaccccaggaacgactagaagctgtagggtgagtaaagagctgcagagcccagctaatggtncccctncttaccctggccccaatatcagggaagaaatatgaaagttttntagcaantaaaaggacctgaaggtgactaagaccccctaaaggcaag

SEQ ID NO: 410590 - DNA, 273 bp, Homo Sapiens
  misc_feature (19)..(19): n is a, c, g, or t
  misc_feature (182)..(182): n is a, c, g, or t
  misc_feature (208)..(208): n is a, c, g, or t
taagcccccacaccttgtnagttgctacgaattttgccacaagtaaaggatcatcaggggaacagagaaataagaatggcagaaatgcaaatccctgatcaggctacaaatgagatgtccacttcatggataaacgtttcattctaaccatgaagctaattctaagcagttcttccactgantaatttgaaagaaaaatctaactgtntcattttgtccccaatttttatgactggctttatgtcaaatcctggccagcataatctctacttt

SEQ ID NO: 410591 - DNA, 322 bp, Homo Sapiens
  misc_feature (71)..(71): n is a, c, g, or t
  misc_feature (78)..(78): n is a, c, g, or t
  misc_feature (117)..(117): n is a, c, g, or t
  misc_feature (149)..(149): n is a, c, g, or t
  misc_feature (167)..(167): n is a, c, g, or t
  misc_feature (170)..(170): n is a, c, g, or t
  misc_feature (175)..(175): n is a, c, g, or t
  misc_feature (309)..(309): n is a, c, g, or t
cgaaatcctgcaggagagggaggaaggcatgatgggagtaaccggcctcgggtctccttaggcttgtaganccctctnctccccaaatggctataaggcacccctccaggctcccantctccatggctccctcccagggttgcccctgncccttgggtgctcacctnttntcctnctaacttggttaccaggggatgggtctccatgttttctaaggtagggcagggtccccacagggcccagactgggaagtacagagggaggattccaacaacatgcaacagttagggttgagctttttcccaactnagtggcaacatcc

SEQ ID NO: 410592 - DNA, 379 bp, Homo Sapiens
tgtgtctcttggcgctcaagcaaccctcccacctcacgcctcttgagtagctggaaccacatggcacatgccaccaagcccagctaatgttttaattttttgtatagagagggtctcattatgttgcccaagttggtctcgaactcctgtagcgggacatatttggatcattatgattttgtaaaacatattctattttaattgcagataaatcatagtaaatgaaataaaataacttgctggttttggagatattttccaattaaaaatgacattacgtactaataatttttaggaagtcaagcaatgttgtggcctttttgaaaaagttactttaaaaaggaattatttcaaaaaatattgggtattgcaattaggt

SEQ ID NO: 410593 - DNA, 312 bp, Homo Sapiens
  misc_feature (276)..(276): n is a, c, g, or t
atgcccgctctcatagacggtgcagagcgtcactgcattcctatctgattaatgtgaccttagtgttgtagatacactgtgtcactttcatcctccctcctccccacaaaagatgccacgagaactcgtgaactgtgataagcaatgaacagaataactgttgaagaagcacctcatgaacctccccagagaaacgggatggaggagcacccagggtctcttgctctcttgcctgcgctgccatttcctgtacagcctgggttttctagctctttnggggagattccccgttttttttggaatggttttctt

SEQ ID NO: 410594 - DNA, 139 bp, Homo Sapiens
  misc_feature (33)..(33): n is a, c, g, or t
  misc_feature (122)..(122): n is a, c, g, or t
catgtccactgcactggggagctaaggaaaatntgtaggtctttaacacgtagggaaaggaatacaagaatatccggaaagtaaagtaagatgatggttcactctaccctaacccatttcanaatttattttagattca

SEQ ID NO: 410595 - DNA, 443 bp, Homo Sapiens
  misc_feature (58)..(58): n is a, c, g, or t
  misc_feature (250)..(250): n is a, c, g, or t
  misc_feature (272)..(272): n is a, c, g, or t
  misc_feature (286)..(286): n is a, c, g, or t
  misc_feature (299)..(299): n is a, c, g, or t
  misc_feature (362)..(362): n is a, c, g, or t
  misc_feature (370)..(371): n is a, c, g, or t
  misc_feature (378)..(378): n is a, c, g, or t
  misc_feature (390)..(390): n is a, c, g, or t
  misc_feature (402)..(402): n is a, c, g, or t
  misc_feature (433)..(433): n is a, c, g, or t
aggcaatctcccctacccacgatgggaaacccgagaaatagacaggggaaatggagtnaagctccggagtgtgggactcacaaaaaatggaggggaagttggcgattaggagaaaggaaaaatgtgcccgtttctgatgaaaacacatcttttgagaaaaaccacaaaaacggtaacgacccttcccgaagtgtaaggtgggggatggtgtggccccttgtgcacgggttatttcttctgcaaagattgnaatcgcgatcatatctctctcngttttctctgtctntgtcccctccccntcaaaatcgaaggtttaagctgttccacgggtcgccagtaaagataatgaaaggaaattcaangcttgggnncaggggnaaaacggaaagntaggcttccaangtctttaagggtctctggcgtttttcttctnttcaaagtca

SEQ ID NO: 410596 - DNA, 325 bp, Homo Sapiens
  misc_feature (275)..(277): n is a, c, g, or t
gtgcccgaaccttggctgcctcactcgagccagcagatgccttcctgagaacaggcggcacccaggggccaaccacgcttggctctgacgtctctgtcctgcagactgtccccgcttccccacgcacctcctcccagctctgtggacgcctctttctaaaagagacgcactatccccttaccctggagaagcctgcagccctttggtgaggcgggggcattctccgactggattgcccttccaatccagtgtcaactgtggcgacagccgattannncattggaagtaaaccctcttgaataaacggctatccttaccaggtttg

SEQ ID NO: 410597 - DNA, 279 bp, Homo Sapiens
  misc_feature (15)..(15): n is a, c, g, or t
  misc_feature (82)..(82): n is a, c, g, or t
  misc_feature (131)..(131): n is a, c, g, or t
tgtcacagtggtgtnaatgggcgtgcatgtaatgaaaggcagtgtgctgtgtgccctccacgtgtgaaggtgtgtccctgtntgtaagtcctggtatgaacatgtgtgtgtaccctgtgctcatgcaagtntgcatcgtgtgtatgctggaagcagtgtgtgcgcgcacgaatactctgggcaatccactcctcgggtgtggtgttgtgtaaacagtggatggtctcagatgccagtccctggggacactgggaccccgaccccaggtttggctggccc

SEQ ID NO: 410598 - DNA, 211 bp, Homo Sapiens
taaatgcagaaggcataaaagcatctgaaaacacctttcccccaacacttagtgaaatggatttacgctataatcatcaatagctgctaaacccattagaaacactgatggcaattgtgtgacggattggccatatttcttgttctccatctgctcaatttcacactcaaatacaagtcgactagcacgacattctgtctcctacattgtc

SEQ ID NO: 410599 - DNA, 225 bp, Homo Sapiens
  misc_feature (24)..(24): n is a, c, g, or t
  misc_feature (33)..(33): n is a, c, g, or t
  misc_feature (43)..(43): n is a, c, g, or t
  misc_feature (56)..(56): n is a, c, g, or t
  misc_feature (179)..(179): n is a, c, g, or t
  misc_feature (183)..(183): n is a, c, g, or t
  misc_feature (185)..(185): n is a, c, g, or t
cacaccataaacagcgccgaatgnatactcagnacacaatttngctaatgcatgtnattaaaattaggagtgagtggtggccaaggttccctctaaatgcctgccctgtgatgcagtcaatcccccggggcccaggctatgacgtggacacacctcaattcttccatgacccccacccngcangncgaggtttgcctcatttacgcagatggcagggcaaggttt

SEQ ID NO: 410600 - DNA, 229 bp, Homo Sapiens
  misc_feature (26)..(26): n is a, c, g, or t
  misc_feature (46)..(46): n is a, c, g, or t
  misc_feature (57)..(57): n is a, c, g, or t
  misc_feature (106)..(106): n is a, c, g, or t
  misc_feature (121)..(121): n is a, c, g, or t
  misc_feature (172)..(173): n is a, c, g, or t
  misc_feature (192)..(192): n is a, c, g, or t
ttggttcttaggcagcaaggcagatntttctgggctggtgtatggngccggactcgnctaccttagaacatgccttgaaaaggtctgggggagccctttgcaactncaaactttgtctctncctcatacccacagaaaaggggccctaagctgtgtgctgtggcaatactgnntgttcagtccagcagcttnaaaagtcagagcctggaccatcagtcattccccaagg

SEQ ID NO: 410601 - DNA, 231 bp, Homo Sapiens
  misc_feature (168)..(168): n is a, c, g, or t
gctgctgcctttgtaatttgtatcagagatctgtgcctcataatacatataaactaatgtggaattatgttcatacccttcctctaatccaacgagagagctaaaacgcgataggatatatcaaactgagagggaactcaagccctctaccatgtttcctcgcccttnctgatactcacataggcctgcattagagagagagacgcaacgactcaggattccttcaggtaa

SEQ ID NO: 410602 - DNA, 223 bp, Homo Sapiens
tgttagacggtgttgccggagccagtaccagatcgaggaataccgtaacgtaacccagacccagcgtggtgttaccgattttcccaatcagcagataggcaatacgtttacctaaaccggtggtcacaaatccggcgcttaaggtaaacgccgagaacaccagcaggtggtacctgaagagtaaccgcttaatacggctggttgtttttaaactgtagtcttt

SEQ ID NO: 410603 - DNA, 300 bp, Homo Sapiens
  misc_feature (65)..(65): n is a, c, g, or t
  misc_feature (104)..(104): n is a, c, g, or t
  misc_feature (158)..(158): n is a, c, g, or t
  misc_feature (160)..(160): n is a, c, g, or t
  misc_feature (162)..(162): n is a, c, g, or t
catgccatctgggagtcttgggatcaggctgccctgcctgcccccaccagtgcccatgtttcgcnatctggggacttgaggataggtctgccccacccaatgtnaccactgccagtgctccaccatgccatccaggagtatgggggtcaatcctcctntntnactacagccagcacctgcatacaccattggggagcttaatgacagccctgccttgtctgccactgtcaatactcatgcatgttaccaggggagtggggattaatctgtccttcccaccactacaacaaggactgaagg

SEQ ID NO: 410604 - DNA, 467 bp, Homo Sapiens
  misc_feature (39)..(39): n is a, c, g, or t
  misc_feature (173)..(173): n is a, c, g, or t
  misc_feature (208)..(256): n is a, c, g, or t
gcctcctattgggccagggcacctaacctcaagactttnccctgtctcatcaatgtctccccctccaaagcatgagacaccacttcacttggagctcatcttcaaaactttgtcacccatcccccccaatttgtttgctagtaaaaagattgggggggtgggctgtctctttncctctccatcgcctcctcccaatcatcgccagtgnnnnnnnnnnnnnnnnnnnnnnnnnnnnnnnnnnnnnnnnnnnnnnnnngagagctgatgcagttaattggagcgtcttgaaagtgcacattaacacacagagagccaaggagacgtcttggcagcgaaatatcattatcacttcttgagcttcagccaaaatcccctcgcggtcaaaacacaattctttaaacttaaacaattaaaggtttgtgcaagtgtggctgccatggggtatcaggtgggagcggctgcccttc

SEQ ID NO: 410605 - DNA, 449 bp, Homo Sapiens
  misc_feature (131)..(131): n is a, c, g, or t
ttccaacaatgttcctcactttccaccatgagactacctcacgcttgcactttatcatgcaaatcgctatcagcattttgggaaaagccatttaacaagtctctaggagattccaaatttcttcacatttnctgtcttcttttgagtcctccaaactgttccaactcctgcctgttacccagttccaaagtttctcctacatttttgggtatctttttagcagcaccccactctactggcaccagtttactgtattagtttgttttcacactgctgataaagacatacctgagaactaagcaatttttaaaaaaagaaacaggtttattggacttacagtaccacgtggctggggaggcctcacaatcatggcagaagggtgaaaggcatgttctcacatggcagcagacaaggttaaggaggacctttgtgcaggggaaacttcccct

SEQ ID NO: 410606 - DNA, 216 bp, Homo Sapiens
  misc_feature (155)..(155): n is a, c, g, or t
gggatgtggctgagattgtgggttaaatcacacagagtgtgaggaagtacaaggagtttggtaatgttatggggacacggtggtgctcagtctcatttactttgtggagcatactaatgagtctgaagggagacactagacatgtccctcctgtnctttgccaattgcattctacatcaccaggacacaaaatagctctttaatgtcccgggctat

SEQ ID NO: 410607 - DNA, 400 bp, Homo Sapiens
  misc_feature (64)..(90): n is a, c, g, or t
  misc_feature (317)..(317): n is a, c, g, or t
cgatgggatggaaaatgtccactgtctttttcctattagactgacctatgaatatatctcagannnnnnnnnnnnnnnnnnnnnnnnnnnaatgtcaagacaacttagtaaagctccatctagagttttaacttaatggctgtcagaatcagccttgataattgcttcttttgggttatctgcatgtcttctttccatcggtaacaaaatcaatactgacaccaattcagagcattagactccccaacatgctttcatgtgcactttttaaatggtttgaccagcaaccctctgaatttcacaggatatcattattnattgttttccagtggtaacagggtgaggaaacaagaggactttaggctcaatttaaaaatttgctgtacttaatggataattt

SEQ ID NO: 410608 - DNA, 258 bp, Homo Sapiens
  misc_feature (28)..(28): n is a, c, g, or t
  misc_feature (34)..(34): n is a, c, g, or t
gcctcaagtcctgaaatactgactctcnaaactnaggtctgagtacgagtcccaagcagtccacgaagcctcacgaaatgttgcagtcaaacatggaagctaagcaatactcttacaaagcgttaggttaggttagctcctcagtaaatcaagggcagtccagggtgcaaacgtctgtcattcgttatttggttgtttttataacacctgcagatatagcggttaataatacccttctgtccgaagtacaggtattat

SEQ ID NO: 410609 - DNA, 125 bp, Homo Sapiens
  misc_feature (65)..(65): n is a, c, g, or t
  misc_feature (69)..(69): n is a, c, g, or t
  misc_feature (72)..(72): n is a, c, g, or t
  misc_feature (86)..(86): n is a, c, g, or t
cctgacttcagacttatttttaaccgcctgacactctcaattttttaagcttatactttcacatnccanaancctctaacccttgnacgatacattacctctaagatttttttcccaagtcacaa

SEQ ID NO: 410610 - DNA, 484 bp, Homo Sapiens
  misc_feature (468)..(468): n is a, c, g, or t
gaactgcttaattgagggagccgccacatcacacttaatcagtttgtttctccctcaatgacagatgaactaaattttctcttgggtaagaaatactttatgtccattgtgattaaaaagtcagattcaagacactgctttatgtacaagaaaatggaaatgattttagatcctcccccagtgacaagtaaacctgaactgaccatatttatacataaaatggaatgtaagaacctattttggatatcccggacaagattttcttttgaattaggtgccaaaccctttgtgaaatgagataggatgtgaatattctgtattctttgatgtgaattgtgaggtttagttatctttatttccaaatctgtggaacagttggggagggtgatatggctctgtcatcaccatatttgaggtgatgcagcaaggggactgcatccgaaaacacccccctggccaatggtaaanccaggttggggtctaa

SEQ ID NO: 410611 - DNA, 241 bp, Homo Sapiens
  misc_feature (39)..(39): n is a, c, g, or t
  misc_feature (130)..(130): n is a, c, g, or t
  misc_feature (169)..(179): n is a, c, g, or t
ctgtgcctgtgaggaatggtgcattctagcccagatatnatgcttttcccaaggtcttcccaacccgcagaccaggagattcccttgggtgcctacaccaccaggtccctgggtttcaagcacaaaattnggtggccatttgggcagacaccaagctagctgcagcagnnnnnnnnnnncatgccccagtggcacctggaatgccagcaagacagacccattcactcccctggaaaggggg

SEQ ID NO: 410612 - DNA, 260 bp, Homo Sapiens
  misc_feature (149)..(149): n is a, c, g, or t
  misc_feature (203)..(203): n is a, c, g, or t
cccccagcaccaggctgcacgttggcttttctgtggctcatctctgaccacctacaaccatctgctggggagagcaccaggacccaacacgttccagtggacgagtccaggaagccaggaatgtatattggctcagcagtacccgaccnagaaatggattaacactcatggagacatccggatcgaagaccttgtaggcacantactaagctcgatgagttaacttttcattctacaatggggctggagaaaaaattttg

SEQ ID NO: 410613 - DNA, 350 bp, Homo Sapiens
  misc_feature (18)..(18): n is a, c, g, or t
  misc_feature (41)..(41): n is a, c, g, or t
  misc_feature (60)..(60): n is a, c, g, or t
  misc_feature (64)..(64): n is a, c, g, or t
  misc_feature (68)..(68): n is a, c, g, or t
  misc_feature (81)..(81): n is a, c, g, or t
  misc_feature (83)..(83): n is a, c, g, or t
  misc_feature (90)..(90): n is a, c, g, or t
  misc_feature (96)..(96): n is a, c, g, or t
  misc_feature (145)..(145): n is a, c, g, or t
  misc_feature (147)..(147): n is a, c, g, or t
  misc_feature (232)..(232): n is a, c, g, or t
  misc_feature (243)..(243): n is a, c, g, or t
  misc_feature (248)..(248): n is a, c, g, or t
  misc_feature (287)..(287): n is a, c, g, or t
  misc_feature (289)..(289): n is a, c, g, or t
  misc_feature (319)..(319): n is a, c, g, or t
accttccaggctgctttncctactcaagcctcagcaatggnagggtacccacccccagcntcgntgcnaccttgcagtttnanctaaganttctgngctagcaatgagtgaggctctttgtgcgtaggaccctccaagcaatgtntnagatataatctcctggtgtgccgtttgctaagaccattggaaaagtgcagtattagggtgagagtgacccaattttccaggtgcnatatgtaaccnatttntttgactaggaaagggaattctttgaccccttgtgcttncngggtgaggtgatgtctaaccttgcttctgntcatgatcagtgcactgtacccaatgtgctg

SEQ ID NO: 410614 - DNA, 475 bp, Homo Sapiens
  misc_feature (19)..(19): n is a, c, g, or t
aggggtggggcggagaggnttctgggggtggttctagagttagggtgggatttaatcacatcctggccagcagtgttttctgaggactacttatggatcctgggacccacacagagggaggctgagcaagtggggctctgggaacctactcccactttaactacaggtgttgctgccctttttgttttgtattttggatgtatgcttcaactttcacttgaagaaagtagttggagctcagtgaacttttgagaactatggcatgatactatgcttatttgccaagaggcaattttgttttggcaaatatatctctaactacttttgaaagcattcaaaaggtcaaacccatgagaaaggcaagtttctccaacctcttgtttgcttgggaccttacaagatttagccaagagtggtggtaactcaaggagtggggcaaagaacccttgaaagtccatgaggccagctttagcca

SEQ ID NO: 410615 - DNA, 297 bp, Homo Sapiens
  misc_feature (131)..(131): n is a, c, g, or t
cactatagggcgtattacgtcaccgcgcccgggctgcaagagaaatctcgcaccattccaagagcacacaccccaacgtcacaccgatgccaatcccgcacacaccaagtcatacgggggggtcctccaanccaggggcacctgaagttcagcaattccagctgcacaatctatcacatcacttcaccctcaggagcttttgtgtttaaaaaaagtcgccacaatgtgtctaaaagtaaggacttccaaaatgttgccgaaagacagcgctagtgtcagcggctttcattgcttggg

SEQ ID NO: 410616 - DNA, 459 bp, Homo Sapiens
  misc_feature (449)..(449): n is a, c, g, or t
gaccatgacttgtgaccaaggaatgctcaggaacaatatgtgacacaaacaatattcgaacttagaaagaacagaaagtatttcaattatatgcataataaaatattgcatattccattgcttcagctggtagaagtaatggaaccatacttggtgatgtaagtcattgagctgtaatagagcaattgggagattttggttggcagctgaggactaggaaatgtgtagataagatgtcaagatctgcaaaaggtttttaagacctcctgcctcatggatgcttatattctaagacagggtaaacctgtgtcctgcaatccccaaatgaaccccttacagtctcgtcattcatctgaagggcaagtccatttccacaggtcaagctaaacccaggtcaaacccagtccatttttcacaggtttaaggttaaaaaccctgttgtggcagtnggaaaaggct

SEQ ID NO: 410617 - DNA, 412 bp, Homo Sapiens
  misc_feature (82)..(82): n is a, c, g, or t
  misc_feature (84)..(85): n is a, c, g, or t
  misc_feature (170)..(170): n is a, c, g, or t
  misc_feature (306)..(306): n is a, c, g, or t
  misc_feature (313)..(313): n is a, c, g, or t
ctacacagtgggccttcacaagtcccaggctgcaggtccctggggtcgggacgctggccgactttccgcagctgccttactngnnaggaaaatttttgtggcattatgtttttgtatatccgtccagtatttttctgggcacttcctccatgtctaggaaaaagcctgtncggaaaactggaggatctttatgggcaagtagagggagaagtctctttcaggggtttcatttctagatctctttaaaaataagaataatcttataattgtgtaaaacataggtatagaagacagtaagtttaaaangttaaancacaagttgggctctattctcttcagaagtttcatgataccgacttaagggcttgttataattgttgtaggattaggccaagcatttttccacacataa

SEQ ID NO: 410618 - DNA, 300 bp, Homo Sapiens
  misc_feature (184)..(184): n is a, c, g, or t
ttccaaacgcctcgctctagggcgtatggggtaccacgccctagaacgaggtacatcccaaggttgcgatcagtgaccactgtagcagaagcccagtggaatcaagtttctcagttgagctgtccgggttaatttttttgcaattgcatcaagagcctgggcctacagtagactctcgggaaanaggaaagtaggacggcaagagactacacatgcacgtgactcatatcgaatgcatgttcctgctgttgtacactctccaactcctgaccttattatttaggggctgaggagagccaa

SEQ ID NO: 410619 - DNA, 539 bp, Homo Sapiens
  misc_feature (349)..(349): n is a, c, g, or t
gcatcctgggcctcctctctggctcaccatgtgcctctcccggggctggatttccctccagatgacccccaccccagacctcagatcacaggccctgaaacctgacctggtcactgggagtgggctactgtgggggtccaggctcggggtgcacgttctttctgggtgggaggcagggccgccatggaggtcaggctcggggtgcacgttctttctgggtgggaggtggtgcatcttcagatgcggcgctccagctctttctgtgaaactcctctgggctgcttggggcttcttctcccaggtaacagaggcttagggagggctgtgcaggttcatgtctggcctgtgncccatggccatgaagtttaccctaggcagaggtgggggcgaggaccccaaaagagaagccgaggaggtgatgtgaactgtaggaggggagcaagagaaaaggacttggggcccatggagtcatcttgggtggatttcccgtttagaaggaaagctttgggattgccgtttttcaagactttaaggaatcc

SEQ ID NO: 410620 - DNA, 438 bp, Homo Sapiens
  misc_feature (28)..(28): n is a, c, g, or t
  misc_feature (38)..(38): n is a, c, g, or t
  misc_feature (195)..(195): n is a, c, g, or t
agctgccacagctgactcagtggctgtntgtccctggnatcctggctctgcatcctctctcgaaataactttggaagacctccttaaccgcctcaagcctgagtttcttcaccatatacaattcccattttatacaacaattttacaccattccaatcatgagcaagatccatctcagagcatgtttcatcaggntcaaaaggcttagtggttaggatgcacttagcagggtgcctgaaaggaattaactgctcagtacgcgtgttaattattgtcgctattacacatgaagcccatttcttcattgtgtattctcagagaatgtaatcttaggacctggtgccaatagtgaggtcatttcatttttagcccatgtgcatccttaaaatgaactttcctctttgtaaataatttggtatgtgtttccttccctagtga

SEQ ID NO: 410621 - DNA, 397 bp, Homo Sapiens
  misc_feature (40)..(40): n is a, c, g, or t
  misc_feature (54)..(54): n is a, c, g, or t
  misc_feature (211)..(211): n is a, c, g, or t
  misc_feature (345)..(345): n is a, c, g, or t
  misc_feature (362)..(362): n is a, c, g, or t
  misc_feature (381)..(381): n is a, c, g, or t
agtaaaacctgctactcgctgccaactatgtacctctctnagctcccctttttnctcaattacaaaataagactgctgtatcctgaaagaacgtgtgcagattaactgaaagcctgcattccatctattttgctacacccacatggctacactggcttccaacctagtcaggggctctgttgtaaattagaagggacaacatgccccacgncctgccagtctggacctagcatcatcaggttcgctactgcagcaggagtcataagcccatggcccaaagaatgtgctatgtttggctgagacagtattgttctgtttttaaattaatcaacagcattttataantgaaaggtgttgcacgnacacggcactctgcaggantctcctagaaaatcag

SEQ ID NO: 410622 - DNA, 319 bp, Homo Sapiens
  misc_feature (141)..(141): n is a, c, g, or t
  misc_feature (292)..(292): n is a, c, g, or t
  misc_feature (301)..(301): n is a, c, g, or t
gtatgggagggcagtctggggagaggtacagcctgaaaccctgcagtgttattgtctgggttgccctataatttagggtgctgagtgtgatataagagggccattaaatcaggacattaaccatgtcagaaagtaaatganctcctttgttggatggagttctgtggtcttgaagtcaccagggtaaatcattcacataaataccgctcccatgaggggtctgcatgggcagagaccagtagatgtgggtttcatatacaccccgagtgtgcacacaggtccacaaccactnggacgaagntatactcctcaaggtagg

SEQ ID NO: 410623 - DNA, 249 bp, Homo Sapiens
  misc_feature (174)..(174): n is a, c, g, or t
agccagtgtttaccctgaggggctctgtggaagcctgtttcaggaattcttggtggaagctcattcacagaactccttcttacctggttcctagaaaacggcaggagggactggtgttccatgggacatgcattggggaaactgtctaatgtaatttccaggaagaaagaaggntgcaggagagtcttattagagcctctgtacttcaaacgagtagtgacagggtctcaggcgtagggaaaagccaag

SEQ ID NO: 410624 - DNA, 347 bp, Homo Sapiens
  misc_feature (25)..(26): n is a, c, g, or t
  misc_feature (48)..(48): n is a, c, g, or t
  misc_feature (132)..(132): n is a, c, g, or t
  misc_feature (168)..(168): n is a, c, g, or t
  misc_feature (274)..(274): n is a, c, g, or t
  misc_feature (303)..(303): n is a, c, g, or t
ctaaagagtcgctataggacgaatnnaaaacctcgcccaatatattgnctgtacgagcaaagaattacattttggaaattagaaggctgatcaatccattgtattttaattattaccatgtgaagaaagctngcaacataaacttactgctcatattttcctctctcnaataatgaattatagatgatatgatagaaaatatgctattgtttataactcacttttgctttccataatcaaaactattgctctttagtctttaaaggcagttggngtgccataatagaaactactgtgtaactncccgttttcaactttccccataatgcgtaacaaaggcattgcag

SEQ ID NO: 410625 - DNA, 329 bp, Homo Sapiens
  misc_feature (123)..(123): n is a, c, g, or t
cttgtagtaactggccttgctgtgctggtggctgactgagactgtcttagtccagcaaagcctgctttggtcatctcagtttagggacagaataccatccaatggctcgtaatagtctctttnctgtgagtgtaacaactcttttaaattgcataggaaagaaaggcagcatggtagctgagttagtcactctcctgcccctcctacaattttcatatttgctatcctgctatattctttttaagtcataaaagttttgtccatggccattgtcactggaaaagctgctttggttcctctcgatgttgtggcagtttgagaaggatagt

SEQ ID NO: 410626 - DNA, 304 bp, Homo Sapiens
  misc_feature (107)..(107): n is a, c, g, or t
  misc_feature (131)..(131): n is a, c, g, or t
  misc_feature (196)..(197): n is a, c, g, or t
  misc_feature (239)..(239): n is a, c, g, or t
gctataagtgcgagcacaagcacagatctctgtgtttatgacagagctggcaaaaaagcctcacagaaagcagtagggcacactcaatgctagcaccctcgtatatncctttctgggccatatatatcatntccctccaccctagtcatagctacaaaaggagaaagaaagttgtaacgaatctaaaggttattcnncctctcctacggcacctcctttttttcaggccccgcagtagngcgtctggtgtgctcgtggcgatgatcgctcagcctgagacatcgacgtagtcattgcgcgctcg

SEQ ID NO: 410627 - DNA, 224 bp, Homo Sapiens
  misc_feature (67)..(67): n is a, c, g, or t
  misc_feature (69)..(69): n is a, c, g, or t
  misc_feature (85)..(85): n is a, c, g, or t
  misc_feature (102)..(102): n is a, c, g, or t
  misc_feature (127)..(127): n is a, c, g, or t
ttattccaagattaaggaggaaatggatatcatgtgattcagacacattagacaaatgttaggcttntncagcattttaacaggnattagctgactgttacnatgtttttctagctttggagaaagnttttagggtgggagggttgacttggagtggaaagttaatgttaaaagttaacatgttatatacagtttcataaactcttaaaaaagacacctaggtg

SEQ ID NO: 410628 - DNA, 339 bp, Homo Sapiens
  misc_feature (109)..(109): n is a, c, g, or t
  misc_feature (125)..(125): n is a, c, g, or t
  misc_feature (170)..(170): n is a, c, g, or t
  misc_feature (208)..(208): n is a, c, g, or t
  misc_feature (260)..(260): n is a, c, g, or t
  misc_feature (323)..(323): n is a, c, g, or t
gagaacttatgctgtttctactttaatacaacaacttctataaacaaaatctgttccactacattattgtttgaggatactggatcgttacatacagctagggcttttnaatgagcatatttttnagtggtcatttgctattttaatcagctcagcatccaaccaccttnctcttttaatgggcaatgaaattgtgtgagtctttctncagaaacgaaccactgctttccctgtaaaacctaatgtgtttaatgttttcnccactacacgctggcagctagacatgcaaaccgtacatggtcaattaggatatgataccaagnttttgaaatctggtgg

SEQ ID NO: 410629 - DNA, 305 bp, Homo Sapiens
  misc_feature (16)..(16): n is a, c, g, or t
  misc_feature (29)..(29): n is a, c, g, or t
  misc_feature (115)..(115): n is a, c, g, or t
  misc_feature (124)..(124): n is a, c, g, or t
  misc_feature (132)..(132): n is a, c, g, or t
  misc_feature (139)..(139): n is a, c, g, or t
  misc_feature (164)..(164): n is a, c, g, or t
  misc_feature (228)..(228): n is a, c, g, or t
  misc_feature (231)..(231): n is a, c, g, or t
gagccgctataggacnagttcggtaccgngcccacgcgacgtggggtacccatgagggggtgagccaccacccatctgagagtgcctggggctatatatgcccatcattgtcccncgatgtccngtataagntgataantgaccaactattgctatacctacancttttagcctaattggtattttagtgagctttctctactacatgatcggtcagctgtgacctgngtnacaagtcccatggttaaaggtggatgcagtcacctgcccgagtttgggttaggaattcttagtaggcctgggaa

SEQ ID NO: 410630 - DNA, 288 bp, Homo Sapiens
  misc_feature (58)..(58): n is a, c, g, or t
  misc_feature (200)..(200): n is a, c, g, or t
  misc_feature (253)..(253): n is a, c, g, or t
gctttattctctctctctcctacagagtcagcagtgcagttatatgacttatagacantagtggctcaaagccaggtataagctcacacaaacaggttactttaaatggctacataaatatgatcacataatgcacagtgttgtgtgcctgtcctctagacccgctgtgtcatgctgtactggatgtctggctcgtcctnctccttgactgaaggacagccatttctttttacaattccatcctgtagaccgngagaaaattgtgccccacagggaggggacccctgg

SEQ ID NO: 410631 - DNA, 324 bp, Homo Sapiens
  misc_feature (161)..(161): n is a, c, g, or t
  misc_feature (243)..(243): n is a, c, g, or t
tctcgagaattagcagcgacagttgagcatattcagctgacgttggaaacaattatctatcaatcaaatgatcctcaatttaaaatttgtccaaacaaatatttaccgtgtatgatgaatcttagtgcttctggaaggaatctgttcattcagtttctaantgaccaaatttcaaatattacttgtcactgctgagataattttttaaccccctttttaagcatgtctttaaataagctatgntggttaattcatataccatagaatcctttgagcagaaaacaagcctttagtcccttcaaatcggaggcccagggttaccta

SEQ ID NO: 410632 - DNA, 350 bp, Homo Sapiens
  misc_feature (72)..(72): n is a, c, g, or t
  misc_feature (195)..(195): n is a, c, g, or t
  misc_feature (223)..(223): n is a, c, g, or t
  misc_feature (253)..(253): n is a, c, g, or t
  misc_feature (291)..(291): n is a, c, g, or t
  misc_feature (338)..(338): n is a, c, g, or t
gctgtgctgaaagagtgaatgcgttcctggtctgctgacaataacactcagtggaggatgccagctaaaatntttcattggggtggtggcagcagggcctgcactcacatgtgcatgccagcagcagtggcttgtggtgcgggcatgcattggtggaagcagaccactggtggggatagggtagtaacatccctntggaggcaaggtggtgtctagccaaatngtttttgacagcagaggctgtgcggcattncacactcacatcaggggcaggggtgccagcaaggcagnttggtggcatcttcacaggggcaaggttgccagcatagttgtccatnttttcttcgggt

SEQ ID NO: 410633 - DNA, 250 bp, Homo Sapiens
  misc_feature (81)..(82): n is a, c, g, or t
  misc_feature (154)..(154): n is a, c, g, or t
  misc_feature (179)..(179): n is a, c, g, or t
  misc_feature (198)..(198): n is a, c, g, or t
aaggcgccggagctcaggactcagaggggccatggcgtaccccctgcttacccccaacctggttccgcttggggtccaggnntctctgggttccaggtcctacactgcttttctctggtttgtcctgcctttggtgccatccccaagacgccanagccccacggataacagggcagggncagcttcccttgcgcccanttggcctaatccagcttgggatctgttttctctcttaacagtgttccaggcc

SEQ ID NO: 410634 - DNA, 250 bp, Homo Sapiens
  misc_feature (73)..(73): n is a, c, g, or t
  misc_feature (78)..(78): n is a, c, g, or t
  misc_feature (100)..(101): n is a, c, g, or t
  misc_feature (230)..(230): n is a, c, g, or t
catgtcgttcaccactgtataacatgacctctttcaagtttgatcccatgataacatgctcatttattaccanttccntacctttaaatccaaacttttnnggcttaaacttctctactttgcccatcagcattttactttactacccactgggctctggcttccaatgacctcctaattgccagatctatggacacatttaagtactcattgtaatggatgtctctggnggcatttggatactgtcgat

SEQ ID NO: 410635 - DNA, 354 bp, Homo Sapiens
  misc_feature (42)..(42): n is a, c, g, or t
  misc_feature (114)..(114): n is a, c, g, or t
cctttcccagggctctgtttaacactgaggccagaataactntgtccctggtagcttaattttaagggcctgtaagagggaataaggagcctctggagacaggcctcccatgtntcaggaagggtcctgggcccacaggtgccagccacacctcctgcagctttggaagtccagtgccaaatctcagccacacccccatatctgctccctggggtgcacatttctcatcgagagcatagctcttatgcaatgaggtggctgtgggcaaactggctgtccagatgcctaggcttaagtcagtgccctggggaccctcccgagttaatgctggtggccagtctctttggacttcag

SEQ ID NO: 410636 - DNA, 431 bp, Homo Sapiens
  misc_feature (112)..(112): n is a, c, g, or t
atgcgctgtgctgcatgttctccctgggcacagcaggctactaatcctgttacaaagagaaatgccgtacattgcgagcagtgctggcccctgggactcaccgtggcctttnctaagtgcttacagactctctgtttaataatccattccagaaattttccagggctcattgttgagcttggtgttcgcaactttgagtgatcagcccttctcctttgtgggagcaccaggacagagcagcctttgtccctccccagtctcagttccctcccactgcccctgtggacctcgaatgcagagcttatgcacctaccgaagtcgtgtcagcacccaaggcagaacgaggctgccctgggaactagggtcaattaaaacagcttgtgcttggaggaccctttacaagagatgaagggcctttcccagcagaaaag

SEQ ID NO: 410637 - DNA, 457 bp, Homo Sapiens
  misc_feature (365)..(365): n is a, c, g, or t
  misc_feature (382)..(382): n is a, c, g, or t
gagcttggatgtggacaggccacatccaggtagtacaggtaacatggagaggtggaagaatgtggtgggagctaccgagctgggttttacttttgggcgagctgggtttgagtactgtctcatgttgggcaaggtattcaccctctctgagggccagaatcccttcttctgcaggaaaataatgcagaccaaatataattcccagttttgatatagagctgatatacagcttccagttccaatagaccaaatataactcccaggctttccagcacacaccatacattccaaccacaatagatgtactcactgctcctcatcacaccttatgactctgggtcttgccatgtttacatccttctgtnccttgttctctattatnttgatagttagtttgggtatatgtcgatgttcccttgggatgtgccaagtggccttgaggggaagggaccttgcc

SEQ ID NO: 410638 - DNA, 524 bp, Homo Sapiens
  misc_feature (110)..(110): n is a, c, g, or t
  misc_feature (476)..(476): n is a, c, g, or t
  misc_feature (494)..(494): n is a, c, g, or t
  misc_feature (509)..(509): n is a, c, g, or t
gagctgtttcttattcaccagatcacattacctttgctctactattgtctgaccaaggagtctgaggcaaagaccgtgctgctggtggttaacagcacactgctccacantaggatcttctgagaaccagctcaagtgctgaaacagccacgggaacgactgaaatttcagcaaaacacataggcatatgctgtcctcagcagagtggatttgcatctactgtgtgaagccccagatgtgaatttcgactttttattttgaatttttctaaagaacagaagcaatatgaaaaacgagagtaaaaagagactaattcctgggaaggtttttattcttccactttgccactcttttcccagcaccatgcgatcaatgactgattatgtgggcagcaagttagattttggggatgaggcttggaagggaggagtctgcttcaagggtcggcaagcctcccttggcaatcacatcaagtnccttccctttgctcctgnccctacttaagcggnaaacttcgttcccca

SEQ ID NO: 410639 - DNA, 354 bp, Homo Sapiens
  misc_feature (143)..(143): n is a, c, g, or t
  misc_feature (160)..(160): n is a, c, g, or t
  misc_feature (320)..(320): n is a, c, g, or t
  misc_feature (343)..(343): n is a, c, g, or t
gctgatccggccctagaggtacttgaattcggggctactggggtagcggcagttactggttaccgcaacatggcggtcactggagcaggagtatcaggcagactgttacgaccagcgtgacaccgtcaataatcccgacaggntcacagaagattacagnatcgcccaggcagcagcggacctcaatcagcagctggtagccgcaggcttgatgcattacgcaatggtcgaacatgcgctcggtcctatgagcggccattcactccgaggcacacccctagttctagagcggcgccacgcaggctggagattcagctttnatttccctatggtgacggggtanccttcgtgctt

SEQ ID NO: 410640 - DNA, 233 bp, Homo Sapiens
  misc_feature (19)..(19): n is a, c, g, or t
agcacgttctccttgcganagaaaagagaggctcaagtggtgaatgagcatatttggtggggatgcacagacccgagtgccatgtgggtgctctcctgcctttgattcacaggattatgtacatggatgccctgggaggtgtatgagccaaatgagtcgcacagcaaggagcgtgactgggtaatggtatccagagtccaaataacagcagttttctttcagaggttacggta

SEQ ID NO: 410641 - DNA, 296 bp, Homo Sapiens
  misc_feature (58)..(58): n is a, c, g, or t
  misc_feature (115)..(115): n is a, c, g, or t
gagctgcgcttttcctcacacccacaccaggtggcctgcgcagcaaatattaaatgtnctttagatttgacgtgaccatgacagaaactcagtttaactagcaaaaatataagtngcaaaatacttagtttacagaagatctaatacatctgggaatttaaataattcactggcatgatgatttacgacacctgacgcaaatgcaaataatcagggagcagaggaaaattataagccaaattgttgtcatgttaacattctcccttctcttcagtgaccctgcttctctcatccct

SEQ ID NO: 410642 - DNA, 238 bp, Homo Sapiens
  misc_feature (219)..(219): n is a, c, g, or t
gggaaaccacactagccagactctagagtcttcagcatgtaacttacactgtggccctcaggcccttcctcagcacagtctttatctccagcatcttctgtcgccaaaatcacctttcgtaacctttcggatgcatttaatacttttaactgctttctgctatttggaacagtttttgtttttaaatgtggcttcaaaaacacccattccctttattcnagtatcacattcctgttgg

SEQ ID NO: 410643 - DNA, 255 bp, Homo Sapiens
  misc_feature (29)..(29): n is a, c, g, or t
  misc_feature (135)..(135): n is a, c, g, or t
  misc_feature (157)..(157): n is a, c, g, or t
  misc_feature (190)..(190): n is a, c, g, or t
  misc_feature (227)..(227): n is a, c, g, or t
gctggacatgctaccatctccctctctcnccccacctccacaaagcccagtcccaggaccacctctcggctctagtattccaatttaacaggtgccagaaagatccagtgacctacctaatgtgggggggctgangggtcagatctcacctcctgcnacattttcttaatcctctgatgcaaccgggccntctttcctttaagatgttaagcatattaatccctctntaagctggacttatttacgtgcttcctt

SEQ ID NO: 410644 - DNA, 365 bp, Homo Sapiens
  misc_feature (324)..(324): n is a, c, g, or t
  misc_feature (338)..(338): n is a, c, g, or t
  misc_feature (344)..(344): n is a, c, g, or t
atgccacctaaagtacctggcacatgagcaaaaatctttgagagagatatatgatggaagaaaaaccccaaaatatgaaagggcaaggaggcttacatattgcaagattaccaaacccgaccacttgcatattttcaggctcttaggtaataagtgaaggaggcatttcgaattagacaagttaaagaagagggaaaaaggttccagacaaaagttccagacaaaggtaaattactaaacgtataacaaattcaaaattggaggaacacacaaaaataacatggtcatttagggaatacttggggtggtcctgtttgtctttgnacaacctttggggntccagntgaaacaggtggaggatttca

SEQ ID NO: 410645 - DNA, 424 bp, Homo Sapiens
  misc_feature (54)..(54): n is a, c, g, or t
  misc_feature (125)..(125): n is a, c, g, or t
  misc_feature (155)..(155): n is a, c, g, or t
gagtcatgctgcagcatttgtatttgaaatgagaggcagtcccagggtattctnaggaaggagaggaaggaacgctgagcttgtgggtagtgttagaaggcgaagtggagcagaggagaggagtncgacggatagcagtggtagacactccagangacgtctttactacatcttccacatgctgctgccccgtggtaacatgatggcctcagcatgctcacccctgtggggactgttaccatgtttgatggaggccttcaggggtggtgtctggatcagtctcacttattccccaaagagttaaagctccatataacgattgctcctctctctacccctgtgagttagggaaggggtcatcctgttgcaaggaggggactttctgagctcacatagcaagtcagtgttgtaaaataattagggg

SEQ ID NO: 410646 - DNA, 370 bp, Homo Sapiens
  misc_feature (52)..(52): n is a, c, g, or t
  misc_feature (296)..(297): n is a, c, g, or t
taaaatctcagcatatccttgccagggacatcctggatatgacaagcgaagnaagactgctcatcaaagaaactgcaagaattagcacggatatattaagtctgtatagtacccctggcattatattttaagggtgattgtatcaaggaggtcagaatataaagctgcagaatacaatgcaaaaatacattaacttgggggcacttttttggaacacagaattaaataccctggccaaggtcccaggggttggggcaaactcactgctaatagaagcctgaatatgcttggtccannagtaaagtggaaaggccttaatttccacagtagatggtagagggaggcataaaagatggagcagtgcagccct

SEQ ID NO: 410647 - DNA, 456 bp, Homo Sapiens
tctgtcttatgcaacgagccttgcttggcatccgttgctgttggccatgcatggcatcacggtcccctccctgttcagcgcccaaagcatagataggacgagagcttggaaaacctcaaagtgcctctctcctgtgtggaaattgagaaagcacagacataattacctttgttggctcacagtctcaaacagcaaaagacattttaaacatctgcccttcctttgattggttctacatcctctctctttttggctactgttcattattcttgcattatattcattaccaagaaatcttctccaagccaatattttcatttggattcatttgggaaaggatgacttgggatccaggggtattaatctgatccagcccccagacaaaccccataataggactatgacacaaccacatataggtaaattctataggggagagctgtgtttcagggttaa

SEQ ID NO: 410648 - DNA, 403 bp, Homo Sapiens
  misc_feature (216)..(216): n is a, c, g, or t
  misc_feature (266)..(266): n is a, c, g, or t
gtggtgaggcctcttcagctggcaaagcaggcttatcttctctctgttccatcttctcagtatcctgcagctgaagcagcaacatagtttcatccatgactctttactctctaatcttcatcctatataaagttattttcctcaaaattcattaatgtatcttaaactgtctctattactgtgatgttagtttgggtttctcagatacatatcggnaattgtgaattgttacaagaagtgccttataaggcgatggggttaagggnagctaactgtggtagagggaagaaaggccatgatctcaactggcgtctggcttcagatatgggtctcaactgaagtctgcctcaaattgaggtcttagagccgttgaagctctggaaggatacattgtattatacag

SEQ ID NO: 410649 - DNA, 307 bp, Homo Sapiens
  misc_feature (13)..(13): n is a, c, g, or t
  misc_feature (43)..(43): n is a, c, g, or t
  misc_feature (67)..(141): n is a, c, g, or t
  misc_feature (234)..(234): n is a, c, g, or t
  misc_feature (250)..(250): n is a, c, g, or t
ccacatgccaggncaaactcacccacagagcatttagaatggnccgattctacatcatgtgatagannnnnnnnnnnnnnnnnnnnnnnnnnnnnnnnnnnnnnnnnnnnnnnnnnnnnnnnnnnnnnnnnnnnnnnnnnncgtcctcccttggactcttcagcacagtgctccgtccccttttagcactgattccatcatctttcccatcagtctccctcactgaattggaangcatcttgagtgacanatgggttttatgtgtgtgtttgaagtgttgcccttaaaaatatatggaggaaggtcc

SEQ ID NO: 410650 - DNA, 247 bp, Homo Sapiens
  misc_feature (17)..(17): n is a, c, g, or t
  misc_feature (237)..(237): n is a, c, g, or t
gatttgcccccacacanggacatggcaactcttaactccctcttagagtgcatagatgatctttgctggggggggaccttccaattctttcaccctgatgaagttctactctttacttttatactcactcttattctcattcccatttttatgccaccctctacctctccccagctatctctaccacactatcaaccttacttcattctctcctagacgtttctaatcccttcctgnggtgaacaac

SEQ ID NO: 410651 - DNA, 298 bp, Homo Sapiens
  misc_feature (58)..(58): n is a, c, g, or t
  misc_feature (167)..(167): n is a, c, g, or t
  misc_feature (265)..(265): n is a, c, g, or t
  misc_feature (274)..(274): n is a, c, g, or t
  misc_feature (281)..(281): n is a, c, g, or t
ttccgactcgccgctcagacgaactcacggctcagctgggagaatcacacgggagggncccatgaacgggcactggttccacagccggggattcaactgcaccgaaatcccagccctcaacacggcccacggctgtgtcatcccggatttatcactataaagcaaanccaaaaacggacctcaggtttctttgcaatatgtaggatccgtgaaacctacaacgtgaaatgtgaagtaggtagcctcgaatcttcacccaggcagncctaaaggntatctgnttgacaacacacatttt

SEQ ID NO: 410652 - DNA, 346 bp, Homo Sapiens
cagcccttcttcacagcacactccatataccatagttattactccaggccgcaaaaatgtgtgcgcccctacgaccatgcaatagacgtatatccatgtatttataatgcgatctgacctggggtggggaagctgtcaagtaaagtttgagatgaatttccgaacatttgagctcaggaaaatccagaatatatttcccaagcactttctctctgaatatttaaacccaagtgtattttgagggcaatttaatccacatgttcctgattcatttacacttaattcatcaaattgttttgtaagagtcatctgatgttcatggatctttatgaggggattttggtct

SEQ ID NO: 410653 - DNA, 451 bp, Homo Sapiens
  misc_feature (409)..(409): n is a, c, g, or t
  misc_feature (421)..(421): n is a, c, g, or t
  misc_feature (434)..(434): n is a, c, g, or t
tcgaggagctctgaggagcacaccaagggacgtgtgtcccagggccaccgtgcaggcaagtgtggtccaactccttcctccctttacaaaactccagcctcacccacacaaacactggctgacaggccttcttaagccttttttaactgttcaaagggaagaggtttgttatggggcgtgtatgtgtgtttcgttgtcacaccttcattttcacacaccgatctcctgccactctgaggccttaatccccggggcaggaacaatgtgcttttcagataaattgtgaatgtgcccagagggacaagcagacgggagctgtgaggctaggagggaacaacgaggcatcttgccatgagggtgtgcagtggatcggtgttccagctcgctgtgcctgctggagtgataattngcctttcggggngtaaggggctctnattttcaagttcgtctt

SEQ ID NO: 410654 - DNA, 211 bp, Homo Sapiens
  misc_feature (30)..(30): n is a, c, g, or t
  misc_feature (57)..(57): n is a, c, g, or t
  misc_feature (153)..(153): n is a, c, g, or t
  misc_feature (186)..(186): n is a, c, g, or t
agggggcgacgaccaccgatgtgtcctctntgtcctgactggcttaccaagggatanctaagtgggagatgaggttggaggacgagacgaggttcctccttgctttggggagaaagaattcagaaagtgggtgtgtgggaaacctaaagatancgtgcacaggacacagcgtggtcggcctaggcngacgggcgactgactgtcctggagc

SEQ ID NO: 410655 - DNA, 416 bp, Homo Sapiens
  misc_feature (67)..(67): n is a, c, g, or t
  misc_feature (83)..(83): n is a, c, g, or t
  misc_feature (298)..(298): n is a, c, g, or t
  misc_feature (361)..(361): n is a, c, g, or t
ctgaatgtctgtcagcagctgggtccctgctggtccctaggccccggtctccccatcaccatcaccngagatctgtcccacgntctcaggtccacctatacccacccagctgaaggctgcctgttaaccgggccctctggttgagtcttggcagctgagatgctctggtcagaaccatgttaggtggcgaccctatattagggtgatgattcccttgagagttccttaagagtctgcaatccttcatggggtaaaacagacaggattgtggttaacaaagggcttcccaactcttctnttttccatagagacaaattggtaaatgatcttcaacacagaaatggtttcactaaaataatcnaggcatttttgatgtacaacagaacatttgccatagatggttggtggtaaatcct

SEQ ID NO: 410656 - DNA, 329 bp, Homo Sapiens
  misc_feature (51)..(51): n is a, c, g, or t
  misc_feature (214)..(285): n is a, c, g, or t
attgtttgcattctaatcgttctttgtctacttattttattttttaattgncacataataattatacctgtttatgggatacatggtgatgtttccatatatataatggatagtgatcaaataagggtaattagcatatacatcatctcaaagatttatcatttatttgtgttggaaacattcaatattctccttctagctatttgaaactatnnnnnnnnnnnnnnnnnnnnnnnnnnnnnnnnnnnnnnnnnnnnnnnnnnnnnnnnnnnnnnnnnnnnnnnncagatagtattgtcaccgatagtaatatattatggttaactgta

SEQ ID NO: 410657 - DNA, 418 bp, Homo Sapiens
  misc_feature (36)..(36): n is a, c, g, or t
  misc_feature (53)..(53): n is a, c, g, or t
  misc_feature (67)..(67): n is a, c, g, or t
  misc_feature (69)..(69): n is a, c, g, or t
  misc_feature (202)..(202): n is a, c, g, or t
  misc_feature (217)..(217): n is a, c, g, or t
  misc_feature (288)..(288): n is a, c, g, or t
  misc_feature (320)..(320): n is a, c, g, or t
  misc_feature (366)..(366): n is a, c, g, or t
  misc_feature (368)..(369): n is a, c, g, or t
  misc_feature (385)..(385): n is a, c, g, or t
  misc_feature (392)..(392): n is a, c, g, or t
  misc_feature (398)..(398): n is a, c, g, or t
tccctcccccaacctggcccgggtagaaggggtggnagagccagctgcaggtnagatggcgtttatnanatttcctaatgccacaaaaatgtctttaatgcccctggccccctccccacgagggggagatcaaaggctccgtggggaagagggacagctccattcatcatgccattcggctggcagtgggcagcagcccctncccctcccgtccccnacgtgccccggggtgccaagggacaggtggtgtgggacattctccctgccataccatcaagagcaaccatnaacctttaaagctgtcctgggagtggggaggncagatcgagtccctatggcagaaacgtaaggcgcccagaagaaagntnnctggttgtttgtaganagggggncctgantttgggggacttaggtcgtt

SEQ ID NO: 410658 - DNA, 358 bp, Homo Sapiens
  misc_feature (33)..(33): n is a, c, g, or t
  misc_feature (55)..(55): n is a, c, g, or t
  misc_feature (62)..(62): n is a, c, g, or t
  misc_feature (66)..(66): n is a, c, g, or t
  misc_feature (72)..(72): n is a, c, g, or t
  misc_feature (80)..(80): n is a, c, g, or t
  misc_feature (89)..(90): n is a, c, g, or t
  misc_feature (93)..(93): n is a, c, g, or t
  misc_feature (110)..(110): n is a, c, g, or t
  misc_feature (112)..(112): n is a, c, g, or t
  misc_feature (115)..(115): n is a, c, g, or t
  misc_feature (178)..(178): n is a, c, g, or t
  misc_feature (183)..(183): n is a, c, g, or t
  misc_feature (200)..(200): n is a, c, g, or t
  misc_feature (204)..(204): n is a, c, g, or t
  misc_feature (212)..(212): n is a, c, g, or t
  misc_feature (218)..(218): n is a, c, g, or t
  misc_feature (232)..(232): n is a, c, g, or t
  misc_feature (243)..(243): n is a, c, g, or t
  misc_feature (272)..(272): n is a, c, g, or t
  misc_feature (316)..(316): n is a, c, g, or t
  misc_feature (323)..(323): n is a, c, g, or t
  misc_feature (337)..(337): n is a, c, g, or t
aggaaggatccgtcccaccttctccagcatctngtgtccccaggtgtcccctggnttgtggnagcnatcccnatgtcccnatggaattnnctntggatcggaacaatatntnctntccatgcatctaagtccaagtttccccctttaataaggaccagagtaatatggattaggggcnttatntaaggtatgaccttatnttgnctaattgnaactgnaaaggttctatttncaaataaggtnactttctaaggtactcggggtttaagaanttaaatgtagaaatttggggggacaaaattaaacttattggaanagaattntatattaaacattnttaagaaaggttttaatatgt

SEQ ID NO: 410659 - DNA, 364 bp, Homo Sapiens
cctcccttgcccctgtcctctggctgtcagcgatttgaaaattatctgggtcagagttaccagagggaagggtgggccaccatctttcctgtttgcgggacttagcgattccagctttcaggttttggagagcctaaactgaccaggggcagaagcagaaccccaacacaatcagatctgccctatgagagcatggccaaactgctctttttaagtgggtccccaattccattttttattaaccaggtggagcctccaaatggggcctccagtttccccaatgggtatttttccagctgacagagggtctcaagttcttcccgagggatggaagtttccaaagggggaaaggggttggacccac

SEQ ID NO: 410660 - DNA, 330 bp, Homo Sapiens
ctgcacccttcagtccacttagaggaccattgcgtcacagcaggattggtgttcccgtcaaatgacatcctgtataccgagttttagaaaagcacatgagtgcacgtaacgggatgtagaaaagctattttcaagcatagttaaatgtggtgattttggaagccttcttcacttaactatgaggaaaattcattatcaccaacaaacatcttatgagagtagtatatcagcctaattgccatccctgacctcccatggtgagctgacgtgtaataaaaacaaaaataacaatagcgtgctcatagtactgctgattcctaccgtagagct

SEQ ID NO: 410661 - DNA, 184 bp, Homo Sapiens
ctcacgcctccttacagagcttacttctcaataccattaaaagcatcttccctaagccctatcccttgttttcctttcactataggttctccctatgacttcagatagagagctgagaaataagggagcagaaccaagttaaaagctcaaaaccctgaaagtctacccccttcagtgttgctcc

SEQ ID NO: 410662 - DNA, 285 bp, Homo Sapiens
  misc_feature (88)..(88): n is a, c, g, or t
  misc_feature (113)..(113): n is a, c, g, or t
  misc_feature (135)..(135): n is a, c, g, or t
  misc_feature (241)..(241): n is a, c, g, or t
  misc_feature (272)..(272): n is a, c, g, or t
gcactcttgatgtggaaaattgggacacagcaggaaaaggattaaaagaggctcatcaaaaaggtcttaaagttgattctcctatctncacgtggagtctggttcgtactgtnctgccattatctcattattctnctgggcagcaggctgagtctaaaaatctgaaagaaatctgttgtcccccccacagatccaattgaaaacaaaaaacaggagagggaggataaaaattggtttttancaccccctttcagttgcagcaacatctgtancacctccttcagt

SEQ ID NO: 410663 - DNA, 297 bp, Homo Sapiens
  misc_feature (40)..(40): n is a, c, g, or t
  misc_feature (45)..(45): n is a, c, g, or t
  misc_feature (78)..(78): n is a, c, g, or t
  misc_feature (106)..(106): n is a, c, g, or t
  misc_feature (113)..(113): n is a, c, g, or t
  misc_feature (150)..(150): n is a, c, g, or t
  misc_feature (182)..(182): n is a, c, g, or t
  misc_feature (211)..(211): n is a, c, g, or t
  misc_feature (271)..(271): n is a, c, g, or t
aaaatagtattacattataatcttattcagtttcttactnttttncactcagcacactacttttaagagctatcacgntacaatgtctacatctagcccacttttnctaaaanctgcatttttttgatgttgtacatcctcaaccttcgnaaatctgctctcccgttgatggacatctgggntgcttctaattccccattaccataaattntgccaaacaactgttgttatggacctgtgtaagggatttatttaggatatatacctgggngcaaaattgctcaggtccaatatatg

SEQ ID NO: 410664 - DNA, 232 bp, Homo Sapiens
  misc_feature (19)..(19): n is a, c, g, or t
  misc_feature (30)..(31): n is a, c, g, or t
  misc_feature (81)..(81): n is a, c, g, or t
  misc_feature (98)..(98): n is a, c, g, or t
  misc_feature (109)..(109): n is a, c, g, or t
  misc_feature (155)..(155): n is a, c, g, or t
  misc_feature (186)..(186): n is a, c, g, or t
aaacttggaaacagcaatncattggatttnnatggcagctgatactttacagttaaatatgtactgcatacatcacatctncaagtcaggagcatgcnctggtacaganctgacttgttttttataggcaaatggacatacctgtggattttagnccctaatgcctagctttaaaaagggtctccnatctttagtttggcatctgaagctctctggtccagcccaatgaacc

SEQ ID NO: 410665 - DNA, 302 bp, Homo Sapiens
  misc_feature (56)..(56): n is a, c, g, or t
  misc_feature (133)..(133): n is a, c, g, or t
gctattattatcatcagtagcattactcttctgaaggatggacatttatgaatgtncgaataactcattcatcttgtaacagtcacaccatcctcatatgtaatattctccttacaaatagttttatctaagnttaaatccataaatagatcattttgttttttgaagctcttacctaccacaaaattttgacttattacaaaatctcaaaatgaattttgacactagcctttttacacttatatatatgagcagcattaaattgggtgtctaaattgtgtattttttttaagaaacagtga

SEQ ID NO: 410666 - DNA, 377 bp, Homo Sapiens
  misc_feature (94)..(94): n is a, c, g, or t
  misc_feature (125)..(125): n is a, c, g, or t
atgaacatatccaaggttctattttaaggccaagggatggggagtggtgagtgggcctatgttaggaggtcacacagatatataccagcttttnatttacatgatcaacgggacttcattttttnctccagtccctcctgtgtttgacattaagacagcttaatgtgaattttaagtgcaataatgtgttgtttacccttaatgataacttttagggaatatttatacccctttaaaaaagttttgggcccacaatagctagattatttcgtgttttacagttatattttttacttaacagaaaatcacaactaacaataaacttttatggtggatatagtttgtaatcttagtgggactgttaggaatttgtttat

SEQ ID NO: 410667 - DNA, 267 bp, Homo Sapiens
  misc_feature (23)..(23): n is a, c, g, or t
  misc_feature (103)..(103): n is a, c, g, or t
  misc_feature (122)..(122): n is a, c, g, or t
  misc_feature (133)..(133): n is a, c, g, or t
  misc_feature (202)..(202): n is a, c, g, or t
  misc_feature (227)..(227): n is a, c, g, or t
  misc_feature (254)..(254): n is a, c, g, or t
tttgaaagtaaaggaggatcctntttaagtagattagggtctggcaggccatttaactttatcaggcatttaaagccgaggatgtacactgtagccggctgtnagttgccaattagctgggntttccccactntttctggtttggcagggatgaggtggttcaccctgccgcactactgcctgccaaggacacatggccagntcccggcttcctgtcttcctctttntgtcctggccttgcttccagggagctnccagaacacaatt

SEQ ID NO: 410668 - DNA, 223 bp, Homo Sapiens
  misc_feature (18)..(18): n is a, c, g, or t
  misc_feature (47)..(47): n is a, c, g, or t
  misc_feature (83)..(83): n is a, c, g, or t
  misc_feature (92)..(92): n is a, c, g, or t
  misc_feature (115)..(116): n is a, c, g, or t
  misc_feature (199)..(199): n is a, c, g, or t
ggcaaatattaatataantttaagatttacagtctgctgcctaaaanttctaacatataggaattcgattagtgacaaatttngtaaatttntgacaaggtttgtaaagggtttnnttgatatatttaatgctagcctcttaaatccagcagtactccattctctaaaaggtctgcccaggtgtttctctaaggttttncctctagtccaaactgctacttgt

SEQ ID NO: 410669 - DNA, 377 bp, Homo Sapiens
  misc_feature (280)..(280): n is a, c, g, or t
  misc_feature (293)..(293): n is a, c, g, or t
  misc_feature (361)..(361): n is a, c, g, or t
ctccagcccactcagttgggagaacttcaagaggtgaacaaagttttattcctttttggattcccagtgtctcatagaccttctgggacatatggcacattcagtctagctgaatgaggtgatgaatcaatccacttactctctccagtgcctgaaacttctcaaggagcttgtgctctcctttgctcctctcttttcaaccaatctgaaaatgcttttaaaagataatgtctgttttccagtgcagtcttctcacttggcatgtaatttctccattttnatttcctttgtgnaatatcaaggtacaatttccatagctaccagtctaactgggatctttttcatctcagttttggaggtncacaacagtgtcctgg

SEQ ID NO: 410670 - DNA, 285 bp, Homo Sapiens
tttttccactccaaacttcagcactgttacatggctttgacccacaaaacactgattgctttggaggggtcatctgatcttatgagtcaataacattcttccttggatttttgaactttggtccaaaaagaataatagatgcatcttttttccagatgatagtcataagatataaaatgttggcactttcagttgtcatgttttctactatgtgcaggaagccaattgttggtaagagaggagtatttagtagaagaaggtaagtcaatccctgataaattataa

SEQ ID NO: 410671 - DNA, 363 bp, Homo Sapiens
  misc_feature (279)..(279): n is a, c, g, or t
  misc_feature (295)..(295): n is a, c, g, or t
  misc_feature (314)..(314): n is a, c, g, or t
  misc_feature (322)..(322): n is a, c, g, or t
  misc_feature (337)..(337): n is a, c, g, or t
gaaataatggccccctttgggaataaaagagatctcaaatcctgttgcagtcagtagcgctggctgtctgcagtagagatggttttcaatgattgtttcagaaattccttatcaacagaaaatgaacgagacggggagttttcagaaaataaatggatttgcagacaacttcacgtcatcatcgaagtcaccaaagaaagcaaagcagcgactggggaagctgaggctgaagtagcaagggcatgccacccaggctgctattccagtcgctgtgaaagnctgggcactgtctttnccacgcagaaacacatctntggggatnctgtcgatcttatgncctccatcttttaaagggtttccatt

SEQ ID NO: 410672 - DNA, 355 bp, Homo Sapiens
  misc_feature (47)..(47): n is a, c, g, or t
  misc_feature (88)..(88): n is a, c, g, or t
  misc_feature (135)..(135): n is a, c, g, or t
  misc_feature (240)..(240): n is a, c, g, or t
  misc_feature (317)..(317): n is a, c, g, or t
  misc_feature (330)..(330): n is a, c, g, or t
gtgtaaagcttcaaccatagagaagaaaacatctcagaatatatctncagttgagtatgaaaattcatcattccataatgtgtttttnataccttggagaggactttatggttaaaaactccttttataattctngatattttaatttaaaagctctttatagtctttaatacttctttagaaatcatgaataccaattctcctagtgatatgttaccttaactgaccaccccaaaccangagaagttgaatttcatcttaactctgagggatgacagattttgaaaaccttaaaacttctttgaggcagtttgggntctaatatgtggnccccttaaaatgggaaaatgctgtg

SEQ ID NO: 410673 - DNA, 321 bp, Homo Sapiens
  misc_feature (65)..(65): n is a, c, g, or t
  misc_feature (128)..(128): n is a, c, g, or t
  misc_feature (265)..(265): n is a, c, g, or t
  misc_feature (282)..(282): n is a, c, g, or t
  misc_feature (298)..(298): n is a, c, g, or t
tacatttgtaatggattttaaagacctagactatgatctacctgggttactatttcatgtctctnattccattctctcctcggataacaaataaacttgctcagttttgaacatcaagtctgactctncgtgcagtgagctctccaggcgtcccccgttgcagggggaatcaagctggggctaatcagtttcttacatgattcccagcaggaaggtggtaatattcatgacttcagagaccaaaatgaaaccagctccttttctnagggcagagcccagggntaaaaattaatagtangcaactccttggatccagtggta

SEQ ID NO: 410674 - DNA, 239 bp, Homo Sapiens
  misc_feature (28)..(28): n is a, c, g, or t
  misc_feature (47)..(47): n is a, c, g, or t
  misc_feature (56)..(56): n is a, c, g, or t
  misc_feature (206)..(206): n is a, c, g, or t
gttattttgagagcaaagtttgcctcanctgtccaatagagactgtnttgcatgtnaaaagttcatcatcaggagctgaaagaattgaaagtaaaatgaaactatcttgtgtgcctcgtaggaatacaacctggacgtagtgtccattactaattaaagccaatgtgtattgtactttcacagtgagacaggccctgctctttgtnctctatatttatttacatgcacttaatcctcac

SEQ ID NO: 410675 - DNA, 382 bp, Homo Sapiens
  misc_feature (30)..(30): n is a, c, g, or t
  misc_feature (100)..(100): n is a, c, g, or t
  misc_feature (151)..(151): n is a, c, g, or t
  misc_feature (188)..(188): n is a, c, g, or t
  misc_feature (268)..(268): n is a, c, g, or t
  misc_feature (281)..(281): n is a, c, g, or t
  misc_feature (302)..(302): n is a, c, g, or t
  misc_feature (306)..(306): n is a, c, g, or t
gtttataagtaaaactactttttgttttcntttttgatactcatatacttctggatttgggagacatttttggtggggttagttagacaaactatttatnccataaaggattccttgaagaatttccctgaaggtggtcatttagtttccntttaagtgctacttgtaaaggctggccaacccctttnagggcagctgttttaccaatgtgaaaatgctactagaatttgtactagaaaattctgccattaagtgtgtcactaaatgnccttgtaaggtancataaagtgccttctcctagnatgnaagaaagctttctgagtagctgaagggtacttcttacctcttaggcagtggttaacaaaatgctttctagggtttt

SEQ ID NO: 410676 - DNA, 154 bp, Homo Sapiens
  misc_feature (12)..(12): n is a, c, g, or t
  misc_feature (101)..(101): n is a, c, g, or t
  misc_feature (111)..(111): n is a, c, g, or t
gaaaaggttgtncatcattggtagtattcatgaaattggactagttttgaagcaggtaggtcatagataagagctctggaattcagctccttctagttttnattccaagtnctccagtgctgggagtttaagatcacaggcattgcatcttatc

SEQ ID NO: 410677 - DNA, 239 bp, Homo Sapiens
  misc_feature (35)..(35): n is a, c, g, or t
  misc_feature (68)..(68): n is a, c, g, or t
  misc_feature (101)..(101): n is a, c, g, or t
  misc_feature (122)..(122): n is a, c, g, or t
  misc_feature (172)..(172): n is a, c, g, or t
  misc_feature (182)..(182): n is a, c, g, or t
  misc_feature (222)..(222): n is a, c, g, or t
gcagaaagtgggtactaaggaaagacttgaagttnatgaaattcactgtttggatgtctggggaagantattctaggtaggggaacccacaaaggcaaaanatttggggtaggaggcctggngcactggagcaacggtgaagaagccagtcctggacgggactttccaagtngggaggaggngatgaggtcagcaaggaaacagggagctaggtggtctagnggactttcaaggccact

SEQ ID NO: 410678 - DNA, 255 bp, Homo Sapiens
  misc_feature (27)..(27): n is a, c, g, or t
  misc_feature (99)..(99): n is a, c, g, or t
  misc_feature (168)..(168): n is a, c, g, or t
  misc_feature (175)..(175): n is a, c, g, or t
  misc_feature (224)..(224): n is a, c, g, or t
gaatgaagaactgattttatgtaaaancagaaccagcaaagctctgcaacctgtgcaatatgcatgttttctaaaatagcctccatctccatgtgagtnagctcagcttcatagctcctcatttcttacaggacaggagctaaactaatatggcgcttagctctaggnctttccntttagcccctgtgtgtattaactttcagctgtgagtcccagctaaatgntacatgtcaatatgtagcaatcagaaaaggg

SEQ ID NO: 410679 - DNA, 206 bp, Homo Sapiens
  misc_feature (32)..(32): n is a, c, g, or t
  misc_feature (112)..(112): n is a, c, g, or t
aggaatgcttttcaatacagcaagcatatttnatatatactagtagcaccatggcattgagaatttgcaataattcaaaaatataagtattccttgcctaaatatatttggnatccatcacaagtaaggcagaaggttaagtgaaaaagaatagaaatggggttcttcactttaagactgcatttcattaatacaaacatctttag

SEQ ID NO: 410680 - DNA, 237 bp, Homo Sapiens
  misc_feature (66)..(116): n is a, c, g, or t
  misc_feature (121)..(121): n is a, c, g, or t
  misc_feature (179)..(179): n is a, c, g, or t
  misc_feature (211)..(211): n is a, c, g, or t
  misc_feature (222)..(222): n is a, c, g, or t
cacgaggtggcgctataatctattactcaatttataaatgcttcgtggattgcttgctgactattnnnnnnnnnnnnnnnnnnnnnnnnnnnnnnnnnnnnnnnnnnnnnnnnnnnattgnaaaataaaaattgcatctatttattgcatacaacatgttactttgaaatatgcatacnctgtgggatgcctaaattgagctaattaacgnatgcattaccncacacactttttatc

SEQ ID NO: 410681 - DNA, 348 bp, Homo Sapiens
  misc_feature (222)..(222): n is a, c, g, or t
tgatttcagactgccttactttgctggctgatttgcaaagcaaagtataaactttattatgtttcagaaaacatgctcagagaagttataggccaaagtgaagaagctgggactcaaaattcagcagtcttccagggaaattgtctctcagaatttagttattacagagttttatgataatgaagtatcataaaagtatattaacaatagcagatataattnctaccaagaagagattattttttatataagatgcaagtatgtgtcttctgtcagagtagaccagattcatcagagggatcatcatatctttccttcataatccaaagaaatattatgctataaatg

SEQ ID NO: 410682 - DNA, 130 bp, Homo Sapiens
gaagccaaggatgagaatcggggaccccaggagcctgcatggtgctctataccactgtggctgagctggtacccaggctgcaagataaagttccctttacccttccctctcctttcctcaaacagaaaat

SEQ ID NO: 410683 - DNA, 249 bp, Homo Sapiens
  misc_feature (27)..(27): n is a, c, g, or t
  misc_feature (131)..(131): n is a, c, g, or t
  misc_feature (146)..(146): n is a, c, g, or t
  misc_feature (149)..(149): n is a, c, g, or t
  misc_feature (163)..(163): n is a, c, g, or t
  misc_feature (173)..(173): n is a, c, g, or t
ggaaaaggctggtactttgtgcaaatnaccagctcatcagaggcttctgtgtaagaaatccatttattataatcagattgctttctagaaatcccacctcaccttcttgctctcattctcctggttaaagnggcttaatgttttanccntttatcgtgttggnatgttttggnagatattggcatttaaattccaagtttctaagtggtacctatgatcgagttagtgaagatctgggtgtcttatatt

SEQ ID NO: 410684 - DNA, 170 bp, Homo Sapiens
  misc_feature (82)..(82): n is a, c, g, or t
  misc_feature (97)..(97): n is a, c, g, or t
aaaaaagaaatatctcccccgtaagtcctaagtacttatgaacttgagagcctcccacaaatatggctaatattgtatctanactagcatcatggangaccatgggccagggactctgtaactgacaaaagctcattttacaaaagtaaagatcttacagcccacatact

SEQ ID NO: 410685 - DNA, 275 bp, Homo Sapiens
  misc_feature (99)..(99): n is a, c, g, or t
  misc_feature (104)..(104): n is a, c, g, or t
  misc_feature (113)..(113): n is a, c, g, or t
  misc_feature (142)..(142): n is a, c, g, or t
  misc_feature (150)..(150): n is a, c, g, or t
  misc_feature (233)..(233): n is a, c, g, or t
  misc_feature (236)..(236): n is a, c, g, or t
  misc_feature (264)..(264): n is a, c, g, or t
gaagactcattccaatgagttttggttgagtagtaaaacttactttttaccacggttgtcattatcacagtcagtcctttgaatataccaagacccaancattnccagaaatntgtctttagagaagagaggctcccattantataaaangaacaacaatgaaaaaaatctttatattccttagtaaatgtgactacttagtgaattttgtagtatatctcttagtatatttnagntcacagatgtttttgcaaaaacaatttnaataggttaca

SEQ ID NO: 410686 - DNA, 300 bp, Homo Sapiens
  misc_feature (19)..(19): n is a, c, g, or t
  misc_feature (40)..(40): n is a, c, g, or t
  misc_feature (89)..(89): n is a, c, g, or t
  misc_feature (139)..(139): n is a, c, g, or t
  misc_feature (146)..(146): n is a, c, g, or t
  misc_feature (161)..(161): n is a, c, g, or t
  misc_feature (173)..(173): n is a, c, g, or t
gtcctgaaagatgctaaancattaacatggcaaatatttnctttttgacacacaaacagcaaagagtaatctttagatttatgattttntttatacagttctacaactgtatatcaaaaataaggagattatataaaancttaaancaattaaagcaagantgtattcaccanttcaaatatgaaaactgtgtttcggtgtcagtatgtatttcttaaatcagtcaaatactaaagataatgtgcaactgaagagcaaagaccaagtgggacagttgaatcagtgtatcgagtcatatga

SEQ ID NO: 410687 - DNA, 333 bp, Homo Sapiens
  misc_feature (95)..(95): n is a, c, g, or t
  misc_feature (105)..(105): n is a, c, g, or t
gtaaggtcatgtcaaagagacagttgcaaagtctactcctgataccctggggaattgcagggaagcgtcacaggcagagcccagtggcacatgancatacatttncttctccctctgaggttggcacctctcaggcgtgtgcaggagaaacattggataggtatgtgggaacccaaggcacatattcacccagatgccaacttggagaggagcaaagagtggcaaggtatttattcaaaagaagtaatcgagaagagactgaccaccatggtgctaattaacaagtttaaatttccctattccccatcagggtgggctcaagaaggataattt

SEQ ID NO: 410688 - DNA, 418 bp, Homo Sapiens
  misc_feature (35)..(35): n is a, c, g, or t
  misc_feature (341)..(341): n is a, c, g, or t
  misc_feature (348)..(348): n is a, c, g, or t
  misc_feature (395)..(395): n is a, c, g, or t
ggagcttcttcccaccagggtgtgaagtagttttnacagcaggtgtggtgtgtcagcctgaaacctgaacagggcatcaccttttacctggtgccatcacagagtgctccagatttgggtaggaagaggatcccgtcacatccaggcatctcttggcagaggaaagggagctggtcagggagttttgaaaacaaaaattgtactataaaatgttttatttggggagctgtgctctggcagcatcctgatctgaaataattcctagccttttgtgtggttggtggtggctgatccatggaatcctgctgtgtcgctcagctgctgttaaaatattggttcanagaaatngactcaggaggaaaagtgtcaagtaaaagttaatcatttcatccttnctgaaagatagaattttgagttg

SEQ ID NO: 410689 - DNA, 210 bp, Homo Sapiens
  misc_feature (124)..(124): n is a, c, g, or t
  misc_feature (136)..(136): n is a, c, g, or t
  misc_feature (141)..(141): n is a, c, g, or t
  misc_feature (150)..(150): n is a, c, g, or t
ctggaagtggtgcgtttcccttttgctcacattccacctgctagaactctgttaaatggctataacctaactgcacaggaggctggaaatgtcatctagttgagctgtgtgcccaagaaaaggnaaaagactaggnttttncagtctttnccctctccaaaatgtctatcatcctcctaaatccagtgccagtacccctctgaccagctt

SEQ ID NO: 410690 - DNA, 308 bp, Homo Sapiens
  misc_feature (113)..(113): n is a, c, g, or t
  misc_feature (116)..(116): n is a, c, g, or t
  misc_feature (210)..(210): n is a, c, g, or t
  misc_feature (232)..(232): n is a, c, g, or t
atatagaattcattgtctaaaatttttattagcaatgtccttacatgattgtccttacatgattgtttcttatatgattgtttctaagcattaagcaaattatagtaaaattnctncctaaaatctgttatacattggataccatgtgagtctacaagcttaacaatgacggttttctgcctttctgacttatgtctcatactattaagnaagtataattttgtaaaaaggnaataatgtgttagaagaaagtatgaaaggcaatgctagcattattccaggctagtaagtactcagtaagtaaatct

SEQ ID NO: 410691 - DNA, 344 bp, Homo Sapiens
  misc_feature (111)..(111): n is a, c, g, or t
ggctgttggtccatgcaccatcagaggaagggggctgaacgggaaccagggaatcaaggcacagggcatggctctgtcctctaccccctgtgccatggggccccctccctnctccctcctttccaccagcatagatcagagataacccggaccagaagtaatgaggaacgcacacacacgcattcaaaacacaagacccatctcactactgctctcgaaaacagcctctaagcttgcagtgggttctagaaaatatggctgggttggctcctgcatcagatgagaaccttggcctacaactgacctcttgggatttattcaaaacaataaaacactcatgtatg

SEQ ID NO: 410692 - DNA, 112 bp, Homo Sapiens
taaaaaaattaacttgagccatattggccagtgccactgtagctgatttatttctttttgcaattcaaacaaatccattaagggcataagttcaagatgaatgaatgccacc

SEQ ID NO: 410693 - DNA, 173 bp, Homo Sapiens
  misc_feature (65)..(65): n is a, c, g, or t
  misc_feature (73)..(74): n is a, c, g, or t
ccgttttcacatacataacagcaattttatgacctgtatggccacagggagagcaaatgcaaatnaggaccanngtggaaaccccaacaaccaaacttgctgtgggggtcaagaaggaggaaaataacccacgggagcaacatattgacagagcaacctaaaatccactctgg

SEQ ID NO: 410694 - DNA, 267 bp, Homo Sapiens
  misc_feature (13)..(13): n is a, c, g, or t
  misc_feature (53)..(53): n is a, c, g, or t
  misc_feature (104)..(104): n is a, c, g, or t
  misc_feature (142)..(142): n is a, c, g, or t
  misc_feature (148)..(148): n is a, c, g, or t
  misc_feature (160)..(160): n is a, c, g, or t
  misc_feature (205)..(205): n is a, c, g, or t
  misc_feature (210)..(210): n is a, c, g, or t
aataaggcttgtnccaatagtgttgcagggtctttacccatactctccctttnctgttttctgagcatatttttaagagtggaatgggtatgtcctactgtccntgggggttatacgagatgcctgtggaatgttggatgtnccacgngtgacaaaattnttgaaattgtgagctggcataagccagaccattatcagttttaanttttntgggccgccctataaatgcaaaagttaagagtaggtgtttaataatatattgggtgg

SEQ ID NO: 410695 - DNA, 380 bp, Homo Sapiens
  misc_feature (66)..(66): n is a, c, g, or t
  misc_feature (148)..(148): n is a, c, g, or t
  misc_feature (207)..(207): n is a, c, g, or t
  misc_feature (209)..(209): n is a, c, g, or t
  misc_feature (216)..(237): n is a, c, g, or t
ccaccagccactcagtctttgaacccagcaatctctctcagcctcgatggctttgcactttctgtnctccctggatacaacgttcttgcattctgactctttgcatagttggtcctcccaactttcgaaacaggcttaaatatcagtncctcatagaagtatttcctgacatcatagcacttaccacaggctgcaattatgcatttntncatttannnnnnnnnnnnnnnnnnnnnntttaactgtgtggcttacatgggaatgcaagcttcgtaggattagggacgtgtccatgtcctccttgttgcatgcccactgccaagaatagtgtctggtgcatgataaatacttgtttcatggaattaattaatatactattt

SEQ ID NO: 410696 - DNA, 339 bp, Homo Sapiens
  misc_feature (26)..(26): n is a, c, g, or t
  misc_feature (173)..(173): n is a, c, g, or t
  misc_feature (256)..(256): n is a, c, g, or t
atattaaaggcccacctttgcctcanccaaaaagttggccttaaacaaaatggaacaacctgagaatcagtgctttaccttttttgaaattgcagaaatcccagcagaaattactaaaatctgatagtgtatcactgtaaaagtcacttttggtgtaggatttcagtcctttncagctctttttttgaccctgccgctgtgttttggtgtcaaggaagttctaggtttgtcctagagaaataggcacctctttttnctaatacaaaacatctgctagtttgatttacagtcttgctcaattaagcttaaggaatagggaagctaagaggaagtaaaatt

SEQ ID NO: 410697 - DNA, 357 bp, Homo Sapiens
  misc_feature (265)..(265): n is a, c, g, or t
  misc_feature (316)..(316): n is a, c, g, or t
  misc_feature (328)..(328): n is a, c, g, or t
  misc_feature (345)..(345): n is a, c, g, or t
ctccttggcatcatttagcctagtatatttgaaacagcaaattaactgtcatcctgtgtattcttttatttttttctcactttatagagtaaacattaaaaacaataacaacaacaaaaaccacctcttactatggtctttgttactttatgattctctactgtaatatgattaacatatagccatgcaccatataacatttccgtcaatgacagatcacatacacatccttatattgtagtactgtatttctaccgtacctttnctatcttcagatatgttttgatacacaaatacttaccattgtattataatngcctacagtatncagtacagtaacttgangtacagtaggtg

SEQ ID NO: 410698 - DNA, 209 bp, Homo Sapiens
  misc_feature (44)..(44): n is a, c, g, or t
  misc_feature (55)..(55): n is a, c, g, or t
  misc_feature (149)..(149): n is a, c, g, or t
  misc_feature (184)..(185): n is a, c, g, or t
aaagaatggacaatcaggttcttactgttttcaagacaattatnctttagatccncttggcatagtctattccaaaattaataattctcccttttgaatcaaaacaaatttagaaattctaacatgatttacagtaacaagctcttttnatctgctcatcagtagatagaaaatatgtgttttnnttttataactggcttttatatact

SEQ ID NO: 410699 - DNA, 316 bp, Homo Sapiens
  misc_feature (104)..(104): n is a, c, g, or t
  misc_feature (161)..(161): n is a, c, g, or t
  misc_feature (260)..(260): n is a, c, g, or t
  misc_feature (271)..(271): n is a, c, g, or t
  misc_feature (295)..(295): n is a, c, g, or t
cattcagtagtatgtgttcaaaaagggtaaaaggaagcctatgaagaagagggagaaaagaaacaattttctgagtatcagatgagtgactggaaacacctgantcctattaaatttcagagtcttggttatcaaaaggaattttaaaatatttgggaggngaaaaaagattcaagtaattaagaattataattcaagcaaaagatttcccaaaacttcatttaactgtattggagtgctttacacttggtttaacattngaaagtatgtncttttagaataaaaatgatttccngatgcatgtcctttacataga

SEQ ID NO: 410700 - DNA, 348 bp, Homo Sapiens
  misc_feature (78)..(78): n is a, c, g, or t
  misc_feature (131)..(131): n is a, c, g, or t
  misc_feature (240)..(240): n is a, c, g, or t
  misc_feature (322)..(322): n is a, c, g, or t
aaacaaaatgtgcaattcctttgatgatacagggtagaagactacagctggagtaacttgagttttgtacctactctnctggcgaaaacattaagttaaagaagggagaagagagaaacagactggttctncctctttctgtgtttcttaaggggtcttttgagaaggatgatgaaatgaatatgggtatatagaaatattaaaggaggtggtaattaagaggatcaatttatgtaaganggatcctaataaagataagagaatagctgataaaatattgatacgggcaaggcattctacttcattacatttaatgttgggngtttcaatatagcttaatggttcaga

SEQ ID NO: 410701 - DNA, 293 bp, Homo Sapiens
  misc_feature (77)..(103): n is a, c, g, or t
  misc_feature (105)..(198): n is a, c, g, or t
  misc_feature (220)..(220): n is a, c, g, or t
tgggctcaagggatccttctgcctcagcctcctgaagtacttgggaccacagtcacataccactatgcctggctaannnnnnnnnnnnnnnnnnnnnnnnnnnannnnnnnnnnnnnnnnnnnnnnnnnnnnnnnnnnnnnnnnnnnnnnnnnnnnnnnnnnnnnnnnnnnnnnnnnnnnnnnnnnnnnnnnnnnnnngtgtgagctacctgtgcctggnccaggttgcattttaaaataaggggtagggagcttttagatgaggcctcatgggaataggtcacatttgtgca

SEQ ID NO: 410702 - DNA, 373 bp, Homo Sapiens
  misc_feature (38)..(38): n is a, c, g, or t
  misc_feature (169)..(272): n is a, c, g, or t
actccagaacttcccagggctgccctgaagagcctgtntcttggtgatgggggtgcagccactggggccaggcaacagcaggaggctgaacccctaccataagcagtagaccatgagtgggctcctaagaacctccagttatccaaggccccatcagagtagctagatnnnnnnnnnnnnnnnnnnnnnnnnnnnnnnnnnnnnnnnnnnnnnnnnnnnnnnnnnnnnnnnnnnnnnnnnnnnnnnnnnnnnnnnnnnnnnnnnnnnnnnnnacaacccctgggctagacataaaagttctccaagtccccatgagaatagctagatacagcatgtcaatttggtgcactcaaaatccctgagctagacacag

SEQ ID NO: 410703 - DNA, 349 bp, Homo Sapiens
  misc_feature (311)..(311): n is a, c, g, or t
ggaaagatgcacaagaaactaataaagtacttttactaatttggcagggttggaggggtgaggaaaattgggaactgagcagatggggaattaaggggaggacactactcgctgtgtatctccttctatatcttttgaattttgaaccttgtaaatgtattgcctattcacacatttaaaaaaacgaaacaaagtgttctacccagtgggcatccctctctcagccatgcaccgtgacggcagagtacaagttacaagtcatgcctgagtctggggaggtccacggttgggaatccattcactggcttttntgagcaaggcaggtcacggggttacaaaggcatctttt

SEQ ID NO: 410704 - DNA, 363 bp, Homo Sapiens
  misc_feature (19)..(19): n is a, c, g, or t
  misc_feature (110)..(142): n is a, c, g, or t
  misc_feature (268)..(268): n is a, c, g, or t
  misc_feature (274)..(274): n is a, c, g, or t
  misc_feature (302)..(312): n is a, c, g, or t
atagtgtaaattgctaganccatttagaaaaagtacttgtcattgtctataaacaatcattcatactgctaagatcatttgaggattttaataataaaattataaacatnnnnnnnnnnnnnnnnnnnnnnnnnnnnnnnnnaatatatacatacatactcatccatactctcattcagcaattatatggggaagattgacattgatattttctgaattagaggttagaggttagttttcatatacactgattaattacatatttttnacatanaagttatcaaatgtaaaaacaatgttcnnnnnnnnnnnactggggcagcatggcatacattgtccttattcctcacccacctatatcct

SEQ ID NO: 410705 - DNA, 453 bp, Homo Sapiens
  misc_feature (176)..(176): n is a, c, g, or t
  misc_feature (386)..(386): n is a, c, g, or t
attgggtgggtgtgggggaaaattcagacctgctgtcgctcttcggaagctgtagaaagaagaggacttaggagtccctgcattgaagagtggaaaggtttaattatccctgtctcagcttgtcacttcatttgtctctgtgttttgtgtcccctgttcaggggccttaggttttnttgtcctagaataagcatctagtcttttgtggctagagggggcagtgatctcaagggcagagaaggggactgagcatctaactacatacttcttaaatagactttccatcccttctctcattttttgtaaatccctacctttacttcatgaggacccagtttttgggtctgtgggacagtactgcagtgtagcaaatctggctacttctngactttcgccaacttagagttaattttaaattgtgtctcattaaccttctttaaacccttataattt

SEQ ID NO: 410706 - DNA, 185 bp, Homo Sapiens
  misc_feature (90)..(90): n is a, c, g, or t
  misc_feature (112)..(112): n is a, c, g, or t
  misc_feature (157)..(157): n is a, c, g, or t
  misc_feature (170)..(170): n is a, c, g, or t
agggcagagccctcattgacccaatcacctcttaaaggttccatttctcaatactgccccactgggcattaaatttcaacatgagttttngaggggataaatattcaacccntagtaaactgtaaatgtagatcacaaagctcactttttgattcanctcatcccctggntcagaaggttatatt

SEQ ID NO: 410707 - DNA, 127 bp, Homo Sapiens
  misc_feature (95)..(95): n is a, c, g, or t
taaaacaggtgagtatgtggggatatcccctccattgttgtgtcttcattccagttctgagtcaggagattctcggaatttcctgggagtaacanttccatccaagttacaagttgcgttaggagaa

SEQ ID NO: 410708 - DNA, 203 bp, Homo Sapiens
  misc_feature (49)..(49): n is a, c, g, or t
  misc_feature (95)..(95): n is a, c, g, or t
gtatctattcatctattgatggacaggtaggttgcatccaaatcctggntattgtgaatactgctgcaataaacacaggagtaccaatatctctncgatgtaccattttcctttcttttgggtatacacccagcagtgggattgctagattttttggtagctctatctttagtttttttaggaccctacaaactgttctgcat

SEQ ID NO: 410709 - DNA, 311 bp, Homo Sapiens
  misc_feature (61)..(61): n is a, c, g, or t
  misc_feature (282)..(282): n is a, c, g, or t
aggcagatgcagttccagggttggttaattctacaacggtgtcagagctctggattaaatnctgttattctcttacatttgcattcatgttgtgggattattgctgctgcttttaaggattgcatctaaaatcaggaaggaatgggggcttttcattattaaagataaaagtatttcccagcagcctctagacttatcggcatctcagtagtcagacctggttcctgtgctgctcaccttaaaactgatcactgtcagaggagaatggggttcttgtgattnacttggtctaatcatggtatcatcccttt

SEQ ID NO: 410710 - DNA, 303 bp, Homo Sapiens
  misc_feature (24)..(24): n is a, c, g, or t
  misc_feature (43)..(43): n is a, c, g, or t
  misc_feature (164)..(164): n is a, c, g, or t
  misc_feature (205)..(205): n is a, c, g, or t
  misc_feature (242)..(242): n is a, c, g, or t
gaaaataaacgtcaaaagtattantcaataagcatcgtatttnagctgaaaagtcactatgtatcagtgactaaaacattttgtccttgctgacaaaaacttcctttatggtagactgtattaaggtcactttgatcctcaccgaaactgttaatatacaaganaaatcacagatacgtgtatctcttttgagcaacaacaaaanacattaaatggagaaatgattaacgttagacagcatnccctttaaaatatgtaggttttaaaaataacattataaagaagttctcagtattgtaccct

SEQ ID NO: 410711 - DNA, 344 bp, Homo Sapiens
  misc_feature (113)..(113): n is a, c, g, or t
aaggcacttcatttagaagctaacaacaagacaaagatgggtcggtcttgttcccttatctcagtgagctggaggtttgtacaagtttttatccaaatgtgccagaggttttnctgtctgtgcagccatgggcaggtctccaagcacaacaccatgtgctagttaccttgttagtgtctgcagcttgattttttccaggattccttttatgttatgcagggatgagatactgacccaagggccagggactttccagggacccttctcttgctatctaactaaagcaagctaactaacttgtttcagaattaatgagtattcacttttaattttgtaagacaaaa

SEQ ID NO: 410712 - DNA, 178 bp, Homo Sapiens
  misc_feature (92)..(92): n is a, c, g, or t
  misc_feature (118)..(118): n is a, c, g, or t
  misc_feature (122)..(122): n is a, c, g, or t
aatacaaacaagattgaaaaattatgaactcgaaaaattgtttacaaaacatatgacaggaattaaaatgactacaacataaagagcttttncaaatcaaagacaaataggccaagtnctgngaaaaagacaactcacaaagacagaattaacaactggccaatcaacaagcaaaata

SEQ ID NO: 410713 - DNA, 272 bp, Homo Sapiens
tcaataaatatcagttatcttcccctttccttgatcttagattacaaaaatatcagcaacatcctccagatatggacatgttgaaaaccaacaaaaaatcatagcttcttccaaaattacagaaatttatattaactaaccaacactggtttactccacaaaattcaacatacacattctaatgcatctatgtgtctgtaagtgcactgcattgaggccctactaaacacaaacttcactttatccattgctgtgtgtggacttcacccagg

SEQ ID NO: 410714 - DNA, 154 bp, Homo Sapiens
  misc_feature (84)..(84): n is a, c, g, or t
cacttttctcttttggcttccaggttgctgttgagatgtctttatctgccagtctgttctctgcaggtgatgttttctttctgntaagatgttttgtctttattatttgtggctttactataaagtgtgtaggtatgagttttaaaatttatcc

SEQ ID NO: 410715 - DNA, 340 bp, Homo Sapiens
  misc_feature (70)..(186): n is a, c, g, or t
cctcagcctcccaagtggctgggatcacacgcacatgccaccatacccggctaatgtttaaattttttgnnnnnnnnnnnnnnnnnnnnnnnnnnnnnnnnnnnnnnnnnnnnnnnnnnnnnnnnnnnnnnnnnnnnnnnnnnnnnnnnnnnnnnnnnnnnnnnnnnnnnnnnnnnnnnnnnnnnnttgtttctgtttaaagacacccttatttaatatatattgttgggttcattaacattgaactttactgacagcagcactattaactcatgcctgaactaagcttctctaacatgtaattttcctctgtgaggcatatcactatcttcttgcactt

SEQ ID NO: 410716 - DNA, 147 bp, Homo Sapiens
  misc_feature (102)..(102): n is a, c, g, or t
attaaaatagaaattctagaagagaaaaatataatgattacaaacaagagctcagtagccaaattaagagcagaacagttttagctaaatagaagactacgnactaggagacagtagaaaatatatagacagaagaacagaggaaca

SEQ ID NO: 410717 - DNA, 327 bp, Homo Sapiens
  misc_feature (72)..(72): n is a, c, g, or t
  misc_feature (92)..(92): n is a, c, g, or t
  misc_feature (119)..(119): n is a, c, g, or t
  misc_feature (125)..(125): n is a, c, g, or t
  misc_feature (135)..(135): n is a, c, g, or t
  misc_feature (178)..(179): n is a, c, g, or t
  misc_feature (227)..(227): n is a, c, g, or t
  misc_feature (233)..(233): n is a, c, g, or t
  misc_feature (261)..(261): n is a, c, g, or t
ggaagaaaaaggacacgttgtgggagctcagggcctgaggggctggaggacaggggtctagaaaggcatctntggaggaagtggcatccctnccaggccttcagagcctgggtgatctngatgtntgggcatttngggggcaggtgctaccaacgttacttaggcctggggctgcaanncctggctccacaaccctaaggacacaaccccacaccctcccacagacnccagtnctggccccctgggacacatgggcctggnagtagaccactaacctggtgctgggagagcatgcatgcatttacttccttcaaaagcgtgcctctt

SEQ ID NO: 410718 - DNA, 257 bp, Homo Sapiens
  misc_feature (155)..(155): n is a, c, g, or t
  misc_feature (161)..(161): n is a, c, g, or t
tctcttgccctggaatacaaggaggggaacatgtaatgaaagtaaatctgaactgtcttcctaaagggacatttctggtactttcgaaggtgcagactgaagacttgagtcaaggattgctgctcaccagactggcgagagagcatataaatgtntttgtntgtagtgtgcatgtatgttttgcagtgaaattacagctttccaagtgtatggcattgcctttagaagcaataagaaacgttattgctgctgagtga

SEQ ID NO: 410719 - DNA, 341 bp, Homo Sapiens
  misc_feature (263)..(263): n is a, c, g, or t
ctaggcctttaaagagaagatgagtctcaccaccttccacatcccccctctcctatctctgtttctagcatgcaactatgatgagttagttttactaacaacttacatgagattttatattccaagtaaagtttttcagaatctctcccagcaccaaagaccacccaaattaaggaagctcataatagtctaggaagctctttgtccacccagatggtcagctttttcagaactgaaaactttcatgttttcattttagagtncatcctgtgcagtttgtggcaatagctcagagcccataccttttatcaaatccccaggaacgcttatttcccatcctt

SEQ ID NO: 410720 - DNA, 337 bp, Homo Sapiens
  misc_feature (70)..(70): n is a, c, g, or t
  misc_feature (157)..(157): n is a, c, g, or t
  misc_feature (272)..(272): n is a, c, g, or t
  misc_feature (288)..(288): n is a, c, g, or t
  misc_feature (296)..(296): n is a, c, g, or t
ctctttgaaacccatagcccctctccttacaaatggttaaggatatggatggagaaagcagatacctttnctatagcctaaccggatattaataagtcatctacgtactggagcagacatatacattttggggtataaacttgttctaacacttgtnctagaatttgaccaaagagattaggggaatctttgaagcccgggggtagagctgtctatcgatactgttgctgtcatccagaatggggatcttcccattcggaaagcaaaaatgnctcagctgtcctcatnccaagggngcattctcaaaaggcatcttttaaacctattaactgtaaac

SEQ ID NO: 410721 - DNA, 323 bp, Homo Sapiens
  misc_feature (56)..(56): n is a, c, g, or t
gatcctaggcccccacttcctaagccatataaagaacataaggaggcaaagccgangaaacccaaaaatagagagaagagacagaatcaatgcttcaattgtgagaaagtaggccacttcaagaggtattgtcccaaattaaaatcagaaagagaagtcgtcccacttacgacctttgaggaggaataggggggttaggggctctgtctcttttaccttgaatcccaccaagagcccttgataaatttagaagtggaacccaaatctgagcttatgacctttttagtaggactcaggagcagcctgcttcctctgttttgtta

SEQ ID NO: 410722 - DNA, 244 bp, Homo Sapiens
  misc_feature (121)..(121): n is a, c, g, or t
  misc_feature (218)..(218): n is a, c, g, or t
  misc_feature (221)..(221): n is a, c, g, or t
tagatatacaaagcatttttatagtcacattttggtgctcaactaaggctccctgattacacctctgccatatggatagtaagtcacttaagcttgtagaggagtatatttaattctcccntttgattctataatttttaactatagaatctcagtttagcctgtaggttttctaccatgaaaggcatttctacccctactgtagggtaggaatgagnttnccaatcaaattattaaaagttag

SEQ ID NO: 410723 - DNA, 344 bp, Homo Sapiens
  misc_feature (110)..(110): n is a, c, g, or t
gtaaacatgattctctctccagtgcaatactcactccttcaagtttgggccttgttcacctctatatccctagccaagaactcgagtaataatttcaataaatacatgantttaaagtgaatgaccattcagtcatcagcccttaatttctacattatacaaattttattgtttcacttcaccaaaatttacagtagaagctacggaaagattatatgtatgagattcgcgttgcttctttcttctgaagatctccaagttgtgcacatgaaaaacatttatgcaaaattaatcttattcatgtccttgctaatctgcaaagtcggaactatcatcagtgttgg

SEQ ID NO: 410724 - DNA, 262 bp, Homo Sapiens
  misc_feature (164)..(164): n is a, c, g, or t
  misc_feature (194)..(194): n is a, c, g, or t
agggtctggtcacttttgaagtcctgggcatggttacatttcattcatactggtttttcaccaactgtcagggtttctgtgttccattagcacaaaatagctaaaagaagatattttcactgtctaattcactattttcatgttacatttctgaaataattganctttaggggcaagatactacttactgaagnacaggtaattactgagaacccacagcccagcaaattctaagggacagtcattttcctcagcccctccc

SEQ ID NO: 410725 - DNA, 327 bp, Homo Sapiens
  misc_feature (169)..(169): n is a, c, g, or t
  misc_feature (292)..(292): n is a, c, g, or t
gtcactggaatatcaataggtttctgataaacaagtaaatgtccctgagtctatgagctctaattcagcctcctcctagcacagcttcccagccgggatattccaaattttaggttatttttacaagattaataggttttaatatatattttacaagctcacttttttnctgtgtggattttgctttagagtccatgagagtaagaaacttctttaacccttatggattaacagatttggatacatatgtttgaatcaggtgacctaatttcctgttgatcacagcccaggnactctttcaaaattcttgtgattggtcatattttc

SEQ ID NO: 410726 - DNA, 326 bp, Homo Sapiens
aaaggtatgagccattgcttccagccagaaaacattttaaaacagctgaagaatattccactaatggatatattatttatagaaccaatttatattgtgttcacacttagagcgtttattaatttctgattattataaaacacaatgaatattgctaaatatgactttcagtatttctgtattctcaaaatagattattgtaagtggaattatcaagtcaaagtgtattaacatttctagagctctcaggagagcaaaacattgcaccagttgctttctaggaatggcttgtacaaggtttccatttccattaccagtggtatgag

SEQ ID NO: 410727 - DNA, 303 bp, Homo Sapiens
  misc_feature (27)..(27): n is a, c, g, or t
  misc_feature (215)..(215): n is a, c, g, or t
  misc_feature (237)..(237): n is a, c, g, or t
  misc_feature (267)..(267): n is a, c, g, or t
cccagcagaatcttcaactagaaattncttttgtggttgatattgggaaggtacttctagattccaggctctttgtaattactgatgagcaaacacttacagccgcacccaaggtcaaataggcaaagcctttccaggatacttaaggataattcgcacatctgtattggctaatccattcatccaagaaaggacaggcacagagaaaggaaagngagaagtagggcaaccaaattnctttcacaatacctcatgcctttagctttnctatctcaaggaattttccattaggcacaaagactt

SEQ ID NO: 410728 - DNA, 350 bp, Homo Sapiens
  misc_feature (231)..(231): n is a, c, g, or t
  misc_feature (279)..(279): n is a, c, g, or t
  misc_feature (296)..(296): n is a, c, g, or t
ctctgtccttttcaaagaaacgtactcatagtcattcaatgagcaggatttcccactgcacaagcatctatacctttggccagtgtagaaagagagtaaggtcataatcatatggagatgcatgctaggtttcagtagttacaatttactaatctcattcccatataaggcctttatatgcctgtaatggaatgggaaaatcaataagctttgaaaaggaacactattctncagagaagttcaatgggagatagttgagttggggaaattgccccagtncttcctttaagcatganatgagggctgtccctatgtatgtttactttccattgccttgggtgttatcactg

SEQ ID NO: 410729 - DNA, 176 bp, Homo Sapiens
atgtcaaataggtatgagtagaaatctcaaagggtgaaagatacagctgtttctagaagctaacaatttgaaggattaatctattacttgctgaaactgaactttcttttccaattagtcagacttttaacatccaggcaaaacattccatttccctgaataaaacaaagtaaatg

SEQ ID NO: 410730 - DNA, 298 bp, Homo Sapiens
  misc_feature (93)..(93): n is a, c, g, or t
atgtgataagtcacatttattgatttgcatatgttgaaccaaccttgcatcctagggataaagcctacttgatgatggttaataatctttttnatgtgctgctagatttggtttgccagtattttgctgaggactttttcactgatgttcgtcaaagatagtggcctgaagttttctttttttgtcatatctctgtcagatgctggcttcatagaatgagttagggaggagcccctccttttcaattttttgaaatagtttcagtagtaatgggtaccagctcttcctttgtacatct

SEQ ID NO: 410731 - DNA, 375 bp, Homo Sapiens
  misc_feature (39)..(39): n is a, c, g, or t
  misc_feature (88)..(88): n is a, c, g, or t
  misc_feature (146)..(146): n is a, c, g, or t
  misc_feature (183)..(183): n is a, c, g, or t
  misc_feature (205)..(205): n is a, c, g, or t
  misc_feature (213)..(213): n is a, c, g, or t
  misc_feature (236)..(236): n is a, c, g, or t
  misc_feature (279)..(279): n is a, c, g, or t
  misc_feature (319)..(319): n is a, c, g, or t
  misc_feature (331)..(331): n is a, c, g, or t
  misc_feature (353)..(353): n is a, c, g, or t
tttaaacagctctcttggtgctacaggtagggctttttngcaagcagatgaaggtagcctaaataggtgattggtatgtatgtttgtnattgccctgaccttccttagttgttaagatagatcagtgagtaatgtagtcatctttnctagtgggaaatacacttttgtatgggaatgattganctgataatgcaaggtgaaagtnttgttttntgtcaaaatattcatttctcccntaactgttgagtaaacgtagccattagtgtatgcatacaattncccttaatcctcagagcattcaagcagcaggtagacactncctgcttgaggnaacatattttgagtgaggatgnggcattttttaaaaggcggcat

SEQ ID NO: 410732 - DNA, 145 bp, Homo Sapiens
  misc_feature (62)..(62): n is a, c, g, or t
ctgcatatttagacaatgactactcaaaggcaaagactttaccttatttatacatatatttncagtgcatgaaaaataagtaagcaggaaataaatgtttggttagttaaattaagacagttaaggtaattctttaaaaataaaa

SEQ ID NO: 410733 - DNA, 278 bp, Homo Sapiens
  misc_feature (260)..(260): n is a, c, g, or t
gagcaaagccattccaagctgcagggctctgggctgacttccaacttggaacagagcttttctaattatcgcttttacttttgactttgtggaggatatctctgaagaaaggagttattgcttaacaaatattacttagtacttaccacatggcagacatggggatgtttttaaacattgaaaaccaaagctttagagtagtatctgcttgtccatctggctgcctcacaatcatcccaggagactgccccagaatctgnaatatttaaggattcttg

SEQ ID NO: 410734 - DNA, 160 bp, Homo Sapiens
  misc_feature (36)..(36): n is a, c, g, or t
  misc_feature (66)..(66): n is a, c, g, or t
  misc_feature (102)..(102): n is a, c, g, or t
aattattatttagatcattatagatgcataattgtncgtgaaatggctttgctggagctggttttnagggtaactgacaggagagagaatttccagtaattnctcttctgtttagagagacagctatgtctttcctgtaaagtgatctctttcttgtttt

SEQ ID NO: 410735 - DNA, 315 bp, Homo Sapiens
  misc_feature (180)..(180): n is a, c, g, or t
  misc_feature (239)..(239): n is a, c, g, or t
  misc_feature (280)..(280): n is a, c, g, or t
gtgttgagtgctaaagacttaaaagagttataaagctgaacccttaatcttaagaggtttataagtgagaacaagaatctccaaatcctgtactgtttaatatcagcatgagactaaaccactgtcctaagaagacaaccttaatttgaatcaagttattttagagtgatgtgttttctnaggcagctctcagaaggttattgtctggtgttaaaatagtgaaattgaggtaataacanggttaaaatcggtggacatttaaatacacacaagacttcanttgctgggtcctccattgattaatgaaaaactggt

SEQ ID NO: 410736 - DNA, 285 bp, Homo Sapiens
  misc_feature (65)..(65): n is a, c, g, or t
tttgtggtttcctgccactgttttggcatgcttgttgttgagattgagaaatagtagtgtatatnatatttggcaattatgcttataatctgaaagtgtttgtgtaagcttaggaggtgtaaactttttacttcgcaaacagggaaacagagatccaggcagggccaggggtgttttgggtgagatcaccaaaggcccagaaataaagagtagaatccatgacatctcaactccagaagtactttctgtgcctctgaaacatgatgcttcacttacttaggtttt

SEQ ID NO: 410737 - DNA, 299 bp, Homo Sapiens
  misc_feature (51)..(51): n is a, c, g, or t
  misc_feature (101)..(101): n is a, c, g, or t
  misc_feature (134)..(134): n is a, c, g, or t
  misc_feature (167)..(167): n is a, c, g, or t
gagaatgtgagatgtgaaaattttccaactgaaaaaaggctcacatttctntttataatggaaaattgctcttagccaactatgactctatcacaccaggntctaggagacatgatgagaaatgcttggaaggntcagcaccaaaaactcagtaaattaggcaaganctttcaggttcctatattcagacaaagaacacttctggcaggaagaacaatactatggcagactctaggaaatgtgaaataaatacacaactttgatttcaaaaaagactaaagggctactctttcatacct

SEQ ID NO: 410738 - DNA, 293 bp, Homo Sapiens
  misc_feature (60)..(60): n is a, c, g, or t
  misc_feature (65)..(65): n is a, c, g, or t
  misc_feature (173)..(173): n is a, c, g, or t
  misc_feature (259)..(259): n is a, c, g, or t
gtttttccttcctattctcaagttatcaaactcctactcctgctgctgcagtcacttcanatgtnatctctttccctaaggctccttggcaagatggaaggggctccttctgtttgtccccctactgccattcatagctgatgagagggtgctgccttgtgtccacacctctnatttaacactcctcagaatgtgcgacctgtttccctttgagctactctaagccatatgtctcatgcctctgtctagccccaagggnccagcagcacagctgccccacagtagtaagttca

SEQ ID NO: 410739 - DNA, 311 bp, Homo Sapiens
  misc_feature (69)..(69): n is a, c, g, or t
  misc_feature (265)..(265): n is a, c, g, or t
cagggctttcaagttgaagacagcaaccaaaccttctcctcctgccattccccaagtgagatatttganctaaaaccccagagcgccctcctgttcaaaaactgaatgaaggctctattttcaatagagaaatagattcaaaagaccaaatgaagatcagaacattgtgtggtgggtatttgaagcaaagggaaggaaattaggataaaggggttttctgcagggattcagtcagttgctggttggtctgtagtatatgaaattncagctaggaaaagatttgaactcttggccacacagtgttaaatagc

SEQ ID NO: 410740 - DNA, 298 bp, Homo Sapiens
  misc_feature (112)..(112): n is a, c, g, or t
  misc_feature (121)..(129): n is a, c, g, or t
  misc_feature (231)..(231): n is a, c, g, or t
  misc_feature (250)..(250): n is a, c, g, or t
cgcatttattttaatcaatcgaaaaccctgaagaaaggtcaaaaagctatcttgagagtcttttagattggtaatatttagtgtcatgcttccccaaggaatatagatactnctgaagtannnnnnnnngaaaatttatacagatagtagctgaatacaataggtatctaaaaccagtaaatgatgttgagaatgaatgaaatgattaatgtagccaaatatagtattaancattaattttatacagaangaaataggattggtacagagaaaaattaaaatgtacaagattttttaa

SEQ ID NO: 410741 - DNA, 303 bp, Homo Sapiens
  misc_feature (193)..(193): n is a, c, g, or t
taaccagccagactggaggtatttcacttaaatcccaagtattcagttgagactccagaaagccataggaaaaatggctactctagccttaagagtgtcctaacaaaaacttaaagtaagccttaatatgatcagactgatccaccagaaaataacttctttccagaacaaaattcaatgcactttaaagganaataacaaatccagattatcaataaatacagtacataatacccagtaaatcatcaagttatgaggtatgttaagagacaggaaagtgtgacacataatctgggagggaaa

SEQ ID NO: 410742 - DNA, 288 bp, Homo Sapiens
  misc_feature (78)..(78): n is a, c, g, or t
  misc_feature (222)..(222): n is a, c, g, or t
ggtttccaaaggtatatgctttcactaaggaatgcagcaggaatctcactaaattataagtcatgattactgcttgtnaatttgggggatctttgcggcaaggggacaacagacaacaagaggaatcaccatcctagaatagcagctgaccctgaagatcagaagctagggctgtcaagacacaatgatgaatatgtctgacaagcaggagacccacttgantgcttctcggtgttcccttgtccagttttgttggtaagtggacagaccagcagccccaagctgaga

SEQ ID NO: 410743 - DNA, 228 bp, Homo Sapiens
  misc_feature (20)..(20): n is a, c, g, or t
  misc_feature (22)..(22): n is a, c, g, or t
  misc_feature (98)..(98): n is a, c, g, or t
  misc_feature (122)..(122): n is a, c, g, or t
  misc_feature (189)..(189): n is a, c, g, or t
  misc_feature (212)..(212): n is a, c, g, or t
gaagcatgctgaggtgactngnactccagatctacggacttgcccaggtggtggcggggacatccactgcaatagacagtgggattccaaggtggggntgctcaggaaccagagagaggctngcaccgcaggcaacggtgcaggtgaatggactgaacgatttcatccgttcttccaaggtggggcttntcaggtaccagtgagaggctatncaccccaggcaacggt

SEQ ID NO: 410744 - DNA, 170 bp, Homo Sapiens
  misc_feature (138)..(138): n is a, c, g, or t
gaaccaagtaagtaacatatgcaacacagtttaatagtatgattatatattgaggagtctgttcaaatgctttccaagtaagaggtagaaggctggaaacagcatcaccctcaagcttaccacaacaacaaaaaggcngcttatgtaaaaaatcccacattttctttaac

SEQ ID NO: 410745 - DNA, 288 bp, Homo Sapiens
  misc_feature (36)..(36): n is a, c, g, or t
  misc_feature (82)..(82): n is a, c, g, or t
  misc_feature (114)..(114): n is a, c, g, or t
  misc_feature (133)..(133): n is a, c, g, or t
  misc_feature (177)..(177): n is a, c, g, or t
  misc_feature (197)..(197): n is a, c, g, or t
aggtctataccctgctactattgtaatagacttttnctgcaatcttttggtattgtacagttacaaaagaacactatatctnctgataccctgtgaaataaaaataacaatttnctttagcgcaattattttnccagtggaaatgctgaaaattaaaagcatattaatatgtttctnctgttagtgagttgcttttncttcttttgggacagagagtaatgaatgagcactgaggtattgagggctcctgcagttaatagccagagaaggtcttaatttaaggtactc

SEQ ID NO: 410746 - DNA, 321 bp, Homo Sapiens
  misc_feature (85)..(85): n is a, c, g, or t
  misc_feature (91)..(91): n is a, c, g, or t
  misc_feature (203)..(203): n is a, c, g, or t
  misc_feature (252)..(252): n is a, c, g, or t
ggttggtgaatgatgcagtggagttggcacttgattaaatgtaatgaacatagtattgaaggctacagggttgatgactgttttncctttnatcactgaaatgtggagaagcaaccttgacagagaacgtaaatacaatctatggattcaatttactcaacctgttgagtatcaaagtgcctaatctgtgggagtagagaggngacagtccaaatgctatagcttgaatgattttattatcaaaagcatcangtttaaaaattcattaacttaaccctgggctatctatcacaggttatttaatttccctatcccttgggg

SEQ ID NO: 410747 - DNA, 232 bp, Homo Sapiens
  misc_feature (49)..(49): n is a, c, g, or t
  misc_feature (212)..(212): n is a, c, g, or t
ttgagtatctaaatcactgtattataatcaacttcgttttctgtaaatnctttcataacttagggaatcatggttgctgaagtagagaatgtcacatattgataagtaaagcaatgacctcacttgaagtcaaaagttactatatctctttcctaaatctaatatattgcttagcttaactgaaataggtcatttaaatcgcttgtcatttngcagaaagaagaatattttt

SEQ ID NO: 410748 - DNA, 351 bp, Homo Sapiens
  misc_feature (49)..(49): n is a, c, g, or t
  misc_feature (185)..(185): n is a, c, g, or t
  misc_feature (278)..(278): n is a, c, g, or t
  misc_feature (280)..(280): n is a, c, g, or t
tcagcagccaggtggcaaacatcaattttaggtagggacgttgcaagtnccccaagtcacatgtcaacatagagaataggggaggtaggagtgggggtggcagctgcagagaacaaaagaggaaacgaataagataggtccgacctaagaaaaaggaggtgtctatgggctgacctgatggagtnaaccagaaattcagacggcagcacagctagatactttagaactaccggcatcctaaaatctggctcccaagcctctgtcataaagtaggtctntntcctcggtatagtcacttaaccacactttgcaatcacttcttcctcattttgtaaaattcagaggagggct

SEQ ID NO: 410749 - DNA, 308 bp, Homo Sapiens
  misc_feature (27)..(27): n is a, c, g, or t
  misc_feature (71)..(71): n is a, c, g, or t
  misc_feature (109)..(109): n is a, c, g, or t
  misc_feature (135)..(135): n is a, c, g, or t
  misc_feature (230)..(230): n is a, c, g, or t
agtagtcagtcactcagaacaaagtgnagtcttttacaggggtgcagaatcataagcctggtccacaagantcaaatgggccagactttgaattcagtcacccattttnagattatctgagccatcatgaaattntttgtatttgtgtactacggaagatggggatttgctaatttcaagagacctcctggaattcatccacctccatccagctattcctgacctccttntggggaagggagaagggaaggtcttagggaattaatctccagtaacatcactaccgaggtgagcaaggcaaaacctgt

SEQ ID NO: 410750 - DNA, 170 bp, Homo Sapiens
ccctttttcaaactcagatcaaattgtacattaacaaatatagtaacagcactgctagatttacacctcacagaaccccactgaatttatattcacatgaaaccttccaaagattgccagctcacttcctcagaagcatgcaaccacagcaagactccaattaccccccc

SEQ ID NO: 410751 - DNA, 322 bp, Homo Sapiens
  misc_feature (193)..(193): n is a, c, g, or t
cctaactttcaaaatattctttcttctttgctataaattgctccatgctgcatctccattgctgtgtttctcttgtttaaattctttaaactaagaatacaagaacccaactttcacaacagccatcaacacacgtggcaattttaaaatgtgttcacagttctttgatactcttccagtattcttccctttnctcttgaatgtggatgtactgagtgactcgcttctaaaggacttagtgtggtataaatgagtatgtgatttcagagagtagttcattaaaaacacactgccacttcaggctcccttcagtccctcggtt

SEQ ID NO: 410752 - DNA, 328 bp, Homo Sapiens
  misc_feature (154)..(154): n is a, c, g, or t
  misc_feature (230)..(230): n is a, c, g, or t
gaaagtaagagtggtagaaggaaaagtggcagagagaaggcaaagataacaggtctgcaggttcctcctgagcctgctttatgcaagcaaagacaacagtcaccagcctcaaagcccatttctgcagcacagccactccgtttcttgggttgtnccttcttccatatgtgtgatagaaagctataaaatactacttatatcatgcccccaactatcacttaatgcctgtntggaggcatgaaatatttatggtaatgattagagtctggcatgcatgtgttgaggttcaaagttctttaagagaatctccattagcttaataaaatgg

SEQ ID NO: 410753 - DNA, 350 bp, Homo Sapiens
  misc_feature (54)..(54): n is a, c, g, or t
  misc_feature (167)..(167): n is a, c, g, or t
  misc_feature (175)..(175): n is a, c, g, or t
  misc_feature (240)..(240): n is a, c, g, or t
gacatattggaaagcaatttggcactgtcaactaatagtgtgtgtgtctctctnatgagttattgtatctagtgtggtgttactggatgctgaaaaacacttcatgaatacttcttgcattcaaaatttcatcaagaataatcaacatgttcagttttatttctgtncatttttncttgcatggtgagctttgagaccttgtacaaaatccctgatctttctgggcctcatctgtgaagnttatgatgatcacggagccctgtgacacattcctcagagatccagggtgctggctggtgagggagctgggacaggtgctctgtgctgaaattcaccaaagttgtgaaggg

SEQ ID NO: 410754 - DNA, 289 bp, Homo Sapiens
  misc_feature (163)..(163): n is a, c, g, or t
  misc_feature (213)..(213): n is a, c, g, or t
  misc_feature (262)..(262): n is a, c, g, or t
catttaagaaaattgatgttaaaataacccaaataagcctgtgtcttaagatagacaaaagaaacaatatattgcttttgtatttaaagtagtttatttttactagagtttactaatttgtcgtattgtacatcctttgtatatgtggaaggtattcattatnctaatgtaaccataaagcagaaaatctgtaaaagagtaatatggaaagcnctttcctcattatgtttgtaaataggggaccctaaagtaagaataacantgaaaataagactcctaatctgaacgt

SEQ ID NO: 410755 - DNA, 277 bp, Homo Sapiens
  misc_feature (53)..(53): n is a, c, g, or t
  misc_feature (200)..(200): n is a, c, g, or t
  misc_feature (239)..(239): n is a, c, g, or t
tgagagttaggaagaatattctagactattagggataattctaagtatctttnagtgttcccatgtccagtgaaaaacgttaatgtaagacaaagcaaccccatatacacagtccatcaaaggttctaataccttagagttgcaagattcatccatcccaccaggtgaaaaaacccaaccagccaaggtgtttgtaaagnaaaataaaacatgaaatgcatagtcaaggaagggcattntaagcaccaatggcctcatgaccaattgcagtacttga

SEQ ID NO: 410756 - DNA, 296 bp, Homo Sapiens
  misc_feature (82)..(82): n is a, c, g, or t
  misc_feature (121)..(121): n is a, c, g, or t
  misc_feature (182)..(182): n is a, c, g, or t
caggcagccaggttaaggcagtggtaagggcttgtggaaatcctcttctacctgtttttccttgggagatggggagattttntaaggaagagaaggtatgaagcagtcaccctagagaatnggcagatgactgtcctagggaaatagagtggcattgctgggcagcaccaaaggcccacttnaggttcatggtataaactgatgagactaatgagcctggtcgtgtggttttctaccgcccatttagttgcctgggtaaaggtggagagctactgaatttaatatttatccctaag

SEQ ID NO: 410757 - DNA, 420 bp, Homo Sapiens
  misc_feature (81)..(81): n is a, c, g, or t
  misc_feature (199)..(199): n is a, c, g, or t
  misc_feature (208)..(208): n is a, c, g, or t
  misc_feature (368)..(368): n is a, c, g, or t
  misc_feature (392)..(392): n is a, c, g, or t
gtagcaatggaaagcaccttcattcaatgtaaatgaagaagtatttgctgacacaaatgatacctacattaagtggatttncctgaagaacaattatggagaattgaggagctgcttttcctgcattttgcaaggcaagatagggaatacagttaggcctccaagagcacattttcacaattgaaagtatgtgtgagtntggggtttngggggttggtggtgagaggacagtggttgaatatgctttgccagggatgcctatgatggcaagaacttgctggaaaagtgatcccgtggagtctctagaagaaacccagaacaatgaggctggccacaggtaaatcttaggcataaggaaaacaagagtntggatgatccaacagggagggggnagtataaagcgaatttgggaagcaggat

SEQ ID NO: 410758 - DNA, 240 bp, Homo Sapiens
  misc_feature (30)..(30): n is a, c, g, or t
  misc_feature (39)..(39): n is a, c, g, or t
  misc_feature (118)..(118): n is a, c, g, or t
  misc_feature (120)..(120): n is a, c, g, or t
  misc_feature (129)..(129): n is a, c, g, or t
  misc_feature (151)..(151): n is a, c, g, or t
  misc_feature (181)..(181): n is a, c, g, or t
gtaactaagcagcatccagaaactcatganctgtttctnaaacacacctttatcaaaaaggcaccaaaatacactgtttttgtaactaaatggcatccaggaaaggtgtgcccatttnantggtttgcnatttgtaccctgggcatctctnattgtggtcctagaatatattatagaagantatagtggaaaagtcgcatgtaaatagattttaaaacacactgaatatctggtaagttt

SEQ ID NO: 410759 - DNA, 179 bp, Homo Sapiens
  misc_feature (139)..(139): n is a, c, g, or t
  misc_feature (157)..(157): n is a, c, g, or t
  misc_feature (162)..(162): n is a, c, g, or t
ccaaatgcccggatgcaacaatcagttcttagaaaggcatgtgaaccaatccaagccaaaaatatgcaatcctctgacgttactggaaactgttagaaaaaggaggtatggtctggacttaaactcaagaaaatataancacagcattgtgtggggncactngaaacaggatggctgag

SEQ ID NO: 410760 - DNA, 150 bp, Homo Sapiens
  misc_feature (40)..(40): n is a, c, g, or t
  misc_feature (97)..(98): n is a, c, g, or t
tgttggcgccttcattctcatcccgttagccgcgttcttncttacggccctgctgtcaataggacatccttgtggagcaccgatctgtgcaggacanngcaccaggtgctgggctgggcagcagcaagaagaggggtccccgcaggctag

SEQ ID NO: 410761 - DNA, 340 bp, Homo Sapiens
  misc_feature (154)..(154): n is a, c, g, or t
  misc_feature (276)..(276): n is a, c, g, or t
  misc_feature (316)..(316): n is a, c, g, or t
gggttttatggtaccagttactataatgaacatagtaaaaatgaaattaattgtacgcctttgcttgacaatataatgaaaagaattttatggttgattgttgcccattgggtttctttttactgtccttgaatttgtaataagtcagattgtnctctacctcttactacactgttttacaaaatagaataattggtaaagctgtatttaaagctttaccttctcttgaacaaagtcacaaagactaaccacagcaaattaaaaatatggaaattncttaagcaaattggaagtgactatacattcatttgaaggnaatatggggcatgtctggttactt

SEQ ID NO: 410762 - DNA, 228 bp, Homo Sapiens
  misc_feature (41)..(41): n is a, c, g, or t
ctcagatgtttggacaatgtgtcgtcatgtctgcaactttncagtggttcagccaaagaagaaattgtccgccatgaacaagagcactctcctacctaacggtgccattgtcacgcctaagaaacattcatacaatcttattgtctgatacagactgtatgtaaatccccaattgtcccaaaaatgtccaagagcttattgagtctaaaatacaacccaagatcacct

SEQ ID NO: 410763 - DNA, 198 bp, Homo Sapiens
  misc_feature (71)..(71): n is a, c, g, or t
  misc_feature (95)..(95): n is a, c, g, or t
  misc_feature (120)..(120): n is a, c, g, or t
aataaattcaaatggtacaaaaagggataaaacaagaagtgaatgccttaaagtccattttgtctgaaatnatgattgcaacccctgcttttttnctgttttctgtttgctttgtagatnttcctccatccttttattttgagcctatagatgtcattacatgtgagatgggtctcttgaagacagcatactattggg

SEQ ID NO: 410764 - DNA, 312 bp, Homo Sapiens
  misc_feature (168)..(168): n is a, c, g, or t
  misc_feature (184)..(184): n is a, c, g, or t
  misc_feature (229)..(229): n is a, c, g, or t
  misc_feature (284)..(284): n is a, c, g, or t
ggatcatgcctttggtgttatagttaaaatgtcattgccatacccaagatcatctaagttttctcctacattattttctaggagttttatacttttgcattgtacatttagctatttggtctgctttgagttaatttttgtgaagagtgtaaagcctgtgtataaatncatctttttgcatgtnatgtctagttgttccagcatgatttgttgaaaagatatgtttgcnccattgtattgcctttgcatcattgtcaaagatcagctcattatatttatgtggntctatttccaagctctctattttggtcc

SEQ ID NO: 410765 - DNA, 207 bp, Homo Sapiens
  misc_feature (22)..(22): n is a, c, g, or t
  misc_feature (149)..(149): n is a, c, g, or t
  misc_feature (152)..(152): n is a, c, g, or t
ataaagttggagtatggctgantatgggagctgtaggttaggattccatggagacgataatttaggaggggactgtcccatcttaaagatggggcattggagctaagaatcacaggggaggatacgctcaggtggaaggggtgacaggngtnagaagtcacttggatttagggagtgagggagaaatttaaggtaatacctagattt

SEQ ID NO: 410766 - DNA, 267 bp, Homo Sapiens
  misc_feature (39)..(39): n is a, c, g, or t
  misc_feature (134)..(134): n is a, c, g, or t
  misc_feature (147)..(147): n is a, c, g, or t
  misc_feature (160)..(160): n is a, c, g, or t
  misc_feature (229)..(229): n is a, c, g, or t
aaaataaaaacttgtttaatacaaagcagtctgaaactnttgaaccaaaacactctacctaaaagcctactactatctaaccaatagtgaattattaatacctaactattccttggtctgatcccacatattantctctctactttnattcttatttgtnaccaccacaattcaagctgctatacccaacaataccctaaaacaggacaaaacagtatttccaattctnggaactcctacaaaggacaagaggaataatatacctaa

SEQ ID NO: 410767 - DNA, 399 bp, Homo Sapiens
  misc_feature (64)..(64): n is a, c, g, or t
  misc_feature (111)..(111): n is a, c, g, or t
  misc_feature (122)..(143): n is a, c, g, or t
  misc_feature (314)..(314): n is a, c, g, or t
atttaatatcttacattacattaatagattcttaatactaaaacaattatacttatatattgantctgaatactgaaccttaatactttcaattttacaattaattctgtnctgttatgggnnnnnnnnnnnnnnnnnnnnnngtgagatgcagtcttgctctgtcacccaggctggagggtaagagtgcattggcacgatcccggcccaaccgcaacctccgcctcccaggcccaagcgactctcccacctcagccccttgagtagccgggaccacaggcgtgcaccactgcaggcagataattttatttttnatttttagtatagacagggtttcaccatgctgggccaggccggtctggaactcctgacctcaagtggggccaccagcctcggcct

SEQ ID NO: 410768 - DNA, 372 bp, Homo Sapiens
  misc_feature (144)..(243): n is a, c, g, or t
  misc_feature (256)..(256): n is a, c, g, or t
gtcaaaactaaatttcaattttatgtttccttaaatttctaataagtatctacatgtttttgggatcagccatataatttactaagctaaaattaaataaattttttaaggatagacaatggttataattctttgatgaaagtnnnnnnnnnnnnnnnnnnnnnnnnnnnnnnnnnnnnnnnnnnnnnnnnnnnnnnnnnnnnnnnnnnnnnnnnnnnnnnnnnnnnnnnnnnnnnnnnnnnntcttttactcttnctttcagaattttgaagatcaagtgtaattatagcccagattctgttgcatctgtggttattctagatctctagggttactggagtaaattattcgttaaacctcttccagtcctg

SEQ ID NO: 410769 - DNA, 251 bp, Homo Sapiens
  misc_feature (63)..(63): n is a, c, g, or t
  misc_feature (93)..(93): n is a, c, g, or t
  misc_feature (108)..(108): n is a, c, g, or t
  misc_feature (196)..(196): n is a, c, g, or t
  misc_feature (217)..(217): n is a, c, g, or t
  misc_feature (223)..(223): n is a, c, g, or t
cccatcccttgctactcttactaatgcattctgccctctagccaccagaatacttgctttctnctggaggtagcaaagctttcaagccttttnctcacactgtttctnctgcatagaacacctttggcaactttcttcaccaagcaaatatcttttttaatgtccagttttaatgtaaccttctctgggtagtctngactcacttatactgaaatantccttnccttaatgtgatccctcagcaccttgtg

SEQ ID NO: 410770 - DNA, 183 bp, Homo Sapiens
  misc_feature (31)..(31): n is a, c, g, or t
  misc_feature (66)..(66): n is a, c, g, or t
  misc_feature (90)..(90): n is a, c, g, or t
  misc_feature (124)..(124): n is a, c, g, or t
  misc_feature (153)..(153): n is a, c, g, or t
ctgggaagatcagtctgtggctattaatgtnatttgtccaccatgttgggccataagaagattgtnaattgccatgaggagtatgctttnctgaaactttctctgaaatgtataacagcttcancagcttagtagaaaattcccagacatttnctggtcaccaaacagaggaggtcagatatt

SEQ ID NO: 410771 - DNA, 158 bp, Homo Sapiens
  misc_feature (74)..(74): n is a, c, g, or t
  misc_feature (123)..(123): n is a, c, g, or t
  misc_feature (134)..(134): n is a, c, g, or t
  misc_feature (143)..(143): n is a, c, g, or t
atggccgaactggaccaggagcaaggggtacacagcacagcagcataggggtggggaagggcaggtcttctctnttcgaggctctgaggagatcagtgatgtggtttcaaatccaggcctctntgcttactgtntgtggcttngaaagtcacttatca

SEQ ID NO: 410772 - DNA, 125 bp, Homo Sapiens
  misc_feature (93)..(93): n is a, c, g, or t
  misc_feature (97)..(97): n is a, c, g, or t
ttgtttcagatgaaaaagcatcatactctatgggtaactggttaactcaccttattctgatatatggaatgccatttcacgaagctgaaaggntggntcctggggaaggttggagccagcttgca

SEQ ID NO: 410773 - DNA, 280 bp, Homo Sapiens
  misc_feature (209)..(209): n is a, c, g, or t
ctcaaagaaacataccacctcaaagacacaggcataccgtgccttcctaatacacaaatgaggattagaaaaacagagaactacccatgttgccttgccctctttcctcaaaccacactagcaggcacaaagtaaacaagcaagaagagtctgccactgggagtgggtaaacagcacgccgagagatacatgtagaataaatataaaanttaaaacaatactggacacattgtattcaaactccttaaaaccaaagctaaagagtcaaagttacaggtag

SEQ ID NO: 410774 - DNA, 199 bp, Homo Sapiens
  misc_feature (93)..(93): n is a, c, g, or t
  misc_feature (126)..(126): n is a, c, g, or t
  misc_feature (158)..(158): n is a, c, g, or t
aattccgcacaataatgtgtcaagagccctggacttattgcttctgggacgttagcaaagatcaagcgcagaccactggctttggggtctganaccccaggagagtcccggtttcgtgctcatgtnttatgtgacccttgacccctcgttcaattctnacgtgcttcactctcctaagccatgcaaaagggacataagg

SEQ ID NO: 410775 - DNA, 190 bp, Homo Sapiens
  misc_feature (79)..(79): n is a, c, g, or t
  misc_feature (142)..(142): n is a, c, g, or t
gaactgcagaggttcacagaaagtggcacatggtaagcactcagaaagtgcttgctgcactaaagggaacgatgttgantaataatcactggtacgtgaataaaccccacatgtgctggacatacacagagtcccatattantgagggcacactctcagatgcatctggcccgcagaaaacctggactaa

SEQ ID NO: 410776 - DNA, 343 bp, Homo Sapiens
  misc_feature (49)..(49): n is a, c, g, or t
  misc_feature (118)..(118): n is a, c, g, or t
  misc_feature (139)..(139): n is a, c, g, or t
  misc_feature (160)..(160): n is a, c, g, or t
  misc_feature (177)..(177): n is a, c, g, or t
  misc_feature (195)..(195): n is a, c, g, or t
  misc_feature (240)..(241): n is a, c, g, or t
agtatttgctttacctacttaaaaaagcacaacactatatttatttttncatacagtctgatatttttcctcttttaattggtgagtataatgcattcatatcaattatgattatttnggacttctccccatcattgtnctgggattattttgaattgtnctttcccctattctgangttttttttcccactatnttggtaattatattcattaggcttatttttagtaattatatagcnnttaacctgcatacttaataacatatgcagaatatcaaaatactcaccctcatcctgaattataaatgtcctaagagtgctttagatctgactgcatcttacg

SEQ ID NO: 410777 - DNA, 181 bp, Homo Sapiens
  misc_feature (49)..(49): n is a, c, g, or t
  misc_feature (68)..(68): n is a, c, g, or t
  misc_feature (118)..(118): n is a, c, g, or t
  misc_feature (133)..(133): n is a, c, g, or t
  misc_feature (164)..(164): n is a, c, g, or t
cctttctaaaagtcacaatgctggcagcatcgcctctttgtagcccggngcagctgctgccatcacgntggctgtggcggaaggaggtcgtgggccgtggcggtgggagcagctgctnccatcacgctggctntggcggaaggaggtcgtgggccgtggcggtnggagcagctgctgccat

SEQ ID NO: 410778 - DNA, 337 bp, Homo Sapiens
  misc_feature (194)..(194): n is a, c, g, or t
  misc_feature (239)..(239): n is a, c, g, or t
  misc_feature (251)..(251): n is a, c, g, or t
  misc_feature (257)..(257): n is a, c, g, or t
  misc_feature (262)..(262): n is a, c, g, or t
  misc_feature (279)..(279): n is a, c, g, or t
  misc_feature (292)..(292): n is a, c, g, or t
ctccagctaatcactgccatccaggttatcagctttgtgctcaagctggctcttcctgtagctgcagagctgtcccagcttttacttctacatgtggcaccttccagagggaaaagaggactgtccgttctggtatgcccttcttaggagcatagatgccctttccagaaaagcctgccagcaactctgctggnttccatgcagcccagctttgagaagggagtgggatacctggcttngggttgggcaancgaggnctttncctgagagccagccatnggcttctgggttncccagagtttgtgtcggcggcggtgaaggggaagtccagacaaaa

SEQ ID NO: 410779 - DNA, 224 bp, Homo Sapiens
  misc_feature (73)..(73): n is a, c, g, or t
  misc_feature (80)..(80): n is a, c, g, or t
  misc_feature (101)..(101): n is a, c, g, or t
  misc_feature (112)..(112): n is a, c, g, or t
  misc_feature (173)..(173): n is a, c, g, or t
  misc_feature (202)..(202): n is a, c, g, or t
  misc_feature (212)..(212): n is a, c, g, or t
aaaaaaattaaaaattagtaacattttaaccatttaagaccagtcacattcattataacatctgaaagcaggncaatggnactatttaaacttttagggangtatcttaagnaagacaaacatataatcatatctcttatgaaatacacagctctcctattcaagccaaaggntctttctagacaaagaaacagattttggncaaaataagncactcagtattt

SEQ ID NO: 410780 - DNA, 289 bp, Homo Sapiens
atagaataagtgctaataagtgttactatcattgtcagtccaattagtctatacctgtaatacataaggtatctgaaagattacttctcattcatttattcacaatgccaggaactgtgccagatactgggtatacaatagcaaacaagacagacaaggaatcaaaccgagcttacatcccctcttctaaagacagatatttacatcctaatagaaatttccctaccaaatgtatttatacataaaacccagttctgttttaatgttagcacatgagatctagctgatg

SEQ ID NO: 410781 - DNA, 200 bp, Homo Sapiens
  misc_feature (51)..(51): n is a, c, g, or t
  misc_feature (108)..(108): n is a, c, g, or t
  misc_feature (133)..(133): n is a, c, g, or t
  misc_feature (137)..(137): n is a, c, g, or t
  misc_feature (146)..(146): n is a, c, g, or t
  misc_feature (178)..(178): n is a, c, g, or t
agccttagtaatggcaatgaagtgcggggatagaatgttcactattttttnatgtgctgttaaaatttcatacctcctgtcctatcttgaagtcttacagttttggantggtgagtgggggaaacaagcatanaacnattacatanttcatgcagttttcactgggcaacagtatccnctgaatggtgaaatggctactt

SEQ ID NO: 410782 - DNA, 206 bp, Homo Sapiens
  misc_feature (141)..(141): n is a, c, g, or t
  misc_feature (147)..(147): n is a, c, g, or t
  misc_feature (177)..(177): n is a, c, g, or t
  misc_feature (193)..(193): n is a, c, g, or t
cttctctctgttatctccaattttattgtgcttcctctaaacagctgttctgaattctctgtcataccaggttaggtcactggcaccttatttatttcattcagtgaggtcatgttttcctggatggtcttcatgctcgtnaatgtnctttgatgtctaggcattgaagagttaggnatttattgtagccttngtagcctgggcct

SEQ ID NO: 410783 - DNA, 354 bp, Homo Sapiens
  misc_feature (59)..(59): n is a, c, g, or t
  misc_feature (289)..(289): n is a, c, g, or t
  misc_feature (298)..(298): n is a, c, g, or t
  misc_feature (320)..(320): n is a, c, g, or t
  misc_feature (322)..(322): n is a, c, g, or t
  misc_feature (324)..(324): n is a, c, g, or t
atatcaacgcagtggagaaacaaaaatagtgttataataattagtgtaaaacaattttnatctcataaacctaactgaaggaagaaagctccacaggcaacacgttgagaactccgccctagaaagggcttaaagactacagcctgtggtcaggtatagagggttctcttgtatttataacagtgaaactaatgaggatacattaatttccaaatctttatcttaacttggaagtaagacatgctcatgataaaatgtgcttacacggccttcgaacacacttaccacngatgctaanccacgggcggtcagaatttttncntnatggatggaaataataaatatcgtaggcgt

SEQ ID NO: 410784 - DNA, 237 bp, Homo Sapiens
  misc_feature (194)..(194): n is a, c, g, or t
  misc_feature (202)..(202): n is a, c, g, or t
tttccgtgtaagtttggaaggtgatccttggaaacaccaattatttactccataccaacatccaaaagatcacttgacattttcattggtttgacttcagaattagaaactctactttttataaaataaacattataaactataaattgtgcctacccagtcaacagtcattgccgaagcttttcatgactttntgattgantaatctgaattagagattttttcaataatgttaca

SEQ ID NO: 410785 - DNA, 318 bp, Homo Sapiens
  misc_feature (163)..(163): n is a, c, g, or t
  misc_feature (254)..(254): n is a, c, g, or t
atttatttcatttgtgtcacaatataaaattcttcttgttaggacttgtgtacaaactgtatttaaaaacatatttctgaaagaggaatttttcagtggtcttatctggactacctttcaacctgtacctatcttaggaccaaagccagattttcagaatgantcactaattcagtgaacttgagtagattttagagattacctgtctaatgctctcattttatatatggacaaaatgaaatatataaatgtgnaatgatctctacaaggtcacacaacatttagagacagagatggaactaaaagcaaaatattaga

SEQ ID NO: 410786 - DNA, 331 bp, Homo Sapiens
  misc_feature (95)..(95): n is a, c, g, or t
  misc_feature (222)..(280): n is a, c, g, or t
  misc_feature (317)..(317): n is a, c, g, or t
ctaagatgaagttaattatgtcaaggttgtactataccatacataactattctgtaaggtttttttctgacaccaaacaccaattctccaatttnctaacaggaattgggtgtcaaacaattaaattcaattctcttggctcagttccctaaaattgctcccattttaagtgccaggtttgccaccgaacagttgtaaattcgagaatacccggcaatctcnnnnnnnnnnnnnnnnnnnnnnnnnnnnnnnnnnnnnnnnnnnnnnnnnnnnnnnnnnncattttagcaatgcatcgtaaagggtacaactcaggnaccagctaagtggg

SEQ ID NO: 410787 - DNA, 346 bp, Homo Sapiens
  misc_feature (20)..(20): n is a, c, g, or t
  misc_feature (110)..(110): n is a, c, g, or t
  misc_feature (121)..(121): n is a, c, g, or t
  misc_feature (229)..(229): n is a, c, g, or t
  misc_feature (234)..(234): n is a, c, g, or t
  misc_feature (331)..(331): n is a, c, g, or t
atgcaacaaacatgattgtntatgtgcagtgtgtcaggagaggtgatagctcatggagatattagaataaacaagaggcagatccatgcaccccccatattatggatgtntatgtctacgnccgcaacttagccttttgcacgtgacttgcctggtcgttgccatggaaactcctccatttctcagcctccctctttctcctgcccattcctcacctccatatctcctnccctncccccaatatggttgcctagatactggttatccctgggctaggagacctaggatatctgggctcctacaacccaattgcaagtgggcccctttactnaaaaccaacccactt

SEQ ID NO: 410788 - DNA, 364 bp, Homo Sapiens
  misc_feature (71)..(71): n is a, c, g, or t
  misc_feature (172)..(172): n is a, c, g, or t
  misc_feature (271)..(271): n is a, c, g, or t
  misc_feature (344)..(344): n is a, c, g, or t
ggaattattttttaacaaacatgcagtggagcacatagaagccagcggtatttgagaaatggggcccaggnttaattggttggtatggaaattaaccaagttggcctactatagtcccagaagccttgtccattaatcatacgaatgagtgctgaactctggtgccccccgntactcctcattctctggtgtcatctgttgctgtcctgatgttcattattgcctctggttggagctgtaaagtttcttgacatagggtactatgtcacantctttttcagtaaaatcttacaacttaagacaggtataaatatgctggcaagtacattcttttgtttgaaggntatctctagacttatttttg

SEQ ID NO: 410789 - DNA, 250 bp, Homo Sapiens
  misc_feature (39)..(39): n is a, c, g, or t
  misc_feature (135)..(135): n is a, c, g, or t
cattgcagtattcagtttattaatacttatttataattnctgtgtccatgttcataggaaacatgtcctataattttaatttcttagaattcctttgctgttttatatatcagtgttatactagcatgataaatnagttgtgtagtattcactttcttacctataaaaagtctgttaaagtttatagaattcacttgtaaaaccaaatgagactgatgtctttttagaaagatttgaatgtagtgattaa

SEQ ID NO: 410790 - DNA, 288 bp, Homo Sapiens
  misc_feature (18)..(18): n is a, c, g, or t
  misc_feature (98)..(98): n is a, c, g, or t
  misc_feature (122)..(122): n is a, c, g, or t
  misc_feature (239)..(239): n is a, c, g, or t
agagaattggtacttgtnatcattctgccatctgcaaaagctggattcccctgcccctgcttttctttattaaatataattttattttttgctttggntttagactgcttttagacagagantatccatatatccctcccctagctttcccttctgttaacatcttaatacagttatccagtagtccgtggtacatgttatccaatcatatttatgtagttatcaaaaccaggaaacantggtttgatgctattaactaaaaatcttactcagattttaccagttttc

SEQ ID NO: 410791 - DNA, 167 bp, Homo Sapiens
  misc_feature (15)..(15): n is a, c, g, or t
  misc_feature (51)..(72): n is a, c, g, or t
  misc_feature (100)..(100): n is a, c, g, or t
  misc_feature (105)..(105): n is a, c, g, or t
  misc_feature (153)..(153): n is a, c, g, or t
gagaatccaaaaatnattctaagtcattatgttacaataaaaacaatagtnnnnnnnnnnnnnnnnnnnnnnacaacagctacgacttgttgatggccgnttganctccaggtgatgtgttaaagggctttccaggcacatttcctttaggtncttaaaacaatcct

SEQ ID NO: 410792 - DNA, 299 bp, Homo Sapiens
  misc_feature (32)..(33): n is a, c, g, or t
  misc_feature (62)..(62): n is a, c, g, or t
  misc_feature (101)..(101): n is a, c, g, or t
  misc_feature (177)..(177): n is a, c, g, or t
  misc_feature (218)..(218): n is a, c, g, or t
  misc_feature (227)..(227): n is a, c, g, or t
  misc_feature (230)..(230): n is a, c, g, or t
  misc_feature (249)..(249): n is a, c, g, or t
  misc_feature (264)..(264): n is a, c, g, or t
  misc_feature (275)..(275): n is a, c, g, or t
gacaaaatacccatgaagaggtgatttttttnnatttccaagatgaacaatttctccctttncccctcatttcaataaagcaaaaattttacatgcccttnagggacactctgaccccacctctgctacccacatccttgcccctgacaagaaaccttagaacagttttaatttctncttttctctcaccccaatctcaacccctacattttgctttnattaatttnagngttcccttaaattcatagntttcagtttcaagantctaattgggntcttattccacacattgcagggtg

SEQ ID NO: 410793 - DNA, 295 bp, Homo Sapiens
  misc_feature (35)..(35): n is a, c, g, or t
  misc_feature (198)..(198): n is a, c, g, or t
  misc_feature (227)..(227): n is a, c, g, or t
  misc_feature (270)..(270): n is a, c, g, or t
tcaactcctcaaccaatatgtggtctaaaatcccngagtataagtccctgttttggctttgagttatctctgcttattatctggaggttaacctttctttccttaaagcttagacacgtattggaaaaaacttttattatattccacatttcagtttgttggtgtgggacagccattccacaggggcttattaccccnctatgttacccaaagctcctcaatatagnttttaaaacaagtaaaccattgtattttagagtaatcttaggnatgccagccaaactgttgacaacca

SEQ ID NO: 410794 - DNA, 386 bp, Homo Sapiens
  misc_feature (162)..(162): n is a, c, g, or t
  misc_feature (276)..(276): n is a, c, g, or t
  misc_feature (330)..(330): n is a, c, g, or t
cctcacactcaatgtccacagccagtcagtagtgaagtcaaataattacatctgtgaagtgttttgacaatctatgtactttaagttcatgctgccactgcttgagttctggacaacaccaactcttatctggtctaatgcaaaagcttgcctccagatttnctaaactagttccttattcaaaagtctttgactaattcccatcccctaactaaccttaacaccaccacattttgggcgtcgtatgaaaacaaaagccagttttcatacaacggnccaaaatgctgaaatctcagaaaaattgaccctcatcacccaattcctatgggngaaaggacaggcttgaggcaaggggttgtggttctaccataaagggtctgaaaacc

SEQ ID NO: 410795 - DNA, 209 bp, Homo Sapiens
  misc_feature (47)..(47): n is a, c, g, or t
  misc_feature (137)..(137): n is a, c, g, or t
  misc_feature (148)..(148): n is a, c, g, or t
aattcactgtaaatgtacagatttgtttatgggttctctattctgtncccttggtctatgtgtctttatgccaataccatcctgttttggttactatagctctaaagtataatttgaagtcaggtaatgtgattccnccagttttgtnctttttgctcaggatagctttggctattcttgtcttttgtggttccatataaatttaagga

SEQ ID NO: 410796 - DNA, 278 bp, Homo Sapiens
  misc_feature (78)..(78): n is a, c, g, or t
  misc_feature (89)..(100): n is a, c, g, or t
  misc_feature (187)..(236): n is a, c, g, or t
  misc_feature (252)..(252): n is a, c, g, or t
ctgcaggtgaattgtaaccaatttaaagacaggaccaggtctttaaattcatgtttggttaatgacaccatattccgnccccccctccnnnnnnnnnnnngcctctgttttccttttggtaggccttagattttatccaaccccctactcctccccacacacaacactctagctttcctactcctannnnnnnnnnnnnnnnnnnnnnnnnnnnnnnnnnnnnnnnnnnnnnnnnntcagaaacttgctttnctatccataggaatgggagttgacgg

SEQ ID NO: 410797 - DNA, 336 bp, Homo Sapiens
  misc_feature (21)..(21): n is a, c, g, or t
  misc_feature (94)..(94): n is a, c, g, or t
  misc_feature (172)..(172): n is a, c, g, or t
  misc_feature (232)..(232): n is a, c, g, or t
  misc_feature (275)..(275): n is a, c, g, or t
  misc_feature (288)..(288): n is a, c, g, or t
  misc_feature (304)..(304): n is a, c, g, or t
agaggcataataatccttgtnatttcataaattcaaaattctagtttcctgtctacaacttgacctttaccagatacattctattgtgactganttatgtcaattcttccttgattaatctttttaatccattctctcctttatcattgtttatttgtatctcatgtaactnattcttgtcctacatgtaaacaatggtttcctgaattccaacatcattctgccatctgancctttcagttttagctctgatcactttccaccacacatttttntctacaatctagncaaatcagtgcatttntcaaaaatatgctattttcactttgtgatttt

SEQ ID NO: 410798 - DNA, 293 bp, Homo Sapiens
  misc_feature (119)..(119): n is a, c, g, or t
  misc_feature (132)..(132): n is a, c, g, or t
  misc_feature (157)..(157): n is a, c, g, or t
  misc_feature (200)..(200): n is a, c, g, or t
  misc_feature (211)..(211): n is a, c, g, or t
cctctctagccatgacctctctccagctccactgagggttgtgctggaacctcaaactcgaacatgtttaaagcaaaactgatactcttcccaatcaaatatccaatcatgcacttganttgtctatttgtnatcatcaccaaacatgctcattgtnattattcaaatttgaaatctttatcaccttagcttagctcgtnacccactaggnccacctcccatccatcctgccatccatttaccctacaaatagcttcgcataggattgggccttcacaaccattttcccatct

SEQ ID NO: 410799 - DNA, 120 bp, Homo Sapiens
  misc_feature (61)..(61): n is a, c, g, or t
  misc_feature (86)..(86): n is a, c, g, or t
  misc_feature (91)..(91): n is a, c, g, or t
aggctcacgtactttcctaactgccttgctgcggcttactgccaacgtccaacatcttctngctcttctctgctatctccaaagtnatttnacttatcttcaatgaatgtctgtaaatct

SEQ ID NO: 410800 - DNA, 310 bp, Homo Sapiens
  misc_feature (94)..(94): n is a, c, g, or t
  misc_feature (111)..(111): n is a, c, g, or t
  misc_feature (119)..(119): n is a, c, g, or t
  misc_feature (181)..(181): n is a, c, g, or t
  misc_feature (208)..(208): n is a, c, g, or t
  misc_feature (231)..(231): n is a, c, g, or t
  misc_feature (239)..(239): n is a, c, g, or t
  misc_feature (291)..(291): n is a, c, g, or t
gatcaatactaattctacagaaatataatagaggtctaaatcactaaaaacaaatcatcatctgaaatacagccaacacattctaatgttttcntttaaaaatatattctnctcctttncctttcttcgtgaattaatgagtcaaactcatgaaatctctacacagtgacccttcattttnatcttaaattttaagaaaatgagaaanttttgatgttaccactatctttncatctgancctttgcatagtgctattattccatgacctaatttagtgataagagattctncttctgtgtctattttaaa

SEQ ID NO: 410801 - DNA, 218 bp, Homo Sapiens
  misc_feature (165)..(165): n is a, c, g, or t
  misc_feature (176)..(176): n is a, c, g, or t
  misc_feature (205)..(205): n is a, c, g, or t
tgagggaagctgctgtatctccacttcttccctctctgtgcccagagatatctcttcagttatctcacatgccctacaagtctagagacctcaggtgaggagccagtagctcagtatagaaactaaggatccaagtggacaactgccaccaagtcaccacagagncagctgctttnggagggtgctgcatctgcctcccatacantttttgccaagtt

SEQ ID NO: 410802 - DNA, 321 bp, Homo Sapiens
  misc_feature (49)..(49): n is a, c, g, or t
  misc_feature (276)..(276): n is a, c, g, or t
tcaaaactgttcagagtctctccaaaggacagactaattaccaactgtnaatattaagaatacacttggggcagaaaaataggacttcaatttacagtaataattttgggatggagttattccagcagtaaactgtcacagcagctcaaagtgtgatgacacccctgaaaataaaataaatacacttataactttccagtagatcttcagacactctgccaagaaaagtaaaacaattagtaaactttcacaaattataaagtgagattatacctnaggtttgcatagcggtttaggaattacacagtgtttttatatgtg

SEQ ID NO: 410803 - DNA, 358 bp, Homo Sapiens
  misc_feature (38)..(38): n is a, c, g, or t
  misc_feature (247)..(247): n is a, c, g, or t
  misc_feature (314)..(314): n is a, c, g, or t
  misc_feature (328)..(328): n is a, c, g, or t
ggtttacactttccatgcatgtaagagttatatttctnaactttcagtaaattggagatgtttttattgcttacctaagacaactgccaatatttctttctggcctattaacagtacatacatagtgttactgcctcaaagaggattattttcccaagtggtaaagaaaacaaaaatatggtgatgacttaaatttcttaattcaacttctgtaatgcatagaagctaaattataaaaatataaaanctaaatatattggtattactaatacatgtttaagtgtttcgggttacaaaggaatctgatcccagtnactgtgctttactnaggaaccagtgtcttaattaatgtcccaat

SEQ ID NO: 410804 - DNA, 325 bp, Homo Sapiens
  misc_feature (24)..(24): n is a, c, g, or t
  misc_feature (202)..(202): n is a, c, g, or t
  misc_feature (305)..(305): n is a, c, g, or t
attagcatgagaaaaaagaatgtnagtcaggattcagtactgaaaagttcaaattatggaattttttaagagaaagaaacatttactactttctgtaacttgaactaacctctggtttaaagtggaattccttcagctacatgacataatggaaagtagattgtcaagaaatagtgggaactggattctggctgtggttctnctcattaccagctggataagcttggacaaaccccttgaactttctgaatctcaagttcatcatctattaaatggcaaaaataataactgctaatatttatggngtatttactaccattttaca

SEQ ID NO: 410805 - DNA, 214 bp, Homo Sapiens
  misc_feature (101)..(101): n is a, c, g, or t
  misc_feature (126)..(126): n is a, c, g, or t
  misc_feature (141)..(141): n is a, c, g, or t
  misc_feature (154)..(154): n is a, c, g, or t
  misc_feature (196)..(196): n is a, c, g, or t
gaaaaagaatgtatcacgcaaattcttagaaacttggtaatagattgtagctcataagtagatttgtcacaggatttggggaaaattgaattatacaaagntaatttcagataaatgtttatgagntaaaaattataaatntgcttaaataggnatgggcaggtagggagggaggattgatactgtattatatttnaccttcgttaaggtagga

SEQ ID NO: 410806 - DNA, 172 bp, Homo Sapiens
  misc_feature (124)..(124): n is a, c, g, or t
  misc_feature (133)..(133): n is a, c, g, or t
  misc_feature (160)..(160): n is a, c, g, or t
gcaaaatggaaccatgggcttaggggaggagaacggcacaatggtgtaaaagttgcagagaggaacaaaaaggctacctgcctcgctcccaggccaagtaacacaggaggaaagaaaatatccncatatgcgngggctaaaggcaagaggtgttctcaancttaagcaggag

SEQ ID NO: 410807 - DNA, 218 bp, Homo Sapiens
  misc_feature (30)..(30): n is a, c, g, or t
  misc_feature (115)..(115): n is a, c, g, or t
  misc_feature (132)..(132): n is a, c, g, or t
  misc_feature (153)..(153): n is a, c, g, or t
  misc_feature (170)..(170): n is a, c, g, or t
  misc_feature (183)..(183): n is a, c, g, or t
  misc_feature (203)..(203): n is a, c, g, or t
ttttttcctaatggaggggaggcatttttntttttaagaaagtatagctatttatgggcctaatgttgtttaaaggaaataaagcctagaatgaaagatttatgtgtggtttggnatttccttaggaatganatctgaaaccaaaggcctttntttttttaaaactgggnaacaattagtctncttatgtagcagtagaattnctatctttatagacg

SEQ ID NO: 410808 - DNA, 117 bp, Homo Sapiens
  misc_feature (74)..(74): n is a, c, g, or t
gtggttggctctttcccgtagtctcaacatttcatttactttatatttacccttattcttactttatactattncttaagactttactcggcaccacctattagccaactcaaatcc

SEQ ID NO: 410809 - DNA, 297 bp, Homo Sapiens
  misc_feature (29)..(29): n is a, c, g, or t
  misc_feature (105)..(105): n is a, c, g, or t
  misc_feature (140)..(140): n is a, c, g, or t
  misc_feature (165)..(165): n is a, c, g, or t
  misc_feature (210)..(210): n is a, c, g, or t
  misc_feature (227)..(227): n is a, c, g, or t
  misc_feature (229)..(229): n is a, c, g, or t
  misc_feature (273)..(273): n is a, c, g, or t
  misc_feature (275)..(275): n is a, c, g, or t
ccacaccgctcagaggaggggtgcggcancacacactcaccaggtacacactcgcaatccagcacactcacagcgccctaatccactttttgcctagtgcttatnatcagctgacacattaaatatttgtaatgtttctnttggcctctcctcacacaaagaagncaggtttgttgactgctgtatctccagcatgcacagcccattganggctcaagtagcatttntnacatgcgaaaataagttgtttatagccctccccaacacctagcntncacataaagtgtaagggatctt

SEQ ID NO: 410810 - DNA, 134 bp, Homo Sapiens
  misc_feature (62)..(62): n is a, c, g, or t
  misc_feature (74)..(74): n is a, c, g, or t
  misc_feature (80)..(80): n is a, c, g, or t
atgtcttctacaaattgcatgtcttgtacttccttgtactagcagagcatagaactgtaagnttaagtgacatnaattanttttagatgcatctttctgacgtagacattcttctcactagtgacttctgcttt

SEQ ID NO: 410811 - DNA, 212 bp, Homo Sapiens
  misc_feature (115)..(115): n is a, c, g, or t
  misc_feature (138)..(138): n is a, c, g, or t
  misc_feature (171)..(171): n is a, c, g, or t
  misc_feature (185)..(185): n is a, c, g, or t
  misc_feature (193)..(193): n is a, c, g, or t
ttatttttcctaaaaaatatggctttgttatgcctaatctaccttctttagtggtagatatgtgaatatgtggggaaagggtagatatgaagtctcaattacacaatttccaganaaaaactgcactcatcaactgcntgttttctctgttccagatttttgtgccatggnaaatggtggtcatngctccagnttaggactccatcctccgg

SEQ ID NO: 410812 - DNA, 394 bp, Homo Sapiens
  misc_feature (13)..(13): n is a, c, g, or t
  misc_feature (68)..(68): n is a, c, g, or t
  misc_feature (145)..(145): n is a, c, g, or t
  misc_feature (209)..(254): n is a, c, g, or t
  misc_feature (377)..(377): n is a, c, g, or t
attttggtatctncttatgaattattatttaaaatctagtgattttaaaatacaggtttgcatctttnaattattgtcaagtaactatttgcatatgaatgtcaagaaatggaacctgtggcatctgagaatccctaggtttgtngtctccagatgcaactcctcttcctcttaaaggcaacagctatcctgacttatgcgttagcacnnnnnnnnnnnnnnnnnnnnnnnnnnnnnnnnnnnnnnnnnnnnnnacaccttctgttatctttgcagcagaaatcagaagttagcatcttgaaattggatccttgacattttaattcattgtgcctgttttctgaactgaaaagtaaaaaggaagtagtgacaatttnccattaagggtattaag

SEQ ID NO: 410813 - DNA, 234 bp, Homo Sapiens
  misc_feature (26)..(26): n is a, c, g, or t
  misc_feature (60)..(60): n is a, c, g, or t
  misc_feature (67)..(67): n is a, c, g, or t
  misc_feature (88)..(89): n is a, c, g, or t
  misc_feature (162)..(162): n is a, c, g, or t
tcattgcagaaagaagaaagacaatnacatagacgttaggtttccaaatcaggtagtttnatttttntaaagacagaaaggcatttannagaacttatacaatgaaataaaatacttccaagcattccatgattaattctttacaaatgatagcaataaagntacaaattttttggtatggtaagccccatgccaacactaatctcagtactccccctccttcccttcagaagg

SEQ ID NO: 410814 - DNA, 190 bp, Homo Sapiens
  misc_feature (65)..(65): n is a, c, g, or t
  misc_feature (176)..(176): n is a, c, g, or t
atgtttgaaaataactttgtaatccatcaaaataacaacaggtttccaggacagtttagcctgtnctagaatttaacataaatacttatatactcctcctgtgtaaagccctttggcttggtgtgtttttaatattcatcgatgttgctccgtgtatcaggagtttgctccttttnaacagtgggctttt

SEQ ID NO: 410815 - DNA, 219 bp, Homo Sapiens
  misc_feature (45)..(45): n is a, c, g, or t
  misc_feature (68)..(68): n is a, c, g, or t
  misc_feature (119)..(119): n is a, c, g, or t
cgagcagcatcttgcagttacatagaaatgtaaagttcatctctnaatagcatttcaaaagggttgtnagaaaatagctccctgattttaaagcggtttagtcagggtgagtgggtgtnttaaccagcagtgcataactaagcctgccctgcctgtttctaattagcaccaagctagttactttcaaggtctgtttctagaataagagtgacttccttt

SEQ ID NO: 410816 - DNA, 229 bp, Homo Sapiens
  misc_feature (27)..(27): n is a, c, g, or t
  misc_feature (52)..(52): n is a, c, g, or t
  misc_feature (86)..(86): n is a, c, g, or t
  misc_feature (88)..(88): n is a, c, g, or t
  misc_feature (165)..(165): n is a, c, g, or t
tagcattgagcaatggttgcaattgtnggcctgagaaatgtaggaaaatcanagttcctaaatacctagttacacctaggatcttntnattgcctgcagtttctctaccaacttcacaaatcttgatggaacttagagtaagggttatgtgcagtttacagaggngcagcagcaaagccttcgttgtaattgccatctcacaatgattatagccggccagatttaggtg

SEQ ID NO: 410817 - DNA, 217 bp, Homo Sapiens
  misc_feature (70)..(70): n is a, c, g, or t
  misc_feature (102)..(102): n is a, c, g, or t
  misc_feature (126)..(126): n is a, c, g, or t
  misc_feature (135)..(135): n is a, c, g, or t
  misc_feature (137)..(137): n is a, c, g, or t
acacctaactccacgatcatcagaccttactttaaggcctcagaaacagagaagaatagacatatttttnataccctcaaagtaggttccctgaagcctggntacgacagacacccctgcaatggnttacctctnantggctccccgtggtgaaggttactacggtagatatgctacatagaactcgtcacatttttttgccacctacactataatt

SEQ ID NO: 410818 - DNA, 200 bp, Homo Sapiens
  misc_feature (15)..(15): n is a, c, g, or t
  misc_feature (90)..(90): n is a, c, g, or t
  misc_feature (93)..(93): n is a, c, g, or t
gtccaacattctctnctctccttatctggaaagccccataatgcctccttagtattaattctacctcaagtccccaaattcctggttgtngtnaattggcttatgagagtcatctaacctaagaggaccaatcaaattctctctctgacaaactgttattaaggttcaagaagcctagttgttcttcataatatgagtga

SEQ ID NO: 410819 - DNA, 273 bp, Homo Sapiens
  misc_feature (23)..(23): n is a, c, g, or t
  misc_feature (27)..(27): n is a, c, g, or t
gagccagactgcactttgctgtntggnatctagaaggtggcgtgctggaagctggtgctgagtgatacatggggacaaggtgggagtaagagagaccagcaaggcagtgaagagactggagagagactgaaggggtcagagaaagggcagagcattcagcatgggagaggcgaagaagactttaaggatatttttttgaacaaggcatggtgtgcaggtaacttccttaaaaacattcctctggaagcagaaaatagatgattaccagggact

SEQ ID NO: 410820 - DNA, 281 bp, Homo Sapiens
  misc_feature (27)..(27): n is a, c, g, or t
  misc_feature (135)..(135): n is a, c, g, or t
gtactatgagaaactgctttacaaatnattttctgtggaaccctgtcaccagcatttagtgaaacatgctttccatttgaatatgcatttagatgaggccaactggctgctagatcatcgtctaatgggcctgtnatcccacatgaagattattttccctttggtcctagaaccactctccatcctgctcacccttatagactatatgagagggtccctaggtctcactttcaggtgggctcagccagtggaaatcagagaggtgtgagttcgtggtatgt

SEQ ID NO: 410821 - DNA, 282 bp, Homo Sapiens
  misc_feature (40)..(40): n is a, c, g, or t
  misc_feature (49)..(96): n is a, c, g, or t
  misc_feature (209)..(209): n is a, c, g, or t
  misc_feature (213)..(213): n is a, c, g, or t
ttgttttctagatgctactttggagtcatgtaaatatttnctgtgattnnnnnnnnnnnnnnnnnnnnnnnnnnnnnnnnnnnnnnnnnnnnnnnngtgacaaatgaaccctgcatttataaggtggtagcataaccacacagagaagaatgactgacagtgaaatacattaatcctatatccgtagtggggacataaactaatgacanaagnaaaatggtggtattggtgctggcattagtagtcctgaactgctgtgtatatcaaagcaagtaagtaatt

SEQ ID NO: 410822 - DNA, 345 bp, Homo Sapiens
  misc_feature (116)..(116): n is a, c, g, or t
  misc_feature (128)..(128): n is a, c, g, or t
cttctaagaaagcaaaatggttacctttgagaggaacattcagtgtttaatcatcccttatgttaactagatgatagattcaagcttttagaaatgagaaagtagaaactaatttnttaagatatttncagactgcggaatgttgttagcttttcctttcacttctcttcaaggacaggtgttgttagctgtctacaatactgttgaactctgttgtcaaagtagcccccttagtctacaaggcaggtagccttggcttgaattatcaatatcaaaatgtcagttaaccatggaggggataaagtaatgtgaaaagtgaggatggctgcaaaggataggctctcc

SEQ ID NO: 410823 - DNA, 174 bp, Homo Sapiens
  misc_feature (47)..(47): n is a, c, g, or t
  misc_feature (72)..(72): n is a, c, g, or t
  misc_feature (82)..(82): n is a, c, g, or t
  misc_feature (111)..(111): n is a, c, g, or t
  misc_feature (113)..(113): n is a, c, g, or t
  misc_feature (154)..(154): n is a, c, g, or t
ccagccccatctcttaagaaaaataaggtggcaggggagagtaaggntcccagccaggacccccaccatctnagggaccttnggaaaggcctcctgcccagccctgctggngnctctgaggctctctgggagggtctcatgactgtggggactnctggatatccctattggtcc

SEQ ID NO: 410824 - DNA, 410 bp, Homo Sapiens
  misc_feature (178)..(178): n is a, c, g, or t
  misc_feature (361)..(361): n is a, c, g, or t
  misc_feature (368)..(368): n is a, c, g, or t
  misc_feature (392)..(392): n is a, c, g, or t
gaactagctagggccacttgcctaaagtaaaccacctctttttaatcaaaactgagcaaaacattcattccatttcatggtgtttcaacgtgtacctttttagaaagatgaagtaaggaaaactaaccctaaatcaactattaaagcccattgaagtgtgcttgtttgcatatttttnctttatatggatagcacgctcctgagagctgcagaacatgaacttctaggctgaatgagatacagggttgcagctgatgctttctggtatagcccattcagaactcacatggcatctaaaagtgttactgatggggctgtcattgatcagcactacttggacatttgcgtggaacaaagaggntcagaangtattggaatctgggaaactcgtnggagttcaagggccattt

SEQ ID NO: 410825 - DNA, 133 bp, Homo Sapiens
  misc_feature (75)..(75): n is a, c, g, or t
  misc_feature (93)..(93): n is a, c, g, or t
  misc_feature (95)..(95): n is a, c, g, or t
  misc_feature (103)..(103): n is a, c, g, or t
tgagctgacagttttaaaccttttgttgtatgcctactctagttgtttcccttcagtcctgtctataaagaagantaaacaattctccttttntntccagggngggcccttttttagaattatttttatttat

SEQ ID NO: 410826 - DNA, 398 bp, Homo Sapiens
  misc_feature (256)..(256): n is a, c, g, or t
  misc_feature (333)..(334): n is a, c, g, or t
  misc_feature (347)..(347): n is a, c, g, or t
ggtaaagagctttgtcttactttgatgaaaggtttttgaagtgtctgttgattagtgtttgctactattatcagaatttacaaagtttgttttcccttttggaaaatatattaaggctaaaaaaagtgtaagttaattacatagccattgaggggttaaacgtgcattgtgattgagactgaatagtgttttcccaacctttccctttttacaatggagaaaacaggtaattaaattttgtacagtaaaatgtcanttgaacatttattgccaaataacacctcaggcatagcagggcattatggaaaaggatatcaggagacatccgacctnnccttgggtgctanctgtacaagcaattcattaacctgcttctagggcaatgccacagcaaacct

SEQ ID NO: 410827 - DNA, 293 bp, Homo Sapiens
  misc_feature (142)..(142): n is a, c, g, or t
  misc_feature (249)..(249): n is a, c, g, or t
gtcatcaaagcatgcctgggcaggttggtatacttgaagtctctccactgtccccccagataaaaaataaacccacaagacacagggcttatccatcctcaactgccctttccagcttccgttcactcgaaatatgctctgntcattcccatacaacttataatatactctgtaccattttctggcacacaaacccatcactttaaggatactgaagctacttgttcaaactggttcaaaatgactttncccttttcctgacttcacatagccttaactaatttacctttttt

SEQ ID NO: 410828 - DNA, 322 bp, Homo Sapiens
aaagattttttaattaacttggacaaaagtatgaaatttctactatgctcaatttgcttccaataaatggaattaaagggggcagataacaatattccttaagtgttctggattttatttactcattgtaatgtaaacagagactcatatcccactaatttgggggctttgtttctataactcaccttctaatgacaatggctgggcaaatgaatactaccttgctccaccccaatttggtccttgtcagcatcaatcccagtggaattttcactttctttcctttccaaatcaaggctttgctctataataacccattcag

SEQ ID NO: 410829 - DNA, 370 bp, Homo Sapiens
  misc_feature (21)..(21): n is a, c, g, or t
  misc_feature (35)..(35): n is a, c, g, or t
  misc_feature (54)..(54): n is a, c, g, or t
  misc_feature (65)..(65): n is a, c, g, or t
  misc_feature (77)..(77): n is a, c, g, or t
  misc_feature (309)..(309): n is a, c, g, or t
ttaggaatttaatccattttnaggtaatttttgtncatggtaagagataaagtnctaattatatnctcctgcatgtnaatatccagttttcccggcacaaatttatgaagagattgtcctttctcccattgtgcattgttggcacctatgtcaaaagtcaattgaccataaattcatggatttatttctgggctctgtattctcttccatttgcctatgtgtttgtttttatgccagtatcatgctgtttggattctatagctttgcaatgtatttcaaatcaggaagtataatgctttctgctttgtnctgtttgctaaagatcactttggctattcagagtctttcgtggtttaatcttccataagta

SEQ ID NO: 410830 - DNA, 148 bp, Homo Sapiens
  misc_feature (106)..(106): n is a, c, g, or t
  misc_feature (114)..(114): n is a, c, g, or t
ggcaagtctaatcccagcagggctaggattaattaggattcacttattaacacttatcaaacctctggcagaagtggcttgctaaacttagaaacttggagagganaactatgngtatacaaagatgggtgaggttttgtctataaag

SEQ ID NO: 410831 - DNA, 102 bp, Homo Sapiens
gttcctgcttgttagaagagtgtacaagagcagtagctgctaaagaacgtcttccacaccattgtgtgtttgggtcaggctgaatagtcccatccacaccaa

SEQ ID NO: 410832 - DNA, 317 bp, Homo Sapiens
  misc_feature (72)..(72): n is a, c, g, or t
  misc_feature (288)..(288): n is a, c, g, or t
ctaaaaagaagtggaagatttcaacattctacccagaagggaggcaacaatgggcagatatctgactttttnctctaaagctaatacagttctgggtccttagcgaaaagtgcatacatccttatctttaggaacccaatcttagtgctgacctgcaatactgtaaacatgaaggtggtatttccaactcatcatctgtagatgatgttctaattatgctgagggctgccatccattcccttgaaatgaacatctgcatttggaagattgctggctagaattaggggncagtgtgcacccatggaaaagaccctttt

SEQ ID NO: 410833 - DNA, 208 bp, Homo Sapiens
  misc_feature (122)..(122): n is a, c, g, or t
  misc_feature (143)..(143): n is a, c, g, or t
atctgggctggtcactgctgggggggcactgcagctcctctgtccagtcctgtgcctagaggccactagctctagcattttctcacaggggcccaggggacatccaagggcttggggcaggntccctgctggtccaggctggntccccccatgccccgtcccatcctgttcctggggaggtattgttcctgtctggcctggccggtgg

SEQ ID NO: 410834 - DNA, 141 bp, Homo Sapiens
  misc_feature (53)..(53): n is a, c, g, or t
  misc_feature (105)..(105): n is a, c, g, or t
  misc_feature (116)..(116): n is a, c, g, or t
tatataatgaaattaactttcccaaagctcaacgtactttataaattagacgngataggccaaacactaaagcacaggattctgggaatgcttaatagacactancaaccatacanttgcacactcttacagcaaaatgct

SEQ ID NO: 410835 - DNA, 349 bp, Homo Sapiens
  misc_feature (24)..(24): n is a, c, g, or t
  misc_feature (161)..(161): n is a, c, g, or t
  misc_feature (242)..(242): n is a, c, g, or t
  misc_feature (287)..(287): n is a, c, g, or t
  misc_feature (290)..(290): n is a, c, g, or t
aaccaaaccaatcagaagattttnaggacaatgtagcacaaaaagcagatatgatttgatttgcaaatatcactgaaggggcttatccacacagaagaaagttccattattgcgctgtcaccaacaatagaattgagagttactatgaagaaacacacccnttttcagacaaggaggcaatctgcaactggcaaatgggccatggcccaaagcgggtaacacaacatggaagtgcagatttntttctgcatctcaggctctcgttaagtcaaagggaaaaaataccnccncattatttttgataaattcacactaggaaagctctcctttgatatttcttgaaattcag

SEQ ID NO: 410836 - DNA, 282 bp, Homo Sapiens
  misc_feature (141)..(141): n is a, c, g, or t
  misc_feature (169)..(169): n is a, c, g, or t
  misc_feature (225)..(226): n is a, c, g, or t
  misc_feature (239)..(240): n is a, c, g, or t
  misc_feature (248)..(248): n is a, c, g, or t
gaaacttgttttaaaacagattcaaggtaagcttaaaataatagaatagagaccacttcagataaatacatttcacccagtaaatttaaccagagcagagttttaattccttttaaatgaaaatgttttaagatatatganggaaaagaatagatacatttaataagangagacatcactcagtcagccaagaattgtcaatgaagacttaaataatgattcctnnggtaaagcaccanngagtcagnattcaaaccatttccaaatcccttcatagtattt

SEQ ID NO: 410837 - DNA, 314 bp, Homo Sapiens
  misc_feature (106)..(118): n is a, c, g, or t
  misc_feature (177)..(177): n is a, c, g, or t
  misc_feature (226)..(226): n is a, c, g, or t
  misc_feature (263)..(263): n is a, c, g, or t
  misc_feature (296)..(296): n is a, c, g, or t
agattctcttaactgagaagtttttatctccttttcctttttactcttgtgtctgctgaggtaggaaattgtagtgagtcctctatttatcctataggtgagtcannnnnnnnnnnnngggactttgaacagaggcagaggcttcagtgacgataaaggaaacagtgtgtggttgtnttttttcatggaaatttttctggggctttctccatagagcagggctttnccataggcagagaggcccagagtagcacacacatgtntgtgtgtgttctaagcaacataatatggatttngacagagagggaaaagtg

SEQ ID NO: 410838 - DNA, 277 bp, Homo Sapiens
  misc_feature (99)..(99): n is a, c, g, or t
  misc_feature (108)..(108): n is a, c, g, or t
  misc_feature (125)..(125): n is a, c, g, or t
  misc_feature (127)..(127): n is a, c, g, or t
  misc_feature (210)..(210): n is a, c, g, or t
  misc_feature (236)..(236): n is a, c, g, or t
acctatttataaactgccactccctcatttatcaggcaagtttgcagctctgtgaattcaatgcctctgtgctctcattcagggacaaacaagaatttncctgtaagncagccacagtcacattntnatttccatgcctaagagcctgaagcttgaacaaagggcttcagttagtttcatgtgagccaaaatggaatgtgagtgccattnagagccacacactaaaaagatttcangcttgggacactggctcccacagtcctggggggagcaaatt

SEQ ID NO: 410839 - DNA, 175 bp, Homo Sapiens
  misc_feature (60)..(60): n is a, c, g, or t
  misc_feature (75)..(75): n is a, c, g, or t
  misc_feature (98)..(98): n is a, c, g, or t
ctttcttcattaatgggagaaatgtaactaagcttcattcatccaggtagaattggaatnttgtccagtcttttnattctctgcttccttttctctgntagaaatgtcttgtctcttaggaagttacactataatcatgttatgtgttgtcattttatcttatagttctcttaag

SEQ ID NO: 410840 - DNA, 315 bp, Homo Sapiens
  misc_feature (45)..(45): n is a, c, g, or t
  misc_feature (74)..(74): n is a, c, g, or t
  misc_feature (95)..(95): n is a, c, g, or t
  misc_feature (149)..(149): n is a, c, g, or t
  misc_feature (180)..(180): n is a, c, g, or t
  misc_feature (183)..(183): n is a, c, g, or t
  misc_feature (202)..(203): n is a, c, g, or t
  misc_feature (221)..(221): n is a, c, g, or t
  misc_feature (224)..(224): n is a, c, g, or t
  misc_feature (280)..(280): n is a, c, g, or t
  misc_feature (287)..(287): n is a, c, g, or t
  misc_feature (293)..(293): n is a, c, g, or t
gtatttaggagaagtcttctgagataatcaggagtagcatttggncagataaacaaaacacttaactgaaacanggaatcatttaaaaatgatgnaaactatcaaaattttatacttcaatgtaaaatagttgtaggcagagctgacanttggccagcatgcactgacatggctatatanttncttaaatttgagcatcttnnctgatggggcagacattngtnctgcttggtcaatgtcaaaaccttaccagttaatagagtatttggatataatcccnctatatncatcantctcttgacataggatcaaggt

SEQ ID NO: 410841 - DNA, 237 bp, Homo Sapiens
  misc_feature (173)..(173): n is a, c, g, or t
  misc_feature (187)..(187): n is a, c, g, or t
  misc_feature (196)..(196): n is a, c, g, or t
  misc_feature (204)..(205): n is a, c, g, or t
  misc_feature (222)..(222): n is a, c, g, or t
ccaattggtaagtgtccctgggagccgcagccaggcagtctgacctcagactcctgacacctgcaggctgtgccgcatccctgacttgggtgctggccttctccttctaggtactgtccctggcaggcaagtctgaggcctgagccagtcttactttttattgttttcacttntaaacaatagcagntaacaactnggacccanngtagttatgcttaactngctttggtatggcag

SEQ ID NO: 410842 - DNA, 329 bp, Homo Sapiens
  misc_feature (168)..(168): n is a, c, g, or t
  misc_feature (191)..(191): n is a, c, g, or t
  misc_feature (211)..(212): n is a, c, g, or t
  misc_feature (275)..(275): n is a, c, g, or t
gtaaattttacaggcagtttattagctttctttaaaacatcatattggaattcttagcaggattacattgagacagtagattaatgtatgatgtttcagtcaaggaacatggcatgtcttttaacttatttattgttaaatgtactttagtaagtgtgtgtagttttncttccatcctatacatttttgtnaggtttataactagatattnnatattgtacctggttcataattgggatcccccccatataaattgttattaatgcttaggaganctattgatttttgtctgcagtcagccaccttaaattattttgctattaatttca

SEQ ID NO: 410843 - DNA, 319 bp, Homo Sapiens
ggattggaacttagaaaaaatccccagaaatcagaaatactggactgagaaagcctagatcctcattttcaaggtaccctaactaaggaaaatatcctacccctaccctcacctctgaagtttgtgtcttcccaaagaaggagggagtttaacaggaagtcaagaacaatcacattaaaaacaggctaaacaaataccagtagcaactgattcttcttggaaacagtggttgtagattatatatcactgcttttgaaatctaagtgcatatcaatatctaggtagtttttcaaaaaattcaggtgcctaggctcaccct

SEQ ID NO: 410844 - DNA, 302 bp, Homo Sapiens
  misc_feature (78)..(78): n is a, c, g, or t
  misc_feature (97)..(97): n is a, c, g, or t
  misc_feature (285)..(285): n is a, c, g, or t
aagtctttagcacttgaagaaatgggacatcttaattttagcttctgatcacagtttataaactataaaacaaatttntttttaaagtcttataggnacaagaagtgatcttgactaagattcccctgagatagcctcgcaagtgaacagataataagatcacaaaaatgtgtttgcctgtgatctttagatggccacacacagcacacagtctactttcaggtaattttcaagtaaaaatctcagtgtaatcataatgtattgatttgttttgccttggttccnttttcacaaatatattg

SEQ ID NO: 410845 - DNA, 330 bp, Homo Sapiens
  misc_feature (270)..(270): n is a, c, g, or t
  misc_feature (272)..(272): n is a, c, g, or t
  misc_feature (304)..(304): n is a, c, g, or t
tttatcttggtaagaggctcactcagtaagaggcacatgggaaaactgaaacccttaaaagtgattcaggcaggtccattgactcaagatctctctaggcacatgcctattgcccattgaggtgtgaattacctccatgggttaaattgttgatgtagtttctgttaaatatagaatatgactctgaatgactattctccttgctcaggggatggaaaatgattaaaacaaaatgcctgctctgaatgcaattaaaccaggggaaaatangnccagaacaaaaatgatcataacgcaaaaattntgacagaaagtagtttccagaaggaa

SEQ ID NO: 410846 - DNA, 403 bp, Homo Sapiens
  misc_feature (312)..(312): n is a, c, g, or t
  misc_feature (338)..(338): n is a, c, g, or t
tgtaagtcatttgtagataaaatgtacttagggagtgcctactaagtgtgagatgctatcatagctgggagaagggaaggggtaggagtaacaatggaggagtgggttagtagaacagcccccatttcaggaaaactatattttattagggagatatatgtgcacaggactatttctatggcaaggcataaaacagcgcatgcctcagtagtaaattgcacatgtaacactttgtccagcagaattctctggaacttgaaagatgtataatggaaccaagtaaaccagcaactgtaccatttctaactgtgnggaggaaaacaagtggtggaaagttngtgcctcaccagggtgcttttgtgcaccaaattacaaccaaaattttaggaggcactaccctcct

SEQ ID NO: 410847 - DNA, 133 bp, Homo Sapiens
  misc_feature (88)..(88): n is a, c, g, or t
atactctggggccctacaaagagaggaaccacggctgggctatttgaggagagaaattaggtgagtatgatccctcctgaggaatgtnaactagaggagaggcagtggcctgaggcagccagtgagtgcagca

SEQ ID NO: 410848 - DNA, 350 bp, Homo Sapiens
catctctttaagaaaactcaataactggtaatagaggttgtcccaggggagggaaactatatggctgagggatactggtgggagggagatttttactgtatgcctttaaaacaaagttttaaataacattttaatctgtgctcctaagaaacaaaggaaaattcctatgtgccagagaaaactgaacgatagattgggaaagcacacaaacagagagcatgagttatgtatcctgcccaagatcactcagccactaagtagtgaagccagggttcaaacttaggaaatctggctttagtacttaggaataaaagatatgcttcaagtgtgttttttccctgtggtattca

SEQ ID NO: 410849 - DNA, 161 bp, Homo Sapiens
ctgtggtttaaggctgagagaatagatctaatcagcagtcagtagagctcattagtagaggagagaggagagttttcttttaagaaggctatggggtcttgtgaagagacgagatagcttctatttaaattcacctgaccagtccattagctagtaaaaac

SEQ ID NO: 410850 - DNA, 386 bp, Homo Sapiens
  misc_feature (25)..(25): n is a, c, g, or t
  misc_feature (117)..(117): n is a, c, g, or t
  misc_feature (133)..(133): n is a, c, g, or t
  misc_feature (203)..(203): n is a, c, g, or t
  misc_feature (242)..(242): n is a, c, g, or t
  misc_feature (252)..(252): n is a, c, g, or t
  misc_feature (320)..(320): n is a, c, g, or t
  misc_feature (322)..(322): n is a, c, g, or t
  misc_feature (333)..(333): n is a, c, g, or t
  misc_feature (354)..(354): n is a, c, g, or t
aggagataagagagagatgtaagtnagaggaaggagaaattcatggaagaagttcaggaagaattcagaaggcatgcaaattgcacactgaatcactagtaagtaagtagttaagantaaggtaatatcaganggaattaacctgaaggaggcggggagtagatgccttctagctctaagaaagaagatggatggtgattaancatttccaagagtttgtggagtgttagaagctgagagantgcaggcttnagatcctctcattattctttgaagccaatcaaattgtgagataaaaacctgagccagagaagcaattngntagggcccttnggacaggagctaaaatttggnagagctgctattagaagttggcagagggagct

SEQ ID NO: 410851 - DNA, 364 bp, Homo Sapiens
  misc_feature (74)..(74): n is a, c, g, or t
  misc_feature (112)..(112): n is a, c, g, or t
ctgagttaatctctagtttctctttcttgagatctgttcatgcctgcctggtcttcctttggttaggatctttncttaccctttatatttctcaagtggtgaggttgaaatnttccgtgaactgtagcacaggtgtttatttaatcatccacatggtttcctcagagtctttcaatcttgacttgggatgaataggttacacctcaaatttctttaaagtcagtggaggcggcacagctctctccaaggaaatcgtcttcaaatatcatccaatttcttattttctaaaagtgggtgagggatttaaaggttatctaattttttaaaaagtttctcagatttctctaaaattttgcatcgtatt

SEQ ID NO: 410852 - DNA, 315 bp, Homo Sapiens
gaagctctattcattttttaaaaaataaactctttttttggaataattttagactttcagaaaagttgcagaatacagagaatttccatacaccattcccccaacctcttctaatgttaatatcctacacaacaatggtacatttgtccatactaagaaattcacattggtatgttttaattacctaaaccacaaactttatttggatatcaccagtttttccactagtgtcctttttctgttccagagttcaatccagaataccacattgcatttagtattaactcattttttctgctgtatggattacactac

SEQ ID NO: 410853 - DNA, 331 bp, Homo Sapiens
  misc_feature (130)..(130): n is a, c, g, or t
  misc_feature (299)..(299): n is a, c, g, or t
gtctggcttattatcacttcgcataatgacctcaaggttcacccatgttgtggcatgggtcagaacttcctttttaaggctgaataatattcagctgtatgcatatacaccatcatgtttatccattctnctgtcaatgaacatttgagctgttccccctgtgtggctattgtgaacaatgcagctatgaacactggtgtacaagtatctgtttgaatccgtgcttttaattcttttgggtacatacccagaggtggaattgctgggatcatagggtaatcctatgttcaaattttttnagggagctgcccatatcattttccaccgtatg

SEQ ID NO: 410854 - DNA, 387 bp, Homo Sapiens
  misc_feature (122)..(122): n is a, c, g, or t
  misc_feature (263)..(263): n is a, c, g, or t
  misc_feature (314)..(314): n is a, c, g, or t
gggctaagggctgagccctggcgcactccagcattaagaggatggcgagacaggaggagccagcaaagaagcctaagaaggcgtggccacaaagcgagaaggaaacccacagggcccatgantgtaaataaatttcaggcaacatcagtcagtatagttttctgtgttttctccaggaagccaagtaaattgtttcatggaggaagaagtgatcaaccgtgtgaaatcttgcttgataggtcaagtaagaggaaagctaaganttgattatttgagtttgacaacatagtggttatttgacaagcaggtagctnggtagcgtgagggcaaaaggcttattggagtgggtttcaaagagaagagaggagagaaatcagggatagtgat

SEQ ID NO: 410855 - DNA, 386 bp, Homo Sapiens
  misc_feature (141)..(141): n is a, c, g, or t
  misc_feature (239)..(239): n is a, c, g, or t
  misc_feature (270)..(270): n is a, c, g, or t
  misc_feature (327)..(327): n is a, c, g, or t
  misc_feature (332)..(332): n is a, c, g, or t
  misc_feature (353)..(353): n is a, c, g, or t
atgaaatgaggtaattttctgggcccttggtacaatgcctgagatgtcatatatactcagctaattataagtgacattttgttctagaatccagtagctcaacttttagtccattgtgctgaacacaaatctatagatccntaaattgtatacttttattaatttaattttaaagagccagaaaaattgactacattggaaacattccagtccaccaacatattgagtagaaagaaggncaaaggccatattctctttcagatgctacanattgtgtatattttcagtaagctgtgtctgcttaaggggggcattactgcattcggntaganaaactcaaataaaaaggcccngttaggaggctctactgggttagcggttttttt

SEQ ID NO: 410856 - DNA, 360 bp, Homo Sapiens
  misc_feature (109)..(109): n is a, c, g, or t
  misc_feature (344)..(344): n is a, c, g, or t
gagattttaacagcaattagttaggactactctctccactctaaaatttccttggacatacttcctgttatggtgtgtggtattagagacattgcatgcattgtttggntctggctaaaaagatttatgacataatttgcgtggtttgcaatcacttcagagtatatctaagttattgctagatatcccagtatgcacgtagctcacaggaaaacacactttgtgcttatcatgtgactcattcaccatcatgacctaagggtgcagtatcctgatataaaccttgctcctggaagtatgttgataagagaggtgaaagtggagcaaagcttcaaatatgtggngctaggaaactactct

SEQ ID NO: 410857 - DNA, 303 bp, Homo Sapiens
cccaacagtccctccccaagcctgtctgtcctgctgtgtccctcactcaggagatggaatgaccttccacctggtcacctgggccagaaactgaggggtgtcctggaaacctccctccccctgtgcctgcccccgccatctggtccatcagtctagaccgtgtcctcacatcccttccctggcggccgcttgaccagtccccaccaccagcactagtcaccagcctggctctggcattccatgtacttccgtccaccatgcattgttcacggggcttcaggcgagtcactcctctctgagccg

SEQ ID NO: 410858 - DNA, 356 bp, Homo Sapiens
agtcatcagatctcatgagactcattcactatcatgagaacagcacagaaaagaccagtccccataattcagtcaccttccactggaattcaggatgagatttgggtggggacacagccaaaccgtatcagtatagaacatgatagagggtatcagttattaagaaaatttatattcattatcaccaagggtccagtgttcctttcatgaatctaaatatcagcttggaaaggaacttttcaactatttctaatatttggttataagtaggaatatgaaatacaagcattaatgttccataaaactgttttttatacacattatgggaattcccatctgcctcaatagtgctgagg

SEQ ID NO: 410859 - DNA, 388 bp, Homo Sapiens
  misc_feature (226)..(265): n is a, c, g, or t
  misc_feature (337)..(337): n is a, c, g, or t
gatgggaaatgtaactcctagctagccaggcacagcccaatcccagctgcatattatgtgtggaattaagtatgaatatttggtggacaactatttatgtctgccactacacttagataaggctccagtaagctgattgtgaggatttgaaaaactacgatgcatagtatcaacaaaattggcagcagtatgaacaattcaggcatgcaactactttttatgcagnnnnnnnnnnnnnnnnnnnnnnnnnnnnnnnnnnnnnnnncgtgttgagctatttcccattttatggtttagtttccgttttctgtttcttgctgctttgtgttttcttttntgttttaaggaaaccattgggaatacaacctcaaggctggcataattaatg

SEQ ID NO: 410860 - DNA, 324 bp, Homo Sapiens
  misc_feature (111)..(125): n is a, c, g, or t
  misc_feature (272)..(272): n is a, c, g, or t
cctgggatgagaatgataggaggtgtagcggggttgagctggataatataaggttccttacagctctagacatttatgatttaacattttttatggattgctaatgctgcnnnnnnnnnnnnnnnaaatgtcaaattcttgcatgtataaggccttgattctttcaggcctgggttgtgttgatttatgggcatgagctaattccagatgactcattctagaagtgattgtgtaagtatcctttacttagctaaacatatgcaacataaatncatctactataacatatgtcctctcagaacatgctactggccagagttatta

SEQ ID NO: 410861 - DNA, 267 bp, Homo Sapiens
  misc_feature (166)..(166): n is a, c, g, or t
  misc_feature (214)..(214): n is a, c, g, or t
cctcaagatgaatttccagtgtgaaagcatcatgaaagtgtcaaagaatgatgcattaaagccaatctggtgggagtaaaaataatgtgccttggaaaactgtgtcagataattcagaaagtggcttaagtgaagacaaagacccgatgacatggctgcatatgantaatttaaataaattttttcataaaatttgagagccaagaatgagcantatatctcatttttacataatatgtgattgagtacataatttgtaatacatat

SEQ ID NO: 410862 - DNA, 325 bp, Homo Sapiens
  misc_feature (65)..(65): n is a, c, g, or t
  misc_feature (90)..(91): n is a, c, g, or t
  misc_feature (282)..(282): n is a, c, g, or t
ctagatcttgttggaaagaagatgaagatttatgaagggggatagaaggaaatatattgcatttntttttatcctctgcttggtattttnntcttcctctcctgtacttcaacccctataagtctcaactttcatgcatgccacacatggcatatagtatttggaaatgggaaagctgcagtgtgtcttgacctactttccagtgactgtacaattacaaataagaagttgatgctatataaagtagtactacattctacactgaaaagaacatatggagangcaaagagtgcgtttgcccaagcagcaccaatttttaaaactc

SEQ ID NO: 410863 - DNA, 366 bp, Homo Sapiens
  misc_feature (91)..(91): n is a, c, g, or t
  misc_feature (128)..(128): n is a, c, g, or t
  misc_feature (188)..(188): n is a, c, g, or t
  misc_feature (251)..(251): n is a, c, g, or t
  misc_feature (331)..(331): n is a, c, g, or t
gttgtaaattcccaaggctccgtactaataaaaagtttctggctgccttttgggccccagccctatgccctgggtctggctcccaaatttncagaaatgtgtgatttcttggggtgagacagggtggntcttaaaactcacggtctccaccccagggaacttgatgcagggtcctggagtctgcaggntctagtactgcagttaaaattcacagtctggttttagctcactttttaactgaactgtatgtnatgctgttggaaaagcttgaacttgggcattagaacctttcccctctctggaaatcttctttcacagagagagaattttngagccaagctaggttgggggactagacaagatggt

SEQ ID NO: 410864 - DNA, 356 bp, Homo Sapiens
  misc_feature (31)..(31): n is a, c, g, or t
  misc_feature (52)..(52): n is a, c, g, or t
  misc_feature (327)..(327): n is a, c, g, or t
tctcacgagatggttttataaggggcttttncccctttgcttggtatttctncttgccgccacgtgaagaagtacatgtttgctgtctctgtcttttttcctctctctgtgtttcatttcctctctatataagaaaactttatttgaaacagacatggtgaaaactctctttgctctcctatataccttagttcacatacgtaggtagacacattcattttttcatcactttattagaaagcattcaactcacctttttcagccttattatgtgtcaggcactgccctcagcatttcgttataagaggaaataaaacaaaaaatggnaaggattggtccaataatagcggaaaatg

SEQ ID NO: 410865 - DNA, 179 bp, Homo Sapiens
  misc_feature (45)..(45): n is a, c, g, or t
  misc_feature (103)..(103): n is a, c, g, or t
tttgttacatagaatgaggaatttaaaatgaggccatcgcatgtntacaattacaaaatgatgcaaaaatgaaaaaaacatgtgtaatacactacctggtttnctcataagccccacaagtatgtcaaacagagggtaagtgaaagctaggctatggctgctaggagaggtgtgattct

SEQ ID NO: 410866 - DNA, 331 bp, Homo Sapiens
  misc_feature (42)..(42): n is a, c, g, or t
  misc_feature (85)..(85): n is a, c, g, or t
  misc_feature (130)..(130): n is a, c, g, or t
  misc_feature (139)..(139): n is a, c, g, or t
  misc_feature (187)..(187): n is a, c, g, or t
  misc_feature (246)..(246): n is a, c, g, or t
  misc_feature (281)..(281): n is a, c, g, or t
  misc_feature (293)..(293): n is a, c, g, or t
  misc_feature (308)..(308): n is a, c, g, or t
ggttcgaatggcagcgggagtgttcttctgatattaattttnatttacattttagattacggtctccattataggaggcaatttnatcctcctctaccactgctccattatctgccttgctacttaattncctactatnctactatcttaaagggaacgtgctaggataacatgggtttatattttnaggctgttttactgtagactttctgaaagtcggaagcagagcagaccatactattcgancaagagaatgtaaatcgtagtagcgatgtaaatanactatgcaaacnatattttaccttggntaaactgcaaagcagtgggtatt

SEQ ID NO: 410867 - DNA, 292 bp, Homo Sapiens
  misc_feature (119)..(119): n is a, c, g, or t
  misc_feature (125)..(125): n is a, c, g, or t
  misc_feature (234)..(251): n is a, c, g, or t
  misc_feature (256)..(256): n is a, c, g, or t
  misc_feature (270)..(270): n is a, c, g, or t
gaactgagataaacaggcctttagtgtggcctagaggactatctggctaggagttaggctgtgtttactgtttgatgtagctttggtgtcagagattaaaatttcctctcgtgtaactncttttntctcctttgttgtctttgggtttccctaataactccttcataagtaggttccgaggcttgtagttatttaagctgtaagtccctgttattacacaggagccctattgannnnnnnnnnnnnnnnnnaaaantgttctataatctnatgattagctcttagtgagcct

SEQ ID NO: 410868 - DNA, 420 bp, Homo Sapiens
  misc_feature (322)..(322): n is a, c, g, or t
  misc_feature (398)..(398): n is a, c, g, or t
gtcagtatactaatagaggaatggtttaagagggtacatagtttaagtgagaaatgttacctaggtaaaccacagaagtataaatgtaattaacaaggctgtcaggagaatatagtgggtacttcatatacccatgtgaataactggtttgaatatatttataatctttcccctccctttttcacattaagtagcaagttgagaaaggaggccatttatttttaacatgcaatgttgaaatatccctacttctccaacacacaatgaacatgttgtattcctagccatttaaaaataaacatttccaggggctttaaatatnatattatacaagcgcaataaaaccattttttaaaaaaagttatagattgggggaggtcagaaagtaccagcacctngcataatgaatgcttcggaccc

SEQ ID NO: 410869 - DNA, 268 bp, Homo Sapiens
  misc_feature (52)..(52): n is a, c, g, or t
  misc_feature (184)..(184): n is a, c, g, or t
  misc_feature (215)..(215): n is a, c, g, or t
aaagaatgtaaatgcaaagatgaggaaaatcaaaggataataaaggactggnggagaaaggtaggatatgcactcatgagcacacatgcagaggttcatcttagaaaaggggaaggcattcttactgcaaggcagatatgcagggaaagagaaagaataaaagcagaggtagagagagacaccngaaaaaattctgaaaacctcatgcccaaatntcctcaagctcagttaaataaggaaccaagttatctgctgagagcaagaatga

SEQ ID NO: 410870 - DNA, 154 bp, Homo Sapiens
  misc_feature (55)..(55): n is a, c, g, or t
actgcacccggcctgctgctatttaattgcaaaatgaaaagcttgcccctagagnagagaatttcttgaaaatgttctgttaatgccagagctgctctggtcagagtcacatctctaacagtgggcttttattttatgctagtaaatcagtaag

SEQ ID NO: 410871 - DNA, 297 bp, Homo Sapiens
ccattatcacagtgagtagtagcatccaaaggttaggtaatgccccttttcctagccgaaagactgaagaccgaattctcctaagattgttgggcttaccttaaattcttctattaaaatggaaaatgcccaaaccccagtctgtctgtccttagagccaggaaaaaggactctgagacgtacatgctgttggcatcagttaaatttcatgttcctagaggtcctacaatcctgtatgtaaagctacagtgagtaattgcaactgcatttataaattattttggtaatgactccctt

SEQ ID NO: 410872 - DNA, 235 bp, Homo Sapiens
  misc_feature (91)..(91): n is a, c, g, or t
  misc_feature (102)..(102): n is a, c, g, or t
  misc_feature (105)..(105): n is a, c, g, or t
  misc_feature (187)..(187): n is a, c, g, or t
  misc_feature (210)..(210): n is a, c, g, or t
gtacgtatgcataaatgctataaaaaaagccagacttaagataacagataccatttgtcctacatggcaaattaaagttaaaaggtatgantgcaggtgcangantcacctgtgggtacaaacggaattctgatattatttttgaattctgggtatgatattttatttccgaaatggaatacctaantcatttaaaaagcaaatataggntatataacaggttcctcattcgctc

SEQ ID NO: 410873 - DNA, 430 bp, Homo Sapiens
  misc_feature (154)..(154): n is a, c, g, or t
  misc_feature (297)..(297): n is a, c, g, or t
  misc_feature (360)..(360): n is a, c, g, or t
  misc_feature (398)..(398): n is a, c, g, or t
  misc_feature (417)..(417): n is a, c, g, or t
gacccagtaggagaaagagaagtacctaggtgggaagtggcaggctggtgggaagaggccgtccccaccttcccctaaggcccacagtggagtccgctgaagctctgcatgacaggggaggtggctagcgtcgaggcatgcatagctgcccgtntgcttgggaccacttccagggtgcttcccttgcaggtcccccatgggcctgcagctgggccaagggaacaaccccagcattacttaagctctcccagggcgcacctgcagatgtggggctgaacgagtgtggcaaggtcacanctctcggggacaggtgactccgtatctggacatccctgagtggttttgccctcaagcttctgnccgaattctaagcaaagcgatctctttgcaagtaatgntatatgtaaacaatacctncttccttcccagg

SEQ ID NO: 410874 - DNA, 210 bp, Homo Sapiens
  misc_feature (184)..(184): n is a, c, g, or t
acgagccaccatgccttgcagacagctagattttctaatgtggatgataggagcatgaaagaggaatcgggcatgagcccaaggtttttaatcttagcagctgtaaccatgcacactgcttcagctgagatgacgttggtattgacataatattcactgtggatatccagaggggttgtttttngtcatatggaaggaatcaggaggccc

SEQ ID NO: 410875 - DNA, 240 bp, Homo Sapiens
  misc_feature (88)..(88): n is a, c, g, or t
  misc_feature (104)..(104): n is a, c, g, or t
  misc_feature (109)..(109): n is a, c, g, or t
  misc_feature (161)..(161): n is a, c, g, or t
  misc_feature (181)..(181): n is a, c, g, or t
  misc_feature (207)..(207): n is a, c, g, or t
tccctcatcatgtatatgacagaatttacacagctcctgaggctgctagaggtgaggtgacaggcactggagctctggacacccaggngcaaagggagcaatanctctnctacccatacccatcctcaggtcctgtcttgggaggcacagccctaagctgnccacacggtgcagagacggncagagacccttcctggtgagcacagnttctcaccagggacttgaggctgggatgcagct

SEQ ID NO: 410876 - DNA, 265 bp, Homo Sapiens
  misc_feature (155)..(155): n is a, c, g, or t
  misc_feature (190)..(190): n is a, c, g, or t
  misc_feature (195)..(195): n is a, c, g, or t
agtgaattcttgctttattgatacattctagtattcagttgtgattttaatatgctattttggtactttctgctttcagttttcattgctgtggctattgccttaaacagaaacaaaaaactaaaacaattttacaaccatccaaaagaggcttnggaaacttttttttggctggatatccatagcacantttanttcagtaaacataaacagttaaaaattattccagtacacaaaccatgtttttaaaaaggaggtacacccc

SEQ ID NO: 410877 - DNA, 243 bp, Homo Sapiens
  misc_feature (28)..(28): n is a, c, g, or t
  misc_feature (36)..(36): n is a, c, g, or t
  misc_feature (69)..(69): n is a, c, g, or t
  misc_feature (160)..(160): n is a, c, g, or t
  misc_feature (200)..(200): n is a, c, g, or t
  misc_feature (208)..(208): n is a, c, g, or t
gagcatctactacgtgccaagcattgtnctaatggntggggatacaaaaataagtaatatatggttgtnaccctcaaggggctctccctggagatgggtagagaagcaaattatgcaaaactcagagcatggtgatttatcaggtgctacaacagtgggngaaactggagctttgagatcccataaaacaggtgctttantatctggnaattggctttgaagctctacttaaatatatccact

SEQ ID NO: 410878 - DNA, 346 bp, Homo Sapiens
  misc_feature (173)..(173): n is a, c, g, or t
  misc_feature (197)..(197): n is a, c, g, or t
  misc_feature (320)..(320): n is a, c, g, or t
cttaaactactccctgatggtgaaaaataacaatgaaatatacagctacccttgagaagttcacattctcactggtcacctgcctccagtttgcccccaacttccatttcagcctccaggtcactgccagaatgagcttgtaaaacacacatgggatcttctcacctataggntaaagataaatccctaggcatggntcacgaggtcctttgtgcattggctcctgcccttttctctggtcttatttcccatccctctgtgtgttctggttgtacttaactacttgtaattttaaaaaactcaaacttgctgtctcctgnctcaaggttgatctataagcgggttt

SEQ ID NO: 410879 - DNA, 394 bp, Homo Sapiens
  misc_feature (365)..(365): n is a, c, g, or t
ttgctaacagaacactgagaacagtgccagcccctgtctaagcacgtcctgtgtattaactcacatgatcttaagagtatttgcagaagggcagtagcctgctctgtcaacccctagcaaaatgacacctggagggcaaccaggcttgcaaagcacccccgaaggcttgagcagcccctgaggttgacagctcatcaactccctcagctcagccagctttcacgttgtcagacctgcttaatggcagaaggcacaggtatcttgtggcgaatatgcctggttctctcaacacgacaacacagattttgccttggacactggctgctttcttactttgatcaagatgactgatccgctaaggaaanctggggccgttttaggcggctttcttagg

SEQ ID NO: 410880 - DNA, 377 bp, Homo Sapiens
  misc_feature (24)..(24): n is a, c, g, or t
  misc_feature (33)..(33): n is a, c, g, or t
  misc_feature (40)..(40): n is a, c, g, or t
  misc_feature (61)..(313): n is a, c, g, or t
actatcctccctcttgcgctatgnctgcttctnagttggntagcacaggacacacaaacannnnnnnnnnnnnnnnnnnnnnnnnnnnnnnnnnnnnnnnnnnnnnnnnnnnnnnnnnnnnnnnnnnnnnnnnnnnnnnnnnnnnnnnnnnnnnnnnnnnnnnnnnnnnnnnnnnnnnnnnnnnnnnnnnnnnnnnnnnnnnnnnnnnnnnnnnnnnnnnnnnnnnnnnnnnnnnnnnnnnnnnnnnnnnnnnnnnnnnnnnnnnnnnnnnnnnnnnnnnnnnnnnnnnnnnnnnnnnnnnnnnnnnnnnnnnggaagtcttatgactcaacccacttgacaaatgagggaaactggggatcagcaaggcacagcag

SEQ ID NO: 410881 - DNA, 341 bp, Homo Sapiens
  misc_feature (22)..(22): n is a, c, g, or t
  misc_feature (206)..(206): n is a, c, g, or t
  misc_feature (280)..(280): n is a, c, g, or t
  misc_feature (298)..(298): n is a, c, g, or t
gtcgcatctaaggatgagaggntctgccggtccaccctgaatcactttcctaccctacaaatactttcttccatggctcagaaggagctcaaagccctagtggtggaaagaccctcgacagcagtggtcctcagatttccttgtgcaacagtacaacaaagagggcttgtggatagagatttcccttactctggttaattggtttnaggtacggcccaggaatctgcatccaatgtgctagtctcaggacatgttgatataggcctttggaccacatttnatgagcccttctttcctncctggtggggcacagtgtatcacacaacctcttgctatggact

SEQ ID NO: 410882 - DNA, 392 bp, Homo Sapiens
  misc_feature (72)..(72): n is a, c, g, or t
atatcatttggttcagcaaccttaatctgggtattaatttcctcctggatgcacatttttctaaagagaggntccacggctagcaacctattcttgaagggacgcttatccctccataggttaaaaatcacagttctaatctatccctttcttttacaagcaaggctgtaatctcaagagttaaacggtttatctttagtcccacagaaaaccagtcggtgttgaaactcaggcccctgactcctcatcttaatctcttacgaaggtctctcaccacgaaatgaataacactacaaaagtaggttcaaaatacattacactcatgcttgacatgttcggttacaaaattattcctcctttctggggctagcctctgctgtctgaggtctctt

SEQ ID NO: 410883 - DNA, 156 bp, Homo Sapiens
  misc_feature (89)..(89): n is a, c, g, or t
  misc_feature (94)..(94): n is a, c, g, or t
atctcttgacctgaatgcaatgcagccttaaacctggaagtgggcactggggcccaaaaagggagagctccaggagaaaccctctaggnttctnttacagagctgggtaggaactcctaacgctcagagaaagtacagaagtcctcggagtttttt

SEQ ID NO: 410884 - DNA, 331 bp, Homo Sapiens
  misc_feature (317)..(317): n is a, c, g, or t
gtagactttatttttttagatcagttttaggttcctcaaagcaaaactgagaggaaggtacagagatttcccataaatccctggccccacacatgtatagcctccccattatcaacaccccctaccggagtagcacatttgtcacaactgatgaacctacattgacacatcataatcacccagagtccatactttccattagggatcactcttggtgttgtacattctatggatttggacaaatgtataatgacacgtatccaccattgtagtatcatccagagcagtttggctgccctaaaaactctgtgttctgnctatcaattaccta

SEQ ID NO: 410885 - DNA, 433 bp, Homo Sapiens
  misc_feature (402)..(402): n is a, c, g, or t
gccaaggactaaattgcggattaagagtttcttccttttatttcctgcatatccagaaacctggggtcatagatactcttccatggtgtgttgtttggcacaacttgcaagtattttggcagatggttagaaaaaaagactttaagaaatatgcaatagtactcaggactctaaatataataaataaagctaagataccagtatcctgccattcattacaatcaacatttattgaacagcagttatatgccaggtagcagggatacctagaacttgcccctcccactagcactccagaaggagttcctgctttcccagcctaaagcaacagcaagtcttacatgagctaggctttactgtgatagctgtcctgacggcgaagtggcaaacatggcccagtgncttcctcatgggttgaccatgactctacact

SEQ ID NO: 410886 - DNA, 173 bp, Homo Sapiens
  misc_feature (149)..(149): n is a, c, g, or t
ataggtttatacgatctagtctgtggtattcagtagcccaagctgactaatataatggctgtgtgtgtacaaatagcttttcaagattttttacaattcttttatacagtgggaaaactgtattctatttatacccagaaatagaattnctagaacatgtagtagttctattt

SEQ ID NO: 410887 - DNA, 457 bp, Homo Sapiens
  misc_feature (90)..(90): n is a, c, g, or t
  misc_feature (92)..(112): n is a, c, g, or t
  misc_feature (353)..(353): n is a, c, g, or t
acagttgtcctaacaggcagttttgttttgccctttacagacactttaatgctgaaatgttctgtgccagggactcaggtttcccatttncnnnnnnnnnnnnnnnnnnnnnaggtagttatttatgtgactgtcctcctaaccaaatggaccaatctgggcataaaccattttctcattttctctgcttatagaaaggaatgctttatttcagcagtgcagataacatcttgaggtctcaggaggatgacaaattgaaacagtttctttcttgcctaacatttcttacccaagagtcaagtgacgatggtggagaacaaatctctcttctcctgacaatttgcacttatttncttaatagctctgctaaaattcagtgaatttcattttgcttagagcctacttagtccctgccacaggcacaggaagctttcattcatcagcacagagtccactg

SEQ ID NO: 410888 - DNA, 303 bp, Homo Sapiens
  misc_feature (209)..(209): n is a, c, g, or t
  misc_feature (254)..(254): n is a, c, g, or t
  misc_feature (276)..(276): n is a, c, g, or t
cagcaacatatatagatctttaaaacagaatgctgaatatagaaagtgagaaataggtactttaaaaatacataatgttctttagtgggtatatattttaatttatacaactgtggtactgtgctgttgcttattctaacaaatacattagattcctatgggagaaggaaaatataagtgggaaatgagaataaagaggaatgattaancaaacaaccaagggagaaatagtacacccactgataacaatagtntgccatgaactgagcaacatgnttacctcaattctcggcactgcaagtt

SEQ ID NO: 410889 - DNA, 170 bp, Homo Sapiens
  misc_feature (94)..(94): n is a, c, g, or t
  misc_feature (151)..(151): n is a, c, g, or t
aaacaagattttaagattatgtctatgtttctggcttcagaaacaggatgaataacatagggcacccctaactaaacaagagagcacaggcagncacatatttggttggagtggggaggggaaaataaccagtttgtccttcctgaatttnagatagctctctcagatct

SEQ ID NO: 410890 - DNA, 177 bp, Homo Sapiens
  misc_feature (78)..(78): n is a, c, g, or t
  misc_feature (127)..(127): n is a, c, g, or t
  misc_feature (147)..(147): n is a, c, g, or t
acaacatgagcacttgccactaaggggtgtagaatatatctaattggttacctaagacacttgaaagaactagtaggntctctctttaattcccatgttagggtagaagctcccctaaaatcagganacatgtgtaatgacttcctntggggggtgcatggcaacatattcaagcta

SEQ ID NO: 410891 - DNA, 178 bp, Homo Sapiens
  misc_feature (118)..(118): n is a, c, g, or t
  misc_feature (131)..(131): n is a, c, g, or t
agcattatcttctccatgagtgaattcatctacttcagaatcaccataactattcatgttacgaattattttaaattataattattgactactattttcaggcaattaatcccttgtncatagcttcagtnctttcaaccatcagaaatcttcccctgcatatgctagagatacatca

SEQ ID NO: 410892 - DNA, 357 bp, Homo Sapiens
  misc_feature (150)..(150): n is a, c, g, or t
  misc_feature (197)..(197): n is a, c, g, or t
  misc_feature (222)..(222): n is a, c, g, or t
  misc_feature (246)..(246): n is a, c, g, or t
  misc_feature (274)..(274): n is a, c, g, or t
  misc_feature (293)..(293): n is a, c, g, or t
  misc_feature (344)..(344): n is a, c, g, or t
aaagaagggcatttaaggaaaactacaacacatttccccagaaagacctgaatgacgaatatgaggttttcagctcaaaatcaggtctcatgacttcattattggatttgcacctaacatagatcataatttttgtatcttatgagaggnacaaatatcaaaatatgatacagctttaggtatatgttagaggcccnttcttggttgtacgggaatgaaggnaaggacactggaacttcttgcccntcttcaatgtatgctacataattattangccactcctcacctcttgngtacaatttgatgaaggatgttgtaaacatagtgctggacaaatcactggnctcaatacatact

SEQ ID NO: 410893 - DNA, 208 bp, Homo Sapiens
  misc_feature (40)..(40): n is a, c, g, or t
  misc_feature (150)..(150): n is a, c, g, or t
  misc_feature (164)..(164): n is a, c, g, or t
  misc_feature (192)..(192): n is a, c, g, or t
caaattagaattcaaaaagacatttaaaaagatgtttttnctttgaccaactgacctcatgattatctaacctgagatcatcacttgaatggagtaaacagtcaaggggtctgattcggtgcttgggactggagatgaatcattgggatntggctgtggctctnaagaggtgcctaatctatatgagacagncacataaacaaacaat

SEQ ID NO: 410894 - DNA, 367 bp, Homo Sapiens
  misc_feature (111)..(111): n is a, c, g, or t
  misc_feature (121)..(310): n is a, c, g, or t
  misc_feature (331)..(331): n is a, c, g, or t
  misc_feature (336)..(336): n is a, c, g, or t
gtggcttcacttatagaagaatgctgagtgccaaatagtaaatgctgagggagtgctagagttagtaaatcatcattttgcaaccctcctagcagagactggcttaggcangaatcatcannnnnnnnnnnnnnnnnnnnnnnnnnnnnnnnnnnnnnnnnnnnnnnnnnnnnnnnnnnnnnnnnnnnnnnnnnnnnnnnnnnnnnnnnnnnnnnnnnnnnnnnnnnnnnnnnnnnnnnnnnnnnnnnnnnnnnnnnnnnnnnnnnnnnnnnnnnnnnnnnnnnnnnnnnnnnnnnnnnnnnnnnnnnnntgtgcctcccataaaaccctnagaangaatgcgtggattatttatgtagtagtctgg

SEQ ID NO: 410895 - DNA, 339 bp, Homo Sapiens
  misc_feature (83)..(83): n is a, c, g, or t
  misc_feature (158)..(159): n is a, c, g, or t
  misc_feature (189)..(189): n is a, c, g, or t
  misc_feature (324)..(324): n is a, c, g, or t
gctactcaaaatatgattcctatactaccgctccaatcctatttaactgactctctgtttaacacaatccactggtgattcanatgaatgataaagtttggataccttcagggaacctgtcctgacctctcagaccagatcacatacaactgtcttcnncattagactacaaattcatgagggaagggncatctctgtctcattcttaataggctgtgaacactaagtatggtacctgacaaagtgtaaaggctgaataaatacttgcgtgggtgaaatggacaaacctaggattacatgaggttaaatcaggcagactgtggnggaatgtggttgcta

SEQ ID NO: 410896 - DNA, 340 bp, Homo Sapiens
  misc_feature (171)..(171): n is a, c, g, or t
  misc_feature (304)..(304): n is a, c, g, or t
  misc_feature (330)..(330): n is a, c, g, or t
atcccactagttacttccccaaagtcttaactcattccagcattaacccaaaagtcaaagtctgagtctcatctgaaaaaaggaaaatcccttctcccatgagcctgtagaatcaaaaacaagttagttatttccaagatagaatgggtgtacaggcattgggtaaatgtncccattccaaatgggagaaattggccaaaacaaaggggccacaagccctatgccaagtccaaaacccgggtaggcagtcattagatcttaaagctccaaaatctcctttggactccatgtttcacatccaggncacgtttgttgcaaagggatgggctnccacagcact

SEQ ID NO: 410897 - DNA, 307 bp, Homo Sapiens
  misc_feature (114)..(114): n is a, c, g, or t
  misc_feature (238)..(238): n is a, c, g, or t
ctcctaataatttgtttcagaactttctgggtaataaatgccattctgtttgaaaaagcattttattaatcgtgttctgcatagagctaatggagaacagagatggtacctcancgttacatgtcctccttctttactaaagaccctagcttttccccaataggaatcttgagtagtcacaccttcccatgttcaacagccacagagggaacatttttcatgttgcagattataaatncataatgagatttctacgtggcatataaagagccgtgatgtagagatgtagagaagcctctggttatgt

SEQ ID NO: 410898 - DNA, 283 bp, Homo Sapiens
  misc_feature (19)..(19): n is a, c, g, or t
  misc_feature (131)..(131): n is a, c, g, or t
  misc_feature (259)..(259): n is a, c, g, or t
  misc_feature (272)..(272): n is a, c, g, or t
ctgcataaatagtattctncctgattccagtgtacaaaaaacatcatgtgtcagtggtagtcagacatggtaagggaagatttctcagaatttattaccaaagtcttctcttgccagctcaggcagttttnttacaccctcagcgttaggtgcctcaataaagaagggttaggatgactttggagtagaaataagtatatgtatagagtgaggaatctgagataaggcataataagagggacctgaaagcccaggattngaaagaggacctngattataataa

SEQ ID NO: 410899 - DNA, 328 bp, Homo Sapiens
  misc_feature (66)..(66): n is a, c, g, or t
  misc_feature (175)..(175): n is a, c, g, or t
gatccctcacatgcacagttcacaacagggttcacattcgtatgacaatctaatgctgccactganctgacaggaggcagagctcaggccgtaatgctctctcgctgggcagccctcttcctagcaggccgtggactgatacaggtctgcggcccaggggatggggacccttgtnctaaaggacatccacctaaacagggatcctcaaccaacagatgggtatcagaatcacctgaaaggcattttcaaactcattttgaaggctgtagtgaactactactattactggaaatgtaacagaggggttctggggatagcaaagggtgaa

SEQ ID NO: 410900 - DNA, 301 bp, Homo Sapiens
  misc_feature (199)..(199): n is a, c, g, or t
  misc_feature (259)..(259): n is a, c, g, or t
  misc_feature (266)..(266): n is a, c, g, or t
gagatagtctcaatgtaaagatcttaagtgttttatttatttttaattcctgtgggtacacagtaggtgtatatatttatggggtatgtgagatgtcttattataggcatgcaatgtgaaataagcacatcatgaagaatagggtattcatcttctcaagcatttatccactgagttgcaaacaatcctattacatttngtcttattttaaaatgtatagtcaccctgttgtgctatcaaatagtatgtcttattaatnctacttnttgtacctattaactatccccacttccctctattt

SEQ ID NO: 410901 - DNA, 217 bp, Homo Sapiens
  misc_feature (34)..(34): n is a, c, g, or t
  misc_feature (58)..(58): n is a, c, g, or t
  misc_feature (136)..(136): n is a, c, g, or t
  misc_feature (153)..(153): n is a, c, g, or t
acggggagtgttttaagaaatttaatttcctganctaaatttgtatctttagaccttnctgagaaccaaatagacttggaagggttgactgcatagactgcttttccatgctcactctgtcacaatgtggcaaatncttgttttccccaaatncacattgaaactgcctggagaaggaagttggtcctgaaaaagacgtgcctggcttcttatcctt

SEQ ID NO: 410902 - DNA, 129 bp, Homo Sapiens
  misc_feature (96)..(96): n is a, c, g, or t
gtacatcgtcatcattaaatacatgaacatttgctttccacttccaatttcatagaattcttaaaggtcattagccaggggataaatgtggatccnctcgtggaccacagcagtttacctgggatttta

SEQ ID NO: 410903 - DNA, 289 bp, Homo Sapiens
  misc_feature (201)..(202): n is a, c, g, or t
  misc_feature (204)..(204): n is a, c, g, or t
  misc_feature (222)..(222): n is a, c, g, or t
  misc_feature (247)..(247): n is a, c, g, or t
  misc_feature (269)..(269): n is a, c, g, or t
gaaatcaagagcaaactgaacttctgagatatcaggtcaataactatggtttttttacaaatgcatctcaggaaagacaacttctagagtaggaagcaagttcatgaatgagaagtggatgctttcagaatcccatcttactcactttggatgagataaattaggattagcataaacagatctaacacaccatatactttnntncttcgtgatatatttgtngttatcctttcaatccttgtcctgngaataggaagctttatgggcgntataggtaggaagaaaagct

SEQ ID NO: 410904 - DNA, 322 bp, Homo Sapiens
ttgtattttacaatcgacgttggtgatagtaatgatccttcccaagaactagacaggtgccgggctcgccgaccactgcagcccttcaggacaggttctccctgctgccgcctctggacacagcgggacacttgggaaagtcccccttgacctccttggcaatgccagattctaaatccctccctcattatctgctgtgttgctcagagcctgcttgccctagactaacctgggacgcttagcaaagccagcaacaggtgagcatcagccgggactctggaaatcagaaccttcaaatcagcatttcttttttgagacggat

SEQ ID NO: 410905 - DNA, 264 bp, Homo Sapiens
  misc_feature (23)..(23): n is a, c, g, or t
  misc_feature (179)..(179): n is a, c, g, or t
  misc_feature (189)..(189): n is a, c, g, or t
  misc_feature (227)..(227): n is a, c, g, or t
atttggaatgctgaatacctttncaaagactcttttaatctgtataaagatgtagaatatatataaaatacagtgctctacactcaccaggtacctcatcaacgtggcttactagaaagctgtgtaggaggttgtaataagggtttttaacatttattcaaaattttacaaagcatganggcaattttncaaaaaacacaaataattcagataatgacgagcttgtnccttttcactgcagaaattttaggcaagatggacatt

SEQ ID NO: 410906 - DNA, 358 bp, Homo Sapiens
  misc_feature (165)..(165): n is a, c, g, or t
  misc_feature (205)..(205): n is a, c, g, or t
  misc_feature (274)..(274): n is a, c, g, or t
ccatatatgctaactttgtagctggtggcaaaaaaagattattttccctatattaatgacttcttcagctgaattgaggaatagggttaccagctcttttcttggagtttaacactctcaatctgataatatgaataacacctcaataaccacaacaagagcggntcatcttcagtatctttcctgaattaccttttggcttttnaccaccttgtttgtccgtttcagagtttgtctttctgtaaaatcatgggaaggcatctgattactttgntcttgatgtacctgagtaatgcgaacatctgaataattgaacaaaaatcttgtttaaacaaaacttttgtttcagaaggcatcc

SEQ ID NO: 410907 - DNA, 362 bp, Homo Sapiens
  misc_feature (64)..(64): n is a, c, g, or t
ggccctacttagcaagatgctttaaaccaagagtgcacattaacagtgacttcctgtgcaagtntttaaagagctgtcccagttaaagcctgtccaaaatctccacagtacaaaaaaatggtgagtaaaacatttcttcccatactgtttccttgactggagaagttgtcccagatctgttcatgtcatgacacactaagccatcagccacacattcttgactatacatatttatcaagacaccaagaagaaaaaatccaccaaacaaatattagcaatattttatatcaccaatctttttactagggttatttacataaccaaaaaattaatcacttcctgtccttcctctgttcatgggt

SEQ ID NO: 410908 - DNA, 187 bp, Homo Sapiens
cctgtgctccagatccagctctgcggctgctctgcatgcacttgcacttctgacagtggcatctctgtggcccaaacatgcccatgtgctggacctaccaccaaggggcatccccttggccacaactacccctgatagaaggaaaagagatcagcagcactgcagcaccttttactgccaaagaccc

SEQ ID NO: 410909 - DNA, 256 bp, Homo Sapiens
  misc_feature (165)..(165): n is a, c, g, or t
ctgtatgcccccctgagagagacagtgatgaaggaaatgtccgactccttctccagagcacagtcttgttgagaaatttgagactcatgcccatgaacgtggtcattgcctcagtcgtcctgctgatattcatttagcagcgcgttgggggtatgttgtgaaccnggcacggtccctactctcagggcgtttaactctggtggggaaaacgttaaacaatgacctcactaatacatggaaatgcctcctactgctg

SEQ ID NO: 410910 - DNA, 288 bp, Homo Sapiens
  misc_feature (189)..(189): n is a, c, g, or t
  misc_feature (195)..(195): n is a, c, g, or t
  misc_feature (208)..(208): n is a, c, g, or t
aagacattactagcaactggagatacgaatgtccagcctaactaaactgcctgtattgacttttggaaaaatcagcccctattttctgccactctgcatttcttagttcactcaacactttctgatatacagcttagcagttgggacttcttcttagaccatccttaaagcatggactaagagggactngcaggntatataatgagantatcaatagcagagcctctgcatgatagatcatttatggattttaattttcttcttttgccctggccagtcttttcaaaa

SEQ ID NO: 410911 - DNA, 327 bp, Homo Sapiens
  misc_feature (285)..(285): n is a, c, g, or t
  misc_feature (295)..(295): n is a, c, g, or t
ttcataatcatggccgattaaagttgtaatcttattgtatagtctgccatcatagttacagatcacaccctcagaaggagttgcttatgtggattatagcaccagctgagacactgtggttaggcagccagtccagcactttactaaaagactgctgtgacagagtcctgtagtagattctgtaggaacatgcaaaagaagtgataaatgtgtatcttgcccctgggagcttacaccatagagagattaagtacagaaacaagtacaactaaattccagcttttncgagcaaganatgtaacttattgtttatttcaaaaagtgaag

SEQ ID NO: 410912 - DNA, 284 bp, Homo Sapiens
  misc_feature (56)..(56): n is a, c, g, or t
  misc_feature (194)..(194): n is a, c, g, or t
  misc_feature (203)..(203): n is a, c, g, or t
  misc_feature (205)..(205): n is a, c, g, or t
  misc_feature (214)..(214): n is a, c, g, or t
  misc_feature (248)..(248): n is a, c, g, or t
  misc_feature (251)..(251): n is a, c, g, or t
  misc_feature (270)..(270): n is a, c, g, or t
tagctcaacttatagggaattcaaaggctttttcagccaaactaaaatttaaactnctcctttaatttgaactgactctaaaaatgaaaatagtattttcccctttgtgaacaaattttacaaggagcagcctatttaataaacactagctttaaacaaagtataggcttttcagctgatacccgtaaggttcngtgggtatncngcaaaaagnggtataatttaattttctgtgcatagctctttanccngtgtttatttccaaatccnttaatagggatgcc

SEQ ID NO: 410913 - DNA, 366 bp, Homo Sapiens
  misc_feature (62)..(62): n is a, c, g, or t
  misc_feature (106)..(106): n is a, c, g, or t
  misc_feature (145)..(145): n is a, c, g, or t
  misc_feature (321)..(321): n is a, c, g, or t
tttatatttcactaggagtaggaggataaaagggatagatagaatagtctcattcaaaagtncctaagaccagctgatgatgagaatcacctgtttattaaaacgnattctcatacccaacctcagacatgattaatgggaattncttagtggtaatgcctcggatatgtatcttttaaaacaacaagccctcttaggtgagtctgataatcacctgaatttggaaactattcaatcagaattagattaattggattctggacacagctatttttattagttatatgatcttgggacaagttactaaaaacctgtatgggnctatatttcccattgaccattaattttctgttggtacataatatt

SEQ ID NO: 410914 - DNA, 351 bp, Homo Sapiens
  misc_feature (19)..(19): n is a, c, g, or t
  misc_feature (117)..(117): n is a, c, g, or t
  misc_feature (123)..(123): n is a, c, g, or t
  misc_feature (186)..(186): n is a, c, g, or t
  misc_feature (203)..(203): n is a, c, g, or t
  misc_feature (315)..(315): n is a, c, g, or t
gtctttactatttactgtncttatgtaaatccaaaggagaccatagtcagcagtgttttccaaacatttttaatcatgaagtttttgtttcatttttagaagtactttatgggtaangtgttncataaaacatattttgggaaatgtaaaagctaatatatgcaacaaaaattacttaagactttnaggtttcaatatatttnattctctgcttatatgtgtgtgaacatccacacaaagccagaaacataagccaacaactggttcaacaatatgccataaaaatcaaactcacagtctataatatagggatanggacttttaaaactagcatgggtgtattttggttcc

SEQ ID NO: 410915 - DNA, 254 bp, Homo Sapiens
  misc_feature (38)..(38): n is a, c, g, or t
  misc_feature (82)..(82): n is a, c, g, or t
  misc_feature (88)..(88): n is a, c, g, or t
  misc_feature (132)..(132): n is a, c, g, or t
  misc_feature (203)..(203): n is a, c, g, or t
gtaatcttatttacaaatagtctatatctccgagtctnttctagattattaggaaaaggctcctcaaccatggcctgaggantaaggnagtatctgtgcccttcaagccatcaaaacccacctcattctaanatctcaaaagaagatcatcacccccttccctcaggggtctgttttctttctggagccttgaatcctatttnagttgtactgcaggtccagagacatcccaccccaaaacccgaaaaggtttt

SEQ ID NO: 410916 - DNA, 296 bp, Homo Sapiens
  misc_feature (192)..(192): n is a, c, g, or t
  misc_feature (203)..(203): n is a, c, g, or t
  misc_feature (233)..(233): n is a, c, g, or t
  misc_feature (240)..(240): n is a, c, g, or t
  misc_feature (254)..(254): n is a, c, g, or t
  misc_feature (279)..(279): n is a, c, g, or t
aaaatatactaaaacaagagaattaggacaagaaatgatttaaagtagataaaggactatataaaacataattagatttttaaagtttgatggcaatgagaattacataagaaaaacaaggaaaggtatgtaggaagtgtcacaagtggggctagtagaaaacagccatctctgcgccatgtccaccgtggncaggccacttntgctctccggctgcccctgagcccatctgnccctctntcctctggctacancggggcagccacagcagcctctgtntgggtgcccatcctgct

SEQ ID NO: 410917 - DNA, 341 bp, Homo Sapiens
  misc_feature (51)..(51): n is a, c, g, or t
  misc_feature (208)..(208): n is a, c, g, or t
  misc_feature (296)..(296): n is a, c, g, or t
  misc_feature (321)..(321): n is a, c, g, or t
ggagtggggacactccaaatatatgttgaaagactaaataaattataattnctttctggcattcaatgcctccttgctctatagaacttcctctttatttgaagtcaggtaatagcctggtgacaccatatagatataaagcccactatagtcagtatttataacagcagagatggtaattcacagcatgtaaatgtctttatagganacttccctttgaaacctgcatctttctgaggcaatatgcaagtgttaaccttttgattttatttatcaaccttcattttctgtttacnaaggcatgtgagagacaggtaacgnctcataaattttaaaaaagg

SEQ ID NO: 410918 - DNA, 180 bp, Homo Sapiens
  misc_feature (67)..(67): n is a, c, g, or t
  misc_feature (154)..(154): n is a, c, g, or t
  misc_feature (168)..(168): n is a, c, g, or t
aggataaagggtgtagccatagatgggtggtggtgaagatctctgagatgaggagctcaaggaattnagaggccagggtgtggacatcaggtaatattataacaccattattagatggagagagctgctgagaactactgccagagtgggactnatgagaggaaactnttctaagggtca

SEQ ID NO: 410919 - DNA, 298 bp, Homo Sapiens
  misc_feature (12)..(12): n is a, c, g, or t
  misc_feature (86)..(86): n is a, c, g, or t
  misc_feature (108)..(108): n is a, c, g, or t
ctgttgtaaggnacagatgcctttaaaagctcagcatagtatctgacatatccaagtttttttacatgcagagaattacttttatnctatagggaacatgctactgtnatcaagcaaaagtggctcactgcctgatgtgctagaggccaatactgtgacactggagatttgttgggggaaaaaagccctatattgcaggtcaactcacaaggagacaggagtcaagctcaaatctgtctccccatgctggcttcaaggcagcattatttattagaaaaaggttcagggagtagatctt

SEQ ID NO: 410920 - DNA, 412 bp, Homo Sapiens
cttgtggggcttagcgtccagtgactgttgttttgttttatccttacagaagccctgtaaagatgaaccttatttcccaccattcagcaaacaaggaaacaaatgctcagggtcataaggtatttaactaaggtcacacaattgtccgttccagagaccttactatttccactctctgtgctgcctctcaagggagaccatttcctagatgagaatagccattggtcaatgagctgcagcttatatgggattctctgttggaaaatgacttatgattccttgacttcatgcttagatggctgttagtcaattttgaactaatgaaatgggaatgtatggggtataaattttaattgcaacaaattcttgaaggactttatatgtgcacattttatattatcagattacactt

SEQ ID NO: 410921 - DNA, 147 bp, Homo Sapiens
ggaattttaatttataaaataaatacaagcaaactgttctgaccaaaatgggggtgggggtaagaactccttcgtaggattccaaggaatccctgagcttggcacagcacagcctgaaaagtattatctacagatagtatttggatt

SEQ ID NO: 410922 - DNA, 217 bp, Homo Sapiens
  misc_feature (154)..(154): n is a, c, g, or t
  misc_feature (184)..(184): n is a, c, g, or t
  misc_feature (205)..(205): n is a, c, g, or t
tgagcacctcacctggcagtactgtgttcttaatgtatatcatagttaacccccactcccttattttcttactaaataataggtgtgaaaattaaatttttgacatatatggctctagcagaggattgcttttacagagaaataggtgcctgtnttctactttgtagagggactcttacctgtngttttccttctcaagagctgntcacaggttagg

SEQ ID NO: 410923 - DNA, 164 bp, Homo Sapiens
aaaagtttttgaaaaaaatcaggtaagggatgttattaccacgataattcctttcagaatatttgcctccctgtaaaacttggaaggagaaaaatattcctttgacaatgcttctttaagatgggagtgactttcaaaactatgaaaataactagcacacttgt

SEQ ID NO: 410924 - DNA, 283 bp, Homo Sapiens
  misc_feature (46)..(46): n is a, c, g, or t
  misc_feature (126)..(126): n is a, c, g, or t
  misc_feature (185)..(185): n is a, c, g, or t
  misc_feature (193)..(193): n is a, c, g, or t
  misc_feature (201)..(201): n is a, c, g, or t
  misc_feature (217)..(217): n is a, c, g, or t
  misc_feature (220)..(220): n is a, c, g, or t
  misc_feature (267)..(267): n is a, c, g, or t
ttaagtttcatcagtaagtaagaagttccagtaatgtaagattttncaatgggtcactttgtactgtgtgcattttttaaactatattcaaagatcctgaagcttcactgtccatgaccaattttnctcttataatatttataaataaatatccagaggtgggataaatgcatgatatgatagtnccattttnaatttttngtgaaaataccctacnggntttccatagcagctttatcatttttgagttgtgatatgggttttggnttgtggtccccacccg

SEQ ID NO: 410925 - DNA, 303 bp, Homo Sapiens
  misc_feature (16)..(16): n is a, c, g, or t
  misc_feature (217)..(217): n is a, c, g, or t
  misc_feature (249)..(249): n is a, c, g, or t
gtatgggttaccaggntcagcagtttgcatacaaccaacttcaaaaacgtttatagtcagcatctagaaatcctgaaagctaagttaacattagatctgataatcaattgtctgtgtctccaaaatgcaatacagagataagaatgcacaattgattctagagcacacaatctggacctgggaactgtacaaacactgaggttaaactcagagatancagctgttaaatctatagatcttaacagtggngaattctgcaatcccccaattccattttgatatatgcttcatcattccactggg

SEQ ID NO: 410926 - DNA, 179 bp, Homo Sapiens
  misc_feature (19)..(19): n is a, c, g, or t
  misc_feature (28)..(28): n is a, c, g, or t
  misc_feature (65)..(65): n is a, c, g, or t
  misc_feature (95)..(95): n is a, c, g, or t
  misc_feature (101)..(101): n is a, c, g, or t
  misc_feature (118)..(118): n is a, c, g, or t
  misc_feature (154)..(154): n is a, c, g, or t
gtcaggacctagctatctnccaaaaganctgggtctctgaaatcctaattttgtacataattccnccatttaattgacagttttgacccaagttncttttncagtatcttggattctnagtaattccccatctgacataaatccagcaaatggncagcaagcccattggagtaggctgg

SEQ ID NO: 410927 - DNA, 167 bp, Homo Sapiens
  misc_feature (87)..(100): n is a, c, g, or t
  misc_feature (114)..(114): n is a, c, g, or t
ctaatttccattctctcaggctctccctaggaatttagaaccttcttcaattcactgtacaaaacaattagctttctaatttcctannnnnnnnnnnnnnactctgtatgaggnctgcctcaggactgaaaaccatttaagttgtgctagtaaaccaaaaataaagg

SEQ ID NO: 410928 - DNA, 300 bp, Homo Sapiens
  misc_feature (50)..(50): n is a, c, g, or t
  misc_feature (53)..(53): n is a, c, g, or t
  misc_feature (210)..(210): n is a, c, g, or t
  misc_feature (239)..(239): n is a, c, g, or t
  misc_feature (248)..(248): n is a, c, g, or t
  misc_feature (260)..(260): n is a, c, g, or t
  misc_feature (282)..(282): n is a, c, g, or t
atctctagaaggaaaaatcaaaagagttgtcagagaagatttaggcactnaantcagagcatatcatgggtgctgaagaaataattcttgcttactcttttaataatgcaaacaaatgtaaaagtaaacagaaggtgacatgagtttaaagaatcatctctttcacaagtgagtttttgtattgttttgtttaaatactcaaggactgantgaagtcagcataaggcacagaaattttnctggcaagncacacacttttnctgtcaggcagaccacaagganggtaaagaatagcctttt

SEQ ID NO: 410929 - DNA, 281 bp, Homo Sapiens
  misc_feature (16)..(16): n is a, c, g, or t
ggaaccaaggtttgtnaggggggatgagagaggctgctgaccccaaagttctgtccaaaggcatccttggtcttcatatgggcttccttacatccctccctccatggtctacacttccttcccatatcctctccttcctcaaactagagtccaaatgttaggtacaataaagggagaaactgaggcaacctccccttcaatgggatctgggtaagcttcaggaaataaataacctcttcacccctctcagcctgagaaggttcagtgaaaaagatgacatg

SEQ ID NO: 410930 - DNA, 327 bp, Homo Sapiens
  misc_feature (299)..(299): n is a, c, g, or t
ttggtgggggtagggagttcagcaggaagtattgtctgtgtgtgatgacggggcagtattgccagtcggcaatgttgtatttgcattctttatccctaactctgaatctaggactccatgaaaagccgggtcacccacaaaacatttcttccaatacaaagtgtattattacgtctattataaactagtttcatttcagttatttatcttcatagagtgggaaagtctttttctgaaatactaattctatgaaaataataattttagtggaatctttgccaagaagttatagaaacttnggaataaatttctccatttttcagcaca

SEQ ID NO: 410931 - DNA, 319 bp, Homo Sapiens
  misc_feature (106)..(106): n is a, c, g, or t
  misc_feature (226)..(226): n is a, c, g, or t
  misc_feature (270)..(270): n is a, c, g, or t
  misc_feature (302)..(302): n is a, c, g, or t
aaacaaacaaaaatcgtgggctttctgagaaaaggagaagtctatgttttaatgacattctgagtgagaaaacattccaaattgtattaaatgatataatttgtgnttctctcatccatctcatattaacctgcacagagatggagaaaaagttagccaatctagtactcattgtgatatctcattgacaaccaatcttgaggcatttgtcaaaaaagttactctnacagtaaggtgtaacccaaatcaaattaataagtaattttttgnagcatttttttaaatgtcaaaaggcagtcttntattgcatttagcaagg

SEQ ID NO: 410932 - DNA, 308 bp, Homo Sapiens
  misc_feature (25)..(25): n is a, c, g, or t
  misc_feature (231)..(231): n is a, c, g, or t
  misc_feature (248)..(248): n is a, c, g, or t
  misc_feature (265)..(265): n is a, c, g, or t
cattttagaaattatgagggttttnccccaatagaggttttaatgtgagttttgcaaaaaggctagacagctaattcgtctctcaaacaacactgagaactgtggatttctgaaagaagtgaccccagattcactcacttaaccacttctagctcttaagtaacttaaaattgacaaagtacggtatcaaaatgtgaacagtagcagatagtaagatattttatgaatgancttggtagaaggtaganaaaatattccattagancatcttctcctttagcaaaattatactgtttattatactaaat

SEQ ID NO: 410933 - DNA, 221 bp, Homo Sapiens
  misc_feature (46)..(46): n is a, c, g, or t
  misc_feature (64)..(64): n is a, c, g, or t
  misc_feature (118)..(118): n is a, c, g, or t
  misc_feature (150)..(150): n is a, c, g, or t
  misc_feature (168)..(168): n is a, c, g, or t
  misc_feature (186)..(186): n is a, c, g, or t
  misc_feature (192)..(192): n is a, c, g, or t
  misc_feature (201)..(201): n is a, c, g, or t
tagattatctataattggatatcatctatattgccatacataaaantagctatagaaatatgtncattcaagcagaaggaatggtgcttgaggaaatacctaggtggaaagacaagtnagccatgtaatgacagatatgtttggtttgtncaaataatacaacaaaantgcaaaataacatcagtncttacnttaggaaantggaatgtcctcctgtcctt

SEQ ID NO: 410934 - DNA, 278 bp, Homo Sapiens
  misc_feature (139)..(139): n is a, c, g, or t
  misc_feature (268)..(268): n is a, c, g, or t
ccttgtaatcacacgtgtaaggttaactggttaatataaattaaaataaaaatagatgtcactgacattattccataatgaacagctttgtaggaaaagaattagatctactctttcctgctactttaattatataaancatacataaataattgccaacagtgacattattagggaacaacaaacttggaggaatattttgattagtctgaaatactaagcaatgcagctagttcaaagcttagtttaaaaatttaaatacctgggnttttttgggg

SEQ ID NO: 410935 - DNA, 291 bp, Homo Sapiens
  misc_feature (30)..(30): n is a, c, g, or t
  misc_feature (74)..(74): n is a, c, g, or t
  misc_feature (107)..(107): n is a, c, g, or t
ctgcagacagtctggcaaggacagcgcgtnacgacacagctctcgctggccacttaaatcttccagtgtctctntctttataaacaaccctctggtgacctcctttntgctattttttttccttctttgggtaaattctcagcagggggattttggagtgagagtataatcttttttggaactttcaagggacctggctggcttgtcctctctgcgtggcaaacacatatgcccaggttagcccggcagccaccctggtctacccagggagcccctccgtgggctttcagg

SEQ ID NO: 410936 - DNA, 315 bp, Homo Sapiens
  misc_feature (90)..(90): n is a, c, g, or t
atcaaggcaccagcagacacagtatctggggagggcctgcttcctggttcactggcggctggccatctcctgaagtggtgaaggactctntggagtcccctttgtaaaggctctaattccattcgtgaaggctgtaccctcatgacctaatcacacaccaaatgcctcacctccaaatagcatcaccttggcgatcaggtttcaacataggaatttaaggaggtcagaaacattcagttgttagcagcatcatactgaaatctaatagctcagggcagcacccagatggaggtgggaaaagccttaaattcttag

SEQ ID NO: 410937 - DNA, 242 bp, Homo Sapiens
  misc_feature (100)..(100): n is a, c, g, or t
  misc_feature (102)..(102): n is a, c, g, or t
  misc_feature (130)..(130): n is a, c, g, or t
  misc_feature (171)..(171): n is a, c, g, or t
tgttgctgttgcttttaagcctccaaagaccaagatccacttaatagaccgtggcatttttgcctcatctactgacttaagaacttaatccatgaccctntnactacaccccctgcacccccacccacgnacatttacatgctcactcgtacactcattcacactcacctntacctttagatttaacccactgagctgtactgagccagatgaactggactgttgattctaaccatttctgg

SEQ ID NO: 410938 - DNA, 265 bp, Homo Sapiens
  misc_feature (66)..(66): n is a, c, g, or t
  misc_feature (91)..(91): n is a, c, g, or t
  misc_feature (142)..(142): n is a, c, g, or t
  misc_feature (159)..(159): n is a, c, g, or t
  misc_feature (202)..(203): n is a, c, g, or t
  misc_feature (246)..(246): n is a, c, g, or t
cacaacaaaaggtctatcacagtgttatggtattatcaaaacattatgatgataaaaataactttntgtaataatgttgaagatatgagtnctagaaggaggttcagagagaaaaatcaaagcattatagataatagtgggncaacacagtggcatatntagggcagagtagagaaatatctgggagtgaagttggtaccannttaaaaggacatggtcccattccctagaattcccataggaaanctgagacaaatgcttcaat

SEQ ID NO: 410939 - DNA, 225 bp, Homo Sapiens
  misc_feature (50)..(50): n is a, c, g, or t
  misc_feature (81)..(81): n is a, c, g, or t
  misc_feature (142)..(142): n is a, c, g, or t
  misc_feature (170)..(170): n is a, c, g, or t
  misc_feature (180)..(180): n is a, c, g, or t
  misc_feature (202)..(202): n is a, c, g, or t
gtgttatttcctcctatcccaggccttctcaaatacctcccttgactgtnccttatacattgtctgtaataattacctttnttgagaatcatagtatttggttggcttttctccagtgaatagaattaacctagtgcaagcngtttttcaaagcatataatgagcctttnaaaacttganttttcatgacaaagtttatttngttgaaatataaaagaaaggcaa

SEQ ID NO: 410940 - DNA, 338 bp, Homo Sapiens
  misc_feature (48)..(48): n is a, c, g, or t
  misc_feature (318)..(318): n is a, c, g, or t
ccaactctgccttgtatcatgaaagccactgtagatgatatgtaaatnatgaacctatttgtgttccagtaaaactttatttacaaaaataggatgttggctggatttggcccatggactatagtttgcctactcctgctttgtagtgcttaaactcctttgataagaatatgaaagccagtgatgcgctctagtgactgcctaagaactatcaagacaccttagtatgttatagttccctgttaaaacaacgggattatggtggattataagtgcagtttaataacatcaagaatcattaatatttattttgtaggntgcactgctaatttatattg

SEQ ID NO: 410941 - DNA, 216 bp, Homo Sapiens
  misc_feature (100)..(100): n is a, c, g, or t
  misc_feature (109)..(109): n is a, c, g, or t
  misc_feature (122)..(122): n is a, c, g, or t
  misc_feature (137)..(137): n is a, c, g, or t
  misc_feature (155)..(155): n is a, c, g, or t
  misc_feature (164)..(164): n is a, c, g, or t
  misc_feature (178)..(178): n is a, c, g, or t
aataccttgctgcctggctactgcagtgccaattctgccattccccccccgtcctcaattcaggcatcacctgagggacttgcagagcatcagggatctngcccctctnagatcttgctggnctactcaagcctttntacagcaccaggcaacgnaattaaatntgggacatgcactntcacagaataactttttaattgcttaattaaatcaggg

SEQ ID NO: 410942 - DNA, 277 bp, Homo Sapiens
  misc_feature (226)..(226): n is a, c, g, or t
aaatgcacacatctagtttctcttatcttcaaagctaagctgtcttaactccaagtttaagatatacaaatacttcagaatatttttgaaaatatactttagaatccaatagaaacattacttcctttttcaacgttagaatagctaaacttaagctcacttctattccagatataaatcaccagaaattcccactgaatcaaaatgcttcaggctcacaaaatgnaaattactcccacaaatggttaaacacattgttttgaaattaaagtggtta

SEQ ID NO: 410943 - DNA, 316 bp, Homo Sapiens
  misc_feature (62)..(62): n is a, c, g, or t
  misc_feature (193)..(193): n is a, c, g, or t
  misc_feature (256)..(256): n is a, c, g, or t
  misc_feature (285)..(285): n is a, c, g, or t
caggaaatttagacaggctacagttaaagtgaagcataccttacccatccaccccccatttnatatttagttgcctttttaaaaagattataggggtacaatgtttagatttagtgggatctccaggtataactgtaatttgagccccagtgttaagactatgaagctttgtcaatgggtacattttagcaantgttacaattaatttagaacctaaagttatggagacacaaaagccaataggcaccctttttangttttggttaaatgattcagtatatacancttatttatttgtaatattaggtatataatt

SEQ ID NO: 410944 - DNA, 134 bp, Homo Sapiens
  misc_feature (50)..(50): n is a, c, g, or t
  misc_feature (68)..(68): n is a, c, g, or t
tggcagagctgcatatgcagtagagagatgtgagttaagctgggttacanccaaagaaggaaagagantacaaagagtaagtagataaataagaactggtgtcatgaggaagtgccatctgggaatctttgctt

SEQ ID NO: 410945 - DNA, 224 bp, Homo Sapiens
  misc_feature (99)..(99): n is a, c, g, or t
  misc_feature (121)..(121): n is a, c, g, or t
  misc_feature (129)..(129): n is a, c, g, or t
  misc_feature (136)..(136): n is a, c, g, or t
  misc_feature (165)..(165): n is a, c, g, or t
  misc_feature (208)..(208): n is a, c, g, or t
ctcctcactctgctcctacacaaacacattgccctgtgttcatccgtgtctatcacatactaccctgtttcccacaggacatccatccccttccccctnactcaccccgatttccttatantagagttntttgttngccagggctccctgaacatgctccacctncattaggaatctaggaatcggtgaccccatagcagtgggtctnacactggagtgtgcct

SEQ ID NO: 410946 - DNA, 180 bp, Homo Sapiens
  misc_feature (21)..(21): n is a, c, g, or t
  misc_feature (133)..(133): n is a, c, g, or t
  misc_feature (143)..(143): n is a, c, g, or t
gggaccagagcaaggcctggncctcatttttgggcggggatttatggtggggtaggacaaggaagaggaaaagagcgggtgcctcggaggtaatttaggagaaaacgaaggaagaggctgggaaatgccaaanagagggattngggaataagaccccaaagatcgtctgaaagcaccttt

SEQ ID NO: 410947 - DNA, 239 bp, Homo Sapiens
  misc_feature (52)..(52): n is a, c, g, or t
  misc_feature (127)..(127): n is a, c, g, or t
  misc_feature (135)..(135): n is a, c, g, or t
  misc_feature (143)..(143): n is a, c, g, or t
  misc_feature (228)..(228): n is a, c, g, or t
gggcctctccacagagctgcttgaatgtcctcgaggcatggcagctaatttncgacctagcctcagaaactatacaccattactactgctgcattctgttggtcaaaaggcaggaaaaatgcatctnaccttttnataaaggngtgtcaacatttcattgtaaaattggaaaataaattcccaaagtgcccaacacttgtatagcactgtacagcctttttaaaatgncctatttttca

SEQ ID NO: 410948 - DNA, 301 bp, Homo Sapiens
tctgctggttgtaaagacggtagagtaaaaatgatgttatgataagaagagcaatgaaatctgctgtgcatgcaaccttcctttttgccttccttccaaagaaatctctgatgtttcttctagcattctatcaaaatgaagtcaaaatctatatgacagtaagttctctaagcagataaatcaatataatgtgcatagtaacatacaagtgacatcatttctggaaaaagaaagtttaagatatatggggcatgttgaagtctcaacatgtatgacagtattcatgttaaataattgcaga

SEQ ID NO: 410949 - DNA, 188 bp, Homo Sapiens
ttaagtgactggaattttaagttataactcctattataaaaagttaacttgactataacttgtaaagtcaactcctcaatcctcttaatcatttggtagacttctgactttatattcaatgagataatcatattatttttattagaaaagagtcagttttaatatgtctgaaagaaaataaatctggg

SEQ ID NO: 410950 - DNA, 330 bp, Homo Sapiens
  misc_feature (44)..(44): n is a, c, g, or t
  misc_feature (79)..(79): n is a, c, g, or t
  misc_feature (97)..(97): n is a, c, g, or t
  misc_feature (197)..(197): n is a, c, g, or t
  misc_feature (257)..(257): n is a, c, g, or t
  misc_feature (300)..(300): n is a, c, g, or t
attctaataaataatcatggtgctaggctctgaaaatacataanaggattagagatagccccaactaccacccctaatnagacttcttcttcctctnatggtgggatgtactccttgcctagagtggcagcccacagcagcatcaccacctctaattcccagaagggccagttgctagcacagtccatcccacgttntttaggcattacctggagcccaagggatcttggcatccagaagctcaatttggtgaaaanattggtgtggcttgcacagcagtgtctctcctgtgggtgattncacccaacaactcctaatcttttccaaccc

SEQ ID NO: 410951 - DNA, 217 bp, Homo Sapiens
  misc_feature (18)..(18): n is a, c, g, or t
  misc_feature (42)..(43): n is a, c, g, or t
  misc_feature (117)..(117): n is a, c, g, or t
  misc_feature (134)..(134): n is a, c, g, or t
  misc_feature (164)..(164): n is a, c, g, or t
  misc_feature (187)..(187): n is a, c, g, or t
ggacacactttggctatnacctgtaaagagtgaaaggccctnnctttttttggaatcatgtgacattaaaagaaatttccctctagttttactgtgtatacgtgtaaaaggaaaatnattgtaagaagcttttntaatttaaagagagtattacagagtctgtnatccctgtgctttatggaattantctaacacctatatttggcttctaagaaag

SEQ ID NO: 410952 - DNA, 286 bp, Homo Sapiens
  misc_feature (11)..(11): n is a, c, g, or t
  misc_feature (27)..(27): n is a, c, g, or t
  misc_feature (59)..(59): n is a, c, g, or t
  misc_feature (84)..(84): n is a, c, g, or t
catagaggaanctttctgccactcttnagactcaaggaagaaaatcagtgggttcaggnggggaaggaaattgggggttgagtnctgtctaagaccacttctgttttgtttgctctcctccccttcaattcttcactttgaagcctagggaacagagcactgctcgttctttctgtcgatgtcacacagatagacaaccagaaaacagtgtagatgagtaggcttagattgggaatctaccagtcaggctgaatatgaaacctgggggaaacatattttacagaca

SEQ ID NO: 410953 - DNA, 297 bp, Homo Sapiens
cttagattacctagcagaagaaacgcaattcccaagacatatccatgtcaaatactatttcctccctaaaggaggctgtctactttctaggtatgttctttcttaccaaaagagaagatacaagcaaagaaacttgcataatctaaatccaggctggatcatttcagattttataatgcatactaccctatagaagccttaattaaacattttatagagccttaaactctcaaatagctgtgctgctatggcacaaggaggtccatgcagaaaaatcagttaaaaacaagtggttgt

SEQ ID NO: 410954 - DNA, 251 bp, Homo Sapiens
  misc_feature (20)..(20): n is a, c, g, or t
  misc_feature (132)..(132): n is a, c, g, or t
  misc_feature (141)..(141): n is a, c, g, or t
  misc_feature (158)..(158): n is a, c, g, or t
  misc_feature (188)..(188): n is a, c, g, or t
  misc_feature (215)..(215): n is a, c, g, or t
gagaaatctaccaatatttnaagttttaattggcaaaaattgtgaagtattaaaagtatcaaaaggtaaaataaaacataacgatgcttcctgtattaaaatatatagccctaggacaaaattttaattttncaatttganctttaatcccaattgtngtctgtgatttatgataataattataacantcattatcccctttaaaattatttatncaaaaagcctagtgttatagtgaacaaattataata

SEQ ID NO: 410955 - DNA, 179 bp, Homo Sapiens
  misc_feature (45)..(45): n is a, c, g, or t
  misc_feature (71)..(71): n is a, c, g, or t
  misc_feature (75)..(75): n is a, c, g, or t
  misc_feature (95)..(95): n is a, c, g, or t
cttgaacacagaccaactccagaacctgccctcttaaccactttnctcaactaaccactttgctctacgtntgantcctgtggaagagttatttnccatttcctgaagttaactccttgggagtttagagaaaaattcttccaaaaccacaggtttcaccatctctaactcgctctttg

SEQ ID NO: 410956 - DNA, 312 bp, Homo Sapiens
  misc_feature (26)..(26): n is a, c, g, or t
  misc_feature (68)..(68): n is a, c, g, or t
  misc_feature (74)..(74): n is a, c, g, or t
  misc_feature (83)..(83): n is a, c, g, or t
  misc_feature (169)..(169): n is a, c, g, or t
  misc_feature (186)..(186): n is a, c, g, or t
  misc_feature (188)..(188): n is a, c, g, or t
  misc_feature (209)..(209): n is a, c, g, or t
gtgatgtaattagcagtataattgtnttggggaaaagtattgggctctaggaaggataagtgcaaagnagcatngttggtgtnctgaaggaaccggaagaaggccaccgtggctggagagaaacaagtggaaaagtgggagatagagtcagagaagtaatttggagctngtcatgtagggcctctntntcattgtaagaaatgtaagancataggatgtctctaacaaacttagccttcaccctttcttggcctcatactctcatcatgatgctctaaaccttgtctgtcttcatgaaactgcagcctattt

SEQ ID NO: 410957 - DNA, 316 bp, Homo Sapiens
  misc_feature (55)..(55): n is a, c, g, or t
  misc_feature (155)..(155): n is a, c, g, or t
cagctcttcagactggataatttctttggatctctcttcatgttcactgattctnctgccatatccaatctactgctaacttcatccagataatttttcattttgcttattgtgctttttagttgtaaaattttgatttggttctatcatatttncccatttctttgtatgtctattaatattttattgactacaggacattttagatatgtggtatagagactctggattttgttatcttacaccaaagagtgttgcccctgttacagcaagcagttcaggtactggctagtcaccttggacgtgtgtgggtttg

SEQ ID NO: 410958 - DNA, 313 bp, Homo Sapiens
  misc_feature (115)..(115): n is a, c, g, or t
  misc_feature (142)..(142): n is a, c, g, or t
  misc_feature (194)..(194): n is a, c, g, or t
  misc_feature (249)..(249): n is a, c, g, or t
cagtaaggcttatgaaatatggatactgatcaaacagccctaataatttaagcttactgatgaaaaactcatccacttgccttagtgaataaccaaagaccaatactttcttttnccttgtgggtaagtaaagcagtttgtncaggtttgtaagttataaccaatactatttatcaagtacttcttaccaagancattatataccagtctataaccctcaatagttctacatcagagggctaaaactgngattaaaactcagatgtctggctctttccaaggttagtacattgccctttaaatctggtatctt

SEQ ID NO: 410959 - DNA, 309 bp, Homo Sapiens
  misc_feature (79)..(79): n is a, c, g, or t
  misc_feature (106)..(107): n is a, c, g, or t
atgacagaatcactgagaatatttcaatactgccacttgcacagctaccgctgcctcaaagaaccaattaatgaaagancattagccaaaagggaaatataatttnntgccatgtttactcagctttatatgtaagcaatcaaaataatcatatttaaatttcatacaaatttatatgcgtcctataaacacacatttagtgatgtaaagttttgtggaataaattcagaattaaaatattccctttttgggcatggggaaaaataagcctacgtataatttcagtgaaaaagaatgagatagaaccaa

SEQ ID NO: 410960 - DNA, 242 bp, Homo Sapiens
  misc_feature (58)..(58): n is a, c, g, or t
  misc_feature (64)..(64): n is a, c, g, or t
  misc_feature (191)..(191): n is a, c, g, or t
  misc_feature (222)..(222): n is a, c, g, or t
caggtataaataggtgagatataaaggcactgtaaaaagtaatataccattgtctttncttgtnaaaggaactctggctctcataaaaactatttcacatcaagagggccccctaaacaattttcttctttgacattacaaacttctttacttcacagttgtgatttcttccttgagctgtaatgttttcnctctatgcctagaacattatgcaaaaacagncatcataggtaaccccattt

SEQ ID NO: 410961 - DNA, 154 bp, Homo Sapiens
  misc_feature (63)..(63): n is a, c, g, or t
  misc_feature (68)..(68): n is a, c, g, or t
  misc_feature (116)..(117): n is a, c, g, or t
  misc_feature (144)..(144): n is a, c, g, or t
ccaggggaacaaattaatagttcattaatatggtgattcatttagtcagcaaatacgtgagtnttttnatccctatgactccaccagaattcctcttcaaggtcactaatgacccnncattgccaagtccattggtcgaatctnagagttcatt

SEQ ID NO: 410962 - DNA, 319 bp, Homo Sapiens
  misc_feature (127)..(127): n is a, c, g, or t
  misc_feature (168)..(168): n is a, c, g, or t
  misc_feature (220)..(220): n is a, c, g, or t
  misc_feature (265)..(265): n is a, c, g, or t
agttacccagtagtcattccggagaaggttgttcagtttccatgtagttgtgtggttttaagtgagtttcttaattctaagttctaattgattgcactgtggtctgggagggtgcgtgtaatgattnccattcctttgcatttcctgaggagtgtttcacttctaatnatgttgtcgattttagaacaagtgctatgtggtgctgagaagaatatatatngttgatttggggtggagagttctgtagatatccgtagggaatgtnaggattaaataacaaggtactcagcacatactgagcactctgtaaacagtttgt

SEQ ID NO: 410963 - DNA, 224 bp, Homo Sapiens
  misc_feature (160)..(160): n is a, c, g, or t
gaaagtatatccttataatggagctctagtctttgtgatcaacctactttatgaccaagtaccagattttaacctgtacagtaactaagccagttttcattggcactttctcaattttagatattttgtcacattgttcacatacagttcacagtaagtncagttctatttgtggttttgaaaatgcaaaccccatgcttttagctagcttgatacaatttaca

SEQ ID NO: 410964 - DNA, 329 bp, Homo Sapiens
  misc_feature (290)..(290): n is a, c, g, or t
  misc_feature (304)..(304): n is a, c, g, or t
ggtttgtggtctctgagtggattttagccttcagtcatcggttgctttatacgtgaggttactagattgagacaccatttgtggggggaaaaggatgaaggatactcaaaggctaattgctacttgaaggcagaaaatagggaaaaacagcaaaaagactgcagttagcctctgctcatccttcctctaaataaatggtcacttgattgtacatgactatgactgccgcgtgacctggggcaaaagagaacatttatcattgaaggctcatttgctgtacagcgtgtgtnccacaacagatggncaaagcattgtttttataagatgga

SEQ ID NO: 410965 - DNA, 327 bp, Homo Sapiens
  misc_feature (86)..(86): n is a, c, g, or t
  misc_feature (210)..(210): n is a, c, g, or t
ttgtgagatcaggactatttctattttcagaaggttattccaatgtgatgacttcttgggaagatcacattatctacttgtatgcnctgtaaatattgaaatactctctgagtacaaaataaaatttcagacgacctaacaccatgctaaccttggaggcgacaccatttcttgtaagcaggaagctctagagaaatgatggcataagangtcacccacttataatggtcaggtggaaagagcaagtaccttagcaagaacgttctgcccagtgagtgctatgtccttgcagtcacggacagcaaactggccttgttgacattttgg

SEQ ID NO: 410966 - DNA, 324 bp, Homo Sapiens
  misc_feature (76)..(76): n is a, c, g, or t
  misc_feature (203)..(203): n is a, c, g, or t
  misc_feature (299)..(299): n is a, c, g, or t
ataaccttcatacagaaaagtacaccaataattaccacaaaatacattcacttttgcactaccacccaaattaggnaatagaacattaccagtacccagaagcccccttccacaaacagtgtattttaagtatttactaagcagttatgagaaaagtgatatttttccatagttttttttaatcagctttattaagatatggntcacataccatacatttcacccatttgaagtacacaattcagtggttcttagtatatttgcagatatgtgcaaccatcaccacagtcaactttagngggattttcatcacctcaaaaaagg

SEQ ID NO: 410967 - DNA, 328 bp, Homo Sapiens
  misc_feature (96)..(96): n is a, c, g, or t
  misc_feature (117)..(117): n is a, c, g, or t
  misc_feature (139)..(139): n is a, c, g, or t
atctcattaaatcttaagctcaacatgtctagatttcattacactgcatctatttcttcctgatgtgtgtgtttcgaatttaatggactgactgtncctggcatcgagtaagcagtnaacaaatgttggtacgcatttnctattactggcactgttgttctagtaagccaggcgtaagaccttgcagctcagcatcttcaactacttcttgacttctaccttgccaccttaccttgtgtaattgacatccacaatgagtcttccatttggtcctttcttctccattccttttatgtaggctattagttaccagtgtctgcaacagagt

SEQ ID NO: 410968 - DNA, 370 bp, Homo Sapiens
  misc_feature (202)..(202): n is a, c, g, or t
  misc_feature (221)..(221): n is a, c, g, or t
  misc_feature (246)..(246): n is a, c, g, or t
  misc_feature (305)..(305): n is a, c, g, or t
  misc_feature (328)..(328): n is a, c, g, or t
ccaacgtaatgtgtttttaatcagacacatcaatctaaagtttctgcaacatctgcaaacttgaatgctattgttaatgtgaccaacgccttaaaataattgcattagggtttttggcatcactttataataagtggacagttaattgttgctaaattacagctgaatctctgcagaattggatattacatccatattaggntcgaatgactccatcatgnttaatgatactgcagtgagtaccangagaattaaaattattaggcactaattttaaagtgttgacatttttccacaattttagnggttatgttttcaacaaaacttncccaattaaactttactgctcgtgggttactgggggaaaatt

SEQ ID NO: 410969 - DNA, 281 bp, Homo Sapiens
  misc_feature (60)..(60): n is a, c, g, or t
  misc_feature (155)..(155): n is a, c, g, or t
  misc_feature (172)..(172): n is a, c, g, or t
  misc_feature (236)..(236): n is a, c, g, or t
  misc_feature (260)..(260): n is a, c, g, or t
ggggataaatggatgtagtaccctaattatgagcagataactgctaattccttccaaatnagctaattcccatagtcacatatgaaagtaggaacacggggatatacaattaaaaatgtatcaggagttaccagagtacagggaacaggcacgtncttaaggtttagacctntgagcactagttctttttaaggcttcatggagttaaaactagctgatgtacgatgtgtgtaaangattcggccagctgaaagaaaggnatcctaggcaagggggcatca

SEQ ID NO: 410970 - DNA, 354 bp, Homo Sapiens
  misc_feature (331)..(331): n is a, c, g, or t
gtaccttttctgcagttggaagatgggaaattctattaggagcctcagtgagttgggtagaagtcacaccaatcaacggaattaattctagaagattgtggtggaagacattatattaatgattccaagagaccctgatgttggcttctgaaaaatttaacatcttcattgtaaagggaagggtgagaatgtccccaagaagctatgccatgactcagtggcctctttgaaagattctcattttaatctaaatagtgtgacttcagtgaaggtcaacatggtcccagttttaagaggatcccagggcattagccactctgggcaccaccanctgggcactgggttatgattatt

SEQ ID NO: 410971 - DNA, 198 bp, Homo Sapiens
  misc_feature (26)..(26): n is a, c, g, or t
  misc_feature (154)..(154): n is a, c, g, or t
ctgccttccttcttgtcataatcgtnctgcttgaaatggacgttgtgaaaagcctaatttcagcttagaaaaatgtcctcttctaccgcccttcccattcaatggattaaggataaaagcagacaaacagattgaacatagaaactctgaaatnatttacaatttcagaatcggtaatcaaagcaagagctccacagt

SEQ ID NO: 410972 - DNA, 289 bp, Homo Sapiens
  misc_feature (192)..(192): n is a, c, g, or t
  misc_feature (209)..(209): n is a, c, g, or t
  misc_feature (239)..(239): n is a, c, g, or t
ttttttatgtctcagtagtattccgtcgtctatttacattacattgtctttatttactaattggttgttgggcacttaggttggttccatatttctgcaattgcaaattgtgttgctataagcatgcagattttacatacagttttgaagattgtttttattataaacttttagaatggcaattattttctntctccactaaaatatgncattccattagcttttgtctgcaattattnctattgagaaatttcttatcctcacttctttgaagagaacatatccattt

SEQ ID NO: 410973 - DNA, 389 bp, Homo Sapiens
  misc_feature (300)..(300): n is a, c, g, or t
  misc_feature (306)..(306): n is a, c, g, or t
  misc_feature (333)..(333): n is a, c, g, or t
cccacctaaactgttcctgctgtgattatggctgctatgcatttatcttcccatgtttctgtgattttctccctcaattatcccttcctgagaaccatcaccatcaggcatgcctctcgcctttttcttccattactcaaacctcctcttgcctacagttcttcctctggcatatccatgcagctctgctctctttccctaccgcgtttctggccgttccttgtgtctcccaactgcatattcacccacctgactgtatggctaggagtctgtccctattatcaatgggcagaacttttnccactncccacctgggttgggggaaggggagtnggggtgtgggagccaggggaaggaggcccataagttagaggatttgtgagtatcga

SEQ ID NO: 410974 - DNA, 325 bp, Homo Sapiens
  misc_feature (144)..(144): n is a, c, g, or t
  misc_feature (260)..(260): n is a, c, g, or t
  misc_feature (300)..(300): n is a, c, g, or t
cctcctaacacctgttattgtctggctttttaattatagccattctagtgggtgtaaagtgcttattgtggttttaatttgcatttctctaatgagcaatgatgagcattttttaaatgtacttgttggccatttatatatctnctttgatgtgtttattttaaatcttttgcccattgggttgtcttactgagttgtaagaattttttgtatattctggatatgaatcctttatcagatatatgatttgcaaatatttnctctcagtctgtggatttcttttcattttcttaatgacgnctttttgagggtaatagctttaaat

SEQ ID NO: 410975 - DNA, 165 bp, Homo Sapiens
  misc_feature (35)..(35): n is a, c, g, or t
  misc_feature (98)..(98): n is a, c, g, or t
ggatattggtgtggtaacaagataatatatatgtncaaacttgccaaactatatccattaattatgtactgtttgtgtataacagttttacttcagtncctactatattgcctggcaaacaatagatgtataaagtgagatcaatgattattgcatgtgcatgtc

SEQ ID NO: 410976 - DNA, 335 bp, Homo Sapiens
  misc_feature (59)..(59): n is a, c, g, or t
  misc_feature (102)..(254): n is a, c, g, or t
gttaacattgctacttttttaatgctcacaagaacactgtgaaggagggattttttttntcatacccattttataagtgagaaactgagaccctgaaagccnnnnnnnnnnnnnnnnnnnnnnnnnnnnnnnnnnnnnnnnnnnnnnnnnnnnnnnnnnnnnnnnnnnnnnnnnnnnnnnnnnnnnnnnnnnnnnnnnnnnnnnnnnnnnnnnnnnnnnnnnnnnnnnnnnnnnnnnnnnnnnnnnnnnnnnnngaaaagtgataaggttcacttaaccataatgcatgtgaagcacctgctcccatgctgggcacagagtcttagtggtcagta

SEQ ID NO: 410977 - DNA, 159 bp, Homo Sapiens
  misc_feature (18)..(18): n is a, c, g, or t
  misc_feature (99)..(99): n is a, c, g, or t
aaggagccattcagtttnctatgaggacttttaagagacatttacccaaggtcttggtatcagaaaagcattctatctcctaaaggacttcttactgancatggaatttcatgcatccctctttcctctagggccacaagcagcctccaagtcaaattt

SEQ ID NO: 410978 - DNA, 112 bp, Homo Sapiens
  misc_feature (69)..(69): n is a, c, g, or t
atagtcacctttttattctataatttgggttcataataatatttaaaccaaattattactcatggcatntaacagtacactagtgtgaccttgaaagtccaaaaaaacttag

SEQ ID NO: 410979 - DNA, 207 bp, Homo Sapiens
  misc_feature (138)..(138): n is a, c, g, or t
  misc_feature (153)..(153): n is a, c, g, or t
cccagctgggaggaagtttaataaatgtaataaataattgccaaatgaaaaaacaattacatctgcttcttccataagaagcaaaatagagagagttggatgacagaaaatccagaccactctataatgtaaaggganttctttcacataagntatgatacttatgttaatcctaaaggctacatatgattagaaagagagagaaag

SEQ ID NO: 410980 - DNA, 383 bp, Homo Sapiens
  misc_feature (104)..(104): n is a, c, g, or t
aaaatagagttgtttacaagatttaaagtttccaaaatatgaaaaactaagcagtattccaaagaagcacagtgtttccagattctaagatatgagcaaaattnctcctccaggctctagtaaagaggacaatgttcttgttagcattctgaccctagattataaaagtttgtccttaaattgccctctaatgtttaatgaaacaatgctgcttaaatttggatttatctgttacccagtgaactgctcagctaaaaattattccataaacagcgtttctccttgtctggcttctgaacaagttttgaactgcaaggaggtttagggggtgtagtctctggttagggttctgtaaatgccagggttctatggtactaattaag

SEQ ID NO: 410981 - DNA, 157 bp, Homo Sapiens
  misc_feature (60)..(60): n is a, c, g, or t
  misc_feature (106)..(106): n is a, c, g, or t
atgagccaccatgcccagcctaaccactgatctttttactgtctctatagttttggtctnttccagaatgtcatataattgtaaatcatatagtatgtagcctttnctgattggcttctttcacttagcaataagtacttaggattcctccatgtct

SEQ ID NO: 410982 - DNA, 230 bp, Homo Sapiens
  misc_feature (11)..(11): n is a, c, g, or t
  misc_feature (90)..(90): n is a, c, g, or t
  misc_feature (94)..(94): n is a, c, g, or t
  misc_feature (110)..(110): n is a, c, g, or t
  misc_feature (135)..(135): n is a, c, g, or t
  misc_feature (161)..(161): n is a, c, g, or t
  misc_feature (166)..(166): n is a, c, g, or t
acaaacaacanataatttaggtattgttttccaagaacatttaatcctatagggatagatgtgattaacagatgtgaaacagtggaagantttnatgagacaaagcttantcatattaatttaacttagtatttnctagccactttttgagaatgcaatgncctgncaaaactatgctgggacaaagagtgcagcttagagcatgccacagcaaacacttctattgtgtg

SEQ ID NO: 410983 - DNA, 127 bp, Homo Sapiens
accgtgcccggccgtgttgtcacttttaatgtgctttggttttaattttctgtagaaaagtaaaacaaatttttccctttaaatttaatccttgcttttaatgacttgtgcaccccaatttactaag

SEQ ID NO: 410984 - DNA, 402 bp, Homo Sapiens
  misc_feature (72)..(72): n is a, c, g, or t
  misc_feature (91)..(91): n is a, c, g, or t
  misc_feature (351)..(351): n is a, c, g, or t
ggaatgagaatcaagcatccagagctgaatccggctggtttagagagagcagctgatctcctagtgcgagtnacgggctgcctggcctcantcagcagatcctcactgagcccgtccagagagcatttaaagtaagctttgcaggtgccaacaggctccacactggctcagtctttcactacgccctctcctcctccccggctgccttctgtgttagcaagatcccactggtggcaagaggcgggaaacgggtgttaggttcatggagatttgattcggggaaacgttctcgcttgggtcaagaccttacgagcttctcaccacaaacacttcttgctctttgggtaactnctggatttagcacgtgagattaagtccatcccaagtgactgttttgcacct

SEQ ID NO: 410985 - DNA, 378 bp, Homo Sapiens
  misc_feature (299)..(299): n is a, c, g, or t
  misc_feature (323)..(323): n is a, c, g, or t
  misc_feature (353)..(353): n is a, c, g, or t
tttatgaaaaaccccctgtatgaaaaacactgggggaatctctcagacacacggaaggaaaagcaaacgattccatttccatccgagtttccgtagtggaagacagcctttcccacagtgctcgcctgccaagcatcttcctgtaggaacttgtcagtgccgccattagttgtttgcaaagggattacgctttggcagccatgctaatcgctccaaggtgaccctttatttggagaaacaaatccttttcagttgttgttacggtacactaatccaaccatgcaagtagctgtttgggnaaaaaattatcaaagtgcattttnctccccactacttctttctctccagatcgntcctaacttaaaagtgctgtttctt

SEQ ID NO: 410986 - DNA, 297 bp, Homo Sapiens
  misc_feature (19)..(19): n is a, c, g, or t
  misc_feature (37)..(37): n is a, c, g, or t
  misc_feature (112)..(112): n is a, c, g, or t
  misc_feature (193)..(193): n is a, c, g, or t
  misc_feature (237)..(237): n is a, c, g, or t
  misc_feature (267)..(267): n is a, c, g, or t
  misc_feature (285)..(285): n is a, c, g, or t
gcgcccggccataactcanctctttacatcttttgtncatgagtagctgctgcattcactaagattcattcattcaaatggcagaatgcattcctcatgcgccacgtaaganagattatcaaaaacacaggcacaaaggagagagccttgaaatctttctcctggcttaaagttgatggattatctgcctggnccatatgcattctccaggaagttgttaaacaggttagttttatnctctgagctatgagtcttatgtccttacanttttcctagcaccaaggnaataatctctga

SEQ ID NO: 410987 - DNA, 290 bp, Homo Sapiens
  misc_feature (74)..(74): n is a, c, g, or t
  misc_feature (100)..(100): n is a, c, g, or t
  misc_feature (225)..(225): n is a, c, g, or t
  misc_feature (235)..(235): n is a, c, g, or t
gggagggcaaagctaggcagggctgggctggagaatcctgcattctggccaccccaacagggcacaagcaccancccttgcaggggttgcaaggcagttntcaggccccgaaggaatgctccagggaggagcagagcaaccactgccatgccaaagatccagcatggggaaagtggggtcgctagggctccacaacctggcaggtgatagtgggacccggttctntacagttttnacctggttggattccctcctaccatctgctgctggcagcaagctgaaacagccag

SEQ ID NO: 410988 - DNA, 378 bp, Homo Sapiens
  misc_feature (333)..(333): n is a, c, g, or t
  misc_feature (358)..(358): n is a, c, g, or t
  misc_feature (365)..(365): n is a, c, g, or t
gcactcggatttttttcactcactcctttactcacacaaatatattgggcatctataactatgatagatagatacagtaggaagttggagtgatgagacggaattgtcattgacaccagctgtcccctttggaaacatctgttgaattagccaaacaaaacatctgtgtcagaacagatgaataacaagggcagttgatgtgcctgagttagtggtaaagctattaagctaagtaggacttcagaatgggagatgataactggagattccttaatgagatgagactggaattgtacctccagggcatatgtgatatttgtctagacataaagncattaacatgtacgggtggggaatnggagttnacacttattgact

SEQ ID NO: 410989 - DNA, 345 bp, Homo Sapiens
  misc_feature (29)..(29): n is a, c, g, or t
atcatatgctgaactgcctgaagcatganctttgcattgttgaattcctataccggtaggtcccgtcacccacctcttgatgtcaacatgcaaacacaggccctatggtgtgataggtcccactgaagtgtggaaaactacaggcagttcataaggaggcatctgtgactacatgacatctaattgtgcatagaagcaggtaatgagactctttcttcttatgagccccaggtaacaccaaggaaaaaattgtttcttctacctaagcccccttgttatcttggccacccagggctgagagaggttcaaaggcatgaaactttctgggaggtagcagggatggct

SEQ ID NO: 410990 - DNA, 260 bp, Homo Sapiens
  misc_feature (129)..(129): n is a, c, g, or t
  misc_feature (185)..(185): n is a, c, g, or t
  misc_feature (187)..(187): n is a, c, g, or t
  misc_feature (211)..(211): n is a, c, g, or t
  misc_feature (236)..(236): n is a, c, g, or t
  misc_feature (246)..(246): n is a, c, g, or t
ggggaccctgggtcacagcagtggtgccttccctcccactgctgccactgggtctgggtgtctgaggcccccactagacataactctgagggcagcagctcagggccttggcacatgttaggtgctctncagaatcaacagaagaggactttgacaaaaggtcaatgaacctacaaggtcaaatntnaccaaagtccaaggagagaggatngggggtgggccctgcgtgcagcagncttcgtgggntacagcagtggttg

SEQ ID NO: 410991 - DNA, 227 bp, Homo Sapiens
  misc_feature (21)..(21): n is a, c, g, or t
  misc_feature (45)..(45): n is a, c, g, or t
  misc_feature (47)..(47): n is a, c, g, or t
  misc_feature (73)..(73): n is a, c, g, or t
  misc_feature (141)..(141): n is a, c, g, or t
  misc_feature (143)..(143): n is a, c, g, or t
  misc_feature (185)..(185): n is a, c, g, or t
  misc_feature (201)..(201): n is a, c, g, or t
aataatgtcttccaccctgtngggtgcacagaatacactattctnanctggcaggttccgcttcttgactaantcgaagatgtaaattaaacgggctcagacaatgtcagttttggcaacctcaaagtgagtatatttaantnatattacatgtgattcaaaaagctattgatttaatatatgcngctttccatgctacanttttccctaatccacattttaaaaaa

SEQ ID NO: 410992 - DNA, 245 bp, Homo Sapiens
  misc_feature (33)..(33): n is a, c, g, or t
  misc_feature (74)..(74): n is a, c, g, or t
  misc_feature (118)..(157): n is a, c, g, or t
  misc_feature (185)..(185): n is a, c, g, or t
  misc_feature (190)..(190): n is a, c, g, or t
gcctgtaatgtgactcttgataagtggattttnagaaagtcaccaaatgaagaaacagagagcacactggagangagctcaagtgaagccagactgcctggtttgcactccagttctnnnnnnnnnnnnnnnnnnnnnnnnnnnnnnnnnnnnnnnnttaaatattctagcacatgaatggagangaatntttctagttctttccattttggaggcacagattgtttgtaaggtcatatctatgg

SEQ ID NO: 410993 - DNA, 320 bp, Homo Sapiens
  misc_feature (104)..(104): n is a, c, g, or t
  misc_feature (118)..(118): n is a, c, g, or t
  misc_feature (130)..(130): n is a, c, g, or t
  misc_feature (204)..(204): n is a, c, g, or t
  misc_feature (237)..(237): n is a, c, g, or t
  misc_feature (285)..(285): n is a, c, g, or t
catttctggagttatgttcaaggcaagtggtggagttaaaattgttagcgctcatagttgtcacagaaagacaaacagtgtaatgacttgaagatatacttggnttattttatttttnataaaataaganaaatcagaagaaaggtgtttaacattgattaagtcctataatagaaaaccttaatcctaggaagtatgaatggngtacgaaagctttcccatatgcattacaggganttaaaatacacaatacacttaacctagagagatcacgactgcaaatgngatactgttcattcttattgggtgtgctccatttt

SEQ ID NO: 410994 - DNA, 304 bp, Homo Sapiens
  misc_feature (56)..(56): n is a, c, g, or t
  misc_feature (102)..(103): n is a, c, g, or t
  misc_feature (111)..(111): n is a, c, g, or t
  misc_feature (127)..(127): n is a, c, g, or t
  misc_feature (140)..(140): n is a, c, g, or t
  misc_feature (191)..(191): n is a, c, g, or t
  misc_feature (289)..(289): n is a, c, g, or t
tgaggagattaagattcttggcagctgtgacagcgtgcaaggagggtcttgaaganttagcagcaaggagagtagcaagcacaggctgaggaggtgcctggnnctcaaatnatagggattttaaggnataataatcatgncacaatttatgccacacgcctcagccctcaccactgcagtgcaccctagangcccagaaagagcctgtccagatgcagggcaggctgaaactcctggggagctaactcccccaaaacattccccagcagcagcctggcttccttacatntcaggtagggcagct

SEQ ID NO: 410995 - DNA, 239 bp, Homo Sapiens
  misc_feature (21)..(21): n is a, c, g, or t
  misc_feature (25)..(25): n is a, c, g, or t
  misc_feature (184)..(184): n is a, c, g, or t
  misc_feature (191)..(191): n is a, c, g, or t
  misc_feature (209)..(209): n is a, c, g, or t
ggagaggcttggaggcatggngttntggtggaagcaggttctgaaaagcagaactctgaagctggctcattctcaccaagtcatctggcccagcctcccgcctccaagcacatcctgcctgcagagggtctggctagctgccttttcagctctcgagggatagagattctacaacctccctctntcatcanttccagagccactccccnttgcactagtagttcttgctttcaaagaat

SEQ ID NO: 410996 - DNA, 332 bp, Homo Sapiens
  misc_feature (18)..(18): n is a, c, g, or t
  misc_feature (175)..(175): n is a, c, g, or t
  misc_feature (184)..(184): n is a, c, g, or t
  misc_feature (222)..(223): n is a, c, g, or t
  misc_feature (228)..(228): n is a, c, g, or t
aaaattacagcaattctncaatctcagtggaagtgttcacaatattatgccctggtaggaatgtaaacacgtctcgattatgttagttatgatgtctaaaggtatactgtccaactcttaagcactttatatgagaacactacaccaagatgaatcagcacattcagcacatgtnagaaatcangtatttcctttttatttttataaatcttagtggttttnnttttnccggctcagactgtccaaggcaaactccactactcgcatatccccagttgtttgtggtaggttgatgtaaatatggccacaatactgttaggcttcacctccag

SEQ ID NO: 410997 - DNA, 166 bp, Homo Sapiens
  misc_feature (22)..(22): n is a, c, g, or t
  misc_feature (115)..(115): n is a, c, g, or t
cctgggagcctcctggattgtntctaggccccagataggggataacacgctcctcccagcctgaaggccatcctcctaagtactcacttggcaggcatcctggaaaatggttgtnttgtaaaggctaagttactcttctcagagatctctatttgacatgataaag

SEQ ID NO: 410998 - DNA, 270 bp, Homo Sapiens
  misc_feature (93)..(93): n is a, c, g, or t
  misc_feature (224)..(224): n is a, c, g, or t
  misc_feature (247)..(247): n is a, c, g, or t
catccttcgcttaccctaagaaggaaaaatgacaatagttacagacacaagagaaatatcaattatattcactggtgctaaccatccaagcantaagttatactgtcttcatccctgtaatttagattttaacagtgatatcagtaaagacatgaatgtacaatgctgagagtaaatcaggctgtagatgacttcccttgaagatcacgatgctaataattttnctcatcttgtatcataactagantgtcacgcacacattttaagatg

SEQ ID NO: 410999 - DNA, 407 bp, Homo Sapiens
  misc_feature (26)..(26): n is a, c, g, or t
  misc_feature (253)..(253): n is a, c, g, or t
  misc_feature (316)..(316): n is a, c, g, or t
  misc_feature (336)..(336): n is a, c, g, or t
  misc_feature (341)..(341): n is a, c, g, or t
  misc_feature (368)..(368): n is a, c, g, or t
ggctccttgtggtggtacagcctgtnctcctgtgagcaaggccttgtttcctgctgacacctgggcatagtacggaccccaaggtcactgccacagggcaagagccaaggcccctttcgccgtttattgctgggcccctgcacctcctgggaacgggtccgaggggaagtgtcttccactgagtctcgtccaagggcagtgatgttgctggcaaggggactggggtgaggccaacactccagcagagcatctnagcctagttctcgaagaattcgtgttcagaagcaagtccaaggcaagctgtgctctccccagncccaagggcttcccggcctnacagnaacagaagggcaaatgcaaatgcttgngaggagctttttaatcgttcagggaggctgataagttct

SEQ ID NO: 411000 - DNA, 382 bp, Homo Sapiens
  misc_feature (115)..(115): n is a, c, g, or t
agagagagacctttgactctagaggactaatttgggtcatagggtcctctaattctgtaggaatgaatcagatggttgtagccccttctgtttcttgaattatcctttgattctnctcagcttgaccatgaaattcatctttttcttattcttactgcctttcagatgtagttactctagagtagggcatgtaggtagggtcttagtaaaaggagaggaattatagatgtggcctttttcaaacccccaatgcatataggcatgtaaatcctactcataaatgcctgcaacaacctagatgtgggattgcatatttattatggtaataatgtttaggtctaaattttttcagtcacggatctcttacatattgatatgtctg

SEQ ID NO: 411001 - DNA, 358 bp, Homo Sapiens
  misc_feature (248)..(248): n is a, c, g, or t
  misc_feature (281)..(281): n is a, c, g, or t
  misc_feature (285)..(285): n is a, c, g, or t
  misc_feature (291)..(291): n is a, c, g, or t
ctcctatctccttcaggggctcttcaatgaccaaaggccataagagactggaaggcaaaaggacccattaatgtaatccaaacatcagtctcctgcagcaaagaggtgaatggagaagggtggagagtagctgtggacgagtgaaaaagacatcgcaccatgtcttcaaattacatccagcaacttcatatgaactatgaaacccttgttgccacaatagtccctctttgtttgaactactacaagantaaagaaatttctttctaatcttttgcaggagnattncatagnctctcactttactgctcttgtttcataggtgggctggattttccaattatatttaaatacttttggg

SEQ ID NO: 411002 - DNA, 301 bp, Homo Sapiens
  misc_feature (70)..(70): n is a, c, g, or t
  misc_feature (74)..(74): n is a, c, g, or t
  misc_feature (215)..(215): n is a, c, g, or t
  misc_feature (267)..(267): n is a, c, g, or t
ggaaaaatataacaaaacaataacctggagacaatatctaggagggaacaattctgggacagcatttctntttnccccacctgacttcagagaggtggcaagtattcactgggaggcatcactttaagccaggtacaaaaacaggctccaactacaaaaagtgcgtttccctaacaaaagtattccaagcaacctccctgtacacggcacatttnctgaaaatcaatcaagccctctcattcagctgaagtccaatcgcattgtctntcccttcctccagaagccgatttctgccaggtag

SEQ ID NO: 411003 - DNA, 316 bp, Homo Sapiens
  misc_feature (57)..(57): n is a, c, g, or t
  misc_feature (74)..(74): n is a, c, g, or t
aaacactagctccccatgccccatttccccagcccctcacacccaccactgtaattnctgtctctgtgaatttnattactctaggtagctcatataaatggaatcatacagtgtttgtcctttcatgactggcttatttatatacctagcaaagtgtcttcaggattcctccatgttgtatcatgtgtcagaatttctttcctttttaaggttcaatatatttcattgtatgtatataccatcccctactttttttaaaactaaagggatcatgcctatgtatggtctttctacctgctcaatatgtcagaaaaag

SEQ ID NO: 411004 - DNA, 335 bp, Homo Sapiens
  misc_feature (184)..(184): n is a, c, g, or t
  misc_feature (227)..(228): n is a, c, g, or t
  misc_feature (273)..(273): n is a, c, g, or t
ctgttttgtcagaaaataggattgcaacccctgcttttttctgctttccatttgcttggtaaattttcctccatccctttattctgagcctttgtatgtctttgcatgttagatgggtctcttgaatacaacagcatactgatgggtcgtgattctttatccagcttgccgttctgtgtttttnaattggggcatttagcccacttacatttaaggttaatattttnnatgtgtgaatttgatcctatcatcattatgctagctggtttattnttgcaagacttgttgagggtaactgcttcatagtgttactggtaaaaagaaaaaccagtgtg

SEQ ID NO: 411005 - DNA, 282 bp, Homo Sapiens
  misc_feature (29)..(29): n is a, c, g, or t
  misc_feature (244)..(244): n is a, c, g, or t
gactttaagcactgaattccaaaattttntcttcagcccacatcatttttcctcaactccacagactactcataggttgccttacaggttaacatgttcaaaacacagcttctgatctcaccccacactgccctcaaaaacatccccttaactcccagcaaatggcactctcatcctataggagttcaggccaaaaaccttggagctcgtgaccatgttcattgcatcagtaagactgcccttnaaacctttatccaaaagcggatccttttttaccacttt

SEQ ID NO: 411006 - DNA, 138 bp, Homo Sapiens
atataattcctaaaggagatgtacttttaatataatcataggattttcagcaatattatacaccaaccttaaaaatacaagcattacctctactgaaatcagaagttttgggtcattttaccaaagattcatgagaga

SEQ ID NO: 411007 - DNA, 326 bp, Homo Sapiens
  misc_feature (48)..(48): n is a, c, g, or t
gtaaagcattgtcactagtgctggaaatagccatcccaaacctaagtnacatcctcacctgccagcacaattaacccttcaattatttacttagacaaccatgtgttaaaggcaagttaaatatgttaactacttacagttctattcagctcttgcacgatgtctctgggaaatctctgttcttgggatagcttactgatggtgaagttaccattggctccaactctataaactcttccctcaacacaaagatcgtcttctcttggctactatatttactgagactaagtggcctgcttcatcttctaccaaatgttcaataagca

SEQ ID NO: 411008 - DNA, 192 bp, Homo Sapiens
  misc_feature (154)..(154): n is a, c, g, or t
ccggcgctgtctggcttgtccgcagaccctccccacgccccgcggccctcccctgctttcacactgccctccccaagctacccaccctcgccaaatggcctcctcttggccaaagagcagcccgctgcgcgcctcctgcaaacgcggtctactncagcgccctgaccccaaggcgggcgggagaagggtagc

SEQ ID NO: 411009 - DNA, 346 bp, Homo Sapiens
  misc_feature (291)..(291): n is a, c, g, or t
  misc_feature (313)..(313): n is a, c, g, or t
gatgtgcacatgctattgccctgctgactattttaaatggatgataattgggaataatgaccgggtcagaggtagggatgcgtaaaccctggcagagcagccttccaccaagtcaaagcacatggggccctcagagccgggagccggcacttgtaagctgaattgagcacacaatgtatgtggctggccacatacgttgccaaataaatatcacattacacatcccatctcccccacgtgaccttggtgtagacaaagtctaaactcatctaggagatgagaacatttttnttccgagaatgatcccatctgnctcccccaactcccaaatatccttcaaccctct

SEQ ID NO: 411010 - DNA, 415 bp, Homo Sapiens
  misc_feature (60)..(60): n is a, c, g, or t
  misc_feature (114)..(114): n is a, c, g, or t
  misc_feature (138)..(138): n is a, c, g, or t
  misc_feature (172)..(172): n is a, c, g, or t
  misc_feature (181)..(181): n is a, c, g, or t
  misc_feature (310)..(310): n is a, c, g, or t
  misc_feature (372)..(372): n is a, c, g, or t
ggaaagtttcctgttcctataatgtacaatgaataatcagctgcaatttcagtggatgtnagctgggctagatgatgctggagtttctgggacaaaagatgcacttcctaagtnattttcatgcatgtaatgaaaaanttagaagacagcagaattgggtttaataaacttncctattttnaattgccactgaatgatgttttaaggacaataagtccttagaggaaagaaaaggctttaaaagcacccacttcttctcttccattgaaatgacatgtttcacctatgtgaatgacttaattgcctaagnggcaaggaacagtgggactacagataaccttagttgggctttagagcaggggaatggatttntacccatatgggcaattattttcccaggttctctgaggggtta

SEQ ID NO: 411011 - DNA, 374 bp, Homo Sapiens
  misc_feature (78)..(78): n is a, c, g, or t
  misc_feature (333)..(333): n is a, c, g, or t
gtaccgggaatgaggtaagctttgacatgagggaaatgagtagctttgacacttaacatattgcttgaaacctttttnccatttgttgagtacatattaaaatctaaacacccccttaggtactagggatacaaatacctagaagttcaaatatttgcccttcaagagctcacattagggaagtcaacatgaacactaatagtccccatataacatgctaaatgctatatagttaaggtgtggacaacatgttaaaggatcacagaggaagttgttatactgcttggagtagggaaaaagccgacggacaaaatgacttttgaaaacataggnataaagaactgagggtatgtctgggccaaccaatgtgtccc

SEQ ID NO: 411012 - DNA, 322 bp, Homo Sapiens
  misc_feature (23)..(23): n is a, c, g, or t
  misc_feature (102)..(102): n is a, c, g, or t
  misc_feature (141)..(141): n is a, c, g, or t
  misc_feature (165)..(165): n is a, c, g, or t
  misc_feature (299)..(299): n is a, c, g, or t
ctgggctggaactgtggggcttnagagaaggaaattgggaccaggcaggcaggaggggctaatggtatcaggaggtcagggctgcgggaagaggcagcagtnttggtggtgtaggggtctctccccatggctttacctctnctcttgctgggatcctggtatttnactttccaactcctgtctacgtgtgctaggaaagtctatctcctccccagtcctaaccccaatttttcaccctcaggaaaaccacagaagaccctgagcctccagacaggtggacaacccaggaccggttcctnaaatccagggaagcaacgggggt

SEQ ID NO: 411013 - DNA, 334 bp, Homo Sapiens
  misc_feature (39)..(39): n is a, c, g, or t
  misc_feature (45)..(45): n is a, c, g, or t
  misc_feature (114)..(114): n is a, c, g, or t
  misc_feature (144)..(144): n is a, c, g, or t
  misc_feature (203)..(203): n is a, c, g, or t
  misc_feature (214)..(214): n is a, c, g, or t
  misc_feature (226)..(226): n is a, c, g, or t
  misc_feature (235)..(235): n is a, c, g, or t
  misc_feature (247)..(247): n is a, c, g, or t
  misc_feature (269)..(269): n is a, c, g, or t
atctacatttcctctcaattctcaccctttatgggagcncttttncttcatcctgagaaaattcagataattaaatgcagttaagagtgcaaactaagagaagaaatacaacantgtcccattaggaaggttgtggctgatganggcttaaaatacttgctaccacttaacaagtaaaaatgactgcaatgtcatagaatatncttcaaatgtntttaacaaaaantccaaatanactagaactaantgatggccggtttacgtttcangatgagaaagcgaagtgaggaggactggttttgatcttcagcaatcatctcttcaataggatacc

SEQ ID NO: 411014 - DNA, 286 bp, Homo Sapiens
  misc_feature (194)..(194): n is a, c, g, or t
  misc_feature (238)..(238): n is a, c, g, or t
  misc_feature (259)..(259): n is a, c, g, or t
caccgcacaaaaaaacccacaactccctagattcgggaaaaaggagtaaattaagttggaaagccagaaaaccacgccttgctaagtcggggggatatggcacaggttaacaaacgcctcctaccaaactaaggttccactaaaggtctgggaataagggcaaagagatgtatagccttatcgcgaccgcaagngtgggggccttgcagtgggaaacaaaataggaaggcaagctatnccgagaggtttaagggggctnagggcttcggctctcgggagattcgcc

SEQ ID NO: 411015 - DNA, 232 bp, Homo Sapiens
  misc_feature (101)..(101): n is a, c, g, or t
  misc_feature (179)..(179): n is a, c, g, or t
  misc_feature (203)..(203): n is a, c, g, or t
ggtccctgactccagcctgacacgccttcgaaattctgctgccacttggttacacaaagcaccacgacccacccgactctaactggccacaaatgcctttntcacaggggagcacactttccccctggaaatgcagcggtggaaggacacaggtggtctttgctaaggaatgccttaanagctccccgtcttctctgcctagnaacttgatctgtgatgtttttgaaagcct

SEQ ID NO: 411016 - DNA, 284 bp, Homo Sapiens
  misc_feature (268)..(268): n is a, c, g, or t
ggctcacagacaccttaagaagccactgaaaacccctggtgctctcccggggaaaagacccaggctcaccgaaagttgtgaacaatttcaaggggttcaaagacctttgagtcccatcctccaaactcgagtttagactctgtcttaaagccttgttagttcatttctcaaacattcacggagccccatgggctgctcctggtctaggctaggtgctgggggcccagagacagggctttgctccagggttgggagtagggttgcgctnagacggccctaacaca

SEQ ID NO: 411017 - DNA, 212 bp, Homo Sapiens
  misc_feature (156)..(156): n is a, c, g, or t
  misc_feature (193)..(193): n is a, c, g, or t
ggtttatgtggtatggatgtaagtcctgcagcctgtgggcttacgtggtacgtatgtaagtcctgcaggctataggtttatgtggtatggatgtaagtcctgcaggctgtagggttatgtggtatggatgtaagtcctgcaggctataggtttatntggtatggatgtaagtcccgcaggctgtgggtttatncggtacagatgtaagtgcc

SEQ ID NO: 411018 - DNA, 292 bp, Homo Sapiens
  misc_feature (21)..(21): n is a, c, g, or t
  misc_feature (62)..(62): n is a, c, g, or t
  misc_feature (232)..(234): n is a, c, g, or t
  misc_feature (267)..(267): n is a, c, g, or t
ggagactgttggacctctgtntttaaagaccatgctatgttgcaaactctccctcagttttnataactgaagtccaggttttagttgtgcagtttgaatatgaacataaaccttccagcatgctatatttatgcaaagtaagaaatattatataccagaataaccactactggattattttgaacatagaaattaaataagctaatgagatcattttgctttaatatattannntgttatttaaatatattgatttcaaactgcttnaacaaatcaccaagaaatccctggg

SEQ ID NO: 411019 - DNA, 271 bp, Homo Sapiens
  misc_feature (64)..(64): n is a, c, g, or t
  misc_feature (72)..(72): n is a, c, g, or t
  misc_feature (118)..(118): n is a, c, g, or t
  misc_feature (130)..(130): n is a, c, g, or t
  misc_feature (245)..(245): n is a, c, g, or t
  misc_feature (252)..(252): n is a, c, g, or t
cacataatataatctacaacattctacaacaaaattcctgatttaccacaaaaaatcagatttnctaatgancactttagaaagtatctacattttagaaacaatatctacagaaaanccatcttttgtnacttaatagctagttgagaaattcattcctttgagtttaattttatcattttattatgaaattgtacgtgatcacttactgtattctacagtgtttaattgtggagatacttganaactttnctcagtacctatgagctgg

SEQ ID NO: 411020 - DNA, 252 bp, Homo Sapiens
  misc_feature (47)..(47): n is a, c, g, or t
gaaaatacattcaatgcttgccagcaatttacctgtttattttcctnatgtttgtctctctcctagtggctcacctatatattgacactgcctttagaatttgggtgtcgtggcttcattgttgcatctgtgctcctctttccctactaaatgtcctttatcagggacggagccagcagcatttgcttgtcctcagcaatctgagtctctggtcttccttgttccctgtttgggggcttctgcattgccatt

SEQ ID NO: 411021 - DNA, 312 bp, Homo Sapiens
  misc_feature (262)..(262): n is a, c, g, or t
aggcagtgttgaaagtaaggaagattggaacctgtctcagtaagaagctgagaggcttagagaaagttcctcaacacagcaaaacccaacattttaaaaacagaagcagaaacagttttataaaggcattgccacccccaccattgcacacaggctttgtttgttgttgtcagtaacattataagcactccatctttgggccttaagttaatgctactactcccaggttcctgcgttacccaagaaagttcctcccaaattnggagctgttaaccatctgtttgatactcaaggctctccggaaccagctat

SEQ ID NO: 411022 - DNA, 196 bp, Homo Sapiens
  misc_feature (67)..(67): n is a, c, g, or t
  misc_feature (114)..(114): n is a, c, g, or t
  misc_feature (144)..(144): n is a, c, g, or t
  misc_feature (151)..(151): n is a, c, g, or t
agaaaatggtctattaggatcttttattggatttcaactgatatttataagcccatactcctaagancaggattactcctggacttaaggctctgccagtgttttgtatttggnccttggccttaaccagctgtgtataacccngccagtncttaggatcctcaaatagcagcaaggacacagaagtctttccacc

SEQ ID NO: 411023 - DNA, 308 bp, Homo Sapiens
  misc_feature (65)..(65): n is a, c, g, or t
  misc_feature (96)..(96): n is a, c, g, or t
  misc_feature (100)..(100): n is a, c, g, or t
  misc_feature (176)..(176): n is a, c, g, or t
  misc_feature (259)..(259): n is a, c, g, or t
  misc_feature (269)..(269): n is a, c, g, or t
  misc_feature (279)..(279): n is a, c, g, or t
ggtgttaggcactcaggttcaagagtgaaacctctgatctgctgctgcctgggaggatattaatnatgttacatagggagtaccagactccatgtntctncccttgatggggagtgttgggagtatttttcatcttgaatgtaagctgaaagttattcttcacaccagaaaggganccaagaccatcttagacatgcagtgaagcagacaaaacaaggctgaggaggggcccctggaacagggataccagagtaaattncagggccctncaacctcagnaagtggtgctgtgtctagcatctacaagg

SEQ ID NO: 411024 - DNA, 242 bp, Homo Sapiens
  misc_feature (75)..(75): n is a, c, g, or t
  misc_feature (118)..(118): n is a, c, g, or t
  misc_feature (210)..(210): n is a, c, g, or t
accagataaccagtatacctctacagagaacatggtcatgagctgtgaattctctccattcctggaccccttgtnacagatgatttagttactccaacatccatccttaccacctgtntcaggaaggaggtgcccttcctcctgtgcccagcatctccctttcacacctacttggtctccttgctccaacaattaatagcctatctttcngtcccttcttttttcttcaaaatagcctgcag

SEQ ID NO: 411025 - DNA, 125 bp, Homo Sapiens
aggttccttatcccagttaagtctcaatattttcacacgtaaattttaagtataatatgagttattgggaaacatgttaccttattctgataagtttaaattacgggcctattaagcactatttt

SEQ ID NO: 411026 - DNA, 315 bp, Homo Sapiens
  misc_feature (113)..(113): n is a, c, g, or t
  misc_feature (146)..(146): n is a, c, g, or t
  misc_feature (160)..(160): n is a, c, g, or t
  misc_feature (209)..(251): n is a, c, g, or t
  misc_feature (254)..(254): n is a, c, g, or t
  misc_feature (289)..(289): n is a, c, g, or t
gtgggggatacatttgaagcccagagcatctaataaactaagaaaaatgaataataaaatatttgaataaaaaccaaattatatgtaatgttgatgactaaaatgtaaaatgncccaagcattacatgttttatcactttatacgnatattttatcactntatatatagtgataaatacatatcattttatatatacacatgtacacannnnnnnnnnnnnnnnnnnnnnnnnnnnnnnnnnnnnnnnnnntgngaagcttggttacaaaaatattaaaagtggatttnggtgggaagttttaaccacaaacgta

SEQ ID NO: 411027 - DNA, 300 bp, Homo Sapiens
  misc_feature (63)..(63): n is a, c, g, or t
  misc_feature (126)..(126): n is a, c, g, or t
  misc_feature (134)..(134): n is a, c, g, or t
  misc_feature (169)..(169): n is a, c, g, or t
  misc_feature (182)..(183): n is a, c, g, or t
  misc_feature (228)..(228): n is a, c, g, or t
  misc_feature (242)..(242): n is a, c, g, or t
  misc_feature (250)..(250): n is a, c, g, or t
  misc_feature (256)..(256): n is a, c, g, or t
  misc_feature (269)..(269): n is a, c, g, or t
agtaaaagcaattttagaatataccttgaaatgggtctggagatgaaggctaaaccaaaactnttccaaatgcattttaaacagtggttgcaatagcttaaaaataaacgtgtagccttataaccncctgaggnaataaaattagatgcgtaggctctggcatttccgngttaacaatacgnntatttatattttaaatactgaatgttcacacaactggtagccccnttagcactgctgtntggggggncaaaantggctaagttagnaattctgggggttattctcttctcttccaat

SEQ ID NO: 411028 - DNA, 315 bp, Homo Sapiens
  misc_feature (102)..(102): n is a, c, g, or t
gttatgtgtctattcttgtaccactaccatgctattttggtcactgtagccccatagtatagtttgaagttgggtagtgtgatgcctccagctttgtttttnaggcttacgattgcttgggctattcaggctcttttttggttcagtacaaattttaaaatagttttctctagttctgtgaatggtagtttacagaactagatgtcaatggtagtttaatcagaatagcaatgaatttataaattgctttgggcattttggccattttaccaatactgattcttcctatccatgagcatggaaatgtttctccat

SEQ ID NO: 411029 - DNA, 351 bp, Homo Sapiens
  misc_feature (286)..(286): n is a, c, g, or t
  misc_feature (293)..(293): n is a, c, g, or t
aagtagaagatgagaaatagcttgtatggaacagagaagtctttgtaccgatacatattcaactaaagatctgaaaatcaataatctcaggttttgaaaatagaatgctattcttataccatatgtttaatgtacatctgtataaggttaacaaaaatctattaccatctcactacttagtctgaaatggaaaacctagtgtttttaagtgatcatagataattcattaaagcgtaaggctcctacataataattattgcttgtcacttttgaatcaacaaatagntattatnatggatccagagaacttttgatatatccgtattaattatgattgtctcattaaaatat

SEQ ID NO: 411030 - DNA, 202 bp, Homo Sapiens
  misc_feature (129)..(129): n is a, c, g, or t
  misc_feature (181)..(181): n is a, c, g, or t
tctttagcattttcttctttttcgttttaaaagacaaccttgaggagagagaaggtagatatgaatggaagaataggggaaggacaatgatttggattggtttgaaacgttggcccctaatatgttgcncttgaggagtagtatttttctaaacggagtaacacttgggattttgtaaatncaatttgatgaggatcttaga

SEQ ID NO: 411031 - DNA, 252 bp, Homo Sapiens
  misc_feature (97)..(97): n is a, c, g, or t
  misc_feature (106)..(106): n is a, c, g, or t
  misc_feature (147)..(147): n is a, c, g, or t
acttttggattagccaaagttttaaggtaaaataaagctaagaggaaaagaaaagatctagggacaaagacaagtagcaagaagtatttaaaagganattcaacanatataaggggacatcaaaaaatttgtgggaaaatggaattnaacggtaaaaataaaaactataaactttgtttctcaacataaactttatcaagttcaacatattttgtaatcaatgataccagccatttagtcccttcctaaagg

SEQ ID NO: 411032 - DNA, 414 bp, Homo Sapiens
  misc_feature (292)..(292): n is a, c, g, or t
  misc_feature (385)..(385): n is a, c, g, or t
ggtcattaactccagacattagatgagagctgggagagaggaagggcatagagggtggaaggtcaagtcacacaactgggcaggaagtaagaagcttgatcagtttaaaggtattagagctctttgtgtgtagagttacaggagatattccctttctatataatttatttccatggtgtttgaatcttatcttgttttctgtaatggacgcagcttctgagaagtaagaaatatggtcaaggtcagctgtgtctctcattgtaggtctccaggatgcaggagtttgtttttncactgtagatatgaacatggtatggagaatgtagcccatgatcacagtctgaaaacgcaagagtcttgactttgtgggatgtccttgggagtntagtatgcagtcccatggcttagtaagct

SEQ ID NO: 411033 - DNA, 375 bp, Homo Sapiens
  misc_feature (325)..(325): n is a, c, g, or t
  misc_feature (358)..(358): n is a, c, g, or t
ctccaattatattgggatattagtgcttcattctctataatcaaatgtgttctaggctgcatttacagctcatccacccttctctgcctgcactgtcacacttggaaaacggaccagttcctacagcaggcacacaaattgacaaagcagcattctgaatcggcaaaggggagaaaaagcaaatgaagagcaggttgttagcactaccctaccctttgcaaagaataaacacaaagttgttctgcctagactcaagcattattatagggatctgtaactaaaaaaggttagtgacattcaaacagaaatcacttatcctgagggncatttactcaaaagtttctaattaaaatagccnttatattactaccttgg

SEQ ID NO: 411034 - DNA, 378 bp, Homo Sapiens
ggtatgacatgtgtctctaacacccaattgaacttgaagcagtgaggctgtgtttgacaacacaagtagggaggagagttcgtgagcccatgcttgggaagtgtgctatagaggaacaaggagtggaggaggaggaattcagctatctctggacattgaaatagcaaactatccttaggacctttcagagagcagtgggccacataagggaaaccatattcgtaggaacgagctttatctcctcttcaagaagattgtaatgacttcatatagtgtgaagagtagatgataaagccagactgaggggggagagggggaagtctaaacctgaagtcagtcaccattaggtcttttttcttaaggaagattacatttggg

SEQ ID NO: 411035 - DNA, 271 bp, Homo Sapiens
cttcatggggaaagagaagacaaacaaaaagctaagctgaagttccttattccatggccaaaagaagaagaagaaagtcagatatgttcagggtgctaagattcaagacggggaagaaccagctaaagggaaagagaaaggacagagcttggtagtctgacggcataggtcattaccatgcaaatactctactaaattgcccagattaaaatacgaattttgagatactctcctccaatattcaccctgctcagttctggagcatgagagg

SEQ ID NO: 411036 - DNA, 304 bp, Homo Sapiens
  misc_feature (69)..(69): n is a, c, g, or t
  misc_feature (141)..(141): n is a, c, g, or t
  misc_feature (265)..(265): n is a, c, g, or t
ctaggcttcaaataaataaaattttcacacttgaaaattatgaacacttaaagcacacatattgactgngatactgtgagccacatttccacttcaaggacttgcatcagtatttaaatgcaagagattggagtgctttcnctgatacaggttgagttcatcatgggtgatttggggaaggtatagagaatccgattgtattaagcaagcttctatcccgcctgtcttatcaagttaactacatggtaaggtttcactggatttntccactgtggatgtgtctttcagaccataaaacacaata

SEQ ID NO: 411037 - DNA, 269 bp, Homo Sapiens
  misc_feature (89)..(89): n is a, c, g, or t
  misc_feature (175)..(175): n is a, c, g, or t
  misc_feature (197)..(197): n is a, c, g, or t
gtgaattagagggagaggagggccacggttagggatgcagaggagggacaccatgggtcaggggaaggaacaaaggagacgggagtttntcccagccccaggcaggagctgtgctgattggtgggaagcagaattaggatgctgggccactggacaggctgtgaatgcagctgtntccactagggccgccacaagangccatccctgagaccctgaggtttcttgtgcaaactcgagggaaggggagtacagagagggcaacagggagt

SEQ ID NO: 411038 - DNA, 355 bp, Homo Sapiens
  misc_feature (215)..(215): n is a, c, g, or t
  misc_feature (278)..(278): n is a, c, g, or t
  misc_feature (296)..(296): n is a, c, g, or t
  misc_feature (317)..(318): n is a, c, g, or t
gatgttatgagttaaaagctcaaaatgaaataataacaaatttttttagaaacataatgaccaagagagaagtttgtcctttttgcagtgctctcagatgtcctgggcccgactgaggcaagagtgttgacctttctgaaatccatccttgaggtccccttgacttcaaaagcagcttttccaggcgttttccctctggcctaatgctgaagcgncctcattacccagctgtcacactcagttggcctgattgaccagagccattcccgaacacatgnctgacctgctcacctctnagaaggctggctttggggggnnaggtggagatagggagacagcctctcccctacctctt

SEQ ID NO: 411039 - DNA, 310 bp, Homo Sapiens
ggattatattaatagccaactagcacaaatttgaactcagcaccacatggcccatgtggaagaatgagtcaatgtaggtaatgtgctgacctagcaaggtctcttcagcaccagcattctaaccagtgctatgctctactaaagggattcagaagactattctgctgtatgtaaccccaaagaatggcaggaatttactacagctataacaaaaattgtaataatattcagttaccttttgctaagaactttcaaatatttcatttgagctcaataactaccctagaagtatgcatggtaggtgttcttt

SEQ ID NO: 411040 - DNA, 292 bp, Homo Sapiens
  misc_feature (21)..(21): n is a, c, g, or t
  misc_feature (145)..(145): n is a, c, g, or t
  misc_feature (233)..(235): n is a, c, g, or t
  misc_feature (242)..(242): n is a, c, g, or t
ggggagtcagtgatttttttncattttaaatttagccttcatggagttttagttatttggttttatccaagaaaagcaactaaatgccaaaacattttacatagtgggctaaagataggaagtgcacatatgtatggcatgtgtnctatacattattagatctctgccttcatttctaatgctaatacaatcatgtgaagagttaagcaaaaatgtcaggtactatatatttnnnataaatncatattattgttaataaaagggaaatcgatgtgtgcggaagtaatctagg

SEQ ID NO: 411041 - DNA, 330 bp, Homo Sapiens
  misc_feature (246)..(246): n is a, c, g, or t
  misc_feature (315)..(315): n is a, c, g, or t
catcaaagtacctgaaagcagatctacatcttctgacttcacttactcaatttttattaatccatagatcaaggtgcattattccacaaattatgatcctctggcttctacttataccagtgtactaaaatgtcttttgatgagatcaccaaagagttcactcatgtcatactgcaggccctaatcttagttattaccttatttgaaagcagatctacattttctgacttcacttactcaattttnattaatccatagatcaaggtgcattattccacaagttatgatcctctggctcctacttataccagtggnattaaaatgtctttt

SEQ ID NO: 411042 - DNA, 351 bp, Homo Sapiens
  misc_feature (252)..(252): n is a, c, g, or t
  misc_feature (338)..(338): n is a, c, g, or t
ggcaatgaatcatgcaaaatactggagaattttgattgcgagctcagcatcaggtagaagtgtaaaattaattctgaaacattaatgtaaactgtgtctgcatgaatatagagatagcaccagaatagcagcactgaaggaaatagtctcattgtactctcttagattatattatgaaatttgtgcttaattctggatataacattttaaaagcagtagagagtggcaaacggaaacagattagaataacangaatagtaaattttatgtggttatgaaatatgaagaaaagttgaaaaaatggctgcctatgccagatttaaaatttaaggcatggncaataactgtcca

SEQ ID NO: 411043 - DNA, 159 bp, Homo Sapiens
  misc_feature (127)..(127): n is a, c, g, or t
cagccttccaggctgcagctaaccagctcagggctataaaggccaggccaccagtggccaccagggggcttccatccctcctcttcagccctgttagagttcagccacccctttaagtcaaactttnagcaaatatttaatgagtgtggattattggtg

SEQ ID NO: 411044 - DNA, 369 bp, Homo Sapiens
  misc_feature (336)..(336): n is a, c, g, or t
gggacacattcaggccataccacagctggagctaagagagcgtagaatcattacatgatcttggcctcagcaatcctctgtcttaagtagctgaacagtttagccataggccagatagatgtacatggatattagaactagatagcattatctggccaatattacaacttaatatggtacatattaaggtattcctgttttttgcttagttttatttttcttctctgccttaagaaatctctgtctttcatgtactaacaagttttcaaaacttctcttggatcactctccattattttcagagctttaaaggaatataatttaattatgcatatntttaaaggttctcctggaatatgtttaaagatg

SEQ ID NO: 411045 - DNA, 209 bp, Homo Sapiens
  misc_feature (29)..(29): n is a, c, g, or t
  misc_feature (57)..(57): n is a, c, g, or t
  misc_feature (115)..(115): n is a, c, g, or t
  misc_feature (146)..(146): n is a, c, g, or t
  misc_feature (150)..(150): n is a, c, g, or t
ggctcacctagctgggttcgtggctagtnatggaggcgccctgaagagcctcatttncccacagctgtaggaagtgtgtggtacacccacaatgtcttagcttttgtattagggnacgtcttcagtttgtccccttggccacatgntttnggaatgtcttcagtgtgtacacggtggctgtccctgggccacatgcttagggaacgtct

SEQ ID NO: 411046 - DNA, 298 bp, Homo Sapiens
  misc_feature (67)..(67): n is a, c, g, or t
  misc_feature (81)..(81): n is a, c, g, or t
  misc_feature (108)..(108): n is a, c, g, or t
  misc_feature (127)..(127): n is a, c, g, or t
  misc_feature (174)..(174): n is a, c, g, or t
  misc_feature (274)..(274): n is a, c, g, or t
aatcatatggttggtactcagtaactgctggctgcatgctggaagcttagccttaggaatggttctncttgaacttcaggntgcttcacaatccctagggagcctgtnaaggatggtgacaccaggntccatgcccaaagagcatgaaggggctggtttgggcttggccaaggntcacatatttaacaaatcctactgagggtccaacagggaactcctctccacccacctgacaggagacagacctctctttccccagggacccactccattntccccaggagtgcttcaggacccg

SEQ ID NO: 411047 - DNA, 328 bp, Homo Sapiens
  misc_feature (43)..(43): n is a, c, g, or t
  misc_feature (63)..(63): n is a, c, g, or t
  misc_feature (87)..(87): n is a, c, g, or t
  misc_feature (118)..(118): n is a, c, g, or t
  misc_feature (172)..(172): n is a, c, g, or t
  misc_feature (262)..(262): n is a, c, g, or t
  misc_feature (274)..(274): n is a, c, g, or t
cgaatgtggaatgtggaggttacacagcgatgcctagactgtntgtccttagaccgaaggcangcagaaaggctcagggggcttgcnctatattccttagacatctccgaagattttntcagcatcagaatcagatcctcccatggcctgcggctacttttaagaaagtttngcaaccttttggatatgtcctcttctcttttttgactttccaggctgtaaaccttcagaagcttccacatgtggtgccagtgggctcctnggtggtgaaggnaggtggcagttgtggtttagtgggaaaaagaattatctggctcctggggagttt

SEQ ID NO: 411048 - DNA, 242 bp, Homo Sapiens
  misc_feature (168)..(168): n is a, c, g, or t
  misc_feature (209)..(209): n is a, c, g, or t
  misc_feature (226)..(226): n is a, c, g, or t
ttgaacggggtgtttttttaacaactgagggaaaataaagttttggaaatgttggtaaggattagagtatacacagatacatggtaataaatgtcaaagatgtgggaggttatcctgcagcaaatagaatgttgctaaagatttatgagcagggtaatgaagcattgngaggagagatacagtaaaattcatctttattccttggccanttttgttgaatcagggnaggagaaattgagcgg

SEQ ID NO: 411049 - DNA, 260 bp, Homo Sapiens
  misc_feature (144)..(144): n is a, c, g, or t
  misc_feature (162)..(162): n is a, c, g, or t
  misc_feature (228)..(228): n is a, c, g, or t
  misc_feature (235)..(235): n is a, c, g, or t
cacagaacccctaaaatcacactcgattgacagttgcaactgaaaagcacacccagtccaaagccgcaatggttgttatcacgctgcttccataaagtgagattcagcccccaaagatgggtctataagtttggatggcctttnctctttctccttttactngcatagcttttagaattggtgccacaattacagctttaactgggtgaagatagattgaagggtagntagatgntatataaaagacaggcctccttcct

SEQ ID NO: 411050 - DNA, 211 bp, Homo Sapiens
  misc_feature (39)..(39): n is a, c, g, or t
  misc_feature (79)..(79): n is a, c, g, or t
  misc_feature (123)..(123): n is a, c, g, or t
  misc_feature (141)..(141): n is a, c, g, or t
  misc_feature (188)..(188): n is a, c, g, or t
atttatcttggtgtctcactttaaggtaaggggattggntcttaaggcttgctgaggcaggactaggctcgccaatgtnaacaaagtataagacaaatacaacgacaagggctttcttctgcncttctttaagattttctnataataatgctctcagtttcttcacttcttagggaagtcagaatttnagataagtggggtgatggggggg

SEQ ID NO: 411051 - DNA, 288 bp, Homo Sapiens
  misc_feature (51)..(51): n is a, c, g, or t
  misc_feature (54)..(192): n is a, c, g, or t
cccctaatagatatacccaagttttgaagtacaagctgtgggaagcctgtnaannnnnnnnnnnnnnnnnnnnnnnnnnnnnnnnnnnnnnnnnnnnnnnnnnnnnnnnnnnnnnnnnnnnnnnnnnnnnnnnnnnnnnnnnnnnnnnnnnnnnnnnnnnnnnnnnnnnnnnnnnnnnnnnnnnnnnnnnnnacatagctaagcaagcaggaagcttgcataagtaaatgccagcagctgcgccaacagaaaagggatacctgggaagccaggtatgttcaacatggg

SEQ ID NO: 411052 - DNA, 292 bp, Homo Sapiens
  misc_feature (22)..(22): n is a, c, g, or t
  misc_feature (24)..(24): n is a, c, g, or t
  misc_feature (116)..(116): n is a, c, g, or t
  misc_feature (123)..(124): n is a, c, g, or t
  misc_feature (175)..(175): n is a, c, g, or t
  misc_feature (192)..(192): n is a, c, g, or t
  misc_feature (198)..(198): n is a, c, g, or t
  misc_feature (229)..(229): n is a, c, g, or t
ggaaaagcatttgcctcctttntncttagaaaaccccagtgggggcttctcatgcccaaagggtgtggtgagcacacagcagacaggacagtcctattagtgttggtgtgaccgtntgcacgnnttcccggcattacagcatcacagcaaaagtaacaggatggcgggtgggggncaccagatgcaaacggncaacgngagagacggatcacagacgctcgcacacggngttcgggacgacggagaaagccacaggtacagcttgtccagacctgggctgccgactccactt

SEQ ID NO: 411053 - DNA, 270 bp, Homo Sapiens
  misc_feature (21)..(21): n is a, c, g, or t
  misc_feature (147)..(147): n is a, c, g, or t
  misc_feature (212)..(212): n is a, c, g, or t
  misc_feature (240)..(240): n is a, c, g, or t
  misc_feature (257)..(257): n is a, c, g, or t
cactgccatgtggctggtttnccgtagagggctaaaactcttcaataaggaagtacttcagggaggcctatatattggcacccaaggaatgccaggactgccacctgctgctccagcgttagctcactcgtgtgcttactcactttnactgcctttttgtctatttctgggaggttggtagaatgaaagggatgctccaaggcaagcagatngcctgtccacctcctatatattgacagngccaatgagtgtagagncttgttacaagag

SEQ ID NO: 411054 - DNA, 305 bp, Homo Sapiens
  misc_feature (269)..(269): n is a, c, g, or t
gtggttataatgagctcaaagcctgtgccggtctggtctgtgaaagggcctgggtgagccaaggtcagggccctgggcagagccatcgggctgctctggccgtggcggtggtggttccaggcacgtctctgggttgtgaggaacccgctggccccggggctgggctccgactggggcccaggtgtcgatcactaaggtatcggggtctctgaggggcaccacgttggaggatcacacgggcatgtgcagctcgttgtattcatcctggncgtcctcgtcaaagtttggttcagcgtcttcagagt

SEQ ID NO: 411055 - DNA, 404 bp, Homo Sapiens
  misc_feature (256)..(256): n is a, c, g, or t
  misc_feature (263)..(265): n is a, c, g, or t
  misc_feature (297)..(297): n is a, c, g, or t
gtcattcaccctaatccctctttcaccttcacagaactttcacactccaatgtacttgctgtttgtagatgctcctataaacagaaagctctgggagacaggtgtcttgttattcttgctctctgtcatatctctgggcctatcacaagtactcaaagcatagaagttcaataaatatgtgttcaatgtaagaaatgatcagtgattctcaagctgcagtggcgtcaggataacctagacagcctgttagcacggntcactgnnncccacccccacagtttcaggtctggtctgggntggggcccaataatctgtattcctaaaagtccccaagcaatgctggtgctgttcgtccagggaccatgcttaaagaaccacccggaataggactggtggacaaaagg

SEQ ID NO: 411056 - DNA, 413 bp, Homo Sapiens
  misc_feature (239)..(239): n is a, c, g, or t
  misc_feature (263)..(263): n is a, c, g, or t
  misc_feature (292)..(292): n is a, c, g, or t
  misc_feature (319)..(319): n is a, c, g, or t
  misc_feature (337)..(337): n is a, c, g, or t
  misc_feature (362)..(362): n is a, c, g, or t
  misc_feature (372)..(372): n is a, c, g, or t
  misc_feature (390)..(390): n is a, c, g, or t
gtgcagaaccaagacctctgtgataatcctatttaaaaaaatagctacaattttagttagaatgtttcccttatgagaaagcattttctgcataacttttaatgtactgaccttttccaagcttgctgagctggcctttgtctcaactcacttgggacacccttccctgtgcctcaccagggcccaccccaagtcccagtttctctagggggtctctcgggaccccttgaatccctttnctgatttgtgctgcctttagcagncggaatgggctggcagaccaccctacatnctcctgtgtgtggggacactgtcaggntgtcctccctgcattagnctctgctgagtttcctaccatgtgnccaggatggngtccatagtcggggcatnaaggacttaggatgggcccagtc

SEQ ID NO: 411057 - DNA, 416 bp, Homo Sapiens
  misc_feature (261)..(261): n is a, c, g, or t
  misc_feature (341)..(341): n is a, c, g, or t
  misc_feature (349)..(349): n is a, c, g, or t
  misc_feature (356)..(356): n is a, c, g, or t
acaaaacaaaaagtagtagcatctctgtgagaggtacacagttagaaaaatgattccacacacgagtaaagagatttaccaggaagagtcttgttttctaaaagttgatacaactagtagaaaaatacttgtcagtggtaaatagagcagaagtagaaaaagcagttaatctattagatcagatcagagtgtaaggcaggtatatcaggccaaaggtgataagacagagcagaaataaagtattgttaattcatgcatttnctgactcatttatttatacattgatactgtcacttataaatcaaatcttacaggtcaggttctgtgctaagctcaggggntataaaangaaatangtcactgcactcgccctcacgggggcccaccagtataactgggtagatagttctataaag

SEQ ID NO: 411058 - DNA, 371 bp, Homo Sapiens
  misc_feature (217)..(217): n is a, c, g, or t
  misc_feature (251)..(251): n is a, c, g, or t
  misc_feature (302)..(302): n is a, c, g, or t
gaaaaggggaaaaatcacaatatgtgttctagacaatattggtttagattttttaaagatctaaaattcaattatggaaagccagcagcctgatccagttactgtgactaaagcaattgtcagaccatctctagtcaaccccttatgggttttgcaatgtgtctaccccaattttggatcaggaggggtcaaacagaaatacagcaatgtgattaanctgctcctttgcaaacaatatgaaaaggtttgtnctttcaaagtagattctaacaaatcgtctgctcactgtggggtagcaaagngagaaaagcaaatctttctattagtctcaagcaagtcttcagatttacacacaatctaatggaggcatc

SEQ ID NO: 411059 - DNA, 369 bp, Homo Sapiens
  misc_feature (21)..(21): n is a, c, g, or t
  misc_feature (73)..(73): n is a, c, g, or t
  misc_feature (132)..(132): n is a, c, g, or t
  misc_feature (183)..(315): n is a, c, g, or t
  misc_feature (326)..(326): n is a, c, g, or t
ctcaacaaagtttggattttntccacgatgactccttgggtgaatttttaatcaagttatttcaaccattttnctcatatatttcgtgcatccctattctggtattcagtgaatacatgggagaggtatgtnattctcagctcccacagcccataagtcggggaaccaggacttcattccccnnnnnnnnnnnnnnnnnnnnnnnnnnnnnnnnnnnnnnnnnnnnnnnnnnnnnnnnnnnnnnnnnnnnnnnnnnnnnnnnnnnnnnnnnnnnnnnnnnnnnnnnnnnnnnnnnnnnnnnnnnnnnnnnnnnnncagaggaaggngggacctgggggaagaggtgggcataaagtgaaggtacaaaca

SEQ ID NO: 411060 - DNA, 327 bp, Homo Sapiens
  misc_feature (303)..(303): n is a, c, g, or t
caaataagaacccagagagagggagagattcacagacaatagcttaaaaagtctagaaattatagaccgattgaggtcagcaagaaacaaattattcaatatatcccctgagggctagagccagactttcccctatgattccaaaattacttcgcagtttcattagggtgaaaggcagtgcagtctcatgagttcagaaagtaaaggttgttccttaaaatttagatagacttgacaaccacttaggatggcattttggcattctgtccctgctcatcaaagaagttgctcaaatttgtgggntagaggaatgaggagcaagaagta

SEQ ID NO: 411061 - DNA, 374 bp, Homo Sapiens
  misc_feature (158)..(158): n is a, c, g, or t
tggtgaaagaagagaaggaaaccttggtctgcatggcacttggtacttttgtattgcctccatgccctccactgcagctcctgccctgctctgtgtgcatccctcatgagactcaagacagataacctctccttgccctttcatgtcccagccctggntcttggactcaaccatccattgcatccccatggaggattctgccagtcctcaggactcaggagcaacccaaggatgtcccagggtcacaggaagacttgttgaggggacccacaggggtgcccacaaattatcagtccatggagaaaagtagagagggaggctcaaggacctcagcacgtaagggacattttgaattctacaagtcacggtgggat

SEQ ID NO: 411062 - DNA, 385 bp, Homo Sapiens
  misc_feature (118)..(118): n is a, c, g, or t
  misc_feature (222)..(222): n is a, c, g, or t
  misc_feature (336)..(336): n is a, c, g, or t
  misc_feature (368)..(368): n is a, c, g, or t
tctttctgcatcgttctgtcataaaaaggggtactactatagaatagaatgcaggcttaggacccccgtaagctcactgttcaacccagcccagcaaactggtcagttataaattttnctgcaggtccctgaaacaacaacaaaaaactggatgaggtttccctcccatcttgttttatgtccttgggagcttgaccttataaccatacggcggtacttttncttggtctctgccatccagggaaccagaatttggggggttatgtcatagttagctctaaaaattatcttgagcagttaaaagcctttgcaagcttaaaattgactgctgtaggntccttctggggaaggagcaatgggaaaccttnccaaagcttatagctca

SEQ ID NO: 411063 - DNA, 367 bp, Homo Sapiens
  misc_feature (144)..(144): n is a, c, g, or t
  misc_feature (173)..(173): n is a, c, g, or t
  misc_feature (310)..(310): n is a, c, g, or t
gtactaaagccatgcaggaaggaggaaataatcagtgagccacgggctgaacttgtggaaaagaaatggagggcaaggtcacaaaccagtccctaactgcttctaatttaatgtaatcctcactgtttgtcattattgcttttnatggccatgaaatctgtttttccccagtnctctagtgtaatttggaattaatttcccagctgctttatttttttcctagaagagtcggggacattttcaggattagtagaggtgtttctacaacaccttcatgccttcgatagtgtgtaagagttcaccaattganttaccttattctgttcagaagtagtaactatggagtttaaccactctgggacataat

SEQ ID NO: 411064 - DNA, 346 bp, Homo Sapiens
  misc_feature (59)..(59): n is a, c, g, or t
  misc_feature (98)..(142): n is a, c, g, or t
  misc_feature (220)..(220): n is a, c, g, or t
  misc_feature (243)..(243): n is a, c, g, or t
tggaaaggaaaagcaaaagattgaagaataaaaacattttgtatttgccaaaacttgtnctgtagcagtaagtgtgaaacaagtttgctacattttcnnnnnnnnnnnnnnnnnnnnnnnnnnnnnnnnnnnnnnnnnnnnnaaaggatttaggggattggcaagtcagtttgtcagatgtcaatgaacagaaaacctaagaaaaaaggtagcaaaagtnctgctggccccagatggattttnccttaagtaatttcctaatcattagttacagctctgtgtcaaaagatgtacatagaaatttatgctagattcttaacatctttccttactgtgtgcagaaatg

SEQ ID NO: 411065 - DNA, 320 bp, Homo Sapiens
  misc_feature (58)..(58): n is a, c, g, or t
  misc_feature (68)..(68): n is a, c, g, or t
  misc_feature (103)..(103): n is a, c, g, or t
  misc_feature (108)..(108): n is a, c, g, or t
  misc_feature (161)..(161): n is a, c, g, or t
  misc_feature (169)..(169): n is a, c, g, or t
  misc_feature (181)..(181): n is a, c, g, or t
  misc_feature (191)..(191): n is a, c, g, or t
  misc_feature (224)..(224): n is a, c, g, or t
  misc_feature (286)..(286): n is a, c, g, or t
atgtctgccaactcaggagcagggcaggaatcaaactttttggagttgctatcaagtncttgattttncaatcccaaccgtccgcagaacactagatgtgtgnatgtntgcttgtgtgtgcatttgtagtaaagagggggttgagaagtggaaggcagagncaggagtnggcatctaccanggcatacatnaaagacccttacaccaacactgcccttcccagnaatgtgagtgtaatctggtttcctaaaaccctgggctgcagtccagatagtcatggttagancagatggttgaggaaaggttcaaggcagtaggat

SEQ ID NO: 411066 - DNA, 332 bp, Homo Sapiens
  misc_feature (36)..(36): n is a, c, g, or t
  misc_feature (127)..(127): n is a, c, g, or t
  misc_feature (149)..(149): n is a, c, g, or t
  misc_feature (186)..(186): n is a, c, g, or t
  misc_feature (270)..(270): n is a, c, g, or t
tgtcctcacccatagagctatcagagggtgcctgcnattggcagaccctttacatttccctttaataaatcacttccctgccaagatctctgtcaaggtttgagaagtcagagcattaagttatttncaataaatggtatgtacatgancatcagcaagctccaagaaatgactcgagggcctttnactactcagagaataaagcaaaaatgccaggttttcagtgcttgtcctttgtgccagggatttggacgtgttttttgttaagtnccagcgttgagctatgttccagaagatggagccttccagaaattaattgtagtgcttgaagg

SEQ ID NO: 411067 - DNA, 372 bp, Homo Sapiens
  misc_feature (158)..(158): n is a, c, g, or t
  misc_feature (333)..(333): n is a, c, g, or t
gaaaagataatgaaggaataatgcaaagctgaaggctgtgccagatgtaagaagtgattatgaaggataaaagaaaagggctttccaagcagggaagaggcatcagagagaaaaccaattgttgagccagtattctgtcacagggacatttgtctttntcctttaatgcccagtaagggtcttctcaggttccattaaacatgcagaatcacaagacccccccaaagttaccatggtgccaaccgactcaaaacaatacagacaagaagctcagctcatcaggaaggctgcagcaggcatatgggaaccatcttgctccacaaaggacagctnagatggcaaagatccctacaagggtccatatccacgggg

SEQ ID NO: 411068 - DNA, 313 bp, Homo Sapiens
  misc_feature (223)..(223): n is a, c, g, or t
gggattgggattgtttggctctgaggctgttaagtctggactgatgctggaaactaatatcaatgtttaacagggttgactgtcattaatgatgtgcctagctgtgggtacagatgctttgcacattactaccctctattctcacaatcttccatgggggatgtattagaatccccttttataaaggataaaggtgagggtcagagagactaggaagcctgtncagggtgacacaatacaaagtgtcataaattgggtttgtactcagccactctgcttattaacatcagcagtatggttaatggggtgaccg

SEQ ID NO: 411069 - DNA, 375 bp, Homo Sapiens
  misc_feature (213)..(213): n is a, c, g, or t
  misc_feature (247)..(247): n is a, c, g, or t
  misc_feature (355)..(355): n is a, c, g, or t
ctgactgaaaggctctttccagctccaacacatgaaggttccataattttccccaaatgtctgccgctctgaaaacttcaactatcttaatatttgtgacatttatgcctgtgtatggcaatctgatggtaaaaggagccatatgtaaataataactgaaactttgtcaaaataatgttaaggaaacataattagcaaagcaatatataattncaagtccactgatttagagaatcagaagtaacanttagaatcagaaataacaactatctggcagggatggaaaaatgagagcagatataaaaggtgtaccccaacccctgaccccactgcccatttgggtgtgcactatgtntttccaatattaatatcttt

SEQ ID NO: 411070 - DNA, 348 bp, Homo Sapiens
ctattgcacatggtaactctgtcatacatctataaagcctagtagctgtattgggtgagatgaaaaaaactgcttatattccacagcaacataattacaaataagttttaacctattaaagtacagagtctctctcatcactttcaaagcaggaccctacttaccaataattcatagcatacctccccttattttaaaactcatatgatagctgatttcctaactgtagcaatcaggattcttagaaagattcgaaactgaatttagctaactaaggaagcggatttcattaaaaatattgggttagtttacaggaatcagtagtggaggaaccagggttgcataaaa

SEQ ID NO: 411071 - DNA, 286 bp, Homo Sapiens
  misc_feature (30)..(30): n is a, c, g, or t
  misc_feature (139)..(139): n is a, c, g, or t
  misc_feature (155)..(164): n is a, c, g, or t
  misc_feature (211)..(211): n is a, c, g, or t
  misc_feature (269)..(269): n is a, c, g, or t
gctctctctaccccctcatctaggtatgtntatagctcatttatttaggggtgatgttaaaaaattgaatgcccttaatggcaagggaaccaaccaatcaatgtggatgccacaactttttcccctgttgactgttgtnattggtatggaagtannnnnnnnnnctcccagcttttatttcaggttcaagggatacatatgcaggtttgtnacatgggtaaattgcatattgtaggggtttagtatacaggttatttcatcacccaggnaataagcgtagtacctg

SEQ ID NO: 411072 - DNA, 353 bp, Homo Sapiens
tatgtaccaggtgtggagcctagaacagacaccagtcagaagtgcagataaggtctgactttccagcatagccaggggacttggctgactccacatgtccccaggccttacctagctgtaaagcaggcaggttgtgaagtcatagtggcagtttatgaaatatttaggggacctaataatctttaaattgtataacatttcttgcataaatttcctttcatgaatcctttcatgacttagaccatctatgacatgcttggactttctgacttgtcctaaccacccctctctttaaacaaccagtctttttactttaggacaagaatttaccatacaagattcttttgtataaa

SEQ ID NO: 411073 - DNA, 197 bp, Homo Sapiens
  misc_feature (74)..(74): n is a, c, g, or t
gcccggcgaccgtagcatcttctggaccacaaaatagaacattgccaggcaaggcagggcatttggggaatttnagagaaagcaggatgagtgatggaattgggagggtggcacaagatgttaaacagcatatcttagtcctcatctagggtataaaacaggacccatggactctagcatcctggaatgacagaggg

SEQ ID NO: 411074 - DNA, 372 bp, Homo Sapiens
  misc_feature (296)..(296): n is a, c, g, or t
tttacaaatgaaccactgagcacctcagtacttagctcatacctcataccttagttccttagtacttagccttgtgccatcttgaatgagatggagtgaagtgaagctcgaaggagtgacagagacatagtccttgctctcaaggggtctttagcctggtctgggggacaagatttcctcatctacctcttgaaaggtggcaggacaactccacactggagtgttctcaccagcagataggtgctgcgggagtgtggcgccacattctttatagccacaggctttcgtgggacttnccctggggtccttccctatttggctgggtggaccataagcggcaagtgaatgtggcaaacttcaattcacaattaa

SEQ ID NO: 411075 - DNA, 343 bp, Homo Sapiens
  misc_feature (118)..(118): n is a, c, g, or t
  misc_feature (127)..(127): n is a, c, g, or t
ctgttccctaaatattattaaaattttaaaaattagacatttggtctaaattagacaggtaagatactactgtccttactagatgctttaaagtcataaactgcttctatggcttttnataattgtncaacttgcttgctttagagccattggattctaggtaaggcctagagacatttggagttagccatgtcccctagctatgctagaaagagtccgacattatctgtggttctgtcctgtatcctacactctacacctgatacataattaaaattacttacactaaaaataaaaatggatgcattttttaggtaggaagggtatgggaaattataggttt

SEQ ID NO: 411076 - DNA, 164 bp, Homo Sapiens
  misc_feature (69)..(69): n is a, c, g, or t
aaacagagtactgggatgtcactgttggaaagtgctcacaatttctcatctaagccgaagttgtctgtnctccttcctaccttaacagtttctcactgcctgaaggcagctgccaaaacccctctaagcaagcagcactcttacccaccaaaatctatgacctc

SEQ ID NO: 411077 - DNA, 271 bp, Homo Sapiens
  misc_feature (73)..(73): n is a, c, g, or t
  misc_feature (182)..(182): n is a, c, g, or t
  misc_feature (248)..(248): n is a, c, g, or t
gttaggtcattcacacatggtggagacaggaatctacagactagggatcagccccaaggctatgatctttgtnctgcgccgctctacccctgagcagacgggccagaggtccagagagggctgtgctggcagagttcatactttgataactgaaccctagagtaagcctgccctgggaaatnccagctcaagggactgacaggcataatgctctttgggagagaaatgccacatctgcagcgacacgnatccttaacactgtcccaggact

SEQ ID NO: 411078 - DNA, 379 bp, Homo Sapiens
  misc_feature (69)..(69): n is a, c, g, or t
  misc_feature (210)..(210): n is a, c, g, or t
tcaagtctcaaaactttaaaagacagtagatatttgtggttttctagctaaatgagggccaagattggnctttttcaactaaattgaatcatgtagtatatctgatttcatagctttctgggggaaaagggaggatttgaattagcagcagtgcaggtcaggagcagtaaagaagacagtaggaggagtccaactacagatgtgaatgancagcctcagaggaacacatgagaaggtgacctgctgtttatcaggaaggcggggctttctctctaagatacaaaccaaataggaatcgtcaaatagttcaaattatccgggggaaaaagcctgagcaatgatccctctggaaaacaaagcagttctcaggcagcacctt

SEQ ID NO: 411079 - DNA, 411 bp, Homo Sapiens
  misc_feature (156)..(156): n is a, c, g, or t
ctatttatgaattctcgcattggtttcgaaaactcaacacagttaaatgaacaggaattgaaggtgcatgatggatgcgtccctcatagcatttaaatctcttccacttgattaaaaattcctagttcctcttcactgaattgtttagagtttttnagcagcctctgccctgattaaaacaaattagcatcaaagatcccctgttgaatgagaaatcattaattgagaaacatgcaatgctccttaattacttttagaacagtgagagaacaaataatctcaggttccagagggccctgcctgctctgcaccgtgaactcatttcgtgtagctgctggaataaaactcaagtaggcaaacactatttggggaatatcaatgcaagctttcagtaaacacactgtaggattg

SEQ ID NO: 411080 - DNA, 281 bp, Homo Sapiens
  misc_feature (116)..(116): n is a, c, g, or t
  misc_feature (166)..(166): n is a, c, g, or t
  misc_feature (171)..(171): n is a, c, g, or t
  misc_feature (249)..(249): n is a, c, g, or t
tgctctgccttaggggtagagaggtgggaacactgacaggttctgcaaaacatctctgaacagctgctggtgtctttttctgtacttcaagtttcacggcacatctgatagctgtnccgaaagggaagagagaattacgtgggctaggctggtttgaaggtttgcntaagntttggcttgagcgactttaacacgtttatttcaaagtaatttgtgtttgtagccccactaaagtaattttgggccagnaaaggttcaaaatacggttttccctacttaag

SEQ ID NO: 411081 - DNA, 198 bp, Homo Sapiens
tggatagcatgaggcaaattgccagaagagaatttctttcgcatcctagtagaataaatccaaattatctttgtggtactgaggatgtctggtttagcacagtgtaaagttgtaacactttaacaggctattaattcacagtcactaattcaatgcttgcccggagttttgctagaaaaggatgagaaggattaaggt

SEQ ID NO: 411082 - DNA, 176 bp, Homo Sapiens
  misc_feature (35)..(35): n is a, c, g, or t
  misc_feature (67)..(67): n is a, c, g, or t
aaagaaaatgccttgggaagacagatgcatttttncccactggtgttgcaattgctcaaatattttnaggatgaatatcctcaccttggaggcaagtttttaagagtgaatttgaattactggagcagtgaacaattatttagagtctggtataagtgaagaaaagaatcatgacc

SEQ ID NO: 411083 - DNA, 407 bp, Homo Sapiens
  misc_feature (47)..(47): n is a, c, g, or t
  misc_feature (93)..(93): n is a, c, g, or t
  misc_feature (149)..(149): n is a, c, g, or t
  misc_feature (254)..(254): n is a, c, g, or t
  misc_feature (360)..(360): n is a, c, g, or t
ttccataactgtttcctgctgacaaaggggcagtggtgatggttctntgggtcttggcctcttgctagctgtcacagcaggagggtggctttntggattggtgaaagtggtatccagccaggtccaagagagacaggggcagggttttnccaatgccaaatatacttcagcagtagaagccacaagattacattattaaattgtcccaagagtcccccagtgcaaaccccagctgaacgccatttagttatatnctggtgcgttttccttctgcaggaactcaaaccaaggtttcttatgtgtgcttgagttgggggccagagtgacaactggtagaaaactatgttattccccagctangagaacagaggggaggggtacatgatagtagggagtcaagtttacaa

SEQ ID NO: 411084 - DNA, 353 bp, Homo Sapiens
  misc_feature (196)..(196): n is a, c, g, or t
tgaaccactgcgcccggcatgattggcattttgggctaaatagtttctgtccacaggaccgtcttgtgcagtgcaggtcttttagcatcctggccactcatagtgcccgtggttctcagtagaagctgtagaggatgttgggaaattggggtgggttggtcacagtgcctggcatctgtctcagggtaagggcttnggaggctcaagtgcagagtcgtatctggatgccagcaacaccctgttgagaaactttctactatggtatgctcatcattctctgaagatgtcagggcctgtttgtttgtttgcctgtttctctcacttttgccttataatcagttcttccttgttgg

SEQ ID NO: 411085 - DNA, 320 bp, Homo Sapiens
  misc_feature (89)..(89): n is a, c, g, or t
  misc_feature (205)..(205): n is a, c, g, or t
  misc_feature (227)..(227): n is a, c, g, or t
  misc_feature (230)..(230): n is a, c, g, or t
  misc_feature (247)..(247): n is a, c, g, or t
  misc_feature (296)..(296): n is a, c, g, or t
ttctaaacccttgcttttcccactgcaaattgttttggctagagagcaggctattaagacattctagccaagccaatttcctgagagtnctgcaggtaccaggtgttgctggagcccagcatctgctcagaggaaggcagagagacccagaggaacccagaatgagacactcatttttgcatcctcagtttccaaattaattttntagctcctggttaggacccganttncagagaccaggcagctntccaacaagaatgctgacaggtttcattgtcctctagggtagctgctgnctaaagaatatttgattttttggg

SEQ ID NO: 411086 - DNA, 321 bp, Homo Sapiens
  misc_feature (79)..(79): n is a, c, g, or t
  misc_feature (156)..(156): n is a, c, g, or t
  misc_feature (189)..(189): n is a, c, g, or t
  misc_feature (249)..(249): n is a, c, g, or t
gtgtgaataggcaagcactttgtttgttgtactaaggaactcaaaatgataggctttttgtcaccatgtgcttccaggntctctgttgcatgagcagagatagaggatcttgcacaaacaattaaatgctctagccataagtagtgcaagtttccnttgcttgaaatttactgctgatagccacttggncacaccttacttccagaggctaggaagtacagttttcccacagtctaagaatgaaagagnattaaccacagtaatgcatagcactcataccatggatgactggataattttaaaagaatgggaatatgcaag

SEQ ID NO: 411087 - DNA, 393 bp, Homo Sapiens
  misc_feature (42)..(42): n is a, c, g, or t
  misc_feature (98)..(98): n is a, c, g, or t
  misc_feature (214)..(316): n is a, c, g, or t
gcagaggcttaaagagtgcttattcactgaggcttgcccttncttactccttcctgggaacccatttggcaacaagtgaagaaacctaggccagcctncttgaagatgagggaccaacggagagagaggctctgctgtcctagccctcccacagaataagtaagcctagccaacaccacgtggagcagagatgaaccatctcagttgagcccannnnnnnnnnnnnnnnnnnnnnnnnnnnnnnnnnnnnnnnnnnnnnnnnnnnnnnnnnnnnnnnnnnnnnnnnnnnnnnnnnnnnnnnnnnnnnnnnnnnnnnttgggatgaccccaattacttgaacttctcttaggcctgttttatcacgtgcaaataggggataattttagtaattt

SEQ ID NO: 411088 - DNA, 396 bp, Homo Sapiens
  misc_feature (42)..(42): n is a, c, g, or t
  misc_feature (79)..(79): n is a, c, g, or t
  misc_feature (246)..(246): n is a, c, g, or t
cccaccaattgccattaaacctcccaatctttactgggaggntctctacttactgtttcaaggcaaaaagatgattaanctatctcacatggttgtaatttgggcctaaaataaatgactctagtggtagcatttcatgtaggcaggtccaaggaagacagatttgtagacagagttgggaaaagggtcaaagagccaatgagtctccctatcctgagggatgccttgacggagccacagcatganctcatgttttcctgaatccatctcagttcatgtgacaggatggaaatgcttcctttcttagccagtgttgcttgtaacgagttccctgcagctcagggaagggagcaacatgtactgctttgttgcttcctgtatagagaaggcaggaat

SEQ ID NO: 411089 - DNA, 340 bp, Homo Sapiens
  misc_feature (28)..(29): n is a, c, g, or t
  misc_feature (244)..(244): n is a, c, g, or t
gggcactgacttcctgggagtgtaagcnnctcacctggaccccacagccagtgagcattagtgcttatattccatcctccaaagctctttcttcataccagaccacacatgtggcccaaggagggatatttactctgcacttttagagttctagaaaacattgtttagtggtctggcatcatctatatttacttggcttgatttgggatagagtataatcctagtcctcgatgaaaggattttnatgagttaaccttatggggtgatgggatttatgggattatttccacccttaaaatgattttgtggggaaaaaaagtgtactaatccctaatttagg

SEQ ID NO: 411090 - DNA, 148 bp, Homo Sapiens
  misc_feature (61)..(61): n is a, c, g, or t
aggaaaaggattgatcacaggagaggtaccaagggagttcccagaataatagaaaagaggntcctcaagaagacagtcacgcaagagaccaagagaagagctaatccaattgatgcaggaggaagtagagcttcagaaagaatgtctc

SEQ ID NO: 411091 - DNA, 297 bp, Homo Sapiens
  misc_feature (142)..(142): n is a, c, g, or t
  misc_feature (261)..(261): n is a, c, g, or t
ccttgggaattgtttcttggaaattaaagcatgtgtctcacacaaacagtagaaggcattgagcattcattagtctttcctcaagaagatatcaaaatgagactagaaactctctggtgaacacagaatgctctgagggggnccaaggtacattatgaccttaaaacgaactccttctccactggccctattactcactgtggaaagcaccatgccaggcacagcaagagacttaagaacacctacaaaggaagatctctnccatccacttgtgtaattatctttaaaaagtaatcc

SEQ ID NO: 411092 - DNA, 313 bp, Homo Sapiens
  misc_feature (113)..(113): n is a, c, g, or t
  misc_feature (167)..(167): n is a, c, g, or t
  misc_feature (260)..(260): n is a, c, g, or t
cgaattagtgaactgtgcttcaggttcaggaacctggtcttagctccttgcctgctgagattttgagttacaagtagaattctccaaaagcaaaacacgtaaaagtcattttnccactcttttggtcaagcacatgtaagctttcaggaccaggtggtatgccgttnctgaaagtgagacacatgccccagggaaagggtaattttaaaattcttcccataggtcctcatcctgttcctctgctatgtccagcatccttnagtcccagctgcagggcctatatttaaataccctcatgctttatcgcttttgt

SEQ ID NO: 411093 - DNA, 341 bp, Homo Sapiens
  misc_feature (16)..(16): n is a, c, g, or t
  misc_feature (22)..(22): n is a, c, g, or t
  misc_feature (49)..(49): n is a, c, g, or t
  misc_feature (54)..(54): n is a, c, g, or t
  misc_feature (254)..(254): n is a, c, g, or t
  misc_feature (272)..(272): n is a, c, g, or t
  misc_feature (280)..(280): n is a, c, g, or t
  misc_feature (283)..(283): n is a, c, g, or t
  misc_feature (305)..(305): n is a, c, g, or t
gatttaaaagcaagtnattttnaaatccacgaaagatgcctaccttggntcctnctctggtccttattagccacacctctcttgacaggcagaggagttaggagtgaggggatattcccaccaagaccctacaaattgcactcttaggccatgccctgggtacccaaactctagaattccctcctcaaagggaccttaacccaacttcagagcctatataggccaattccttggtccattttccaaggggtggncaaaggacaaccattttngggagggngangggagtaggatgaagctttggncacgtgggtcttgggcaaatcccacatatcccggaa

SEQ ID NO: 411094 - DNA, 303 bp, Homo Sapiens
  misc_feature (59)..(59): n is a, c, g, or t
  misc_feature (87)..(87): n is a, c, g, or t
  misc_feature (163)..(163): n is a, c, g, or t
  misc_feature (227)..(227): n is a, c, g, or t
  misc_feature (261)..(261): n is a, c, g, or t
  misc_feature (279)..(279): n is a, c, g, or t
cttcatatttttatagctggggtcaaaatatgcaatttaaaaataaatatatccatttncctattcttacatttatgaatataaaantaaaatctaagaaacataatgctgccaactaatagtagtggaggaaaggaagctgagagaaagataaatatattantttaatcattactcagaaaaggcagtaaaagatactatctatagcaggcatcaataaatatganccatgagccaaatcaggcttaccacctgattttntaggataaagttcattgnaaacacagttacagtgtctttcca

SEQ ID NO: 411095 - DNA, 277 bp, Homo Sapiens
ctgccatagttgcgtcagattgtcagaaaattatgttgtacatctgagagagaaaagaagagccttttgaggagctgcgctaaaattattttttgtttagtctcttaactctttggcttgaatgagtcattgactttccttgccaagatagggttagcatttgttttgtgttttaaaagcaggccaagggattgccacgaggggagacaacctgagcaactgaaggaaggaatttctagaaattgtgtttaccagttgttttagtctgaatgtgatt

SEQ ID NO: 411096 - DNA, 364 bp, Homo Sapiens
  misc_feature (273)..(273): n is a, c, g, or t
  misc_feature (314)..(314): n is a, c, g, or t
  misc_feature (345)..(345): n is a, c, g, or t
aaagaaaacctggtattttcaccatcctctctgaaaataaatactttgacttgcactgattactacttcatcagcattcaactccgctccgtggcactctgtgtgaataattttaaaggcagattaagcattctaaaaataaattctattggtaaattaggatatcagatgcttccattataaaagcctatcctattctgtactctcagctggcagtcatatccagatctcaagctactctggctcttattgaacaagaacctattccagggngtgaggttttgaagaggggatctctcatggttaactagagncaggaagaggcagaattgcccacatactctngcaggagttaaataacaat

SEQ ID NO: 411097 - DNA, 354 bp, Homo Sapiens
  misc_feature (315)..(315): n is a, c, g, or t
gcataggcagcccctgctcttgcatttacctcccacgtgaactagctgctcagtcattgctctggaatatggagttgtgatctagaaattaaagatgggattaggtaaccagtgaggtcccttctactgccagtgtatgactctcttctttgtaaatgtcatatgtagggttctgtacacaggacattttcttcattgtagttcctcagatgcattgagctctcctgaatgacttagcggggaagctcagttgcagctgaccgtattaagggtcctctcccattgtgctgtgcccgctcgttagcgtaggattcntgccccacggcccttcctgttttctaagggcttggcttt

SEQ ID NO: 411098 - DNA, 350 bp, Homo Sapiens
  misc_feature (21)..(21): n is a, c, g, or t
  misc_feature (30)..(30): n is a, c, g, or t
  misc_feature (112)..(112): n is a, c, g, or t
  misc_feature (116)..(116): n is a, c, g, or t
  misc_feature (185)..(185): n is a, c, g, or t
  misc_feature (210)..(210): n is a, c, g, or t
  misc_feature (309)..(309): n is a, c, g, or t
ggggaggcggtagggtctgcnctgtctgtnaggggcttgtggcttggcgggtgggctttgcatggtctcgcctcttgagtccagccccgtcctgatggggcagacttctgtncgtnctgcttcctgggtgatgtcaatactgaatgagagggcaagagaaggggaaagggaaccgcccatatgtncttcacgtgctgcaagggggctgtntggttcccatgaaatggtcagcagagactttgggatgggtatgactcgtgggtcacagggttgactagacagaatctaaagaaggtgggtgcttagctnggaagtcttcagtaggaacggatcactgtgaagctctaggg

SEQ ID NO: 411099 - DNA, 391 bp, Homo Sapiens
  misc_feature (14)..(14): n is a, c, g, or t
  misc_feature (80)..(80): n is a, c, g, or t
  misc_feature (126)..(126): n is a, c, g, or t
cgtatgtatctttnatttacactgcacaccttgcagcatccttaccttgcagagtactgagtcctggcttcatgaatttnatgtcaagtaaatgggttttagtcatccctagttcatgtgcatgtnccgagaaaaaggggagcttctaaaacatgtgcgcaaaccacaggaaacagtgcaatcctgtgtgtctcctattccacttactcctcaaggccccaaggtaggacgcatgtttggtggctttctggcttacaagttccagtgcctactcccattccctcagaggtttgctgtgatcactgaggggaagcagaatggagcatcgtgtggtccttactggaggactccttgcagcacctgaaacaacccaatgttgttagaggcaaat

SEQ ID NO: 411100 - DNA, 313 bp, Homo Sapiens
  misc_feature (43)..(43): n is a, c, g, or t
  misc_feature (145)..(145): n is a, c, g, or t
  misc_feature (199)..(199): n is a, c, g, or t
  misc_feature (283)..(283): n is a, c, g, or t
  misc_feature (303)..(303): n is a, c, g, or t
aaggtccttcccaggcttctcgcaaaggaaggcactgcctctncacaccttgtgaaacctttccaggacctcccagtcagaggccgtctggttctcactgtctgcagagcgccctacagcctgtctgtgggtgagcgtgtctgtnaactcttgtccatctcttctgtgatctgtgtgctcctcgaaataactgattttntctcatacaccttggaatcctgagtccacagaacagaggctcatacaaaggaagctttcaaagagtgctcatcgatttctaggnttcttgaagacaggcaccangttttgttct

SEQ ID NO: 411101 - DNA, 307 bp, Homo Sapiens
  misc_feature (39)..(39): n is a, c, g, or t
  misc_feature (66)..(66): n is a, c, g, or t
  misc_feature (196)..(196): n is a, c, g, or t
  misc_feature (243)..(243): n is a, c, g, or t
  misc_feature (278)..(278): n is a, c, g, or t
  misc_feature (286)..(286): n is a, c, g, or t
acaaatgttagctttctctggcctagaaaaagaataggntcatcaagtcataaaacgaagtatgtnatttcagcacctccacaaaatggcttcatcaaagaagagaatcccatcacatgttacctctcctctctaggttcttcagctggggctttgcctgcccctctacctatggcagaacccactgactcgtggnctttccagcacttccacttgcctccattagacacttaaccccgctgnccgctgcctcatgccagggagggccaatctccagncaatgctnctgctggctgtatgatgactg

SEQ ID NO: 411102 - DNA, 303 bp, Homo Sapiens
ggttgaggttgtgggtaggatgagaagacgacaggatgaatcttaccccccagctttagtggaattctgtgaaacacctgggaatgtgttagcatcaggagaattcctctaaggtatgaagaatgacaacctgggacctttcttgtaggtggctctgaacctaactattccccaaagattcccaagtggtaggaaggagggggtgcagagggatattaatcatggtcattaagtctcaaaacatttctacttcaagtgaatacattaaccatgctgaggcagttgaacaactgaatgcgtagt

SEQ ID NO: 411103 - DNA, 338 bp, Homo Sapiens
  misc_feature (215)..(215): n is a, c, g, or t
  misc_feature (317)..(317): n is a, c, g, or t
gggctgctcgtgaggatgggacagcattgacttactggggagactcccttgatgacagccttacacggttattcataaggaggcaggaagaggcgctaacagtaagcatgttctgggtggtcttcggggtgcacatgtgcagcagctgtacctgcttgcttgtatgttacatgtctcattaacatctgaaatctccacccgggagtgtgtttttnactattataatgagcaaaggttcagtctgaggacaggtaaaatcaaaaatgtgcaccctcttacgggggaaattccttactggagctagtttggcttgaagngaactggactacagtgtgaat

SEQ ID NO: 411104 - DNA, 335 bp, Homo Sapiens
  misc_feature (136)..(136): n is a, c, g, or t
  misc_feature (300)..(301): n is a, c, g, or t
atgcctctggcttgtttgactgcaaaaggtgatgtgcaggggtagaggtagggtactaatttacagtcaccaaaattagtactgatattaatcagtttagttggattaagatgaacaatgtttaatgctttaaggntcattttttgccccaacaggactgtgctatattaaatgacaccgtgcccaaaagctcaaaaattacatagaaagtaaagtacttcttgaatactaaaacagttaagcataaaaggttgtgaattggtcccaaagtgatattaacttaaacatttaatcctacgnnctatcttagctgtaccctctaaaaatgcttagga

SEQ ID NO: 411105 - DNA, 347 bp, Homo Sapiens
  misc_feature (219)..(219): n is a, c, g, or t
ccacttcagtgcttctgtgtcccgaaaagatcttttgacgcatagggcctaactgtaatacacttaaaggataagtctccaccccaaggtgaacatgggtcatgtgttacacgcacattagttcattatccatgtgtgaggacctcctttgtgaacagtcacagctcctcctataacctgttaaatatgtatgtttgatcaacccattcaacttaaatncttgtcttacctctccttccctcaaagtgcctggctatacttcccagcctgcgggatggccaccttgcaggatggaaccctttgtaagaaataaagtctcctttccaaatgtacacattgtatgactt

SEQ ID NO: 411106 - DNA, 274 bp, Homo Sapiens
  misc_feature (90)..(90): n is a, c, g, or t
  misc_feature (233)..(233): n is a, c, g, or t
agtgacgatttagcaacctgaaaaccttgggtctttgggatatgacctcagtatcaacacagaatatttgaatgctggttaatatatttnttttaaactgtgatagaattgaaatcttgtagccacattttgaaagtttattcttcattaactagtcttttctcacctgattttctacaagagagaattttccaaaaggttagttgtcgttacattaagaacttggggtttgnttgacatgaaatgtttctacaccagcaggtctcagatgaat

SEQ ID NO: 411107 - DNA, 393 bp, Homo Sapiens
  misc_feature (257)..(257): n is a, c, g, or t
  misc_feature (335)..(335): n is a, c, g, or t
  misc_feature (349)..(349): n is a, c, g, or t
  misc_feature (353)..(353): n is a, c, g, or t
  misc_feature (380)..(380): n is a, c, g, or t
aactttggaggggacaccatcactcaaaccatagctgtaaatctattccttgagtccagatcacaaattaccaaatgaacacgttctccatttttagtacttttttacctgtaaccctctgtctacctaagatgaatatttattcattgaatgaatcatttaattttggtgccccaaaattctcagtgaaacaatttctggatacctctccatcactaagataatcactatagcagtgtcatattcttcaacttagnacaaatctaaaggctccatttatccctactagaagtgttctgttgtctttttcactctcaaaatatcctccatgcgcnaaccaaacactaangggnaccaccatatcttgctcaatggaggcnaaatcacttttta

SEQ ID NO: 411108 - DNA, 289 bp, Homo Sapiens
  misc_feature (99)..(99): n is a, c, g, or t
agaagaaaattcttaagcagagtacttaagtacaaaattgagtgactgaaagatgcttaatctagggaaattaaatgagaaaaatacatggtgtgtgtnttggagggggagctggaattggaatgggctggagtgatgaaaaaaagccaacagatatagtcttctgttttgtaatataggctcaatactaaattatgtaggactagataatctaggtcctaatgtctcctttttgctggcaacctgggggccaattacactagagggttggtagaaaaaagaggaatat

SEQ ID NO: 411109 - DNA, 388 bp, Homo Sapiens
  misc_feature (75)..(75): n is a, c, g, or t
  misc_feature (194)..(194): n is a, c, g, or t
ttttttaagcactcttgtgtggactggtcaaagatgttcctaaaacaacattgctgtcaccaagcctcccatganttaggctggctcctcccatgtggatatctgcttctgcatagttggtgaagaggaagcatcctcagtcaaagctaccagctgaggaacccttaggaaaccccgctggtacctggcctgtnttttgtaagtatacatcaggccagggggctgcttgccaagcaacatcattgactgcatactgtttagtgcatgcattaccagggctcaaacatccaagtgatgctacctgaataagtcgaggaatttttgataataaacataagccaaatccaaaaaaatgttctgggtttttccatcatttccactcattagt

SEQ ID NO: 411110 - DNA, 324 bp, Homo Sapiens
  misc_feature (226)..(226): n is a, c, g, or t
  misc_feature (255)..(255): n is a, c, g, or t
  misc_feature (258)..(258): n is a, c, g, or t
  misc_feature (309)..(309): n is a, c, g, or t
ctgttccacctcagatcatcaggcattagattctcataaggagtgtgcaacctagatccctcccatgtgctgttcatagcaggatttgcactcctataagaatctaatgccactgcagatctggcaggaggcggagctgatggtgggaaggtggtattgctcgctcgctcgcctactgctcacctcctgctgtggggtccagttcccaccacagaccactggtctntgactcagggaccactacctttctaacanggntgaggaaaacaactgggttcatcacacaattattttaaagttcaggttttncaaataacttatcca

SEQ ID NO: 411111 - DNA, 355 bp, Homo Sapiens
  misc_feature (40)..(40): n is a, c, g, or t
  misc_feature (318)..(318): n is a, c, g, or t
  misc_feature (324)..(324): n is a, c, g, or t
attactatttgcctctataggaggtttcattaggcatctncttcattatgagtgcaatataatcaaacacttatcagtacaaggcagagagaccgggactagctgcctacacatcctcaatgagctttaggaaatgtgaaggaaacatggactgaaaatcttctggtggcaggtactctcatgtgttgtcctatctgatgctctcaacaacctctaggggtagatattgtgaccctcatcttgcagaagccttggctcaagtatatgctcagaatcacagagctggaagataaacttgggtctctctagtgccagagnccatgncctctgatctctcaagggcagaggtattacc

SEQ ID NO: 411112 - DNA, 270 bp, Homo Sapiens
gaaattacccatggtcatatctagcctacaaagaagagaaaatacagtgattcaagtttcattgtattcctctcattgatatatttatcaaccttccaattgaaggaagtgtcttctaggcctttacaaagaatgtaaccagggtttaggtatacaagttgcatatgataaatctgtcatgtttctatataaatctgtccatattcctcttctgaaatgcattatttttgggggaaattaaaatgtgatgcaaagatccttatactttgt

SEQ ID NO: 411113 - DNA, 314 bp, Homo Sapiens
  misc_feature (107)..(107): n is a, c, g, or t
  misc_feature (202)..(202): n is a, c, g, or t
  misc_feature (247)..(247): n is a, c, g, or t
  misc_feature (262)..(262): n is a, c, g, or t
  misc_feature (268)..(269): n is a, c, g, or t
gtgaaggaagtatgaaaactgagactaatattatgaagtctttttttaattctttatcttattgcccatttttaaccccttggtgtttgaaatggaaaataaatatnctcttcgcgatagataatatgtcaataaccaaaaggtggccttaaccaataattggcccaactttaaattattaccctaaagatatataaattanctaatctaaaattaaatgcaattttgctatgacttaaagtgtcantaatcctgtataagngatccnntttatgcagtcacttaggcatgaagttggcaattcatctaaactt

SEQ ID NO: 411114 - DNA, 147 bp, Homo Sapiens
caagagagacatagcaggcattgaaacaatggaaatgcccacatagcagaagggagtgaggggatccaaactacaagagcgacaaaatcaactgtggatccagagacgaaaaaatgttctgtagtgcaaaggtaatctggtgagatg

SEQ ID NO: 411115 - DNA, 278 bp, Homo Sapiens
  misc_feature (42)..(42): n is a, c, g, or t
  misc_feature (107)..(107): n is a, c, g, or t
  misc_feature (146)..(146): n is a, c, g, or t
  misc_feature (206)..(206): n is a, c, g, or t
gggttttggttgaggtttctacctcattatccaagatatttnctttccagccagcagaaagaaaaaggagaagagctgccaccctttgtatccaggatgatctcttnttgaaatccttgatttaattatatctgcatgaccctttncccaactaaggttatatccacagttaccgggggttagcactgggacatcccttattttangaacatgtctcagaaagttgcacaaaaaacttctactacatcccattggccaatacttcttacatgatgaca

SEQ ID NO: 411116 - DNA, 403 bp, Homo Sapiens
  misc_feature (368)..(368): n is a, c, g, or t
attttgaatcatattttacttataggtttgctgtatatactgattaaacttctgaacctaaagattctctataattaaactagcacaaatataatctgtcccttacccacattgtaagaatgtctggtgggggaaatccaatattgaccttcacattccacatggaaaatctttgtccccagagtgcaattagggtgattaaaaataagcagcttttgtgagtctcaagtttgttccccaaacaagcagcatcagcaactggaaatttgtcagacatgcaaattatccagtcccacctgagacttcagcccagatctatggatcaaaaattttgggggtgaccctgggcaatatgggctttaataagnccctaggatgggttctgatgcatgctccaaatttg

SEQ ID NO: 411117 - DNA, 442 bp, Homo Sapiens
  misc_feature (21)..(21): n is a, c, g, or t
  misc_feature (51)..(51): n is a, c, g, or t
  misc_feature (139)..(139): n is a, c, g, or t
  misc_feature (182)..(382): n is a, c, g, or t
  misc_feature (389)..(389): n is a, c, g, or t
  misc_feature (393)..(393): n is a, c, g, or t
  misc_feature (428)..(428): n is a, c, g, or t
aatctgtgaacatatattttnatttatcttaaatacctaagagtgaaattnttggttcatatgtgggtatatattcaactttgtaagaatctaccaaaatgattttccaagtatatgtataatgttatggtcatcaganctacatgatagttagagttggttaacatactcactgcaatggnnnnnnnnnnnnnnnnnnnnnnnnnnnnnnnnnnnnnnnnnnnnnnnnnnnnnnnnnnnnnnnnnnnnnnnnnnnnnnnnnnnnnnnnnnnnnnnnnnnnnnnnnnnnnnnnnnnnnnnnnnnnnnnnnnnnnnnnnnnnnnnnnnnnnnnnnnnnnnnnnnnnnnnnnnnnnnnnnnnnnnnnnnnnnnnnnnnnnnnnnatgaaanggantgaagtggtatacaagaaacaccacaggttaaccnttgaaagtatatta

SEQ ID NO: 411118 - DNA, 337 bp, Homo Sapiens
  misc_feature (18)..(18): n is a, c, g, or t
  misc_feature (43)..(162): n is a, c, g, or t
  misc_feature (187)..(187): n is a, c, g, or t
  misc_feature (213)..(213): n is a, c, g, or t
  misc_feature (243)..(243): n is a, c, g, or t
aacagactttggagccantcccatgtgagtttgagtctcagannnnnnnnnnnnnnnnnnnnnnnnnnnnnnnnnnnnnnnnnnnnnnnnnnnnnnnnnnnnnnnnnnnnnnnnnnnnnnnnnnnnnnnnnnnnnnnnnnnnnnnnnnnnnnnnnnnnnnnnatgtgatttgttaagtctaatacgnaatagatgcctatttgagtgtttctnatactcaggatggttcttgggatatatttncccatggaacaaaaagcagactactcatgaccactcggattttatgttcagccacattagggctcttatggcctgacctgaagacctaccattt

SEQ ID NO: 411119 - DNA, 267 bp, Homo Sapiens
  misc_feature (103)..(103): n is a, c, g, or t
gtcttgtggacatttacgtggtatctttagagcaaacacagagtggttgcataagctgcagtgttttagtatcggtgggactgtggcatggcgtagaggagtnacagtcgcaaactgatggcccagctctgaccctccaggcaagtggactccgaggagtaccagcagatcttcccacatgcgtcggggagggctctggggagagtcagtgggcaggagagggtcagctgtgcaggctccagggcccagccccgtgctttcccctct

SEQ ID NO: 411120 - DNA, 384 bp, Homo Sapiens
attttaaatgacattttatttaggccaggggaccaggtaacattatttttaggaggagagcaaaaggtgttatattactgcttctaattacctagaaggaaagcatttgctacactgccattatgattggctgcagcagttcaacctggctctcggaatctgccattagcttgacagcatacagagcaccatatcagggttactatgggaagactctattgtggcatcagaaacacaaaaaacactggatacagttagtttctgttgacagtttcagaagaaaatcccacagattggacaggctgcctgctgaaagggttgtcactacacacagcatgccctgaaccctgggaatgaagttacccctatctgtggtgatcagga

SEQ ID NO: 411121 - DNA, 325 bp, Homo Sapiens
  misc_feature (220)..(220): n is a, c, g, or t
  misc_feature (254)..(254): n is a, c, g, or t
gagtgtccagatgatggcagtgatggcccatctggagcggctgctgtaaggacactggctgcagcaggggaggcacagccaggcctgcgcactaggcagagctggtgtgggagccaggagcagatgagagccccgccttctaccaagttggcagtgcagaaggccgcactcccgggtgctgatgccgagttcagctccagaccctggcatccctgggctntcaggggcccaggaagccccccacccctgcaggnttcaaagggcctgcttcccactccttggcctttccctcctcctgggaaccattctggggcagagcaaagct

SEQ ID NO: 411122 - DNA, 315 bp, Homo Sapiens
  misc_feature (89)..(89): n is a, c, g, or t
  misc_feature (184)..(184): n is a, c, g, or t
  misc_feature (187)..(187): n is a, c, g, or t
  misc_feature (243)..(243): n is a, c, g, or t
agagatcaaatgtcttaaacattatggaataggagtgtatgactgactaacatccagtaatcattagggaaaacaaacatgagtgaggncaactgaaataattatgatacaattaagggtggtaggttacatttgtatagttctttaaaatatgcattattccacatgatcagaaatataaaanganctagacagatactggtagagagacaattaatttaaatttgtaacatattgcttggngcaagcattcaagttgagtgcttaatgtgtatcggtgactgcactgtgcaaataaatttggggttagtaaga

SEQ ID NO: 411123 - DNA, 400 bp, Homo Sapiens
  misc_feature (149)..(149): n is a, c, g, or t
catcaagctgggaatgccctaaagtgggggcgtgaggaagagaaggggtgatacctagaggctggggtatctctgtcccaaggagacaaactataacaagacccagcaactgaagggttaacacctagcacagacgtatacctccaggntcctagctgcatttctaattctgcttcatctatgcttgagcactacttgttgttaaatatacttaatatcactcttagctaatttcctctatgtagatttttatttatttctgagggcaacccaacttccaggctcttggaaggaaatagactgcagcccctaagtgtgatcaatacttaattataacaataatcactaataataacttgtgctgcttcattgtaactaaaatgtacacttttacattttt

SEQ ID NO: 411124 - DNA, 286 bp, Homo Sapiens
  misc_feature (66)..(66): n is a, c, g, or t
  misc_feature (259)..(259): n is a, c, g, or t
ctagctctttattacaccaagacagcttcacatttttatttatatattgtacatctcatgtaaggnattaccgtatataagctagtgtcataacttaagtagccacattcattcagtatgttttatgttttctctctgactggatctctgatacattctttcctgttctagctgcttttatgcaaaagggcattatatgtttgtcaatcaaccaggcttctgtgactgtttagaaggaattatgtaaatatataatccngtggcctgtttcactttggccatgttt

SEQ ID NO: 411125 - DNA, 294 bp, Homo Sapiens
  misc_feature (22)..(22): n is a, c, g, or t
  misc_feature (132)..(132): n is a, c, g, or t
  misc_feature (273)..(273): n is a, c, g, or t
ctgtgtatatttagtatctttnattaagaagactggttgatatttgccttcagctaatttatagaaaggatgatcatcaatgtctctagttttcttctaagtggcttgtctgtgcaggtacatataaaaatncaactatacaaatagctggacagttgagtctcaactatgaaaatcttttctgggatcaagatctaagaagttggtgtgtgtatgagtgcaacccatcattctatcccctaaaaatctggggtttctcagcccaaacattcncactagtaaagtcaagtttca

SEQ ID NO: 411126 - DNA, 406 bp, Homo Sapiens
  misc_feature (386)..(386): n is a, c, g, or t
tttaaatattaagttaagtatataacttgccctatgccatattgctttaatcaggggactgagcatcacatttagatttgatgagtttgggaaaagttctcaaacatccagacccatggaccttaagaattactgcagaaatctccttcaatatagtcatagggagcattaatgcttttgtggtactaaacatatttttgagcttagatacaaatccttcttgtcctgaactgatagggtaggaattgtttaggtgcttcaaatccagatctttcaggggttgccacctaaactcatctttatgagtaactctagataataatacactttggtatcttccaaagtgcttatctaggcatggaaaagttcagtaattatcatgaggncctgtttttaggttaggtcc

SEQ ID NO: 411127 - DNA, 391 bp, Homo Sapiens
  misc_feature (79)..(79): n is a, c, g, or t
  misc_feature (131)..(131): n is a, c, g, or t
  misc_feature (179)..(179): n is a, c, g, or t
  misc_feature (199)..(245): n is a, c, g, or t
ctgtctcttatctgggcaagctttagacatactagcttggttggaaactgatattaaaagcctaaaacatgtaactttncttatcaggttactatcatggggaactaaagattcctggttttttgtatgtnccataactatactttagtaagccctgatatacggtgttaattttcctncagtgaaggaaacatgaagnnnnnnnnnnnnnnnnnnnnnnnnnnnnnnnnnnnnnnnnnnnnnnntcaaacatgcactcagaggaagttagggagagaagtttctagctaaacatgatcttgtgaaattcttccatatgtggaaaagtcgtcagttcatctgacatagagcaataccatacatatatacacacagggtgctatggtataca

SEQ ID NO: 411128 - DNA, 410 bp, Homo Sapiens
  misc_feature (310)..(310): n is a, c, g, or t
  misc_feature (316)..(316): n is a, c, g, or t
  misc_feature (343)..(343): n is a, c, g, or t
tcatcgctgtcctttcctccttgtcagagtcagtgacactgacattaaggtcatcgaatatcaaccaggtcctgaggaccttggtgtgtttcctcctctcctagtctccagaccccagcctgttcattcctgagcttcctctggcaccccttccttggggccaagccaagtaagaaatcagcaggcccaaggtggtgcttgggaggccggggcagtgccaggggcagtcctcataccatcctcccactggcttccctcctgcctgctcttagccgccacacatatctcagctgtcgaatccgattagggnttctgnccagtgagccagacaaggaggccactnggcaggggagagagagacaaggacgccaagcagggattggcagaaggaaggtggagacatggctcaa

SEQ ID NO: 411129 - DNA, 422 bp, Homo Sapiens
  misc_feature (83)..(83): n is a, c, g, or t
  misc_feature (222)..(222): n is a, c, g, or t
  misc_feature (247)..(247): n is a, c, g, or t
  misc_feature (312)..(312): n is a, c, g, or t
  misc_feature (326)..(326): n is a, c, g, or t
  misc_feature (357)..(357): n is a, c, g, or t
  misc_feature (361)..(361): n is a, c, g, or t
  misc_feature (383)..(383): n is a, c, g, or t
  misc_feature (411)..(411): n is a, c, g, or t
gagggttggagacaggagacagtggggtgggaaatccaaatctcaactgcttttgtactgtctcctgctcccgagtgccccanagcccatgcagaccctctgctgtctatgatatcctgttcagccctcaactttctctaccatccctgcaactggggttcactgtgagccaaaccagtttgcttcttgttttctaaaagcaggcagcccttcaggactgtntcattcaaggcatttcccacctctnttctccactcatatcccttcccaaactgcctttcctcatttctccgtctccagggagagggactncaggctaccacagncaaaaatggtggtcttcagtcctacgtaagncaanctgtgtgagtgtgtaaggactnagggttgctcacaaggggacacacagangtggatgccag

SEQ ID NO: 411130 - DNA, 390 bp, Homo Sapiens
  misc_feature (211)..(211): n is a, c, g, or t
  misc_feature (320)..(320): n is a, c, g, or t
  misc_feature (328)..(328): n is a, c, g, or t
  misc_feature (333)..(333): n is a, c, g, or t
gttgctgactgctgattggagatgacgtgtacccatcctctagacagtctgtgcttttcctgtctttggagcttccagttccacccccatcagtttttttctgaccactccatcttgccttatttctctctctttccttttgactggaagagtactcatcttttctaacatcttttcataaactgttttgatttcacttatattgattttnaacgtataatgtgctggtgttctatttcctcagttagatcagaaggcccctaaagacagggctccattggtgttaaactgccatcttcaaggtctgggacttgatttcncttttttnacctncacaacaaggcactcctcttgcacccagtcggaatttcagtgcctgtgggtcaaagt

SEQ ID NO: 411131 - DNA, 201 bp, Homo Sapiens
catcgtgtatgaaggtagccattttgtacatgttaccttgttaaaaacaaaagagcagcaacatgtttagagtggtgtctatagatagaacactgctgttatgtttaaggaaaattggggcgggggcagaaaagatcaatatgactagttagaagactattaaggagaactttgtacatgaattatggatgtaagaattag

SEQ ID NO: 411132 - DNA, 318 bp, Homo Sapiens
  misc_feature (281)..(281): n is a, c, g, or t
accctgtttgggtaaggcctattgacagaagccagatatctgggtggaagttagaagatgggcaaggaattcttatctcagagtttcaacactgcgacaatgtggagagaagtctcctgggaaaatgcagatgcccaataacttccaaaagaatcagggaagttggagtatttttgagatttacagtgtctttacttcagtaaaacaagccacagcaacattatgctctgcagagtcttctgttcacctttgggatggaaaagagctgcttctcctagggnggcaactaaggcccaggaccaaaactcccatctccta

SEQ ID NO: 411133 - DNA, 295 bp, Homo Sapiens
  misc_feature (216)..(224): n is a, c, g, or t
  misc_feature (279)..(279): n is a, c, g, or t
ctgcaaacccttcagcatttagctaaagttatttcacaattcaatgcttgtcttgcactgtcctggtcatttaaaaactggtatctcttcaatagcaaatagtatcataacagaccactaaatttggagggaaagtggtttctattgcagatggatgtaattaaaattggtgtaaatcacagggtacagaattcttatctggtaagaattctgacnnnnnnnnnaaagaagaaaaaatatatccagatctgtatccacatgctatttaaatgctcaggncaaaaagaagccacta

SEQ ID NO: 411134 - DNA, 303 bp, Homo Sapiens
  misc_feature (269)..(269): n is a, c, g, or t
gacacagtttccagtcctggaaacctttagctaatctttagcattccttcaatggtgggaatgggcaacagatcaccatagtattaatactctgtgtaattttatcactagaatggttaatttccatatcatagtagagctgttgcagatattttgaaatcccattatactcactgccacttcaagattactgtagttgttagaacagctgctagatcttattacttaataaattaataaagtgtgaatataactatataaccattttnaaaatgttttttggataactttcaatataattgg

SEQ ID NO: 411135 - DNA, 282 bp, Homo Sapiens
  misc_feature (146)..(146): n is a, c, g, or t
  misc_feature (270)..(270): n is a, c, g, or t
ttgagtactcatttgaggactgcagtcatagatttaaagtgtaatcagtcaactcagtggaattactttctccattaatcttaaattgcttcaggactgtttcagcctaagccagtagctgggtttaaccaaatttgaagattttnctaggagagtttggcacgaggagagaggggcaaaggcgtgtaaggcagtgtttataacagtggcccatggaattgatcatgggtaaagagaaaacaaggacatgcgaggaggtgataaatagancaaaacaaagca

SEQ ID NO: 411136 - DNA, 341 bp, Homo Sapiens
  misc_feature (186)..(186): n is a, c, g, or t
  misc_feature (239)..(239): n is a, c, g, or t
  misc_feature (259)..(259): n is a, c, g, or t
  misc_feature (276)..(276): n is a, c, g, or t
ttctcatgtctgaatttcacacgcacaagtctgaaatgtgaaggtttcttaatgttggttttatggttcgtgtaagatttttgggaaatgaagggctcttcattaggataaaatggtcttaacttcccagagaagaatttcctgacaacgtggctgaagttagatacaaatgttaatatagaagantgcttttatttgaatttctagcaaatggttttcaactactttaaatatgaccnacttgaaagtattattcctnttttaaaactacttttnatgtatagatctaaggtctgcttgaagctagtaggttaaagtgtttgagaaataaaggcaagatt

SEQ ID NO: 411137 - DNA, 270 bp, Homo Sapiens
  misc_feature (156)..(156): n is a, c, g, or t
  misc_feature (186)..(186): n is a, c, g, or t
ggagcagggctgggagtcagtgggagattgggagtccaagtctggacatgttacatatgctatgtctattacagatctgagtataaatgtgaagtggagttttaccacgtgattctgaagttcagagaagaggtacaggttagagataaagatttnggagtcacaaatataaagatgtatgacttnatgagattaccaaggaagtggagattaatagcaaaaagaaaagtttcaagcttcaagccccgaagcattctaatgtttacagct

SEQ ID NO: 411138 - DNA, 347 bp, Homo Sapiens
  misc_feature (169)..(169): n is a, c, g, or t
  misc_feature (228)..(228): n is a, c, g, or t
cctgtacttgtcgtccctcattcacttaattatgatacttgcctggcatcttgcaggtttctgatgctgttaccccagtatagaccaagtgcagacagaatttcatttctgctttattaaggcacagtcttgagaaacccattggcttcacacacaattaattaatttntggcaacaagctactatattggcttgcatgtcactttcacctctctgggcattagtttnctctaatatttataaaagaaggacatgactttctaaggttccttgcagtaattatgcagttctattctaatagatgcttaagcataaaacccattttaatactgtcccaaggatccagg

SEQ ID NO: 411139 - DNA, 463 bp, Homo Sapiens
  misc_feature (14)..(14): n is a, c, g, or t
  misc_feature (83)..(83): n is a, c, g, or t
  misc_feature (366)..(366): n is a, c, g, or t
atcagcagattttnctctggtgaatgtctaatcagtgtgatttccataggctatacttaccttttgggggctacttgccaatnatgtttggtcagtatccttgcaaacaacagagtgacagattctaaaaatgactttgcaggccagtactaagaaagacaccaaggttcatgggcttgcaaataaaaagtccataacttccctgccctacttcaccaagtgaaatcgagttcctcacacttctgcacacagctctttcaggatcttcccttcccttcaaggctgtctgatgttcagtttaatttgattgtatttgtataaagtgctgagtgttgagtcctcaaagaaatttactttcagtctaangcccccttgggacaagaaagtggcaaccaggcaaatgattgattacttatttgtttgagtatcactttgtgattgtcccagggctgtattacacata

SEQ ID NO: 411140 - DNA, 287 bp, Homo Sapiens
  misc_feature (34)..(34): n is a, c, g, or t
  misc_feature (117)..(117): n is a, c, g, or t
  misc_feature (185)..(185): n is a, c, g, or t
  misc_feature (190)..(190): n is a, c, g, or t
  misc_feature (220)..(220): n is a, c, g, or t
  misc_feature (253)..(254): n is a, c, g, or t
ttgaggaagttctgttgctggtgaggaaattctnttgagttctgtaggaatttttatagcttgttttgcattcagttctatcaacaagccagcagcaactcaaagggaagcctcctnctggcatatcaatcacacaggcacataggatcatatagcatataggatcagtcccaagaagaactatngggtnggggagaggtttttcttccacttcttgggnttcagtgactttgagatggacctcttttttccnntggacaaaatgtcatcacaccaacatcttattg

SEQ ID NO: 411141 - DNA, 168 bp, Homo Sapiens
  misc_feature (137)..(137): n is a, c, g, or t
ccaatgagtgtggaccctaaatttaaacagctaaagctatagtctaaggacagtctcaaataaatacctttgaattgtcatatggtgcccaggagggtcttgtggaaagggtttcatggtagtgaaagatgtaatanctcttttttccttttaaccctaagcctgtcc

SEQ ID NO: 411142 - DNA, 362 bp, Homo Sapiens
  misc_feature (120)..(120): n is a, c, g, or t
  misc_feature (178)..(178): n is a, c, g, or t
  misc_feature (188)..(213): n is a, c, g, or t
catgtcatagtggcctgctctcctaacacagcacaatttagggcatattttcatgatggtctatcactggattacaacacatctcttcattaaagtcttgggaaagaggcttcaactttnctgtgttgagaaaacttcacaggtgtgtaaagtttgatcagtatgtataatatatttnattacatatnnnnnnnnnnnnnnnnnnnnnnnnnngcatacatagcaggtgtatatacttatgggttatatgagatattttgataaaggcatgcaatgtgtaataatcacatcagggtaaatgcagtatctatccatcaccccaagcatttatcctttgtgttacatacagtccaattacactc

SEQ ID NO: 411143 - DNA, 350 bp, Homo Sapiens
atttgtttgcaattgacaacacctcattaattgtaagcccagtgacactgcttgctgtttcaagtcacttttaaattacacacgtgctacttaatcttaaaagcaaaattaaacattggactggtttacatttcaagctacaatatggaaccattgtatttggaggaatgagtttaatatgcattgtaaaataaaattagggggtactttgcattcacagcggcttatgtaattaggttcagtcaactgtaatgtttcaggttaatgtcttccatggatgtatgctgtgtaaatagtgaacttacatatcccttaatacatctgaattattacataaatccttaatatta

SEQ ID NO: 411144 - DNA, 328 bp, Homo Sapiens
  misc_feature (37)..(37): n is a, c, g, or t
  misc_feature (215)..(215): n is a, c, g, or t
gggagacgagaactcttgagatccggggtcacctgtnagtcgctggacccaagggggaagcgtcttgattcctggaggaaatctccgaagtgatgtgtaaccctgtgtgtcgcctgcacttcggccgcaactgcctttggttcagtcccctgttcctgtaggaggcggggatcatgtaacagtggagcacatcgctcccggcttggacgcctttnacctttaagtgttcctgatttagtttggctttgggtctaccaagaattctagtcagttaactagctttttaagccaggttcctgaatttggtaggcatggacactcccagtag

SEQ ID NO: 411145 - DNA, 377 bp, Homo Sapiens
cacccccaactcttcaccaagtaggggccctggcttgcaattgcagaagagctttcccatccctgggtgagcatacctactggtagtggctccgtgattccctggggaggggctcccagaggtaaccaaccaaccctgtgctactgctatgaccacagttctgcttctgctgccctcaaactggggaagaaacaaagagcctgagggctttactcacgcttctagcactacgcagtcaccatataaagaggagcccagtctctcttccttgtgaacccttgacccccaactcttcaccaagtggggcccccagcttgggccagcagcacagtggccccaacccctaggctgaacattccagtagcagctgctccgcg

SEQ ID NO: 411146 - DNA, 331 bp, Homo Sapiens
  misc_feature (39)..(39): n is a, c, g, or t
  misc_feature (320)..(320): n is a, c, g, or t
ttatgacttttttcaataaggctattgtatcagcctgtnctctcgctgctaataacgacatacccaagactgggtaatttataaaggaaagaggttttatggactcacagttccacatggctggggaggtctcacaatcatggcgggaggcaaaggagaagcagagtcacatcttacatggcagtaggcaagaagagcatgtgcaggggaactcccctttataaaaccatcagatctagtgagatttattcactatcaatgagaggcagcatgggaaaaacctgcccctcatgattcaattacttcccattaggtccctnccacaatacat

SEQ ID NO: 411147 - DNA, 318 bp, Homo Sapiens
  misc_feature (15)..(15): n is a, c, g, or t
  misc_feature (30)..(30): n is a, c, g, or t
  misc_feature (61)..(61): n is a, c, g, or t
  misc_feature (133)..(133): n is a, c, g, or t
  misc_feature (161)..(161): n is a, c, g, or t
  misc_feature (292)..(292): n is a, c, g, or t
cttttttggtgattnctaagctctgttttncttatcctatatatatatgtggttggttttnattttaggattttaaggttatccctaataaattttgagatgtgttccatagctagcctgttgagatcttttnatatcaaaagttaatatctgtggatttntaatcattctttctacatatttaacaaagtcattagcaaaatattgaacaaaacctgttattcatatccttagatacagaacatcaatatcctgagatacagtacatcatcaaaatgtggtccccaaatgngcagcaattagcatcatgtgggagct

SEQ ID NO: 411148 - DNA, 323 bp, Homo Sapiens
  misc_feature (231)..(231): n is a, c, g, or t
gatggtaaacataaacccaaatatatctgtaattacattaagtgcaagtgaaccaaaacagttcagataaaagacagtacctatttcatagcattatgactatcatgaggtaatatatgtagagattagagtacacatgtcatattaggaggtgtgcaataaatgatactttattctgaagattaacataattcatacttaaaaggatcaagaactagaatattaaaaaantagaatgtgaatgtttctgcaagttttgataagaacaagcccataaattaatctctaatttgctacatttagggaatatgggtaatgactac

SEQ ID NO: 411149 - DNA, 207 bp, Homo Sapiens
  misc_feature (63)..(63): n is a, c, g, or t
  misc_feature (116)..(116): n is a, c, g, or t
  misc_feature (154)..(154): n is a, c, g, or t
  misc_feature (173)..(173): n is a, c, g, or t
aggccctgcgtgctgtgtcatcccatggcggaagaaggaagggcaagagtgggtgagattgtnagcacgagagaaggctgaacttcatattttaacaacccactttcatgattatnataatcttcgcatttatttttttcggtctcttcatgtnctctaacttttctctgggnttttggtcttttgcttcttcatttttagaagctc

SEQ ID NO: 411150 - DNA, 267 bp, Homo Sapiens
  misc_feature (20)..(20): n is a, c, g, or t
  misc_feature (34)..(34): n is a, c, g, or t
ctggtaacttcccgattggntttccccgcctcanccctttcccagggctattctcctcccacctgctgccaggcctttccctggccatcctgtgttaaatgtcatcccgcccctactgttatgttctccacagcacttgaacacgacccaacatgccttttcacttcaaggtttattcttctattagttttcccagagtctgcttccctagtgtccatctcccctgctcgaatgcctcttgagagccagtgcttgtattttggtcct

SEQ ID NO: 411151 - DNA, 167 bp, Homo Sapiens
  misc_feature (72)..(72): n is a, c, g, or t
ctaaacagatttaactccctcccagcaatccagattaatttaatatgctttcttaacggcattccgcatttntcattaaagcaaatgaacgtccatccctctctgataaattagggcaaaaaaattcatatgtttagggcatagggaaggaggagttgttggctgtt

SEQ ID NO: 411152 - DNA, 410 bp, Homo Sapiens
  misc_feature (332)..(332): n is a, c, g, or t
  misc_feature (342)..(342): n is a, c, g, or t
gatgcaaacagccccaaggagggaggtggaaaggccaaggggcttgccctcctgcaagcgcgcctgtaaacaagtccccgtggggttttgggaggtgcgcccacatctaagactgtgcgccctgcactccctctggatggcttgccgaatttggtcttcgctgatcaccaattctggaagggtggagagacagttggctggacagctgcctgattcggccatgacccttcacgggtgtctgtgggccaacaccaaacgccagcctgctctgctggcagggcttctacctgcacagtccctagggctgcaagagcaaatggggaccctggctnccggtccttnccagggccttggtcaatgacatcaccactttcttaggacagcgtcttggggagctaccggaactttcg

SEQ ID NO: 411153 - DNA, 396 bp, Homo Sapiens
  misc_feature (318)..(318): n is a, c, g, or t
  misc_feature (323)..(323): n is a, c, g, or t
cagaataaacatttactattaggagagtcaaatcatttattttcacatgaaagagattaagtaaagcagaatctttgatggtctgctgtgaattcttcgcagtgattgagaaatttctgaaaaccacttccaaatcaattataatattaagtaaactttggctttaggagtaagagagagaaggtctgcgtccatgttgggaaagaatagatatgcccacaataattagtctattacttgtttgaaaagggtgatttcctcgtcatttcaaagtattaagcaaataaggacatattgagtatgtaattcatggaaaantaagnaacttcttacagtatgattcctaaaggattatggatgccattatccattttggagttggtattgaagcttatc

SEQ ID NO: 411154 - DNA, 326 bp, Homo Sapiens
  misc_feature (22)..(22): n is a, c, g, or t
  misc_feature (55)..(55): n is a, c, g, or t
  misc_feature (72)..(72): n is a, c, g, or t
  misc_feature (74)..(85): n is a, c, g, or t
  misc_feature (288)..(288): n is a, c, g, or t
gaaatgcaggttcagctatttnctgcttgcagagtccagttaacaaaagtgagtnctggtataaagaaagtnannnnnnnnnnnnaaattattccaaagctagctgaggggaacaagtacaggcttcctgcctaggggtatcactttgcttttggagcaggaagtaagcacttttaaagggggcttaacatgaatggcacatggggtcgggggaagtaagcaagtgcagcatctacatgttagtttggtaccttatctactaggtagtcaaggtggtgactgcctgtntctttgtggggcatgtgtactttggggttgtaaattgg

SEQ ID NO: 411155 - DNA, 267 bp, Homo Sapiens
  misc_feature (124)..(124): n is a, c, g, or t
  misc_feature (184)..(184): n is a, c, g, or t
tctgaaggggaggctcgcagcatgtgtgtggcaggtcagacagacccaagagccagcttggtggggcatccctggctaccctggggacacagtgagcgccgaactaaataacatcaggaatggntcacaacgcaatgagtaaggggaatctgagtctatagggatacagacccagaggtaaatngccatggccacccactttcctacaggagaatgtgactagttgagcgtaggaacatgggaacaaatggtagaggtggctgacat

SEQ ID NO: 411156 - DNA, 369 bp, Homo Sapiens
  misc_feature (76)..(76): n is a, c, g, or t
  misc_feature (257)..(257): n is a, c, g, or t
  misc_feature (348)..(348): n is a, c, g, or t
gaaaaagagagaggagagggagtcaggagtgctttggaactggaggtttgctttccactgacaacatccatatctnctgctaatgccaacatgctcccaagtgtcttagtgggtcccacaaagttgatccagcccagaagagttgcagggacagtcaagaaaccagaggtgctgcccacatccccatcactccctttcccaacttcccagccttgccccaaaagcagcagctcaggacaacctgagatactactgtnatgggtccccgggaggaggacagcaggagtctgaactccagaggagggggaatatgggtaaaacagagagatggcaaggagacaagctgtncccagacagagggatgggagg

SEQ ID NO: 411157 - DNA, 409 bp, Homo Sapiens
  misc_feature (222)..(222): n is a, c, g, or t
  misc_feature (245)..(245): n is a, c, g, or t
  misc_feature (308)..(309): n is a, c, g, or t
gaaatttttcatcagctcttgtttcctctcattctttttgaccttgtagatttatccttttttcttaatttattctcacttaatgggatttcaggagcatattgactaagttttcatttttacatgtatactggggagtatgacatagacatctctgtacttagatattactgatgtaagtctactttgaatcaaatgaacagatgtttaaaaagtattgtncccaattgttttaatgatttctncctgtgagttggggtggtgctgcccatcaccaactcaggacgggtatttgaaaatacctgggnnaaattgtaacaatgtctgggaaaacactgcaggatattttaattgggcagaggggtcaaggggatggattaaccattgcggaaatgtgagggacgggtcc

SEQ ID NO: 411158 - DNA, 300 bp, Homo Sapiens
  misc_feature (253)..(253): n is a, c, g, or t
aagactcaaggtaatgaaaactatgagtagaatagtaaggtgtgacaggggacaaataagtagatataaaactatgctgcaatattttagttattaaagctgggaaatatgcaaatgtaagtagtgcttggaaccagagaaggttctatatttagctgttcttctgtagctaaatctgacaaattgaaaaatatcatattctctgctctaggtacattttatgtatattttgacagcatatcaaatatatganacattaggttaaataaattaaaatccagtgggataaactatatgggg

SEQ ID NO: 411159 - DNA, 198 bp, Homo Sapiens
  misc_feature (67)..(67): n is a, c, g, or t
  misc_feature (103)..(103): n is a, c, g, or t
  misc_feature (135)..(135): n is a, c, g, or t
  misc_feature (166)..(166): n is a, c, g, or t
  misc_feature (175)..(175): n is a, c, g, or t
aactaaaaagttaaaacttttacaaaacaacaagttttccttaaattatgatttgttattataaaanctagtaagaaaaaattccaccacatgaaagcatttnctaaaattcatacccccgtacctatttttaantacagttggtaaattgattaagctctatttncattttgantgatcatcggttttattttattt

SEQ ID NO: 411160 - DNA, 337 bp, Homo Sapiens
  misc_feature (293)..(293): n is a, c, g, or t
  misc_feature (299)..(299): n is a, c, g, or t
acatctgcagccatatatgaggtccctcatgagacttagcaacaaggtgtgttttaatgtgacagtgtgtctgatgtgtccccagcacattgggaccagtacacagtgttatttgtacatctgctgagtaacattgagtgtgtgggtaactaaagccctcagtaattattttacttaatgttttcaagcttaattctgatcttgtacttgcatgatttattattccttgtgctaaattcttcaatgttcttgccttgattgatctgtcattatctatcacttaactaaaatantaaatncctttaattaagtcatggttaaatgagggactttgttt

SEQ ID NO: 411161 - DNA, 358 bp, Homo Sapiens
  misc_feature (71)..(71): n is a, c, g, or t
  misc_feature (184)..(184): n is a, c, g, or t
acttcacatttctccagggagggatgctttggaaaaactgctcagtgagatgaagcacagatctgcttttnatcccttttgtacctttttaaagacataaggtatgttttgacactggagtatatatgagggttgctaacgtttaggttgaaagagctgctgttgtccacagcttatttatttnccacccatttttgtctcctggtctcatccagttacatttcctgggatatgtttttggaggttgctcagatcacggcactagagtccctttgggtttctcctccctcctctgtctatttggcctcgcccttgacaaacattccccacattcacaaccaggcctttggctaaatgt

SEQ ID NO: 411162 - DNA, 300 bp, Homo Sapiens
ttgctgagagagatgatgtttcatgggtgatgtctctggaagagattggataggacccaagcacagagcaagaaattggctttaggcaagtcagatttgtcttatactagttaggagtaaagagaaatggatgatacagatgcagctatgttcgtaggagggaagtggagggaatttctgtgtgatggctttagtaatgtaggcagcaaggtcaactactgacagtgagaggagaaattcggggaggctggtcacagtttgaagtaataggtcatggggaggcagatgtttgtgggtgga

SEQ ID NO: 411163 - DNA, 281 bp, Homo Sapiens
atcttttcaaccctatcaataagatgttatgaaagattggttctcttgtttacaagtagtatagaatcttttttgatctttgactctgtgctgcctatctcatcaatgttgttgctattaatatctgtcctttaacactggatgttgggatcttagtaatgttgctgataataggattttcagcaaaacttccatatcccttgaagatatggtagtttatattactatatcgataacagttttgcctgtggagatttgactagttttaggtgtttggaagc

SEQ ID NO: 411164 - DNA, 277 bp, Homo Sapiens
  misc_feature (12)..(12): n is a, c, g, or t
  misc_feature (40)..(40): n is a, c, g, or t
  misc_feature (171)..(199): n is a, c, g, or t
  misc_feature (219)..(219): n is a, c, g, or t
  misc_feature (222)..(222): n is a, c, g, or t
  misc_feature (240)..(240): n is a, c, g, or t
  misc_feature (251)..(251): n is a, c, g, or t
  misc_feature (254)..(254): n is a, c, g, or t
aacatggctganttgagattacactgccatgatacattgnctgacagcacttcacattttccctgagttggggacagaaatcacactgcccaaatacattatctgatggctcctcatgtttcccaaaagttaggaaaggaggttctatatacatacatgcacaagtgcatnnnnnnnnnnnnnnnnnnnnnnnnnnnnngtgctagatgagatgttgantgncataaggaaatgaaagtnccatctctctnttncctaccccctgcatctgtccctt

SEQ ID NO: 411165 - DNA, 291 bp, Homo Sapiens
  misc_feature (21)..(21): n is a, c, g, or t
  misc_feature (52)..(52): n is a, c, g, or t
  misc_feature (201)..(201): n is a, c, g, or t
ttaaaatactccatatatttnagaagcaattgaaaatgcatccatgtatgtnatttgagcgttactagaaatttatttatacaaatccatattaatgtgctaataagtgacaaatatatatatagtcatgcactgaataatgatgttttggtcaacgatgaactgcacatacaatggtggccccataagattaaaataganccaaaatttcctatggcctagtgatgctgtagccatcataatgtggtagtgcaacccattaccttttctatgtttaaatatacaaatact

SEQ ID NO: 411166 - DNA, 385 bp, Homo Sapiens
  misc_feature (338)..(338): n is a, c, g, or t
accaggagatggaggtgctctagactgtgatgctgggaaaggattgtgggctagaaaaagggctccctagggccggcatatgggccactgggtggaagaggggctctgagaccctcaccctggagcaggtcatcacccacaccgaagaatgaagcgtgaattcggtcacgcttaaaatgttgaattgttggcaaaagcccaagttaatgaaatagcatggaaaatggatgtgatgagatttttgaattgtaattagattaacattgtcactagttatcagtctgatatatcttataaatcaaacgttgggttgatttatcttttatcacttctagggncttactcctaacagtaactcacaaacccagccccaaatcagaggctt

SEQ ID NO: 411167 - DNA, 161 bp, Homo Sapiens
  misc_feature (59)..(59): n is a, c, g, or t
  misc_feature (121)..(121): n is a, c, g, or t
  misc_feature (142)..(142): n is a, c, g, or t
aagaaaaaaacataaataatattagaaatggaaaagttataaatcaactacagcaaggntttaaaactattatgaaacaaaccaagtagaaagtagatctgccaaacaaaaaaggaaaganactgtttctttcataaataantgacaatgggggaaaaaga

SEQ ID NO: 411168 - DNA, 370 bp, Homo Sapiens
attattcatgaaataatccatgtaacatcacttagcactgagagttaacaaaggcaaatgttacctgaataggaggaaacagaggaagaacaacgaggtctcttttatctatgctaagctttgtctgaataggagagaaatgtgtggcctgttggtgaatttattgctttgtggtagtaatggatttycctaaagctgtttccctctgatcattaataatccctgtacagcaaaggactattgtcctttggtatgagtaaataaccctgttggaagcaccgcttatcttcagaccacagcgcatacttcttactggaaaatataatgcaggtgccaacacccaaagggcatgaccaggggttccccttcc

SEQ ID NO: 411169 - DNA, 219 bp, Homo Sapiens
  misc_feature (51)..(51): n is a, c, g, or t
  misc_feature (91)..(91): n is a, c, g, or t
gtggtagagtaaatcctattatatcgagatattggtcaggcaagaattttncttttaaaataatttattgtaaatgaaccataaaattttnacctttgtgccatcttctaggctataaaatagtcttataaagaatcagattgttaagagtatatgaaatgtggatatggatgtggaagatccataacgaggatgatgaaagcacattaagaagctttc

SEQ ID NO: 411170 - DNA, 243 bp, Homo Sapiens
  misc_feature (54)..(54): n is a, c, g, or t
  misc_feature (91)..(91): n is a, c, g, or t
  misc_feature (180)..(181): n is a, c, g, or t
  misc_feature (210)..(210): n is a, c, g, or t
ttaatcattcaaacttcattttatacaacgagtgcatacaccactgggggagtntctgactgatgcgtgggagggcgggcggggatgtctncagctatgagtagggaggaggcggggaagccctgggtgcttcctctcctcgactgaccgctgtgtgttcgtccccagaggaagagcggnnggcagtcagccccgggggggatggcacantggagagacggacctgcagaagtggtggccaag

SEQ ID NO: 411171 - DNA, 290 bp, Homo Sapiens
  misc_feature (140)..(140): n is a, c, g, or t
  misc_feature (211)..(211): n is a, c, g, or t
  misc_feature (271)..(271): n is a, c, g, or t
aattatttcataataatgtaataaacattcatgaacataccctatcaagcaagagctagaaccttggcaatcatttccttgactcctccagtttgtggctatcatgatattcagccccaagttcatcatttctgtttttncttctatacaggtttcttatatgtatttctaaaaatcattggttatttcatctttgtaaaaagtcattgtnctattttccccactagttctacattgcattcatattgttgtgggttgtggtaattcattnattttgactgctgtataat

SEQ ID NO: 411172 - DNA, 299 bp, Homo Sapiens
  misc_feature (230)..(230): n is a, c, g, or t
aatgcttgggaattgggagatatgcacaattgtctttgctttgttcacaaaattaaatgcgtatttgggtacttataggacactatttgtaaaaacatttatttcttcagacattgatggtcttgtcccagttattaacaacatctacatgtttaagaataaatttcctatctacttcttattccattgaaaattacctttctatcctcctactctggaagtctttatgnattctgtcctaatcattagtatcccattgcttcttcaagaggatgtctgtccagtaggaatttctccca

SEQ ID NO: 411173 - DNA, 361 bp, Homo Sapiens
  misc_feature (250)..(250): n is a, c, g, or t
cagaaactcaggaataaagccattaactttcaaagaatatgttgtgttgttcgatattttccattcctaatccacatccacgttggtcaagtagagcttcctactcagaagcacagcagttgccatggtgttctcttccatctgaaagcagcaattttccgcagcgtccatttacagaatgtgccatatttactcagattctaatgtatattaaatatgctttggaaacttaacaagaaacgtgcaagcnctcagtaaagaaaagttgtagaaaacaaaaactgaacagcaggcttctagtttctcctctcccaaaatggccttagtgggattcaaaaatgggaagtgtgaataaaactgc

SEQ ID NO: 411174 - DNA, 382 bp, Homo Sapiens
  misc_feature (325)..(325): n is a, c, g, or t
  misc_feature (369)..(369): n is a, c, g, or t
cctaagatgcctggcacaatcaaagacctttggtggcttccagcatttataaggcagagtccaaacacacacttaagaatgacttactcctctggcggaccccaccattccctcaccccgctttggctctgtcctctcgtggagctgcccctgcccctaaacactgcctcctctctaccaacccggaccatatttcccctcctcccctcaccaggtccagcagtacccaccacgtttgtggacatctccccaaggagctctcacgtatcagaagcaaggagttagccttcagccccacctcttgtgcttaggtctacagtgagtntccagtgatgcttcctaccgactgcttgggggtgcacaagagtnaggccagcaagat

SEQ ID NO: 411175 - DNA, 291 bp, Homo Sapiens
  misc_feature (62)..(62): n is a, c, g, or t
  misc_feature (109)..(109): n is a, c, g, or t
  misc_feature (117)..(117): n is a, c, g, or t
  misc_feature (132)..(132): n is a, c, g, or t
  misc_feature (223)..(223): n is a, c, g, or t
  misc_feature (239)..(239): n is a, c, g, or t
  misc_feature (269)..(269): n is a, c, g, or t
aacaacaatcagccacaatgtgcttttaaggatttaactgatagtaaagataaatgtgagtnttaagaatgggatttttagactaggctgacacaagggatcttctttnaataaggntcttgagcatttgtntttttggagctcatccttaagggctggacaggaagaatcctgtgttatgtgtgcatgttgagcaatgcaaaaaacactctgccaaatcctngataccacatggtctngagaaatgcatgagtgatttaacgcacggntgggtgtagtcattatgttcct

SEQ ID NO: 411176 - DNA, 282 bp, Homo Sapiens
  misc_feature (20)..(20): n is a, c, g, or t
  misc_feature (129)..(129): n is a, c, g, or t
  misc_feature (187)..(187): n is a, c, g, or t
  misc_feature (225)..(225): n is a, c, g, or t
  misc_feature (266)..(266): n is a, c, g, or t
ggaatgacatggtcattctnacttaaaagaaacattttaggttcacacttgccaagttaggaagaaaaccaaccttagatcccttcccccccaccaatactcctttccccaaacaccgtccccacccgnctctatgtttaattgaatttttatttgtgatatatagaaaacctaacccatggctgtnatgctgagtgtcatttggcttcaagctcgaaccagggnacagcttggcctggaaccctgagacaagatgctggcctcanaaggtgggggctcacg

SEQ ID NO: 411177 - DNA, 182 bp, Homo Sapiens
  misc_feature (11)..(11): n is a, c, g, or t
  misc_feature (38)..(38): n is a, c, g, or t
  misc_feature (68)..(68): n is a, c, g, or t
  misc_feature (123)..(123): n is a, c, g, or t
  misc_feature (136)..(136): n is a, c, g, or t
  misc_feature (161)..(161): n is a, c, g, or t
gaatggccttntctaacggcatgtatgacttgcatganctctctaaagctgaactggcctcacctcancctgtcttgctggcaaatgcggccttcagtgggaaagtaaatggcagctgctgtnattacctggtcgntgaagaaagacagatggcaaaattnatgcctgttggggatgacagc

SEQ ID NO: 411178 - DNA, 304 bp, Homo Sapiens
  misc_feature (23)..(23): n is a, c, g, or t
  misc_feature (123)..(123): n is a, c, g, or t
  misc_feature (192)..(192): n is a, c, g, or t
tttatttactgccgttgtaaatnatcacaaaacatattcattgtcaagtgaatgcacaggctttcaaaggtgattgtattctgcaaggtggggaatagccaactaccttctaaggtgaatgtncagcctgccatttccaaccccaaaactcctctagattctcaacagggcagcttctgcttcatgcctctnttcggaaaggtcagccctgtgtagaaggcttaataccaacatgcagatccacctgagaatcactggaatgctctggacccagctggaatgcttccggaacccagtcaggctt

SEQ ID NO: 411179 - DNA, 280 bp, Homo Sapiens
  misc_feature (44)..(44): n is a, c, g, or t
  misc_feature (92)..(92): n is a, c, g, or t
  misc_feature (265)..(265): n is a, c, g, or t
agtgctgatacagatacagtgagttcctgccctttcctctcctntatattgaagggattataaatgaagctctttaaacattctgagatctntaagttgatttctacatgaactccaagtggtgttaatgacattttcagaaaagatgctttacttagctgacaagaaaaagtactctgtaagcctttatttgtatgtgataaaacagagttgataaaataatctactattaacttatcaatgcagtcttacagaatccacctanttacaaagtagataa

SEQ ID NO: 411180 - DNA, 369 bp, Homo Sapiens
  misc_feature (114)..(114): n is a, c, g, or t
  misc_feature (204)..(204): n is a, c, g, or t
  misc_feature (299)..(299): n is a, c, g, or t
  misc_feature (317)..(317): n is a, c, g, or t
ggcagatataaccttttctcaaacatctctaattgtctgcataccccactaatattggctacataatacatttatttttgtcatttgggactaagtgccttacttagttttgtncagtgtattcattaattgaagaaatacttattcaggatttctattacttagttttgctcaatatattcactaattgaagaaatatttatncaggacttccattatatgagcactggcctttgtggtacaaagatacaacatgaatctgaaactcaatttaatctagaaagatttattaatataanctcatcagaaaagcaagncatctactgtgatagctacagtattggttagaaatggaaagagagagcagat

SEQ ID NO: 411181 - DNA, 361 bp, Homo Sapiens
  misc_feature (216)..(216): n is a, c, g, or t
  misc_feature (224)..(224): n is a, c, g, or t
  misc_feature (257)..(257): n is a, c, g, or t
  misc_feature (270)..(271): n is a, c, g, or t
  misc_feature (307)..(307): n is a, c, g, or t
  misc_feature (326)..(326): n is a, c, g, or t
gatttgagccatcagaattcagcttttgtagataaagaatatgaactaattgactatggatggaattattgtatatagtcagcttgctgaattattggttaagcactactaactatatcttggtaaactatggtgcaactgagccaccccctaaaagcaaaagacatttagcagttcaccatattttgcaattaaccaaatgagagcctatgagantgaaatgntttcaggtggagtttgacaatacaattcatccntaatatatagggnnaaatatttcctcaaaaataacatctatgtggtaggnccttaaaaacgatggatgnaatgcatgcaaaattctctggtacacagacacatg

SEQ ID NO: 411182 - DNA, 255 bp, Homo Sapiens
  misc_feature (30)..(30): n is a, c, g, or t
  misc_feature (116)..(116): n is a, c, g, or t
  misc_feature (167)..(167): n is a, c, g, or t
  misc_feature (173)..(173): n is a, c, g, or t
  misc_feature (191)..(191): n is a, c, g, or t
  misc_feature (198)..(198): n is a, c, g, or t
  misc_feature (203)..(203): n is a, c, g, or t
  misc_feature (209)..(209): n is a, c, g, or t
  misc_feature (217)..(217): n is a, c, g, or t
  misc_feature (222)..(222): n is a, c, g, or t
tctgtccaggattattaccagctaaaccangtaatggaggtctatgcctgatgaagaacacctgtaaaagctggaaaatgtggctgtcttctcaaatgggcagataccagcacaangatacaaggattgtaaagactcagaatcatgttacttccagaagaaactanataagntccaacaatgaacacaanataatanaactnaagganatttgganaacantgcataaacaaaacaagtttaatgaatgattag

SEQ ID NO: 411183 - DNA, 281 bp, Homo Sapiens
  misc_feature (80)..(80): n is a, c, g, or t
  misc_feature (208)..(208): n is a, c, g, or t
  misc_feature (228)..(228): n is a, c, g, or t
  misc_feature (254)..(254): n is a, c, g, or t
atcagtccaatgcagattagtatcactttgctcataaaagagagtataaaggttcttgaagtttttgaaaggagcggctnagctgactgttaaggaagctatcttttgtctacaagaaatttatacttttcccttctaaatttcacaaacagaatattattagagacaacagaatacatttacaaaaatggcatcagaaataattgantacattgtgtacaatatctnctattaatgaaataaatgtatatttnatatgatatttggtctttatgggaaaa

SEQ ID NO: 411184 - DNA, 132 bp, Homo Sapiens
  misc_feature (81)..(81): n is a, c, g, or t
  misc_feature (108)..(109): n is a, c, g, or t
tctaactgttcccttttatttccctatggagcatctactgagccccagccgagagtagaaacaaacctgctggctgctctnaaggcacttatagtcccagttaggggnngacgggtcacttaaccacttagt

SEQ ID NO: 411185 - DNA, 240 bp, Homo Sapiens
  misc_feature (116)..(116): n is a, c, g, or t
  misc_feature (145)..(145): n is a, c, g, or t
  misc_feature (157)..(157): n is a, c, g, or t
  misc_feature (171)..(171): n is a, c, g, or t
  misc_feature (201)..(201): n is a, c, g, or t
  misc_feature (208)..(208): n is a, c, g, or t
  misc_feature (211)..(211): n is a, c, g, or t
gcctattataaaacaataggaaatgctgaagtctagtgcaccaagacatactgaatttcaaactaaataaattaaaattatcatgtacattccactacatgtcaaaacaggaaaanccatagtattatagttgatatgaaatgangattacatacancagtaatacagagnaaacatgaagctgcttatatttatttgggnataaggncancaggggccaatgattttcactgcagatgt

SEQ ID NO: 411186 - DNA, 371 bp, Homo Sapiens
  misc_feature (154)..(154): n is a, c, g, or t
  misc_feature (163)..(163): n is a, c, g, or t
  misc_feature (305)..(305): n is a, c, g, or t
gatgattttgtatctttttctatttattgagataatcaaatgatttttgtccttcgttctattgatgtgatgtttattgatcatgtttattgatttgcatatggtgagccatccttgtattcctggtataaatgccacctgatcatggtatatnatctttttnatgtgctattggatttggtttgccagtattttgttgagaattttttcatctgtgtctattacggatattggcctgtagttttttttgctgtgttcttctttggttttgatatcaggataatgctagctttgtagaatgagtnagggaggagttatctactcttcaatttttgggaacagttgcagaactgttgtgtgttttagaacag

SEQ ID NO: 411187 - DNA, 155 bp, Homo Sapiens
tgagcaccgcgcccagcccaacacatggtattttctgtcattttcatttagtcttctggttgctgtgtgatggtctcaggctttatttacatttctccgattactaacagacttgaacatttcagcacactttttaggttattgaataaccccta

SEQ ID NO: 411188 - DNA, 145 bp, Homo Sapiens
acttttctgcagagatggtgtttctccatgttgcccaggtcggtctcggaactccggggctccagcgatcctcctgcctcagtctcccagagtgctggacccacaggcatgagccaccacactcagccccaaaatccatgatttt

SEQ ID NO: 411189 - DNA, 151 bp, Homo Sapiens
aagaaatttactgcaaagggatgttgcatttcaggtgaatgtatgtagcctttcagaggccgggctatttattagatgtattttataactgagggttctaggtaaacacaagccaaacagatccaccagaagcctagagctgtggactctt

SEQ ID NO: 411190 - DNA, 178 bp, Homo Sapiens
  misc_feature (142)..(142): n is a, c, g, or t
tataaatattttgtatcaattttcagcttttacagtcaatgaacttaagtcttaattttggttacagaattaaatattaatattaacaatcaaggcaatgtaaaagtaaagtacagttgactgaagctgggacacagacggnaaagagagtgaatgaaaagaaggatactaatattct

SEQ ID NO: 411191 - DNA, 279 bp, Homo Sapiens
  misc_feature (102)..(102): n is a, c, g, or t
ataaaaatgctacagatttttgtatgttgattttttatcatgcaatttcactgaatttgtttttcagttataacagttttcttatggagtctttggtttttnccaaatacaagatcatatcatctgcaatcaaggataatttgacttcctcctttccaatttagatgtccattatttttcctcttgtctgattgctctagctaggatttccagtactatgttgaataacaatggtgaaagtgggtatccttgtcatattccagggtcttggaggaaagg

SEQ ID NO: 411192 - DNA, 367 bp, Homo Sapiens
  misc_feature (67)..(67): n is a, c, g, or t
  misc_feature (94)..(94): n is a, c, g, or t
  misc_feature (202)..(202): n is a, c, g, or t
gctatgttgcccaggctgttctcaaacccttgagctcaagcagtcctctcacctgtctcccaaagtnctgggattacaggcatgagcgactgtnctgggcttactaaattttaaaagatttgtgttgaaccatctgctgatcatggagcagcagagaaatttattgacagattttctagggtcatcactgatgacaatctgntgccagaacaagcctgtaatgctgatgaaacatcactgttctggcattattgctccagaaagatactgactacagctgatgcaaaggcccctgtaggcagtaaggatgccaaggacagaataactgttctggaatgtgctaataatgcagcaggcattcaataag

SEQ ID NO: 411193 - DNA, 280 bp, Homo Sapiens
  misc_feature (154)..(154): n is a, c, g, or t
  misc_feature (180)..(180): n is a, c, g, or t
  misc_feature (254)..(254): n is a, c, g, or t
  misc_feature (268)..(268): n is a, c, g, or t
ttgactagcttcctacgtcattaaaaattctttaaatagtctgtcttaatggctgcaaattttgtcgtaagtctgggctaaaatctgatgaaatgttttacctgtggttaagtaatttagcaactcgtatctttttaaaatattacaactgggnattctagtacgtcacaaacatttgtnatatcatttattttgtgccattgtctgtgctatgaaatacagtagaatgaaaatttacttcaaagcattcattntcttcccccagggnatgatggcaaaa

SEQ ID NO: 411194 - DNA, 310 bp, Homo Sapiens
  misc_feature (22)..(22): n is a, c, g, or t
  misc_feature (78)..(78): n is a, c, g, or t
  misc_feature (141)..(141): n is a, c, g, or t
  misc_feature (164)..(164): n is a, c, g, or t
  misc_feature (246)..(246): n is a, c, g, or t
  misc_feature (273)..(273): n is a, c, g, or t
  misc_feature (279)..(279): n is a, c, g, or t
tcagcattgttttctgtatgtnttgagatgattatttggttttcctttttattgtgttaatttggtgaattgcatcanctttagtatcttaaaccaaccttgcctctctagggtaaaccttatgtggtcataatatataancctttaaatacattattggattnctttttttaatatattgctgaggatttttcatgactataatcataagagatattggcatatgatttcctatacttgtaatgnctttgttagaaggagtttatattaggntttatnctggcctcataaaatgggttgagaaatgtcc

SEQ ID NO: 411195 - DNA, 372 bp, Homo Sapiens
  misc_feature (11)..(11): n is a, c, g, or t
  misc_feature (246)..(246): n is a, c, g, or t
  misc_feature (275)..(275): n is a, c, g, or t
  misc_feature (289)..(289): n is a, c, g, or t
  misc_feature (328)..(328): n is a, c, g, or t
  misc_feature (342)..(342): n is a, c, g, or t
gccagattgtnttccttgcgagcccctgaccccggctactcttcaccagacacggcccggctttggcccacaacacagccgtcccacccctggttccttcaccttagcagtagcagtagctctgggtggagttgccagaggagctgacaggccctctgccactgctgccacccccagggctagggagggaacaaagagcctgcttgctgtgcttgcacatccagcatgccacagctgcactacggngaggaggtcagacagtccccccaacaagnccccgatccctctnctctccaccagggagggccctgggctttgcgcccacagnacaaaacgttccancccgggctgatcattctgggttggcagcgg

SEQ ID NO: 411196 - DNA, 287 bp, Homo Sapiens
  misc_feature (24)..(24): n is a, c, g, or t
  misc_feature (96)..(96): n is a, c, g, or t
  misc_feature (124)..(124): n is a, c, g, or t
  misc_feature (130)..(130): n is a, c, g, or t
  misc_feature (221)..(221): n is a, c, g, or t
  misc_feature (266)..(266): n is a, c, g, or t
tacagactcaggttatagggtgtnattttctaagtcaatattcagtttcacagccagaatctgtgaagagagaacaaaccatgagaaaactaacanttttatggtgattgagaggttccaagtncctggngttttaaaaaaatcagtttttaaagataaacaaactaaaactagtccaagcactgagacagagtattaaaagatggtagcacacccaaagngcacggtgggtcttgaatagctaacatgtttcaagtagtggaggnagatgtgcttaaatagttacc

SEQ ID NO: 411197 - DNA, 372 bp, Homo Sapiens
  misc_feature (38)..(38): n is a, c, g, or t
  misc_feature (40)..(40): n is a, c, g, or t
  misc_feature (98)..(129): n is a, c, g, or t
  misc_feature (156)..(156): n is a, c, g, or t
  misc_feature (293)..(293): n is a, c, g, or t
  misc_feature (319)..(319): n is a, c, g, or t
  misc_feature (362)..(362): n is a, c, g, or t
ctcaactgccactcacctatctaccatccactacccantnaccacccaccatgacccaccatttgccatctacccatccatccattctataaataatnnnnnnnnnnnnnnnnnnnnnnnnnnnnnnnnttaggcaccagtaagacaatcatgggnaaaaaagacagacaacccccgaccctcccatcctcagggagctctattccagtgagaacaatcaatgtgctagattgtgaaggtcatcagtgcttgctgcccgtgtaagactgaggttcccaggcccgaggaccagnctgggccagggcttcccaggggtctnctggtgggggactctcaggagtccagctgctgccccttagctnagcacctggg

SEQ ID NO: 411198 - DNA, 303 bp, Homo Sapiens
  misc_feature (56)..(56): n is a, c, g, or t
  misc_feature (157)..(157): n is a, c, g, or t
catattgggggcccaatataaagcaaagctggaagaagggatgatccatgtatttntggggatgggatatggacagggaaatagtgttccaactccatgctgagtgttgttttgaattgtaatgtgaagttgccaccataccagggctatgactgtntacgatgtctcacccttgtaggctagtagctttgcagtgggaaaagatgacagggccacttgtccagggcattcaggtaataaagtccctgagctccaagttgctagatctaaggaagtatttttcccttcatgtcaaagatgggg

SEQ ID NO: 411199 - DNA, 267 bp, Homo Sapiens
  misc_feature (53)..(53): n is a, c, g, or t
gacactttcagaattaagaagccttgccctctttgcgtgtcttcacaattgtnttaagtctattatagtattcattttagtttgaaagcaataaatacaatattagtacaagcacactgtcaagaaatccctagaatatggctcctctgaaggttgacatgggtctgcctcgcatgtatcttttcatctccagcatccagatcagagtcaacaacaacaactctacaaatatcaggcttcttggtggaaagaaatctggacattttt

SEQ ID NO: 411200 - DNA, 226 bp, Homo Sapiens
  misc_feature (139)..(139): n is a, c, g, or t
  misc_feature (153)..(153): n is a, c, g, or t
  misc_feature (206)..(206): n is a, c, g, or t
ccaaaaatgagataagcgttatcagggcaagtccatcctcatcactctttccctccccactgccctctccacgatgcccagctgatcaaaagtcatttttactcataagaccaaagtatcatgggatactgtgcagttngagagcaggttgancatcagaaataattgctgacaataaagtaaaagatgggagaaaagcaaggccnattgtatataatacagcttc

SEQ ID NO: 411201 - DNA, 223 bp, Homo Sapiens
  misc_feature (17)..(17): n is a, c, g, or t
  misc_feature (115)..(115): n is a, c, g, or t
  misc_feature (132)..(132): n is a, c, g, or t
  misc_feature (143)..(143): n is a, c, g, or t
  misc_feature (173)..(173): n is a, c, g, or t
  misc_feature (181)..(181): n is a, c, g, or t
gtgccattacaactttnctgtaaccctgaaattgtgtcaaagtgaaaattttttaaatgagattataagagcataatcaaattggaatttccttaggataccagagaatcatttncttctcaggtaaagganttttccttttngtagtccagagctatacatgattaagaaantgttcagnccaggaagatgacatctctgctaacctaatcgattatcatgg

SEQ ID NO: 411202 - DNA, 410 bp, Homo Sapiens
  misc_feature (243)..(243): n is a, c, g, or t
  misc_feature (322)..(322): n is a, c, g, or t
  misc_feature (369)..(369): n is a, c, g, or t
aaggaaatgaatttgatagcagattgttagagattaattacctatcatatgccaaagccacttcctacatgtcagtgctaaggaatcccctagagatggaattcctaggttcaactgaaaattaattgtaattaatataataggttaattcattgtaattatttttaagccttttggcaatgagttaattccacaagatccacattgcttgaagtgtcacagagaacacttgatgagaatgtnctagtaataaaccttaaccctctggggaaaaaatcctactgtctttccttctggcttcgtttcttctggaacatatttnggtggcatttggatatctggaggacaaagggatccctacaaggtggntgcataaacatgcgtgggcccagatggactgtgctcattgg

SEQ ID NO: 411203 - DNA, 386 bp, Homo Sapiens
  misc_feature (32)..(32): n is a, c, g, or t
  misc_feature (99)..(99): n is a, c, g, or t
  misc_feature (138)..(138): n is a, c, g, or t
  misc_feature (362)..(362): n is a, c, g, or t
aaactggcttgccttcatcatctctgcagggntcagtaaagattagaaatggattatttaccttgttatacaaatacacctcctccctacacccaaganttgagaggaagatgagctgttcctgtgttaacgcctgantcaatcccattatctgcatttctgtgtgtggttagcgctccagcagcctaaggcgggagctggaaatgacagccttggagacgaggaaggctccagggaggacggagaggaacacctgctgaagaataagacgggcggcaccagccgggctgattttggggaacggaaggtaacagagggtgatgcttctaatcgcttttacaaggtcttggaaagacgggatngccttaaccaacttggggtttctt

SEQ ID NO: 411204 - DNA, 386 bp, Homo Sapiens
  misc_feature (139)..(139): n is a, c, g, or t
  misc_feature (196)..(196): n is a, c, g, or t
ataactttaacagaggattggaataatgagggattggcaaggaagcagtaaaagggaacactaaagtatagaataatagcaaacagaaggagcaccctacccctagggctgagaaagagcacagggaagtccttttttnttcctggacagagatccagacgagctggagaaagaagttgctatggtactgcatcantggaacttgctggaaatccaccctcaagggcactaggaaaacctgttcaggggagctgtggagggaaatggggttggcaggaaagctgctgggcgcggggtgcttcagactgcagtgtattgcaggagcttgggcactggggaagctgtgtgcactgcaggatcctgctgagccagcacatcagatcagg

SEQ ID NO: 411205 - DNA, 302 bp, Homo Sapiens
  misc_feature (23)..(23): n is a, c, g, or t
  misc_feature (41)..(41): n is a, c, g, or t
  misc_feature (137)..(137): n is a, c, g, or t
  misc_feature (195)..(195): n is a, c, g, or t
  misc_feature (198)..(198): n is a, c, g, or t
gtatttcctcatttgtgcaaatnaaatagaaaaggtaaatnagaaactcaagaggtttgttacctactgtcaatggagtggggaaaatgggtggaaagaagaaggcaataagaaaagagtaacaggaaacgacagtngacacttctgagtataccttgtggaatctctttcactcttagaatcatagtaatagangangaaaaaagaactccccaaactgaaaaggatagaccactggaacaacttcaagtggtctaatgtagaagcaaatggagtccctcaaggaaagaagagaggttttg

SEQ ID NO: 411206 - DNA, 272 bp, Homo Sapiens
  misc_feature (43)..(43): n is a, c, g, or t
  misc_feature (150)..(150): n is a, c, g, or t
  misc_feature (185)..(185): n is a, c, g, or t
  misc_feature (191)..(191): n is a, c, g, or t
  misc_feature (230)..(230): n is a, c, g, or t
cccaactctatagccctagtcaaccactaatctataccctgtnctctatagatttgcctagtctagaaattttgtataaatgaaatgcatgcacttgaactttttgtatctggcttgcttttccatttagcataaagttttaaaggtccncatatgttgctgcatgtgtgcatttctttttgtgnactgcnatattacattgtatgggatataccattttgccatatttngttaaatccattcatccagttggtgggacagcaggttatttc

SEQ ID NO: 411207 - DNA, 252 bp, Homo Sapiens
  misc_feature (94)..(94): n is a, c, g, or t
  misc_feature (109)..(109): n is a, c, g, or t
  misc_feature (165)..(165): n is a, c, g, or t
  misc_feature (171)..(171): n is a, c, g, or t
  misc_feature (218)..(218): n is a, c, g, or t
tttgttagtgttttctacactacactcaagttcattcagcatgtcatttcaacaacatgtgacgtgtcaacttcaaaaattaaacaaaccagcnaaacacaacacttgncactacaaaggaacttgttttattctcaaccttctatgatagctaaacttctctgnaatttngttcccccacacatcccacatctgggctcaatttccagcttctgttnttctgttttatttcatccaaaatgttattttaat

SEQ ID NO: 411208 - DNA, 201 bp, Homo Sapiens
  misc_feature (110)..(110): n is a, c, g, or t
  misc_feature (113)..(113): n is a, c, g, or t
  misc_feature (152)..(152): n is a, c, g, or t
  misc_feature (161)..(161): n is a, c, g, or t
  misc_feature (177)..(177): n is a, c, g, or t
agtgcaatatgcacattactaagcacaaaaaacaagtgtaattcagaactacttgcattttttttagttaaatgccaatgaattattatgccttagttttatgaacctgnctnctccttgtgcaattccttccttgcaaatgaattgacttnaacgccgtnagtgaatagcctcagnctgtaggatgtcctttcaaatttt

SEQ ID NO: 411209 - DNA, 206 bp, Homo Sapiens
  misc_feature (137)..(137): n is a, c, g, or t
  misc_feature (167)..(167): n is a, c, g, or t
  misc_feature (171)..(171): n is a, c, g, or t
  misc_feature (180)..(180): n is a, c, g, or t
agaaagtaagattctcagggcaacagtgtacagcagagtggttgctccacagacagaggagggcagagtggcccagagtatcagcgtacagcaaagtgggtgttcccatccacaggggcagcgctatctcatagganagaacaacccctaggaaggcaagcgtcagncagncagcagtgnaacagtcaacagttagccagtgtcag

SEQ ID NO: 411210 - DNA, 322 bp, Homo Sapiens
  misc_feature (20)..(20): n is a, c, g, or t
  misc_feature (213)..(213): n is a, c, g, or t
gaaagcatttgaactaagtntgtaaaaatggcagataataattaacacttggtagcaagaaacgctttctgaaatactgggaacactgacttgtttcactgtaacttatcacctagtgctgtatctgccatagtgctcacaattgcaactttatatccaacatgggtgttccatttctatttggataaaatttactggaaatatactagcaangaaaaactggtcttaaaatggcaaaaggctctggcactaaattcactgctacttaacttagtttactaattaacttccttaattatagttttccaaatccgcatgcacg

SEQ ID NO: 411211 - DNA, 291 bp, Homo Sapiens
  misc_feature (64)..(64): n is a, c, g, or t
  misc_feature (151)..(151): n is a, c, g, or t
  misc_feature (247)..(247): n is a, c, g, or t
  misc_feature (256)..(256): n is a, c, g, or t
  misc_feature (262)..(262): n is a, c, g, or t
caactccttgcatggactgatgctggaaactgggtcagggagctccaggaggaaccagacaggntcctgttagcaggctcaccacaagttctaaagggcaccagccttgagaagggcagttgggatgtggccaaatgtgaagccaggtttnctgggatcctgactgtcccaggttacaagttcctggccactctgtgaaccttgggcaagttaacttccaacctctttacaagttccctaatctatnaggaaacanttagtnacatgaccttcatgggaatttatttatga

SEQ ID NO: 411212 - DNA, 366 bp, Homo Sapiens
  misc_feature (54)..(54): n is a, c, g, or t
  misc_feature (190)..(190): n is a, c, g, or t
  misc_feature (290)..(290): n is a, c, g, or t
  misc_feature (302)..(302): n is a, c, g, or t
tcacataggtcacattttacccatgaaacctttctaaattaccttttgcatttnttgcctatccttctacatcatcatacttcgtcaattaaagtcacttttttgggtaacatttcagaaattgggattcctcttacaattgctatcagacagaagccaattatgatgttgtcattgcttacacatgggnaaataacaaaactgccagcatgacatttgcatatgacagtcaacagcctgaaagaaattcccagaaatgatactggagcattcatttcaccctctagganccaaatggactnggaaggaagtagaagatggggaatccctaagcagcagtcaaagtaggctggcttttcataattt

SEQ ID NO: 411213 - DNA, 369 bp, Homo Sapiens
  misc_feature (141)..(141): n is a, c, g, or t
  misc_feature (145)..(154): n is a, c, g, or t
  misc_feature (216)..(216): n is a, c, g, or t
  misc_feature (337)..(337): n is a, c, g, or t
  misc_feature (358)..(358): n is a, c, g, or t
aatggaagaagtgaaaaagaacaacacaaagaaaataaagaagtaacctctttcacccactgaaataatctctggaaaagatattagcaatcatgcagcttataaatatctaaagggctagaattgaggaatttataagantaannnnnnnnnncaacacataaaatacaacatgggaaataagatgttttttactaacaggcaaacacttgaggngtcctcttcaaagactacagtggatgaaagaccagttatccaaaggaaacggttagtagaaatataaagttagtcccacacaaaattaaaatggtgctcaatgcagattatctatcattanaccatttttaaaggcaatttnttatttaaaat

SEQ ID NO: 411214 - DNA, 404 bp, Homo Sapiens
  misc_feature (89)..(89): n is a, c, g, or t
  misc_feature (289)..(289): n is a, c, g, or t
  misc_feature (357)..(357): n is a, c, g, or t
agctggcataatttaacgttctaattatcccttaatcataagctgtacgattctataattaaaaagttaatgccttcttaatgtctatnctagtagaagaatgatgagaaaataatagtatagattagttttggtctctactcattttgccttctgattatattacaactccagctggtgacaagatggctgtgtaaatcttgaaatcactgagcattcattttagcttctcattgaaaggtagatattcagtatgaattgtaaactggcattaagggagaaagtaggnataatcaaacttgatctgagaattacttgctggtgcatttcctcaatgcatagtaatatccttatgangatgcagatgcaaaagtgggttttggaggtggataaggagggcagct

SEQ ID NO: 411215 - DNA, 409 bp, Homo Sapiens
  misc_feature (147)..(147): n is a, c, g, or t
  misc_feature (184)..(184): n is a, c, g, or t
  misc_feature (188)..(358): n is a, c, g, or t
  misc_feature (365)..(365): n is a, c, g, or t
ttttgctcacagctacatcttcagaggtgagaaccatgcatgacacagagaagatgctcactgatggatttaatgagtcaaacattgaagaatcaatgagtgccggaaataaacaggataggtggcagcatagcatgcccttaagancatggctgtggattcaaatcccagaccaatcactgantttnnnnnnnnnnnnnnnnnnnnnnnnnnnnnnnnnnnnnnnnnnnnnnnnnnnnnnnnnnnnnnnnnnnnnnnnnnnnnnnnnnnnnnnnnnnnnnnnnnnnnnnnnnnnnnnnnnnnnnnnnnnnnnnnnnnnnnnnnnnnnnnnnnnnnnnnnnnnnnnnnnnnnnnnnnnatacttntgggccagcagcggctggggctcatccctccctggctgggtcca

SEQ ID NO: 411216 - DNA, 411 bp, Homo Sapiens
  misc_feature (155)..(155): n is a, c, g, or t
  misc_feature (265)..(265): n is a, c, g, or t
  misc_feature (361)..(361): n is a, c, g, or t
  misc_feature (369)..(369): n is a, c, g, or t
  misc_feature (380)..(380): n is a, c, g, or t
  misc_feature (401)..(401): n is a, c, g, or t
ccactaccacaggaaatctctatacccttcttggcttttccttttaatgtaattttcttaaaagcttcaagataatttttaatcaggcatgctgaaatctatctaacctattagtcactaattatattcttcaagcctatatattaatgtttctnctgttgtaaattcatgatcataaagttttggacctggccatcaatactaaagcactgatatttagttttaggtgatacttgggcataaatacaaacacgggatatatttngtcatagaaaaaaatgtgttactgcattattttgcacttctgaaggactgcaaacatttttcaagcacaataagcaaattcttctttcaaaaaggnatactttngcacatatgtnaggtttggaaaatgactaggnccctagggag

SEQ ID NO: 411217 - DNA, 346 bp, Homo Sapiens
  misc_feature (166)..(166): n is a, c, g, or t
  misc_feature (252)..(252): n is a, c, g, or t
  misc_feature (275)..(275): n is a, c, g, or t
ctcactttagtttgagtcaatatctgagaaaaaaagaatggagtaaaagcacagaaagcaaaacttagcttagaaaatatttcctaattcaaaaaatgaacaagtcagattctgtaaagatatccagtgaaatcttgaagaaatattgtattgattattaattaanctgattggaaagtgatcttgggttcacaatgaggttgttgaacaagtagcattttcatacaattgcaaaccaattcaatgtttttncatacactgtttacatttctttncaaaatttgatttcttcttcgtgatcctagtcaaattctgccttctcagtaaatctttatcaagtttgcag

SEQ ID NO: 411218 - DNA, 211 bp, Homo Sapiens
tttgctttatgaagaagctggcctaggtagggttacaaatgggttttactgaacttaaacagctaattgctacatctctgaaaataatcagaatagaaaaatagatggaaaaatttcaaacccactgtaagagactaacataaatccaattccaaaagctgttaatcataccatctaaaaagaaaactgtcgactaatcatgtgtttacaa

SEQ ID NO: 411219 - DNA, 225 bp, Homo Sapiens
  misc_feature (159)..(159): n is a, c, g, or t
tgggtttctgatccgagaaaaattgaaagacaaacatggctgggggaagcaaaacgctgacacacaattcaggtggcccagcagtgctgacctgcaatccaccccaccccaaggcagccctttcaatccaaagtggacagagtgggccttatcccagantcactcaggaagcttcttcaaacatatgactgccacacccgcccccaaggttcagaaacatcttcg

SEQ ID NO: 411220 - DNA, 298 bp, Homo Sapiens
  misc_feature (193)..(193): n is a, c, g, or t
  misc_feature (266)..(266): n is a, c, g, or t
aatctttaaaactactttgaatcttatagaaacatcagaatcttttgaattcaaaagaagccagggactctagccaaagtggagtggttttttaactcaaggatttaggaccttggctgaatacaaacattgaatgattactcagtaggtgccaaagctcaggactttagacagagtcagagtccagtttgtnctgaaacacaatttgatttcaactattgttttaagtgagagaggaaagtgacattattatgagtgtaaatttnctgcttttaaagtagaagttactgacaattga

SEQ ID NO: 411221 - DNA, 136 bp, Homo Sapiens
  misc_feature (54)..(54): n is a, c, g, or t
aaatccatgcttttaaacattactctgtatggtgtgataatgaacagtcactgntatctgactgttcatctgtgtggtccatctgtattgaataaaggaggaaggagttgaagaataaaggggaaaatcttgcaga

SEQ ID NO: 411222 - DNA, 184 bp, Homo Sapiens
  misc_feature (97)..(97): n is a, c, g, or t
aattgagttacaggagaatactgtgaacaattgtacagctaaaagtaataatctaaattaaatgtacacattcctagaaacacacaaatcacaaaanctgactcaaggagaaatagaatatctcaacagacctataacaactaaagatatggaatcagtaaccaaaagccttccaacaaagaaa

SEQ ID NO: 411223 - DNA, 318 bp, Homo Sapiens
  misc_feature (23)..(23): n is a, c, g, or t
  misc_feature (197)..(197): n is a, c, g, or t
  misc_feature (223)..(223): n is a, c, g, or t
  misc_feature (239)..(240): n is a, c, g, or t
  misc_feature (266)..(266): n is a, c, g, or t
  misc_feature (274)..(274): n is a, c, g, or t
ctcaatttcttctcatctttttnatgctattattgtcatataagttacattcctatacattgtgtgtccaacacaaatttaaaattatgccattgtctcttaagtcatagaacaaaagagatacaaacaaaacatacatttatcctgtcttttatatttgcctatgcagttacctttaccagtgttccttatttctncatgtggatctgagttactgtctttnaacttcaatctaaagnnctttcagtctgaaagactgtaatttnaatttctngtaggggtaggttaactaatgattaattctcagtattctgagga

SEQ ID NO: 411224 - DNA, 409 bp, Homo Sapiens
  misc_feature (94)..(94): n is a, c, g, or t
  misc_feature (346)..(346): n is a, c, g, or t
agtcactcagaaacttactttgcttacagcctcattattgttttttgtatttgttaagatattccgtgtgatgacatattttgccttaaatttnctaattttcctggccattgctttcctgtgatttgaaaatgttacggtaagtgcttagtttggaaactatactgtcaacatatattgcattacttcagcagagctgtagttccataacataataaaatgatgctttttttaataagaagatcatacacatttcattatgccctaaaagatgaacattcaaagttcacttttctcttgttttgatatgacggatatatatcagtaaaataaaaaatgctgcagnaccaatatgcactaactcaaacatgctgtggatttgtaggggcactgaggtagcaatgtcaag

SEQ ID NO: 411225 - DNA, 396 bp, Homo Sapiens
  misc_feature (267)..(267): n is a, c, g, or t
atctgagatactttgtcctcatgaataaattagttagtagaatctaatttctagatccttcataatggtaattgagggtaaaaaataataatgtagtagtcaattttagccctttaaacctatggggaactgtatgaataactgtttgaaactgcagggtaatcctgtcacacttgcaaacacatagaagcaacaagactatttcctctcacacttttaattaaaatagtgcctgagtagacttccagggtaaggttcagaaatttnctttctaatttccctgttttaatgaccactacttttaaagctatgctgggaattcactttcacatatatctaacttacaggaaatttttgaagagcctaaatgtctatgggtagattcaatgtttcctt

SEQ ID NO: 411226 - DNA, 343 bp, Homo Sapiens
  misc_feature (179)..(179): n is a, c, g, or t
  misc_feature (306)..(306): n is a, c, g, or t
tttctgggtactcttcatggcctgctagagaactttactaaattatagtccagtagctggacagagctgcatgtgtattgtctaagtccacctgtgctgctggtcaagattattttgcagtgtttggtggtgttgaagaggaatactgttgtgaaggctgagtcaactgcatgacaatnctcatggctcactggctgatgagttgtggcatgactagaaagctctgcttgtattcccagatgacaagtcacacctgaacagctggatactactcgcatccaatttgcttccaagttaacatatttncagaaaatatttggatttggagtacatacaaatattt

SEQ ID NO: 411227 - DNA, 370 bp, Homo Sapiens
  misc_feature (13)..(13): n is a, c, g, or t
  misc_feature (215)..(295): n is a, c, g, or t
  misc_feature (304)..(304): n is a, c, g, or t
ataagcatatgantttatctataggccaagttaatgacataactacaaagaaatgacttgtttcacatgttttaaaccagtgttttggctatactaacttagtgagacatattctaaagaaaaatagagacgcaaagaagatcttacactttaatagtcaattttgtagttgtaatattactatcgatcattttgtaactctcctatatagggtnnnnnnnnnnnnnnnnnnnnnnnnnnnnnnnnnnnnnnnnnnnnnnnnnnnnnnnnnnnnnnnnnnnnnnnnnnnnnnnnnaagattganagacggtaagtaaaaagctcattagtatagttccaagtttaacttgtcagggatgagctcatgatt

SEQ ID NO: 411228 - DNA, 179 bp, Homo Sapiens
  misc_feature (29)..(29): n is a, c, g, or t
  misc_feature (61)..(61): n is a, c, g, or t
  misc_feature (72)..(72): n is a, c, g, or t
  misc_feature (92)..(92): n is a, c, g, or t
  misc_feature (94)..(94): n is a, c, g, or t
aggcctgaccaaatcagactaaatcctantacctataccagagttattgagaaagataagntttggcctgcnggcctttgacagtgaaaggntntaggctttggagctcctcagggccactgcttcagggaaccttgctgacagtgaagccaacacagatgaaagcaaggccaaacatt

SEQ ID NO: 411229 - DNA, 372 bp, Homo Sapiens
  misc_feature (13)..(13): n is a, c, g, or t
  misc_feature (56)..(56): n is a, c, g, or t
  misc_feature (61)..(61): n is a, c, g, or t
  misc_feature (76)..(76): n is a, c, g, or t
  misc_feature (85)..(120): n is a, c, g, or t
  misc_feature (343)..(343): n is a, c, g, or t
ttaactctttctnctcttcagtcggattatagagttggagcaaatgtcatgatganctttnaggcctaggcctggnctcttgagnnnnnnnnnnnnnnnnnnnnnnnnnnnnnnnnnnnnttctttctccataatagtcccaaccctaaacaggggtatggcacagtacttcttatgaacaaaagtgctattggtctacaaggggacttgagcctgcactaattgtatttgattaggatttttgtgctgtctgtatgatgtttaaccacactgtcaattacagacttcctttaaggaatttccaggaaacccccttaccataagagtttaaattaatagtttnctagtttaatgacagcagttggtaaagga

SEQ ID NO: 411230 - DNA, 393 bp, Homo Sapiens
  misc_feature (140)..(140): n is a, c, g, or t
  misc_feature (186)..(186): n is a, c, g, or t
  misc_feature (248)..(248): n is a, c, g, or t
  misc_feature (327)..(327): n is a, c, g, or t
  misc_feature (375)..(375): n is a, c, g, or t
catctatagtccatacatatctataatggacagaaatatgagaatgaataagcaaagatacttatgtacaccaataataaagtaagaaaggtaaaaaaattcatgtaataagaaaaaataacaacccagaaatttaaganttaagtagtagtcaaatctaattggaataactcacctatataaaanacaagaggaaggaaactttatacataggtctggaaaatatcacaactatgttcccagaagantgtttatctccacagcatccaacctagtgtcatgcacacagttgggactcagccactgttgcctgattgattatgaagncagtcactgtgatcaacccaacagtaattgaacgttcatttttaatanggtcagtgttaaatctgt

SEQ ID NO: 411231 - DNA, 363 bp, Homo Sapiens
  misc_feature (132)..(132): n is a, c, g, or t
  misc_feature (326)..(326): n is a, c, g, or t
gataagtgagactaatggaatcgtttccctctaacttcataaaaactttaaggattatctttcttgagttctctgtatttctgttttagaagaaaagaacaaaatttcagaaacaagattatagtgcttttnctaaagtataaatacgtgggccctatacaaactggcaaattcattagtcttaaagcagacatccaagctattgtgggtgtttggatgacaccattttcacagtaggaaatcatttcattctgagcgtgggaatcggcattggttaacgcatgaggttttatgtggtataaacacctgggaagtgagagaaaagncagcacagaagctctgtgggagctcttctgagcattg

SEQ ID NO: 411232 - DNA, 316 bp, Homo Sapiens
  misc_feature (41)..(53): n is a, c, g, or t
gaaatgattcagggaaaaaaatttatagtacgttttcaacnnnnnnnnnnnnnctttgaaatggagtatggtcataaaaaggacactaaataacctgattaagctagagtatagaccaaattgccacttactttgaattgtttttaccaaaggtatcactttgaataaagataactttcattagacatctatctttatgtgttcctgccatcatttcagtgagatcagaggaaagttaaattaggaacaatgaaaaagcttaagaaatgaacaatcatcatgcttttgtgtatgcttaaagtgagtacatgtaaaa

SEQ ID NO: 411233 - DNA, 319 bp, Homo Sapiens
  misc_feature (48)..(48): n is a, c, g, or t
  misc_feature (253)..(253): n is a, c, g, or t
  misc_feature (298)..(298): n is a, c, g, or t
tttccaattattattttgccaatatcctcaactcttttgcccactttnatcttccattcaaccctccctgcaaaatcctgatctaaaagcaacccaagtatttgcctcttcaacctcccagctgctgagtggttttgggaattacacaaccactaagcttggtgcagatgcactatggcctcaatagagtcccccagtgctgcccactttctccttccatatttctccacagcagctggtcaaaatacatttntccccaaatgtcttacacaacccccttctctcttatcatccttanctcacccccaccccagttctt

SEQ ID NO: 411234 - DNA, 353 bp, Homo Sapiens
  misc_feature (28)..(28): n is a, c, g, or t
  misc_feature (113)..(113): n is a, c, g, or t
  misc_feature (194)..(194): n is a, c, g, or t
  misc_feature (218)..(218): n is a, c, g, or t
  misc_feature (248)..(248): n is a, c, g, or t
  misc_feature (276)..(276): n is a, c, g, or t
cttgtttacaggttttgaaaggtttgtnagattagtatttacttttaattttttgagtaatagaatgcgtttaggttctaaattactatggaaatggcatagtgaggattctncacagatattagagaccttcaacaacatagtgaaaatagatttgtcctttcttgtaaatagctgaactatgaaaatttganctgtcactggagggggcatttgcnctgaagtttgccaaagtaaaaataactttnctctttagtaagaaaaagctatattttncaatactgcctgccacagcaaacaaacaaagtcttgtttgtgttttaatattggcaaaggaaaaattctctatataa

SEQ ID NO: 411235 - DNA, 306 bp, Homo Sapiens
  misc_feature (148)..(148): n is a, c, g, or t
  misc_feature (266)..(266): n is a, c, g, or t
  misc_feature (288)..(288): n is a, c, g, or t
caataagctttaaaaagttagtgccacatgaccagcatcgactggcctcagacatctgcaagcactcacccaggccacagggtcaggtagagggctcctgggcccactgtagcccctgctgggtcagtgtagctggaaggctacgggnccttagtggggagccacagcctttcccactagggggcctctcactctgacatctccctgtggtgttcggaccaagggtggggagggagacacgctggccctaaagggaggtggtaatnagtgaagatctccagggccagnccacagggctccgtccat

SEQ ID NO: 411236 - DNA, 163 bp, Homo Sapiens
  misc_feature (63)..(63): n is a, c, g, or t
gtttggctaatcatcctatgattttcctatagcttgaaaactttttatatcttaaattttttnataattttgaagtattattgtttgggctttgtatatccagtgtattttcaattaaattcccctaactaaagtaattcaaaaggaataaaagtgtaatgtg

SEQ ID NO: 411237 - DNA, 244 bp, Homo Sapiens
  misc_feature (119)..(119): n is a, c, g, or t
  misc_feature (163)..(163): n is a, c, g, or t
  misc_feature (206)..(207): n is a, c, g, or t
cgacctcagtgtaaatcacaaaacgggaagagctgatattggcaaaataattacatggctcatttccttgcatgtcaaaataggatttgattggttgtaaaagatgacaaatacctttncggtttcaatgttcttaagtgggaagtcacttattacagacctnattgggagtaaacaaagctgttagacctttcattatcagtccnnttaatcccttcaataatccccctaaatcagtgaggcg

SEQ ID NO: 411238 - DNA, 347 bp, Homo Sapiens
cctcttcccccaaggagcttgcaattttaggaactaatccagtttgagggctgaatttaagttaaaatcaattactgccctatgtactccttttaaaacaacattaggtcaagaccctttcagtgctaaataaactgatttgtcattatcatacattcaagttttataaatgtgtttttcctcacttcactgaaatatcagaatccagctcaaaaacagaatcaaagaggagacttttaagcttattcaataaaaactatggtacggtaatattcaaaatagtggaaatcattatattatctaaaattctcaggaaactgctttaaccatggattaaataatttacc

SEQ ID NO: 411239 - DNA, 304 bp, Homo Sapiens
  misc_feature (43)..(182): n is a, c, g, or t
tttttatactatttaaaagaatccttaaatgatgggtattctnnnnnnnnnnnnnnnnnnnnnnnnnnnnnnnnnnnnnnnnnnnnnnnnnnnnnnnnnnnnnnnnnnnnnnnnnnnnnnnnnnnnnnnnnnnnnnnnnnnnnnnnnnnnnnnnnnnnnnnnnnnnnnnnnnnnnnnnnnnngatgggtattctatatttatctttcatgttacatttttctttgtggggtttctaaataaaacttgtaacatgaatgttttattctcattctgtattttaaaaagaagctgagtaacaaaagg

SEQ ID NO: 411240 - DNA, 231 bp, Homo Sapiens
  misc_feature (169)..(169): n is a, c, g, or t
  misc_feature (187)..(187): n is a, c, g, or t
  misc_feature (191)..(191): n is a, c, g, or t
  misc_feature (219)..(219): n is a, c, g, or t
tttcacaaagaatttatgattgcttcaccaggtcactagtgagctaaagtcaaggaatgactacaatcttgtagcattttaaagtgattagaatttgagaaacttttactacattatgtgttactatcataagaacactcctttgggggcatttgaataataaaaaggnctacattctttgcaccangtgntcattttcacccacattccagtattttnctctaacttggg

SEQ ID NO: 411241 - DNA, 379 bp, Homo Sapiens
  misc_feature (293)..(293): n is a, c, g, or t
ctgggacagagacctttgcattgctccatgtgttggcttcagctgggacagagacctttgcattgctccatgtgttggggcaggtcttccatttcaatctcctctgccctaatttattagccatacttgtgctatttattacttttaaaccctaatcctttttccgtaatttgtttacattttgcagagtgccagcattttacaatgtgtcttttatgtctcacagaggtcatcattaagttagacctttggcttcatgtgtctcccgagagatggtttataaaatttgcatncttctggcacaggtggtgtggcttagggattaggacacagcctgcctgagttcacacctcatctctcccacttaacactgataatt

SEQ ID NO: 411242 - DNA, 143 bp, Homo Sapiens
  misc_feature (70)..(70): n is a, c, g, or t
aatcctgggggtgatttagaacttagaggcattctcaaaatggaccaagctaaatggtagcctttatttnctgtaatgattcaccatgggaaaattagtaattctttaaacttcttacttaatcttatatgtattccaaattt

SEQ ID NO: 411243 - DNA, 338 bp, Homo Sapiens
  misc_feature (280)..(280): n is a, c, g, or t
tgcatggaaacttaatctattcaggtcccaactttcaggcttctctgctctgacaagtactagaggccaatatgatagactagtctgagttggatgcaagttagccatttccaggaatgataccaggataagtataatggtcgtgaatataaccggattttaagggagaatgattacacctggaaacaaactgtcaatacacaagtaactagttgttaaagatttctaattttgaccaaagatttttactttcctggtatagaaatggaaataaacattnacactttaggttttgaaagcaaccacctcctaacacggttctgagttgggggccaaca

SEQ ID NO: 411244 - DNA, 149 bp, Homo Sapiens
ctccacagctgccacatagaacaagcaaatctgacatcacagctcttttaaaaatctcccagaattctacactggaataaagatcacccagtaaactcagctatgttgattcgtaggaatttctccttggagttaataataatcattag

SEQ ID NO: 411245 - DNA, 281 bp, Homo Sapiens
  misc_feature (86)..(86): n is a, c, g, or t
  misc_feature (107)..(107): n is a, c, g, or t
  misc_feature (265)..(265): n is a, c, g, or t
atctttgcatccctgggacgatttccagttgagcatggtgaataatctttttgataggctgttggatttgagttgctagtattttnttggggcattttgcatctgtnttcatcagggatagtggccttcagctttcttttcgtgtgtgtgtgtccctgtcttgttctggtattggggtaatattggccttgtagaatgaatttagaagaattcctttccttttgatttttttggaataatttaagaagaattagtattagttctnctttaaatgtttggta

SEQ ID NO: 411246 - DNA, 392 bp, Homo Sapiens
  misc_feature (42)..(96): n is a, c, g, or t
  misc_feature (173)..(173): n is a, c, g, or t
  misc_feature (176)..(187): n is a, c, g, or t
  misc_feature (189)..(294): n is a, c, g, or t
  misc_feature (301)..(301): n is a, c, g, or t
  misc_feature (371)..(371): n is a, c, g, or t
ggactgcccgtttgtttatgagacagggtctcattctgtcannnnnnnnnnnnnnnnnnnnnnnnnnnnnnnnnnnnnnnnnnnnnnnnnnnnnnngctcaagtgatccttgcatctcaacctcacgagtagctacgactacaggtatgccccactatgcctggataattgtnccnnnnnnnnnnnngnnnnnnnnnnnnnnnnnnnnnnnnnnnnnnnnnnnnnnnnnnnnnnnnnnnnnnnnnnnnnnnnnnnnnnnnnnnnnnnnnnnnnnnnnnnnnnnnnnnnnnnnnnacaatgnccagcatggattgtccttttcagacccagaccaaagaacaggacttatttgtcccaagaccaatctaggnaaagtataagctgtgttgtca

SEQ ID NO: 411247 - DNA, 216 bp, Homo Sapiens
  misc_feature (109)..(109): n is a, c, g, or t
taacattctctccaacctccccaggtcccatcagtgttgagaaggaatctaggccagctcctgggagatgccagttaagccgctttgaatcctgtgcctttccaattgncccttatagcagtcgatgtcagggattgggacaactttcaaaacaagtccatcaaagtccccatgggcactaggggctctgggaacccagtgtcgagaggcttagag

SEQ ID NO: 411248 - DNA, 249 bp, Homo Sapiens
  misc_feature (22)..(22): n is a, c, g, or t
  misc_feature (96)..(114): n is a, c, g, or t
  misc_feature (138)..(138): n is a, c, g, or t
  misc_feature (186)..(186): n is a, c, g, or t
  misc_feature (204)..(204): n is a, c, g, or t
  misc_feature (229)..(229): n is a, c, g, or t
gctccataggtctaagtttgancttttctagaaaaggatttgcaggacgatctgacgaatcttgggcttccaaattagttccaacagttctagtannnnnnnnnnnnnnnnnnngacagaagcaaataagtaagtttnactttgtgattaaaacaaaagtgaaatgcatttagtcccaggaaatgncaatcctttctgcatctnacttttttttgctgtgacctcgagnttctcttgtcctcttcagtt

SEQ ID NO: 411249 - DNA, 244 bp, Homo Sapiens
  misc_feature (99)..(99): n is a, c, g, or t
  misc_feature (138)..(138): n is a, c, g, or t
  misc_feature (198)..(198): n is a, c, g, or t
attccaatggtaatactaacgaattgtgctatctaaatattggatagtaaaaacgtcaacatttagaaaatgtatatcacacagggaaccaatattttncaaattatccacatctaatattaggcaaccacgcgcaanaaaagacacgttcaaagtacaggagaaatggatggattttaatgtgagatagtacaagangtttattgatatagtttcaagattccatattgtaataaacctttaa

SEQ ID NO: 411250 - DNA, 241 bp, Homo Sapiens
  misc_feature (118)..(118): n is a, c, g, or t
  misc_feature (165)..(165): n is a, c, g, or t
  misc_feature (197)..(197): n is a, c, g, or t
  misc_feature (208)..(209): n is a, c, g, or t
gttttactcttgtgaagatagcactttaatcctaaatgagcatgtaacgtgtgacagatcctatatcagttttaataattgaagcagatagtaataactagattattgacatttttgngtcatgtgttcagctattgcttcaaacttgctcaaattatacttggnattttatagtgttttatttattatatactctncttgtaataanntggtaatctagtttccagaatcatgcaaatag

SEQ ID NO: 411251 - DNA, 366 bp, Homo Sapiens
  misc_feature (156)..(156): n is a, c, g, or t
  misc_feature (167)..(167): n is a, c, g, or t
  misc_feature (220)..(220): n is a, c, g, or t
  misc_feature (228)..(228): n is a, c, g, or t
  misc_feature (257)..(257): n is a, c, g, or t
aattttgtgtcctgtaggaaatgcttccttgggtgtttgtattatagcccaatccaagtcatccctgagaacatccccaggttgtaaggattagtcagaagtcatgatgactgtcctatataaatatttggcctattaactaaaattagtaccttnccatttctccnctttcttgggcggggcagcgggggagtgcaggggaggggaaatagggaacgtncaattgtnttttaagtaatgctcataaaattcttagncaaagatgatcttgccctccaccttggtgacccaccgcatacggggtacatctatctggcctgtctctaggcctagacagaaggaacagggagggttattgttaacttt

SEQ ID NO: 411252 - DNA, 248 bp, Homo Sapiens
  misc_feature (13)..(13): n is a, c, g, or t
  misc_feature (43)..(43): n is a, c, g, or t
  misc_feature (48)..(48): n is a, c, g, or t
  misc_feature (78)..(78): n is a, c, g, or t
  misc_feature (83)..(83): n is a, c, g, or t
  misc_feature (107)..(107): n is a, c, g, or t
  misc_feature (116)..(116): n is a, c, g, or t
  misc_feature (202)..(202): n is a, c, g, or t
ctgtctttctgtnacccagagaaagcttcacaagcatgcctgnaattnagttgcaccattttattacagctgaaaganttgantgtaaagaaggaagtttaatagancatataatncagcagatttattgatggggaggtatctattgtagtttggccagtgaaggcaggtcatagaggaaaatttaggtaagtcggatttnctttaaaaagaggcccaagagttagtacctcaggattttgttttct

SEQ ID NO: 411253 - DNA, 343 bp, Homo Sapiens
tgggaagatcaggtcttacttgtttttctgtcccctccagcgctagatcaacacagtgttaaattagttgaatttcagtggaggagataagacagaaatgaaatctgtgaagattcagactttcccaagttaaaaccagtcttgagttacagatcaagatgatgccagaaataacatcacactgaaacatcagtcaaatgtagtcatcatggcaaaggccaaatgtccctttctttttttgcctccgcctgcctgggaatttagcatcccctaaagccactcatctgggacaggattttagggtgtgtacatgtttttcaatctccacaggacccagctgtgt

SEQ ID NO: 411254 - DNA, 146 bp, Homo Sapiens
  misc_feature (52)..(52): n is a, c, g, or t
tttacacaatcagtataatactgataggaaaacttgactgagttcagaaaangaaaacgaagtagagatctcacttgcatcagaacaaaatgtcaatctattagcagataatattcatcagtattttttgaaaatacaataccaca

SEQ ID NO: 411255 - DNA, 216 bp, Homo Sapiens
ctgggttataacaaacattgtcatctctgcctacatttaaaaggctctggtgttattttaatatgtcttttcaatttagtaattaattctaattttcctttgagctgagatgttattcattgttctcctagagttgcttttatttgttcatatatgtttcccttagcatgtttttcgtatctcttagttattagatacctgaacatttgacattgg

SEQ ID NO: 411256 - DNA, 134 bp, Homo Sapiens
  misc_feature (88)..(88): n is a, c, g, or t
  misc_feature (94)..(94): n is a, c, g, or t
  misc_feature (109)..(109): n is a, c, g, or t
tttctttaatgcatattgagtttctttagttttaacagggcacttatcttggttggacccaaactattcactatgtttcttggggganagcttngaatcttggggtggnagccaattttgtaatagccagggtg

SEQ ID NO: 411257 - DNA, 384 bp, Homo Sapiens
  misc_feature (304)..(304): n is a, c, g, or t
  misc_feature (317)..(317): n is a, c, g, or t
  misc_feature (355)..(355): n is a, c, g, or t
ctgagagccaggagctcttgcggagaagccactgtctgcacgccacctgcttcgatgaccctgctctgccatccctgtgctccaagggccgggccctgccgttgcctgtgccagacgggtctcagggagatgccggccagcaggtatgcatggcgaggcctgggcatcaaggcccggattctatggctgccagtttcattctctcgttgtttgtccccctagcaagacttatgaggttccttgaggacaagactccctcctgccacctggtctgtttcctgaacattcactgcactagcacggncccgggacgcagnccttgggaatcaggccgtcggccatggtagagcggctngcactgctcggcaccgtgacggacgtttg

SEQ ID NO: 411258 - DNA, 412 bp, Homo Sapiens
  misc_feature (23)..(23): n is a, c, g, or t
  misc_feature (319)..(319): n is a, c, g, or t
attacctttttataacccaagantgccattattacacccggaaccctcaccaaataagtaggaaaactacactgagaacaattcggcccagctgtctctggcccatttccctttctaccgcctcttgtgcattccagcaatctaactcgatgaatgatcttccagttggaaagatggggacttcacaatgtgcagacccaaagatctgtcttccaaaggccaatcaccactgtatccttcgttcctttaaatgtcgttgtttatttgaatatattaaggaataatatcaagggtaattatctatgtataaaatgtatgnttaattttttaggggaccatcatactgtttttccacagtggctgtacattttacaattcccaccaacaatgcacagggttccatggttcctat

SEQ ID NO: 411259 - DNA, 254 bp, Homo Sapiens
ctaaataaaatgtgtttgtgagggtggtacaagcaacagtgatatatttctttaagtattttcccccagccaaattccaacaagacaataatgtctaatgcactgtctggtgaatcggaaaatctcctgaatgaaataagagcctctaatacccaaaagggaatgaagtgagtcatcaccacagcctgtgaatgaaaataactgctctgaggaaaacacatgtaaaaaatgacaccatgtggattaaatggggg

SEQ ID NO: 411260 - DNA, 315 bp, Homo Sapiens
  misc_feature (183)..(183): n is a, c, g, or t
  misc_feature (185)..(185): n is a, c, g, or t
  misc_feature (229)..(229): n is a, c, g, or t
  misc_feature (235)..(235): n is a, c, g, or t
  misc_feature (271)..(271): n is a, c, g, or t
  misc_feature (279)..(279): n is a, c, g, or t
  misc_feature (304)..(304): n is a, c, g, or t
gacggagcgaggggacagagcccagggatggaggcgggatgcgggggacagagcccagggatggaggcgggatgcgggggagcagctggtaatgtgcagagactgggagagggcggtgtccaggtggagagtatttcaaggaagagaaggattaacagcgtccactgccgcagatgggccaancngagatgggactggaaaccaaccactgcatttagcatcctggggnctgctnataaccttggtttgatggctcctcaagaagagccanaacccttnaaagttagttcaagagagaaggggngaagagacact

SEQ ID NO: 411261 - DNA, 405 bp, Homo Sapiens
  misc_feature (327)..(327): n is a, c, g, or t
  misc_feature (329)..(329): n is a, c, g, or t
  misc_feature (333)..(333): n is a, c, g, or t
  misc_feature (356)..(356): n is a, c, g, or t
  misc_feature (382)..(382): n is a, c, g, or t
aaaagttgacaaaacataaagtatctctagacagcaaggaaataatttcacgagattgctaaattgatgtcaacacctgcagtctaaaatttatacagttcaatatgtgtcatttgatcactggcatgtcaaatatagaacagctatgactttgctggccagtaaattatctagcagtgaaaatcactttttaggagagtcgcaatcaaacattgtttaacgtgggagcctataaagatgcaaattcctgaacaacagtgtctaagaaaagtacattgggtcactctgaacaggtggtatgaacatttgatttaactgcaagatctncngctntttacgggctttgtcaccatcgnatgaatcttacatccgctgatgactnagagcaagcaggggcgagctgcc

SEQ ID NO: 411262 - DNA, 395 bp, Homo Sapiens
  misc_feature (102)..(102): n is a, c, g, or t
  misc_feature (381)..(381): n is a, c, g, or t
ttttatcacaccctgttttccaagggtcctgttacgtaccattcaccattctgcttagcaatggcttgtgagatggcatttattccttcagcatgtattttnatgttcaccttcctctcacctaaattcctcccccaccccaataacaattagttgttctatttgcatgtagccagagcaaaaaatgatttctttcccttaagttactattattataaaagggacgataaacacatgagtcattataccacaagtatagtgtggaaaggactctaaacataggctcactgaagaaggtggcatttgggccagggctcaaaataaggcagattcagatttgaactgaatagatggaggagtcatttcaaacagaaggaatgncataacatgtggag

SEQ ID NO: 411263 - DNA, 243 bp, Homo Sapiens
ccactcatggcagaagggaaggggagctagtgtgtgcagaaattgtatggtgagagagaagaaacaagagagagggaagggagatagcaggctcttttcaacaaccagctctcatgggaaatcatagagtgagaactcattcactaccatgagaatggcactaggccattaatgagggattcgcccctatgacccaaatacctcccattaagctctacctccaacactggagatcacacatca

SEQ ID NO: 411264 - DNA, 345 bp, Homo Sapiens
cttgcttgattttcccctgtgtgtcagagaatgtgcacattgaaagagagggagctctccatcaccaagagagcccaaaaatagcccaactgatcatagccgttgtaaaaatattcatggatgtaaggaaagatcctttcccagtctgatgctccttgacttgtgatttgctaaatttgagaagccatcacttacacaacctgttttatagacaaatccttccagtttcagaagaaaaaatgtcatctatctcaacctccatctctttttcaaacttcgatagatgagaagaaaatggtgaaataaattttttagaatcagttttgcaagattgggtttcaagga

SEQ ID NO: 411265 - DNA, 326 bp, Homo Sapiens
  misc_feature (97)..(97): n is a, c, g, or t
  misc_feature (302)..(302): n is a, c, g, or t
agttggatttcagctactcagagtaattggaaaaggccacagcctggtgggcttcacagctttcagagacctggtaggggatggctaacaggttctnctgccaggagacaagtggcagacccaggtgtgaaacttttacaggtcccaccaagcctttcttatggagcacagagcataaggacaacttctgcagaaatggaatggggtacttggaaccaaaaatacatacacctcctttcccacctgcctccagcttagtagcccatagtcctctttgtccctcacactgagccagggcctgncttagatgatgaaatgcatggcct

SEQ ID NO: 411266 - DNA, 329 bp, Homo Sapiens
  misc_feature (278)..(278): n is a, c, g, or t
  misc_feature (283)..(283): n is a, c, g, or t
  misc_feature (289)..(289): n is a, c, g, or t
  misc_feature (293)..(293): n is a, c, g, or t
agtatgggtcccttggtactactcaaggtttacaatattgcattaaacacattgaaaaatacacgagaaccttgagggatcacattttactgcaatatgtgatttcctggtgagactccttgtgcagagatgattagctcacagagcgttgtaagcacgtactcgcaacacctgagcatgccgcaatggcaacaggaggtatcttcacaattatgatggtagtacagtatgtactgcagttgtttacacagttatgatttagtactacatctttacanttggntatttncttnctattttgaatggtatgtactgtctgtgtgtacata

SEQ ID NO: 411267 - DNA, 115 bp, Homo Sapiens
  misc_feature (75)..(75): n is a, c, g, or t
cctagctatgtaggcaaggcaggaggagaggggcccagttgggaagcatagcccacaagagtatgagggcctganccaggatggtggcaacagggatggagaggaaggcgtgcca

SEQ ID NO: 411268 - DNA, 295 bp, Homo Sapiens
  misc_feature (241)..(241): n is a, c, g, or t
tgagcaaaacacagaggactgcacctctagtggctcgtaatgagaaagaagatggtctcaaacctgagaaagataatgtggagtggacctctgttgtctcagtattaacagtcccttctaggaagtaggtagcatttctgaaaatagagtgaagcaattgactgatggatttaatctttaaactgcttaggtaaccatcaatctgtaatgagcttaatactcttaactaggtgctattttncatgtgtgctactttgccagtgataaaggattacgaaaaattctttaccagagg

SEQ ID NO: 411269 - DNA, 388 bp, Homo Sapiens
  misc_feature (58)..(58): n is a, c, g, or t
  misc_feature (86)..(86): n is a, c, g, or t
  misc_feature (245)..(245): n is a, c, g, or t
  misc_feature (284)..(284): n is a, c, g, or t
  misc_feature (308)..(308): n is a, c, g, or t
  misc_feature (347)..(347): n is a, c, g, or t
ggtgggcagcttctctctgcagctgctctcccatcatctggctgaatatggggctttnatgggcctcaggggaggaagtgtgtgcnaaatggtccgtgggcaaacatgggcgggcctggaaaaggcaccacaagttcccaccccagtcagtaggatcagcagtctgacacccaggcttcaggccctccccgacttgaaggtggtgcttcaccaaggactcacccactcctgcccaggagcttgtntgcctcctgctgccatttatggtgcccaggctgtttgtnccaaggagtgtctgtgggccagcnctgagctgccctcagcacccccttggcctcttttctgtnctcattggtgcccaaagtccgcagcaggctgaagtggcagg

SEQ ID NO: 411270 - DNA, 379 bp, Homo Sapiens
  misc_feature (47)..(47): n is a, c, g, or t
  misc_feature (51)..(51): n is a, c, g, or t
  misc_feature (138)..(138): n is a, c, g, or t
  misc_feature (200)..(200): n is a, c, g, or t
  misc_feature (203)..(203): n is a, c, g, or t
  misc_feature (257)..(257): n is a, c, g, or t
ccagagttaaatatgcccaggctgaaagaaggtgtataatgtatggncgtncttataccaaatgatttctttggaatttaaacaaatatgtttagtattttattcctaatttaggaagaaaaagcaactaaagttgtnctgacattgtacacagatgagtagcacgtaacttttatttagtaagccccataggatagtanggnataaaagttgttagtgagcaaaacaggagtatcctgccatttgctttaattctncttgtgatagttttgagggtacaataattcctgtgtgcgtgtcactcaagcaaaccagaaagtgtcttttgtaaatacgcattttgggcctcatcctcatggaggttcccgttgtttgttgg

SEQ ID NO: 411271 - DNA, 398 bp, Homo Sapiens
  misc_feature (168)..(168): n is a, c, g, or t
  misc_feature (371)..(371): n is a, c, g, or t
gcccatgaagcagctctcgtggattggagtctcatgcctgcagctctcccatactggagttgcatgctggtggtcctacagtgctggtgtctgggcagtggcctcactcccatggctccaggaggcattgccctggtgagggatctctgtggtggctctgtccctgtnacaagtttctgcctgggcttccaggctgtccatgatatcctttgaaatctaattggaggctggcatgaccccatggcttccacactctgtgcacctgcagaatcagcaccatgtggacactgccaagacctacctaccacttgtgctctctggagcagcagcacaagctacatctggggctgcttgagccatggctggggctnccaaggagcagagtcctgagggtggcc

SEQ ID NO: 411272 - DNA, 313 bp, Homo Sapiens
  misc_feature (75)..(75): n is a, c, g, or t
  misc_feature (226)..(226): n is a, c, g, or t
  misc_feature (232)..(232): n is a, c, g, or t
  misc_feature (281)..(281): n is a, c, g, or t
ttggctagaagggaggctggagcctttcatggtggcttttgaatgccatggtgaatagtttgtcctttatttgtnattgaatagcaatttgtacacttctgagctattagagtgaaatgattaagcctgtggtttaggaagaaagagcctattagggagataaatctttccctagttgtaggaagggttggaacagtatgatatggagagggtagtaatgaatganggaatngaaaacgagaataatttcaatgatactggaggtgcagtatacaagttgngcagtaggtttatgtctaggaagataagaagt

SEQ ID NO: 411273 - DNA, 111 bp, Homo Sapiens
agagagggagaggctcttaggaaattatcttcttgcatattatgttatattatgctatatttggctatttcctaagagctctatcgtattatttccatttatttgtgagga

SEQ ID NO: 411274 - DNA, 309 bp, Homo Sapiens
  misc_feature (74)..(74): n is a, c, g, or t
  misc_feature (78)..(78): n is a, c, g, or t
  misc_feature (234)..(234): n is a, c, g, or t
  misc_feature (282)..(282): n is a, c, g, or t
tgtgttactgaccatgtttttgagagtagtgcccctaaccactttgtctccacttgcatagtgtagtgattttnaggnctctgtatgtcatattataacagaactgactgtatatggctattttatcccataatcaagccaattcttccagaatattaccatcagtattaccacatacatcctcccaaatcttatttcaaagaataaatatatagtcactcatggtttttaagnaaacccaaaactactcaaccaaaaccttgaggaaggtttttccagggntttctaccttaattattcataatgatt

SEQ ID NO: 411275 - DNA, 326 bp, Homo Sapiens
  misc_feature (54)..(54): n is a, c, g, or t
  misc_feature (82)..(82): n is a, c, g, or t
  misc_feature (208)..(208): n is a, c, g, or t
  misc_feature (274)..(274): n is a, c, g, or t
  misc_feature (305)..(305): n is a, c, g, or t
gtttaaaaactgtccaaatgtcattttaatttatgaaggcacccagaataagtnctaatctcatactgccccaatatatttnctgaagccaattctctcttttattaatttttactgaaaatagcacttttttcctccccctgatagtactgggtaatgttagaatgtcctctaaaattctttggaccttatttacattctcaagagntttttttaaatttaccaataagatgtgctatttgaggaattagactttagttcagttgtacatggnttatgtctgctcatatcattcatgtctgagnctttcattttattaatatggg

SEQ ID NO: 411276 - DNA, 306 bp, Homo Sapiens
  misc_feature (38)..(38): n is a, c, g, or t
  misc_feature (152)..(152): n is a, c, g, or t
  misc_feature (288)..(288): n is a, c, g, or t
aattccgaagactattcctatacattagagtgaatttnagactatctccatcattctccagccattcttcagtgggaaaaaaacggtggaattaaactagtggaaacaaggctttctcatctagtcccaatccagtcgataagctgtgtttnccaatcactgctccagcacaatggccctcagtttatttttaagtctatggcatgcctgaaggaccatgttcccatgagtgacacccttctgtaaatgtggtggcacattatgggctgctgttttagaagggactgncaacttgctgggggttat

SEQ ID NO: 411277 - DNA, 283 bp, Homo Sapiens
  misc_feature (65)..(65): n is a, c, g, or t
  misc_feature (130)..(130): n is a, c, g, or t
  misc_feature (162)..(162): n is a, c, g, or t
  misc_feature (241)..(241): n is a, c, g, or t
aattccccctttccaaatgtattttcaatcccttgagtgtctaggcttcctgcttttaaggcctnccttctaacccagggttgccccattcaccttaaaacatttttcaataacccagaaaaaaccaggntgaacatacccaagctccggaaccagcaaatnttgttcgaaccccgctgatgactcccaggggaagccaagaggacaaagacaaggatgaggacgaggacccagggaccgntggtgaatggcaactgctgtcaacttcacttttcaacctcag

SEQ ID NO: 411278 - DNA, 383 bp, Homo Sapiens
  misc_feature (187)..(228): n is a, c, g, or t
  misc_feature (241)..(302): n is a, c, g, or t
  misc_feature (330)..(330): n is a, c, g, or t
  misc_feature (348)..(348): n is a, c, g, or t
  misc_feature (370)..(370): n is a, c, g, or t
ccaaaggtacaacagatttactacatttaagacaggaatcttttctaatctctgtgcctattaaagaagccacctgcttagaagtactttgtagatgaaaaaatacttatgaatccactgtaacttcacaatcttgaatgccaaggaaaaactttactagtttcatttaccactattctttaaagtnnnnnnnnnnnnnnnnnnnnnnnnnnnnnnnnnnnnnnnnnngagacaaggtctnnnnnnnnnnnnnnnnnnnnnnnnnnnnnnnnnnnnnnnnnnnnnnnnnnnnnnnnnnnnnntgggctcaaggaatcctcccatcttagnctcctgagcaaactgggnccacaggcatgcaccatcatgnccagctaattttt

SEQ ID NO: 411279 - DNA, 317 bp, Homo Sapiens
  misc_feature (98)..(98): n is a, c, g, or t
  misc_feature (143)..(143): n is a, c, g, or t
  misc_feature (161)..(161): n is a, c, g, or t
  misc_feature (257)..(257): n is a, c, g, or t
  misc_feature (286)..(286): n is a, c, g, or t
  misc_feature (292)..(292): n is a, c, g, or t
tcagttcatactctggcagttaattttatttcctctaaataaaaatggacaggttaatttattaagcagctgtgttatcaatatggtacgtgtgtgtncttgtatagatagatgtatatgtacatacataactatacattttnctggacacataatatttnaggtgcctattgtatgctagacactgttctaccatcagtaaaaaagcactgccctgttttactgttgattaaaaacaaaattctgaaaatagtgancaatgaggcttacaacatttgttacaggntaaggnatctcaatttaggaaaatgttgtca

SEQ ID NO: 411280 - DNA, 397 bp, Homo Sapiens
  misc_feature (90)..(90): n is a, c, g, or t
  misc_feature (126)..(126): n is a, c, g, or t
  misc_feature (220)..(220): n is a, c, g, or t
aattttaagcaaatgttatgtttaaagactgttttgatgaaaacttttagaattgagttagtagcagaatacatagctaaatgtactttnctacaaatagaatgagatatttgatttaaaatattnctttcctcttgaaataggatgttagatagggacatctcattttacctatcaagttctgagtcttgctttagaactacttcttttaacttaattncatgcatacactggaagacaataatatggctttttaactgcattatctttagttgaaactgatggagaaacaaaaatactgcttataccatattgggtacatgctgaatgtttttaaagactagccaaaactgacattttttaaaattaaataagatgttttagtttcaaattagag

SEQ ID NO: 411281 - DNA, 289 bp, Homo Sapiens
  misc_feature (79)..(79): n is a, c, g, or t
  misc_feature (184)..(184): n is a, c, g, or t
  misc_feature (218)..(218): n is a, c, g, or t
  misc_feature (242)..(242): n is a, c, g, or t
  misc_feature (267)..(267): n is a, c, g, or t
  misc_feature (273)..(273): n is a, c, g, or t
ctttatgaagtagtaattcctgagaggtgtgctggctgaaaacataataggttctggaagagccaggtaaatgcctggntttagacatgcaggggttaatcaaaataatttaggagcgttttcagctggtgagcctcatatgggatcttcgaacccgtggcgagaagaaaaccggtgtttaggnagcaccaggcacagtgctcggaagggagaggctngccggccagtgtgcagctcagctntttcgaggacggaacccgcagcctngctgtntcccagcagacccagg

SEQ ID NO: 411282 - DNA, 217 bp, Homo Sapiens
  misc_feature (61)..(61): n is a, c, g, or t
  misc_feature (176)..(176): n is a, c, g, or t
aatcaggagaactgttagagccataccagagaaaatcacaagaaaggcaggactgcaaagntctagtggaggctgtgagaaaaggtaaaccccttcttaagctcatctgcccctttagttaccactggctgtctcactcctggatttatgtgactcccttagctatactttcccanccccctgggatgttccccactcatcctattcactcacaaag

SEQ ID NO: 411283 - DNA, 375 bp, Homo Sapiens
  misc_feature (125)..(125): n is a, c, g, or t
  misc_feature (353)..(353): n is a, c, g, or t
ttggtcctcaagtcctattttaaaattttgtcaattagaggactcttggttctcttggttgactcattctctgctgatttgttctctgtacttgcagcaaataaagtgcagtcattgagaatgtncctgtgtcactgtgatgtatcaagggatcttcatgttaatatctgtttctctgacaactgtgttttatactttgtactgtagctttcattggagaagccctgggctcataagagtgatttgttgtggcatttccttatggaacataagcttttgaaatatacttgaggtaaatattcatgggagacatccaaatgcagtaatgagagtacaatgaagacagcattttngactttggaaacctgagttcaa

SEQ ID NO: 411284 - DNA, 124 bp, Homo Sapiens
ggcaacaagccaagtagcaaagatataagcaacaatcaaatggagcctgaaatatgataagagcatacatgcactttaacaataattttgatactggaatgattatttcagaagcaatattttt

SEQ ID NO: 411285 - DNA, 299 bp, Homo Sapiens
  misc_feature (91)..(91): n is a, c, g, or t
ggaattcccaaattatgggtagtccaaaagccaaaggcaatgtgaggaaggacactccccagataagaacaaaaacagaaatctgtatgtnctatgtgttacacacagttgcgaataatcagatgtacacacatgatgcaaaggcacgccgctacacatttatgtgatattcagacatatgttcaaatagaggaggtgaatatctttttataaatacaatttagcaagtacaagaatgctgatcagctgcagctcaagaggaaaggggggaaaaaatcttatgggaaattattaatact

SEQ ID NO: 411286 - DNA, 378 bp, Homo Sapiens
  misc_feature (17)..(17): n is a, c, g, or t
  misc_feature (134)..(134): n is a, c, g, or t
  misc_feature (360)..(360): n is a, c, g, or t
ccagtttggtgattctnttctgtgtctgctgatctattggcgtgagaagctgaaagtgaccagccaacagccataactttatgtttagtgagactcataatgggtctcctgctggaagatctcccctctaagantcagtaattctagacctgcaaagtttgaagttgtaagcatgggaaacacaaattccccaaataggtccagatagtgatagagaataagacacttacttgcctacttccatttctcagcccagatattctacctatagtggacatgcccatgcaatgggctattgggtttgaggtatacattgcacggttgaaggacagtgcctcatccttgcaggggtgccctttnccagttggcaccacagct

SEQ ID NO: 411287 - DNA, 373 bp, Homo Sapiens
  misc_feature (137)..(137): n is a, c, g, or t
  misc_feature (254)..(254): n is a, c, g, or t
tagtcagttattgctgcactagagctaaataaaagacataaatatctaaggcacttactggaataaacatcttatttccgctaagaggttggctagggaagctctgcttcagagtatgggttgagtataagcctgtnccacatgtcttttgctctgggaccaggagttgtgcagcccatccttttctcaagacaaaagctgagccaagcaaggacatttaaagcttcacttctgctcacatcatatctattggncaaacattccattgggccaaagcaaatcacatgggccaagtcaagcatcagtaggtctgggggaatattctttcctctactcttggacacatgggaaagggttatgcatactaattctt

SEQ ID NO: 411288 - DNA, 276 bp, Homo Sapiens
  misc_feature (117)..(126): n is a, c, g, or t
  misc_feature (182)..(182): n is a, c, g, or t
  misc_feature (265)..(265): n is a, c, g, or t
gattgtccatacttgattattagtttctaaagaaagtattcttaattccaagcctaatagctcttatgtcattagtttctagtgcagagaaatgtacttgatgaatttttgttgacnnnnnnnnnngctagccaatatgaaggttgccagtccctgccaaaatcagcactaaaactattttncatgagtaataacaataatattcttttttaaatagcacctttaacccaaaaatcttaagcctatataaacattcactcaacantacactcaaaa

SEQ ID NO: 411289 - DNA, 355 bp, Homo Sapiens
  misc_feature (39)..(39): n is a, c, g, or t
  misc_feature (89)..(89): n is a, c, g, or t
  misc_feature (329)..(329): n is a, c, g, or t
tgtattgctaactgtctttgtaactaatttatgtatacnctaaatggtatagcatgtgattttattatagttgattaactttgtaattnctgtaactgcatcgatatcccagtctacctggaaaattaagtctattaaccatagttgctgtgggagacagtactattgccaactgaagcctgaatccttcatttattttgtccccagttacagagtggaggtttagaggagtggggttagataatgctcagattagaaatacaaaggcagctgtcagatcctcccattttatttgtttgaaggaactgaggttggtaaacatcacaagngctagttaactggtgagtagcagccc

SEQ ID NO: 411290 - DNA, 393 bp, Homo Sapiens
  misc_feature (135)..(135): n is a, c, g, or t
  misc_feature (160)..(160): n is a, c, g, or t
  misc_feature (167)..(167): n is a, c, g, or t
  misc_feature (186)..(186): n is a, c, g, or t
  misc_feature (224)..(224): n is a, c, g, or t
  misc_feature (276)..(276): n is a, c, g, or t
  misc_feature (290)..(290): n is a, c, g, or t
  misc_feature (293)..(293): n is a, c, g, or t
caaaagctaactcttaataagaagatgaggaaataaaatcagttcaaaagggaggaatatgcattcccagaattaaaggaccccgggtccagtttgaggaggactcttggccagatacaagccccttgtataatnctcaagagggaggagaccttatttnctccttngaggtgtctagtatgaaanctgcttattttgaaatgtgattctagccattatcaggngcaactgcagataattcccatttacagaggaatgctgctaacaggtgtgggngggagcagcgacancgnaaaattctgctgtcataggtcacgtttatgttggttttctttgaaaatcaaggggtagaaaatttcatgcctctagaggagagagaggaaacacatgagg

SEQ ID NO: 411291 - DNA, 313 bp, Homo Sapiens
  misc_feature (286)..(286): n is a, c, g, or t
tgtctgtatttattaaattgcctttactacttttagatggccatacgttttcaaaagcaaagacctagtaagccatttgtgttcatttgctaagctatcttaggtacaggtccagattataaatgttacctgctaatcagagagcaaatttttaaattaatcacttgtaaatccacattaaaagaaaaagaaacttagaaaaacacataaatttcttttgtgatcccactattcaggaaaatccattgaaaaagcagatgacttatccgtgttaaatttttaaagnccctatttaaactgtcatgtaaattct

SEQ ID NO: 411292 - DNA, 426 bp, Homo Sapiens
  misc_feature (78)..(78): n is a, c, g, or t
  misc_feature (81)..(81): n is a, c, g, or t
  misc_feature (89)..(89): n is a, c, g, or t
  misc_feature (112)..(112): n is a, c, g, or t
  misc_feature (252)..(252): n is a, c, g, or t
  misc_feature (289)..(289): n is a, c, g, or t
  misc_feature (312)..(312): n is a, c, g, or t
  misc_feature (354)..(354): n is a, c, g, or t
ataatttaaagaaaagagaattctacaatgtaaaaccctttaatataagctgttttaataattggaaaacagaatgantantgtttttntttgtcatgcccaattatttcancaagtttttattaataacttgctacatggtaggcacagctgtaggtgttggagatatagaggtaaacaagtctgacatgatctatgctaccacggagttcttattttcaaagtggaaggtagaaaataaataaaaatganctagaagagcaaagtgcctctgaatgagcatgcagangcatgttttcaaaatgtctgtgngtgggataaatagatcagcaacacaccaggccatgcaatttngcagcaaatcacttctgcagtctagctgctgtttttcctactctggaatcatactccccccttcggtcatct

SEQ ID NO: 411293 - DNA, 134 bp, Homo Sapiens
  misc_feature (56)..(56): n is a, c, g, or t
  misc_feature (103)..(103): n is a, c, g, or t
tcggcccaaatctttcttaagttgtgtctggcctttggcagaaatagccacaaagncagggtaggaacgttttactcttcaagtgatgatggcatccgataancttttagagggaggtttttaaaatgcaacgt

SEQ ID NO: 411294 - DNA, 362 bp, Homo Sapiens
cttcccttttgttcccctcagtgtcccttttaattgcttccctccattttccttagcagcatcctagttgatggtctgggttatcagaggagcaaaaacatttaagtgtcaaataatgctcattgtctccctgggatttctaaacagaaaaaatgaagaaagaggcagagaagagcttcacaaggtgtgtgccagctctgcatcatttccagctgctcaaccaccatttctcccattttaggtccccaaaagtaggaggtggggcctcacagagctgctgtgggctttgggtatcaaaagctgcagccaccatatggggcactcctggctggtgtacagggtgggcattgcccaggtctttt

SEQ ID NO: 411295 - DNA, 339 bp, Homo Sapiens
  misc_feature (131)..(131): n is a, c, g, or t
  misc_feature (296)..(296): n is a, c, g, or t
cgcgttatttaaattgtgaaaaataatgaatattaatttggagcataatatttaaatacatgaaaaaagctggctgggaaatgttggcatgacttttcccagatgttagcactgcttcaacttttgagagngcactctgagtgtaagtttactagactgacattactaaaatcattggtgctatagaggcaggagaatacggggaataagaaagccagttgcaagccaacaatcctaaaactcctccttttgccatggactgacggcatattaaatgagatcatgcattttaaggnattaacagtgtacaccacatgtgcgtgttccaataaaaggaag

SEQ ID NO: 411296 - DNA, 132 bp, Homo Sapiens
attaataggaaagatgattgtatagatggtgggctattaactcagatcaggatgagaatcgggagtgcctttacatgtgtggtacccaaatgggtggttggatataagagtaacaaaaggactgaaagggtt

SEQ ID NO: 411297 - DNA, 562 bp, Homo Sapiens
  misc_feature (458)..(458): n is a, c, g, or t
  misc_feature (520)..(521): n is a, c, g, or t
atacccttacatatatattcacagaaaatcatattgcatatactctttctccacatcataaaaatgggtgttgggctctctaggacacaagggaagcaggccaaatttctcatattttcaggaataaactgagtgccccgaaggtgtaataggaaccttttactaacctcatctgacttcatcctcacaccagcattttgtgtgtaaggaaactggccgagagtggttaagaaatatatccaaagacgtatagttccaaatggaacacggatctttttatttaaattccaatcatctttccattatatcagccaatgatggagcagaaagctggtccaggcaatcccagaatagatctttctaggcacccgttcagtgtgaggagggggaagtggccttgccaaggggccagtgagctcaattagggttaacgctgcttcttagcctaccccaggggncaccgcacttaggttgttttgtgcccagctttggcaggaagcattcctcctttcaaagattnnagccttgcggtcatatatcgggtgtaatagggttctttttt

SEQ ID NO: 411298 - DNA, 359 bp, Homo Sapiens
  misc_feature (278)..(278): n is a, c, g, or t
  misc_feature (298)..(298): n is a, c, g, or t
  misc_feature (331)..(331): n is a, c, g, or t
acatgttctccctctttcaattttagcagtaatgtgatcctcaaaaatgcattaatactagttgaagtaaataaacggaagagctccaaaatgcctgcattaaatgcatttttccacactaatgccaatcatccaaagctattttcaacaagtcaggtattcaaagctattcacaccacttgaaagagtaattaccatttactgaagcacttatctgtcctacactgatgggagtaaatgcttctcataggttatctcatgtacattatgccactttnacttaaaatgatcacaattnagtgctataggtttttgggttaatgttttcccngggggagttgttaaaaacatggcatttc

SEQ ID NO: 411299 - DNA, 139 bp, Homo Sapiens
cacatacattttaaactcggtttaatcctgtgrccattcacttatggttcagtttttaaatagtcctagtcttatgvccactgttaaagttcaccaggacataggscattggggaaaggggcctgtaactcttggatta

SEQ ID NO: 411300 - DNA, 143 bp, Homo Sapiens
tgagcaccgtgcccaggctgttttttaactgactttggattttactccctttctatgcaaatttattttagaatctgttccttaaccttagggggttgggttagacaagtttcaagggagcctcaagtgkaaattgcttaagg

SEQ ID NO: 411301 - DNA, 246 bp, Homo Sapiens
  misc_feature (32)..(32): n is a, c, g, or t
gacttcttacaatgcagcagcaagagaaaatnaggaagaagcaaaagcagaaacccccagtaaacccatcagacttcgtgagacttattcactatcactagaatagcatgggaaagaccagcccccataggtccactacctctccctgggtccctcccaaaacatgtgggaattatgggagatacaattcaagttaagatttgaatggggacacagtcaaaccatatcattctgcccttggcccct

SEQ ID NO: 411302 - DNA, 288 bp, Homo Sapiens
  misc_feature (140)..(140): n is a, c, g, or t
  misc_feature (163)..(163): n is a, c, g, or t
  misc_feature (186)..(186): n is a, c, g, or t
  misc_feature (247)..(247): n is a, c, g, or t
  misc_feature (275)..(275): n is a, c, g, or t
gatgatttagtttccaggctagcctacagaagcttatttaacttattatgtctctgagatatactaaggggtagaaaggaagtatagctagctttcccctctctttccaagttacatggttagtcccaagcataattttnagagcacgggagagccggctctngaaccccagggctgtagtctctntggccctgccgtgcgctgacaccaaggcccaaggttcggcccggtagagattcaacacggnttttcttgccccgcgatgaatgtttttngcagaaagagctt

SEQ ID NO: 411303 - DNA, 258 bp, Homo Sapiens
  misc_feature (233)..(233): n is a, c, g, or t
tgctaagtacagcggtcaggaggagggaagctgaccttgaatcagcaccttagttgaatttcctgattgatatgctttgcgtccccctcccttatcagccctctgaacgtatctctaacacagcaggaaccatcgctgtgtttcctgtcagtctccccagctggtatgagaactatccaagagcagaagccttatctaatttgtatttctctccagagcacctaccacagtanctggcacatagctgtttgttcaaag

SEQ ID NO: 411304 - DNA, 338 bp, Homo Sapiens
  misc_feature (58)..(201): n is a, c, g, or t
  misc_feature (237)..(237): n is a, c, g, or t
aaattgcacacacataactctgtggagtgtctaatagtcaaaaataggttgagtgtgnnnnnnnnnnnnnnnnnnnnnnnnnnnnnnnnnnnnnnnnnnnnnnnnnnnnnnnnnnnnnnnnnnnnnnnnnnnnnnnnnnnnnnnnnnnnnnnnnnnnnnnnnnnnnnnnnnnnnnnnnnnnnnnnnnnnnnnnnnnnnnnntattttaaaactaggttgagtatgaatgagaggganaacagaagtgagccagttcataattataggctaaagattatagtggaaatcagatcacatcttacatttcacattattttttcctgtactttggcattaag

SEQ ID NO: 411305 - DNA, 241 bp, Homo Sapiens
  misc_feature (72)..(72): n is a, c, g, or t
  misc_feature (89)..(89): n is a, c, g, or t
  misc_feature (91)..(91): n is a, c, g, or t
  misc_feature (115)..(115): n is a, c, g, or t
cgtcctgacaggctgcccttggcttgcactaccggcctggttcccatgcctgccaagggtgagccaagcatngagggccgaggagtgtntnagcgagcatagggtttggccactntgtacagccaggcacaccagttgtggtagggtgggcagctcctggcaccggcttaggtgttagctccctgcaagtttgcagctggaccattcataccacaagcatcttccacggcttgcactaggg

SEQ ID NO: 411306 - DNA, 183 bp, Homo Sapiens
  misc_feature (118)..(118): n is a, c, g, or t
  misc_feature (137)..(137): n is a, c, g, or t
gggaagtgagatgggctttatgattggagcactgactgataggatggtatataagaagtctggtggagaagaaagcgaatgctttctaccagcagagctgctgcacagccgacagggncctgcgcgtcctgtttttncagagaggtggacagacacagcttcgcatgcctaaagggagacagt

SEQ ID NO: 411307 - DNA, 365 bp, Homo Sapiens
  misc_feature (95)..(95): n is a, c, g, or t
cgcagccagagacaacatgtaaacagcggagagggctccgttcccacagcgcgggatctgggtcccagtttgcacagccctgagtcgagggtggntccaatccaggtctgatacagcatttcaatggtgatgccgcagccttccacactgaggcacttaacaccccattgttcccaattgcattttaactgaaaaaatacaaaaagagatcaaaactgaaagtgcagtttcctcatggtcccaccacatttttggagaagtgtataaatggaggaagtgaaagctccatcttctgccccttccccatgagagagcctctatttcacagccaggtcagtttctttccagactgttaacatccgtgt

SEQ ID NO: 411308 - DNA, 332 bp, Homo Sapiens
  misc_feature (203)..(203): n is a, c, g, or t
tgtgcttttttctttagttgattagtgattgccctagagtttacaatatacatttataaatcattcaaactcacttccaaataacactataccatttactgcttcaagggtagtatgagtaccttaaaacaacaaaataatcctaacttctctttcttgcctcttgcataattgctaccattcattttacaaatatatataancacatataaacatatgtattatatgtacatatgtagttaaatacattgctgctattattttgaataaactattatatgttagatctgttggctataagaataaaagtttctattttatcgttacttatt

SEQ ID NO: 411309 - DNA, 231 bp, Homo Sapiens
aattccttaaattttttgtagaaacatggtttcaccatgttgcccaggccggtcccacactcctggcctcaaacaatcctcctgtctcagcctcccaaaatgctggaactatagttgtaaagcactgtgctgagcttataacagacttttatatagcagagttatttccctgttcaaataatttgaaaaaattaaaaaataatctgtatgtttaaaatgtatatcctattt

SEQ ID NO: 411310 - DNA, 281 bp, Homo Sapiens
  misc_feature (23)..(23): n is a, c, g, or t
  misc_feature (29)..(29): n is a, c, g, or t
  misc_feature (41)..(41): n is a, c, g, or t
  misc_feature (54)..(54): n is a, c, g, or t
  misc_feature (82)..(82): n is a, c, g, or t
  misc_feature (135)..(164): n is a, c, g, or t
  misc_feature (173)..(173): n is a, c, g, or t
aattccaaaaatttttaaaaagnttactntccacagattgnttataataatttncactttcttagaccccaaccctatggancacttttaactcaggaactaccttcttagagtgacctttatctttaaaatgannnnnnnnnnnnnnnnnnnnnnnnnnnnnngtgggaaanattgcaaacatcaaggcagtccttacctaaagcaggtttctggtttaactgctcagtcacagttacacagaaaagttttcactcaaatgatacaggtgagtagggtgg

SEQ ID NO: 411311 - DNA, 318 bp, Homo Sapiens
  misc_feature (279)..(279): n is a, c, g, or t
  misc_feature (283)..(283): n is a, c, g, or t
cccccaccagaggaaggcctgactctaggacaatgggcgtcgcttattcctcttatctggtctttggcagagggcctgagcagtgatgcctacagcagccagtgcaggagctgccttggcctggacatccccaaaagttttgatgtcttctagcagctagaatcccccaaaactgaagtagctctggaaggagcctgaaaagtcttccccaaaagtcaggaaaaagagcctataagcagagggtgaaaaattattatgaggccctgcaagacagacttncagnacttgcccaatcaactcttcataaggtgatggggg

SEQ ID NO: 411312 - DNA, 236 bp, Homo Sapiens
  misc_feature (160)..(160): n is a, c, g, or t
  misc_feature (211)..(211): n is a, c, g, or t
ataaacaacttttcaatacataaattttcaaaaccgagctcaaataggacctttcttaacctgagcattggaaaaattaagtcaggactgaaagcagaaaagcgactctgggaaaacgaatagaagaataaacccaaaacttaaaaagatgataaactgntggattcttaacttccaacgagaagaatgaaaatattagcagtcaacaaantatttaatcacagatattaaacact

SEQ ID NO: 411313 - DNA, 175 bp, Homo Sapiens
  misc_feature (54)..(54): n is a, c, g, or t
  misc_feature (80)..(80): n is a, c, g, or t
  misc_feature (121)..(121): n is a, c, g, or t
ctcctggatgagatacaagggttccagagccttcgccaggcaccagctggtctnaatgaactagaagtttgacgactgtnatccctggcccacctgggcagagcacaaggggccgagtttnaacgtcatcagcaggttcagacatcagcgctgctcatatctttagagactgttt

SEQ ID NO: 411314 - DNA, 263 bp, Homo Sapiens
  misc_feature (208)..(208): n is a, c, g, or t
  misc_feature (241)..(241): n is a, c, g, or t
tatccttttctaggagaccctattctactgagaccactggcagggctgagtgtggtaaggctgaactatgacacaaacaggatatgaccaagtatgtttgttgtttagcttttgttgtttggcttttgtttacaaaaagcttaaaaataacaaaatttggttcttgtcctggtcctacagagttgattctaggccaactgtctctctngcttttggtatggcattaccaaggtcaagcttncagtctgatctccaccttagta

SEQ ID NO: 411315 - DNA, 191 bp, Homo Sapiens
  misc_feature (109)..(109): n is a, c, g, or t
tttgtatagtgaacaaactgttaagaacttttttatgagaaatattttagtatgactatattgcatagagttaggctgatggttcagtgttcagtagattagatacccncattgtttatttccatattgactggttctagctagagctgaaattaggcaaagaatatcttgaactcattttgctatacagg

SEQ ID NO: 411316 - DNA, 304 bp, Homo Sapiens
  misc_feature (147)..(194): n is a, c, g, or t
  misc_feature (286)..(286): n is a, c, g, or t
gacacagtactggctcaggattcacaaaacggggggtattcatgtcaggacctctccctgttcaggagctatgccaaaagaggcctctccctaggtcatctccctaggcaagcctgatgtccacaaattcatttttccatttattannnnnnnnnnnnnnnnnnnnnnnnnnnnnnnnnnnnnnnnnnnnnnnnatattgcctgaaatttccaaagacgcagcatgtgactcggtagctaaagggggaaagagcatccctagagttaagtttcccagggcatttgnactcaaagggcccagatt

SEQ ID NO: 411317 - DNA, 253 bp, Homo Sapiens
  misc_feature (111)..(111): n is a, c, g, or t
  misc_feature (241)..(241): n is a, c, g, or t
ggtcaagatcgacaaacactgcctgttaaaataagacagaagctggaaacggaagataaacctgagagagaaagcatgactctggaatccacctgccatcagagctctctncagaccagtgctccttcccttcctcaccttcctgaatgcctcggcctggcacctgaactccccatcgctgctgccaccttcccccacccacttctttctctttcatgtgtgctacttcatcaattttttnaaagaaaattct

SEQ ID NO: 411318 - DNA, 327 bp, Homo Sapiens
  misc_feature (63)..(63): n is a, c, g, or t
  misc_feature (71)..(71): n is a, c, g, or t
  misc_feature (226)..(226): n is a, c, g, or t
aagaagagaaatggggtagctatttttaagtgtcctgctgttgggagggggaagatgttttcnctcttctnatagctgtagaccagtgggaaaggattttccctactctcttttccctcattgagcactgtgtacccaagtgtatccttgcagagtagtttggtgatgtttgtttcagctcaacaggctcccaaaatccagttcagcctgcagaatttgttttgtnagtgccattacccggccacctgctgggtgcagaggcgtaaagcatttgtaagctgggcacatattgtgtgttaggagtttttgcatctcttctcggcgtcg

SEQ ID NO: 411319 - DNA, 243 bp, Homo Sapiens
  misc_feature (162)..(162): n is a, c, g, or t
  misc_feature (218)..(218): n is a, c, g, or t
gtttctgatgttatttcatactaaacaagttacaggttgtcctatacttctgatttaaaatttaaatcagtgttaaaacttaaaagtattgtgcaacagcaagaaccataggttcagcttactgtatatgtccaattagtgttgctattactattaacaggnctaatacaaatatggtatgatcatttgacacattaagctaaataaacaggtaatgnctaattttgcacaatgctaattatg

SEQ ID NO: 411320 - DNA, 279 bp, Homo Sapiens
  misc_feature (213)..(213): n is a, c, g, or t
  misc_feature (233)..(233): n is a, c, g, or t
cagttttaggttcacagccaaaggtacacattttctgtgtacctccttgcctgcagacttgcgttgacttcttctattatccacatccccaattagagtgctgcatttgttacaattagcctgcacctaaggtccatactttacattgaggttcattcttggtgttgtttgttttctgggtttggacaagtttataatgacatatattcaccnttacagtatcgtacagtctnacttcactgaaaaccttttgtgctctaccctttaaagaagtttttt

SEQ ID NO: 411321 - DNA, 184 bp, Homo Sapiens
tacacaacttattagcttactacaagttcactgataactctactgcaagaacatgtataaattccaagaataaaatataaataaggcattacgaaggttttcttggaaggaagatctgtttgaactgagagataaaacatgaattttaattgttttaattaattattatcacaaaatgaagtga

SEQ ID NO: 411322 - DNA, 262 bp, Homo Sapiens
ctaagaaagcatattaaattaatctagcttgttgtgagggagttaaatctgtttagatgtgcaccagtgtgactataatagtttggtctcaacccatttctggcctgcggctgcagaaggttgactcccagcttgctttcatttgaaagatcccagcaacaaacacatttggcatttccagccaaacccactttgtgcagcgaaggaaaagttgaggcgtgcctctgttgttttcccccaaatcattaggcagaaatgtggc

SEQ ID NO: 411323 - DNA, 234 bp, Homo Sapiens
  misc_feature (14)..(14): n is a, c, g, or t
  misc_feature (68)..(68): n is a, c, g, or t
  misc_feature (143)..(143): n is a, c, g, or t
  misc_feature (152)..(152): n is a, c, g, or t
  misc_feature (183)..(183): n is a, c, g, or t
  misc_feature (213)..(213): n is a, c, g, or t
gtgacagctgcggntccccagcccattttcataggtgccaccaaattagcggctgttggtgaggccgnagaaacgagtctgaagaaatgttctgtgtgaaattggactagattggctctggtatcaacacaggcacaggctgngggaggctngacagccataaacaaaggctaacggcagatntcagcgtatcgggcaggcgggggcatctcntgggaggcctcctaggccact

SEQ ID NO: 411324 - DNA, 304 bp, Homo Sapiens
  misc_feature (153)..(153): n is a, c, g, or t
  misc_feature (199)..(199): n is a, c, g, or t
  misc_feature (249)..(249): n is a, c, g, or t
  misc_feature (258)..(258): n is a, c, g, or t
gaagggccctgaccgaggccaccagcttgtaagtagcagccctaggcttgggaccagggcctcctgaaggtgacagtcctttcagccatgtgtccttgttcctctagttacctccaattaactctaggtaacccagcccagtctttgattctntgttgaaaggtgcgaggtgctggagccgggaagaggtgcgttcttnctctcgacaggaagtgtcatgtgagtttccggttccctctactccactancactctggntcctcacaacagcccacagaggggagacaggaagggaggcacaaag

SEQ ID NO: 411325 - DNA, 283 bp, Homo Sapiens
  misc_feature (58)..(58): n is a, c, g, or t
  misc_feature (78)..(78): n is a, c, g, or t
  misc_feature (124)..(124): n is a, c, g, or t
  misc_feature (196)..(196): n is a, c, g, or t
  misc_feature (205)..(205): n is a, c, g, or t
  misc_feature (209)..(209): n is a, c, g, or t
  misc_feature (229)..(229): n is a, c, g, or t
ctaaaacatgacattatcaggcttactgattttcaaattagggctttccttaattttnaaatgcttggaatgcttatncttctacataaggcaacatgatgctgagacagttacactccctctncttttttaaatatgaaggagattttcaaccatcttttataagtaagaaaatagaagctgtaaatgctctgtnatttgtccngagncacacattggttaatattgnaacaaggagtaaaggaccggcattgtatggctgtcttaaatttacaatagaacg

SEQ ID NO: 411326 - DNA, 281 bp, Homo Sapiens
  misc_feature (81)..(92): n is a, c, g, or t
  misc_feature (99)..(215): n is a, c, g, or t
  misc_feature (218)..(218): n is a, c, g, or t
gttaagtggagtcactatgtgttcctcttaactggaagatttctttcattcagtgtgaatactgaaacatttattttaccnnnnnnnnnnnnctccccnnnnnnnnnnnnnnnnnnnnnnnnnnnnnnnnnnnnnnnnnnnnnnnnnnnnnnnnnnnnnnnnnnnnnnnnnnnnnnnnnnnnnnnnnnnnnnnnnnnnnnnnnnnnnnnnnnnnnggncaaacatttctttagttgtttgaaagtcatctgactatatctgtgaaattaatgtttatttag

SEQ ID NO: 411327 - DNA, 296 bp, Homo Sapiens
  misc_feature (201)..(201): n is a, c, g, or t
cagagctggtcagactgtgacaaatacagattaattctgaaatggaagccttgcattataactttttatagagaattgtacaagcattataaggataattaaatatattgccagtgttgctacatgatgctcttaaaagactaaagtgaatttattagtgagtacaagtatattgcaaactggtttataccttcaaaaagntatattccctgttcactttatttccaatagtgttaaaaaccactgagccaggcaaggaagaccatactgtcttcagcatattttaaagcagtttt

SEQ ID NO: 411328 - DNA, 261 bp, Homo Sapiens
  misc_feature (102)..(102): n is a, c, g, or t
gtattttgatatatttatggtaatcaaaaggattattattttactgttaatactgagcaagagacaatctgtgagtcatccggacagactattttatatttnccttcttttaagctataaaaccaaccaatatggggatttattgagcaattcgggttccatgcctgctgaatgaaatcttcagcacgcgctgttttgtttggcaggacattaccatcaaagtgacggtgagctgcccttgactgcatcctcttttctagg

SEQ ID NO: 411329 - DNA, 262 bp, Homo Sapiens
  misc_feature (117)..(117): n is a, c, g, or t
  misc_feature (240)..(240): n is a, c, g, or t
gtaatctggaaatctaaaatataataatcccaccacataatgttgtatcttcataatgatggactactaacatactactttaattttatccctaaactcacctagagtctacaaggnatttttacaatctccttttcctttccctcacagctgttttgcacatatctggatgcagttatatttcctaagtgccagtgcttcacatatgtaactgatgcatcagttctcacaacaaccctnggaagtagctacaggttgagca

SEQ ID NO: 411330 - DNA, 278 bp, Homo Sapiens
  misc_feature (31)..(31): n is a, c, g, or t
  misc_feature (65)..(65): n is a, c, g, or t
cagttatttatacataaagctaaagaaagtnttcccaggtgaagcctttaaagtaatactacatntgcttcccgatgtttataatgcctgctgcacagaaatcccactttaggtcactagccatcacatgggtaacatgagaaagataatgaaaatattcttgaagtttcctgaagtgcaacaactgggaaatctcttagcaaccaacatgtaaaaatatacctgtacactcttttctattcattttatcttgaacggagcagtaagaaaaccacgtg

SEQ ID NO: 411331 - DNA, 258 bp, Homo Sapiens
  misc_feature (138)..(138): n is a, c, g, or t
  misc_feature (166)..(166): n is a, c, g, or t
  misc_feature (168)..(168): n is a, c, g, or t
  misc_feature (176)..(176): n is a, c, g, or t
  misc_feature (238)..(238): n is a, c, g, or t
ctctattcacttttaatgagaaaatggttatgtcctgggcggagacaccatcatctcttagctgaaaaattcaatcattgtccctgcttgtgccctctttcagtccatattcaacataaccactctgccctgtcacanatagtcagttatttcccttcctaaaaanantcagtggnttccatctcactcaaattcgaagccgatgatctgtgataacttaacaagacctagtaatttnattccccagtattttttttc

SEQ ID NO: 411332 - DNA, 281 bp, Homo Sapiens
  misc_feature (59)..(59): n is a, c, g, or t
  misc_feature (163)..(163): n is a, c, g, or t
  misc_feature (228)..(228): n is a, c, g, or t
  misc_feature (251)..(251): n is a, c, g, or t
gacatgacagctgaaccagtgaagaatggcattttagccaagagtcagccaaatatggntcaagagtgtgatgtggttctaaactccagtatccagaacaagacagcacttttcaactgcttgccctggagtgtcatggcagtactcactgttatagtatgtnaggaaagctgaagaaatcggaggtgtttagattggaggatgcaaatagcaggattttagaaactncagagcacaataatgctatacgngtcaagaatgagctgggttcttattgtgag

SEQ ID NO: 411333 - DNA, 207 bp, Homo Sapiens
  misc_feature (168)..(168): n is a, c, g, or t
cactgtttcatatcatatagaaaaattcactgaaaatagatcaacaacctaaatataagggctaaatcatgaaactcttagaaaaaaataaagggaaatcttcatgaccttggatctggcaatggattcttagatagaaaaccagaagactgagcaacaacataaaanatagattagttagactttgtcaaattttaaaacatttgt

SEQ ID NO: 411334 - DNA, 295 bp, Homo Sapiens
  misc_feature (169)..(169): n is a, c, g, or t
  misc_feature (189)..(189): n is a, c, g, or t
gaaaaaagagaaagttttcaaatgcctgggggagatcctcttattcttaggcaagtggttcttccaccagagagaaaagtttaattactgcctgatggagctgaaccccttgggtggggaagggaaaggctgcagtggcttctggatgggaaccagccacccagctgtntgagactcttgagccatgtntcccagccccagcatggaggggagggggagcaaggagcccctgctcccctgtcctgaaaaaggaaggaaagggcctttcccccaaccccagggagccacagggttt

SEQ ID NO: 411335 - DNA, 383 bp, Homo Sapiens
  misc_feature (38)..(38): n is a, c, g, or t
  misc_feature (79)..(79): n is a, c, g, or t
  misc_feature (175)..(175): n is a, c, g, or t
  misc_feature (195)..(195): n is a, c, g, or t
  misc_feature (216)..(216): n is a, c, g, or t
  misc_feature (265)..(265): n is a, c, g, or t
  misc_feature (325)..(325): n is a, c, g, or t
ttttaatgtttccatttttttccagctgacaatttttncttcatgtctagaaagtcattcaatgactacagatattctnctacattgtaacctagtaattctatgattttaaataatactttcttagatgtgtctggatttcaccttataagacataagaaagatagataaaccnctttatgttcagatattttnctacttgtttcaataaatttnttgaaagcccctacttttgagaagggagttaaatttcctcttaactagntacattgatttacctcttaaataattctggagagaatgaggagccggcagcctgtttggntattcattttattggtaggaatgttggaccccctcccagaatggggctccttgggttt

SEQ ID NO: 411336 - DNA, 372 bp, Homo Sapiens
  misc_feature (25)..(25): n is a, c, g, or t
ctccccaacaggcttaaagaaagantccatcagcttcacagaaatgtcctttgagctcatgtggagcaaaggcagacgccttgttatacttcctgcccatgtggaaactctgatgggtcttgttttcccaactctcttcctatcttgtgtagttaacttgcacaccctccttagcaaactgcacaactttttaggataaataaaagtcctctttgtacttggcaaaagtcaagctgcctgccatagcctttgtatagaacacaggaaggggctgaccagtcagccgacaagcactgtacttcttgacaactgtccacggtattcaggtgtaaaattgatgatatgggaaattcaaaggacgctatgtgggga

SEQ ID NO: 411337 - DNA, 323 bp, Homo Sapiens
  misc_feature (165)..(165): n is a, c, g, or t
  misc_feature (294)..(294): n is a, c, g, or t
  misc_feature (301)..(301): n is a, c, g, or t
ggaataaaatgcctacacagaagcctctatctaacagtcctgctgggtggggcattacaaagagaggccacaggaaaacctttgagagtttggagcctgctgcgtgagagagataaaagtagaaacagcaaattggctgcaatacgaatggcaggtgcatttttncactggaggcaagtttggcaatttagttttcaatgaccagcttgtctctttaaggttcacctttcaaagtcctcctttttgccctcaacatacatcgctaaagccctgtctcatcttgagtccccacgntccaggnaacagcagctcttttactctgg

SEQ ID NO: 411338 - DNA, 191 bp, Homo Sapiens
tttacccctctttgtccgaaaaactaaggctaaaagcagtagcatttctaccatccctccctcactcagtccattctcaggaaacacagagcccaaaggaagtatccaaaggaaaatgatacgaaattctaatgcttaggtactacttcaggtaccagtgctatagaaaaagaccaaagagaaataattgg

SEQ ID NO: 411339 - DNA, 265 bp, Homo Sapiens
  misc_feature (37)..(37): n is a, c, g, or t
  misc_feature (64)..(64): n is a, c, g, or t
  misc_feature (145)..(145): n is a, c, g, or t
  misc_feature (167)..(167): n is a, c, g, or t
  misc_feature (193)..(193): n is a, c, g, or t
  misc_feature (205)..(205): n is a, c, g, or t
atttaaataggaattctgtccattcatttcacatgtntatcctgggaggcgtatcccgggagtnttcagcaggtgtctgggaggtttactcgtgtccctgaagtgcatgctgctaacgggagctatgcacagagaaacacctgantgctcaagggcaagcagacagntcctgtaacctgtgcagataacagtntggcccaggctnttgagactgtgcacacctgggagagggcaggtaggcaggatgcagactgctagagcagct

SEQ ID NO: 411340 - DNA, 280 bp, Homo Sapiens
  misc_feature (22)..(22): n is a, c, g, or t
  misc_feature (44)..(44): n is a, c, g, or t
  misc_feature (67)..(67): n is a, c, g, or t
  misc_feature (72)..(72): n is a, c, g, or t
  misc_feature (131)..(131): n is a, c, g, or t
  misc_feature (160)..(160): n is a, c, g, or t
  misc_feature (228)..(228): n is a, c, g, or t
  misc_feature (254)..(254): n is a, c, g, or t
aagactatgctttctttaattncattataaggttcatggaaaantggcaatatatacagtccaaggnaagcncttctatacataattatttgttgtacagaattcattatcacttaatcactgacagactntttctcaaggccattggctggagcctggnagcatcattgctgcagaggaacaatgatttgtgaagattcagaggctcctcgtgctacactggatgtnttcatggacgagctgcatgttaagtncatatgggcacaatctgatcatattt

SEQ ID NO: 411341 - DNA, 268 bp, Homo Sapiens
  misc_feature (36)..(36): n is a, c, g, or t
  misc_feature (50)..(50): n is a, c, g, or t
  misc_feature (56)..(71): n is a, c, g, or t
  misc_feature (194)..(195): n is a, c, g, or t
  misc_feature (208)..(208): n is a, c, g, or t
  misc_feature (237)..(237): n is a, c, g, or t
  misc_feature (248)..(248): n is a, c, g, or t
agttctctccctctccattgccagtatcctaatctnagctaccatcattnctttcnnnnnnnnnnnnnnnngccttgaatatcaatctggccccccagatggtcataccacaatcactcttaccttcttccaatctttctcttctccccaaccagaatgattctttgaaagcttcagtatgatgcatatgacgnngtcattcatttgntcaaaatccttcagtggcctgccgttggntttttttatgnaatataaaacaaaacctcgg

SEQ ID NO: 411342 - DNA, 291 bp, Homo Sapiens
  misc_feature (70)..(70): n is a, c, g, or t
  misc_feature (97)..(150): n is a, c, g, or t
  misc_feature (257)..(257): n is a, c, g, or t
  misc_feature (274)..(274): n is a, c, g, or t
aattacctacttctaaattgaatcattatccccaaagaaaagtgctattagaaccctgcagactccaggncatctgcaatatacatccaatctcatnnnnnnnnnnnnnnnnnnnnnnnnnnnnnnnnnnnnnnnnnnnnnnnnnnnnnnggtacacctcattttattttattatgttaatttaatccccaggtagaaagaatgagcttctgttgtacttcaatgtttaaaatctggccaatttttaatgtttacanaattatttttaattttnagagagtataatttacc

SEQ ID NO: 411343 - DNA, 105 bp, Homo Sapiens
gtgaaatggatggaaattcaataaatacaagaggagcactttactctggctgaaagattacactctgaaacgatacagtgaaggtactgaaaaatgaacattttt

SEQ ID NO: 411344 - DNA, 363 bp, Homo Sapiens
ggaaaacctaacatggagacagggagacaccctacccaagcagctctttagaattagaagcacagttgcggcctgttggttaacttctctgaatgtttttgagaactaagaactgtgtgactagatacttatgtcctaatccttgcctgttaataactgctttttatataaacaactgagactatttaaggacactacaagtctctacacagttttagaaacctagcacatttaatttaattgtttgtattgcttaactcagtgactaaagatgttcagaggttaggctagatctttgaaaaatgtgttcattagaggtccactgtctgctttacctgggaaaggaaaggcaggatggcaggt

SEQ ID NO: 411345 - DNA, 318 bp, Homo Sapiens
  misc_feature (190)..(190): n is a, c, g, or t
  misc_feature (211)..(211): n is a, c, g, or t
  misc_feature (237)..(237): n is a, c, g, or t
  misc_feature (277)..(277): n is a, c, g, or t
  misc_feature (295)..(295): n is a, c, g, or t
ctttagagtttgataatataagagaatggctgtcttaattatagacatagactgttttagggtttaagagtgaacagaaggctgtctttatgttttcagctctgtgcatggccagcttgatgttcaatgcacccggtcctcacagggagcaacattattatataagtatgcattgtatttggagctaccngtgtttgatttttgtgttggngtaaatactgcagttaagaatcatgnctttgatatcgtaaatcattacctagacaatttgagacangaaatccttcctcagcantacaactgttgctgttcaagctt

SEQ ID NO: 411346 - DNA, 209 bp, Homo Sapiens
  misc_feature (48)..(48): n is a, c, g, or t
  misc_feature (108)..(108): n is a, c, g, or t
  misc_feature (179)..(179): n is a, c, g, or t
gtatatatacttaaaaatgtctaatcatgcaaggcaaaatagaatctncattctcttttaagtattttgtttaacactcaagatttagcagaatatgatgtgaatctncgcttgagttaacctcctttgtaactagggataaaagtattttccttcttgagaggtgctataggattcancagatcacaaattaataaaattggcaatta

SEQ ID NO: 411347 - DNA, 241 bp, Homo Sapiens
  misc_feature (217)..(218): n is a, c, g, or t
cttaaatgtcaccacctctacaaacttcctaaagaaatgtgaccttttccataaccctaatttattcaatatacgtgtaccattttgtgtctattttcattcatccaacaaataatcactgagttactactacatctcggaaactgtgtttggtttggggatacaaattatcatggctttccttatgtaacttacagtccattggggtattgacagnnaaatcatcaacaaattaatttaa

SEQ ID NO: 411348 - DNA, 272 bp, Homo Sapiens
  misc_feature (207)..(207): n is a, c, g, or t
  misc_feature (239)..(240): n is a, c, g, or t
gagccagcataccactgtgtgtataattaatttaaattcaaattaacaaattcaatgcatttatgtattcaagaaacaaatattcatttagtatctacaatgcagaatggttgctgccctcttggaacagggtcccagcagaaaacagaaagcattctgtatgctttctgtttccttaagaaacagaaggaaaattcaatgaagggnctattttacaaaggtgtaaacaagtttaaggnnatacaaagagatgctgacacgtctgtgaatat

SEQ ID NO: 411349 - DNA, 294 bp, Homo Sapiens
gcccaatttccttagcagggaagtttccaaacatttaaatatgcaaatgtataaaggcaaatgagatatcatttaatttgtttattgtcttacagtgaaagagagcaaatgagcaagttgatgcctttatggcaattatttttagtatgatttcttttgtgctaaggtgtagctgaaggcaaacctcaaattctagcatgaacatgcagcagcaataacatgaatattttaggggctatgcgattctttttgtgggttatggttggaaataaaattttaagttacaactccttt

SEQ ID NO: 411350 - DNA, 323 bp, Homo Sapiens
  misc_feature (77)..(77): n is a, c, g, or t
  misc_feature (144)..(144): n is a, c, g, or t
  misc_feature (289)..(289): n is a, c, g, or t
aaaacaaagtcagttgtacaaatggaaaaagtgcaaatgaaaaatgatgacctttaacaaggcaaggacagtaagantaagaaaatactggattgcctctcattctctgaaaaatcctaatgaatatcagatgtagtgattttntaccttccccaatttatttcactctcctcccacagctgataaataatctatgaaatacagttgtcctgccccttattttacttgtcattatttgttttcatttattttgactgggttaatgcactaatggctcatttatctacgntgatcaaaatttggttgcaaaggacagccctaaa

SEQ ID NO: 411351 - DNA, 270 bp, Homo Sapiens
  misc_feature (189)..(189): n is a, c, g, or t
gccaataccatgctgtcttaatttgtttatagatttgtaagtatgctaatttctgataaggtatctttgatatgttttctttaggtgctgttttgtcatgggtctgtctattatgcaaataattaaagtatttttactttatttagtgacagatttaaccatattatattttcctttattaaaattttncatggaaattaggatgaagtaatggattatgggtacactgtaatttacctaattatatctagtgtggtatatttagttgct

SEQ ID NO: 411352 - DNA, 265 bp, Homo Sapiens
  misc_feature (161)..(161): n is a, c, g, or t
  misc_feature (165)..(165): n is a, c, g, or t
  misc_feature (207)..(207): n is a, c, g, or t
  misc_feature (240)..(240): n is a, c, g, or t
cacatttcaaagggtcatttattattcaatggatttattttcacgagttattttctgaatttcctagccgcactcaaaacataattaaacttacaaaaatgctgtatgcacacaatttatcaggaatatctactctctgaaataagtacagcacaaatgtntttncttaagtcaagaaaactgtatcattgtatttacatatatatncaccactaaggaaaattaaattaattgcctggntacttcacagcagggcagccactag

SEQ ID NO: 411353 - DNA, 268 bp, Homo Sapiens
  misc_feature (88)..(88): n is a, c, g, or t
gatcttttattaattcatctacaaagtggaggataatagaacctttcccgctgagctgttttgagaactaaacaccacaatgtttgtncggtacctgcacagattgccgtagcagggtgtgcaatcagcaaagatttcctgaatcccaatctgacccattgtcgcatggcatggcaacttttcaactttcagaaaaacattgaattaaggcccttgcactattatttcaaagcacacgagtgcaattgggatgtgattttgaacacag

SEQ ID NO: 411354 - DNA, 195 bp, Homo Sapiens
  misc_feature (95)..(95): n is a, c, g, or t
  misc_feature (135)..(135): n is a, c, g, or t
  misc_feature (149)..(149): n is a, c, g, or t
gatcagccataggaatgttaaatgaaattgcacagaggaaagtttaatatatgtctagagattatacatacacttttttaagcgtaaaaagaagncatctagtaatgacagatattctttttatatacaagcaanagaaagtataaggnggtctacagtgcacatccacaatctgtgcattcacatattatgggg

SEQ ID NO: 411355 - DNA, 286 bp, Homo Sapiens
aatggtatttttcttcaagcttagcttctccttcctaatttgcttgcattcttaatttttttagagctctcaagtagttgcagtttatgttttgtccactattttcagttgtaatccatgagagacagtggctgtagtggacttgttccctcttggctagcaataggagttctctgtatctatgcacgtttgtattgattctccatagctcacagtgtctgtcacctaggtgatgagcaaaacgtatgtattgagtgaaaggatgaatgaatagacaaagggaatg

SEQ ID NO: 411356 - DNA, 103 bp, Homo Sapiens
  misc_feature (42)..(42): n is a, c, g, or t
aggaccccagaacatgtcactctgtgtcctcaggtctctggntcccacccaatgtggctgaaatactgccttgccaatccccttctcagacttgccctcttct

SEQ ID NO: 411357 - DNA, 328 bp, Homo Sapiens
  misc_feature (180)..(180): n is a, c, g, or t
  misc_feature (192)..(192): n is a, c, g, or t
  misc_feature (256)..(256): n is a, c, g, or t
  misc_feature (258)..(258): n is a, c, g, or t
acattccagccactgtaggcctggcctttaccaactcagaggcactgcagtggccatcagacgaaaatgtgacatcacagatcctcatagccttgaggatatgacaaacaagaccaactgagagaaacaggtgatggtgacccgagggtcactttgctacaaacatactcagagcctgtntgagggcaagtncctggggctgccgaactcaggattagtctcaggcagctctgcctcccaggcctcttcgggtttntnctcaaacgattgcctcattttgagatcattcaaccatgttaaaactgtaggagagtagagcggcacatct

SEQ ID NO: 411358 - DNA, 176 bp, Homo Sapiens
  misc_feature (31)..(31): n is a, c, g, or t
  misc_feature (46)..(46): n is a, c, g, or t
  misc_feature (117)..(117): n is a, c, g, or t
  misc_feature (129)..(129): n is a, c, g, or t
  misc_feature (147)..(147): n is a, c, g, or t
ctcttaggatgttcaccctttggttcctggngacaaaatgattctncattgaacatttaaagacacctcttgcttctttaaatcattttagacttcatagaggtatcaggaaatttncagaattgtggngccatgttgacaactgtnctgttggcagactggcagctgaaataggg

SEQ ID NO: 411359 - DNA, 250 bp, Homo Sapiens
  misc_feature (45)..(45): n is a, c, g, or t
  misc_feature (76)..(106): n is a, c, g, or t
  misc_feature (117)..(117): n is a, c, g, or t
  misc_feature (120)..(120): n is a, c, g, or t
  misc_feature (170)..(170): n is a, c, g, or t
  misc_feature (182)..(182): n is a, c, g, or t
  misc_feature (222)..(222): n is a, c, g, or t
acacgcaggcttagtgaggtctagttatcttcctactagtactgncattgctagccgctctataaggttgtaattnnnnnnnnnnnnnnnnnnnnnnnnnnnnnnncaccgtatctnagnatcacaagccccctcatgcaactcggggtaaggaaactccttagccaggncatacattgggntcacctccctaactgaattcagtgcaacacccaactaagntctctctcttccccctgtttaagcagcc

SEQ ID NO: 411360 - DNA, 284 bp, Homo Sapiens
  misc_feature (97)..(97): n is a, c, g, or t
  misc_feature (113)..(113): n is a, c, g, or t
  misc_feature (147)..(147): n is a, c, g, or t
  misc_feature (154)..(154): n is a, c, g, or t
  misc_feature (238)..(238): n is a, c, g, or t
caaggtttcacataggcaggaagcaaggaggatagtgaagcatctaggtggaggtggaactcttactgagaaaaacatgaagtagtaaaatcacccnttctttgatataaatncatttagaagtcaatgagggcacttacagctgtntttcccntcactaacttttcatctcttgcattctttacttctctttctcaatttattcatcttgagggatacttatcctgagttgactctnagcagcccatcctccaaaacacaaacaaatgttagggtgagaagtt

SEQ ID NO: 411361 - DNA, 385 bp, Homo Sapiens
  misc_feature (56)..(56): n is a, c, g, or t
  misc_feature (155)..(155): n is a, c, g, or t
  misc_feature (227)..(227): n is a, c, g, or t
  misc_feature (348)..(348): n is a, c, g, or t
gattttttgaattctttgaactctaccttgaggtgtcaagtataatcctgtttttnccattattgttacaaagagcatgctgtagagaagacacattagatttccaatgacgaaagcagagatacaggaaccgagcaaagataaggatgggtgtnttaccagcaccagaaggaatggaaggataaagtacagggtttgatagttaggatggcttcagtatccatganctatgaaagtctaccaaaaaaatagtgacagtcaaacacaggagcaaatctgattctagggcacagagtaattattcactggcctattttcattttgttggggacagtttttactataggnccatttaataatatcactccttctcaaaaccattgtg

SEQ ID NO: 411362 - DNA, 308 bp, Homo Sapiens
  misc_feature (209)..(209): n is a, c, g, or t
  misc_feature (219)..(219): n is a, c, g, or t
  misc_feature (251)..(251): n is a, c, g, or t
agtttggagatgaagtgggggtgtgggctcccctgttttcccaaagcctctttggagaggaaggtgctctaaggctatgtgtggtatgtagtcgggtttctggggaagagaaggctttgaggctagagtgtctgtcccatcccccatcatttctaactagccccccagctctaggagttatctttctccgaaggccccaaatgattatncagtctgggnggggaagaaggtgaatgaaatataagaacttngggagggaaaggatggtctccttactgggctacaacccacaaacggtgcaatatttt

SEQ ID NO: 411363 - DNA, 229 bp, Homo Sapiens
cttaacaatgttaatgcttccaatccatgagcatggagtgtctttccatatatttgtgtcttctgcaatttcttttagtaatgtttttggctttcactgtacaagtcttttgcctccttggttaaccttattcttaagcatattattatttttggtgctattagaaatggaacagttttaatttccttttcaaatcattcgttgttagttatataaaattcagaaattc

SEQ ID NO: 411364 - DNA, 290 bp, Homo Sapiens
  misc_feature (107)..(107): n is a, c, g, or t
  misc_feature (115)..(115): n is a, c, g, or t
  misc_feature (234)..(234): n is a, c, g, or t
tcgaggatctcacattgcacatagttgtcctgtatctacagtctctgctaatcaaggacagctcctcagtcttcagcacctgggcttttacaaagagcactggtcanttattttntagaacatccctcagtttggttggggttttctcatgattagattaagcttattcaccttaggcaagaatacctcagaactgatgctgtgctcttctcaatacatcctacatcagagggnacatggatggttgattttgtcttcattttgggtcatatttaaacttttgattactt

SEQ ID NO: 411365 - DNA, 206 bp, Homo Sapiens
  misc_feature (31)..(31): n is a, c, g, or t
  misc_feature (156)..(156): n is a, c, g, or t
  misc_feature (186)..(186): n is a, c, g, or t
gagaataatagttcccatctactgctctgtnctgaaatccaaacctccactcacagctgacctatcgtaacctttgccagcccctcccatcagatgctaggaggcagtttgttctgcaagcttcccagcaaacaccaaaggcccaagcaccacttnaaagtgtcatttctctgtacagaacctctncaagcccagtcacaagccca

SEQ ID NO: 411366 - DNA, 377 bp, Homo Sapiens
  misc_feature (114)..(114): n is a, c, g, or t
  misc_feature (224)..(224): n is a, c, g, or t
  misc_feature (367)..(367): n is a, c, g, or t
atggcttctttccttaaacctcatgagccaacatgtgttaacctcacatttttctcctgcaatttccccacctctctcagctttcatagaattgaagagagttaggtccttgtnctatattaggcttacaagaatgttgttgctgatttggtcttttatccaaactactaaactttctccatattagcaataagggtgttttgctttcttatcatttgtatgtncactggagtagtacttttaatttccttcaagaacttcaactttgcattaaaaatttggctgtttggtgcaagaggcccagcttttggccgctcagctctcgacatgccttccttactaagcgtaatcatttctagctttaganttaacatgag

SEQ ID NO: 411367 - DNA, 323 bp, Homo Sapiens
  misc_feature (14)..(14): n is a, c, g, or t
  misc_feature (29)..(29): n is a, c, g, or t
  misc_feature (197)..(197): n is a, c, g, or t
  misc_feature (200)..(200): n is a, c, g, or t
  misc_feature (252)..(252): n is a, c, g, or t
  misc_feature (259)..(259): n is a, c, g, or t
  misc_feature (264)..(264): n is a, c, g, or t
  misc_feature (299)..(299): n is a, c, g, or t
gtctcatgtctccnctgactgtgtatttncaatagcctgtcttcaagatcactaattctttcttctgcctcatcaattctacttttgagactgatgcattcttcatatgtcagtttaattttttagcttgtaaatttttcagaatttctgcttgatgttttaaaagcttgatgtaagaacacttatttcaatctccnggncaaatttatctgataggattctgaattccttctctgtgtcatcttgaatttngttgagnttccncaaagtagttattttgaattccctctgtgaaaggncacatatctctggtttctgagggc

SEQ ID NO: 411368 - DNA, 329 bp, Homo Sapiens
  misc_feature (168)..(168): n is a, c, g, or t
  misc_feature (208)..(208): n is a, c, g, or t
  misc_feature (316)..(316): n is a, c, g, or t
taatttttgtttttatacaactatatttcagcctgcttttaaaatagtcaagtaattcttaatatccccttctgtgtctaaagtcactttggagaagcagcaattctgtcatttaaagtaggacctccctattagaatcagaaatgtaatacattgtaatactatttnctactctcactgctatcactgaccattatgcattattttnccaaattgaaagcagcttaagtcaagcaaaaggcagtggcaaaagttgcgggcattgtgcaagcagcatgtattaaacaatccaggggaacttggcaacccccagagncacagacggtgcc

SEQ ID NO: 411369 - DNA, 108 bp, Homo Sapiens
ttcagcaattttaaaggtgacttccaataaaatatgtatgtagatttacttcggggctggtagcctgggctgtaaatttataccaagtcaaccatggaaagcccttca

SEQ ID NO: 411370 - DNA, 256 bp, Homo Sapiens
  misc_feature (45)..(45): n is a, c, g, or t
  misc_feature (128)..(128): n is a, c, g, or t
  misc_feature (173)..(173): n is a, c, g, or t
  misc_feature (214)..(214): n is a, c, g, or t
atttgtcaggcactattttagggactacagatattagtgaataanttgtccaaaatccttccatttatgaagttaactttcatgccaataaaaaagcaaaataatgaacttggtttagtatataatancatgatttcagagaataatataaagtaaataaaattgggtaagangctagaatgtgacacaggtgaggtgtgagcatattcaagantgttgaacagcttcaactttggatgcttcaggaaagctactt

SEQ ID NO: 411371 - DNA, 315 bp, Homo Sapiens
  misc_feature (56)..(56): n is a, c, g, or t
  misc_feature (211)..(211): n is a, c, g, or t
  misc_feature (273)..(273): n is a, c, g, or t
gacaacttacagtcaatgtgataagcaagtactgtgccatagtttagttggcagtnttttttaactatttagtagtacatatagtaatgatgtatttcctcagagctgatgaaacaggatggtgaataaacaaaaggtagatcagtggatatggtaggctaccaacattactaccactcatctaagatttaaggaagtatatccatatttnccgaaggaaatactaaaaggaaaccagcaactattaaaactggatgccttataggagacaanggggatttggtagacacagggataggggtagaaaggaaattt

SEQ ID NO: 411372 - DNA, 346 bp, Homo Sapiens
  misc_feature (157)..(157): n is a, c, g, or t
  misc_feature (161)..(161): n is a, c, g, or t
  misc_feature (193)..(193): n is a, c, g, or t
  misc_feature (201)..(201): n is a, c, g, or t
  misc_feature (205)..(205): n is a, c, g, or t
  misc_feature (229)..(229): n is a, c, g, or t
  misc_feature (302)..(302): n is a, c, g, or t
ctccctatactagcagagactaggaggcaggaaccttacttgtatgacaacatgtttttcccaaggcagtgagcaatctcaaggacactgcaggccaggtaaaatagaaacagcacaggttaacccttgacagtcccaaggacaaacactggtcaantggnttccaaaaacagaacgctttactcagacaaantctctgtntganccccaaaagtaaagcagataaaantggaggccatttaggtgaagcagggttgatgacacagaacccctggcctggggcatctttggaatcccaagancaccttaaaatgaagtccacagactttaaaatctccctcctttt

SEQ ID NO: 411373 - DNA, 199 bp, Homo Sapiens
  misc_feature (103)..(103): n is a, c, g, or t
  misc_feature (159)..(159): n is a, c, g, or t
  misc_feature (179)..(179): n is a, c, g, or t
gtgaggggaggaaagggatggaacaggattcttagaggagggtgtacttgaaattaatggatgagtttgacattgaacagtagagtcagggaaaaagagcagngggaacaatttgtaggttcaaattgtttgacttgccaattcaacataaatacaggncttgatcacaactgattaantgcagcatatttaatattat

SEQ ID NO: 411374 - DNA, 187 bp, Homo Sapiens
  misc_feature (118)..(118): n is a, c, g, or t
  misc_feature (124)..(124): n is a, c, g, or t
tacagcaaactcacctgtgtatttgtatctttatataagcccagataacagtaaataaagagagcgcagagaatatttactggacagttttatatggctcataaaaagaaaccatctnctttgntcctcccaagaggatttttgctacctaaaaatgcagctgtcctgcttcttgaacagaaatggg

SEQ ID NO: 411375 - DNA, 290 bp, Homo Sapiens
  misc_feature (13)..(13): n is a, c, g, or t
  misc_feature (68)..(68): n is a, c, g, or t
  misc_feature (221)..(222): n is a, c, g, or t
  misc_feature (242)..(242): n is a, c, g, or t
  misc_feature (268)..(268): n is a, c, g, or t
ccagatgaatganttgtcacagtggtgaggactgacttccaagggaccaccctcatttcttataaganttaagaaatataatcctagcaaagtctttttaaaatttgaggctaaagcaggtcttcagttttgtgtctttgtacctttcaaatcaatacttatttatagtacatgcaaaacagggcttgtgtgaattttttatgtggtcagaatatggcccnntaaatgttgcagactgcccnaattttagagttccgtaaatttcccntcagaccaaacatgttttatga

SEQ ID NO: 411376 - DNA, 350 bp, Homo Sapiens
tgaactgaagagaatcatatatctgtagcttgacttcaacaagagcactgctccggttctaagagattctctttaaagagtaaggagaaacccagtgagttggtgccatggaaggaggatgtacacatcatcacttggagacagtccagggagagacagagctgggctgatcctagttatctgtaaaacagaaatgattatcatggcctcttcctagggcagcaggaatgaggacttaatgaaaaggacttaagtgggccaggtgcatagttagtgctcagaagcatcaggtattaaaaataataactactggatggtaggccacaacattattatgttttcagggtgca

SEQ ID NO: 411377 - DNA, 117 bp, Homo Sapiens
ttgctcttaattaatgtaaataagcatcaaagagaaattgcaatactttctgaatataattggcattggcatggtattctatttagagcctatccacctgaacccagttctagaaag

SEQ ID NO: 411378 - DNA, 130 bp, Homo Sapiens
  misc_feature (78)..(78): n is a, c, g, or t
  misc_feature (101)..(101): n is a, c, g, or t
actagcagcttgattagatagattccatggtcatgtaggctctgaaataaaatctgggaaaagcaaagagagggctgncaaaatgcacaacagaagcctantgttctacttgaggaaacactgcttcttt

SEQ ID NO: 411379 - DNA, 257 bp, Homo Sapiens
  misc_feature (58)..(58): n is a, c, g, or t
  misc_feature (79)..(79): n is a, c, g, or t
  misc_feature (116)..(116): n is a, c, g, or t
  misc_feature (155)..(155): n is a, c, g, or t
  misc_feature (181)..(181): n is a, c, g, or t
  misc_feature (235)..(235): n is a, c, g, or t
tatggccaagaaagggacaggagcacaaaacaaagagcactttcggtttctgatcgtnaaacctcgtgactcctaattncctcttccccaagctcttggcaccttgtcctgagctngtcagctcagtctcatgaacacacagtccggtgccaggngctggcacgagaaactagcacacatnactcgtgttctcccgaaaggagagtgaagaagggtgagactccggccacagtgnccacgttttggctaggtccgtt

SEQ ID NO: 411380 - DNA, 256 bp, Homo Sapiens
gtattttaaaatccatggacaggtcaaaacatgttaagcaagaagaagatatatctaagagataactttgtaaaagtcttcaattatttgaagggcctgttagagagtggctggctgtgaggaacctggctgggaacacatgccagcaaagacctaaggacggcctgagaaatttggaggaagggggaactttccttcagagttattaagcactaaaaccagtcactagtgtttttagaaaacctttacataattt

SEQ ID NO: 411381 - DNA, 349 bp, Homo Sapiens
  misc_feature (35)..(35): n is a, c, g, or t
gtatttttagtagagatggggtttcaccgcgctancaggatggtctcaatctcctgacctcaagtgatctgccgccttgacctcccaaagtgttgggaaaacaagcatgagccaccctgcccagccccaattaataattttaacagaggcacaagacactatgttgctgatattatgttgaatagtttacattttctcattttatttagcatttcataaatattaaatcattatgttctgtacttgtacactaaagagcagtttttgttttataaaaagggaaacattgcagatcacttataaaactatttatttaaagcatatttctgtatttttcaagcactacagg

SEQ ID NO: 411382 - DNA, 336 bp, Homo Sapiens
  misc_feature (177)..(177): n is a, c, g, or t
  misc_feature (197)..(197): n is a, c, g, or t
  misc_feature (244)..(244): n is a, c, g, or t
  misc_feature (270)..(270): n is a, c, g, or t
  misc_feature (318)..(318): n is a, c, g, or t
gaactaactgtccctctcaggtactaagctgttcccagtgctcacctctatgcaaaatcacccagtttcatctccattttgtgacccagggattagttcatggtttctaatttgtcactgagacacaccattatccacccagcagatactttcttctgcaaagggagcaaggaattnctaaccactatcctgctccngttcaagcatttggattgggggaaagacagtgtacctcatcagaggngtctgagctctcagccccagagaatnaattgatggaagccaaccatggaaagtacattcttcttaccgtgacangtgtaggtaaaagtacgg

SEQ ID NO: 411383 - DNA, 368 bp, Homo Sapiens
  misc_feature (236)..(236): n is a, c, g, or t
  misc_feature (312)..(312): n is a, c, g, or t
  misc_feature (338)..(338): n is a, c, g, or t
aaccttaagtttcttacttaggaaaacctgaaattcgcagtctataaaaatgattaactgggaaataactttcaatgataactctcagttttcaaaagtaatagagccccaaggccaaaaataaatgggccccaaaaatggcagattctcagatttcaaaaaaatagcatacacgcagacacacacatgaaaaaatgtggaaaagaaaaataagcagttatgaaaaaagctatggnatctcttaattacttgccatctgaaggtcccatgccagtggcaaatgccacaggaaagtttcattttacctttagncttcacactaaatcagaccctgattnaagtccagacagcccagcccagagcacctt

SEQ ID NO: 411384 - DNA, 297 bp, Homo Sapiens
  misc_feature (22)..(22): n is a, c, g, or t
  misc_feature (76)..(76): n is a, c, g, or t
  misc_feature (137)..(137): n is a, c, g, or t
  misc_feature (146)..(146): n is a, c, g, or t
  misc_feature (159)..(159): n is a, c, g, or t
gagaaagtgagggaccatcgtntgaggagctgagcccttgggacagagacccaagttacatagctcttggcagggnctcccttctcctaagctgagccagcttcaagaggcctaaagtcaggcagccaaactacctnttggaattncccacactgtggnatgagaagccacgtcccccagtgccagaagcaaaagcaccagagcagggcacattcccatctatcagcagccagggcaggaggcaccacccagagtggacaccacacccacttcccaggtgggcggcccttgcgcctt

SEQ ID NO: 411385 - DNA, 792 bp, Homo Sapiens
  misc_feature (105)..(113): n is a, c, g, or t
  misc_feature (229)..(285): n is a, c, g, or t
  misc_feature (433)..(508): n is a, c, g, or t
tctggcttttggacgtgggttttgattgtttgtttgtgttgtgcctccgcccgcgctccccccccattccacatcctcaccatgaaagggtgtattttgatttannnnnnnnncaattatcactaccttctctattgtccgtcaatgtggggtcgagcgccgcgcgactgtatttatatgtggtggtcagagggcgcccccctgtattatatttaggtaaatttcaaannnnnnnnnnnnnnnnnnnnnnnnnnnnnnnnnnnnnnnnnnnnnnnnnnnnnnnnngacacataacaggggagtcgaagtaagggatgaggatgaagtgtatatgggattagaaacacgaggatgtgttgttgtcgggtgtggaggataatgtaagattaaacggcacgcacccgcctttccctctcctgctgtcttatctagnnnnnnnnnnnnnnnnnnnnnnnnnnnnnnnnnnnnnnnnnnnnnnnnnnnnnnnnnnnnnnnnnnnnnnnnnnnngatagttaagtcacacatatattgcgtcaacggaacaacatgactatatcgatggtacgttgttgataggtacgtgtttcaggattttggctcgacatacttgttactaatcctgaatcccttgttttgcgaagaattaacatttattctttgtataccgtacacgtagtagatcggtgtaagggagacgatcgtcgagttatgcttcactcaggttaattgtgttgggttgccatcttggttgtaggtatgactctcgtttcgttagtgtaccaatactgatt

SEQ ID NO: 411386 - DNA, 706 bp, Homo Sapiens
  misc_feature (617)..(617): n is a, c, g, or t
  misc_feature (625)..(625): n is a, c, g, or t
  misc_feature (645)..(645): n is a, c, g, or t
  misc_feature (681)..(682): n is a, c, g, or t
gggagagtaaaacttatggaactttgtaactagaatacaacatagaaaccataataatcccaataaaaagacacttgcccagttgattcttttctaatgtttgtacctaaaatcatagccattgagttctttgtggcctcatatcccaggcctcatcctttctcccttgaaatggagactggggatatttgtatgatttcatcaaaataaaatgcttcattctgtgttttaatacatggagaaaggtctaagcacattagttgttcaggatgttgaaccaggcccttgttgcactaaaagaaaacacttctgtggatgttgtgtattagtatcaagatctttttattattattattgcaagggattttccatttaagtgtgagaaaaaatgcccttcattgtttcaaaacatcaatatgctggggaaaactgtgcatgaactaacacaatttctttatcgtaacaacattatttcattttcttatttttcagtcacatatgaggttattggcatcaaagaaacatagtttttagtgaaacaaagtggttatataggctacttatatatagtataatacaataatcaggtatctgactggttaagtaaaaaatgcagnatgctctntttattgttatatttttccngttttatagatttctctgaggatttactgtaccacnntctagctactattgtcagttatta

SEQ ID NO: 411387 - DNA, 684 bp, Homo Sapiens
ataacaggataatacagtatgcgtaggaaaataaggcttttgttgggaattgaatcctagtgtgcagaagtattagctgactctcattataaacaaattttaccagttatttcctaacagactcttgtttaatgaataaacgctttgcttattaattacacaaaatttggtcaaagcattagaaaagattaaatagttttgttacggtgtgttaaaaacttggcttttaaccttgacatttaatggattggaccacacgggccaagttccttctcctttgcaaaggtatggagctggaaatgaacttagagatcagactcaagggaccacagcttgcacttaatagtttacctttatctgtgctttagctgtgcttttggatgtattaagaactttttaactgccttaatagactgttatcccttttactctttgatatgtgacatttaaatataccttgaatttgaactggttgtcgttatgtgttgggaacaaaattacttttgatgggaatacatttttgaattaaaaatgcaagttaatagataaataatatctgattattatagattttgaaatatttatatttaagccttacaaatgacttttcagtacaaacaaattctctgattagactttctgatcaccgtagcaaatatgaattggacaataatgtgaatgtat

SEQ ID NO: 411388 - DNA, 889 bp, Homo Sapiens
gggtgggacccggtgaattggggcattatgggccggggcgggtaaggagagtaagagtgagaaaaccagggtagcgagcgcacttgtgagagggggccgcgtcgtcgggcgtggcccttgccgcttgttacacatcgcttctcacgtttataatcaagagaaccagttcaaacaaccctcctcccccgacacattccgtactaccggcgacatatcggcgtccccagcgccgcagtgggagagagttggcgtgggagcgataggtagtagagtagtgaatgaggcagctgagcccctcaacgggcatatctcaattatccagctctcaagacgggacatgacacccgacaccacaaaccacaggatagtgggaaatgagggttaatgggtgacgtttgattttggtggtgtattcggcttattagtttcttcactaactaacaacaccacattccacacccacaaccccgcactccatcagtatgaccacgtcatacatcagattactgtctgttccgtcagttccacctatttttacacacggagcaacgcatcgcggcgttcgtatgtaggcgcaattcataacattgtatagtagagttctaatactctcgaatgagcgtagaaatcgatagggactggtggcacgcgatccgcacgtgcagtacaccccgtctctcgccgatgcgcaacgtcttgatcgttccacggcgttgtcggcgggctactaatgaacgaactgtaacgtagtgagatcgtctttacctgtgtcgctctttgaatatgcgtgtttgtgtaagcgggtggtattccgtcacggcgatattcttacttaggagttctagtttattttctacaatcactcaacgcctgtctgtcccccatttcc

SEQ ID NO: 411389 - DNA, 841 bp, Homo Sapiens
  misc_feature (269)..(269): n is a, c, g, or t
ggggtgggcgctcgggaattcgcccattatggccgggctgccaagtcagttggataggtgcggccccatggtgggcgggcgaggactgggagcgctgaaaccgcggaagggggtgaacactatgccccactcatcatctcaatcgcaactatacttatgtcgtcgtgttgctgtgatgcgtttggcagacgctctctacaggggatcaagagaagggggagtggtcgacgcaggggagcagttatgttattaaataacaaataaactanagccgccacacaacccctaaaacccaacaacacgagacgatcgtggtgttgttctgtggggcggctcttctagagcgctcaacggatcagcagatgcagctgcgatttcaccaatttaaatgggaatagtgttctaactcagacgaagggcgacaaggacgatgactagctcagaattttatataatgtgtgcgatggggtggcgggacgccgtcgtctccgaccaagcgcggacgagcgcttccgtgctgtcctcgctgctgcgcgccacgcctcctgtagcggcgtgatgtaagccggccgacgcacccagccacccccgagtgccgcgtgccgacgagttgtatgtcggtacgggacaccgctcacacgccctatgtccgctttatcaatacacacctcacgacgtatgtaaccatatacataaacagaacacgctgagcccctgctcagtgcgcggccaggacggcatattcctgatacccacactgattcatcatataaacggccacccctttaatattcactgagagtgggtttgagggggcgcgaacggcgagcggtggagagag

SEQ ID NO: 411390 - DNA, 1221 bp, Homo Sapiens
  misc_feature (644)..(644): n is a, c, g, or t
  misc_feature (716)..(716): n is a, c, g, or t
  misc_feature (772)..(772): n is a, c, g, or t
  misc_feature (821)..(821): n is a, c, g, or t
  misc_feature (914)..(914): n is a, c, g, or t
  misc_feature (923)..(923): n is a, c, g, or t
  misc_feature (930)..(930): n is a, c, g, or t
  misc_feature (932)..(932): n is a, c, g, or t
  misc_feature (962)..(962): n is a, c, g, or t
  misc_feature (1008)..(1008): n is a, c, g, or t
  misc_feature (1041)..(1041): n is a, c, g, or t
  misc_feature (1065)..(1065): n is a, c, g, or t
  misc_feature (1172)..(1172): n is a, c, g, or t
  misc_feature (1174)..(1174): n is a, c, g, or t
  misc_feature (1190)..(1190): n is a, c, g, or t
gactgccggagaggcgccgccacttggggtggcgggcacccggtggatattgtggccacttatggctcggaggtgaggatatgtaaaaatagtttgcaatcaaagctcacacctcgacggatcactaacacaacggacatctcagagaaggatacatctaatatagaacaagtacataataaggtgccatgttggtcgctggtgctgcgcataacccaagaactgcgagctggcggggatggagaggagcggcgggcgggcatagttttaatttatgacttcctcaggtatagggatgagttgtgtttgtcagttttgtattttaggtggagttgctacagcgcccgtcgcgcgcccagcagtacactatgctacacattgctctccctctacccgtgccctgagtacggctgttgttcgtgctcgcttgttgtgcgtgtggttggagagtcggtagtcgtatcgagtgtgtatgtgtgtagtatagtagtaggaaggggtggtgggagtcttttgttatagtgatggactgcaacccgacagaaagatatgacactcatcaagggagaacggagagacgagtagtagaactgggagacaagacattctcgctattacttagatactgtctgtacattctattngatcgtagagcgaccgtcacggtggagagtcgagatgataatataaagtcgagtatacaagtgagagagtgnatgatatcggtttgcgtggctgaatacgctaagaggttgtcatcgttcagtacccnacacgagcccaataccacatcctcgtgtatcatggctacctctcatcangtccacgataccttgcacacagatgcgtgcaggaagcgctatgtagtacgagagattgagaggagcatagaacgatgtagcagacgtgtagtncatgtatcntctatgncntgcgctgtagtggaatgatgtgttgatcantgataacgactcatatcgtattcgtcgatcatggactatagacgtntcgtgtgcagaagcatcataatcattctcaaanagacacaatgacaaatataacaanacatacatgaagtagcgaacaatcacagcacagacaagctccgctctctctagcgcacagcgcagcgagcatgcgatatcacatccgacaagcacagtcataatcancntcacatagctacttcngtattcgtgtgtgataagtaatatagcatcg

SEQ ID NO: 411391 - DNA, 988 bp, Homo Sapiens
  misc_feature (218)..(227): n is a, c, g, or t
tgaagaaaggccctctttatccccgggagcaccataaagagattaaaatagaagggaagggcgagagtcgctggtgaccaccatgacacataactcacccttgtattttatatcattaatcgatggaggacaacacaaaacgacaacaagaaacagcccaccagtcacctgaaatattcatagagagggggaattgatgcgatgcactatagctttannnnnnnnnncttcttggattttgaaagtatgcaggttctcttagatcataataagtgagatagaagaatgagaagatgtgaaaaggcgcgtcccgcacaagaaaacacaaacgacctacacacccaacaaatataacaactctattaccaacctcactcttcgttaactaaaggacgagttaacaaaattagtaacacaatagaagaaaacatataaggcagaaaaagagagatggcaaccccaccatccaagtattaggacgctaacgacgcggtgcatcataaaggagaggatcgagaaggcgcaatacagaatcggtaaatgtgtagacaccgcaacgaatcagctcgtcactaccacctcaagcagaagagtagaggtaggaggactgaagggactgaggaggaacagacgggaggtgatacggtggatagaaagtggggacctagcacagactcaacagcagaacatacatgtaccgattataggtaacgagtcacactctttaataagagcatcatcgctattaacgactgctactcgtatttcactgtctacggccacatatgtataacatgagagatagcgttgatgtctatttgccactcttacctggtcgagtccatacacgatagtatataaataacttgtgtagactgttcatatacacatgaaacgtgcctatccacatcataattatataaataaatataatatttgtacgatactgcagagcataggttagagtgagatgctgcgcacgactccg

SEQ ID NO: 411392 - DNA, 1213 bp, Homo Sapiens
  misc_feature (13)..(13): n is a, c, g, or t
  misc_feature (25)..(25): n is a, c, g, or t
  misc_feature (395)..(395): n is a, c, g, or t
  misc_feature (415)..(415): n is a, c, g, or t
  misc_feature (965)..(965): n is a, c, g, or t
  misc_feature (984)..(984): n is a, c, g, or t
cccatttaattangaccaaccgganaagccgcccgcccatttggtggtctgaggtaccacaggcgtcaatgtcggtgactcatacattgggctccggtggttgatacttttatacttcattatttagtgtggagcatgagcttcgcccttctgtgggctacccccgcgcggtgctctgcctctttctcctctcctcacatgtgctctagcgtacttttcatggtagctgccccataacgcgtataggatactgtcgagggtggcctcttgtgcgtattgtttgcgtgatgcatggatgggaagtgtaaagatggagtaacgctctatcactcgcgcctgtatcaagattacgagtaagagcgagaggacgacatgtgagaaagcgcatactcatnaaataggagaattattattntttgtattgtgttgtgatgttagttgtgatgggaggttttctgggttggtgggacgagggtaaggtgaaccggccatcgacaggaacatacgctacacacaacagatcaccgctaatacccgcaaagactccgatagataaatgtcaacaaggagacacgcagaccgaagcgcaccccaccacactactgaagggggtatttgctcgctatgctttgtgaacgggtgggtgtggactgtgggaggttggggttcggccgtttattaccgattgtgcctatccggtgctcatgctagttttgaggggttgtatttgacgcgttccgtgacctcggcgtcatcctcaccgctctccgtccgacctcctcgaaacgtcatatggtgcaacatgagctgtcacggagaggagacgagtaactacgggggagtaatgtcaaacgacgggacggaacgaacttcgtgcgatggtaagggacgaaacaatgcctacgcctacatatctgtgtagtcttggagtgcgctgctcgctatcctgcacattgtagacatgnaagatccacacttcttgtntgctgctcaccaacgattatactcccagctttgaagcatgatcgcttagtagtatgcatgttagaagatgttctgctataccctcatttatttagttatatctagtactgtaataatatgagaagttatccatgcagacacctacacataatacataatcttagatatgtcaaatgtaggtgtagtataatagagagttcaatggacgagtaatctaactttgcatcac

SEQ ID NO: 411393 - DNA, 1180 bp, Homo Sapiens
  misc_feature (142)..(142): n is a, c, g, or t
  misc_feature (188)..(188): n is a, c, g, or t
  misc_feature (288)..(288): n is a, c, g, or t
  misc_feature (392)..(392): n is a, c, g, or t
  misc_feature (404)..(404): n is a, c, g, or t
  misc_feature (509)..(509): n is a, c, g, or t
  misc_feature (553)..(553): n is a, c, g, or t
  misc_feature (576)..(576): n is a, c, g, or t
  misc_feature (591)..(591): n is a, c, g, or t
  misc_feature (672)..(672): n is a, c, g, or t
  misc_feature (1131)..(1131): n is a, c, g, or t
agtggggcgctctatagtggccggcaccccccgggaaactccgccctctatcaggggcccggaggcacgggaagtgcggttatatgcagcggggcgctcctgtatgacgacgagagcccacatcggctggctgttcgtcttntggcacgcgtgttagctgaatgtcaggaggagcgtatcagaggacncttatacattcctgcgcaccgcgcggggtcgatcacgatgtgtcacgctgagataagatttatgtgggtagtgggtcgtgtggtgcggacgcgtgcccgncggggtgtatctgcgcgcttagagcgtatacggagagaagaggcggaggagatggagggggaatgatgggtggtccggtgtcgttttgtttgctgatgataagnataataatatgntgaggggtagaaagagcacaaagagcgcggtcggtgtcggcgcggggcggcgcgtgggtggacaggtgcgccgcctcgcgcggacacgcatcccaagcgcaatgncagactcagcagcagggaagaaagagaggccattcgtgtccganactcggacaggcgctacggagantagaatgactagganagagggcgcaccaccggcactcccctccaatccaactacacatgtcccggcagccgtagggctgcttccgcttcgcccgcncgtgccgcgcgcgttcgattcgtcgaatgatagcagagcaggggacgtcgcgcgcccgctccctgagcctctcgcgccgctcgtatgcggagattaacgtcagcgatctccgcgaggcggacgcgagcggcgggcgagcgcggtgcgcgtagctgatgcaaccctaccgccgcacagcgcgccggctactcgcgcgcggtcgtgatgagggatgtcgtggtctgagcgccgggcgcgcgtgcggatttcgccgctgttggcgttggtggagtcgcgtgcggtcgtgtgagtgtagggtgatatgcggcggtcgtttattcgctagttgtgttgctgtctgcgaccgcggagtccgacgtcggagtagtgaatggtgggtgagcaggtagaggtgcagccatagcgtatgcgatggacgacgtgcgacgccccggtcgtatgttctgcgggccgtgtatncggatagtctgaactacatgtgcgccgccaacccgtcgatgtgtcacgg

SEQ ID NO: 411394 - DNA, 1402 bp, Homo Sapiens
  misc_feature (69)..(70): n is a, c, g, or t
  misc_feature (111)..(111): n is a, c, g, or t
  misc_feature (371)..(371): n is a, c, g, or t
  misc_feature (498)..(498): n is a, c, g, or t
  misc_feature (504)..(504): n is a, c, g, or t
  misc_feature (522)..(522): n is a, c, g, or t
  misc_feature (581)..(581): n is a, c, g, or t
  misc_feature (626)..(626): n is a, c, g, or t
  misc_feature (792)..(792): n is a, c, g, or t
  misc_feature (877)..(877): n is a, c, g, or t
  misc_feature (879)..(879): n is a, c, g, or t
  misc_feature (882)..(882): n is a, c, g, or t
  misc_feature (954)..(954): n is a, c, g, or t
  misc_feature (1046)..(1046): n is a, c, g, or t
  misc_feature (1059)..(1059): n is a, c, g, or t
  misc_feature (1085)..(1085): n is a, c, g, or t
  misc_feature (1102)..(1102): n is a, c, g, or t
  misc_feature (1105)..(1105): n is a, c, g, or t
  misc_feature (1120)..(1120): n is a, c, g, or t
  misc_feature (1175)..(1175): n is a, c, g, or t
  misc_feature (1219)..(1219): n is a, c, g, or t
  misc_feature (1296)..(1296): n is a, c, g, or t
  misc_feature (1326)..(1326): n is a, c, g, or t
tggcgcaccgtgcaggcggccgccatatgcacgcgtgagcgctcagcgggatatatctgcgctcatatnntcggccaccggcggagccgcgtgaccacatcctgctcttgnatatacatcttgtggctgcagcgcacatatatgtgcgtgtggtgccgttgctgcggagatcgacgcagcgagcactaccgcgtgcagggcgaagagcgagagagatagtggcagagggttagaatgctgcaaacgcagtacgatgcgacaccaacggagcagactgtcaccagtcaacactccaaacacaatcacagcataatagtgccggtgcggacgggccaggcggtaggcgcgccacgagagcgacagagagaagnacatacgacgcggacatgcgagacgcagggggtgatgtggttggaagagatgtgggtcggtcgctcgcgcctggcgcacaaagacaaatcacaactgcagcaacgacacgcataacacacacaacangcgcanccacacacgccagtactntcaaacccatgtgacacaacttctccagctgtctaccgtcgtcagtggctattcaggcnctatgttgtccataacgccctacgctcgacctcgacgagtgacantgagagtgaggtatgggtgctcacctcgcatagtcctaaacgaagacagcgacgcgcctgagtatcatagacagtagatgtcgaagagttatcgtgaacagatcatcgtcagcggtacgctccacgctctcatcaactatcaaacatgaatcttctctcataccancatacgacgacacatacctaccattatgatgaacataaataaatgtattgataatcagaaattaaatggaatcatattatcgcangntantgtcattgatgtgattctattctcggcgcacttgcacgagatcgtaactacacacctcgctctgacaatcantgtcgagttatagacactcatcccgaccgcagttgtatgtgtgatagagtgtactgtaggcgagcctactcagcgcagagacacgtcagcgngcgtgtgagatanagggcgcgacactcgagccgtatcanatagaggtcgtacatcnaantacatagtctagtancacacactcagcatacaccacgacatataaagcgaagcgaagacctctatagtgntgaccgaacgactgtgtatgttcatgtcagctacgagaccgcgncgcgccagtagatgcgctacgcagttacaatctgggtacgatagtcccgacctagtactcacgctctcggttcgcgncataacagcgtattgatgggctctcgtcangagtgtatggtagtaagtaggctatatgtatgatacactagtagactacggaacgactcatcgtccagccacacag

SEQ ID NO: 411395 - DNA, 1492 bp, Homo Sapiens
  misc_feature (115)..(115): n is a, c, g, or t
  misc_feature (121)..(121): n is a, c, g, or t
  misc_feature (137)..(137): n is a, c, g, or t
  misc_feature (163)..(163): n is a, c, g, or t
  misc_feature (215)..(215): n is a, c, g, or t
  misc_feature (228)..(229): n is a, c, g, or t
  misc_feature (302)..(302): n is a, c, g, or t
  misc_feature (321)..(321): n is a, c, g, or t
  misc_feature (389)..(389): n is a, c, g, or t
  misc_feature (400)..(400): n is a, c, g, or t
  misc_feature (511)..(511): n is a, c, g, or t
  misc_feature (538)..(538): n is a, c, g, or t
  misc_feature (548)..(548): n is a, c, g, or t
  misc_feature (553)..(553): n is a, c, g, or t
  misc_feature (618)..(618): n is a, c, g, or t
  misc_feature (628)..(628): n is a, c, g, or t
  misc_feature (648)..(648): n is a, c, g, or t
  misc_feature (715)..(715): n is a, c, g, or t
  misc_feature (761)..(761): n is a, c, g, or t
  misc_feature (763)..(763): n is a, c, g, or t
  misc_feature (765)..(765): n is a, c, g, or t
  misc_feature (774)..(774): n is a, c, g, or t
  misc_feature (864)..(864): n is a, c, g, or t
  misc_feature (869)..(869): n is a, c, g, or t
  misc_feature (888)..(888): n is a, c, g, or t
  misc_feature (891)..(982): n is a, c, g, or t
  misc_feature (984)..(984): n is a, c, g, or t
  misc_feature (1108)..(1108): n is a, c, g, or t
  misc_feature (1153)..(1153): n is a, c, g, or t
  misc_feature (1210)..(1210): n is a, c, g, or t
  misc_feature (1260)..(1260): n is a, c, g, or t
tttctatatccatccgacgacaccgccgcccaatctgtgcacaggtcaccctcccgccgcacccctcggctctcttgcttgtgtctctctcaccacttaatccactatctttatntctctngtattaagtaatagangcaaacttagtcacgtcgtctattanggttcttgttctcgcttattgtatactctacacaatctcgcttctcacacancaccctcacacannccatagtgatcgactttctaggataccaaactcacattcactgaaatcatatacatgcatattattttaatantcctccgcgcagcagtggngcatcgtgcagtgagtgcttacgtatatgtatatattgagctcaatagtagaatctaatatgctggtnttattatgagngatataaatgtaattctattacatttatatatatacgtccgcgcaatagacaaaccatcgctcgaagaacacgaatcactaatacactcacgaggacaatctgtcacatcncaacacctactgctcccagcgcacatnctaagctcanctcgntccctgcgttaacgagtcccacaagtatgcacagcgtcgcataccacgcgccagtgacgcttcgncagtgtcgantacgacgcgtcgtctctcgngtcgcctaatggtgttcagtgagactagcgttacgttgcgtcttcttctcgctcgtccgacgtccgntcgttctcgctcgtctgtgtctcgtgcttgtctgtgtttgttgctntntntcgtatgantgtgaaacttagcatatcactacgcactgccactaactcagcttacatacctctcacagctatctcacatctgagaatcatagctatgantcaanactatcacgactaactctntgnnnnnnnnnnnnnnnnnnnnnnnnnnnnnnnnnnnnnnnnnnnnnnnnnnnnnnnnnnnnnnnnnnnnnnnnnnnnnnnnnnnnnnnnnnnnanttagatacgcacatctcgctacaatatcacactccacacaatacatactacatcgctacgatttcttatcaatgatcactctggaactcaactcgactgctcctgacgtgcaccgctactgtantgtatatacacgcagtacgatgtgtagcactagagcgttcctcantctctactcctgcgtcatactactactacactgctcctatcatctttctatcacacnctatctgatcagtgcatcaccatcatacacctcacgcattatactttatnctcactgctccatgtactattctcttagcgtatattcaatgttagtctcataatatagagatagactatttgcatatttacatcccgccatccatagtatcactatgagtgtcgcacggttacgccgacactcaccgtcagccgcacgtccgcgtatcgtcgactcctctctctgtggactctacgcacaccgtacgcaccattcatcgtacactaacgtataattctccat

SEQ ID NO: 411396 - DNA, 1253 bp, Homo Sapiens
  misc_feature (42)..(42): n is a, c, g, or t
  misc_feature (66)..(66): n is a, c, g, or t
  misc_feature (70)..(70): n is a, c, g, or t
  misc_feature (88)..(88): n is a, c, g, or t
  misc_feature (103)..(103): n is a, c, g, or t
  misc_feature (228)..(229): n is a, c, g, or t
  misc_feature (233)..(233): n is a, c, g, or t
  misc_feature (279)..(280): n is a, c, g, or t
  misc_feature (282)..(282): n is a, c, g, or t
  misc_feature (334)..(334): n is a, c, g, or t
  misc_feature (355)..(355): n is a, c, g, or t
  misc_feature (358)..(358): n is a, c, g, or t
  misc_feature (383)..(384): n is a, c, g, or t
  misc_feature (386)..(386): n is a, c, g, or t
  misc_feature (411)..(411): n is a, c, g, or t
  misc_feature (457)..(457): n is a, c, g, or t
  misc_feature (459)..(459): n is a, c, g, or t
  misc_feature (506)..(506): n is a, c, g, or t
  misc_feature (800)..(800): n is a, c, g, or t
  misc_feature (866)..(866): n is a, c, g, or t
  misc_feature (952)..(952): n is a, c, g, or t
  misc_feature (992)..(992): n is a, c, g, or t
  misc_feature (1104)..(1104): n is a, c, g, or t
  misc_feature (1185)..(1185): n is a, c, g, or t
gggagaggatagtatcgttgtgaagaagtatgagcagtcttntgggtaacagcatggatacatagnatanaaagtagatgcgatatcnatcacgctgcgacgncgacgccctcgcaccgcctgccattgtctgcgcggcggccacgcagcacttacacactaactcggtcggacatcatcacgactaccaaagacaacaagatgtatagatccaagacacaaaagaannatanagtatcgtgatatgcggggtagagataagtagcgtgcgcgcagctnnanctacatcggcccgcacagtagtcagtacacgcgcgtcgtgtcggcatggagnggcgaaggacgagaggagagnagnagcaggagaagataagaatagagannangatatatatgttataatgatgtgtnatataggttgtacatatcatttatttcctcttttactcgttatatncnctaccaccgttcaattacctcctcttcaacaagccaaacaccgccancaataaccggcttcgtatggaggcagaggtagattgcactcaatcaataaatatgataaacgacagaaaaactagtaattagagagaagatgattagggtgtgtgtgatgatagtggatggcgggggtggccggtaggcaggtcgtccagtacacatcaactcgtacatcctcacgactacaaatctaaactaatcaaacttcctttatatagagatgttatccattagtagtgtgtcacataacaagatacagtgtgcatatagatggagaacgaggcggtgttggacgcgcntactgatatagtaaggagatgtaagagtacgaactggggcgagtcagctacagagtatacagatgntcagacacatatagtaatataggagccgcaatatagatcatctcgcgcacacgcggcgtagcgcgtgctggcgtgacgccgcgggnctagacggatgtcagtagtgacgtgccgcgaacacatggnactgattacacatacgtgtcgcagaccgtcgggtcgagcgagtgcacctcttcgagtaccagaatagatgagtgcaaccgatagggtacagcaacttcacacgcagcgtgcntgtcacgtaccgcggagtcgtaacgcaaaggtgacggcaagagtaagtgcgcataatgtaagcgcaaccgtagaataaccnacagtacgcacagtcacggatcagcagcgagacagactgatatcatatgtgagttataagttatcata

SEQ ID NO: 411397 - DNA, 699 bp, Homo Sapiens
aaagctgatgaatttgtggtcttgtgccccctgttcctccccactccccccagtttggccctctctcaacaactctctttggtgctggaaaccccagtgattctctgcctcatactcctgtgggcctaaagcctctctagtcagtatctacgccatatagggattaagagacacctcttcctgaccatgctgctctgctctcttaatgctgttgggaccacagttagtccatccgtgctacagaacagcttccttccacagtcccagtagggaaaaggcaaaagcctctttgcccttggcgctgctgcttccttctctgaggcttcgcagccccaggtcaggttgattacatcatattcttccctttcttgtctctactccatttacccccgttcatcagaatgggaagagacatatttctcccctttgtcaagcctcttacttcttccttcctttcattgtttgggattttaactacctaatgggattttaattgctctagtagaacttaatagcgcaattatcaaatctggaacatttttacatagcagtcattgtatttgggctatgctcgcctatggaactcatttaatatcctctactagacaaagtttaacaacttggctgggcatcaattaaggatggacttcaagcctaaaaaatggcatggtactgtccccactggtggacaaatggggg

SEQ ID NO: 411398 - DNA, 708 bp, Homo Sapiens
agagctgagtttgaggcgctggatgacccgctgcccttagagagagcgcgctctgctccctgacttagcgctactcaacccagccacacgtaactcaaggacagactcaggtacccagggacaccccctgccttgcctagggacttatgggagtcgaatcgaaccttgttttgggagagttgtagctaggaggagctaacatttggaggctggtgagacagaagcaatcaaactgagagcccaggcctgatgatgttccaggtaaaaagccacgggacacctccattgttgtgcactctgctaatgaggcatgacttctttcggacctgtcttagtattaattattgctttatttttttgaccagataacatacttgcggcatatgtcataaattttcactggaactaagggaggatcactgcatttatggaaaactataggaagatcagataccatgctactacttgatagaactctggcctagcacatacgagaagggacaggtaacggcacgatcatagatgataaggctaaggattgagttgtggaatttggacgcacgttcagacactgcgaaaatcctttgttgacaatagggatacataaatccatgttagtatgcacccggctcctccaaagagggcgttacagtacccgttggttccactattcagaagataccgtcgattgctcacaaagggaataac

SEQ ID NO: 411399 - DNA, 1100 bp, Homo Sapiens
  misc_feature (48)..(48): n is a, c, g, or t
  misc_feature (61)..(61): n is a, c, g, or t
  misc_feature (247)..(247): n is a, c, g, or t
  misc_feature (275)..(275): n is a, c, g, or t
  misc_feature (635)..(635): n is a, c, g, or t
  misc_feature (688)..(688): n is a, c, g, or t
  misc_feature (864)..(864): n is a, c, g, or t
  misc_feature (966)..(966): n is a, c, g, or t
cccgggaagacgcggccatctggggttgggtgcgcccgcgccacttcntgtctcatcaatngtgctctggctgggtcgtagtgcgcaggagccatctcgtccgcatcggtggcgcagcgagcagggttatagatacatgtacagtaaagcaacgcaccggcagttgccaacgaagtagagcaagggacatcaaaaataaaatagcacccaatcaaccaggagtgcgagagaccgccggctccacccntatttctcatcatccctctctatcaccngtatataggagtgcgcgaggaggatatgaggtatagtggaagaagagcgatgaacgaaagccgagggagtgagacgcgtggtatcgcgcgacatagagaggaccacgccgccaacacagccccacgccccgcgcaccaggcccacgtccgagtgtggaagaccgcgagtacgcgtcgagcgcatatctaaatattaccccgtgagtgttgagcgtgcgattggatatatgtttcgctgctgttgtgcgtgtgtccgtggcggggtgtgtgctttgtgttggtagtggttcggcgcgtgcgcgcgcgacccggcgcatctgactgcacgccagtcagagcggttaacgctgcatgacggtntctagtgaaattatcagggaattgtactagcataggatgatacagtgagaaanagtgtcaaagcatttatattacagtattgtacaaagacagctgtatcgatacaacttcatgtgtttaatcagcaccacggcaacgtcgcgctccaccgagcagatcgcgcagaacagaataagagtgagttgtgagagactgggtaagcgatgaagtggtatagctcgcgaaccantagtagactccgacgcacacagacaccccacttcacgacggacgctccaccgtcacgtgatccttgctccactctaccgctctcacgggcgtcgcgcccgangcacgtcgcggcgtgtcggcagagacgctggagacgggacggaagtacatagcgagacacggctcagagcaggatctctggcaacgtacaggtagcgtctgagcgcgttgtcgtacgaaagtgaacgataagtt

SEQ ID NO: 411400 - DNA, 897 bp, Homo Sapiens
  misc_feature (130)..(130): n is a, c, g, or t
  misc_feature (272)..(309): n is a, c, g, or t
  misc_feature (630)..(630): n is a, c, g, or t
  misc_feature (827)..(827): n is a, c, g, or t
  misc_feature (886)..(886): n is a, c, g, or t
gccgccctccagcatttcgccctagaggcgccattgccgcagggtgattagttgtaggaagagagtcgcagagggccttagaggtgattcgaagagacgggtggtagatactctgagaaccattattatnggccaaccctgcttgaactcgccttgatcttctgtaaagaggtcttggttgggtgtggcgtgttgcgttcttctttcttccttcctccgcgcgtggtttgaggctgtcaggtaggccgccagcgtgcccgccgcgccctctnnnnnnnnnnnnnnnnnnnnnnnnnnnnnnnnnnnnnngcatagtgcacgtcgccgctagatgtggtagggcgttgaggtttcgtggctcgccgtcgtgggtgggagatgagggatatcgtagggggcggcgcggcgggtggggtgcgcgttgggcattattgggggtgcgcagaacgagcgcgctccgcaggtcgagcgtcgcgtatgcgtatcttgctcgctgtcgtcctctactgtcattgtcgtggaatttgagtatatgtgcgaatatcaaattaatgttagatgtttgtcacttcaatccactacacgtgtgttctgcgcgaacggtgtgtgcaagacgggaggtttttggantgctgagagacgggtcggtgagcgactacggctgatgttgtgtacttgatcggtcgcacttcaagccagttccacctttagcgacagtatgcttgagtcagaggcccggcgtcgtgagcgacggtgaccgacgacataaggcaacgcttacagattgacggctgacgacatggtaggatagggaggcggcttctcgnaggtggtggcggcgggggggtgaagggatggaaataagattggcggtacgtgtcggggnacgccacgcag

SEQ ID NO: 411401 - DNA, 1073 bp, Homo Sapiens
  misc_feature (66)..(66): n is a, c, g, or t
  misc_feature (321)..(321): n is a, c, g, or t
  misc_feature (366)..(366): n is a, c, g, or t
  misc_feature (470)..(470): n is a, c, g, or t
  misc_feature (612)..(700): n is a, c, g, or t
  misc_feature (809)..(817): n is a, c, g, or t
  misc_feature (854)..(894): n is a, c, g, or t
gccgcctctttccctcctcaccccctcacttcctcctctcactttcccattttatctctccctttnatatcctcaggtatatagggtccccacaaacattatcaaatacttctcaatcgtactacacttaaatatatctactatatctatcacaattactaattctcctctcatcaaacccttctctccactttattatttaattctatctcactcagcaaatctttcttctatctccactcctctttccttctacggcgttccactacatgccttacctctactcacctctataaaattacataataacttgtaaaattntatatcttgatattaactcctctaatttaaacttgttttcattcntcactctcatacaccctcacccaaaacaactacacacgaatcgtcaccacacccacccacctcccccaccctcctacatccatcctctgtccacatcatcccgnaacgacaaattacttccaaaccctaatcctccgtacttcatcacattttcgtccttcaataatcattaactaatataatattactttatgtttattatatttcattttgccccacgctcccactcttccactataacatacnnnnnnnnnnnnnnnnnnnnnnnnnnnnnnnnnnnnnnnnnnnnnnnnnnnnnnnnnnnnnnnnnnnnnnnnnnnnnnnnnnnnnnnnnattttcataatatctctcaccttacatttaaataattcgtatctgtttatatctctcactacctcttgtccatctattctacttcacgtcacttctgctcacccaccannnnnnnnnaccgccaacacttccacaatacttgcctcatcatcannnnnnnnnnnnnnnnnnnnnnnnnnnnnnnnnnnnnnnnnatactctttcctcatattcttcctcttcatccatcctactctcccattacatatcactcctctcatctccttctctacccatctttctcactatcgctccacttaccaccgccatcacactattatactattatactcatatattcatctttatctaccaataccactaataaatctag

SEQ ID NO: 411402 - DNA, 1457 bp, Homo Sapiens
  misc_feature (191)..(191): n is a, c, g, or t
  misc_feature (255)..(255): n is a, c, g, or t
  misc_feature (307)..(307): n is a, c, g, or t
  misc_feature (310)..(310): n is a, c, g, or t
  misc_feature (312)..(312): n is a, c, g, or t
  misc_feature (423)..(423): n is a, c, g, or t
  misc_feature (426)..(426): n is a, c, g, or t
  misc_feature (486)..(486): n is a, c, g, or t
  misc_feature (532)..(532): n is a, c, g, or t
  misc_feature (568)..(568): n is a, c, g, or t
  misc_feature (580)..(580): n is a, c, g, or t
  misc_feature (617)..(617): n is a, c, g, or t
  misc_feature (743)..(743): n is a, c, g, or t
  misc_feature (868)..(868): n is a, c, g, or t
  misc_feature (871)..(871): n is a, c, g, or t
  misc_feature (877)..(877): n is a, c, g, or t
  misc_feature (911)..(911): n is a, c, g, or t
  misc_feature (975)..(975): n is a, c, g, or t
  misc_feature (984)..(984): n is a, c, g, or t
  misc_feature (1002)..(1002): n is a, c, g, or t
  misc_feature (1053)..(1053): n is a, c, g, or t
  misc_feature (1080)..(1080): n is a, c, g, or t
  misc_feature (1090)..(1090): n is a, c, g, or t
  misc_feature (1128)..(1128): n is a, c, g, or t
  misc_feature (1134)..(1134): n is a, c, g, or t
  misc_feature (1139)..(1139): n is a, c, g, or t
  misc_feature (1151)..(1152): n is a, c, g, or t
  misc_feature (1192)..(1192): n is a, c, g, or t
  misc_feature (1207)..(1207): n is a, c, g, or t
  misc_feature (1221)..(1221): n is a, c, g, or t
  misc_feature (1251)..(1251): n is a, c, g, or t
  misc_feature (1420)..(1420): n is a, c, g, or t
ttcatacggcagaagcgcagccatcttgggttagcgcacgtcctgggtatattacgggctcatctaatgagactcctgtgtggtctctctctctcgaacgctgcaccagagaaagcgatatggccaatacagcgcaaagagcagcaccgtgtacaatagatgtaggcgtcatacaacttgctaagtgagtncgcgaacacagccagatcatcaacactaagacacgttacagaacgcattcctatcgctctctcncttcgatatcacgtctactatacttgcagcgggcacacaaaaatatcaatanatncntacgaatagtaccgacgtgctcacatgctatcgctcgactcagctggcgcagttgcgtgcgcactgagtattcatccaccgtcgttggctgtacaagtcattagatatagnaangagatcaatattattgacgataaggatagtgatagcacaaacaggagccagagcgcgaanctcagacgctcgctctatactcataacattacttatatacacaacnacttcatcttagatctaatatcattgatgtgcatcnacaccatacaancgacaatatcatcactatgagccacttgacgcggtcntctacatcacacacagtctacactgtgcgtagagttagcagtacagtgtgaagcagcgaacgctcgtgagaaatgagtcggagtgtgattgatctctctatctctacgagagcttgtaccatatantagaatatactctacatacactatcatatacgtatacacaacatgagagatagacacacagcacgaaagagagcgagagaatatcggataacacatatcagtcgtccctctgcggtggacgacantanagtaantactatagtaataagttcgtcctcgtatcaagtntctcacacttctgcattatatagtatacagacaccgaacaacacgtcctcgctcactcgcctantccgcaacnttaacactcacatctcgntatacaatacagtgagatcctgtcgcgtcgcagcgagcacgcatgctcgcnctcgctcgcgctctcatcgtgcagtgntgagtttgantgcgtagatatacacgtcatcacacgatgattaaacanatatgntgatncgagtatgtacnntctcgtcgatgtctgtatatcgatgcgacacactcatgcnacacatacatgaatnatgtactagtgtantatagttatagaccgccgtagactctggtntgtctactagtgtgcatgttggtgtgcgtgacgtaatgaatatgtgtgcaagtcacgtagtgtgtcctatatcgtgattttgaatgagtagtgagctcagatcgtcagacggtcacatgtgatggtcgtcgtgttcatcgctgcagctgatatcgtgtgatgtctcatnatgctgcatagagtacgcactagccgtatacatatcg

SEQ ID NO: 411403 - DNA, 1295 bp, Homo Sapiens
  misc_feature (156)..(156): n is a, c, g, or t
  misc_feature (340)..(340): n is a, c, g, or t
  misc_feature (443)..(443): n is a, c, g, or t
  misc_feature (497)..(497): n is a, c, g, or t
  misc_feature (523)..(523): n is a, c, g, or t
  misc_feature (606)..(606): n is a, c, g, or t
  misc_feature (634)..(634): n is a, c, g, or t
  misc_feature (684)..(684): n is a, c, g, or t
  misc_feature (736)..(736): n is a, c, g, or t
  misc_feature (803)..(803): n is a, c, g, or t
  misc_feature (860)..(860): n is a, c, g, or t
  misc_feature (915)..(915): n is a, c, g, or t
  misc_feature (958)..(958): n is a, c, g, or t
  misc_feature (1022)..(1022): n is a, c, g, or t
  misc_feature (1170)..(1170): n is a, c, g, or t
ctcccccccagcggccgccccttgggcgtgcggccccgccggggaattccttggtcctatctatcggtccttgggcgggagcatgctcggttatgttcacagaggtctgtagaggtgtgacgtcgcgtgaccatcctcccattgtgtagtaagagncctcgccgccatatattcatagcgcttatatcccacgtaattgaccagcccgcatacctcgcgctaagtcgtacttgtcaagaccaacggtagccgagtgagtggtatgttgatagtgtgtggctcttgtgtatgagccaacaagcagcaccccgcgtgtagatgtgagacgccgcgtttttgntcgtttatcttataagaataagtggttcgggagcctgacggggccggcgctatgattggcgcatctgctactcctataagcacgacgtcatcccaatgacttntccgactcatcctgctgccacgacagcaagggtttggacgtagttggtggtgtntctctttataagcgaggaaataggangagacagagcggatattgtctcgacggcgcgctaagcgacgcagccaacgcgagactccgccgcgaggcgcacggccgccgangcgaggatcaccgctacagagaagcagnatgagatgtacgggtatacatctagcgtgagatttgttgttgatgatatngctatcgttctgcgttggggcgtcgcctggccgctgacagcgtttcctcgtngcaactcgcgcgagcgagtgcgtattcgctcgagcgtcccggtgacttcgagccgacgtcataacantctatatcactcctctctctccacaactaccccgtcacacgagacgcgctccatgcngcactctctcgctcacacgtggtgagtagtatagttacaggcgagtaggcacatnttcgcatcgccgcggtactatagctcacgtttatctagctgantgcaatccctagtgattattcgtatgtctttcgcttgttcttcgtgtgatagcagtgcgtcgcncacccgccgcacccctctctctactccccgcgcgtccgccctctatctgctcacgaagacgtgtatcagcggatcgtgccgcgcgtgcgcaacgtgtggcctgaagatactatagttgtgctttggactcgatcgggctgtcgagatncgacatacaaatgagaacaacatcgcgtgtcgaggacgcagcgatgactgtgtgcccggcgcgactcgtctctgtattcttcctcgctgtctcttcgcggtatcttgtatcctcgtcgtcgcgag

SEQ ID NO: 411404 - DNA, 1173 bp, Homo Sapiens
  misc_feature (553)..(553): n is a, c, g, or t
  misc_feature (699)..(699): n is a, c, g, or t
  misc_feature (741)..(741): n is a, c, g, or t
  misc_feature (761)..(761): n is a, c, g, or t
  misc_feature (956)..(956): n is a, c, g, or t
  misc_feature (965)..(965): n is a, c, g, or t
cgcactgtgtgtggggccccggggagtattctccctcattaggggcgcgggagggctgggtacgagggtgaggattgattgctattggaggcatctattgtctgcacgtgtgtctgcaaatgtgtctccctgcagagtgttccaatctatgtcgtgtaacgcaatcgaatagtctctatgacgacctggtagctatgctgtgtcttaatctgcactcattcacctgcctggacccgccatctgcgagaatggagtcttgctcttctgcctaaacgcatcatcctcttatcaattcctctcgctgcctgcatgagattacctactcccactatgtatagggggtgacacaagggacgtgttttctcctaattggacactacgttatgcacttgacgtccctttccccccctcccatgccaccgcacggcgtagctcgccacgacactcagcacacgacacgaccagcccgcccctgccacacagcaccccacggcagcgacgagcccaatgtcgtaagccgagagcgtctacatagcacctaccgagacggagnaatgtgtctttatcgtttttagcataattgtaatttttatcttgcacactgctcgcccgtcgccgatccactctcgtctctcgcatcttcgatgcggtgagcgacttctctgtatgactcataactaactttccgaagcaatatcncacgttacaacagctatatttatgttagtctgactcttatangtatgtgacccgatggcccnatcgcgtgcgctgcaggcgccgtctccagagcgcataagtgtgtggctccccgtcgtcatgtatcggtgtcgtcagctattcctcatactgccgtcgcgcacctcgacctacagagtatccaccagatcatatacactctctagagcactctccatattcgtgttcttcagcgctcgaggccgtgaacttggtcnaacctagantcttataattatgactcattcgtgacgtgtcgtgatacgctatctgttcctatatatctaacatactcctgtaacctccagccaatgaccgctcgacgagctactcacgacggtagcaccgcactgacaccacggcactttacgtaccttttctctgctctatcatatcgtcttctctcttacccttcacttttcttcctcgtacatt

SEQ ID NO: 411405 - DNA, 1804 bp, Homo Sapiens
  misc_feature (37)..(37): n is a, c, g, or t
  misc_feature (55)..(55): n is a, c, g, or t
  misc_feature (119)..(119): n is a, c, g, or t
  misc_feature (171)..(171): n is a, c, g, or t
  misc_feature (187)..(187): n is a, c, g, or t
  misc_feature (306)..(306): n is a, c, g, or t
  misc_feature (316)..(316): n is a, c, g, or t
  misc_feature (337)..(337): n is a, c, g, or t
  misc_feature (357)..(358): n is a, c, g, or t
  misc_feature (360)..(360): n is a, c, g, or t
  misc_feature (367)..(367): n is a, c, g, or t
  misc_feature (377)..(377): n is a, c, g, or t
  misc_feature (385)..(385): n is a, c, g, or t
  misc_feature (403)..(403): n is a, c, g, or t
  misc_feature (406)..(406): n is a, c, g, or t
  misc_feature (423)..(423): n is a, c, g, or t
  misc_feature (425)..(425): n is a, c, g, or t
  misc_feature (464)..(464): n is a, c, g, or t
  misc_feature (490)..(490): n is a, c, g, or t
  misc_feature (499)..(499): n is a, c, g, or t
  misc_feature (545)..(545): n is a, c, g, or t
  misc_feature (576)..(576): n is a, c, g, or t
  misc_feature (618)..(618): n is a, c, g, or t
  misc_feature (630)..(630): n is a, c, g, or t
  misc_feature (639)..(639): n is a, c, g, or t
  misc_feature (681)..(681): n is a, c, g, or t
  misc_feature (690)..(690): n is a, c, g, or t
  misc_feature (740)..(740): n is a, c, g, or t
  misc_feature (742)..(742): n is a, c, g, or t
  misc_feature (782)..(782): n is a, c, g, or t
  misc_feature (809)..(809): n is a, c, g, or t
  misc_feature (842)..(842): n is a, c, g, or t
  misc_feature (880)..(880): n is a, c, g, or t
  misc_feature (900)..(900): n is a, c, g, or t
  misc_feature (910)..(910): n is a, c, g, or t
  misc_feature (923)..(923): n is a, c, g, or t
  misc_feature (948)..(948): n is a, c, g, or t
  misc_feature (964)..(964): n is a, c, g, or t
  misc_feature (967)..(967): n is a, c, g, or t
  misc_feature (1002)..(1002): n is a, c, g, or t
  misc_feature (1015)..(1015): n is a, c, g, or t
  misc_feature (1023)..(1023): n is a, c, g, or t
  misc_feature (1089)..(1089): n is a, c, g, or t
  misc_feature (1095)..(1095): n is a, c, g, or t
  misc_feature (1137)..(1137): n is a, c, g, or t
  misc_feature (1150)..(1150): n is a, c, g, or t
  misc_feature (1159)..(1159): n is a, c, g, or t
  misc_feature (1170)..(1170): n is a, c, g, or t
  misc_feature (1194)..(1194): n is a, c, g, or t
  misc_feature (1213)..(1213): n is a, c, g, or t
  misc_feature (1222)..(1222): n is a, c, g, or t
  misc_feature (1229)..(1229): n is a, c, g, or t
  misc_feature (1238)..(1238): n is a, c, g, or t
  misc_feature (1243)..(1243): n is a, c, g, or t
  misc_feature (1264)..(1264): n is a, c, g, or t
  misc_feature (1276)..(1276): n is a, c, g, or t
  misc_feature (1289)..(1289): n is a, c, g, or t
  misc_feature (1297)..(1297): n is a, c, g, or t
  misc_feature (1305)..(1305): n is a, c, g, or t
  misc_feature (1309)..(1309): n is a, c, g, or t
  misc_feature (1325)..(1325): n is a, c, g, or t
  misc_feature (1341)..(1341): n is a, c, g, or t
  misc_feature (1356)..(1357): n is a, c, g, or t
  misc_feature (1373)..(1373): n is a, c, g, or t
  misc_feature (1375)..(1375): n is a, c, g, or t
  misc_feature (1404)..(1404): n is a, c, g, or t
  misc_feature (1418)..(1418): n is a, c, g, or t
  misc_feature (1422)..(1422): n is a, c, g, or t
  misc_feature (1445)..(1445): n is a, c, g, or t
  misc_feature (1470)..(1470): n is a, c, g, or t
  misc_feature (1472)..(1472): n is a, c, g, or t
  misc_feature (1477)..(1477): n is a, c, g, or t
  misc_feature (1480)..(1480): n is a, c, g, or t
  misc_feature (1483)..(1483): n is a, c, g, or t
  misc_feature (1505)..(1505): n is a, c, g, or t
  misc_feature (1517)..(1517): n is a, c, g, or t
  misc_feature (1572)..(1572): n is a, c, g, or t
  misc_feature (1576)..(1576): n is a, c, g, or t
  misc_feature (1598)..(1598): n is a, c, g, or t
  misc_feature (1638)..(1638): n is a, c, g, or t
  misc_feature (1646)..(1646): n is a, c, g, or t
  misc_feature (1670)..(1670): n is a, c, g, or t
  misc_feature (1683)..(1683): n is a, c, g, or t
  misc_feature (1701)..(1701): n is a, c, g, or t
  misc_feature (1737)..(1737): n is a, c, g, or t
  misc_feature (1739)..(1739): n is a, c, g, or t
  misc_feature (1749)..(1749): n is a, c, g, or t
caccttgcttgtcggtctctcactgtcaagacggccncgccttgtggctcgtcanggcgccacccccggcgcggagtttctgcggcccctctcttgtgcgcgccacgcagagtagcggngtcctctattgtatggcttgctcattcttaatgtgtgatagatacacaaccntgatgacgaataaagntctgacttatcatccgatagctgcgcgcttgcgccgctatctaagccctgcacttcccctcctctgcgatgtgtcggctcgtcgtctttgttcgttatggtgtgtgttgtgagctgtgngatgttgttnatgtctgatgtgtgtgatgantctcgtggcgtgtcggcgcnngngcggggnagcgaagcgnggcgcggngtcgtgcgcgagggtgantgncgagtttgtgtgtgaangngtgcgtccgtatcggagattataatcactctatctagcnctctggaataggtgaggtaggcgcgngtgatgctncgatgcgccgtgcgcgcacaggaggatgatgagtataatatatttntggttatgtgcgcgttacttaattgtaattntgtacatatgtacactggtgtccactcgtcagcgagtcgtangctcgtcggcancacaacagnatatacgaagcagcatcaaagctccactcagacccacgcacnctgcgcacnagctacataccctgcctacggactccctcttctcttgtctccatcgcgtntnctgtcactcgtcgtcacgtatcatcatatatctatctcanttcaacacagacgtcacactgtctccnagtctcttcttaccatcatgtgagtgcactcgntgtagagaggtcgcagcgatgcgagagatcagcgcggncgatgcgctgatagcgatcngatcggagantccgtcgggtgtngcatagctgatgcatacagggtggntgtgacggcgcgagcngcncgcacaagcgccacgtgacggcatcgctcagctancagcgtcgatcanaagagctntctcgctgtcaatcacacatcacgatactagtgtgcacactctcgtcggttgatgctgttggagtntggtgntcgcgcgcgactcgtatacgtgatgtgcgttgatgctggagntgtgtgcgatgtngtgtctagngatgtagttgntattctgatgtgtcgatgtgcggntcgcgcacgtcagcgatcngtgtggtanagcgtgnagtgagaantcgtnctgcgtttgattatatagtanagcagcaggaanatctgtatcaatntcgcgtcntcctgtcntccnctcatcatgtgctgcngtgacgcgtgcgcgcntcgatctctcgtccnntagctatactatacgncnctctagcagcacacaatcaacagtcgttnatatatactgcgtnctancactcatgtcgcacgcctacgangtcgcgtcgcgcgcgttgtacacantntacgnacnagncgtgtgtgtcccgtcgcagcgntgctgcgcattntgagtctattgatgctgatgtcacgtgctcgcgacgtcgcactctggagtgtcgncgangctgagtactgtgcactagtcnagtgtgatgcgtactataggatatcagtgacgtcgtcagncgatcgcntgatatcactgtctcacgttcatntattgacctcatnacgtgtacgttcgactanttacttcgccgccgcgcgtcactgactctgctcacnangatgcgtgtntatgttatactatcgcatgcgctgtcttcacgttatcgtcgacagtctagcagtg

SEQ ID NO: 411406 - DNA, 1047 bp, Homo Sapiens
  misc_feature (111)..(111): n is a, c, g, or t
  misc_feature (704)..(704): n is a, c, g, or t
  misc_feature (809)..(809): n is a, c, g, or t
gtcactggggccgggcccccggggaggacgaggaaccctggggagcggggtggagggcggtgggtggttttgggatagggtggcggtagataggtcgtcgtcgcgcgcttnctcaccgcaaaacacactgcaggcgcacccacgaaagagaggaagacacacaataaatcaaaaaaaatgaaaccacccgccagccacagtcatgaaatctctatagaaagagtcttccgggctttgggtgagagtggcggtgtggtaggacggagggtcggttgtgcgaagccgccgccccgcaggggaaagggaagggaggtagaagaaagccacgaaccacggaaccgggccgaacgaagaacagaacgtggaacgtagtgacacacccgccacgcaccccaccgcacaccatcacaacgacaagataagacatagagggtaaagagtccggggtgtggtggggggacgccgcgtatgagtgtgcgggtaggcagctactacttatgcagacggggcgatagtgaggtatgtaggggtatttcaatcgtataaactcaccgaatatctatagaagagatagagatcaggtgcacaggttagatattagaataacaattagaggtagaagtaaagtgtgaaatacgcaggtgtcaccgaggtgcggcggacgaggatagagcccagtattaagctacatctccgcagaagangtatttggagaagatggagcgcgaaagtgtccttacgtggcgcgggactggcaactcgatatttgtgaagtgatacgcttgcgttgagagacttactgtccagtngatgtttgatatatagtagcagaagaataagacagcgatgaaaggcagaactgcaagagtgaagagcgcggacgagcggggcgtcggggcgggcgggtcgcgcggaccgacacgcagacgtataagcggtggatgtaggagagggtgaacgtgggtggtgagaggcgggggtagggaggataaagcaccgaagggcacgacgcacgcgaggcacaccgatggctggatacacgtgtag

SEQ ID NO: 411407 - DNA, 890 bp, Homo Sapiens
  misc_feature (59)..(59): n is a, c, g, or t
  misc_feature (130)..(130): n is a, c, g, or t
  misc_feature (628)..(628): n is a, c, g, or t
  misc_feature (819)..(819): n is a, c, g, or t
tgagacatagcagtgtgagcgcttgtgggcggtggcgcgcggtttttcctctcaagcgncgtgctccgggcgcgcgccgtgcgtcatcccgacgtctgccacgttcgctattggcgggtcgacagcaacnacgaagctgaacaccgcacctcaacaacacgaattaacaagagatattaactcaactgtgtacataaacttatctcggtctggggtgcttagtggggggtgagagtgggtgaggggctatcgtggtttcgaagtgggcttgattacttcacactaatgcgtctgccaccccaccgaagaagacgctacgcggagcgacaccctacgctcacgccccgaccccgccacccgaccacgtgcctcaccacccagtgtcctgcgctggcgcgtcgtcgccacgtcctggtgtgtggggatgtagggtcgctcggcaggggcggccgcacatgcggtggttttgttagttgcgaacattgagactcacgcgccgccgccccgacccaagcccaagcgagaactaccactcaccctatatttattgtatcgatgattaagaagaatactgttttagacatttgttatccgtgtgcggattcacgcgtgcgcatctgtgcaatancgttgtaggacgacgtatacatcttatccaaacgacacgcccttcctcccaaccacttcgcacatcatcatcaccgtatcagatgtaaccttttaagatcggcatcacttctactgcacaccgtactccgcggagcagtgtccggatgcggatacaacaggtgctatgtgatggtcacgctgagcgatgcnccgttaatagacaaccacatgagagcccggtgcaacgtcgtccggtagtgtggtcaccctacttacggctt

SEQ ID NO: 411408 - DNA, 989 bp, Homo Sapiens
  misc_feature (177)..(177): n is a, c, g, or t
  misc_feature (304)..(304): n is a, c, g, or t
  misc_feature (532)..(532): n is a, c, g, or t
  misc_feature (581)..(581): n is a, c, g, or t
gaggaggctcattttgttgggcaccccgggacctcccgccactttaagggcccggcgcacgcaccagtccgttcctatgggcgggcgctgacgctgccgccgcacaacccaagagaagcagggagaagagcgcgggcaggagctaggctcgggtgccatgtcgaggacaaaggcggnctaatgggtataatactcaacttatctgattggttgatgtgatttagtcgatagagcgctccatacaaaacgaaaaaataatatgaggcactggaaaacggtccataaagagtccgagaggagaggnaggtaatcgaaagttggataaagaaataagtaataaaaaaccacttatgacaaaaccggcgcggtgggggagcagacacaggaggccgcgcagtaagccgcgcgcgacacaaaacaccacacataacaacgtgcagaccgaggagcagaacgacagaaagaaacgatcacgagaaggataatccgtaatgattaaattctcacaaactgtcacaagcaaccactcatnatatacatttatatttgcattattcactaggtccagcaacgccaacgangcttgcaacatataaccacttcaaccatcgacactcataacgtagtgatcggataggtgttagacgttattgttggttattagcgggtgtgagtgagtatgtaggtcgggtggagatcagaaagaacacaaataaaggtgctgatataaaacctacttatcgtagtgtgatcagtctgcggtcacggtgattggcgttgaggttatatcgatgtatcagtaacaagtaatgtctatacacccacacttctctcgtcattcctatactacctactcatcgaccgacagcacgatcgataaggctcatacactaattatctttaactcctactcatcatccacatatgaactgtatgagagattgctagttagaatatcgaaaatagagatgaattaaatgataatatca

SEQ ID NO: 411409 - DNA, 667 bp, Homo Sapiens
cctcgacggctacagagacgccaagagcaaacccacgcacctaccctgattcccttttgtccagcagattttagttcatgaaacgactgcactgcaagaacggcatagtatggcaactctgctggccagattgtgagcttgggatcggataaggcatcccaactgtaggctatcataggattccggcatacgctaaactacataaccgtgaatgtgcaccactggtatgaacaaaacataaaacaaatgtatcaactggcccacataaaatgcagctaagacatcataaagacaagtgtaggcccaggaagcaccactctggaaaatgatgagactctaattattagcgaccggatccttgagactgtcatatgtccctacctgaaggagcctctacatacatctgatgataacattagcaatgggaataccgcctataacctgtgcacaaccgtgactctttatgctattgagaaacataaagagctcgaaaatgagccactatccctcgtgaagagcagagtgttcaggaacaccgtggcatcaaagcgcaaccagcagatggctccatcacagtcatatgccaactcggagtgagaaagctatgaaggtaagcttcctcaccatgaaggtggatctttgccgacctggaaattattgatctacg

SEQ ID NO: 411410 - DNA, 702 bp, Homo Sapiens
gggaagggagaggattgaaccccggtcgggtctcttacctggccgtgtggcggtacctctgatgaagccacgcatcatgcttgacctgtaggcacatcctatacctgcggacttgtggtttaagaaagaacgctgaccttatctatgcctcaaaggtcttcagccactggataccatatgatgtttcactagatggggaaaatgacaccacatcttaagcatctcaaggaatactactgtttaagacaggtgctgttcaatgaatggactcaggttgctgttagaggttcagacaattggtgtgacgcatactgaaatagaactgataacgtagcttgaatatgtgtctgaagtgaaacgtgcactagcacacgcactaatcattcgtagccgccgtcttcatatccacagcctatgcactcattccttaattattcgtgaagactgctgatgcgtttaagaagctcccaacagtatcttgcatagtcacaggagcgttttcaaacattatgtaatgaggttttttgctctcatgattaatacttgcatgatttaaatgcgtcgtttaacgttgaccacacctggattactaagataacgctctgatactttgtaggtctgacaaaacctgcgagagcccacgtccttaaagtattttaaagagtttaagttccaagcttatattccttttggattacgtct

SEQ ID NO: 411411 - DNA, 689 bp, Homo Sapiens
ggatggacaagccagacccaggtagctatacacgaatcgagagcatcactgcagtttgttgtaagtccttaaggcaacagacctgttggagagagatggcagcaatccttactagctggataccctatgatagtagcactttcattgtgactgaggggggcgtatagaactttgcattcaggagctccaaggaagtggtaagagcatagctatgctacacacccagatgcttgcctgcagcacctggaatgtgttccacaggatatattgagcctatatagccggacatatatgccatagaagtatgctgtaggagaaattacaagcctatgggggtgcttagctataagatacattaggtggactgttggatccttaaacttgatctcttgcacgatgggacgtagtcctccttactctgaagaaatcgaggctttttaaaactgtatactgggtgaattaaaggcacgcatggtggcgatacacacttcacagtccctatgtccaatactgtaggggcgtcgatgctgatatacaggatagattgaggggcgcttccctccagacaaggagaaaccagctgggagatcgaggctagtactgtgggccaatatactaacgtgccacctcagggtaatcctatatttttttcgattagtccttgctcataaggtttccatgctatatga

SEQ ID NO: 411412 - DNA, 686 bp, Homo Sapiens
  misc_feature (161)..(196): n is a, c, g, or t
ctgtaaaacaatgcaagaacatgaagatgtcaaagcccatggtatgtgcatttagtcattctccggactaaaaatatttgcattttctatcaacaggagtttaccttcatgtgcaaatatattcatgcaaatgtgcatattaataagcacacatgtatgtnnnnnnnnnnnnnnnnnnnnnnnnnnnnnnnnnnnngcgggtgagtatttccatgtatcgaggtttttcagagagcgaacgtcactagtaaacggaagaaaatgtatgttattaaacctttatttactaactttcttaacgacagctctaaagctagaaaatatgaaggatcattcatttttaaacagatgccacctgttgaccgtctgccatgctttgtcaagctcgggatgcctaccttacatgttggacatgaatatctatagacaactctatatatgtcattacgaggttaaaggctatgccagataacctaccatgattgctatgcaatcattatctatgggacaatactacctgtcatattctcacataattataaatgctttcagaaatagagaccaatgtgtattatgtctatggtcgcaagaaacatcctatgggactattgacccttcctatcaattggaattatatatggggctgcccaatttattttcttctaccggccttttgatttcagaat

SEQ ID NO: 411413 - DNA, 704 bp, Homo Sapiens
aggaaggatgggtcagggtcaggcctgaagaggtgccctggctgcagcctgccacagccagtgtgttgcactttaggggacacatcttgagactaagccctccagcctccctggctttagcaggggaaagtgcagccaggagctgtagagatggatgctgtccttcccctgcccagggggcttagcatgttagttgccagacccagtgctggctgctgctcctcccccagggagttcaaagggcttagacagcatacagccgcagcattggtgccggtttccccttccgctgggagttcagtaggctccagctgagaggctgttgagaatctgcacagctccagggttgggatgctaggccctggtggcgtgggttcgcaagtggaatctgatccatgagttgcacaattccgtggtaacagcacggtttccttggctgggtagcatgctcactcgctgccttccttggctcgggagagggggctcccctgcccatgtggctctcagacaggcttccgcaccacactgttcttcctctctatggatcgcaccagccttctagtcagttctgatgagagaacctggataccttgcttgccagggagggattcacatgcttattatggtacttttttgagaaatttaaactttatcaattttgtctctttatatgaaaattgggaactgctatctgcaatacaatg

SEQ ID NO: 411414 - DNA, 1058 bp, Homo Sapiens
  misc_feature (168)..(168): n is a, c, g, or t
  misc_feature (239)..(239): n is a, c, g, or t
  misc_feature (369)..(369): n is a, c, g, or t
  misc_feature (482)..(527): n is a, c, g, or t
gcgccattggtgttgggtaccccgggtgaattctggcccatttatgggcccgggcgacggctaacggtcgtctctcctaccctaggttgaagatagggcttcctaagagcacaatgtgaggatgtacatacaacgaggggaggggactagacccaacagtgcactggnccactgcgttcattcgttataaagaatccacataatgactcatcacagtgccgaaatccgctgtgccgtgnatctccagatctttgctcctccctacgggcgaggccgccccggcatgggccctgcatgtgcgttacctttttccatttagtcacacgtccccctcctcctgcctccacacacagcctaaggaggggtcgnccgccgccggccgcgtcgcgacgggctcagcctcagcgcggccctctgcccacatacctcacaacattaatctgcctcttcttggcttactcttcgtaactcccctaacgagnnnnnnnnnnnnnnnnnnnnnnnnnnnnnnnnnnnnnnnnnnnnnnctgctggtctccgtttgctctatggttgttctgtgtgcgcgcattcccgacgtaattccttatatgcgagctctccgacggccgcttacggcgcctccgtctatcgtaagtccttcccttatcgtctatctctcccctcatcttctccactgctgacccagtcaattctattgccgcacccagcatctttaccgctgactcccagattccctcctccctcctcaccaccgcgccgtgcccaccgtgacgtactgcacacccaccccccgcggcgggtgatgctgtgctctcgttcaacaccttacccacaggccaatcgtcacacgagcatcgttacgaaggcttattcgttcctccacacacctcttctctttccacttctcacatacgatatctaccactccccatcgcgtgctccccctcatccctgccgccatattccttgttcgtcactctctccttcttctaccttcctccgcatctctagcccatcctatctcgaccgactcatctatcaatccattccctcat

SEQ ID NO: 411415 - DNA, 888 bp, Homo Sapiens
  misc_feature (414)..(422): n is a, c, g, or t
ccacggaggcccgcctcgtttggcccccgggaattcgccctttggtccggggcagaagtagcctctccagaggtggaacagccggcaacaagaaaaagcaaccaacaaggtaaccacataaaagctgcgggggcggtgtttttggattctcttacgcaacacactaacatctatatccccacgcacccattacccatcccgccgctccctgaccactgtaagtgaagcccgggacttgtccacacacacaacaatcgcatcctcaacaacccccaacaccaatatcaatacggacccgattatctctacttgtccactatctaataggtataatttaataatatcaatcacccaacctaatgtgtcaagtctgagaggtgacgtaatatctatatgtgatctgttggttgtggnnnnnnnnnatgttctccactccctaaatatcaaacaataaaccggcagcgtgatgactatagtacgtcatactacaagtacctctcgtacaataatattttgtaatgtcaataagtactcacacacgttaacgaatgtaaactgtaaggcccctctctctactgcttcgcctccatcgtatacttctcttctttctaccggtaacacacgcgtctgtctccgtctagtcgcgtagggttgcgaattctatattatcctttcttctcgtttctttaatctgcgtatttctttcgcacctctttgcgcttctctttgttgtaatgggtgatcgttcacgaaaggaggacggcttgactaatatgcactcacattggggttatggcaacagcgcccaagagaggaccccgcgcagcttagcaacgggtcgagaagctgccgcccaccccaatatactaaggacggtactccagcaac

SEQ ID NO: 411416 - DNA, 710 bp, Homo Sapiens
  misc_feature (62)..(139): n is a, c, g, or t
  misc_feature (596)..(596): n is a, c, g, or t
  misc_feature (614)..(614): n is a, c, g, or t
  misc_feature (671)..(672): n is a, c, g, or t
aggaagagagggtttgcacacttataatactgagatgtaagttccacaaggacaaagacaannnnnnnnnnnnnnnnnnnnnnnnnnnnnnnnnnnnnnnnnnnnnnnnnnnnnnnnnnnnnnnnnnnnnnnnnnnnnnaaaaatatgtttttatatcagtcacaagtacaatggatatagtataactgattatgtaatgttcaacatttgtacatgggattgagtcctgaaaatttcctcagtcagtgagactggaaacaattttggagaaagtattcttaaaggaggtatatacaaagacaaaaactagaaagtgagaaaacttagttgatcagaaagtgatctttacttttcacagatatcttgtcttcatagttaaactacaaatttcatgagaacagtaaatatgcttttgactattctcctttgcacagcacagaagggtaatactgaacccttatcatttaatatcccaaatgggcttgacaacttgtatctctcatgaaaggctctgagttttcccctcactctcccacgtagtcattgagacatctgttttgcccaagagctgcagagagccactccaggaggctgnaggacccattaactttgngcttcttgctcatcatactttacttcccattgacagaagaacagaggaacccactgnngatgtgggctctcactttgcttttcctgagataatctt

SEQ ID NO: 411417 - DNA, 722 bp, Homo Sapiens
  misc_feature (58)..(130): n is a, c, g, or t
  misc_feature (143)..(286): n is a, c, g, or t
  misc_feature (388)..(605): n is a, c, g, or t
acaaacagacaggtagaaactgaggacctcaactaaactacctcatttctcattctgnnnnnnnnnnnnnnnnnnnnnnnnnnnnnnnnnnnnnnnnnnnnnnnnnnnnnnnnnnnnnnnnnnnnnnnnnattccaacccagnnnnnnnnnnnnnnnnnnnnnnnnnnnnnnnnnnnnnnnnnnnnnnnnnnnnnnnnnnnnnnnnnnnnnnnnnnnnnnnnnnnnnnnnnnnnnnnnnnnnnnnnnnnnnnnnnnnnnnnnnnnnnnnnnnnnnnnnnnnnnnnnggtattaatagacaatgaatataagatgtaaacttaagaagaacttatgaggccaggagtggggcacacatctgtaattacagtacttccagaggagagttnnnnnnnnnnnnnnnnnnnnnnnnnnnnnnnnnnnnnnnnnnnnnnnnnnnnnnnnnnnnnnnnnnnnnnnnnnnnnnnnnnnnnnnnnnnnnnnnnnnnnnnnnnnnnnnnnnnnnnnnnnnnnnnnnnnnnnnnnnnnnnnnnnnnnnnnnnnnnnnnnnnnnnnnnnnnnnnnnnnnnnnnnnnnnnnnnnnnnnnnnnnnnnnnnnnnnnnnnngaaaccaaattaggaatacatgaaaacatgttcatgatctaagtaaaaagctttaaaaaatgacctctgcatgggaaacaattttttgacaagctaaaagagaagtaagactctaga

SEQ ID NO: 411418 - DNA, 644 bp, Homo Sapiens; identical to SEQ ID NO: 297781

SEQ ID NO: 411419 - DNA, 536 bp, Homo Sapiens; identical to SEQ ID NO: 297782

SEQ ID NO: 411420 - DNA, 240 bp, Homo Sapiens; identical to SEQ ID NO: 297785

SEQ ID NO: 411421 - DNA, 764 bp, Homo Sapiens; identical to SEQ ID NO: 297786

SEQ ID NO: 411422 - DNA, 357 bp, Homo Sapiens; identical to SEQ ID NO: 297787
  misc_feature (228)..(228): n is a, c, g, or t
  misc_feature (283)..(283): n is a, c, g, or t
  misc_feature (319)..(319): n is a, c, g, or t

SEQ ID NO: 411423 - DNA, 143 bp, Homo Sapiens; identical to SEQ ID NO: 297788

SEQ ID NO: 411424 - DNA, 193 bp, Homo Sapiens
gtggggtgttaaagtggagagagaacactgtaccagggtgagctagtagaaggtgctttcagtgtctttagaaggcctatgcagtctcacactcaccatgtacaactcaaagcttcacagattctgaaatagcttctcaactgggctaactgttcaactctggtaatgtgcagcagtggggtaggatccattt

SEQ ID NO: 411425 - DNA, 311 bp, Homo Sapiens
ttaaaaatactctggaaagagcacttccatcgttcatttacatcatattagaaatggatttccgagtcagcactggcttcctccagaatagcagtcctggaggagcgagatctccccaagcctccaggattgcagtctgttttgtgccttcactccctaataggtttgccttatttaaaggacccaccttcagagctgccaaggactttctcagagcagctccttggtccctccgacagcctgggatggcatttattctggggcctgggtgtggggaggtcctcaccagcctaggagtaagaggaggtggt

SEQ ID NO: 411426 - DNA, 186 bp, Homo Sapiens
gcagtggatctttctttttttccaaaggaaatttcatatagagtccattcataggaaacagataaaatgtgaacggctgcaactgagatgggggagagtggcttggagcccccagcctctttgctttctcttatccctataggatggccattaggtgaagcagtttagcttgttggttcagacctg

SEQ ID NO: 411427 - DNA, 149 bp, Homo Sapiens
cctcgacttaccacgggtgatcccagaatggactatcagcggtgttttgagccaggttgattgagcactgggctccaacttattgttaatgagaaacggcccaacttggaccatgactttcccatttgcaggtcttagaataatttttt

SEQ ID NO: 411428 - DNA, 153 bp, Homo Sapiens
actctgcctgcactataaaatgaaccaaggaggatccagtttgctgtctgcactgacagatttacagacaggaaaacaaagccttacttaccaggaatccaaagtttatacatgaaaatttaaaaagggagtctatgcaaagcggagttcagg

SEQ ID NO: 411429 - DNA, 177 bp, Homo Sapiens
ggtcttggctggtggtttatggcccgggccttctttctacgggggccagggtccaattttccacctggggtttaaaagttaaggaggaccagcctgggaacccctcgagtggggacgccatttctattaccagggcccccttatattttaaggggacaccatatggagattttatgc

SEQ ID NO: 411430 - DNA, 265 bp, Homo Sapiens
aaggttgcgctgcccatcctctcgcccttcggaatttacccctggccgctcagggtctcgcttctagaagaagatgatggatactagggcgatcctcctattgcctttatatttaacaggcccgccgaggaggggctcccgctggtgcccacataactctattagaccatctgaggcgacttcccccaccccctccaacgcgcctcacgcacgactctagcaaaagacaggttccgcggtggtcacgtcgtttgagactatactg

SEQ ID NO: 411431 - DNA, 202 bp, Homo Sapiens
ttctggcaccacattcaatactgattcacagggatctaaaacattctagttattcagtcactctgtcctgtgtggcagataggacttatgtatcttcagaatatttgaggagtcattctcagagtctctcatgagtgctcaacttaactgttccacaagtctgtcttcatagctgcatgttgcatcttccagtctctgttct

SEQ ID NO: 411432 - DNA, 124 bp, Homo Sapiens
ttattagggggtttagaaaataaattcgtagggtttaaacattgaataaaactacaaaaaaagacacacattcaggtagcgaggctctgggggtaactctttcttagttctttggacacatccg

SEQ ID NO: 411433 - DNA, 238 bp, Homo Sapiens
aggcctgcctaccgtaggtctctcagagcctttactctagtcactctttagaggggggcactagaagcaatatctccgaaacttcttcgactgtcgagactttttactcataattcgcttcaagccaactacggaggcgcatttacaaaactgaaatacgagcgacaccccaggaacgcacggagacatgacgcccttaatcctctgtccctactccctctcctaggacaccgcatta

SEQ ID NO: 411434 - DNA, 204 bp, Homo Sapiens
attcctgacctgtgatatcggccattagagcctttcaagaatggtacctcctgccgatgattttttttaaagccttaatgaagagagtgtcctctgactccttccagagaagataggatgtgagtgagtaagttatgtataataattttatctcaaaataaccacgtccttgataccattccctgtataccaaggaagggtatt

SEQ ID NO: 411435 - DNA, 130 bp, Homo Sapiens
tccctcctttccgaactggagccccatcctctccagagtatccagggcttcttcactcccgggtacctgcccttcggccccttttcaccacagctgtgctactgtcaaccagtctttgctgcataggcat

SEQ ID NO: 411436 - DNA, 293 bp, Homo Sapiens
actttaatttatttcggatgccggaattgtgcccagagtttctcctgagcttgattccatagctagcagcttcaatccttcgcagctgcggtgcgttctgaactctgagctgtcctttcctgacaggcactttccatagcatctgcctgcttaattcctcacgactcagaaatgttaacggcactgtcgagtgctgtgatcattttgctttaactatgtaaagctttatgcccttcgagaagcttatttcgagatagagctagagaagaaaagcagcaaaattcggtcgatac

SEQ ID NO: 411437 - DNA, 151 bp, Homo Sapiens
atcaaccggaggtgaaatgaaataccgtcaacctgtgcatgagtttgtgtgaactgaatgtgtgtgcatacacataagcatgtgtgcgagcgcaaatgtggcgtctccacagcatgcgcaatccatgagtctgtttctaacgcgcgcgcgc

SEQ ID NO: 411438 - DNA, 291 bp, Homo Sapiens
aatcttttaatcaatcgaaaccttaataattaggactgataatagtgatcagtgattgaacctttattatttaccagctaatatagtaggcccataaataggttatatcattcgtagtcacaataaccacatacatcacacaccatgacgtagcgctactacccatacctgctagcagtcaaggttcagataatcataacacgcccaacatctcattgatagtgagttatccaaacaggaacaatctcaagtttatatctaaagcccatgttcttttgcttaatattagag

SEQ ID NO: 411439 - DNA, 218 bp, Homo Sapiens
attatttataaattttagtgagcaccaccaaagttaggattcaattgagtttgaattcaaattcattcaaaagttgcacaaatttatttcttttttcctgaacattcctttacttcagattgacaattcattctatttagagcgctattttaagaaaccttgatgaatcgcccttgactaaaggaaacaaagtagaattttatacagatggaaaaaga

SEQ ID NO: 411440 - DNA, 199 bp, Homo Sapiens
acgtaccgagccgtcgtcgcggtgcttgagcttgaaggcgagatagccgatgccgccgaggcggtggaccgcatcacggtggcgctgacgaacgcgagattcagcagcagcgatgccatcaatagcagcctgatcggacgcatgaccgactctccctgtgagcggaggttggggggccgatctcccgccggtgccgggc

SEQ ID NO: 411441 - DNA, 178 bp, Homo Sapiens
ttatcttacaattctacttcccagcatcctgaaattttcaaatactgtcttagtatattaaactcttttgaaatagataacaaaagcaccatgggagtccgttgaaaacttaggtttgttccttctaaaatttctaagtccttcattatgactataaagaaaaaaggttcatcaattc

SEQ ID NO: 411442 - DNA, 300 bp, Homo Sapiens
ccaaggtcgcctgtgtgctagtcacgaccattaggatccgaagaagagatgatgactaccctaaaagtaaggtctgtgaacagcctgtaatgggacgtgagctgcggtattaaaaaaatcaagaatggaagcgttcctcaattgtcgttgagaatcataccaacacggcagatgcaaccatgaaaaacgcagctgcgtatcgcgcgtttttcatggttcgcatctgccgtgtatgcaatgattctcaacacacattggagtcacgcggcctgcgtaagagtatgaaggtcttcctgtaaa

SEQ ID NO: 411443 - DNA, 109 bp, Homo Sapiens
  misc_feature (53)..(53): n is a, c, g, or t
  misc_feature (66)..(66): n is a, c, g, or t
tccctctgtctcacattcatagtgtgttcttgtctagtgtatgaagtctcacncaaggaaagtgtncaggcagagtttggggagagtgaaaaaagtgaatggcctatat

SEQ ID NO: 411444 - DNA, 341 bp, Homo Sapiens
gcatataccaaaaaaggacaaacagatagaagagtcatctcagtgtgtaacgaggaaaagatttatctcccatcctctgatcctccatatgatatctgatagcgaagatgacaataaccccttgactcttcacgaaaactcgatgagagagaaacttgaaaagtcagaaaataagttcataccgcaattaaccttttggtcaagtaatggaaacttttgactactagtgtaagtcaaaagacaaaggactccagcaagatgagagatttctctattttgtaacgagtagtccaccgatcgtcatcaaagagagagaatgaacaactacgaaagtttaaggg

SEQ ID NO: 411445 - DNA, 303 bp, Homo Sapiens
tcttcaaatctgtcagacagggacgtttaagtctgtagaagtttctgcagctatgttcagctatggcctgcccccagaggtggagtctacagaggcaggaaggcctccttgagatgtggttggctccagcccattcgagcttcccagccactttgtttacctactcaagcctcagcaatggcggacgcccctcccccagcctcactgccaccttgtcagttcgatctcagactgctgtgtctagcagtgagcaaggctctgtgggcgtgggaccctctaagccatgtgtgggatataatctcc

SEQ ID NO: 411446 - DNA, 281 bp, Homo Sapiens
aaaaacaatgtcattttgtacagacaaaatttagcagactcaagcttccacagttagtgcgagagcctgtggatggcatagttacataagagtctgttgtggattcaaatgtcacctcttccaggcagtctttcctgacttaccctggcagctttgtgttcccacattactagtaatgtttttttccttaatagcaatgatttcactgtaataatgtatttatatgcctctctcccccagacagcaagcgttttcccacaggtctcgacacacagaagata

SEQ ID NO: 411447 - DNA, 282 bp, Homo Sapiens
ggacattggaacactatactctattattgcggtcgtgcctagcagtctcgcgcatgtctcctcagcgcgcacagtctctctcagagagctcttctctctttatatgcgcagacccgcagactgggagacccagacccagggcaaactctcttcttaggtatatcgcacccatcatatctcacacatcgtgtatgtcgtatcatcagacccccatagagcatatatgctaaattaatgctctctttcatcagtaattaccccatatcataaaatgcgggcggg

SEQ ID NO: 411448 - DNA, 168 bp, Homo Sapiens
cacgctttctctcacacagcactagcgctctctcactatcactcttctcacagagctgcgcgcgagtctcactactatcaaatatatctgtctcttctcactctatagctctctcacagatatatatctacatatagcgctctcattatactataatattatactctc

SEQ ID NO: 411449 - DNA, 145 bp, Homo Sapiens
  misc_feature (15)..(15): n is a, c, g, or t
  misc_feature (32)..(32): n is a, c, g, or t
  misc_feature (35)..(35): n is a, c, g, or t
  misc_feature (60)..(60): n is a, c, g, or t
  misc_feature (73)..(73): n is a, c, g, or t
  misc_feature (127)..(127): n is a, c, g, or t
actccaccactgggnccgccatgttttgggtnggngcaatgcgctgtctgtgagcgccantctaattgtattnggactgcacgggtccgtacactgactgacactgggctacctcgcccgaaaatgngaacaccgctcaatatcg

SEQ ID NO: 411450 - DNA, 310 bp, Homo Sapiens
gtatgtagcccagtgggtgtcttcccacagggtaggtactcagtttgctctggagggtgactcatacctaaacaagtgcacatctcctttctcagtaaagccaaagcaggtttctacatttggaacaaaagagatcctgaccagagagctatcactggtggtccacttgggccctccttgatgggtgtgttcacttagaaaaccaaattacagatctgaaggctgctgggtagggacaggattagaacaaagggaatgagattgaatgttatttaagggatatttctgtcaagttttggtttctcgatga

SEQ ID NO: 411451 - DNA, 160 bp, Homo Sapiens
agagatatatgcaatctggtagtccattaaatgagagttacacttaaaatattttagttcttttaaagaaaaagtctccatgtgctatttgggaaaaccttcattgcctaaagacccacttgcataattaaggcagatgatgatgatctttatatatgcg

SEQ ID NO: 411452 - DNA, 316 bp, Homo Sapiens
agtttctgcatttggtctgtgtgactctatggagcccaggacttacagaaaaaggtgtaactggctcttaggactttaagccacattatggtagtagacctgccgttttatttgacatggtgaaataaactaccactcctttgtggtaccatatgggcaggacagagctcttcaaccctggctaacaagcctgaagaagaccctgtgaggccgcagcagccatgggaacttcccaaaggacagaaatccacattggaacgtagcatccagataggtgacagaaattccttccaccatatccaaatgtgtgtgtttt

SEQ ID NO: 411453 - DNA, 307 bp, Homo Sapiens
ctagtaacatagaaaataaacttcagtgggaatctctgcttcccgcgtgaggtgtttaattcttggcatttttgtattttaaagatgtagcaacttgtttcaagttagaggagatggcagggtcaaaattttagaaactggatcccaccaccactgtgttacttcctaaacctgcatacaaatgttctgccaacatgtaatgtgccaatagaattatacggtgtgaactgcatatctcagtatctccacgggaaaaaactgtggttggggcatggaggggggaaagggaaacttttttaagctattt

SEQ ID NO: 411454 - DNA, 235 bp, Homo Sapiens
agtctgtaacgatacacccatagatgtgaattatgtatattcgagaaggagatcagatggcatccagaagatagtttagatttcagcacattcatggttcagatgcaaaatcagatcatcaaatagatccagcaattcacaatcatcatagccatatcgcgtcacgtccgccgcacaaagatccgcaccaattatctatctcccaccccccccaggcattcagcacccgcaaaag

SEQ ID NO: 411455 - DNA, 281 bp, Homo Sapiens
agatttatggctgctttcacttggctccatgttctgctgataattaaacagtttgtgtgtcctgtctttcctcaaaggaacttgtcaacctttggaattttgttcatctcagagggacgtcttaagtactcagctttctgaatgtttaagaaaaaaataatacttttcagaattacctacctctttctcatttttagcctgggatcaattattccctttcacacttttttacatcctaagtagaaataaaactctttattctattttttttcagttattgg

SEQ ID NO: 411456 - DNA, 192 bp, Homo Sapiens
  misc_feature (100)..(108): n is a, c, g, or t
cgtgaggagcaggtaccatttttagtagtcacacaattccacctcctgtttttactactggcaacttctacttgagaataatgttctgaaaatggaggtnnnnnnnnntttggaagcaaacacatttggggtttttaaccaattgttaggttctttttatttagggttgtgcagggaactgttgggaggttt

SEQ ID NO: 411457 - DNA, 136 bp, Homo Sapiens
attttttttcccaagaatccccaactcaataaaaccgtgaaacaattgctggggatgggtagagaaaacccatttatagtacttttctgccttcttgtggttttcggctttgcgatcagggactgaagatagaagg

SEQ ID NO: 411458 - DNA, 188 bp, Homo Sapiens
cacagttttgttgactaaactctacagaagtcaggtattgggaaggagaatcgtttcttctttagaggagtaggttttaaccatgttaaatttccaagaataaatttatttatcacctctacacagcgcagaccatttcaggaaaataaataattttcgattcaagtactatacaaacttaacgatgg

SEQ ID NO: 411459 - DNA, 261 bp, Homo Sapiens
gacagcgaccgacactcaatggaatcccgattccatggaaatggaaaatagctctatttatacagcaaattcaaatacagtagcttgctaagcaacttcataattcattaacactcgatggcagagcagatagtcacaattactaacgattatcatgatctgcattcttgacaagtatactatggcgagataaatcaaactcagacgatgataagcaaactcaaaaatgaaaatgatgatgccaactaagcttttgttaaa

SEQ ID NO: 411460 - DNA, 208 bp, Homo Sapiens
gtaatattagggacatgaatgttagtacagtaattaccacacatggaaaatattgttcagcaggaaaagtaaaactttcaaaaaattccctaaagatcctattcaataaacaattttagatttaaggaaccacttacgcaaaactcgaacaaataaccgaaaactccacctaccgcgcaatactcaaaaacacaaaaatactactaac

SEQ ID NO: 411461 - DNA, 182 bp, Homo Sapiens
  misc_feature (45)..(58): n is a, c, g, or t
acaggaactaaatcaacaaactttttcgattcctcaactttagannnnnnnnnnnnnngattaccatttacttttcttcatttaaaacttttaacgcctcagcctttttcttaggccaaggccttccaccaaggatttactccgggacggatctaactggattttccgaggtgggtttaaga

SEQ ID NO: 411462 - DNA, 199 bp, Homo Sapiens
actttgcagtcctcacatcacaaatagagtaaaagattcccaaaaggaaggggatccttttgactgccagacgcgggaaggaaagaatgaaattaaagaatatccttttaaacacacacctcgacacaattttccactctgctaagggatcacaaagactaagacgcgggcagactccccataagccacgcttataacc

SEQ ID NO: 411463 - DNA, 134 bp, Homo Sapiens
cacaatcatagcatttattacacgatttacatctgatcctcacgcaattttcttcctcaccaataaagaactaataggacagcatattagaagcaacatacattcttttattcttgcatcgctataaagaagta

SEQ ID NO: 411464 - DNA, 267 bp, Homo Sapiens
taatcccttttaagcagagatacacattcacagagagagaatgttttaaaaagacccacaaggggaagggaccaagtaagcacttttaattcattttgattacacaaaaataaggcaaactaaatgattcagaacaattcaatttaactgaagccttctagaaaaatactcaacaggcttcaacaaaaagacttagcgcacataaaacaatcacgaagatcacaatttcagcacaaatatctgaaggaatacacgcaaaacatcata

SEQ ID NO: 411465 - DNA, 227 bp, Homo Sapiens
tcactgcaatcacggtagcttcgcccattgcctcttcaaccaggcacatacatcgagaagttgaacctgcactttatttcacactgaacagacttaccccgacaacaacacctccccagtgggacaaacctaccccacctccccacactctactcccagctaacgttccctataatcatcatgacccattaaacatttgcaaaaccacacttcaacccacaggaaga

SEQ ID NO: 411466 - DNA, 205 bp, Homo Sapiens
cgttgtcgccatggtaataccgctcagtacgggaggacccacaggctaagacactcggagcacgagctcgcctgagggaccaacgaggcgaagccacaatccgcgaactcatgactgaccccttctaagtaagaatcccacccaggcaaaccaatccgacaaccgaaatagcgcaggcaccgccaaattcaaggcgccccaaaag

SEQ ID NO: 411467 - DNA, 289 bp, Homo Sapiens
agcgaccgccactcactgtgagttccacttaattcaggtgagccgctcttctgcacctcctcctcacacctctctacctatactaaccatttttgaaggttcaacaatgctctgcaaatctttttaagacccgttacttcaacaactcccaataccttcctcctcaacggaacaacttaaccgttaccttttaaacccgacgagctacaaagcaagagatacttcgcgagccaaattctacaaaggaccaaaaaagaaacccattaccttatagtactcatgcaaaaaa

SEQ ID NO: 411468 - DNA, 177 bp, Homo Sapiens
agcaaccaacactcactggaatcccgcaatcaagagctaaaaggacttcttccatctctcagggacacacatccaccgataagaataaaagaaatgcctgaatgactctcactggcacttttaaacacagcaagcccaacatattttctccttttcataaagaagcctatacaccat

SEQ ID NO: 411469 - DNA, 187 bp, Homo Sapiens
gaaccgcctctgtttccagagcaactggtcaaaacctctccaaataccgagcagttttgaaaactggattaggaaccactaatgaaaaagaacagactcagggacaagtgtttggcgggaatgtgtgaagaggtaactaatgagtgtcactgaatcacactattacacagatgaaacaaagccttta

SEQ ID NO: 411470 - DNA, 273 bp, Homo Sapiens
gggcaccaaaatacacatcagaggagactggcttccatgagacgcttcgactgtctcatcggggcacttgtaataagcatcttgatgccactgaatgcaatgctgtattcaaataatagctttcatcttcactataaaacaatacaaacgtaaactttgaagccctttgaaggacctaaccaaacaacacaaggatgaaaatagatcagtacaactttgagacacattattaggtcaaatctgcaaagcatattcggattttaccgtaaggaa

SEQ ID NO: 411471 - DNA, 299 bp, Homo Sapiens
atatgagaaagcagagcaaaacagatgatgctctaaatgcaactgacacacttgctaaagacgttaggtgctccataaatgcttgttgaaatgctgtttgtcaacatttgttgtgaaaaattcatctctccatctaagaatcctcatgagttaaccacaatcagttctacataatttaacagaaaacatctggtggcacttttaaatgtttaaggacagcatttcacaaactaagcccgcccccagtcccactgcagcaggagaaaataaggctatggagaaaagcaagatgagttata

SEQ ID NO: 411472 - DNA, 246 bp, Homo Sapiens
  misc_feature (65)..(160): n is a, c, g, or t
gaaaataatgattcatattaccgggtatttcttatccagtctttcattctatgtaaattgtgtgnnnnnnnnnnnnnnnnnnnnnnnnnnnnnnnnnnnnnnnnnnnnnnnnnnnnnnnnnnnnnnnnnnnnnnnnnnnnnnnnnnnnnnnnnnnnnnnnacacacactcatagagaacaaaattattccgaatatttcatgaggtttcttattataaggagacaatattgatgcaatctaattaa

SEQ ID NO: 411473 - DNA, 175 bp, Homo Sapiens
aagaaaaagatattaagatgggcaagtcctggtggcaagacaagcagatgacattacagacaatggacatcaaactgctgccaagctaatttagattgtaaaaacagctccatagtcaatacccatgagtgatcttaaatacgcacaattaagctacttctccttgatattacct

SEQ ID NO: 411474 - DNA, 184 bp, Homo Sapiens
atgatatctagactaccagtattttttgaatgaggctttcttaggagtatgttgatgcactctcatcctttcctccccggactcctaccacaaccctctgactgtggaatagcatggttgtgtgtaaggctggagcacaggcacagtgagatgaggatgagggattgagggatgctataagcca

SEQ ID NO: 411475 - DNA, 208 bp, Homo Sapiens
tgaaaaatatttggaactctttagtacagaacagtttcaatatgagttaagaatcatgcgatgactaccaaaaagctaatgcgatcccaggctgcggtaacagaagcagagcagctcagctggggaacgtgatagtgataactacttcgtactaggttagactgtaccgagagacctatgttcagttctgggagtgaaagtattttat

SEQ ID NO: 411476 - DNA, 139 bp, Homo Sapiens
atttgtattagaaaagtaaagttgaaggaaataaaatttgcattcttgttttaagtgatctttaattgtatatatcgcggtagtatgttcaaaatccactaagtactgtgacttttagctgcaaatctttgctctttgc

SEQ ID NO: 411477 - DNA, 158 bp, Homo Sapiens
ttcctatactatgtcggttaaaagccttcatagaatataggcaccaaaaataaactaaccccacaccctcaccaaccaaaggaggcacaatccaacgaaactgatgaaaagtcgaggtaacgactctgcagaccgtactcatttctaaaccaaaagtc

SEQ ID NO: 411478 - DNA, 287 bp, Homo Sapiens
cggaagcattatcctgtcatcagaagatggacctttccctggaatgccttttccctatcatgtctgtgtggtaaatacctattcatccttaacaacctagctgaggtcttacctcatcaggatttgatcccccaaaaagatttgtccctctctgagctatctttataactagtacatactcctaccagcggactatgttataataatgtggctatatgcctgtgatctcagcgtgagctctttgaggacagagtctttgtctaaatactcaaaaccctgtttaccat

SEQ ID NO: 411479 - DNA, 260 bp, Homo Sapiens
gcaatccataagtgtccttatctacaaagtgaaaagttggacaagatattcttcatgatctttttcgattttaaaatgtcatgcaattttagagaaaagctgaagggtcacccaatatggcgcgacaccaaaagacaaatacgaggacaatcactttttcactttccgcaaactatgcctggacacttccttggcgagacttaatacaccagacaagaacacactatgaatgcgagacagagggagacagaggcgaaata

SEQ ID NO: 411480 - DNA, 241 bp, Homo Sapiens
tattttatctcaacataataaaaacgactataaatcttcctaagagaatgctctactcccaagactaatttaaactcggggatcgtcagagggagtgccactgtgacttctacgatgaaagaacaagggagagaagatcttatcgacaatcatacaaagccatatatacgctattcctcaactcacagagttaattaaatgtcaccaggatggaagaaaccttataagcccctatctatca

SEQ ID NO: 411481 - DNA, 267 bp, Homo Sapiens
tcctgaaatactctctactgtcactgcttcagtttaatttatagatagcaccagatatgagtccttattagttctgataactctgaaatggttatttggtatttcttcagtgacaagcaaactatccccccacatgcctttaatggccagtgttttcgatttgtataccaataagcaatctaggtagaggtaatcatatactgatacgctaacctttgaaacataatttccaatctagtaagctaaaatcgcgccaatactgcttaa

SEQ ID NO: 411482 - DNA, 279 bp, Homo Sapiens
ttgtcagtcagaataggatgtaaaagactatttcaaagagttaaattatttgttaatatcagagatcagccacagacaagaagtttatggatgagtgcagcagtggtccattggacatgttaaatactcgtggatatccacaattcgaattgacattaaaaacgaatggatacccaactctgaattccatatcgttttttaatatcaaaaacacaattttaactactgataaaccaggcaaccaccgcaagtttatcgaaatcctgccgctactaaaca

SEQ ID NO: 411483 - DNA, 158 bp, Homo Sapiens
tctgtgtggaggggagggacccagtctggacccaggtgtcatcatctcagccacagcagggccctctcaggctgggaaacttctgccagagctggcgagtcctctgcaggtcaagccagggcttggacacaactacttcatctatcgcgcaggaagag

SEQ ID NO: 411484 - DNA, 286 bp, Homo Sapiens
tctgtggccacagatgcatattacaagcccatccagagccattatgaagagaaagtggcaattttattctcagcctgagaaatccacaccaatctagtctgggtttccaaggatctgccgtttaagtcacttagcctctatcctttccgggaacaacctgcccctagagagggtgaacgagaatcgtccccagtgcctccaacataacaaacccaatcgccctgttaactttaaatcttcaactcgagaaaaaggctcatgactacttctaaccatgcccaaaccc

SEQ ID NO: 411485 - DNA, 272 bp, Homo Sapiens
atatagtccgctagggatagtgaaaaatttggggcttggtttagattggagaggtatatggtggggtgtcttataaggcttaactttgggagggcccagggccttgatttctgtcccccttgccttgcgtggcctttgaattgaaagctttgaattaggccttcatagattttagtgtgcatacaaataacacgatctttttataaggcagattatgattctgaaggtttagtgtgggacccaagctttcgcatttctgatctataaggtga

SEQ ID NO: 411486 - DNA, 152 bp, Homo Sapiens
caattctattttcagagttgactgtactcttttcctctgaagatacacgtataaacgcgaccaacgaggtctctcgtcctaataacaggttcaggcatgaatcaccgtctaacagctatttaaacaccgcctcttcatagaagtaacgccga

SEQ ID NO: 411487 - DNA, 310 bp, Homo Sapiens
aattgtggtatatttcatttaaaatcgatcaaagacagcaacatacattaatcagaggaaagcatcaattaaatgcagaaacaagatttaaacaaagattcatattaaaacaatgataagtaatacttagaaactgcatcctagagacacatcattcgcatttttagaaaaacagaaacatattagtgtgaaaagatgttaaaaaatgaatattaaaccgtcgagcacaacacactacgccgataacaatacaccacaagcgccgtaatcctgccgacactgacacactacaggcgtcgtggcgatccga

SEQ ID NO: 411488 - DNA, 177 bp, Homo Sapiens
  misc_feature (80)..(104): n is a, c, g, or t
gttcacatcagtgtgtaggatatgctatcacgtatgtgcatgagaagaatggagaaaatggatctatgcggatgtctgtnnnnnnnnnnnnnnnnnnnnnnnnnacaagcttgcacatgtatagaggatccgaaattccaccaatactgacgaactacaaacgtaacagcagcaggc

SEQ ID NO: 411489 - DNA, 223 bp, Homo Sapiens
  misc_feature (154)..(154): n is a, c, g, or t
aacactcagaccggacgggacgagggattcccctgccttcgcttccctccctcgcttgctttgtagttttcccgcaccagcccgctgccctgcgccatcctagggcctcgaagcccggggaatctgtcccatcctgtaacgggccgcccccttngatttttctgcccgtgccaccggaggttgctgcgacgcgcaccgactcagatcattactactgaactcg

SEQ ID NO: 411490 - DNA, 492 bp, Homo Sapiens
  misc_feature (80)..(80): n is a, c, g, or t
  misc_feature (295)..(317): n is a, c, g, or t
  misc_feature (446)..(446): n is a, c, g, or t
gcctgtattacagataggtatggttgttaaagaaacttttgttgtactgtttctgttgtttacagagtaatgtaattttnaaacttatattccagagagatataaaatagcctcctccatcgtcagccaatgatatcactgttgagctgttttcaataaaagttcatgctgtacttcctgcctcacaggtcatgtctggttccgtttttggatcctctccactgtattcaatccctttggttctcaaggtgactactgactgatcaggggcttgaaaaaagggagacaatattgnnnnnnnnnnnnnnnnnnnnnnnctctaatcatagcagctgaaatttttcatccaagctgtggcctctttgactactacaattgcagttctcaaacttttaacttagactctctggataggttctagggtataaattaaatccaggggccanggaaacaaccttcaaacaggcctcttggaacaccctttccccagta

SEQ ID NO: 411491 - DNA, 414 bp, Homo Sapiens
acattctaggcagtgatcaccttgagggcataaacctggcacaaagaaagtgtgtcagaaatgcttgtgaaatgaacaatgaataaatgggcaaacaggatctggtgggaactgacaaggctccacagccaggtctcattgacccggatggcccaatgcgcactaaactgcactgccttctcatggttgctgaattggatcccttcataaaatgccaggcggacaacaggacttctgcttcccaacaaacaaggcaaaggacacatttccgagttcctggcttgcttctcccattctagtgctcaagttccagcaccagagagtgctgcttactgaaaggtgccatcttcccatgtcatggaacagttttccccagaacactgaggcatgcttcgtgaacccaccacccggtat

SEQ ID NO: 411492 - DNA, 158 bp, Homo Sapiens
  misc_feature (70)..(70): n is a, c, g, or t
  misc_feature (101)..(101): n is a, c, g, or t
  misc_feature (122)..(122): n is a, c, g, or t
  misc_feature (125)..(125): n is a, c, g, or t
  misc_feature (144)..(144): n is a, c, g, or t
caaactaattacctagggtacttaaatgttctgacctctctactatcacatgttaacagtacgataacgnaaacccactcaatgttatgatgtacataagnacaacattaattttacacggnggngacagccgttaattttctnaattactttcaatt

SEQ ID NO: 411493 - DNA, 283 bp, Homo Sapiens
  misc_feature (63)..(63): n is a, c, g, or t
  misc_feature (72)..(72): n is a, c, g, or t
ataattgcaatgacatatcatttcatgttttgttggctattttttccttatgtcatgctattngcacctttngcccatttttctattggtgcattcaccatttcatatcaatttacacaatttcttcatgtaaactggcaatcagtcatgggcacaaacatttttcatactttgatttcttttgagtttgtttttgatacagaaattttcattgtaagagaggtacactagtcttttccctttgagacttctggattatttttcatgcttagaatcttcctgg

SEQ ID NO: 411494 - DNA, 395 bp, Homo Sapiens
  misc_feature (74)..(74): n is a, c, g, or t
  misc_feature (149)..(149): n is a, c, g, or t
  misc_feature (166)..(166): n is a, c, g, or t
  misc_feature (236)..(236): n is a, c, g, or t
  misc_feature (243)..(243): n is a, c, g, or t
  misc_feature (261)..(261): n is a, c, g, or t
  misc_feature (371)..(371): n is a, c, g, or t
  misc_feature (385)..(385): n is a, c, g, or t
gttggtttgttgagttccttggagattttggatatcagtcctttctcagatgcatagtgtgcaaaaattttttnctcattctgtaagttgtctgtgtagaatgttgattttgttttcttaagtccattttgtctacttttgtttttgtngcatttgcttatgaggncttggtaataaattattaccctaggccactgttcagaagagtttttcctaggtcttcttttaggattttnataattncaggtcttacaattaagnctttaatctatcttgagttaatatttatatatagagtgggacagatgtccagtttcgttcttctgcatgtgagtagcgagttttctcagcactatttttttgaatagggnggtcctttcacaanggttaattgg

SEQ ID NO: 411495 - DNA, 385 bp, Homo Sapiens
  misc_feature (114)..(114): n is a, c, g, or t
gtgtgtgtatctaacttatgtctctacctgaaatgtgcctatgtcctgttgttctgctttcaggcaacttctccatcataatgatccataggcagtattcacttgttgactgtngtactcaactaattctcagacttttatggctaccagtacaatataaatttattgtgacacaatttaagatgatttggattaagtgtcaatgaaaaatgctgcttaggtaaaataccatctagaaatgaaatacctaatgatttgtgaaaaagcattgagcaagctccagtgaacaagcaaattactacagaggcactttgctagtgggattctgtcagcaccactggtatctggggtctattgtcaaataaagcatatcgtgttgggtacc

SEQ ID NO: 411496 - DNA, 232 bp, Homo Sapiens
  misc_feature (126)..(126): n is a, c, g, or t
  misc_feature (143)..(143): n is a, c, g, or t
  misc_feature (161)..(161): n is a, c, g, or t
gctgtcttaaaaaagtgaactcaggggttgcaaatgaccacacatctgagctttagtccccattcatcaggggcataacctgtggagaaaaatcagggaattatgcagtatatgggttagacaggnaaacattctaggaagancgagattctatgtataancttaagggcaataaagcatcatggaaggttttaagcagtatataatcagatctacactttagaaacccccc

SEQ ID NO: 411497 - DNA, 265 bp, Homo Sapiens
  misc_feature (17)..(17): n is a, c, g, or t
  misc_feature (76)..(76): n is a, c, g, or t
tacgtgataagattgtnatttaaaataccttattcacagaagaggtgaagtacattttttagataaactgaatttncatactgcaaagctattggaaaagttaaattgagttataaaattttaaaggggagcacgtggccattgaaaatcaagccttgttttgccgtgtactgaatatggctttcttgaaaaatattttaaaatagagcacttccacacgcttcaaaacatggtcagttcttggtcatatgaagaattggagggt

SEQ ID NO: 411498 - DNA, 111 bp, Homo Sapiens
aacaataaaagtaacacatcttggagctcctccctttcatttgttcggcagttattatctgagtgcttgctttgtgctaaaatgttttagaatgctacgttaccttttttt

SEQ ID NO: 411499 - DNA, 116 bp, Homo Sapiens
aaatctgcaatggagattattctaaacttgatcatgatgatgagtgagaaaactggtgcattctcaaactcctgctggaaacgtaaattggcaccacctctcaaggtcactctttc

SEQ ID NO: 411500 - DNA, 266 bp, Homo Sapiens
  misc_feature (237)..(237): n is a, c, g, or t
  misc_feature (252)..(252): n is a, c, g, or t
cttttattcatttgtcatttaaaatcttgtttttatgaattttatgatttgagagaattttcatgtcaagatatcctttcttttctgaaagaatattttagcattaaatattagaaggaatacaatttcagtagttatgtgatgaataaatttagctttctgaaaacagaccgcacttgctttgttttttccatttggcaatgaacctgtgcactagcatttaggaatcatttaggnattatcagtgtagtngaaacagccttgct

SEQ ID NO: 411501 - DNA, 300 bp, Homo Sapiens
ctccattaggaattcactgttagaaatctgatcttttctcctctgttgagctttacttgggcattttattgatttgatatcacttagtagaaacccattcaacaaaaggtatctcttcaggccactagtcaatacagcattttttatttgctgagatttttacttctattttgccccacatcagctggtaagttttataagtaagcaaaaagtaggagctatagacaataaggaagcagaatgaacctctgcaattcatatttatgtatgatttcacttggagtgggaggagatgttttt

SEQ ID NO: 411502 - DNA, 201 bp, Homo Sapiens
aagttaaaagcttacttttcagctctatacctgatggcatcttgttctatcagcatgggtacagactcgttcatgtagtcccataatgttcatggagtcccataatgacactacgtagtgcctggccaagcaagttaggtttgaatgtggctagaggaagatgaataaaagtgagaataagaggcgaggagaacagagagg

SEQ ID NO: 411503 - DNA, 317 bp, Homo Sapiens
  misc_feature (190)..(190): n is a, c, g, or t
ataaaataaaaatttactctcttctccttccctcaaaaagtataaagagggatgcccaataaataattggtaaatgaaaaggatcatttttctgtgcttttctaccaatcctgcattcttttcactctcttagttgcccaacatcactggtttctcctcttttctatcaaaatatgttttcagacaaggntcagaaactttttcaccctgaggctcagataactaatatgagttgcatgtgctactatgcctagggacaaaagtctaaaaccaaaagtgttaaactctaataaaattagttttagtctcctttctgt

SEQ ID NO: 411504 - DNA, 261 bp, Homo Sapiens
caggaaaccaagtgcttctgacaactcattcgtgcatccaagcttgcagaaatatccataggaggtcagtggcttctgctgtgcaaagctcctgttggcccaggaggctcaggcagaattctgattgtcaggaaaaccctcacacttgcctgagagcaggcgctgccaggcttctagttccccctagcccttctgttgagattgcatcacctgtatgagtcagggttcaatcagaggcagaagcatcaggagattgtttct

SEQ ID NO: 411505 - DNA, 198 bp, Homo Sapiens
  misc_feature (26)..(26): n is a, c, g, or t
  misc_feature (68)..(68): n is a, c, g, or t
  misc_feature (120)..(120): n is a, c, g, or t
gaatttagcaaatgctgtttattgtnctctgaatatctgattagcatggacagttaatagtcaaaatncaaaattcatcaacagttttttatgacaacagctatcttaacagcagatctnctaatattatatctttgatggcttttatgaaaatccccagttactgaaaaagatatactattttccatgcgattaatt

SEQ ID NO: 411506 - DNA, 132 bp, Homo Sapiens
ccattgggtgtaaaattaacagggactactttctatcactatgtcggaggtggatgactatgctaactagacttgaaaagctacagactacggatctcttcattggcacacaactgagccacctgagtaaat

SEQ ID NO: 411507 - DNA, 179 bp, Homo Sapiens
  misc_feature (20)..(20): n is a, c, g, or t
  misc_feature (60)..(60): n is a, c, g, or t
atagcagaaaggcataagcncagagagaagtattctttccccagagaaaatctgtaaggngttatatgagaggctccaaatccagcttactgaaacaagcactgttttcagataaaatgaagacaatatcccttcgtatctctttccgtgatccttcacatggattcactattgaggaa

SEQ ID NO: 411508 - DNA, 297 bp, Homo Sapiens
tagaaaagattttatatactctacatacaattctccatacatccacattcagtgacaaattgtaatctttcggcctaacagttctagtgtaattttagataataaaaatattcaccacttacagttctagcttatgctaatagacccacagtcatcagagatgctgagactaagcaacagacttgggactcagaaaagtaacactattgattgcactgccttttgaaaatgaaacttgcaatgaaagactctaacttacaccccagaacttggaaggaggagcaattaccatgaatt

SEQ ID NO: 411509 - DNA, 147 bp, Homo Sapiens
  misc_feature (36)..(36): n is a, c, g, or t
  misc_feature (81)..(81): n is a, c, g, or t
  misc_feature (89)..(89): n is a, c, g, or t
  misc_feature (117)..(117): n is a, c, g, or t
ctacttgaggtaataacaagaggcaatgctactctncctcttcattattttcaaagcttttctcagaacagcatttatagnctctacgntgatttacccaacactttaatatctctnctatattatcccatagccctgcataaagcg

SEQ ID NO: 411510 - DNA, 282 bp, Homo Sapiens
  misc_feature (32)..(32): n is a, c, g, or t
  misc_feature (215)..(215): n is a, c, g, or t
tcacattgactaagagagtatcagcttctgtnctgattgagcctaaatttatctgctttctctgtcttcagatctcctaaaacttacctacctcctgtgctaatttccttatatgtatgacaattatgtgtttcagagactcctgctatgttactgtcagcagaaaattcttctcatttgcttatgcatgagtacaaagtttcttttaagtgaanctctatccatagtgtcctagggaagccttggtccttttcaacatcttctaaaaacacaatggccttt

SEQ ID NO: 411511 - DNA, 344 bp, Homo Sapiens
  misc_feature (53)..(53): n is a, c, g, or t
cagtttcatgcctcataacaatttaataaatattactaaaatatggcaactgntaccatggctcattagcaagctgttggtgtaatataaagttatccagaattgttttgggtagttggtttgtcaatataatgcacacagtaatctctgaagaaagtcaggaacatatggtccatgttcatcagctaaccccagggaactgcaccagaatctctcttcttacaactacatgacgttgagaggagagcttgagagaagatagggaaaaaaagaatgggtggaaagagaaacattgattactcaaaccataaaatcacacttgcaagcataaatcaagatcacaa

SEQ ID NO: 411512 - DNA, 136 bp, Homo Sapiens
gtctaattgaacttgcagcacactgttgaatagcagtgatgaaagcacatattcttgtctcgttcctaatttcagggggaaagctttcagtctttcaccattgaccatgattatagctgtggcttctttacagatg

SEQ ID NO: 411513 - DNA, 301 bp, Homo Sapiens
  misc_feature (233)..(233): n is a, c, g, or t
tggacccatgtattctgactctggggagacagtaccatggaaggctttatgactcaaagcgtacaccttgacctgtgagtcagaattcctttctaagggttgtcccccatttggccctataactgagttttcagtatgcgattccacttttcatgtagatccactgcttctgagtgatggggtgtgtgatggaaccagttgatttcaaggacatgcttccattgttgcacttnctctgcagtgaaatgctttgcttgtttagaaactctgttgtgtggaggccatgactactgataaagca

SEQ ID NO: 411514 - DNA, 296 bp, Homo Sapiens
  misc_feature (100)..(100): n is a, c, g, or t
atactttattttaaaaatttcactcttagtacaaagactctctcacagtgcaccaggtgttaaaattatgcaaaatggggcatttgtccagtaggcatcntacttgggggatgccaagtaggctccccttctgtattttggtatatctcggggagcaatttggacctgatgacaactccaaatctgggtgactcatgatgggaagggcagaggttaaaggaaaacaagtttaagtgtacataaccccttttttggattaagaagctaagcaccacaacttctcacaatttcttccc

SEQ ID NO: 411515 - DNA, 248 bp, Homo Sapiens
  misc_feature (23)..(23): n is a, c, g, or t
  misc_feature (46)..(46): n is a, c, g, or t
  misc_feature (66)..(66): n is a, c, g, or t
  misc_feature (99)..(99): n is a, c, g, or t
  misc_feature (114)..(114): n is a, c, g, or t
  misc_feature (177)..(177): n is a, c, g, or t
tgtgaaagcaaaactcaacaggntggaaggccagaggaaggccggnctcagcaggccccgcagagntcatcaacacatgaggctatagaggcgcctggnccaagggactctttntccccaatctctgtccaagagaaaaccttggacatggcccacattaaagttatttgtaaactnattactgtcaagatttcctctctgaactggccatttcttgtaaggatgactttcctaaaaagttgctgcta

SEQ ID NO: 411516 - DNA, 162 bp, Homo Sapiens
agtctctttaatgggagagaaattgtcttcatgtcttacacatagtatgtattcagtaaatgctggtttaagtttttgttggttgtgctgttttgttagccatggacagaagcccagtgcaccgaaataacatgacagattgaaggacctcaataaacagtg

SEQ ID NO: 411517 - DNA, 294 bp, Homo Sapiens
aagtagtcattcccacagaaagggacagagaggaaatgtccacatcccaaccttggcagtgagtagagagtaaagatacaaacaaccttccttgagaatttgaagtgtaaattagtaatgattcaagttcacagtccgaattcatactgccagtagcgtccaaagaaaccttgaggcaagaattcagagttttctcaattcatagtgctcttggatgaggggaaaaataactctgcaataacttgacataaaaccaggtcattggctgttctgacttccaatattaaaatgtgg

SEQ ID NO: 411518 - DNA, 308 bp, Homo Sapiens
  misc_feature (227)..(227): n is a, c, g, or t
atgatttgtttcattcttctacatgtggcttgccagttttcccagcaccatttattaaatagggtatctcgtcctcaatttatgttttggtgtgctttgttcaagatcagttgactatacatatttggctttacttctaggttctctattctgttcaattggtctgtgtgcctacttttataccagcaccatgctgttttggtagctatcaccttgtagtataattngttcctttttgcttagggattgctttggctattcaggctctttttggggttccatgtgaattttaggattgttttttctaa

SEQ ID NO: 411519 - DNA, 265 bp, Homo Sapiens
  misc_feature (33)..(33): n is a, c, g, or t
  misc_feature (196)..(196): n is a, c, g, or t
cttggtcttactttttaagggaaataatttctngtgcttacatattatggaatactaggggcaatttaaagtcatgctgacagagtttatactgacatgcaacaatgcttaaaacatactaagcaaaaacaaaggcaagacaaaaacttggaaagatccactgtgttaagatgcttaacaaaaagggctctaaggnaacattctaaaatattagtagtaattttctctggatgctggaataataagtggtttttaaaactactta

SEQ ID NO: 411520 - DNA, 175 bp, Homo Sapiens
actgcccgggagctggtgtcttgttggaaggggcagctgggagtagggagcagccgagccacaggctgcccgcggcatcgtcccctgcctcgggtcagggggccccttgactggaggacctcacaaccctgggggtgtccatggcctgttcctgggagctgcaccctcatcagat

SEQ ID NO: 411521 - DNA, 277 bp, Homo Sapiens
  misc_feature (83)..(83): n is a, c, g, or t
  misc_feature (112)..(112): n is a, c, g, or t
ttaatttaaatcctaatttttcaaatttgttgcatataccatgcttaaagtttttcacacttcataattaatttatgtatgtncgtttataaagtggaagcagatatctgtnctcagtactaactagcttattctgtcttatgtcaaccctgccagactttgggagagaaagtatttgattagaatagtatgggcatgcatttatctctgtagggaaaggtggaaaggcttctgggaatccacggtgtgccagggcattgtaggtaattgaaatggt

SEQ ID NO: 411522 - DNA, 233 bp, Homo Sapiens
agtgtaacagtatgtatgcatgtcttttatgctgaagatggggctgtaattcacactgtttccacagttgagagcatcttccacatgtggtagattaaggtgaaactgcatatgggtggtggtgaatcatttttctgtaggctgcgtggttgattgctagtgttaccgaatgtactttttccacttactgaagggtccatcattatttgaatcatctttctttaactttctag

SEQ ID NO: 411523 - DNA, 290 bp, Homo Sapiens
cctacatcctgatcttctctgtcctttcatgcgtcaccccagacaaccatgcccggggcaagaagaacctgatcgacccaaggccctgagggatgcctagacgtgtcccatctgggatctagagactaaagcatcataaatcacatgcttggtaacaccaagacactcacttcgaggacgtgcttatactacttttttctggagcaagagataaaactgttatttcagcctgattccaggagcaaagaggaagggctcttgattccatccactcctcaccccagccaggg

SEQ ID NO: 411524 - DNA, 153 bp, Homo Sapiens
  misc_feature (20)..(20): n is a, c, g, or t
  misc_feature (59)..(59): n is a, c, g, or t
  misc_feature (84)..(84): n is a, c, g, or t
  misc_feature (131)..(131): n is a, c, g, or t
tctaatgaattatgcaagtnttaaaatgtctcaagaaaaagattactcattaggatttncgaatgcataaattcaacataattnttggtgcaactgctctctcatgtaataggtaccaaaatctgattcangttttatattggagggacgggt

SEQ ID NO: 411525 - DNA, 341 bp, Homo Sapiens
  misc_feature (102)..(102): n is a, c, g, or t
  misc_feature (213)..(213): n is a, c, g, or t
aaactgggaaagcataaggctgcagacaccttaaccattccattaatgaatttacaaagtaagcaaaatgtatatttcccaagtcagttcctgactgttttntcctaaaataaatccttgcgtgctgttgtcaacctaaactatgaaatgctctaaaataaatccttgcgtgctgttgtcaacctaaactatgaaatgctctgggattctgtnctgtgctgttggggtgcatcaagatgccaaacccacgaaccaagtattttgtcaaaatgaactgagtcttcaggggacattgaggcatgtctgcatttagctcaaaagtagagtctcacaaaatggta

SEQ ID NO: 411526 - DNA, 308 bp, Homo Sapiens
  misc_feature (266)..(266): n is a, c, g, or t
gaaaccttcattttaatcactgagcaacagtatatagagcaatattgttgatcctgataaacactgcatataaagaaaaactgtaatatacaatatataccatctcaagtatgcttagctttgaaaatgatgaaaatagaaggcaaaagtaagtgagtaataaacatgttatagtaactgcagtagtggtacatgtttcacaaagattttaataaaagcacataaagctacaataaaagttctatattccagtttcttatagtccngaaatagcagtgatttggcatttggcaaattgaaagttaccc

SEQ ID NO: 411527 - DNA, 289 bp, Homo Sapiens
  misc_feature (140)..(140): n is a, c, g, or t
caaaaaaccacagcttgcgatatgatttacatatcatatgatttactcagtttaagtgtacaattcaatggtttttagtacaatcacagataagtgtgaccatcaccatagtcagttttagagcattttcatcacctctnaatgaaactttatattttagctattcctccatttccccattcctttattcccgcattcaacacaatcataagcaagcacttgtctactttgtctctatagatttccctcttttggacatctcatatggatggaattgtataatctgtgg

SEQ ID NO: 411528 - DNA, 335 bp, Homo Sapiens
  misc_feature (27)..(27): n is a, c, g, or t
  misc_feature (30)..(30): n is a, c, g, or t
  misc_feature (38)..(38): n is a, c, g, or t
  misc_feature (47)..(47): n is a, c, g, or t
  misc_feature (57)..(58): n is a, c, g, or t
  misc_feature (61)..(61): n is a, c, g, or t
  misc_feature (82)..(82): n is a, c, g, or t
  misc_feature (84)..(85): n is a, c, g, or t
  misc_feature (89)..(89): n is a, c, g, or t
  misc_feature (93)..(94): n is a, c, g, or t
  misc_feature (112)..(112): n is a, c, g, or t
  misc_feature (114)..(116): n is a, c, g, or t
  misc_feature (124)..(124): n is a, c, g, or t
  misc_feature (138)..(138): n is a, c, g, or t
  misc_feature (151)..(151): n is a, c, g, or t
  misc_feature (168)..(168): n is a, c, g, or t
  misc_feature (173)..(173): n is a, c, g, or t
  misc_feature (175)..(175): n is a, c, g, or t
  misc_feature (177)..(177): n is a, c, g, or t
  misc_feature (186)..(186): n is a, c, g, or t
  misc_feature (190)..(190): n is a, c, g, or t
  misc_feature (192)..(192): n is a, c, g, or t
  misc_feature (195)..(195): n is a, c, g, or t
  misc_feature (199)..(199): n is a, c, g, or t
  misc_feature (202)..(202): n is a, c, g, or t
  misc_feature (224)..(224): n is a, c, g, or t
  misc_feature (244)..(245): n is a, c, g, or t
  misc_feature (264)..(264): n is a, c, g, or t
  misc_feature (271)..(271): n is a, c, g, or t
  misc_feature (274)..(274): n is a, c, g, or t
  misc_feature (280)..(280): n is a, c, g, or t
  misc_feature (284)..(284): n is a, c, g, or t
  misc_feature (300)..(300): n is a, c, g, or t
  misc_feature (319)..(319): n is a, c, g, or t
aatgtcatgatgtggtaagggcttcantcngagttcanatcttcatntccatctganngtncacacaggagagaaaccatananntgtnaagnntgtggtaagggcttcagncnnngttcacantttcaggtccatcngcgagtccacacnggagagaaagcatacangtgtnangngtgtggtangggntncantcanagntcacattttcaggtccatctgngagtccacactggagagaanncatacatatgtaatgtgtntggtaanggntgcagnaacngctcacattttcaagnccatctgtgagtccacacngtgcgaggaaggcctc

SEQ ID NO: 411529 - DNA, 167 bp, Homo Sapiens
  misc_feature (28)..(28): n is a, c, g, or t
  misc_feature (39)..(39): n is a, c, g, or t
  misc_feature (110)..(110): n is a, c, g, or t
  misc_feature (119)..(119): n is a, c, g, or t
  misc_feature (122)..(122): n is a, c, g, or t
  misc_feature (124)..(126): n is a, c, g, or t
  misc_feature (130)..(130): n is a, c, g, or t
  misc_feature (137)..(137): n is a, c, g, or t
tatctggattcccttctcatctcccacncacactcctangacttgacagaactctctctagagagtacccctatgaatgtaagcagggtgggaaagcattcacttatctnacaagcttncanannnattnggggatncacactggagagatatctcatgaatgtaag

SEQ ID NO: 411530 - DNA, 356 bp, Homo Sapiens
  misc_feature (54)..(54): n is a, c, g, or t
  misc_feature (57)..(57): n is a, c, g, or t
  misc_feature (70)..(70): n is a, c, g, or t
  misc_feature (109)..(109): n is a, c, g, or t
  misc_feature (116)..(116): n is a, c, g, or t
  misc_feature (135)..(135): n is a, c, g, or t
  misc_feature (165)..(165): n is a, c, g, or t
  misc_feature (167)..(167): n is a, c, g, or t
  misc_feature (185)..(185): n is a, c, g, or t
  misc_feature (256)..(256): n is a, c, g, or t
  misc_feature (293)..(293): n is a, c, g, or t
  misc_feature (309)..(309): n is a, c, g, or t
  misc_feature (319)..(319): n is a, c, g, or t
  misc_feature (331)..(331): n is a, c, g, or t
gtaacgctgtaaagatgtggcacggtattcggtcagttttcaggactcacaagncancagaggattcatnctggagagaaaccttataaatgtattgagtgtggcaagnctttcantaggagttcaggcctcacnaatcatcagagaattcatactggagagagncntaacaaatgtttcaattntggtaaggctttcagtgatctctcaactcctggatgcaatcagtgcattcatattggtgtggattctctcngaaggtattgcctgctgaaatctcattgggcagcgtncacccctcactaggcngcagagcctncatgctggtganaggcctcacaaaggttgatcactca

SEQ ID NO: 411531 - DNA, 271 bp, Homo Sapiens
  misc_feature (29)..(29): n is a, c, g, or t
  misc_feature (63)..(63): n is a, c, g, or t
  misc_feature (84)..(84): n is a, c, g, or t
  misc_feature (119)..(119): n is a, c, g, or t
  misc_feature (146)..(146): n is a, c, g, or t
  misc_feature (149)..(149): n is a, c, g, or t
  misc_feature (151)..(151): n is a, c, g, or t
  misc_feature (153)..(153): n is a, c, g, or t
  misc_feature (167)..(167): n is a, c, g, or t
  misc_feature (170)..(170): n is a, c, g, or t
  misc_feature (182)..(182): n is a, c, g, or t
aggcatcagagggtccacatcagtaaaangacctcttagagatttcgcctatcaccgcttatngtatagccgagcgaacccgcncggggggcacaggtatcccaagtacgtcccatctngtggaagtcggcctctactaagatcantgngncntgcgggttatacanctntccgtctaggtngttacaagacccttggtcgattacatcaagcttgaatacgatctctgtgaggaacattcccctctcttcgtgcagctttttgggttgat

SEQ ID NO: 411532 - DNA, 245 bp, Homo Sapiens
  misc_feature (23)..(23): n is a, c, g, or t
  misc_feature (41)..(41): n is a, c, g, or t
  misc_feature (46)..(46): n is a, c, g, or t
  misc_feature (60)..(60): n is a, c, g, or t
  misc_feature (108)..(108): n is a, c, g, or t
  misc_feature (114)..(114): n is a, c, g, or t
  misc_feature (119)..(119): n is a, c, g, or t
  misc_feature (124)..(125): n is a, c, g, or t
  misc_feature (136)..(136): n is a, c, g, or t
  misc_feature (140)..(141): n is a, c, g, or t
  misc_feature (206)..(206): n is a, c, g, or t
  misc_feature (222)..(222): n is a, c, g, or t
gtttttcactgtcccaagtgtgncatgagtttccgcctganggggnagctgctcagccancagctcctgcacacagggggagaggcctttccactgcccagagtgtgncatgancttcngccannggggaaacatnctgnngcaccagctcatccacagggccgagaggcccttcgcctgtggcgattgtgggaggggcttcatcnacaagtctatgcttgnggagcacatcagagtacacacaa

SEQ ID NO: 411533 - DNA, 148 bp, Homo Sapiens
  misc_feature (107)..(107): n is a, c, g, or t
gtggaccaagggcttcagtaaccacccgagggtgcacctgacgaagaggttctacgagtgtggtcactgtgggaaaggcttcaggcagctggggttcttcatgaggnatcagaggattcacagccacggggaggtgtagtggtgcccg

SEQ ID NO: 411534 - DNA, 163 bp, Homo Sapiens
  misc_feature (20)..(20): n is a, c, g, or t
  misc_feature (56)..(56): n is a, c, g, or t
  misc_feature (75)..(75): n is a, c, g, or t
  misc_feature (80)..(80): n is a, c, g, or t
  misc_feature (85)..(85): n is a, c, g, or t
  misc_feature (97)..(97): n is a, c, g, or t
  misc_feature (104)..(104): n is a, c, g, or t
  misc_feature (109)..(109): n is a, c, g, or t
  misc_feature (121)..(122): n is a, c, g, or t
  misc_feature (127)..(127): n is a, c, g, or t
tgtgggcggagcttctgcgngagttccaacctcatcacacatcagaggatccacanggggggagaagccctacangtgtngcaantgtggaaagtgntgcagtnagcgntccaagctcatnncacancaggggatccacacgggtgagaaagcctacaggtgt

SEQ ID NO: 411535 - DNA, 107 bp, Homo Sapiens
  misc_feature (24)..(24): n is a, c, g, or t
ggagagaaaccccataaatgtacngaatgtgggaagggtggcacccagaagtcaaacctcattgtgcatcagcgaactcatgcaggagagaaagcccatggatgtgg

SEQ ID NO: 411536 - DNA, 188 bp, Homo Sapiens
  misc_feature (25)..(25): n is a, c, g, or t
  misc_feature (38)..(38): n is a, c, g, or t
  misc_feature (94)..(94): n is a, c, g, or t
  misc_feature (103)..(103): n is a, c, g, or t
  misc_feature (109)..(109): n is a, c, g, or t
  misc_feature (129)..(129): n is a, c, g, or t
aagagtgcggaaaggctgttctcangaattcagacctncatcacccagagaggggcttcacacggagggaagacgtcctactgctccgtgtggngagagaacnctcgtnacaggactctcatcccccancacggagtccacatcggggagaagatgcatggctgatgaacccgctggatcgacacaac

SEQ ID NO: 411537 - DNA, 554 bp, Homo Sapiens
atttctttccttaatcatatctgatgctgggatgtgggtaaccccaaactgaaggcagctgctaaatctcaaatgctaaaaaaatactgcaattttgacatcagtgagtcagatcaatacatcctctggggctgattttgcttcacagttaggatgagccatctcttaagctgcaggctcaaatgggattaactgaactctatacctgggatgggccatggactgagctgtccatgcagaaggaccaggctgtccatgccttccctgcccttttactcaccactgcacagcagccccagtgggcctactgcacatgtctaggagaaatcactctaagaaaaccaacaggaacaggctttaggcaacaagagacgtctcactgcatctcctcccacgtcagaacttgagtactgggtctttgcagctcagagcattcctcccttccctttcctgcccgaaaggcctgccttttcctgagacatatggcactccatgctgcaagtttcaagcagatgcaggttcttatggggctttttgctcaaagagctttggtt

SEQ ID NO: 411538 - DNA, 386 bp, Homo Sapiens
  misc_feature (35)..(35): n is a, c, g, or t
  misc_feature (216)..(346): n is a, c, g, or t
ctccctactgtgattctcatcaagctggaagcgtngtgagaaagcacttcagtttcttccctcggatatgaacctgagctctctgatgaggtggtttagaagtggccctgggagaagcccacttcttggtcacaagatactgcattctcctggcagatgaaccagctgcttccagcatcctctgtgtgggtcctcacgcctagctgctctacgtgnnnnnnnnnnnnnnnnnnnnnnnnnnnnnnnnnnnnnnnnnnnnnnnnnnnnnnnnnnnnnnnnnnnnnnnnnnnnnnnnnnnnnnnnnnnnnnnnnnnnnnnnnnnnnnnnnnnnnnnnnnnnnnnnnnnggccagggcgtggcgggcttcagagcttcttagcaatttt

SEQ ID NO: 411539 - DNA, 426 bp, Homo Sapiens
  misc_feature (89)..(89): n is a, c, g, or t
  misc_feature (231)..(363): n is a, c, g, or t
gatgccttatttagtccatttggtgaggtaatgttttcttggatgtccttgatgcttgtagacatttgttgatacctgggcattaaagngttaggtatttattccagtcttcacagtataggcttgtttttagccatcctttttgagaggactttccaagaattcaaaagggattgagtgttgtgacctaagcctatggtcactgcagccatttcagcactagagagtgcnnnnnnnnnnnnnnnnnnnnnnnnnnnnnnnnnnnnnnnnnnnnnnnnnnnnnnnnnnnnnnnnnnnnnnnnnnnnnnnnnnnnnnnnnnnnnnnnnnnnnnnnnnnnnnnnnnnnnnnnnnnnnnnnnnnnnggaagtcagtctctgcaccaggctgcctggagtttgggggagggataaggcggtcactctaat

SEQ ID NO: 411540 - DNA, 268 bp, Homo Sapiens
  misc_feature (229)..(229): n is a, c, g, or t
gagtattgatttcaggcaggacccaggtcccaaaatgttagaaacagttatcctttttccctctgagttcgttattctctggggccccagtatccgtggcttaacaacccggctggatagaaggcacctctttccccacgttccaacaagatcccagagctgcttctcattggctcgtccctgagtcagtcacactggaccggaaggtgaaaggccctcattggccagncccgagtcatgtgcccacccctggggatccagctgtggg

SEQ ID NO: 411541 - DNA, 394 bp, Homo Sapiens
  misc_feature (377)..(377): n is a, c, g, or t
tttttttgatgaggagatatagcaaagggtcatttgcccctccttcagaaaacttttctccaaatctcctttaaacatactgccttatctttccctccataactccaccagtctctccacatccccctccaaatctctgtatacataggcaagagagggcgattcccagcacaagtctagtcctgggcgaaacttccatctctttcctcgcatacctcctgtctgggtatggggataagggagagtatgggattttgttctccattacatgctttttcaaaatttctgtaatatgtggcacttataaaatcagaacagacaaaatgatatcgggtaaaacatgcaactgagagcaatttggggaaaaatcctcaggncacaaaatgtattactg

SEQ ID NO: 411542 - DNA, 351 bp, Homo Sapiens
tgataaataaagaagttcaaaaaaatcttttaatagaagctataaaatagcagataagctaagtcattctcataaaacaccatttgtcatttgaatgcgtgcattgtggcctgttacttttaactagtctcactaatttatagttatatatgatgtagatctagattgtgatgtacactaagtgggttgatccygagatcaagctatgattgctgcttgcgtaaagtgttccytttgggaaataaataatctttcatatctgtaaactttggtataattggttatttatgcaatgtattgttgtggttgtcaactcaagattgtattctcatctggggacattatgaatct

SEQ ID NO: 411543 - DNA, 373 bp, Homo Sapiens
  misc_feature (242)..(242): n is a, c, g, or t
gtaaaatactaagacactaaatgcgtattttaaatttgcccattaagttttgggctgcgtaagaaattagtaaaaaatatttccaaataacatgcagaagttgtttttaaacttaaaatctcatattttagctacacccacagcgatgctatagagaggagctggatttcgttgtatctgaatggctcagattatgttccttccaaaaaagttattttatgtacgatcattttttatatgangcatatgaaaaatcacccagaatctaccacgtatttaccacatagacaaatgtccatctttagatctgtcattcaacaccatgttattctttttatgcaacagaatgcagtgttgtgagaagtacatcaag

SEQ ID NO: 411544 - DNA, 401 bp, Homo Sapiens
  misc_feature (343)..(343): n is a, c, g, or t
ctctctgccatgctaaccaacgtagaagagaataagataaagcaatgaaaagcagagtggcactctgatatataagattctctaagaaatatagagtgaattttgcccaaaggccctcactgaactaattcctgaaccaaaagagtatttcttaatccaaaactttacagtattagacctacgaattctgatgatgcctgatcagatgctagttgttctcgacaatccatgcagttttccagtatgaaggaaagtaacaaatataccatggttattcttatttctttctgaaaaatatctaggatattttatagtgtcatgtggtaaaatattcatttgacantcacaatgaagtataatcagaagtattagcaattttactttgtttatcctgttaatcc

SEQ ID NO: 411545 - DNA, 355 bp, Homo Sapiens
  misc_feature (57)..(208): n is a, c, g, or t
  misc_feature (258)..(258): n is a, c, g, or t
  misc_feature (275)..(275): n is a, c, g, or t
gattggtatacgggcaacaatggattgatagccttaatatagaaatagttccagcannnnnnnnnnnnnnnnnnnnnnnnnnnnnnnnnnnnnnnnnnnnnnnnnnnnnnnnnnnnnnnnnnnnnnnnnnnnnnnnnnnnnnnnnnnnnnnnnnnnnnnnnnnnnnnnnnnnnnnnnnnnnnnnnnnnnnnnnnnnnnnnnnnnnnnntgaaatagctccatcaagtcaataattaaaagttcaacagcccaacagancaaaaattgtaaatgancacaaattagaaaatgtacaaattaaatattaatgacccataaccctataagggaaagtttaacctctctagtatttttt

SEQ ID NO: 411546 - DNA, 372 bp, Homo Sapiens
  misc_feature (349)..(349): n is a, c, g, or t
tcttgctttttaattgtatttcttaacactagaattttctatttcaagtttttgtacgtggccttgcgtctccttagtacattttatagtcgctgtaagttgattccatttttcttgaaattgaattctcatctgacctaatttcttccttgaatcctacatctcactttctcaatggacgcagtgacgcaatgaagcatccagcaaagcttttgttgttgattgtttaggacgtcaccctgtttttgttgaagttgtctcacaactacttctctttctgctttctctctttcatattgacattgtttttcttttcaaatggattaactttattgatcatcctcttgtncttctagcaaaagacgggtgctt

SEQ ID NO: 411547 - DNA, 323 bp, Homo Sapiens
  misc_feature (163)..(163): n is a, c, g, or t
  misc_feature (198)..(198): n is a, c, g, or t
  misc_feature (233)..(233): n is a, c, g, or t
  misc_feature (277)..(277): n is a, c, g, or t
tagatatgatggctggagctgcaatagctaacttgcaactatgaggaactataggactttggtcttaacattcctgagctcctgaatcaatactttaactaccttctatgagacttcttgtcacatgagaaaaattaagccccaaattaaacccctgcctttnactgtaactctcaattgagcataattcctaaatgntttaatcaattctactctactctggcatgattttnaaggcattaaccataatttccttccaatctaaaaagggaactantacttactggagtatctagtatacatcagatactgtgtatataggc

SEQ ID NO: 411548 - DNA, 280 bp, Homo Sapiens
  misc_feature (135)..(135): n is a, c, g, or t
  misc_feature (160)..(160): n is a, c, g, or t
  misc_feature (163)..(163): n is a, c, g, or t
  misc_feature (218)..(218): n is a, c, g, or t
ttaatagaatagatcaaagcagaatgcagtgtgttcatgtcataggttgacttctccaggaaaccgaccccaagtggaaggtttacatgcaggtggtttattagagagtgatgttgggaagaacacctgtaaggnaagaagggagcctgggaagagcagnggnagaaggtgaactctgattcacttgcaacagagtcctaggctgagtgcatgggatnctgtagagttggggatggaccttcagagatattccaaatagagaaagaattcctgtttactc

SEQ ID NO: 411549 - DNA, 428 bp, Homo Sapiens
  misc_feature (288)..(288): n is a, c, g, or t
  misc_feature (307)..(307): n is a, c, g, or t
  misc_feature (335)..(335): n is a, c, g, or t
  misc_feature (360)..(360): n is a, c, g, or t
  misc_feature (396)..(396): n is a, c, g, or t
taactgtgcaaataatccatgaatatattgtttttatacagcattacagataaggcttgcagctctatagatcaccctcatccactccttcactccattgctacacttaaaagcctcacatgctctcctgtcctctccaaaggcagctgctagcatcagcgcccacagtagccttcttttgtttcctgtttataaaccatacattttctatggctacacatacgtgtattgtttgatgctttctaataaaattgtatcatagtggtacacatctttcacactttcctnattacagtcaacatttggnggaatacagaatgcagcagatcaaggancttttctcagtcttttctaacatgnccccaaatacagcctcactatggggtccatttaggnggctcattggttttcactctcacaacggtggc

SEQ ID NO: 411550 - DNA, 419 bp, Homo Sapiens
  misc_feature (125)..(125): n is a, c, g, or t
  misc_feature (202)..(202): n is a, c, g, or t
  misc_feature (222)..(258): n is a, c, g, or t
  misc_feature (270)..(270): n is a, c, g, or t
gagcccctgccctccagaagctcacatcctcctactcatggcagacaaataaacgtgaattacactgcagggaggtaagtgtggcagcagatgtagtatgcagtgcagaggtggccatggttgcnagggcaaggagggcttcctagcatgggcgttatttgaccagaggctggcggtggcttttgctagcagtgtgattgtnatctgagccagggacagatnnnnnnnnnnnnnnnnnnnnnnnnnnnnnnnnnnnnnttaaagactgantaaagcaaaatatgtgcaaacagtctgtgaatggggaagtaacagatgttgctttctattatgttctctcctagccatgaatatcaattatttcagaaatgaaaagggatcctgcacccaatttcaaatcaagcaagttcacctagagg

SEQ ID NO: 411551 - DNA, 404 bp, Homo Sapiens
  misc_feature (56)..(56): n is a, c, g, or t
tttgtcttatgtagaattgcctatagtaagaaaacccagtagagaaagtggttttnagaccattcggcagctgctttggacacctggagccatttcttttacagatgaagatgcattgtgtcattgtctcaggatcctcgtcctgttgcttctctggccacaaattgttctttaccaaagatgattttatttcactgtctttgaaaatcattctttataggtagaatatgaagattctctgaaatgattccaaaatgccaaactcaaacactattgtccgatttctttacttgcaacaagagagtagaagggacagtatttgttttgtgatgttggggcgttcatcagggagagaatttgagataagtaggaatagcaaataggaatagtgaaataacctagat

SEQ ID NO: 411552 - DNA, 233 bp, Homo Sapiens
  misc_feature (196)..(196): n is a, c, g, or t
aagtgctatattcattgtattatagagaaggttggggagcacagaagaggatcaacccagctttagaaggattagagaaagcttccagaggggtggacatttgagctagcaagaaagcacaagggaaaaggcatttagacagaggagacaatttgtcctgacccagaagcattggggtatgctatgcatggatagncaaagaatttttgcaaaaggggggccagcaaggcatt

SEQ ID NO: 411553 - DNA, 299 bp, Homo Sapiens
  misc_feature (169)..(169): n is a, c, g, or t
ggggaaagctaattggcaataatccttgcgggaaggtcagactcctctcttacagatctagggaaggcctggtaaaatgatggctctttggaaaatgccaagctccttcagattccataccctctcgggccctcaagcataggcaacgaacttgttcctggcttcacgntttctcattgaatcaaagctctcatgcatggcctggatttgtaaacacatgctggctgccagcagtggcaagttagcctcctgacccacttctctcctgctttcactctggtgtatgaagggggatgagg

SEQ ID NO: 411554 - DNA, 295 bp, Homo Sapiens
taagacttcctgttagtaaaagctacctcatgaaaagtattgatgttatttgccaacatttagactagcttttgttaccgtttcagttattcaatttagtcagcacatgtttgagtgtcttactgcaggtgaataatccatgatttctgccccagagtagttcataagactggtaggatacatagatttgtaaataaataattataattctgggcagtaagtgctgctatagaagtctctataaagcaatgtgcaaacacaagaaaaggagccgttaattccttatagggaaagg

SEQ ID NO: 411555 - DNA, 192 bp, Homo Sapiens
catttctgttacattgagacttcagtcaccaacatctggtggcagagatacaggtgtatgaaacatttctatttacccaaatatgccagttcccaaataggatgactgcatttagtgttaaactggcttttctcattagatactctaattgaggaatatttagcttcttgaatagaaaccatccaaatgatg

SEQ ID NO: 411556 - DNA, 326 bp, Homo Sapiens
  misc_feature (92)..(92): n is a, c, g, or t
  misc_feature (287)..(287): n is a, c, g, or t
gaaaaacaaggaaaataggcaacaacctgcaatggacacttttctctacagaaccttttcaaccctgaattgaattgtttcctattcatttnctaataaaaagttactttgcaagatataaggaaatactgtcccaaagattttcactagtcattcaatccattaataggatttgaaaaggcatcattacacagggttgaaaatactctggaatgagactgctttacagtcagaatgcctgagttttgaggcactgttacttctaaacatctctaagtttctatttnctcatctaaaggagtaatattactttccttaaaaggttg

SEQ ID NO: 411557 - DNA, 181 bp, Homo Sapiens
  misc_feature (38)..(38): n is a, c, g, or t
  misc_feature (51)..(51): n is a, c, g, or t
  misc_feature (56)..(56): n is a, c, g, or t
catccgcatagtatttacatcatgggtataggcaagtnctacaaatcaggnctttnccttggggatggatgtttggagctagtttaccagcacaccagtgggtaaaagtgaacaaatacttttttgatcccacagaatcttaaaaaatactttacttcgaaaatgtctctactaagtaatc

SEQ ID NO: 411558 - DNA, 139 bp, Homo Sapiens
tgagggtaaacaaaataagtatgtgtgggtcacacttcagcaggggttgctggtttgccagaggaaagtgcaattattttatctatgggtgtttattgtctccactctaaactgtcagttacagatggcaagactgttt

SEQ ID NO: 411559 - DNA, 424 bp, Homo Sapiens
  misc_feature (412)..(412): n is a, c, g, or t
gggaagtgagctcctgaaccaactctgaaggagacacccacttgctaagccagtctcactctaggacacctgcctagcgaccagcaaacctggaatgaaagggcaagttcctcagtgccccctctgcatcaaagggagtggctctgccctctctagtctctgactacctgcttagtgatttttgcttctgtgctcccagacccaagaaaaccacgtctcttttcttccttcatcgactcatccccttcttaccctatattgtctcctccacttcctgcctctgctggccaggcttaaatctgggccaccagccttcctgggacatacctatttccgcaactgaaccttcccaacccctaggaaaacaaaggtattttacaaggcctctggaccttgacccaaagaggcatgnaccataattact

SEQ ID NO: 411560 - DNA, 165 bp, Homo Sapiens
  misc_feature (140)..(140): n is a, c, g, or t
ctaatttttaaagactttttccggcatcttgaaaaaaaccaccattatttgacataggtaaaactgaaaaaacaaactattcataattacaatttgtgacacattatgtagtagctaggttcatcacataaattacatgntaccccagttcaagttaaatttcag

SEQ ID NO: 411561 - DNA, 116 bp, Homo Sapiens
  misc_feature (50)..(50): n is a, c, g, or t
  misc_feature (67)..(67): n is a, c, g, or t
cccggcccggccaaagactgcctattctaaacgttgctgaggacgtggancaatcacagctctcctntctttccagtgggagtttaacatggcacaaccgcctgaaaaccgtttgg

SEQ ID NO: 411562 - DNA, 316 bp, Homo Sapiens
  misc_feature (188)..(188): n is a, c, g, or t
  misc_feature (242)..(242): n is a, c, g, or t
ttctgtgcaggaggaccacatggcagtccagcagactgcacatttttaaaaactaggtcttcccaggtagtttgaggagcaccagggcacactcagggaagggacatgtcagtgtctgagagctcacgggaggaaggtgtagtgacaacatggaccatggtggagtgactttagacggctcttgggtnaggagaatcatcatgtaacaaagcattaaatcatttggawgaaattcagaaaantcgtagatgtacattctagcccacttaccaggcctactaaacgtcaatcagatatawtttcaatttgaattcgg

SEQ ID NO: 411563 - DNA, 329 bp, Homo Sapiens
  misc_feature (276)..(276): n is a, c, g, or t
  misc_feature (309)..(310): n is a, c, g, or t
gaaaaaatgggagggcagccatgtattaattgtacatccaaggaaactgtgccccaggggtcttgtgtgtatttctgagaagaggggtgagaaaaggcactgtgtcaacatttgcttctgcctgaacgtgcacctcccagtgctcctccatcaattaggagaactgtcttgaagaatgctgcctcagcttctgaagagaagaccccaggacatgcattaatgagaggaggggagtcacagctgcagaagaataaagctctctgagggagcctgggngcccccagtggaggcctggagcttgttgaccanngcagcaggagacccctgct

SEQ ID NO: 411564 - DNA, 402 bp, Homo Sapiens
gtgctcagtaaatacaaattggatggactagagagatagccccgaggacactgccaaataaataacaaattgtgcaagcagcaggccgctgtaattagaccaaggaggacagtcagttattaatatcagacacgtggcagggttaacagccactgagggtgggtacaatgaagagagtcactttctgcaccctcagggacttcccttgtgatggccttctaaagagggctgaacagcaccaagtgccctcgctgcctctggttcctgctgccctccgcgtgccttgggtgccccacaactagggccctgggtccctcccatgtccccctccctcctacaacccctcagccccttatctggccagccattatgatgcctatcagtatgaggccagatgagagt

SEQ ID NO: 411565 - DNA, 344 bp, Homo Sapiens
tcaagctggaaagggctactacctcatgctggaaagggctactacctcaagctggaaagggctactacctcaagctggaaagggctactacctcaagctggaaagggctactacctcaagctggaaagagctactacctcaagctggaaagggctactacctcatgctggaaagggctactacctcaagctggaaagagctactacctcaagctggaaagggctactacctcaagctggaaagggctactacctcaagctggaaagagctactacctccaagctggaaagggctactacctcatgctgggaaagggctactacctcaagctggacagggctact

SEQ ID NO: 411566 - DNA, 173 bp, Homo Sapiens
gaagacaatactgatgccagctctttgtaattgtgaaatctgtacccaaacctctggattagaatctccagttgtctactgtaaatactggaattacagcaaaggatatggggactgggctgcttttctgtattgtacaagcactattctagatattaaagaaatttaaccgc

SEQ ID NO: 411567 - DNA, 109 bp, Homo Sapiens
gcctttaacatcctctgccaatractggcctcaaatcaccagtggaaccttttcaaaaaatacaccattggctctatgtagttctactgatctraaatatccacgtgtg

SEQ ID NO: 411568 - DNA, 367 bp, Homo Sapiens
ttgtgaaatgggcctgggtagataaggaaaagaacctccaagaggttaagtgatttgcggatttgcctaaattatacagaagagtcagcaccagtgcccaggccttctgattcttagtgcagtaaacactaagcaccatcattccatttcaccacactcctgtcttgctgttgtcctcagctaagaaagcctacccctgagttaccctcttccatcttagagccttcctgctcgctgtctgcccccctgcgatggggacttctttggcccttctcacccagcccagcctctgcccgttttccttctcctttccactgcggctgagctcttttctccttccgagaagcctttccttcatctttcctgg

SEQ ID NO: 411569 - DNA, 241 bp, Homo Sapiens
  misc_feature (190)..(190): n is a, c, g, or t
  misc_feature (217)..(217): n is a, c, g, or t
tggtstgtggctcagctgcagcggcasgtaagtgggtstccaggggagtggacaagcaattctcctgtcatttgcaactttcttcaggaactcagataaagaacacttggataacgatgatccctgtagagggatttcatctgtaccatcacacatggaagaggagtttctaggtcaggaaaggcagctnctaagctaaaggtttcttggtcccttngtcctggcatgccttaaggagggg

SEQ ID NO: 411570 - DNA, 289 bp, Homo Sapiens
tatttttattaaaggaccaccctggctgtsgtgagatgaatggattcaaacagggcaagagtggatacagsgagataagttaggaagctggtatagaaatctggatgagatatggtggcttggatgatactagcagtgagtatgggaagtaggtggattactttacacttttttagatcagtckattcttgatgtcttgaagacaaatwtaatctcatatataactctaaacaacatatttatatttcatgtawaataaggataatgctgaccaaatattagcaccttt

SEQ ID NO: 411571 - DNA, 189 bp, Homo Sapiens
cagctttggaaagactttgacctctgaacaaaaagccagaaggctgcttaaagaaatagtaagggtttcacttgccctggatagtcacaaatctaggagtactggttcactgccttgggttaccaggtatcagctctttcacaatctctcctcttcccatgcttccccttaaagtccagttgacaaatg

SEQ ID NO: 411572 - DNA, 444 bp, Homo Sapiens
atcagtgtcagtgtctaacagaagggtctgttaaggatgcttctgatttaaccaaaagattaagcttcagaaacaatctaacatactcaaaggagcaccaaattatcaaccggctacaaggatgcaaaggacctaaacaacagatgtcaaagggcttgtaaaaactggagccagcaaccattccacttgaaggaatccatctcagggaaatgctggaatccacacacaaaagcaggtgtgcaaataatcactgcagcacgccttctaatagtgaacaacagaggcaatccaaatatccttcaacagggaactgagtaaataccaactatgggcatatccacataaggctctctgcagtcattaaaaaggattgcacttacatgcatgtctgccatggaggtctttcaggccaatggttccactcggaagggcaaccaccaatta

SEQ ID NO: 411573 - DNA, 407 bp, Homo Sapiens
gttataattatcttgttttattatttattgtttatctcttactgtgtataatgtagaaattaaactttaccataggtatatacatattggaaaaagcatcttatatacagggtttgttactatctgtggtttcaggcatccactgggggtcttggaacatatcccttgcagataagagggaactgctgtatccatagaataaaaacaccccatcttgaagataggaggmttctgtaaattgggatggggtcagggaatctgaattttaaaagtttcccatgtgatttgatgcccagccaagggctggggaccactgtcttgaaatataatgctgaggaagatactgtctttggattttcctggtaattccgagtgcaaattctcaggctggaaccttatgggccttg

SEQ ID NO: 411574 - DNA, 453 bp, Homo Sapiens
  misc_feature (348)..(348): n is a, c, g, or t
  misc_feature (353)..(353): n is a, c, g, or t
  misc_feature (367)..(367): n is a, c, g, or t
  misc_feature (403)..(403): n is a, c, g, or t
gaaaactttgccatgggtcagttttattggaagttcattttcctgaatgtttggaagaaagtctagtgactcaggatagcatttctaatttcacagagttatttttccgttatgaaacacagattgcctttgaggtctcctgtttctactactgcccctcacttttatgtgggcctcctctttcctttgtttctggagaaccttttcctgttcaattctgttttaattttcagcagttttttttctgtgtgagtgaggctgtttcctagcagggaggtctggttggtcattttcaagttcatcagggcttcatcagggcttgtccacttcaacccttacgctataggnccctntgcaccatctgcantcttcaaaatgtgcccactggttcgttcccatgganggcttgttggtaatttgggcttttagggggggccatggaaggagcaaatc

SEQ ID NO: 411575 - DNA, 222 bp, Homo Sapiens
gggtccaggggagaatcaatatatctagtatagtttatatttgtaccttctctccttaagagttacagtgagtgactctactcctcaaatggagcacctctctccaggagagtaagaagatcacataaatagaaagtgagctttggactctaacagacataggttcatattcaactctgctacttaatatccatattggtttgagttatttaaccttgacaa

SEQ ID NO: 411576 - DNA, 349 bp, Homo Sapiens
  misc_feature (166)..(166): n is a, c, g, or t
  misc_feature (308)..(308): n is a, c, g, or t
caatacatgtatacagtgtacactgatcaaataagagtaattagcatatttatcacctcatttcttttgtggtgagaacatttaaaatcctttctttttgctattttgaaatatacagtacattgctattaagtatagtcatctggctgtgcaataaaacaccagnacttacccctcctgtctgtgactttgtaccctgttcaccacccctccaatcctctagtaactaccattctactctctacttctatgagcctgactttttaaaattccacatgtaagtgagattacatggtattattctctcngtggctggcttatttcactttaacataatgtcctctaaatt

SEQ ID NO: 411577 - DNA, 297 bp, Homo Sapiens
  misc_feature (239)..(239): n is a, c, g, or t
atgaggcgaggcctgcgaagtggctggcatgcagcaggtgctaatgagtgttgcaaaggtgatgtcacgcaggcagcttcccgtggccagagaaacattgcagagaagggataagtagggcttagtgactttgacgggtcaatggaagaatgacccaaagaaggcttcaaggccaggcctgcagttctccaccacaaaggccctcactgatagcacccactcccccacactcagctttngggcctaggtctgggtcacccagctagaagccacaggaccctgaggcgtccgaggggt

SEQ ID NO: 411578 - DNA, 396 bp, Homo Sapiens
  misc_feature (252)..(252): n is a, c, g, or t
  misc_feature (257)..(257): n is a, c, g, or t
gtttggtgaatttggtctgtgataaaattggagttcaagaaacaaacaggaaactacaagtgccccttcgcccccaggtcacccgagtggcagggcagtgaccgctgctctcaggctgcccagtgtggacctgcctgtcggaatgctcctcctccacgtcccctcgctcctgtgtcccagccacatgcaccttccctctacctctgggatccctgcaccaggtctgcccctgtcttctcagggctgctcctnttggnccacaggacctcagctggaatgttgcctcctccaagaggccttcctgactattcagctcacagtggccacccagccacaatctgccatgtgctttgggggattgtctgttaactggcaacatactggcagcccataact

SEQ ID NO: 411579 - DNA, 206 bp, Homo Sapiens
  misc_feature (100)..(100): n is a, c, g, or t
ttaatacgacagggctggcgcccgagtaattcaagcccttcggaagtgtcaccggctgccaggcctcggatgcaatcctggaggcgggagattcggcctnaagactggctcgagccgcccaggggctccatgggagactaacgcggaagtyccagccgtcccagtgccgtgacgtccccccttggtggggcctgcacccgactact

SEQ ID NO: 411580 - DNA, 983 bp, Homo Sapiens
ctcgattattcttattccaatacttattgctttgttgagttttcatatgtatttactattaacagtaatcataatccaacaattacttaatcctctcagcaatatcagaaaggcacagcaggcatttttgtccctatttacaggtgggaacactgaggttctgagaagtgacatgacatgctcaaggccaggtggccagtaaatagcacgaaaccaggactagggtatttgggtctttatttccatgctttctctagaagtttaacaccaaagggccaaccttctggtgggggtgcagggttcatgaacagtcttctcatgtatcctcctctacatttttatagtggggaaacctgatttgaatgcacattgaagaggaggaaatacaaaaataaaagggcaatctactaactaagcggatatatgacatgtggcagagggaggtgttagcactgccagckgckataacaaaataccatagacagagtgcttgttctggaggctgggaaatccaagatcaaggtgccagcagggtaggattctgttgagggcccttgcctgggttgcagattgccagckcctcactgtgtcctcactttcactgtgggacggagtgaacaagctcccttgggcctcttttctaagggcactaattccatttgtgagggctgtgcactcatgacctaatcacccccacaaggccccacctcctaacactatcacatagggggttaagatttcaacatgaatttggggaggacacattcagtccataacactcctgaaaactcaagccaaatactgctttactctttttatctcaattcacagggttwagttagcacttaaagcactctaggaatatcctctaggtagataacaggtgcagttttagagcagaggggaggmgggaaggagaaaggaggatggaccyctgtggaggagcttggcaasmraggagcttaagcggtatgagaaaatat

SEQ ID NO: 411581 - DNA, 570 bp, Homo Sapiens
  misc_feature (147)..(147): n is a, c, g, or t
aggaagaatgaagatcagaagaatgaagagccagccatcctcctttcttgggttccctaggtgagctcagaaaggacccctagaagcacagaatggagaggttgaaccagacctgtggttgctgagctgggctctatgaaggcagtngtgtgaatcttgttttcaagattttaaaaagtctaacaaagtcaatcctcctcaccttcctgggacagcttacacaagctcaccaagatggcagcctcattgatttttcccaactgtccagggactctggttaactattaatgacatcacacaccccaacccaattccagcttatgagcccagtactgccagtgtctacatggcattaaatgagcatgtgacggccgtcggcttccctgtgagtgtgggttgtggtagaaaaaaatgtggcagggaacacaatgcaaattgtcccctaaagatccaaatgagctttgatggagagaagttttggaaccctaacttaacagatgcttggagttcctcccagaaccaaacacctcaggtgggcactttctttcccagatcactttcttcgtcatc

SEQ ID NO: 411582 - DNA, 862 bp, Homo Sapiens
  misc_feature (522)..(640): n is a, c, g, or t
atttctggctttattaggtgctttggcgccactggtttctgtctccaatgacataaagtgctgaaattaacagtggtatactttggaatgacattttgagtctgctgagatcaaaggtaaatgttacagcaggaaagagactgtactacagacagggaacagttgtggcaagtgatgactattaagaagaaacatgaataaagtcttttaactaaaaaacaactagaacatttcagacaagacacatcctaagaacatgtttgaaagactctcaggatctctagctaagacaaatggtttcagactttgccaggacaaagctacattatagacactgtgacaggtagcttgtttttaatgttcaaatttcaattaaagattacaatgcatacaaaattttagggcaacatagctctatcagatattataaaattttcagaaagcaaccattaaaaaattaattttaaaaagttaacataaattgaataatactccatgaatgaaatagaaacacagacaacnnnnnnnnnnnnnnnnnnnnnnnnnnnnnnnnnnnnnnnnnnnnnnnnnnnnnnnnnnnnnnnnnnnnnnnnnnnnnnnnnnnnnnnnnnnnnnnnnnnnnnnnnnnnnnnnnnnnnnntgaaaaaggctaacaaagaaactagaatacacacaaagatatttaccacaggaacctttttaagcacatttttaaaagtcacagacaagagaatattgggagttgcaagaaaaagtgatatgtatttattagcatagccttatgaggtaatgagtgaattttttaagaaaattggccagccacgaaggggaactaaccgggggaaccttgtccacagccttg

SEQ ID NO: 411583 - DNA, 976 bp, Homo Sapiens
  misc_feature (90)..(147): n is a, c, g, or t
atgttttatactcctaaatatctgtgttttatctcattaatattatgtatttatatctttgttttttgtcttgattaacattattagctnnnnnnnnnnnnnnnnnnnnnnnnnnnnnnnnnnnnnnnnnnnnnnnnnnnnnnnnnnaattaaaaaattaaagttatgaatgcttataaaatgaatccaaaagcctaataataattttyttgaaaccagacccttgtctcatcctttcctttagtcaattcccactccctagaggaatccacttaatttttaaattgttgaagtcctctgatgttttaacttcatattattaatacaaagcaaatcgtttatactattacttgatttttcagtttgagaaagtatgaattgaaatggtgagggatgaggtttagtgaacacaaaacaagcattgcataaagtcaaggtgatatactcagtcagaatagatttctgccacaatacatgamatttgactcctaacattattcctttaggaataacattattccactcctattatgtggatatagaagtcctctattaatgtacaattgggtcatctgataatattagggagattgagaaatactttgtttgttgaattccttgatttaggttagattatcaggcaggcactgagccatgtggaatcctaaagaagtaggggcacaggatatgtaaatmttgatgtgaacagggagaaaataggttcagtgtgtgatcctgtcctgygaggggcggtgggaaattgagcatgggaagcaaggctgtcttttttactttaaggctgatcaaagactgttctttcacctgaattaaatctaaggcacaaatcatgttgctcccttatttatcaaacaaaaacaatacacaaattggacctcttcttttttgtcatattttaaggctcacattgggtgctacaggaatcataaggtggtacagggactataatgaatgtaaa

SEQ ID NO: 411584 - DNA, 879 bp, Homo Sapiens
actacagtgatgaatttaattttcagaggcttggcatgacagtacatcctcataatgagtttgctgcagctttgtcacatgcacaggcattcatagaaagaccacccagctaagagggtagaatgattactctttttgcaagattctcttctttgtccaagttggcattgttagtgctaggaataccagcaccttgagacgagcagattccaaccattaggctataaacaccatagccagagatggaaggtttactgtgagtatgaacagcaaatagcttacaggtcatgagttgaaatggtgtaggtgaggctctagaaaaataccttgacaatttgccaaatgatcttactgtgccttcatgatgcaataaaaaagctaacattttagcagaaatcagtgatttgtgaagagagcagccactctggtttaactcagctgtgttaataatttttagagtgcaatttagactgcataggtaaatgcactaaagagtttatagccaaaatcacatttaacaatgagaaaacacacaggtaaattttcagtgaacaaaattatttttttaaagcacataatccctagtatagtcagatatatttatcacatagagcaactaggttgcaaatatagttcagtgacatttctagagaaactttttctactcccataggctcttcaaagcatggaacttttatacaacagaaatgttgacagaaattgctgtagtttagggttgaagtactgtatgatgggcagcaatcatgtattaacttaggaggggaaattgaaatataggaccgaatttggttttatcagttctcagagtactgctgccaacctagacactgattttcagaatttgaaatgtaattcctt

SEQ ID NO: 411585 - DNA, 1018 bp, Homo Sapiens
  misc_feature (34)..(34): n is a, c, g, or t
  misc_feature (38)..(38): n is a, c, g, or t
  misc_feature (44)..(45): n is a, c, g, or t
  misc_feature (50)..(50): n is a, c, g, or t
  misc_feature (58)..(59): n is a, c, g, or t
  misc_feature (65)..(65): n is a, c, g, or t
  misc_feature (68)..(68): n is a, c, g, or t
  misc_feature (72)..(72): n is a, c, g, or t
  misc_feature (78)..(78): n is a, c, g, or t
  misc_feature (80)..(80): n is a, c, g, or t
  misc_feature (82)..(82): n is a, c, g, or t
  misc_feature (93)..(93): n is a, c, g, or t
  misc_feature (96)..(96): n is a, c, g, or t
  misc_feature (99)..(99): n is a, c, g, or t
  misc_feature (101)..(102): n is a, c, g, or t
  misc_feature (107)..(107): n is a, c, g, or t
  misc_feature (142)..(142): n is a, c, g, or t
  misc_feature (145)..(145): n is a, c, g, or t
  misc_feature (147)..(147): n is a, c, g, or t
  misc_feature (164)..(164): n is a, c, g, or t
  misc_feature (236)..(236): n is a, c, g, or t
  misc_feature (238)..(238): n is a, c, g, or t
  misc_feature (245)..(245): n is a, c, g, or t
  misc_feature (263)..(263): n is a, c, g, or t
  misc_feature (269)..(269): n is a, c, g, or t
  misc_feature (284)..(284): n is a, c, g, or t
  misc_feature (290)..(290): n is a, c, g, or t
  misc_feature (298)..(298): n is a, c, g, or t
  misc_feature (309)..(309): n is a, c, g, or t
  misc_feature (350)..(350): n is a, c, g, or t
  misc_feature (386)..(386): n is a, c, g, or t
  misc_feature (407)..(420): n is a, c, g, or t
  misc_feature (426)..(426): n is a, c, g, or t
  misc_feature (428)..(430): n is a, c, g, or t
  misc_feature (438)..(438): n is a, c, g, or t
  misc_feature (588)..(588): n is a, c, g, or t
  misc_feature (614)..(614): n is a, c, g, or t
  misc_feature (753)..(753): n is a, c, g, or t
ccccacamwatagaaaaagtttgtaaaaaamagnaggntggtannggtcnggaatttnngggatntgntaanttttgnantntgtttttttgntgnttngnngttgngtttttktgggggtgggaatggaagaagagattgntgngntggttattgaaaatggntttggtatgtgaaaagatggttttgttggggaagaaggtgggggaggggtgttttgtttgatggtggggggngnaagaaanaagggggtgatggtgggnatgggnaagaaggatttgtangtgggngatgaggnttagagtaagngtggtattttgattttgaagtattttattgagtatggaatngtaaaaaaatgggaagaaatggagaagatttggganaaaaaattttaaaaggaggtnnnnnnnnnnnnnnaggagnannnagtgttgntgaatgaggttttttgaattttaaggttaaaagagagaagatgatttagattatgtttgagatttttaatattktgggkatgtatgtggggatttagggggtggtgtttttttatggttatgggtggataaatggtattgttatggagtntggagagggggtgagggagagggtgnggatgtaagagggataagggtcccacaagcdattdtgcgtatggaaatggatgggwgggammtgamcgaataaattatgaagattattactgagmgagggtaaagatttaabamaaagggggagcgggaaattgtgggngawathaaggagaagmtgtgmtaagttgmcmtggaatttgagtaggagatgggaacggbggattcttcttttttttggagaagagataagaggtgctcgatggsgaaggttattacaattgggaatgaggggtttkggtgttggrgggggtgtttaagckttytttyttgggtatkgaattttkgggattaacgagaaaaatttaatttattatgaagtttaagtgraattgraagaatktaggaaaaaggkgtgtggggggaaa

SEQ ID NO: 411586 - DNA, 600 bp, Homo Sapiens
cgccgcgccgccgtcgctcgtccaacgccagacscgcgcmtcctccgctcgccgacctccagccgaagagaaggggggctaacgtcaggaggcctactgtamcatggactcgctagcaaagcakasyscccgaaaatcgascggtggwaaacgcacccassaaacmactggmtaccaaagccgactacscaagcagctagccgccactctactcgagcaggggwgaagaaaccctcactccgcttacaggccyggtactstgcgcactccgtagaaattagaagttatcacgaastccaatgaactactcattcgtcaaamywaactctccaacaatctggtgacgataaaattagactacaaagactttaaaagcagtatatacgcttmmatgatacgtactaataggawgctttkcagtgaaggaagtgaggcctwtctggtaggmctttttygacacgacacyaamcwgtgtgctatccayaccaaacgtgtaaaaattatagccataaagattatattagctagacacgccgaatcacagtgagagatmcgtgcttwcasaatcccactatkgatrgsgmaacatttacattctcc

SEQ ID NO: 411587 - DNA, 899 bp, Homo Sapiens
cagaaaaacccactattattgcaatggcattttactctaagtaaaattgacaggaaccaagatgatggtgcctataattctcctcagtttattaaaacccatttatcacattttatcctagaggaaactgatcataccagtctgtgaattttcaactaatatttcctcactgcatctaatatgtaagaagcatttactgatattaaagtcataatgcattatatggagatgaatttgcattctaattactgttcttggtgaggaatggggaagagaatgattctgttctgcacactccagatgaagccaatgcatgcttaatgtgaggcctctaactagagaaaattcccttctcggttaagcacagttgatcacctaccaacacaggcacgacacggtcatttttccttgtgaaatgtgtgctgggggccttggtgttggagccctccccctaccctaagggtgatgcccgtgcttcagaaactcaccatgtccatccattccctggatgaccgctgtgtacccacacggcccaggtgccttcagaagcctgtcagacaattcctaagtatgaaagaaagtgcctgttcctgcttttcgctaaagtcagaagtcacatttttccaaaaaccatacttgaaaatttagcttttttattatacattttcgcttctgagaggttttttatttgctccataccatgtaaatgttcccagggcctcacaagtattgtccccatttggttcaatttctctaaatattgattcaatacctgtttgaagttttgtcccctaatcagctcccaccatgtttgccactcctttccttacattgttctattgccatagaccacaatcatgcttttctgtcttacaaatatatatctctcaacttttccc

SEQ ID NO: 411588 - DNA, 923 bp, Homo Sapiens
acatcatttttatgtttattagattttggtgaacgtgtcttttaaaaagagtgctactaaaaagcgttgttactgagttggtccaaactcttcacttctgtcaaccgggggaagccaggcgtgagggagtggtgggtactggaagcagctgttagaacgcacctctgacaagcatgtcctgcccaagtccttagagcaaaaattggtccaggacaggcaggccccaaacccggggctccagccagcaatgtcacttctaggagtctcctgtcccctgcccagataggacagcggcagctcagctgcttcagacaacacgactcaggtctggcacagggagagctggcagaggccaccccaccactttgacggcacagctctccaggctgcgtgtggtgatacagcaactcccagtgcctttcagagccatgtcagccaatcaaccaagtggcccctctggtgtgccaagcactggggttcaagaaacaaagacacacttgggtccctcaagtaacaggggttcactgtgaagagagctgagggaccatagacctgggcaacaggcagaagccagtatgggcaggaagcttcaggccttgaggcctggaaggcaggtggccctgcctaatatgctagtttgtccccagggggctggcgggggcttttttagcaaggggagtttttcatgctttgccatttaggttccccagttctcacccaagatgcttcttgttttcaccctctgtttttcttcccctgggtaacccctgttttttttgttaaaagaaagctttgccgggccacaagaacgttccatcgccttcccggttctgtggggtaccccaaagggggaccgggcgcctaaaagtgcttttgggggcggagcccctctaggtttttatgaaaacacacttttggcccgg

SEQ ID NO: 411589 - DNA, 642 bp, Homo Sapiens
  misc_feature (46)..(94): n is a, c, g, or t
  misc_feature (518)..(518): n is a, c, g, or t
  misc_feature (586)..(586): n is a, c, g, or t
  misc_feature (588)..(588): n is a, c, g, or t
  misc_feature (593)..(593): n is a, c, g, or t
ggaatttktttggagattagtaagaatataaatagagagtattgannnnnnnnnnnnnnnnnnnnnnnnnnnnnnnnnnnnnnnnnnnnnnnnnttgttagggaggattggggagaagaaggaaattgtttaataaattggaaaaatttgattaagttgagtttgaagaatgaatggaataaatagaataaaaggatttttttgttaatgttgtgaagggaaaaggagaaggtgaattataagtgagagagatggagggagaagagttaaagtgtggtagattttaggtgtggtgaggggataatagtttttgaggtttggratttagtgttattttatgattggratgtgggaggtggaaaaagggaaggaaggaatgaaaataaggagttggttggtaagagaggtttgggtgaaagagatggkttgaagaggtgggagagagtaggggatgggttgtggtggtaggtgtatgtttaaagaaagaagaaaargggggagatttggttgtagaaaanaatgctmaaaaaagaatggctagttyttagaaaaatttggggttggggggaaamtttggtttgaaagnanagagnagtttgckatgtttcttctgtctctaagattctgtattgggctgaaatt

SEQ ID NO: 411590 - DNA, 530 bp, Homo Sapiens
  misc_feature (371)..(382): n is a, c, g, or t
  misc_feature (455)..(455): n is a, c, g, or t
caaatttactgtggaaagtacagtgattgaatatgtctgcacctcaatcctatatagccttgtgttttagttaccatgtcagcatatgtcagcctgtgtctccacctcaatcctgtataagcttgtattttagttaccatattttctctgtactgttccctgttatgttctgtttactaatcctagccactagaatacctataggtttaatagctttaacactgaaattatcctggggcaggtaaaataaagttgctgctaaacaccagagttagtttattggttcagacatcacccattctggttcctattgctgctttcttattgtgactgcaaggtcgaaatcctgcacagctatttgtggttctggnnnnnnnnnnnnccttgaagcaaaaggatgcagcagtgttatccgaaggctttaaacagtgaaccaaatgtaagttaaatatggnggcaggagccattccataaaggttacaaacttgttttaggagtgaagtggggacttttttggcttggggccaaaa

SEQ ID NO: 411591 - DNA, 1040 bp, Homo Sapiens
  misc_feature (27)..(27): n is a, c, g, or t
  misc_feature (347)..(357): n is a, c, g, or t
  misc_feature (880)..(880): n is a, c, g, or t
tcacaagtccacagtacaataaaagcnaaattcaaccgccagatacagtgcaaagtaagttccatactaaaccacattgcaaggttacatctttttcagtggaaaattttggaaagtcacatcattgtggagagaatacagtataaaagcacttaaaaagttggccattttaaagtgctatatgacagatgtattaatgtgctgcattcacaaaggtggttatgtgaatataccaagaactagtgtcttttgaagactatttatgttggttttccctatgttttgatatgttttcctatgttatgattattcattaaataataatcttatatccaaactcactgaannnnnnnnnnnaactccacagccattgtgggacaataaaccttaaaggctgatatcataactatatgcttcagaaaagtgtttatgttagcaggggagagaagaaagaaaatatcaacaaatgaatccctatctgaagtccaaactgagaaatgcattatttaatatgatcacagtgctagtttcaactatttaaaaatacaagtccattatacttctaatgcaaaaagtacagaaatcataatcaagacacacaatttctaatgcatcaacactatttactttatgtcagaacaaatcattctaccttttttcatgaaaaataaatgcacttgaataattaagaattgctgtcactaaaaaacttctatkaawtkaagtcwttcawtagyyctcttattcctttttaaagtactgcagctcawtcaagttttaattgagactggcaagcwtaaaggcatagaytggcwtytctaccatgacttgcattttacwtaaatttgaaaaaacttcggkagacatttgcmaaaaaawnattgagggacaaactgtycactgcyttgwtagcaaagatactgwtgagwtgagagactwrgtgcccttatcgaawwagcmatgtwtatccaagctcagctcatcaaacgcgwttcaaardattcggaaggtaattcwttyttartggmacamtgcctcat

SEQ ID NO: 411592 - DNA, 429 bp, Homo Sapiens
aagctttaaagmggcaagaatatgcagaagagaccaaatgtggcctgcacagmataaaatatatactaaatatttttaaagctaaamgttgctgagmtmtcagttgtatggaaaaagataaggtmmmcaaaammtaaattttgttamamagatattaamatattcmtgmvmtagtmaggaatggagtattaagagggaawgatgtgtttmagtatatgtgtgttgttttagaaagtataaattatataattaaaattgtgatagtatagggagaaatgcttagtaaataaattgagtagtaaaaaaatatagtatggtggtgaaatagagttgagaattaaaawtatttctgaamtgatgctmtargcmatgtgggggtatgammttgggcmttttttmtattcwagggcgmgctggamgmamtgtggg

SEQ ID NO: 411593 - DNA, 1201 bp, Homo Sapiens
  misc_feature (25)..(25): n is a, c, g, or t
  misc_feature (102)..(110): n is a, c, g, or t
  misc_feature (143)..(143): n is a, c, g, or t
  misc_feature (161)..(234): n is a, c, g, or t
  misc_feature (312)..(312): n is a, c, g, or t
  misc_feature (317)..(318): n is a, c, g, or t
  misc_feature (324)..(324): n is a, c, g, or t
  misc_feature (326)..(326): n is a, c, g, or t
  misc_feature (345)..(345): n is a, c, g, or t
  misc_feature (348)..(349): n is a, c, g, or t
  misc_feature (355)..(355): n is a, c, g, or t
  misc_feature (385)..(385): n is a, c, g, or t
  misc_feature (445)..(446): n is a, c, g, or t
  misc_feature (451)..(451): n is a, c, g, or t
  misc_feature (454)..(454): n is a, c, g, or t
  misc_feature (518)..(518): n is a, c, g, or t
  misc_feature (520)..(520): n is a, c, g, or t
  misc_feature (526)..(526): n is a, c, g, or t
  misc_feature (528)..(530): n is a, c, g, or t
  misc_feature (535)..(538): n is a, c, g, or t
  misc_feature (540)..(540): n is a, c, g, or t
  misc_feature (555)..(558): n is a, c, g, or t
  misc_feature (802)..(802): n is a, c, g, or t
  misc_feature (1171)..(1171): n is a, c, g, or t
aaaaattttcatgtgttttacattntggcattaaacttccatgaaaaatgctgatathaamvabrkgrgcggtagaatgacctcacattgttctgatgcagnnnnnnnnncagaacacatattttcacatgaacaccacggantaaggaaaagcagcaacnnnnnnnnnnnnnnnnnnnnnnnnnnnnnnnnnnnnnnnnnnnnnnnnnnnnnnnnnnnnnnnnnnnnnnnnnnmccmcccmacagggggggsaaaacatcaaggttcttrctactttaaaacatataascmaataaattatctaattwttnmmccnnaacacnancccccmcaaaamamacccnaanntagtanaamvcccgagvgsggcggggcsaaaggccnatctcacaaaaaagcccggacacatttatacgtyaagtttgattaaagacatytgcwcannttttncancastawwcttcctttttctwtaaaycccgaggggactcaktatagggtgtgagagtgtgtggantnaaaacntnnncwcannnntnactattcttattatnnnntgctgctgatkgaggkgaggttgckttgmagggawgtggtkggtagckacwgtgtkgtaaaaggaaagtgggctwhtaktkggktaagaagggggtyaggtgtaggtgtgggcgagtgggtagaagtgcggcgggckgwttgtgkgggaaagggkggggagraagaaggggaaaagggggawggccracatggcgggwatcaaggtgkttaggggtgttytttccccaggagaaatkgtwgcgnkakaksrsgaataagtwctgtttgttaacaaakkbaaaadawtygggtgccyatkggktttactgttkaggaaatgtgtgtscgcgtaktgtkgwcggcgccttgwtkgggcgaatkagsggtggtccgtatagtkawwdtgyggggtscyaywaggcaggcactakgktttwgtktsckcgcgyycastwgtgtdcggtcgtctgwkggggtaaggggagggaatgaccgraaagtgggawgggsrggratcyacaatwcaattacataagkkakgggtcrcvctcctwgtwaggtttwccaccgaaggagaagtkttkgtwtgracccagtrkttggagggcgcrgccacaaaytyttwytattggnaggggcccyccccasgtagtaytctcksga

SEQ ID NO: 411594 - DNA, 480 bp, Homo Sapiens
  misc_feature (166)..(166): n is a, c, g, or t
aatttatwrarggacgtgactgcctttgttgccaattccccggggccattcgcacaaaaaaataccgagacggcaaccgtgacgcgtggcatatttatggctgttgtcgtacgcacgggtgagtaactattaacgatgtttaaacgaaccgctaccaatatgatgntacggcgggctgaattaattctattggctatttgaattgcacttatagctggtgtacatgggataacaatagcgggtgctggtattcaacgtacgggtattacagccgctatgactaaamaatatgcgcaggcgamaacggtgacgggtggcatatttatggctgttagtcgtaaagaamgggtgagwaamtatwaaagatgtttaaaggacccgctaaaaawatgawggwaaggagggatgaawtaattgtattggatatttgaatgrgacttawaaatggtgtaaataggawaaaaatararggtgatggaa

SEQ ID NO: 411595 - DNA, 621 bp, Homo Sapiens
cccgggatgtgcagatatactagaaaatacagctgtctttgttccagtgaatatgtataaggggtgacatgccttggtggaaagcagctcagattgtgtggactcctcaatccctgctctaccaagagctctccagttccaaaactgtacactcagtggctatgttctgtgtgcctgctcccaatacagccattatgttgttcatccagatttgagaatttaagcttttcactcctctttgggtagtattatttaagtaagaacttctaggaaaatagtatgagtttggttatttttccctcggcagcaggaattttctgaatatttagcacattcagattgctccaagaacagcattgagcaatgctgtacatgtgctttctcctaaggctgtctcccctgtctcctgggttctggaaagactcattgtccttcagggaagggagcatttttcctcactgccattgctgagccttttctcctgttgtatactatttagcccagcatgaagccatcgccgactgtaaggagtgatggatagaagtgtttacttggtttgtgaggccttgtctctaaagggtaacagtctgacaaggaaaacatttcaaagagccctgacca

SEQ ID NO: 411596 - DNA, 148 bp, Homo Sapiens
  misc_feature (52)..(53): n is a, c, g, or t
  misc_feature (55)..(56): n is a, c, g, or t
  misc_feature (60)..(60): n is a, c, g, or t
  misc_feature (63)..(63): n is a, c, g, or t
  misc_feature (65)..(65): n is a, c, g, or t
  misc_feature (79)..(79): n is a, c, g, or t
  misc_feature (81)..(81): n is a, c, g, or t
  misc_feature (90)..(91): n is a, c, g, or t
  misc_feature (93)..(93): n is a, c, g, or t
  misc_feature (97)..(100): n is a, c, g, or t
  misc_feature (102)..(102): n is a, c, g, or t
  misc_feature (113)..(113): n is a, c, g, or t
ttcagtggmtgcagaatamamattmttmtmttmagmamatgggtttttctcnncnncggnccntntgttcggccctccngncgtcttttnnmnctmnnnnanmtgacmhgmcntmctgaaaaatttatgaaaaaawtgraatgaatta

SEQ ID NO: 411597 - DNA, 900 bp, Homo Sapiens
  misc_feature (167)..(527): n is a, c, g, or t
tgttttatttttacctttcctggaaatacatatatttatgatcaagacagagggaactcatcagtgtgcgacaaaaattttttaatttaaggtctgttgccctgaatataatgactgtgaccattgaatttgtattcaaaattaagttttactctagttaacctgcnnnnnnnnnnnnnnnnnnnnnnnnnnnnnnnnnnnnnnnnnnnnnnnnnnnnnnnnnnnnnnnnnnnnnnnnnnnnnnnnnnnnnnnnnnnnnnnnnnnnnnnnnnnnnnnnnnnnnnnnnnnnnnnnnnnnnnnnnnnnnnnnnnnnnnnnnnnnnnnnnnnnnnnnnnnnnnnnnnnnnnnnnnnnnnnnnnnnnnnnnnnnnnnnnnnnnnnnnnnnnnnnnnnnnnnnnnnnnnnnnnnnnnnnnnnnnnnnnnnnnnnnnnnnnnnnnnnnnnnnnnnnnnnnnnnnnnnnnnnnnnnnnnnnnnnnnnnnnnnnnnnnnnnnnnnnnnnnnnnnnnnnnnnnnnnnnnnnnnnnncacttgcttcctagataactgtttgaaaagtcactactgctatagtattccctactgactttgcgttaaatttctagtggacaacccttaatggaaaactctttaaagggctcacaacatttaaagcgccttaaatgatactaccctttaaactcaaaaaatcaaaacaagaattctaaaaaaatgatcgttgaataggacacctcaattctcttttctggggaaaggccttataaacccgggtccttgattatgtatggaagggattccatttaggggccttgattttttttctatttatggattcgtccttaaaccacttgggtttgcccccctaacattactcttttttaaaaggtcggaaagaatccca

SEQ ID NO: 411598 - DNA, 108 bp, Homo Sapiens
taaggtgtgcacatcttattctactgggtctcaagaaagcctacaggtaagccctggctgccttttcccactcccagggagaccaaaagccttcatacatctcaagtt

SEQ ID NO: 411599 - DNA, 792 bp, Homo Sapiens
gcagaaaggctacatgttttgttgggcattgatcaggtgcgccgggaggtggatgccttgggggaggaggaaacccacttggatttctcctcagcaaggcagctttggctccggtagaatgtaaggaaggttggaatggacttcaacagtcctttaccgcacatctttaaaatgagtttaatagctagtaattaactccctcgtttattattccttcagctctgttgaaggctgtactcccttttaatgtatcatcatctgacacgaaatacagacaaaggtcagatgccaccggagacccacctttgaggttttcctttatacctaatgaaagaaaacaaacttagcagtaaagcttggctgccctcgcaatttactgcctggagctggtcttaccgtggttaaagaatggaggatgggggaagcaaaggagggatgtctaaaaatacaactgcttccaagagagacattcaagttctccgctcaagatggattaagccccactctgaggctcggaggctcggatcccacaggctgggagcgctgtgctgtgcccggtacccaacccaggtcctcgaccccggcccctcactggcagggcggcgaccccctggcccctggctttggtctgcttattgatgtwagctggagtmacatgagtgcagcagcygggagtccgcctctggaaagaagacaggcaggagccaagtgagggcaatcctgaactagctttttctgggcagcgcatcccgtgtagccagcccgggaaaaagcctctcaccgaacaccagc

SEQ ID NO: 411600 - DNA, 358 bp, Homo Sapiens
  misc_feature (14)..(14): n is a, c, g, or t
  misc_feature (37)..(37): n is a, c, g, or t
  misc_feature (42)..(42): n is a, c, g, or t
  misc_feature (44)..(44): n is a, c, g, or t
tacttaacacccgntggctattgtgggtcactgtggnagggngnaatgaacgtatgggatccctgacctgtggttactggaaaacagttgacatttagagagaggctgaattcttgggcttcccgtagcccccatcctgagtgtgccaacagggactagaagcatctctagtctgcaaagcgaggaacaagtgatactctgtccaatttttccaatattgttatactcatgaatagagattaatgaaattgaagagcatattcaagagaaagactaaaggagaagtcgtctgccccgtggacaggcagcttgagtggtgcttgagaaaatgtacatgaaattgcttgttaaaaaatat

SEQ ID NO: 411601 - DNA, 1197 bp, Homo Sapiens
  misc_feature (190)..(329): n is a, c, g, or t
  misc_feature (754)..(754): n is a, c, g, or t
  misc_feature (830)..(830): n is a, c, g, or t
  misc_feature (874)..(874): n is a, c, g, or t
  misc_feature (1124)..(1124): n is a, c, g, or t
  misc_feature (1145)..(1145): n is a, c, g, or t
cagtctgtgaactactcactgaatgaattttgttctgtgagatgagaggttttcattttcattttctatttacagccccagtcctaatctcctacccatccacctacccagatattttttctctatctgggttggaaaggccccaggcttttagaggggagttttacttctgacttttttttccccccgnnnnnnnnnnnnnnnnnnnnnnnnnnnnnnnnnnnnnnnnnnnnnnnnnnnnnnnnnnnnnnnnnnnnnnnnnnnnnnnnnnnnnnnnnnnnnnnnnnnnnnnnnnnnnnnnnnnnnnnnnnnnnnnnnnnnnnnnnnnngggggcttatttgtgggagctttatattgaggagacccctagccttctgcttccgagttcaagtttgtaatagtcggctgtttcttgtcgccccactcgcagcactgccccgtatgcgggttcggtccgaggtcgagatgtcgcgctgccccagttccttcccagaccgccgcgggagtgttcagtcgagctgtagtaaccctctgtgcgcgacgagcttctatcgttccactatctgtcagtagcgctaatctgcacgcacctgactcgagggggcgtcggcgcagctatggtctgatccatggattcgcagattgtacgccgagttgcattggttgtgggtggtgtgttttattgcgcgagtctgccaagcgacaccacttatgacgaaccaccgacagagacggcaaccgtctagatcagtncgcttgatgttcagtcgccagtagggctcggatatgatgtcgctacgcctgagtgatgtagttgactataaaagtntttagtgtgatgtcagtgtgcttagtttgcgtgcgagtccgtgnttgaggtgcttcttcacgtgagtggtaagggttacttcctccctagtactgctccactgcacagtccatagtgaagcgatatgtgcgacgacgttgaggcgtctcctctctgtgtgcgttcaactaggtgacgtgaacagtggtatagtttaggtatagacacacgactatcgccttagaacgaggcgtttagttgctaactgtcgcactcgactatggcttctggaccaccggaggtccgtttacatgnatataccttgcgatacgctcncgcgcttcgtccactccccataacgactaaatgtagatcatataggtagggt

SEQ ID NO: 411602 - DNA, 854 bp, Homo Sapiens
  misc_feature (46)..(46): n is a, c, g, or t
  misc_feature (48)..(49): n is a, c, g, or t
  misc_feature (55)..(55): n is a, c, g, or t
  misc_feature (72)..(73): n is a, c, g, or t
  misc_feature (135)..(135): n is a, c, g, or t
  misc_feature (194)..(246): n is a, c, g, or t
  misc_feature (258)..(258): n is a, c, g, or t
  misc_feature (267)..(267): n is a, c, g, or t
  misc_feature (270)..(270): n is a, c, g, or t
  misc_feature (272)..(272): n is a, c, g, or t
  misc_feature (303)..(304): n is a, c, g, or t
  misc_feature (315)..(315): n is a, c, g, or t
  misc_feature (370)..(370): n is a, c, g, or t
  misc_feature (413)..(413): n is a, c, g, or t
  misc_feature (429)..(429): n is a, c, g, or t
  misc_feature (434)..(434): n is a, c, g, or t
  misc_feature (444)..(473): n is a, c, g, or t
  misc_feature (477)..(477): n is a, c, g, or t
  misc_feature (522)..(522): n is a, c, g, or t
  misc_feature (691)..(691): n is a, c, g, or t
  misc_feature (716)..(716): n is a, c, g, or t
  misc_feature (788)..(788): n is a, c, g, or t
  misc_feature (814)..(814): n is a, c, g, or t
  misc_feature (831)..(831): n is a, c, g, or t
ccaacttcaacacctaccacaatcccmcctacatcaccttcccccncnncaaaanttcccccctcaatactnntacccatacttcccctacccaaaaaaaattccccacaaaccccccctacacaccatacctanaaaatctacctttcaatacttttcaatcccacataaattctatctttaaaaatctcacnnnnnnnnnnnnnnnnnnnnnnnnnnnnnnnnnnnnnnnnnnnnnnnnnnnnntctcctatttanaattccatnaantntattcccttaaataacccttaacataccatnnttcactttttntccatctttcacttctttttcacatttcataaaccacaaaacaaaataaaatttncttttaattcacaaaaccttaaccatattacatatccttcacnaattacttcttacacnccaancaaattaatnnnnnnnnnnnnnnnnnnnnnnnnnnnnnnattnccatcctcttcatacattcccctcccctcctttaatccaacattnatttcacataacccacataataggaaatatcacacataccaccactccatcttaaacctcsaacagtctctactcccctcaatcaaatatccaatcccaactcttctatcttcgggggttccackcctagaaattaartckttcaaaaagaacaaraattaaccttcsntttttargtaattgggcgttttggnttagawcacgaccacascctcstgagtcccccccagccstccttcakccgccactccttcccctcccatttncctcctcacarccgaaacacadcttnttagtgcatgtcarctnttaacaarttktttttaatacat

SEQ ID NO: 411603 - DNA, 960 bp, Homo Sapiens
  misc_feature (16)..(16): n is a, c, g, or t
  misc_feature (127)..(127): n is a, c, g, or t
  misc_feature (278)..(278): n is a, c, g, or t
  misc_feature (429)..(429): n is a, c, g, or t
  misc_feature (464)..(464): n is a, c, g, or t
  misc_feature (467)..(467): n is a, c, g, or t
  misc_feature (472)..(472): n is a, c, g, or t
  misc_feature (485)..(485): n is a, c, g, or t
  misc_feature (490)..(490): n is a, c, g, or t
tcmccgcgcccgccangagccaccgttygartaattyggtaggtggtagttggtgycggcatyccgcagccccgtamccggccccggacggagcgccggccgtaccaccgtccgtgtgccgttttcntaccggcgtggaaagagtgtgggtaaggagggcgcacagcgcaagktkgcagcgcgtaaggagaagcgtgggycamaggagttggaccccacggaggccaaccgtgagagygyggacccgtagtgtttyagtcggygtygtcagagtcccntttttgttaacawcttcggccttcgcaagcgccgtgagggcagcracggcggcgtgagtggtcaggttcgtgagcagagcgtccgtgaccgtcgtcatgaggcgcatgcgcggcatttgggccgcggcggttcacggwgtgtcgacgcccntcgtcagcataccgtcgttamttcgatcgcgccgntantaacntgcggcagggcantgagnwcagtcgtagcaaccagggtgwcgtttgtcacatttccaggcccttgacagtcaacgttaatgtgaagaagcagggggttkagcgwcgkgcgkcccgkgkcagygwcgygyccgagggccacggkcgkacccgkgacgcccgtgaccacgwcaagacgggkgkcagccagcaggwccgcgtyagcagttgyagkaacgmscctgycggcagcgacaacggtcccgwcgggggyacccgtcgtakcggkagtamgccggcastgttggcccgaggaccgtcgcgcggcacccagcgtcggaagaggttwgtgggcgtagcgkcgtgacggcgkgcstgcgtgagaccgkgagagtcgmcgkcgtagtagcgkagcgttkaggagcraagcgaagagagargasgtgtgaggktkksggggbrmagwgagcacagaaggtkttcgycgtktamarggwgcgtsycgggkktt

SEQ ID NO: 411604 - DNA, 571 bp, Homo Sapiens
ctgccagcaccccaagtgatggtcttcttaggtttattcccaaacgtacctgatttgggtgataaagagttaaaattaaatacaaaggccaatgccagtccattcctggcgccagctcctgccttttccttctcatggggccctcaccatagtgatggggtggagcatacccaaccctgggaggaaatgaggcttttgtgccgagcggcgatatgatggcaatactggcagtggtagtcaacccatctgtaaacagctgacagagggcagtacaagaatccacctcacagtcagggccgtaaccgcaaggaaagcacacagctgaaatgactgacgtgggctggaactgagctgaaaaggaacttggcttggcttgaccctggagcacacattacaaccatgagaaacaggcatctaacgtgatcttcagcccacagtaacaaccttgtttggctacaactgggaggctcttacataccccatataaccccctggcttttttaaggttcgtttaaccccttttttattacgacaaacccttcatcctcgtcgccccggttgcgcccttctg

SEQ ID NO: 411605 - DNA, 390 bp, Homo Sapiens
gctgcccctcacccaccccttcaaacactccacaattccacccatcatgaagactcttctcctctttttcgsccctgctcctcacctcgccacactccccaccgtcctccccgcgaccacacgstctcacacaattacctccagcaaatctccaatcacccaactaactacctcaataaccaaattcaaaatcctctcaacsssstcaaacacataaacactctcatacaaaaaacaaaccaacacccgcaacahactyctcagcaacctacaacaacccaacaacaacgaaacaccatcccctaaatcgacaccacccgaatcacacacaaaactcaaccacctcccaccgactctccaatcacaccatcatccccctctcgcgcgaac

SEQ ID NO: 411606 - DNA, 512 bp, Homo Sapiens
  misc_feature (261)..(316): n is a, c, g, or t
ccttgcttatgtttgctatgtttaataatattttgtggaggtagcagtctgaccccagggaagccttcttgattgtcctatctagattaactttcctttatgcactctcctagcccatgtacctttccttcacagactttttcattagtatggtcttaattgattcaggtaattagtgtctctccccaaaactgtaatgtacattgatgatccagggaccatgtctccctttgctcccactgtagtccaaccttgcatgcnnnnnnnnnnnnnnnnnnnnnnnnnnnnnnnnnnnnnnnnnnnnnnnnnnnnnnnnctaggttatgactgagttgccttctaaattgacagtaatttatttacatgtttagtgttgaatatgtacaggcacacactccaatttttaaactataatttctgaatagcgtaagcagtcactatctgatgtatccaaaatggagcatctctattctaggttagtgcaacaagacttactagaatatgagaaagaa

SEQ ID NO: 411607 - DNA, 1040 bp, Homo Sapiens
  misc_feature (773)..(773): n is a, c, g, or t
gagcgtgggcttcccccagaaagagcgagccgcactgcctgcctagggagggcacccactaccaggcatggctggtggctccgtttaaagaaatctttgtcctgtgggagtgggaggtgcttcctcatcctgcctggaagccacgtcctggctcttaccgtggactctgcaacagccgtggtggccacatgaagatggaggaacctggtggctcaggggcccctgatgtcaccgcctccaaggcaacgggactgggcagggcagctcctcaggaaggatgatcccacctgcacgggtcagccctgcagggggacaaggcccaccacaaccccacctcaggccaccaactggacctgtcctgccaagaaggtcccttccaatttgtccggcaggtggttccctggatacagcccagacgcagcatcatcctcatgttcacctctggtgtgccctctttcccccgtaaatgacaactgctgtgtcacccacgccgggcaaggagaacataggtgccaccttgggggccccaactttttaggcgcccgggccttgggcaggccccggctttttgttgttcccgcagccctcagggcttggcggtgggctgcctcaacgccctaagggagggcccctttggccacaccagttggggcaatcgaagcttagacctaacggtttcacccttaaacccagccgcgcacagggtttctaagagagggaaaattgctttggagggtccttcttatgagagagagccatcctttgttcttgcnaccctttttcttgctcccttccccaccaatttatgtccgttattccccacgaaggcctttttggccccggggacttcccctttaagaaaccaagaggaggagcgccactggggctcccttggaatccccgggagaaagaacattgtgccccctgtcccctttaaatggtgaatggccccccctcgtcccctgggtggggacgttctggcacccccctcttttgggtgccgttgggcaacgtatgaccccacttttggcggacctttg

SEQ ID NO: 411608 - DNA, 694 bp, Homo Sapiens
  misc_feature (537)..(537): n is a, c, g, or t
gccacacgagctcacagctcctgggacaaactttgcattttggacactacgcaacaccacggctggaaacctacccttttctaactcataaaagcatattaggatgcatgtgggtgaataggttcaatttactctaaggaaatccttgacaaaacagttaactcactcgtgccacacctcagtccaaattactgtagccactgcccaataaagggccacccattagctaaggggcagcagtccccatgactagggtttttctctttgaaggaccaccagcagtggttagttgcctgcgggtctacttcacactgctggagttgctttcaggcctagcctgcatggacatcttttcatgtttctcctcttacctgactcaagctggctcaaattctaaccctctgtcacttaagtcatgtctgtctggagagggccttccagagaaccatgattcacatgggccattcaagccagtcccctaggaatagtgggaccagaggggtcttcatgcccccaaccctcctgtgtggagagctngcttgagctctggtcttcaccagcttttttcaacctggaaatttgagcatgtatcatttcttgggtgataagtcccttcattttcttacccattcttatcactcaggtctaccattcttcaaggtttattacagatttgttgaacatatctttttca

SEQ ID NO: 411609 - DNA, 833 bp, Homo Sapiens
  misc_feature (791)..(791): n is a, c, g, or t
taagtaccaaccaccgttgttatatacataaaattaatacaagatgtgagggacttctatcacagaatcaaagagatatcttctaaagacagtttcatcttcaccttcaagggcaatagaggccagatatacaaaatgcagagtaaagttagaaaatttacaatattcctgggatctgttaaccaagtatgacagcgatttgaaagaggaatggtttatatgaactttcaattataaggctctggaagatcttaactgctgaggaggtagccaatatgcctcacaaaaggtagtcaaaatgcaaacaacatagaataatcttaaaagttaaaatcttcttaaaatgcacccagaagcatgcaggtaacagataatactatgccaactttaaataaaattcaattacaataatgtattccaaatctatttgtcaaaagcacaaatacaagatagataggtatatattcggttatattaacgcattaaaaattacactacatccttaaaaaaactttattgctttaacaaagccactgaacaatcttttcatcaaatcgtaccactttgtagaacaatatatttcctttatatattacactgccaccctaactgttgctcatgtcatttacactaaaaactttttttgaaaagtctacccattatcataaagaatccaaatgtccaaatggaaaatgcgtattcaaataacctttgctccacccctcgttgttagttgatcggtttaatcccaacactgcattgttcttaaacacatttatttgtgtgccagntttataaaaactgtacagaagtctacactttgttcttcaaag

SEQ ID NO: 411610 - DNA, 790 bp, Homo Sapiens
  misc_feature (120)..(120): n is a, c, g, or t
  misc_feature (131)..(131): n is a, c, g, or t
  misc_feature (174)..(174): n is a, c, g, or t
gawtcccagttcttggggaggaagttggaatagaaccagttgggtcatgtgatagacacttccactgtgttttccaaaggaaatttacatttaggaaggaaaacatkttgaagagcgganggagagccaanagagttgctcagtacttgggtaatgcatttcttattcagaggnaagtgagtttagcagggaaggaaggttccacttcctctctcaccagtgcttggcatgggtcagccctcctcattttggacattttcattaatktgtattggcatctctttgtggttttatttatttatttatttataatttgttgttgttgttagagcagggtctcactatgttgccagggtggtcttaaaccctgggctcaagtgtttctaccgcctcggcctcccaaagcattgaaattgcaagcatcagccaccacactcggyctactttttaatttaaaaaaatttttttagagacggggtcttgctatgttacmcaggctagagtacagtggctgttcacaggcacgaacattgyamactacagmctcaaactcctgagcttaagtgatcctcctgcgtcacctccctgagtgggtgggaatagcaggcgtgtgcgcctgggccctcamagtggcttaatctgcattctctaatgatgaatacggttarcatcttttcatgtgcwcgtatgcsatcaatactgaaagtygktttaaagamaggatcatacacmtacatgtatktattgtgaagagagtaaatytaggacccsaamtmacatgtmaagagaa

SEQ ID NO: 411611 - DNA, 1096 bp, Homo Sapiens
  misc_feature (76)..(156): n is a, c, g, or t
  misc_feature (221)..(265): n is a, c, g, or t
acagtgacagatttttagcaatggaaaaaagacaccactcgccaaatcatctcaattgccaacgcagaagcgtttnnnnnnnnnnnnnnnnnnnnnnnnnnnnnnnnnnnnnnnnnnnnnnnnnnnnnnnnnnnnnnnnnnnnnnnnnnnnnnnnnaattttttaaataaatagaggcgacgtctccccacgttgcccagatcattctgaaactcgagctnnnnnnnnnnnnnnnnnnnnnnnnnnnnnnnnnnnnnnnnnnnnngagttgagccaccatgctggccctccccagaagctagaatgaaggctctacattgctgtgaattacatgagctctaacggacacagggacctgtcgccacttctttcacacacttccagtaaaatgagttgcaggggtatttaccgcaccctctccttagctgattgaggtttatcatgaagacgcatgccacttcttattcatgctttacctagcagccagcctatctacgacccacttagtacgcgttcccctgttcggcccaccccgtcctccctgagacctcccccgctcaccgatccactcgtgaaagcttacttgcttctaccgtcctctatacggcaacacctacccctaatcgccgtctactcctgtcaaagtatctcgagtgtctagtctactcgttttcacgcttccgctcacaccctagtaaccgtcagataccgtgcgtctactacagggcgcgctgccctccgttgcgccactaagttttttcgcttacctttcacttcatctttcagctaccaactaatttcaaggctagtttgctagccagctgatatcacagatattcaaaagcgactaattgtttagcacctcattcttctgacgtcggcccgcgcgccttagtggaccccctgcacgtcatttcactcccatcgtcacgctgactacacccgtctcatcgtcctttaaatattctctcctcctttctacatataccttcctccccctccactacgcgacaagcatatcgcggcggtgacggccgacgagaatactgccgtctgtgaataatcgggcgcataccacttgctcgcgcattgtcgt

SEQ ID NO: 411612 - DNA, 1042 bp, Homo Sapiens
  misc_feature (16)..(16): n is a, c, g, or t
  misc_feature (76)..(156): n is a, c, g, or t
  misc_feature (935)..(935): n is a, c, g, or t
  misc_feature (980)..(980): n is a, c, g, or t
  misc_feature (1001)..(1001): n is a, c, g, or t
  misc_feature (1007)..(1007): n is a, c, g, or t
  misc_feature (1026)..(1026): n is a, c, g, or t
accgtgacagattttntagcaatgaaaaaagacaccactcgccaaatcatctcaattgccaacgcagaagcgtttnnnnnnnnnnnnnnnnnnnnnnnnnnnnnnnnnnnnnnnnnnnnnnnnnnnnnnnnnnnnnnnnnnnnnnnnnnnnnnnnnaattttttaaataaatagaggcgttgtctccccacgttgcccaggtcagtctggaactcgagctcaagggatcctcccatctcgacctccccatgggttgggattacaggagttgagccaccaggctgtccctccccagaagcttttctgaaggctcttcattgctgtgatttccatgtgctgtgttgcaaatagcgaactgctgcatcaattttgacccctgagagagaatttgtctagagggggtctcaactattagcgacctctgtgtagaagtgagggctctcgcaaaaatgaggcctgggaccttgctggggctagtattccccgggaagttaaggattctcctagccctcgtagatcggggttaccccttagagcgtaccagaattggctgattgttctgaccccccagaagccccaggcctacccgagttggtacatgattcttccgctcatctttaggagaccacgaaaccctctgcctaatttatgtggtcttaatagcatctattcatataatgggagcccgcgccttaccaagtgctcctcttaccgcccctttgagttgctcccagcgacttctcgtctagaggtccgatccgccgctgccgcgctatgccctcttgcggggttgtgttgcgccgttctaagcccttcgtccctggagtaagcctatgggtgcgacagatccctgtgttgtttcctacataacaacccactccgattttctgctctccgtcgtgcgcggtagtggacaccacttgtccccccttgtnattcgctacatcctctctccgtcgttctgtggccttgatcgagcnccttaccattatcctcccctnacgagnacttcccggcacagtgccntcgatggatcgtatat

SEQ ID NO: 411613 - DNA, 509 bp, Homo Sapiens
  misc_feature (313)..(326): n is a, c, g, or t
  misc_feature (368)..(386): n is a, c, g, or t
ataattttcttgtgtcttacatttttttctcttattttatataaaatgctatgtgagctggtcagarattataaaaataattttwataaaawwagtgcaaaaaatttaaatttaatttcaaaattagtgtattgttatatwtaawgttgtwagaatatttaawwttgtwcttttaattggagaacgctgtataarcctacwtwaataagttttwrtwcctttcagttttwawaaagaaaaaaagtaaawaaagawtgarcccatttgtwtaggtgagtacwaggggggcttcctaaawcawgaggatgttttnnnnnnnnnnnnnngcaaacaaacatgacagtgctttcwgtgtcacagatgctttnnnnnnnnnnnnnnnnnnncctgtaggagtaagtwtgtaactwcaagacagagatggaacaaaacaawagtragaaaaaacaatgaattaaaaagtggagaggacattaataaacaggcggcaaagcccagtattgcggaat

SEQ ID NO: 411614 - DNA, 660 bp, Homo Sapiens
atcactttatggctgacccacattaaataaaaccttgttgactcttacgtaaacaaatggttaagtaaacagaaacttacataaagacacattactttatgttaaagggggatattgatttttatatccatagtagagaaaataaataaaactagataacttctttatcactccatatgattttgatagattatttgataggcataagaaacagggaaataaatgtggtatttatgctttatgtaaacttcataaagctgtgaaaagaccaaagttcttcattatagtcaaacaagtgttatacttctttaagaatgtcattcattgtttgaggaacttcacttatataattaccattgagcaacttgtatacttaggttaaaaattagtaatttcacacatgagagtgtgagaagttagtaaaatttaacttactgttttttctttcccaggttccacctgatcaggttttgctgtgcatggtggctgaggctgaacttttattgctcgggttgacttatcattttttttaggtcaactttgaggtgagccagatggaaaaccttccatcttgtcctgcggttgacacccctaccgcactggctttgcagccaatccgtcctcaagcttgttcttcaccccctttttcttgcggattta

SEQ ID NO: 411615 - DNA, 920 bp, Homo Sapiens
  misc_feature (45)..(45): n is a, c, g, or t
  misc_feature (62)..(340): n is a, c, g, or t
  misc_feature (342)..(369): n is a, c, g, or t
  misc_feature (865)..(866): n is a, c, g, or t
ccattggttgggctaagtgtaggggagaggtgggcgtgtcacagncaaatatgagtaacacnnnnnnnnnnnnnnnnnnnnnnnnnnnnnnnnnnnnnnnnnnnnnnnnnnnnnnnnnnnnnnnnnnnnnnnnnnnnnnnnnnnnnnnnnnnnnnnnnnnnnnnnnnnnnnnnnnnnnnnnnnnnnnnnnnnnnnnnnnnnnnnnnnnnnnnnnnnnnnnnnnnnnnnnnnnnnnnnnnnnnnnnnnnnnnnnnnnnnnnnnnnnnnnnnnnnnnnnnnnnnnnnnnnnnnnnnnnnnnnnnnnnnnnnnnnnnnnnnnnnnnnnnnnnnnnnnnnnnnntnnnnnnnnnnnnnnnnnnnnnnnnnnnngaggagggggaaagacaaaattgtattctataggtcttgagttcaacatttggaaggtagacatttggaatgctctagttccactagacctttggttttcacttaagggggaatcaaggaccattgtgttagaatccagtgaggtcaggacgtagggacgctcaggacagatggctgaggatgtgttgaaagataggggtgggttacagaagattgcactctatcacaagacgaggaatgtttcggatgtggcggtgctcaagtggtggtcctgggatggaatatgccaaaccgtctattagcagagttacagtgtcttttagagaaagccaaacatattacctgtggaagtggtaagaaacaagagtaacccacttatgcctactgtttaattattggaacgctgagcctgtgggagttattgatcccctactgctcaagtcatcgccaagtctgatttttacacaaaaaaatttgcacctttggcataaatggnntaagacagactggattcttaagctagtggaaaggctgagccaccaggagtcggg

SEQ ID NO: 411616 - DNA, 254 bp, Homo Sapiens
gggcaggaagacctactgaaagccccatccttggagccctggcatctcamagcaccttaagctttgcmagtccctccaatacaaattgctatcaactttgatcattttwamaaatatttttcamaaataggaaatttaggaaattcagtgcattggcaacttgtgagtaccttttcagtgagattcctggaggaggaaracaccaaaaggaggggaatttggacaaraggacgggagggaggaaraktggagga

SEQ ID NO: 411617 - DNA, 944 bp, Homo Sapiens
  misc_feature (570)..(694): n is a, c, g, or t
  misc_feature (705)..(705): n is a, c, g, or t
taatttttgtattttttgtagaggcagggttttgcctgttgccaggttggtcccaaattccttgagctcaagcgatccgtctaccttggccttccaagtgctgggattatagacatgagccactgtgcctggcccagtgtggaaaattaagtgaggcatgtatgatgagaacggctgcacgtgggagatgctccgtggatgtttgtagaacgctggcttccgtgtttcctcgttgtggctgtggtggtgtgggtctttgcctgtggacccgtggaagacaaagaagacagttttggatggtcaagctattttcttgcttcagggctccctcccctgctttttgaagcctcacaaaccaggactgtgagggcaggaaggcttggggtctttgtgtgctgagcctcattagggttttaagaacctccctcctttcatctctagcttacgagagggatgattcattatcttccctcctcaggctgcagtagaagcagacagtctctgcctccctgcttgcctttcctccctcccattcactgttgattattgccctcaagaataacaggttgnnnnnnnnnnnnnnnnnnnnnnnnnnnnnnnnnnnnnnnnnnnnnnnnnnnnnnnnnnnnnnnnnnnnnnnnnnnnnnnnnnnnnnnnnnnnnnnnnnnnnnnnnnnnnnnnnnnnnnnnnnnnncagacaaacanaaaaaataaagaagaagaaagagaagaatgggttggatgctaactggtggcactgggtgacaagagcatttggggtttgatgttggcatggagatgagaaagcaggggtgcaggctgcttcatacccctgtggtagccatccatcaggggcctgcttgctgtagagtgggaaaggaggaaagcccagaccttttttgctgggtagccttaaatttggaagcccaactttggttccgctg

SEQ ID NO: 411618 - DNA, 877 bp, Homo Sapiens
akkgttytkytcttgttctgctttcttgtgraratatgtgtttagtggytgyyggtcyttggatgytggggyttggytgtgaggcacagcccctcactttccatggggtcccctgcacctgcmagcttcctcagcctcaggatttcgtgcttgtacctgcmcaggtgctggtccacgtactcctgtagctmagaaagttgctcttcagcmatcgtggcccggaccagcagctgtgcccgctcccgttccagctctgcctggcatggggatgtaagcmatgagctggggcatggcgtgaggatgggcctgggccagcccttgcmtcctacctgggtgctgcgggagaagtcccggagcttctggtggatctgggcccaggatgcagcgtccaggccctgtggctmtgatgtwcccccctgggaggmtccamcgggtmtmttttttggggatgaragcagtrcmcmargmamgcagtgctggtcctcmcgatggmtgaagtmagtraccaggggcacgggcaatggttccaggtmcaagctggmtatrtmaaaaatagcttgggggttcccaggtgcmctgtaggcaaccagtagctcttcatgcatgcggcatmaaatmcaacagcctmtwgtggtaaawgmggrcamaagggcaaactgatgctcacggctgcggtgcgctgcccggatgtcctccagagtcgcctccaggaatgtccggagggccgtggtggctggcgcttggcctgcaccatctgcgtgctcctggaggcggtgggctgggtcscatggggccacccccatcttttcmaccatcccccacccagcaggctgacagtgcggggccctggggtctcctgargtatcagacaccaggc

SEQ ID NO: 411619 - DNA, 863 bp, Homo Sapiens
  misc_feature (102)..(123): n is a, c, g, or t
  misc_feature (591)..(591): n is a, c, g, or t
gttaggttttagaaatggatgtgaatgtacagttgtgtgarartrrrgttgaaaagaaagaataagargrtgaatgttgaatgatttggaaagattatttmnnnnnnnnnnnnnnnnnnnnnngagasggagtctcactctatcacccaggstggagtgmagtggsscgatstvsgvtsavsgvaaggtvvgvatmmmaggaaagamatggcagaaaaatatattatgavatctgmaaaamtcattgctcctgtaattgaaamatcttttgctgcaggttatgattggmtgtagagatcttaaaagtgttggaaaaaaaggacaatagagtgaaaagtgcagctgcaaccaatctstsagssctgtattatatgggaaaggattttggasaaggsaggagvtatgsagatataggtgtgaartgtgatagatataatggaggaggtgttagtaataaagggaatavagtttttgraaatggtgattatgaraagggggrtgaattrtataaagarggtgtaagaaatgattvtwvttgtagtgaagragtttataatattggrgttargtatgagraagtaaatggggkanatgagggtttggagtktttrgtgaaagtwragrrawtggaagaaaarttwgggaattdkttagrgataaraatatwtwtrrdtaatggaaaargrrtaaarkattaattrgdawtrrggtgkrgttttttrragggtdgdraattttttwaakdgraattwtttatkktaagrgtaaarraaattaawwtwawdtrgarwwagkttargtwaawtwaaarttagkggtgaaggtaattaaargwtttkgaaargtwakwtttaaarktttta

SEQ ID NO: 411620 - DNA, 810 bp, Homo Sapiens
caaaggttatttgctgattatcaaccaccatatctgaacatcagctctaggtcaggcaccatgctaggccctgggagacttagcagtgaacaagacactgtggtcccagctcttggagttacagtctgatgggagattctgtcaatgaaggtaggtagacaggtatctaaggacaatttttaatgaatgttatgaggaaaatgagtaagggcagtaatgaagaacaaagttggggccctgcttagatgcagggggtttagagaaaactctgagtgcatcacatttaacctgacactaaaagacgggaaaggagccagctgggctctagtggagggaacagagagttttggtgagaaggaacagcgtatccagaggcatgaggccaaggagtgctggaggccctgagaagagaggagccccgggggaggcctgggcaagtcacgtggggcttgggaggtctttgttcagagtgtggttgttatgagaggtgcagtgggaagatactgaaggatattaagcaggccaataacacaggctgatttttgtttccagaagattcctctggtgtctatgaggatatgtcatggacagagggatagcatgttactcatgataaggttaaaggagtactcagtgaatggcacaaggtggttgatagcatgatgctgggagtcggatatggataatctaacctatttgtgatacatgtagagaattatattattatgaaacctgggtggagaaagtttccagcactgtaggcaatggaccaaactacgtgtcttctcctatttacgcactagatcatca

SEQ ID NO: 411621 - DNA, 138 bp, Homo Sapiens
  misc_feature (14)..(14): n is a, c, g, or t
  misc_feature (26)..(26): n is a, c, g, or t
  misc_feature (88)..(96): n is a, c, g, or t
ttatatgcttaatnctccaactctgnaaaaccctctctcactaatactttgctgttgaaatgttgtgaaatgttaagtgtctggaaannnnnnnnnctaagaaaaactattaaagtacttcctagtagggcaaaaaaa

SEQ ID NO: 411622 - DNA, 744 bp, Homo Sapiens
  misc_feature (208)..(349): n is a, c, g, or t
  misc_feature (527)..(549): n is a, c, g, or t
  misc_feature (650)..(650): n is a, c, g, or t
tttttagtagagaggagtttacccatggccagctggtctcaaactcctggactaagtgatccgcctgcctcctaaattgctggaattacaggcatgagccatcacacccagccttaagctatttattgacttgttgagaggaaaaactctatcaagaacaatggcagcctaggcaacatagtaggatcccatttctaagacaattttnnnnnnnnnnnnnnnnnnnnnnnnnnnnnnnnnnnnnnnnnnnnnnnnnnnnnnnnnnnnnnnnnnnnnnnnnnnnnnnnnnnnnnnnnnnnnnnnnnnnnnnnnnnnnnnnnnnnnnnnnnnnnnnnnnnnnnnnnnnnnngaattatttttaagaggtgatttgaaaagattgactataactcactgattttcaacatcaatgtattatgaagttgtttttatgcttccaatcaagtgtatctttgagtggaagccacatagttggctctgtgtaattgacaaggttatgctgccactccttaggaataataaagtannnnnnnnnnnnnnnnnnnnnnnagacatccagctctgtcacccaagctgcagtgtggtggcatgattgtagctcactgtaactttgaactcctgagctcaagggatcctcccgccttggcctnccagagtttttgcagggactatatgtgagccactgcgtctggtcaaatgtagtttttcaagagtaatgctttataaactgattttttttcccca

SEQ ID NO: 411623 - DNA, 889 bp, Homo Sapiens
  misc_feature (755)..(799): n is a, c, g, or t
tgaaattctaagggttgtggtaatttagaactttctaaacctatctatctatctattggtcaatctatctgtgtgtgtatacaccacatatagaagttcactgttgggttaaactatatggacttgtgtttgtkaacaaatgtaagamagatttttgaatttgtyttgtgcttgaattctgtttctgatattatattgaagacggattaccattttttaatggcctaaaaacatggtttgtbaagatagttattaaggccacagccatctattttagaatctaattttcacaggaaatttgagtttttctgatgaacactgagttgctcaataaacatacattctagagccccaacaccatgtcccagaacctgtgtagccagggtctagaaccacgtgtggtagcagatgtggcctggaaccaccaggcacttaaacacaaaccctcaagtaccatccatatcaccgtctctgtaccatgagatggcctcgttttcaaaataaagttgaaaagtataaagctgggcgctggggccttggtaaaggtaagctgtttttccagaggtttaatcttgtctttagtgtgttccatacttgaagcttttgcttgagggatggggtttctcctttacactcaactatgttcaggctgtttatgcccctgccctagggacatattcttttctagtctttatgctgtggaagaaagattaacctagctggtcttcagaggagtaccagtcacctcaaaacannnnnnnnnnnnnnnnnnnnnnnnnnnnnnnnnnnnnnnnnnnnngggtacatagtaggtgtatatatgagatttttgatacaggcatgcmatgtgtaawaatcaaatcatggaagamggggtatcatcccctca

SEQ ID NO: 411624 - DNA, 909 bp, Homo Sapiens
  misc_feature (243)..(243): n is a, c, g, or t
  misc_feature (432)..(432): n is a, c, g, or t
aatatgcaaaavaggtgaavmaatcctaaacaaggtattgaggccagtgtccaggctgcattgkgttcatagkkktgkkktcggggcgttgcwtggtttgtgaaatgtgtataattacagaagadarkkkggaggacttagtgcagtatgatggtatgackagtgtkgacgggctacttcatccttattcttttatatttatatatggtatatgkattttcktkakakakaktkrkrkrkkknmhakctagtkatttctttcatttgtaccattttctagkgagatttgggkgcttcctaggcgagactggaaagggtttggcagggaaggggcagcgacggkgtaggtkggggckkggctcacagatgctgcagkagtttctgckattgtaatagggccctgggctccgctgtacgcctkgkattggcagnctaattcagtctttcagcctccacgcccccgccctgccgcattcaccgcccttctcctccatacttyttcatcatcttgcgctccgcttcttgtctattctgttttgttgcgctgcckcacatgcgtcctcctccgaggttcccggcktckgccaccagckcgcgcgcgctkgcttccwmagcagggcackgcagctaygcgcttkggcckygccgatgcggcatacgctttcatgkgggttggcctymwstagcagatgtgccwkctgctgcaggccgggkgagtakagggamagcgcgggcagcggcggcaggtackcctgcsgskaktctytctccygcagckgggcgcgcamcgygaayggggggggkkggkgcgcagctcgkabaggagsagsccgggcggsaakcatcgaacgkgcgggwmkgggaagmaraaagagtksggggscmagccggccttkcktttcktbgctg

SEQ ID NO: 411625 - DNA, 119 bp, Homo Sapiens
taactgagtctggttctgatgcttgttttcttttagactgtttttttgtcttttagcatgccttgtaattttttgttgatagctagacatgatgtattgcataaataaacaagtaaact

SEQ ID NO: 411626 - DNA, 880 bp, Homo Sapiens
  misc_feature (792)..(817): n is a, c, g, or t
tgctgacagattccagtgtctataatgagtatctttgtatgaatggtttctgatatgaaaagaaatttgcttatcaatgcaaggagaaccattggtatgttaattttatgcaagtatctcttcactttctaattcactcctcccaataatggaatggtaattggatttctgaaggaatatgcatagaaagcaatttaaaagtaatttgttaatcagaaattactccaaatttgtgcaataaaaatgaggccctgtagcctttgtccgaaaatgcaaaatgggcaattttccctaaatattataatttgagagaggtttacctaccacaacctataaacctcagtggtcatttaatttctaccattagagaattgaaagtctcattttatttgtgttaagcatttttccctcattttggccttgaaatgcaaaaacctaaattagaggtgttatatcaaacctttattaccttaatctttctaaatgttttccagttgtgtgtttctaagaggagaaaccggggtctctctgtgtttgtgtggtttaggttagggaagggtatgggaagtgtagttttgctatccttagaagtgggactgtgactcaggagctacgtgtctttggcatgttagttaattactcaaatcattattgtcttagtatgtagaatggggctcacgctatctgttattagagtgtggtggggataatacatgtaacgtatcgtgtgtagcatggcacttggcccatactaaattgtgtcctcactaaaatctttaagatagtacttgnnnnnnnnnnnnnnnnnnnnnnnnnncttgctgatttgtttgagtwtcttatagatcttgtagatattaggcctttgtcagacatatag

SEQ ID NO: 411627 - DNA, 976 bp, Homo Sapiens
tctcctacggagggaatcatttcctgctttagtctttattatttgcacactttccttcatagtatgtttctttcaccgtgtgtgtacatccctaaaagawatgccatttagtttttgaactttctgttttctttttgaggcagggtcttgctctgttgcctcggctgtagttttgaactttgacgtgagggaattctcctgcgtggctgctcctgcactgcatggctctgagcacctgctctgtgtctatttttgtcctccattctctccctgagacccacccacactgacatggctcattttcattgctgcatggtctcccgtcgtctgaggggagcatgggaaatgtcttcatcttcccgtggawgarwgtttggccaggttggggcccttaggactgtgttttgttgggaacgttcttgggcatttcttttgtacacagcgcaagtttcttctggtcagtagctttcaaattttaaaataaaawmmcaggtaaaaawgwaawtttcctcataacccacaacacacactctttcatatamaagcawagmagaaawawacttcacaagcgttagagtgcctgttgttcctgcttctctccattctccccaacgctggcatggattgggttgtgggatttttgccgtctggtggttgtcacgtgatatctccccctgttaggctgagccctcttcatgttttcattagccattcctccacatttcctcttctgtggagggccggttcagctcttttgcccagtttctgttaagttgtttgaatttttgcacttttcctttattattcctattactatgtttttgagacagaatatcactctgtcacccaggctggatgtgadctcakctcactgcaacywcawcttctkkkttmaatkatcctcyksctcakcycccaaktkkctkkkatwmakgcamacacaccatkccmkctaattttwtattttactaaaatg

SEQ ID NO: 411628 - DNA, 580 bp, Homo Sapiens
  misc_feature (285)..(285): n is a, c, g, or t
gtctttctgctgcttttgttatctacataaacaaagatatcaactggatataataattaactactttccagttttattcactacaaatcttaactaacatttttttctggctcatttttcctttatgcaccattttatatgttcacacacacatagaacaataaaaatatattcaattattcaattctggttgaatgttcattaaaataggtgttaaaaatgattttttgtttgtttgaagaggggttttattgttgtattcaagagtgttgtttctggagacanagttgcctgtgcttaataagcagattccggggaggattcgaaatataagccataacattttaccctaataaattgaatccaacccaaaaggtttagatttgctttaagcattttaaagggggttaggttttgttaaacaaccaaataaaaaggtttgtgtttgtggcataaattgccttattcttttgaaaatattgtccaaaatattactccacaaaaaccctgcctttataattttcaatccccctaaaggttttttttcgggggaatatggggatttttaaccccctttgag

SEQ ID NO: 411629 - DNA, 1067 bp, Homo Sapiens
  misc_feature (79)..(79): n is a, c, g, or t
  misc_feature (214)..(214): n is a, c, g, or t
  misc_feature (565)..(565): n is a, c, g, or t
  misc_feature (1048)..(1048): n is a, c, g, or t
caaaacaagataccagtcacaagtgtttaaaaaaagaaaatgattgtggtagcctctacatataactagtttgtatgtnattcccagtgcactgttgaatatattggaaaaaaagatgattgaagcatttactaaaatttttgttatttaaaagaccaaatccctatggatttgggagattgtttcagcagagaagtggctcagaaagacagtnacaaaggctatgactaaatggatacagttctggaaagagaacaaactgcagagtaccacagggataatgttaggccttcttacaaatgatttgcaagaaggaactcgggaacatctccaaacccactggttgcattcaactctgcttgctgacagtgacaaattgaaaagactggagccagttagggttggaagctgagtttcaacaaaggcagacatatgatagtyaaggaaaataatataaaacatattaaagatgacaggctccacgctatcgattaccacatagatacaaagatacctaatgactactggaatatatttcctggaaacagtcaactatattactgtnaaaatcaatcaaatcctggatacagacaggaaagctagcagaagatatgttctacgcttgtttaaacgatggtacatcatctagtatagtttgtcatgtgtacactggaaccccagaaagacacagagtagaagacctcgaaaagcaactcaaataatatagaagacaaggctggggtttaggaagagcaagatgccaaaatcaaaatcagggcttkgcaaatgatggcccaggggccaaatccagctggctgcctgcttttatwaatgaagttttactggaacacagccatgctcattcgtttatgttttatctgtggctgttttcacaatacaacagcagagttgagtagctgcaatagagttcatctgcctyatggrgcyaaaatatttwctgtctggctttaragaaargkttgctgtycctgwytaatcwtaatgwtraktccaacacttaattctgaaattaattagaamcgaatcngggcgggagataagtatga

SEQ ID NO: 411630 - DNA, 857 bp, Homo Sapiens
  misc_feature (165)..(345): n is a, c, g, or t
  misc_feature (445)..(545): n is a, c, g, or t
  misc_feature (675)..(791): n is a, c, g, or t
aatttttttgtgaataaaggcacgaattatcgagtgttggtggcactatggagcaactaaagcactcagttattgctgatggggatgcaaatcagtggaaacactttgcaaaacttttggcattacctattaaagctaaacacaatcctaccctataacccaatnnnnnnnnnnnnnnnnnnnnnnnnnnnnnnnnnnnnnnnnnnnnnnnnnnnnnnnnnnnnnnnnnnnnnnnnnnnnnnnnnnnnnnnnnnnnnnnnnnnnnnnnnnnnnnnnnnnnnnnnnnnnnnnnnnnnnnnnnnnnnnnnnnnnnnnnnnnnnnnnnnnnnnnnnnnnnnnnnnnnncaaatgaaaaaaatgactcactaaaatacgtaacacaggtgaatctcattatgtgaagttcaagaacacaatctatggggatgaaaatcataataaagtnnnnnnnnnnnnnnnnnnnnnnnnnnnnnnnnnnnnnnnnnnnnnnnnnnnnnnnnnnnnnnnnnnnnnnnnnnnnnnnnnnnnnnnnnnnnnnnnnnnnnggatatataagtcaaagttatccagtataaatttaagatttgagtgctttacttataaatgatatctgaatgtaaaagcccaacaatgcattgatcaagttgactaaatggccttaaaatcaactttatnnnnnnnnnnnnnnnnnnnnnnnnnnnnnnnnnnnnnnnnnnnnnnnnnnnnnnnnnnnnnnnnnnnnnnnnnnnnnnnnnnnnnnnnnnnnnnnnnnnnnnnnnnnnnnnnnnnnnaaatttggtcaggtgggcgggggcaccaccagtaatccgcgctgaaggcaaacaaattacttgggc

SEQ ID NO: 411631 - DNA, 1156 bp, Homo Sapiens
  misc_feature (80)..(81): n is a, c, g, or t
  misc_feature (87)..(88): n is a, c, g, or t
  misc_feature (92)..(92): n is a, c, g, or t
  misc_feature (109)..(109): n is a, c, g, or t
  misc_feature (225)..(225): n is a, c, g, or t
  misc_feature (268)..(269): n is a, c, g, or t
  misc_feature (288)..(288): n is a, c, g, or t
  misc_feature (293)..(293): n is a, c, g, or t
  misc_feature (300)..(300): n is a, c, g, or t
  misc_feature (308)..(308): n is a, c, g, or t
  misc_feature (310)..(311): n is a, c, g, or t
  misc_feature (317)..(317): n is a, c, g, or t
  misc_feature (319)..(320): n is a, c, g, or t
  misc_feature (471)..(471): n is a, c, g, or t
  misc_feature (510)..(510): n is a, c, g, or t
  misc_feature (526)..(526): n is a, c, g, or t
  misc_feature (530)..(531): n is a, c, g, or t
  misc_feature (538)..(538): n is a, c, g, or t
  misc_feature (543)..(543): n is a, c, g, or t
  misc_feature (552)..(552): n is a, c, g, or t
  misc_feature (554)..(554): n is a, c, g, or t
  misc_feature (558)..(558): n is a, c, g, or t
  misc_feature (593)..(593): n is a, c, g, or t
  misc_feature (597)..(597): n is a, c, g, or t
  misc_feature (601)..(604): n is a, c, g, or t
  misc_feature (606)..(607): n is a, c, g, or t
  misc_feature (609)..(609): n is a, c, g, or t
  misc_feature (613)..(613): n is a, c, g, or t
  misc_feature (617)..(617): n is a, c, g, or t
  misc_feature (621)..(621): n is a, c, g, or t
wagtaatatattaaaagaatagagarttgggtaaaaaaradrdgttaaataaattaagadtgrrtdkdtttggaggkgtnnttkttnntkgnttaaaaatwarrgaaanttaaakaaaaaggtgttatggaaaaagakataagataagakaggkaaatkggtaatagggattggdatttraaaaaatgawagataagaaagataaaaaaaatggttattgawagnwtatagagaaatwwaagawaaataagaaatgaaaagttaatannaaggggaaaagttaawttnaatanarggtgnaadtkkgnknnakgttntnnaataaagtgatgatataagataaaagattaaaggaaaatttattttagaaggattattaaagtttagtgaggatagaatgaggtgtgtgaatttgaaagggcgcaaatttwtattataaattaaaaaatgaagaaaatgataagaatatgntgagtaagctttagaagcaatttgcggctggaagatggngggcgcaagaatagtngctnntaatgcnttgcntaataaaantntgcntgggcaaggctggcaaagtgaggaaaggatggagnaaangctnnnnanngngtanttgngctntgggggtgaratgatattgatattaatggtgatgggagaaagggmggtgatataattatgmataatgtagsaaatgaagsgataaatggtgstgaagmaagaaagaaaagtgttrsmgtaaaggtatttgaggatgtsamagtaamaattaatgatggagttgaaggtggtatastggmtgmagmaagattamataaaaargaaggaaagatggaaaaggmatarggaaaamgraamgataattgmaatggtgatgaactggaawmgggagctagtagtyttwtmaaaaragagaggakgsgscgygcgawwtatgctcgaatwaagggsagtacacacttgthtttgtgtscgcagatttcacatvgmgatgkgbgaatstagatactaatgagmtttaakagtatwgtmastcmgccacamstaaaamsstgcsbgsscgcstacttagatgcaasktgssaaasttamaywatcaawatkgygmaaagygaggaaargtkktgmatatgsgsgttrsttaaaatadwttttt

SEQ ID NO: 411632 - DNA, 973 bp, Homo Sapiens
cccgggatggaaggcccaggggatggggacctgcctcccagagaggggctcagctggggagacaggacactttcatgctgaggcagcagtcaggagtcccaaggcccctgtggaaaagggcccttctcaggtctggtgatcaaagaaactcatcatccagggagagcacttggccttgctcgtgacagccccagttcctgccatgtgcatccctgtgtgttcctggagccggagctgctgctctcagtcccaggagagcctggcctttgggctcctcagacacttttctgcttgtccccctgcaatgtcacttgccttcctccagggtctggtccttgcctgtcttggatcaggacaggcagactcttcatactggagggggggatggtcagccgggcagggcctgggatggggcagggtctctaggagacaaaaccttgcagaaaaccttcataggtagagagaagtcgggttcctaagactaagtgttggtggctgtggtcagcttgtaaaggcagacgtgttctgaggccttcgaagggtgccatgtacccctcaaaggtcccctctgccctggacctctctgcctggattgtggggcacacagacaaacctcccactttttgaccccctgtagtttccagagggggtggccctcattgcagggtggcagtgtggagaggaggctgcctgtgacctaaggtgtgtatggcaggatgggaggtcacagcaagcttgaccaagatgtttagagcagcatttgttgacctgcctcctgctccatgctggaaatattcattgcttctggaaggaggtagaccgscargcaggatgctgagaggggtgcgggctkgaggyccgctgtgcgcctgctcagtgatgtattwttatctgttctgcttggctgsagagsataaaatggctyagctcgaggtggattgtgtcactttggaagttaatcgstttaatatga

SEQ ID NO: 411633 - DNA, 1188 bp, Homo Sapiens
  misc_feature (795)..(805): n is a, c, g, or t
aagtcatccattatcacagcattaaaactagttatatatttgaaatttaatatatatattgctcacgcaatcccctgtatagatatctatattttttaaacctgtaaattctaaaaacacaagtaacatatttacattcaagggtgggtttgcagtgtctaaaactggagaagagaggcacatactaatcaatatgactgattaagatgtttgtgctaagatactcactgaaaaaacagattcttggaagaaatctgaaaaagacgccttctcatttaaagagatagctataaaatcagattactttgccaaaaaatataaccgtaatcattaaacaacaagaatacaattacaataagcatttatcctaattcatagtaagcaacaaaatgtattatttaataataactatcagttgtgtggatggtatttgataaaacactttcttcttttagtgaattggtaatgtatagaattgctcttttgacatcacaactgggaattgttcttccattttcttcaaacccccatgaaataattcatgaattaagttacatttttttgcagccacaggtctgcttctgacaaccccctgtgctgtccttacatttgtagtagtcttcaaaattttaaagtgcatccaggaaccctccattgtctgctcaacattatcatattttcaccatttcattgatagctctccagatcatatctatcattttacatccaacatgatattttcctccttcccccacttcctatggtctccagaactatcagttgcaagcgagtagnnnnnnnnnnnaggtattaaaggtcaaaactgttcaccagtatgcataataaatgtcagtaagtcagtacacagtagtggtaatagtcccgttttaaaacacacctaactatgtgtatcatgtaaatcccgcaatgtgtagggtaattgtattatagtatgtctaagtttactgtacaatttcgtctattacaatcagtttgtgtgtttattctaataatttggtcaaagtaaaaaaagttagttcgtttcacaaaatcagtgcaacaagtaaagaaaaaaagtaataggtaacaagtccaccaaaggtgtcaaaccccaacgttgagtccccccaccgtgtgtaacaccaccaataaacgggttggtcccttaaccacgttttacccaaatat

SEQ ID NO: 411634 - DNA, 850 bp, Homo Sapiens
  misc_feature (595)..(595): n is a, c, g, or t
tacatattttctgaggtcatggtgcttattctattgtcagaacagattggacagaggtggatttctgaagaagcaaatgcagcttcagttttaggacccctcacttggattggtctctccaagaccctgtgcttaattttatacattttcttaaaagggtgcctctaaaatgggaaagttttaggccttatatagcctggatccacacctgttttggagtcagataaaagttgggtatggggctctgtgtgattctgtatagttttctaaattttctgagcctgttttctgacctgtaaaatagagaaaaccatgtctatcttacaaggttatttgttggcctaaattaaatttagaggcagtacactgctatggagaatgcctatttgagtcagctctaacttacctagctctgtgacctttgacaggctccctttgctcccattatctgtatcactctcatggcatttgttttcaagattgcatttgtctatgcaaagaataagggcctggcacatccataagtactcaatggattatgtttcctttttccctattctaactcagcattatttggtgccttttatatgacttnccttttattttatcagaagtgatggctgaagcccacaacaatatgaccactctgaggctacagaatcctaagctgggatattcatattcttttcaaagagaaaaagctggaacaaaatccccagattcgaaacactaccgaaagatgaccctgggaggagacaaaaggttttatgaatgccaggatggttgaaaatcctccccggaaaaaggggttctaacgttcctatgaagaaccccctcggtcaaagacctt

SEQ ID NO: 411635 - DNA, 903 bp, Homo Sapiens
  misc_feature (287)..(299): n is a, c, g, or t
  misc_feature (863)..(863): n is a, c, g, or t
aataaggagaacacaggtagaacttacttttgagaactaatcaaactatatcactctaacacattggtttttagacacagaataaatggttcggttttaagcacacgtagtttctctgcgtgaattactcaagtaattgtgtctctgcagatcagggtacattcagtgcatatctgtagaattgtatcatttcagtaaaatggagagtctgcataatcacattcaccccattttagaagacaactgagaacatgacagaacagcactcaactccgtgtctcctttgnnnnnnnnnnnnngtgccaagttatcccatgaattcttcccaaagtgttaacatggaattgaaataaagccatacgaaatagcataaaaaatgtgaaagggtgtcatgtatgaaactcaaatgtcttaccacttaaaatataacacagcttttatgtgaacaaatacaataattcccattttatctaaatgaactctagaacagttgaacaggcttgaaaatccagtaccacagaaagaagtaaggagctgcacccattgagaaggtgagaaagggaagaagactaagcagccagctcaaagtgggggagcccagaggcttctccccttgatcacttctccccttccccaaataatactaacccaggcttccttatttatattacaaggtaacagctttttttggtccaaaggcattggggaaaccgtacccttctctctattggaaaaactatcaacttgggggcgccattctctctttgcttccccgttataaagccccgatttcccactcccgcgtttgttcccacaactttcctttcctatcctagtcccatttacacaccctttttaaattntattaaccctcattccttccacaaccctttttacctaaca

SEQ ID NO: 411636 - DNA, 933 bp, Homo Sapiens
  misc_feature (29)..(29): n is a, c, g, or t
  misc_feature (43)..(43): n is a, c, g, or t
  misc_feature (859)..(888): n is a, c, g, or t
ttttaatgtacccgtttttccaatagtgnacccttatacctgntaggtaattttcaccccaccctcccctcttcagctgtccccagtgtctgttatttctgtcttcatgtccatgtatactattgattagctcccacttgcaaatgagaacacgtggtatttgattttctgtttctgggttagttcacttaggatgatggtctccagctccatgttgctgcaaaggacatgatttcgttctttttttatggctgcctcttttgtttcttaaatctgaatttccatgtggcttcaatgctagtctggcctaccctttccttcccaaagtcaccaccaactcactcccacccccacctcatgcagtgcacccctcacagcccccacccttggcagtgacatttggatttccagggcctttcctgatcctttagagacatcctctcccggccaagtcctgcaagggagacttgagtcagaggttcgatgggctggggtgaggtgggccacacaattaccacacccactcccaggcctattcccggtgatctaagcacacagaagcaggctggtacttatggaagaaggcaccagtgtatgccagagcttatgatggcgtgaggacccaaatgaaagatagatattgttagtggttgttgggagaaggaaggctggaagtgggggtactttttggggctgctttcaagagcttccacccaccagcacaagtttttctagctggcagaagaaggcagaaacaagcttgattttgacagacaccgcctgaagctccattttagttgcaaagaccttttcttattcaactgctttttgcccaagctcctttgcaaagccataggannnnnnnnnnnnnnnnnnnnnnnnnnnnnnaggaaatgagatttggttttttcccgcatgagaagcggggcccaa

SEQ ID NO: 411637 - DNA, 1201 bp, Homo Sapiens
  misc_feature (37)..(37): n is a, c, g, or t
  misc_feature (91)..(91): n is a, c, g, or t
  misc_feature (101)..(104): n is a, c, g, or t
  misc_feature (106)..(106): n is a, c, g, or t
  misc_feature (108)..(108): n is a, c, g, or t
  misc_feature (152)..(152): n is a, c, g, or t
  misc_feature (158)..(158): n is a, c, g, or t
  misc_feature (187)..(187): n is a, c, g, or t
  misc_feature (196)..(196): n is a, c, g, or t
  misc_feature (237)..(237): n is a, c, g, or t
  misc_feature (245)..(245): n is a, c, g, or t
  misc_feature (256)..(256): n is a, c, g, or t
  misc_feature (258)..(258): n is a, c, g, or t
  misc_feature (267)..(267): n is a, c, g, or t
  misc_feature (272)..(272): n is a, c, g, or t
  misc_feature (281)..(281): n is a, c, g, or t
  misc_feature (283)..(283): n is a, c, g, or t
  misc_feature (341)..(342): n is a, c, g, or t
  misc_feature (344)..(344): n is a, c, g, or t
  misc_feature (348)..(348): n is a, c, g, or t
  misc_feature (365)..(365): n is a, c, g, or t
  misc_feature (371)..(371): n is a, c, g, or t
  misc_feature (381)..(381): n is a, c, g, or t
  misc_feature (386)..(386): n is a, c, g, or t
  misc_feature (388)..(388): n is a, c, g, or t
  misc_feature (394)..(394): n is a, c, g, or t
  misc_feature (402)..(402): n is a, c, g, or t
  misc_feature (404)..(404): n is a, c, g, or t
  misc_feature (410)..(410): n is a, c, g, or t
  misc_feature (418)..(418): n is a, c, g, or t
  misc_feature (425)..(425): n is a, c, g, or t
  misc_feature (429)..(430): n is a, c, g, or t
  misc_feature (436)..(436): n is a, c, g, or t
  misc_feature (464)..(500): n is a, c, g, or t
  misc_feature (506)..(506): n is a, c, g, or t
  misc_feature (508)..(508): n is a, c, g, or t
  misc_feature (514)..(514): n is a, c, g, or t
  misc_feature (517)..(517): n is a, c, g, or t
  misc_feature (534)..(534): n is a, c, g, or t
  misc_feature (539)..(539): n is a, c, g, or t
  misc_feature (545)..(546): n is a, c, g, or t
  misc_feature (550)..(550): n is a, c, g, or t
  misc_feature (559)..(559): n is a, c, g, or t
  misc_feature (561)..(561): n is a, c, g, or t
  misc_feature (610)..(610): n is a, c, g, or t
  misc_feature (643)..(643): n is a, c, g, or t
  misc_feature (646)..(646): n is a, c, g, or t
  misc_feature (746)..(746): n is a, c, g, or t
  misc_feature (776)..(797): n is a, c, g, or t
mmccataccmmcctttttttcccccgggcacctkcangtacctttgtatagawtatacagayagakgcatcacacsacagggccccccgcnggstccgggnnnngncnctttymccctggggggkgcagctctaatcccaggdktggkkbknkgbkgnggckgggkggcaaggvgcaakgkaakagnscmmamkancgaacaagagsrggrsgagactttwwatgggrrgcaagagnaaaawatnagraggtgttncncaatwtgcncaggncgggggycncnccagatgcgaaaggccccacgcgcaraaggsgggsccgcggcgggggggaaaaaagcnnanaacncrgggggsggsggcccnccccanaataaccgcncttcncnccaacngaaaaaancnccgccngcccaacncagaaancaannaaagcngcccccacagcaggaaaccccggaggannnnnnnnnnnnnnnnnnnnnnnnnnnnnnnnnnnnnaaccgncncccacnccncggcgaaatgggggganaaaanggcggnnaagnaaaccgagngngggaggcgcaggrgcgagccgcgggcaggcgagcgagcgaacgagcgancgggcccccagccggagggccgcaacgccmaanagnagmaaaatyaaaaataagaaagcaaaataaagcccttatctywgccttatccgtgccaaaaatttwawgtccgccctcaatcwtccggcgcaagcccaanatcaagaggwgagycagawtctcgaagyannnnnnnnnnnnnnnnnnnnnntacatgcgrgctcgtgcgcawgcgtgygtatgcccyttaagcgcgcaaacgcgcgcaatwccctytaccgagagcgawatctccagccctccatccgccccagcagtctccacaccaagcaagccytcactckatwgatatwckactgaagaacarckrwgaayccacagckttgwcgsggcaakyttccatttmkgaggtcaaaagacygwtawtaatatagakacaygsatwcgcaaatakcctgcctcskcccctgaycgtttcgaakbwytgcccmggggggtyttaawtctgctgcacgrtcggggsmaamhcaggmtcagktawsccttttttttkgvcstgggsgbgggvgtgggttyggggrkstrrrcashcagsaaagcaccccgcavaaaavc

SEQ ID NO: 411638 - DNA, 593 bp, Homo Sapiens
  misc_feature (510)..(531): n is a, c, g, or t
tgagcggtctgtggccctgggcacctccatccgccgcggcgcccctccaccatctaccttccgcctgactggggcttgcctttccgggctggcgggtgccacttcggataaaccctttggactcctaactccaatcaggtgtctgctttgttgaggactcacagacacagtctcctttcttcaagatctttacaatgcaagacctcactaacacacagggatggtctcccagagggtctgtgctgttccttcactcagaacatcaagatgcactgaagtaaggatcctctattctacagttcctgctagctgagctattccatgggggcttcagcaggaaattccaaggttggctttgacaagctaaggccggctggtggagcacatcgagttctggaggttcatgtgtgttttcatgaatttytgtctgcccgtagcagataaagagttgttgccccactcctcctggggtcttctattttcctgggaggaatttctggattaactgannnnnnnnnnnnnnnnnnnnnnccttttgaagcatcaacagtaattctgagttcttagggacaatgcagattaaatccacaata

SEQ ID NO: 411639 - DNA, 904 bp, Homo Sapiens
  misc_feature (67)..(67): n is a, c, g, or t
  misc_feature (82)..(82): n is a, c, g, or t
  misc_feature (831)..(831): n is a, c, g, or t
  misc_feature (884)..(884): n is a, c, g, or t
agagacatggcgataattatgctgaagaggaaatctggaaacctgaaagatgcgacattgcttttanccaacacctccacantttcctatacataaaaataaattatactagtgtaataccctagaaatgtataaaatgtgacaaagcctttatatgattgtcatacatgattgtaggtgatagaagtcatactgccaaaactcctgtaagtgtgaagaatgtggcaaaatattttattagtgcttataccttatttcacaggaaagctcttatccttgagaaaaattgtgcaaatacaaagaatatggaaaaaccattaatgcctactcacatcttactgaacagaagaaggttcatagttaataaagcattaaaagtgcaattactgtcaaaaaatctttcagaaaatagaagtctttaaagtgaagaatatttattctgaagacagccattacaaatataaagggggttgtagtgcctttacttgtgtcacagatcttagtgcacacatgtagtactagaggaaaaccctgaagcagttgctcaagctttgtttcagggaatcaagggaatttatattgagaatagtactgcaaatgtaatgaatggaaagacttttcttttccaaaaatgacagcttagaaaacaccagagggtttataccaaaatatatttttgcagatgcagtaaatatgaaaaaatatttaattcaaaattgattctatgtaaatatcagagaattttccatagaaatattaaggcactgacacttcagacattacactaaatcagaatgttcagtataaaaactaatccacagctacagctgntagataaaatatttctatataattttttaaaaagtggatttttgagcactgtnaatacattgaaagatacttg

SEQ ID NO: 411640 - DNA, 603 bp, Homo Sapiens
  misc_feature (324)..(324): n is a, c, g, or t
  misc_feature (384)..(384): n is a, c, g, or t
  misc_feature (423)..(423): n is a, c, g, or t
gtggctactgtattagacaatacaactcaactctaggcagtggtttcttaataggcaggtagtataaccagattatgtcttagattatagttataatatggagaatgcattgaacagggacaagaccaaaaacagtaaaatcagtcaaaagactctcggaataatctaggtaggtgtgtgtaaactttggcccccctttagttatcagtccttaattctactctgatttttttcagctaggatgtttatttgattagtaccataaagaccaagtaacaatgattaagcaagatagaaaattttcttgtcatataaatgtgctgnttgagggcaaaccagagacttctagaagcccttctcacaaagttcttcaggggtctatgntcttctagctgcttttggacctactgaggattgccttgntcacatgggtgaaacaggatcacagcctgcaagaggggaaagaaaaattgggacttagagcttctttaagcatggcagatgcaagttgctttacatttggctacatttatgtaagctaaacttggagatctgacacaagacgcacgtattaggaaggttatggcttaaggtgggaatttt

SEQ ID NO: 411641 - DNA, 1001 bp, Homo Sapiens
gcctgagacaaagactaaggttcaggtagtttatttagcagacaatcccaggaataagggaataagggaacatgagacagggtagtggatgaaaagtgaatgtaagggtctttagttgagatttttgctattgtcaacttgggtcttagttccagagacctactggacaattaacagaatatctactagaattgttcgcttgaataacaggaagctggagcctttatccactggttcttgccccattggttaaaggttgctccttctgtgctaacttgtgcatgggccaggtagactttccaacatcagaaggagcctggggacagtaaacggaaagctgcatggcccgtaattgaggtgaaatttgtcaacatgaagggaatctgtactcccatggtacagtctacaacaactgcagctgaaatcagtggtgggcagagaggacgagatgtggaacaccagagatacctgtggagtcctaattagaaaaaaggagttgggctggcaggactgaaagcaagcaaaaagaaaaagcaggtaagctacaagtttgtctttcttcacggtccaggacacagcccttctgtgcaaataactcacaatattcctgtgtccaggtatcaccagacccttggctgatagaaaaattgcaagttagtgccctgtaaccttgccataatcagtactgcattcagtactcggccgctcaagaaccatcctataaratttccagcaagactttgtttccctggagtcagctcctttcttgctgattctgcccattgctcccttgcaacatattttcatactttctctrawgaaatctgcctttttcamccacaactggkaaawttgggctcagatagtcactgcycagawagtcacyttcacccatgacatgkcttttacgtccmctcctggtccacttagwytgtcataccmcatawagttacmtgkcmmtagkctcawgctggtggagctcatcycmwaaaagcctaggc

SEQ ID NO: 411642 - DNA, 660 bp, Homo Sapiens
tggcttatagaagtatacatttgtgggagctcatgataaagacttactttaaagaatactgtatgtcttcttataaagaattgtaaaatagctaaggrggtcaggaatacgtgtatctatttgaaattaaagcaaattaaactgtccactctagaataatttttcaggragatgattaatgtaattcacggskgckaattattgttaaatagaatatagataaaaawtatwctgatccatatctgtctagtatataggkggstgcgtttgtttttaacatttgatagttgawaattttaaaattcattatagtgtatggcataaactttcaacatgrgctgaattcacacttcataaattcataaattttgatcatcataamagacatagaatatattactatgawatacaaaaactgataawagaaaagatgwattaawaaataaatatwcataataavmtgwaggrtgatgtaawwtawgatgaagawgcwgggttttwgaaagmaatcaaaacattcatggsaacaactaaacgacctgdaatccttactacaagtgacccaacatatagtttaatgatagatggmagcgatgaagaaatcaarttcagtwatmcttmcctrctaaatatagacagctacctacaaatkatttkctt

SEQ ID NO: 411643 - DNA, 953 bp, Homo Sapiens
  misc_feature (115)..(134): n is a, c, g, or t
  misc_feature (227)..(236): n is a, c, g, or t
tatattcctagaaagacagggaaggattactgctctgcagatacatgactaacaaggatagctggccatgcccagggctggtgttggttgaggaggtggtgatggtgcggggcannnnnnnnnnnnnnnnnnnncgcgcttgaagagttgtggaagtgttcatatataaaaagaattatttcatggttgcacacattaatgataggttgaataaatttttttctatnnnnnnnnnnccgtacgtgaggacttttttaattagcatactagaaataactcactttaagcttttgaaataacttccatctcctaacaccagatatacaaactgaatctagcccttaagatcctccccctaatatttatagagaatgacatttcaaccatattgcatctataaaagtgccatttctaactatatcactgtgatttttatccaaatgcctgaatctctgattatctaccatatacaaaagggtagagactacaggcttctatagaagaaactttatatattggtccgaatgatcttatatgtcataattcaccatctgatcaactctttcaggaaactatgacattaacttgaatacatgaaatctctttcatctttttcaatgcatgtgactgtgctatattatagattatctcctagatcgtatactttcatgacaaattaccatgagaatttgagcctgcaccaattctttataaaaatattggctgccatatctggaggaccctgttacagccaagattttgcactgttctccaaggtttaacagaagacatgcccccagccttatgcattgatgtacctttactttgtacaggttgcatttctagatgcctctataaatctttttgttaattaaattttccttgataattttttatatcagtggtacaaggttataatttattccttgcgacttgatattccccaataatcg

SEQ ID NO: 411644 - DNA, 1158 bp, Homo Sapiens
tcactccttaccactctacctcctcatctcgtcctacaccacgccgctctcgctccatcctgtgggtcatcttttttggctttccctcaaaactgcctttcttccctactcctttaccttccaaaacctcaaccaccctcttccccaaaactctccacaaactcaaattgcccaccaataacaagaatccaccacctctctcatcccccacacttaacaacacgactctctcctctcacccaatctcattaccaataatattcattaaactcttaatcaccctccttcctctctaatataaccacacctccccaatcttcactcttccttacgctattcgcaattttcacacccaactctcttaccacattcaactttttcttcttcaacatctttcttcatttctctacctttttcacttcttccacattatcctcttctccacacttaaccacaccatttacttctttttcacttccattacttctctccatccacttcaacaccctgttcccaaacacaaatatcaagttacttctattctttttcctccttctcaattcccataatcttaattaccttaaactcacttacatttctcacatttgtcccacaccacattttttaattaaccccctccatattaacaaccccaatctggccaacattatcatcaagcaaaccccccccactcacctccttcacctcaacattatccaccctcaattctccccaattcaaacccaccacatttatcatttttttattcatcgtctcttaaatccgacgtaattcctttcaacttatacacccccgcttgacctaaatcctactcccaaatatctttaatttcatcatcttctatttaccttaaatacatccgtacaaaatccacgcatcacatcctccactcaatcatcgccaatctccgaaaaaatccgttcaatttaaccccaaaacaaattccgttaatccaaaaacccccctttcccgcaaatcaaaacatactttaaaaccccactaattttaccaaacacacctaatcatatctaaaacccgataaccgtctcccccccttacccgaaacaaactcttttcacaaaaattccaaacccaaacaaatatttctcccccccgtcattaataccactaaccccc

SEQ ID NO: 411645 - DNA, 1036 bp, Homo Sapiens
  misc_feature (59)..(67): n is a, c, g, or t
  misc_feature (264)..(310): n is a, c, g, or t
  misc_feature (313)..(313): n is a, c, g, or t
gagatcattttattccctgggttctgaaaggaggcagctgaagtaatggcttcactgtnnnnnnnnnggataggaacaggcagggctggtgtggacaaaggcaagcagactcctaggcaggcagagatgggtgccaattaattgggcagaaacaatgaaaaggtctcagagaagcagagaaacccatatcccatcccacctatttttaaaaattgatgcctaggccgaacacatcagaagtaatcagtgggcaacactggtttnnnnnnnnnnnnnnnnnnnnnnnnnnnnnnnnnnnnnnnnnnnnnnntanatgttgagaatattcacttacaaaacttacgcgcattgtagaccgctgtttggtctgtcttgaggtttcgctgaaagttggacgtgtcagtatcgtgaccggtcagcgtgattggcctgagttgtagcgataatatagctttaatatatcttggccggttatgaggttgtgatggccactaaatggtgtctcgttgctagtgctctgttgcgaattgagttttctgatgtttccccggtttgttgtttctgtttgtgtttaacgatagcgtctaagactccatctcgaggcaggtaaggagccccgtgtttgtgacgtcttctgtttgtcttcttttatctcaaagtgttaatatgctcacattataataacgttcctttttgtttatcattacggcatagttgtttttttgctcctaacctggttcccttctatttcctatgtactgttgtcaccatcattgtgtcgtattgaatatcctcagttcgctctctccacccgtgcactgcccgcgccccaactcccattgtggcttccttcccgccgcccaccaatgggtgctccgctctgtatccattatcacactagggctcaacctcttcgcaatcatactcaatctctacatatttaattattttgtgtggtggtattgggggagggtgttacgttgaatatggttttgcatactcaccaattcttcttagtcagtgcttctgtaggccg

SEQ ID NO: 411646 - DNA, 568 bp, Homo Sapiens
tgtggtttcagtaacctttttatgcagtatttaaacacatcactttgtattcagaaaaatatctacccaatactctcttctctggaaatttctatttccaaccgtcattgaaaccaggatccctgttcaacccctctggaaagaaatcaacagcaaacaaggacctgtgtcacccacagaagatgcagctggcgataagggttaggagctgatctgttctatgaccatatggtgttgcagagcatggaatgtgctcagtgtgagttaggcatagacagaaaagtatctgttgggtgactgagtcaacttctcaacccattattctttatcatggaggaggaagccattcatatcagaggataacgctagtatccagcctcagatgaagaggatcttccgtaatagtacatgtgacattctcattttcaagacctcgttccatggccttttctactttgatccataggtagaataaagtacccaataatgatttttgttttgtccccgagatactataactgacctgtttgttctaaaacttgttaggcctcgtatctattctccaccc

SEQ ID NO: 411647 - DNA, 890 bp, Homo Sapiens
attsttcactsttsscatatagaaacactactsatgcctcasasatgaccatcatsststtctsststcacsasaatascaatscctsssactccaccaccaccataatctcctstcatcccacssacctscactcasaacscascaatgacaagaaataastsctgagcasttgtcatatgstsctggaagacatgctacttttccctgagggcgsaasacagcctgatgacsgtggtacaatcaatsacatctctstsctsssactcacctccttssssgcccassctsatcatttcacacasacacccctssatcctssaasccaastcctsctctcsstacactcssactssasstttsaccacatscascascattaaasscascatctcatcacagcagttsctgattatctgtttgagttaaasacaacatcatgggagttagggaaatttcggagtgtgatgctsgaaacccctctgtgaatscagagaaataaccgccactgaaaagagtgtcaataaaaatatcagagatcagctgctcaacaaagtatgagaactgagcctgaatgatcctsaggcgsacaggtgagaggctggggcctgccasatgatcatgctgggcccattggaattgttaccatcaagggtgttgattccaacatgtgctgtgggatcccatgagcaatctccstgactttccagtcattaagattaggcaccsagaagaggaaaaggaataaaatcaaactgatatttctggctgggaacasatgctgaattggatgagagarttcwtgaamttsaagagcactgawtcactctgcttartgtggrsagaggttmmatggasmvtgaaaamcycmvaattwrccaggatggtgg

SEQ ID NO: 411648 - DNA, 606 bp, Homo Sapiens
  misc_feature (82)..(82): n is a, c, g, or t
  misc_feature (134)..(135): n is a, c, g, or t
  misc_feature (185)..(197): n is a, c, g, or t
  misc_feature (512)..(512): n is a, c, g, or t
mcccctcctcaaactcaacaaaactcctcctwcccatatcmaccaccatctaataaccctcacaccacatcaccctcttatncactctcacaatmactaaattactatcaaatccaccttctacccaccttcannattacaatccaccaattacctwtttcaaattaaattttacatttctatannnnnnnnnnnnnawaacttaaywtataattttttawccattaaaaccawttcaatwtttaaccaccyaawaataacawcaaawaaawaaaatcatyccaaaaacmttcwaattaccaawtccmmtaaccaacacataccaacaacaaaaaacattaaaatataaaaaayaccawattwatcamacaawcccacaccacacwcctacatcaaacccmctttcccattcataaccctcacatcaccycccaaccctctcaaagaatatttattttaaataacttaaatataaatcctacatkatattttttaasaatttaacatggtgntttatattstcctatcaataccacytccccycaacccaccycmttctctttycattttgbtttaaaatmamcttatmtytttcataatcccaac

SEQ ID NO: 411649 - DNA, 742 bp, Homo Sapiens
  misc_feature (53)..(53): n is a, c, g, or t
  misc_feature (375)..(375): n is a, c, g, or t
  misc_feature (394)..(395): n is a, c, g, or t
aavvccgtvcctgtmcmtgtmcctctscctgtatttatatatatactccatcncacacccgggtaacaagctgctgggcaattcttctctctmgaagsgcsgscaccaacmccacttatatacctctmctcccaagsccagtaggctccagggcctccwtggaagaaaratttatatatcgaaagccactccmaaggcaattctatwaarawttwwaratctttctacaacwacagmsctcccggctactttacagggatacaattcataagtmcctttctcttcctcctaaccacaaacwctatactggrggtacctataccctaaaatcctcacccctatatcawaaccccaaataccactcactaaaccatnctcatwacaagaaaagchnngtctagaggtacataacccaatccccttcctcctatcctgtacactatggcttaaaaaaacaacagccaccacccagttccagtggccccacgaagcccccaktggctkgytgtccakctkggcaaacagtggcacccctcccagctcttctgagtggggagtcttccaggcctcctcagaggtcttccctttgcctccccaggacagggtgartmagagctcagcatttaawctcctckccaaartagagarcaagtmscccacagtgggsgkgtctgtaaawawtgtgamagtatttwwwwactgtgcggttttttttgaaaggggakgggkaarrggkagggtg

SEQ ID NO: 411650 - DNA, 1143 bp, Homo Sapiens
  misc_feature (197)..(197): n is a, c, g, or t
  misc_feature (218)..(218): n is a, c, g, or t
  misc_feature (223)..(223): n is a, c, g, or t
  misc_feature (230)..(230): n is a, c, g, or t
  misc_feature (238)..(239): n is a, c, g, or t
  misc_feature (244)..(245): n is a, c, g, or t
  misc_feature (263)..(263): n is a, c, g, or t
  misc_feature (268)..(268): n is a, c, g, or t
  misc_feature (274)..(274): n is a, c, g, or t
  misc_feature (281)..(281): n is a, c, g, or t
  misc_feature (284)..(284): n is a, c, g, or t
  misc_feature (288)..(288): n is a, c, g, or t
  misc_feature (290)..(290): n is a, c, g, or t
  misc_feature (298)..(299): n is a, c, g, or t
  misc_feature (301)..(301): n is a, c, g, or t
  misc_feature (304)..(305): n is a, c, g, or t
  misc_feature (326)..(326): n is a, c, g, or t
  misc_feature (329)..(329): n is a, c, g, or t
  misc_feature (338)..(338): n is a, c, g, or t
  misc_feature (343)..(343): n is a, c, g, or t
  misc_feature (361)..(361): n is a, c, g, or t
  misc_feature (365)..(365): n is a, c, g, or t
  misc_feature (367)..(368): n is a, c, g, or t
  misc_feature (380)..(380): n is a, c, g, or t
  misc_feature (398)..(399): n is a, c, g, or t
  misc_feature (406)..(406): n is a, c, g, or t
  misc_feature (409)..(409): n is a, c, g, or t
  misc_feature (436)..(436): n is a, c, g, or t
  misc_feature (445)..(445): n is a, c, g, or t
  misc_feature (454)..(455): n is a, c, g, or t
  misc_feature (458)..(458): n is a, c, g, or t
  misc_feature (463)..(464): n is a, c, g, or t
  misc_feature (472)..(472): n is a, c, g, or t
  misc_feature (493)..(493): n is a, c, g, or t
  misc_feature (505)..(505): n is a, c, g, or t
  misc_feature (508)..(508): n is a, c, g, or t
  misc_feature (511)..(512): n is a, c, g, or t
  misc_feature (520)..(520): n is a, c, g, or t
  misc_feature (523)..(523): n is a, c, g, or t
  misc_feature (543)..(543): n is a, c, g, or t
  misc_feature (546)..(546): n is a, c, g, or t
  misc_feature (557)..(557): n is a, c, g, or t
  misc_feature (564)..(564): n is a, c, g, or t
  misc_feature (568)..(568): n is a, c, g, or t
  misc_feature (572)..(572): n is a, c, g, or t
  misc_feature (575)..(575): n is a, c, g, or t
  misc_feature (578)..(578): n is a, c, g, or t
  misc_feature (580)..(580): n is a, c, g, or t
  misc_feature (599)..(599): n is a, c, g, or t
  misc_feature (787)..(787): n is a, c, g, or t
  misc_feature (1122)..(1122): n is a, c, g, or t
ccgcatcttcttttgcgtcgcmagccgagccamagtcgckcatamacmaggggkaaggggaaggktgtwgttaaasgakkktstmttatkgssagaattcgaataacccatcakggtaaagatccgaaatgccagaggcggcaaagaatgcaaaaaggtaggcaaagaaaagaatgccgggatagtgtaaaatagcnggaataaatgccatttggaantccanaattatnctagctcnnacccnncaggcgattatttccttnttaangataangaggaanccncacncngaaagaanntnganncgctcctcttcatcctcagtntgnacgttgccncgaanatccacgaggatwttaangccncnnccagccccagangggcamtccccttcaaanncccctanttngagagctaaaagtgcttttgcaaaatntcggacgtngtccgctcnnaangctcnntgttttantatcawtattcttttgwtcantgcaagaagcanaanaannatgcaggncanataatccaaatcctatgaangcnattagggccgntacgccnttcntgtntcnaanancgwacgctaagagagcawnaaatttkctagcgcccgccaaaagaacccstgtgttgtcaytctgccaacacccyctgatatcscgaagatgaaagyaatgagaagccactgcaaatcccagcgcctcwtacgaggaaatctcagcrtwtcctawcagatwgccaagsccagggaaygcgaawacaggcwaacacgcgaacgscgccnaagcraagcaacgwggcgsggaagcaawstgmgcagccatgamcatccgcgcacwgtcacgaccsctcaaaagatttccagaagccyagaaarcacacaaccgtcgakagwgtavggaaatctstaagmaggmggaaarggcaacascccvrccagrtatrtaacaaarggygcaccgagggcktcgagmaaacargtscgaaacawagtcgcgggmgsaksyycaawggcgcmamgakaawcccktsacamacccacwaatwaaaagaatawaactvavgsgggasccgcaagttgcccmcacktaggccbsgmaggscrgraccggaaagcangcgaktttmcgkgrgraadaa

SEQ ID NO: 411651 - DNA, 145 bp, Homo Sapiens
  misc_feature (49)..(50): n is a, c, g, or t
ggtktkkkgtgaaakkkkkkkkgkktgtkgttgadaggkgaagrggkgnnagkgttcagakwaggkgagakctkggggtcckggggggttggggaagkgcatgggcctctggttccagtkcaggasggccagggggaatkgggag

SEQ ID NO: 411652 - DNA, 318 bp, Homo Sapiens
  misc_feature (132)..(157): n is a, c, g, or t
ctgctttgtttatgggccgaacacaaaacttttcacctgatgggagaaaccatttaaacctcaaattaagcaacccacagaaccaggaagttcaaggaccatgtctgttttcaccacgatgtcttthsccannnnnnnnnnnnnnnnnnnnnnnnnnactaagggcagggtattgtatctgccagactgggtatttgttgaacaagcgagtwttttcgcctattagcttagtttttaaggaaatcattttttacttgattcatcatagctttaattctattacatactacaataaaaatttgacaagactgataaaaa

SEQ ID NO: 411653 - DNA, 1201 bp, Homo Sapiens
tacgctcacactatacaacaactttctacaaaaaaccaccctcctaccgcctccccaattccccccataatatactcacctacaactatcgccacaaaactcaaattcctaatcccccccatccacctccctcattccctgtccacacaattcccccatcacctttctttcaacaacatacaaccgcaaacttgcaacacaaaatcactttctcacatcacttttctaaaaatcgcctctgcctatcatcaaacctcctcttattccctccacatctttctcctttcgcccactcaaccacacatacacaccatacttaaacccaaacttcttgctgcaaacaacctcacaaaaaacttcgcttccgcatacacaaaaagcagcgcgacagcatcaccatctcctatattttcaccacacctcactaaaacttcacttcttcacctcgcgyctactccacacacattaacaacactccactcctctttcctcccaccctattcctcctcctttcattcacactattcaccattctcaccgctaacaccgctacattcccttccccctcctctctctcaccatcacctttaccatatacaacgcgctctcagtccaacctatccacaaatcacatcaacgcccacccattcacgcgccatatctgcgcaatctgcaacttgcctatagtctgcasgcacttcgcttgcacaagctagcactgaattgctscctcttgcgctgcatgygcaamctsccacgcataaaasgcaactcaggcsccsctcttwsttagcttgcatgcattttacttgcattgctctgcaagcttbtgccactgcttgcatgctgssctattttaasctaatgcttksgctgcgcttgcttttaaatggctctgcarmactaactgcatttttksgcctcytcatttttcamykctttcarctgcttkcctcyttattttatgcaamsscccattcagsccacagcatwgcrtymtttattbtaggcamttkscmaaataarcaatgcttaaarsmtkgcyatkgccyaaaawtccagccaaaaatrccckscmttgcarssccaaagscgcaatgcaaaagscccaaaataattwgbtrgcsstkcwtktttaaagsscctttttmtttymttttasssscccgscccmgsccamaaccarsyttcasctkcmatb

SEQ ID NO: 411654 - DNA, 951 bp, Homo Sapiens
  misc_feature (57)..(117): n is a, c, g, or t
  misc_feature (315)..(405): n is a, c, g, or t
  misc_feature (425)..(425): n is a, c, g, or t
gggcgtaggctcgttccggagggcgggcgccacggaggccggagtggtcgcagttcnnnnnnnnnnnnnnnnnnnnnnnnnnnnnnnnnnnnnnnnnnnnnnnnnnnnnnnnnnnnnamagctgcggcaccggcggggggcgtcctgaattggcggtcgaaggcgctgccagctcccraagggccgctcgggccccttycggcccgggtyttgtttggccgcagaacaaggcgggytgcrgcgcccgggthtwgcccttacctamagrctaaacachcagcmccgrggcagcagatmhaacaacmattttttaannnnnnnnnnnnnnnnnnnnnnnnnnnnnnnnnnnnnnnnnnnnnnnnnnnnnnnnnnnnnnnnnnnnnnnnnnnnnnnnnnnnnnnnnnntaacttaatcatctacaaantagcgctgggcaaagtgaaggcttcctgatctcamaavcacgttgtgggcttggaaaccgacggcagcctttagtcaattttggatcgctttgacttctccaacacggtttkgcatctctgaaaccttgagaactgtgatgggsagtggaaaraaragggaaaggtgcccatggsgtccgagcggggsaaggtcaarcacaactggagcagcacgtcggaagggtgtccccgcaarcscatgcmctcccgggagccctgtgatgtggccccctccarccggccaactcarargtctdcvtcgcgttctggagggcccaacamccccaaacgcctkaaaacccaaaaagaggacgatrtkggtttctcgsggaggttmtcctkggggtcatcccgcsgcagaaatmamtyctcctcctcsttttctctmcatttcttkggscctkgtgtkggsggggcggctycmmagsttcctymtttgmamaatcgggggttytttttthmggggatycctcttbgtcttgcmaa

SEQ ID NO: 411655 - DNA, 1201 bp, Homo Sapiens
  misc_feature (70)..(70): n is a, c, g, or t
  misc_feature (399)..(399): n is a, c, g, or t
gamtwtcwwgcaacgmtccacaccagagattagataaatgcactaaaagataaaaatacaaacctatcgnctatataaaaattgatataaaattcgcccccgatgtttcgtgccccacgttccgggacggaacattatcacataaacgagatcaaatcggaaatgacgcgacgcgtatacgcacatcataggccaatggtggggcggacgatcgtcatctcatacgaacgaacgccgtctaacgtaaatccgccaggcttgaaaacacctttaaacggaaatgcgttgatctctcttaatattaattcatgatgtttgtgcaaaaccgccggcgcaattggggaatgggaatgacgaacggcgaccgccataatggacgtgctttgcgcctttcttcgngtttggatcgtgttttyccggaaacggactaaaaaccccccgaaatggtggtgggcgtccctttacctgaaaatctttcccctgtcatgctccacttcccacgcttccgaacgattccaaccctgaacgcctccacatccgatgtcccgccggcggggtaggcaatgattcataacggaacgcagaccctgamacacgcgcccaaacggtccgcgtgtaccccccaccataccggcacatgaaacggggggggcccgaatctcatacggcgmaaatggggtgcacggccgacccgcccgcccctcacaccgtattcctccaaccccacgcccgmaccacgacgggcccaatgcgaatgcacgtgatgaaacaacsaaataacggaactgaaatgccaaamgcacgtaaataaaaayatcggccctgtaataaaatcggatcgctcgccacactacacacgaggcgtttcgcccgattatmctgcacgttactyccactatcactttyatcttggcgcctcactgtgcctcctctgtctctmatgctatttctgggcccacctttmcagccyccatagccccaacaatgscccaaayaaaaaccccaaaaacyccaattaawgscagcscssccmawatascwtcyaarssccscatcwttaaatattaaaaatgbgscwatgsscstgswaaaawtgsttttstawawtsccagcttsccassccctawatsctwtaatatscvssgsscaagsctssmssabcawtatatsaaaadvasgswwarsssssaaawtwaavaa

SEQ ID NO: 411656 - DNA, 972 bp, Homo Sapiens
  misc_feature (587)..(587): n is a, c, g, or t
tgctctaagtggttcttctaactttgaataaaatgtctcttacatcatgaactaaatgaaatttgacatgccaaggctattccaggaggctgaaagtttggaggcagtaattctctactggggctgtctgccttaggacaaaattcactttattttgctttaggcccagttctaaggtttcccactagaaacaaattgctttttataccacagttcttatacaattatacatttggkagaatttataaggkgacaattgccaagaaatacagcctgamcmcaggtgcagagtagagagagactgaaattcttcttggacccagcacttgagcagggataatttatgagtagttctgtttgccacactaaagcaacaccacccccagaatttcacaactcttgtttctcctcagttggcaaatgttgtttttggtttgctagttcygttttataaagatgtaaaagacttgcagtctttcatttaaragacatccagctgggggagcgcgagtggaaatcmtcgtgcatataattacmatggggcagtaataagcatttatackgcaagtttaatcatttacagcggncacatttaagagcccatttagtgaccgtgaacaaaagcgacagtgtggcatagtggttmtaaatamtggmtgaatttagaatmaamtggggagmtttaaaaaggwaaaaaagagtwcatgggmaaarctactggagamtttgwtttattmtgtatgtggaagggmwaaggaatatgtgtttaaacgmmmcagatgatwctaatttgtagamagacttgwgaatgaacggtatatraagawggagahtragtttagagtgaaagttggaamwacacttagggtacggacgtgactacacacacacggactggcacggkgwatghacacactggtaacchaagacaggwmcgacactaggggcaccgmcaacacgrctttacygggg

SEQ ID NO: 411657 - DNA, 1201 bp, Homo Sapiens
  misc_feature (33)..(34): n is a, c, g, or t
  misc_feature (70)..(70): n is a, c, g, or t
  misc_feature (99)..(99): n is a, c, g, or t
  misc_feature (553)..(553): n is a, c, g, or t
  misc_feature (569)..(569): n is a, c, g, or t
  misc_feature (626)..(626): n is a, c, g, or t
  misc_feature (632)..(632): n is a, c, g, or t
  misc_feature (641)..(641): n is a, c, g, or t
  misc_feature (649)..(649): n is a, c, g, or t
tttttawarrrgktctattacttgtttacgacnncaggggtgtaawargagggacgggtgctcctcsggngccggtacgaccacccagtgcgaactcgnctatctgtactcctgcggttaccgggccggtcatctgcatggcagtgactgtccgaacgctttctgtttatataacaaacgcactatacgtggcgtcccggctccaccggacgacttgatgtcccactgtatagaataaacaactcgggaggtctttataaactatacgccatgccaccctgtcacctagtgttttctcaagcgcacttacgttaaacggggacgtacggcgcacgtggaattaatatctataccatgaccgtatttaatatttgcatcctaacaatacgacacgctattttctgggtgtagagatgggggcaagtacggatttatactaaacagcggaactctttacgcatctacactggggcgcccatttggcacctcaaacgatttaccgggacgcggtaaatgaggatttaacacgtgacttgtgaaaatggtttcttgngcagcgcgcctggtgntgcattttcaaccgtctcatgattgaccactttggttccaccggacagtaatgacangaaatnactgaattnccaattgntttactcaccacactgtttttctgcgatacgcttgggtayccgtggttggggaccgtggatggggacccgatcacgcttccaccactatacgacccgaccttgtttcgcgtcacggtatttttacgcctggcgtatattcgtgtattamatttatctgtcgcacacgtccacgtatgctatatatttatbttaaatcactctaaacttttagytttgctcgcaacaataactactactggaaaatatagmtgggagatgtayatatggcgaggatggctcwcactgkcgcwtgcttctacgggacgggaaatagctcgtgttgggtggdggyctyrtctgctgccsyggcgcgmtgatatgcaatamsgcgttwgagggggatrggmtattywtgcgtactgcgaccccaamahactaaggcacactgaacwctggggmaamtrawrygccacgmtatgkacgggggsgctsccaacyatgctyrctttatgctmtgsygyccacttcaacgcwamrcgccmsgggggggmtasgggwaggggttatgmaat

SEQ ID NO: 411658 - DNA, 928 bp, Homo Sapiens
  misc_feature (270)..(270): n is a, c, g, or t
atgattttttatcgtattctacatgccaactgctttacatttcccagccgcaagatatacscttcttyccccctgtccygccctgtctgtctgcstccccttcccccccgtcccattsgccctcmggtcccatttctacaattggtcttccagccsscattttkkctcatgtscsgtaststtscggttsstcgagcmssssssscccsabcccccsggcattatasctctttaattmstgacttgggttatcscmcctgaatssmagangahgssmsagststsatgtggtstgsstgatgbtttgkksaggtgagagagggsmtgcstgttgtgtggsmtstgtaagaagtcgcccstscgtdktgcktgcggcggaattactaaacgwttctgwgtcgacgctgaccatttgcttcaatttcttccttgggtcgcccgaaaaagwtamtttcgctttcttgggcttggatcgttcatagctataggtcaycmtcttttyctctctgttattctacctwatwgactctggggctcttttagcttttttccbacwtcctttttgcgctgtggcwtttgctwtgtgttgccattctccttstttcctttctggtctcctgtatatattattttcccgtatccbctmwttctcgttttaggagrccmtgtwcgcttgtgtttttawwtatgtmrttartttgctggtcccrtmttttctmwttctgattggtttcttgctttgataaggmatcatgtcctggtgacttgwtgtctttctratgttcactggttttcttggmtccmtgwatgctgccgggmtwtmctcamccattgtggttacttccctmrtctccacgcrmtagactctccttagmrmacmtggwtaccctrrgccttcttactttwtggatwgwrccwttgttgtccg

SEQ ID NO: 411659 - DNA, 964 bp, Homo Sapiens
  misc_feature (11)..(11): n is a, c, g, or t
  misc_feature (162)..(725): n is a, c, g, or t
ccctccykgtngggctcccabmcctgccmtgtgacaggtgtgggmaggggcctcmmmgctgamccmgmmtcccttcmcmcccmctmgggtggctmacmttmmmmmtcmgmcmattccmmgtgttgccaaggmagcagagaacttggamcctctcmcmctgcnnnnnnnnnnnnnnnnnnnnnnnnnnnnnnnnnnnnnnnnnnnnnnnnnnnnnnnnnnnnnnnnnnnnnnnnnnnnnnnnnnnnnnnnnnnnnnnnnnnnnnnnnnnnnnnnnnnnnnnnnnnnnnnnnnnnnnnnnnnnnnnnnnnnnnnnnnnnnnnnnnnnnnnnnnnnnnnnnnnnnnnnnnnnnnnnnnnnnnnnnnnnnnnnnnnnnnnnnnnnnnnnnnnnnnnnnnnnnnnnnnnnnnnnnnnnnnnnnnnnnnnnnnnnnnnnnnnnnnnnnnnnnnnnnnnnnnnnnnnnnnnnnnnnnnnnnnnnnnnnnnnnnnnnnnnnnnnnnnnnnnnnnnnnnnnnnnnnnnnnnnnnnnnnnnnnnnnnnnnnnnnnnnnnnnnnnnnnnnnnnnnnnnnnnnnnnnnnnnnnnnnnnnnnnnnnnnnnnnnnnnnnnnnnnnnnnnnnnnnnnnnnnnnnnnnnnnnnnnnnnnnnnnnnnnnnnnnnnnnnnnnnnnnnnnnnnnnnnnnnnnnnnnnnnnnnnnnnnnnnnnnnnnnnnnnnnnnnnnnnnnnntatcagtttctmamaatgaaccagaagctcacatagcctgcactggtcagggagactgacgctcmctcaggtgatctggaaggcgtggcccgtgcaggggaaggmmagtgmcmctycagcatgccmmggtgtgcmmggtccatttwmagamataaaartgagcttggcgagggcaccgtaramaggccggagsaatcaacagcagagcgctyttcmcctacagcaacyacctgaaagaa

SEQ ID NO: 411660 - DNA, 781 bp, Homo Sapiens
  misc_feature (180)..(184): n is a, c, g, or t
  misc_feature (236)..(236): n is a, c, g, or t
  misc_feature (256)..(257): n is a, c, g, or t
  misc_feature (263)..(263): n is a, c, g, or t
  misc_feature (265)..(265): n is a, c, g, or t
ctgctccctccgccgagcggcgtctttgtgtgcgggggtgtgggaggcgagcgcgagtccgcgcagccgccgagtgcccgctccctcccagggcgggtgggggcctctccgcrcmrmccgccgccgccgcctcgcgaggacgcccgthrcccgcgcdgcccgcaccgcgccgggcgcgcnnnnncgcgcccgcggccgctcgcacatgcccgarccgcagccccgcgagcaggcancgcdwwwwcccdcmccgcannccgggncnggctaaggkgtcgtacctcctcccggccggsggccgcggccccggsmcgmcggggggsgrcktkggccgsvvcgcctcyycakgaaggggccgaggggaaagaammmcggastacctcggragsacaaccggcaccgcgagcaggagaaggagggccgcgcgggccaggcggacatcgagcagctggagtcccsgcggccggacgccccctgcacctggccaccacgctgggggaccttgagtgtgcccgcgtgctcctsgcgcacggccagacktgtgcacgggagaatygcagcggctkgacagtgctycaggaggctgtgactacccgggaccttgagctggtgcagctggykscttcggtacsgggactaccagcgggttgttaacsggctggcgggcatccccgtgytcctggagamgckscsmasgcccaggacttctacgtkgagataaatkggagktcacaactkggkgccctggtcgtcaasatttgcctagtgacactacaaatgt

SEQ ID NO: 411661 - DNA, 517 bp, Homo Sapiens
tgtcagcttctttatagccgtacattatcagggaccagcacatacatatacccctccccacacttgctgtctcaaaatagtaatgaacatctttaggtcatcagctccagttctctgcctaaaaggtgtgggaggtaagtgtgaaccccagcatccgaattcaaagagaacaaacttctgttactttgtaagagcttttctataaagttctacaaagagaggagaactgggacgcaggagagaggtttctcccctctgcactcaggactatgcattcttttggaccgggtcactgaagagcaatttgctggaacaatttaattaacccaaaataatgatcaaattaatttaaagtctgattcccttagggtgcttaattaaattacactgtaattttaaaagttagaaaactgaaaacccaaggtttatatgccatttgaggaatgggtgaaagaattctttaaaaatgctcaaagtgtgaaaaaacggaaatcacattcaggccaccccaaagaaa

SEQ ID NO: 411662 - DNA, 1029 bp, Homo Sapiens
  misc_feature (563)..(563): n is a, c, g, or t
  misc_feature (565)..(565): n is a, c, g, or t
tcccaactggggccgagttcaccagggcccacgggaggcgagcgagccctcccaccagcactggccctccaggccccagtctgtgcctccatcaggagcccccctgggccctccaggacacagccgtgcacagcttgtaggagcctcccaggcccaacaagccaggccacccctggcccctggctgccctgccccctccctgagctccgagggccaggccagtgaccctgggcggggtagcattgggctgggggtcccacccttggtccccccagcagtcctactctgggggtcctggtcccaggagagcctcaaagtagcccttccccttgggagcctgagaccccatgagggaggcccccttctccttgggagcttgagaccccgtgaggaggcccccttccccttgggagcttgagaccccgtgaggaggcctcctcagcagcacaggaagggacggtcttcttgggggcagctggaagctcagcgtggccgggggaggggagttgctcagagaaggcatcagtgcagaaggggaaggagggcctggggcagcgaastgngnagtgtggggaggagctcagggtaagagaggcaccccacaaagtcacccgggctgtgggtcccaagagggcagggcatctctccaccaggctctggccttgaatgccctctccactgtggcgaaagggccctgcatagctgcccagggaccactcaggttctgggggaatcacagtccttgggcagtcccttcgcagtctgggttcctttgtgctccacaccacctgccccctggcttttcccccttctttcctcctaacttgtcgtccatcccatctgccgcagtggggtgggtgcatcatccgggcccagctggacggggctccagaggggcgagggctgagtctgtccagaagctctgtcctcagcacccaaaacagggaaatggacccacggggacctaatccatccctttgaatgacagagctgggaggtttggttagayagcgagkctcaggaacacag

SEQ ID NO: 411663 - DNA, 1046 bp, Homo Sapiens
  misc_feature (58)..(58): n is a, c, g, or t
  misc_feature (579)..(639): n is a, c, g, or t
kktcttttaacattataacaaaattattctatttwaaaaccamccytgtcaaacsyancatctgcttataaactkgtggaacatttcaccaaatctccctccattcatctttttmtcccccctctcaacccctagctctcacttctctcttctttctcacttcccccttaacactctattctaacccctctaaaamacscactaaaactactaacctcataataatcacstttaacamaacccccaccactaacccaccctctcaccaaaattmaaacaacacttcctctttccccttcaatataaccccttctcatctctmatsccctcaacaaccactccacctccctctcactacccctactcatcccccttcaaccccccatcacaccacatccccacctactccccttccttctcacttaccttcctcaacttcacattcaccttscmcacctccccttcacccactccctcatccaccttcttccccaccaaatcaaccccaaccccctacttctctccatccctccacacctccatctcccccatcacctccttcctcaaccacttactcannnnnnnnnnnnnnnnnnnnnnnnnnnnnnnnnnnnnnnnnnnnnnnnnnnnnnnnnnnnnaccgatcatccccgccccattctkcaaccsataccsskscacctgccsctkgatgtkcacctkctccaccccctkctcctksacccactksacatccatstgcacctcaaactstgcaatstgacacacaatsccatsatcctkcatctgctsaaacksccccccaaccatgatstgaatacaccctgtgckgcksacaaacatstksccctcctsacacccctcatccatgctgsckcacctsatacccctscatgssaccctgcackscctksatgssckcaatctccskgatgatgaccccssctccsaaaccccscacssctgssscacacccttgccacacatcaccatacctksctamcacccctaccttscccscaatsatcaaatctstssccccttga

SEQ ID NO: 411664 - DNA, 1087 bp, Homo Sapiens
  misc_feature (43)..(128): n is a, c, g, or t
  misc_feature (298)..(416): n is a, c, g, or t
  misc_feature (515)..(594): n is a, c, g, or t
  misc_feature (833)..(896): n is a, c, g, or t
cmwcaaaawamaacaactttctaaaaaaaccaccatcctaccnnnnnnnnnnnnnnnnnnnnnnnnnnnnnnnnnnnnnnnnnnnnnnnnnnnnnnnnnnnnnnnnnnnnnnnnnnnnnnnnnnnnnnttcccccctttccatcaccactscmsccagcatgtctcacaaactgccctacaaavtcsccsacatmcscmtggctgcctcsssacscaagsccctssacattcctsacaaccacatccccsccctcatccctatgccssacsstactcsccctccaacccactcaacsnnnnnnnnnnnnnnnnnnnnnnnnnnnnnnnnnnnnnnnnnnnnnnnnnnnnnnnnnnnnnnnnnnnnnnnnnnnnnnnnnnnnnnnnnnnnnnnnnnnnnnnnnnnnnnnnnnnnnnncatccccccsctccmattcccaacsctcccattcccctctatccmtccaacccccaaacccaccaccactacctctcctccattcaccacaccctctannnnnnnnnnnnnnnnnnnnnnnnnnnnnnnnnnnnnnnnnnnnnnnnnnnnnnnnnnnnnnnnnnnnnnnnnnnnnnnnttctgcmacccatcccacscatctctgaccagaaaccactsssstccacaacctctacaacatgatgcccaatcccatcctcaacctccctccyatcaatctcaatcactccckcaccaacaccaactktsacaacctctatccctccccccactccctcatacatsccatcaacccccccacacatctsatsattscccccaacctacccctcctaccaccctatsctcatctscccnnnnnnnnnnnnnnnnnnnnnnnnnnnnnnnnnnnnnnnnnnnnnnnnnnnnnnnnnnnnnnnntcaacccactccaccctsccatscasccctatsasctsaccaccatscatsasccctckcassassccaacatctkkgtcaccamcacascckckatksacatcatccttsccccscactttsagcacakcaascaksatsccattskskgkaaatkscacacttksacctgcamtccakskcaabgsctc

SEQ ID NO: 411665 - DNA, 839 bp, Homo Sapiens
tcccgggccgcctcttctcttgtctcctcctcctcccattgtttcccttttgccggtttgcactgttccagggagtcctttttcatgtctttaggagttgcatgagaatcgtcaatatttgcacttcatgtatttatttttcagcagactgagctgaaacattggttcaatcgatgtctcagtcctggagtgtgggttcagggaagcaaagccatgttgaaatcgctgtttgccatactagaaaattgggttttctgaggcaaagtccattaaggaaggstagatgcttataacattgcccatcattggtgatggtgagggaggtgggtataatagtataaagaagaaagctcacctgctttggcgtcatttcggattggtttgggtaggatgagagagtggagtcacatttatatccatctcagccttagtttcttcaagtaatgagacttaccttcaaaggacttataaatttttgtaaaatactttgccaatagtgaacttcccagaaaggttagtttctttcccttgttcctatgaagttttacctgattctaactcagaaataactgtattgacattttttgcttttgtcatgcttgagaaaaagcacacagatgaggcgaagtggcttgggtgtgaattttcttactttgtcaggggctttctcattattgaccttttgtctacttgtagataatatctctgcagcttgaggcatacttgcacacaccgtgtttacccagcagggagaacttcaacccactttattgcagtagctacttgacatattttggcagggatttaaaaaccaaaggttttgaaagggaccagcaatt

SEQ ID NO: 411666 - DNA, 1061 bp, Homo Sapiens
tcccgggatcaaaaacagaaaggaaggcctatgaaaatcagaccatgaagtcttatttttcattctttggtctagtaatttaatttcattttccagattattaatgctgcagtttattatatatttgatgctgaattgctgaatttgacttgtccaaatgacatcaatcctgcctttatctcattgccagaagtagtgaatatattgctttttatcctggtgaaagggaagattcaaagttgtttgaaggagaggggctgatctgtgtggtggcagtagaacatattctgattgatgtcctctaaccttgcaaacttgccagagcatccacctagttcaaccctagttcagttatcatggtggaaacccattatgggcactcttagcaactattgtgcctatatattaataagtctactgaataacaattagttcatccccttacttcttcagcccttacttccacattgaaagaagtaaaaagtagaactcaccaattgctatttaagcacatttgctagttttgtaaagtctatagacttctaagaggaatatatgaaacctcaagtaaatatattaaaacatgcacaaaataaatatatttatgatatatactttttattgtaactatcaaattttaatcaaaaaatttgtaatgctagggaaatctcaggttttactaatggaattatgaaaaaatattaatcttaatacaatttgtaaaatgccttaaaagttagatgttgaaatggacttccaggtcctgtagctacttctattgaaattatcatcataatgttttacaaaatgagaaaagtaatacagtttctctttccagttgccctgaagcagactaactgatgcttgtaaagatgtttctcagcataaatggattgttagagaatgaacttcagttaattttgaccttaaaaaaagtcacgtagatatgtatttcmtctgaaacattttcaagagtcttgcaacaagtcactctaaaatawttatgacwatgtttatgtgcccattmcttttggttttcaawmmwatcytmcctaagtgaa

SEQ ID NO: 411667 - DNA, 931 bp, Homo Sapiens
  misc_feature (47)..(47): n is a, c, g, or t
  misc_feature (219)..(219): n is a, c, g, or t
  misc_feature (222)..(222): n is a, c, g, or t
  misc_feature (231)..(231): n is a, c, g, or t
  misc_feature (238)..(238): n is a, c, g, or t
  misc_feature (241)..(241): n is a, c, g, or t
  misc_feature (265)..(265): n is a, c, g, or t
  misc_feature (268)..(268): n is a, c, g, or t
  misc_feature (271)..(271): n is a, c, g, or t
  misc_feature (274)..(274): n is a, c, g, or t
  misc_feature (326)..(326): n is a, c, g, or t
  misc_feature (332)..(332): n is a, c, g, or t
  misc_feature (337)..(337): n is a, c, g, or t
  misc_feature (342)..(342): n is a, c, g, or t
  misc_feature (344)..(344): n is a, c, g, or t
  misc_feature (347)..(348): n is a, c, g, or t
  misc_feature (350)..(350): n is a, c, g, or t
  misc_feature (353)..(353): n is a, c, g, or t
  misc_feature (360)..(360): n is a, c, g, or t
  misc_feature (363)..(363): n is a, c, g, or t
  misc_feature (371)..(371): n is a, c, g, or t
  misc_feature (390)..(390): n is a, c, g, or t
  misc_feature (395)..(396): n is a, c, g, or t
  misc_feature (399)..(399): n is a, c, g, or t
  misc_feature (403)..(403): n is a, c, g, or t
  misc_feature (405)..(406): n is a, c, g, or t
  misc_feature (408)..(409): n is a, c, g, or t
  misc_feature (411)..(412): n is a, c, g, or t
  misc_feature (417)..(418): n is a, c, g, or t
  misc_feature (420)..(420): n is a, c, g, or t
  misc_feature (424)..(424): n is a, c, g, or t
  misc_feature (465)..(465): n is a, c, g, or t
  misc_feature (468)..(468): n is a, c, g, or t
  misc_feature (501)..(501): n is a, c, g, or t
  misc_feature (504)..(504): n is a, c, g, or t
  misc_feature (513)..(513): n is a, c, g, or t
  misc_feature (519)..(519): n is a, c, g, or t
  misc_feature (522)..(522): n is a, c, g, or t
  misc_feature (530)..(531): n is a, c, g, or t
  misc_feature (533)..(533): n is a, c, g, or t
  misc_feature (558)..(559): n is a, c, g, or t
  misc_feature (568)..(568): n is a, c, g, or t
  misc_feature (573)..(573): n is a, c, g, or t
  misc_feature (582)..(582): n is a, c, g, or t
  misc_feature (584)..(586): n is a, c, g, or t
  misc_feature (591)..(591): n is a, c, g, or t
  misc_feature (594)..(594): n is a, c, g, or t
  misc_feature (600)..(601): n is a, c, g, or t
  misc_feature (603)..(603): n is a, c, g, or t
  misc_feature (609)..(609): n is a, c, g, or t
  misc_feature (614)..(616): n is a, c, g, or t
  misc_feature (619)..(620): n is a, c, g, or t
  misc_feature (622)..(622): n is a, c, g, or t
  misc_feature (625)..(625): n is a, c, g, or t
  misc_feature (629)..(630): n is a, c, g, or t
  misc_feature (632)..(632): n is a, c, g, or t
  misc_feature (635)..(636): n is a, c, g, or t
  misc_feature (638)..(639): n is a, c, g, or t
  misc_feature (641)..(641): n is a, c, g, or t
  misc_feature (644)..(644): n is a, c, g, or t
  misc_feature (647)..(650): n is a, c, g, or t
  misc_feature (662)..(662): n is a, c, g, or t
  misc_feature (671)..(671): n is a, c, g, or t
  misc_feature (674)..(674): n is a, c, g, or t
  misc_feature (677)..(677): n is a, c, g, or t
  misc_feature (680)..(680): n is a, c, g, or t
  misc_feature (683)..(683): n is a, c, g, or t
  misc_feature (696)..(696): n is a, c, g, or t
  misc_feature (698)..(699): n is a, c, g, or t
  misc_feature (706)..(706): n is a, c, g, or t
  misc_feature (709)..(709): n is a, c, g, or t
  misc_feature (711)..(712): n is a, c, g, or t
  misc_feature (719)..(719): n is a, c, g, or t
  misc_feature (721)..(721): n is a, c, g, or t
  misc_feature (723)..(723): n is a, c, g, or t
  misc_feature (733)..(733): n is a, c, g, or t
  misc_feature (737)..(737): n is a, c, g, or t
  misc_feature (742)..(742): n is a, c, g, or t
  misc_feature (748)..(748): n is a, c, g, or t
gatgcgggasagagagggaaagggggcgagataggcgcgcaggcggnagaagcctctgcctctgcctccccttctgcttgggccgcagccctccccgccccgccgaccgcggtcacacactctcggagcctccccgtgagcgggagcgcggcgcacggcgatgygccgaggcgggcgctgaggcggcgccgcgcgagcagcagcagaggcggcggcggnccncagcccagnccggcgncgncgccgagcccgggcccaaaggtgnggnggngcnccaagttcccgccatgagcagccggctcggggggctccgcggccccggggantcccgncccgncgggngnganngnagngccccgnggncccgacgngcttaaagttgtcgcttgncggtnncgncaangnngnntnngccgnngntcgngtcctcgccgccaccgcctcggccgctgcagctccgccggnagnatgtytcgaaggaagatttcgtccgagtccttnagntccctgggntccgantanctggagannancccggaggaggagggggagtgcccnntgtttaggntctgntggaatggnannnggagncgnccgggnngntggagnccaannnggnngnagnttgnngntgnngnngnttnggnnnngaatccggctgnttttktcgncgncgncgntgnmamtgccggggcnannagggtgnagngnnggaaggngntnaaacctggantcgntgggngagagnattcagccgcctgacggggccctygcctcagacgatacagcagactctcaagmggacactggagtattatgaacatcaagttattggttacarggatgcagaaaagaatttccacmatayytctaacagawkgtcctatgcrgascactcmaataaagarraattgaagatgtctcasgmatt

SEQ ID NO: 411668 - DNA, 111 bp, Homo Sapiens
gagagggaaggggcaaacggggggggcgggaaggcggamatakaaaaaaggggatgaagrgatcaaggarcaggggggsggggsmsaagggcvagggcaaaggcggagcgs

SEQ ID NO: 411669 - DNA, 132 bp, Homo Sapiens
tggcgcckctgggacggsctkggggkcrgcgcgcgtggkgcgcgtgcgtttgckggcccacrgrccgctggggtgcgctgaggggctgcgcgtgggggtgrscaaraatgatggtggagtgaggstgagtgc

SEQ ID NO: 411670 - DNA, 865 bp, Homo Sapiens
  misc_feature (140)..(183): n is a, c, g, or t
  misc_feature (283)..(285): n is a, c, g, or t
  misc_feature (293)..(293): n is a, c, g, or t
  misc_feature (296)..(296): n is a, c, g, or t
  misc_feature (298)..(339): n is a, c, g, or t
  misc_feature (418)..(426): n is a, c, g, or t
  misc_feature (527)..(528): n is a, c, g, or t
  misc_feature (596)..(596): n is a, c, g, or t
  misc_feature (598)..(598): n is a, c, g, or t
gcattcaagcgattctcgtgcctcavgcccccaagtagctgggactataggcatgcaccatcatgcccmmcmaahtthbtattttagtagagacagggtttcaccatattggccaggatggtctcgatcttttgacctannnnnnnnnnnnnnnnnnnnnnnnnnnnnnnnnnnnnnnnnnnntgascaccatgcccggccccaggmtattcttttgtkcaaagtttaggcmactccatgcccttctcaaaacatcagaygctggssmctkgctttthcaagnnntttggtgnkcncnnnnnnnnnnnnnnnnnnnnnnnnnnnnnnnnnnnnnnnnnncagagacagataagtggtgakggkctccatgadagttgttttttwgtcagaagattctttttcgtgtgtgtgcgtttcnnnnnnnnngatgtwctwtttcttwtgtgctgtcagaggggacaatcccaccatcccattgcatgttacttttaggtcaatttgggcttcttgctttcatccaaatgggnnctcctttttaccatcccgtttctcttgtctttcaggctattctgtctttcttgcttgttgctgtttcngntttttttgttctcataagtcctttctgtcmcttctctttggtctttwgacaaaattggatgggamtttmamtatacaagmtaattamwggagggacamagggataacamtraamgaagwcagaactagaaggtggggctgggaagtaaggaatgaaagacaattgggacttacataagaggtatwgatgtttttaaamacagatatamattacgagatgwtactggttactactactggggatactgggaactttgtatatactggr

SEQ ID NO: 411671 - DNA, 739 bp, Homo Sapiens
gggatgtaaatggtgccaggattgaagtcaattctttcttctctcacaggtgcccaaatgtgatgttacacatttttaaaaataaaaagtagatgagaagaaaccgagtggtgagtagttgaagtcagtgatggggcctgttatgctttaaatcaagtatcgttggcatgccctgggagagttagttgctcttaaagtttctgcaggactttatcactcaaagcctgtgkggggggaaacaaaaaagtcaaagctccatctctcctggggtccctgcttttctacgttcgctttgctgctacccaccaggatgacagacgggtctgcctctcttttccagccccagccttgttccacagcatcccttcagtcagtcaggtccagagaaacccacctgtcactctggtgcaagggaactggctgtggcttgcagtgcgtgtgtgcatgatacagcatacgtgtgtgtggagcagccacgcagcgcagcacaagggaggcagctcagctgttgatgcccagaggagggccctctcccaaggttcctcatcagctcttcagctctccacacagctcatcatggatttcctcagaccatcccaaacataaccttacattttggtgaaaatttgtctactactttttgtatgacacaaatcgagcaaacagcacagaaaccaaaatctatttatttggaaatattctgaagcgattcactggtawaatttcatagtgttaaagc

SEQ ID NO: 411672 - DNA, 1070 bp, Homo Sapiens
ctattgcagatcccttaacacttaatggatggtctctcagggtagaggttggaattttatgagtttgtgaggaggtatgggcattactgatgatctcatgggacagcactactcatgctggacccccgggtgactgctaaatgatgataccacttgaggtaaaaagagggagaacgttttaagcaaatttttaatacaaaggattgagtcaggtgtgctatttctagactagactgttacgtggaaaaagtcctaatttctaaacctctctttttgttaaagtggttatggccatgggaaaaagtttggtttggatttgcttggtttctgggttgcaattacagctttttgatccaagcgtcttatggacacagactagaaacttcccatgcaactgggatttgaatttcggcaacatggttgcagctgttttgaattaattattgtgagtcttttattttttaaaggttattaggtggtagtcatagctggtaggaaatcaacttggggcctcttcagtcactattttgacactatgtggcattttcatcaaagtggagacaagggttggtggtccttgaatggctgctgctcttgaaacaaatggctttttaacatggcctcagggcggctgcatttttggaactgctttactttttaagggttaaataaagccgctttgtacaactgtcccttggctgtgatcatttttcagtttgccccacaggagtacatactctaaaagtaaattgtactgatccctcatatttccgttcttcatttctttgcactgatgattctcctgttttgtacaaagtgtcagtttcgttctgaaacatttcaggagaggacaaagagggtgaggctctagatgtaaactttggacacttggctttcttgccttcaaccaatgtgcagagccattaataaatatgtccttcagatctttawawtttttggtaaataatttamcctgtttttcataaaaattttctccyatagcycwtattttatgtcctttaacaaagrgtggataggcagacttgtgaggcgtaagcgggtattttacc

SEQ ID NO: 411673 - DNA, 1201 bp, Homo Sapiens
tragttwwattargaaaaggggatacggaggtggggagtamaagctcaccgtcrtacgaatggctgttgagaggagcaataggaataaacattgtaaaagttgttgcgaccattataattgttgtcacracgataatactgggtataagtggcgccatacccgttggggaaatagcagctggactaacagggcacggaataatggacgccaaagacgtcgctgacattggtactgtagctgtactmgagggtggtaaggaggatgaactacratattggatacgaatagctggtgctggaatgggaggggacgctggaatagacgsattgacgagacctgaccagataataaaaggctgggtcaaggagaaagactgataaaacaggccgagcgggatacgagggaaattatagcaagggtcgttgctggtggaaggttaaaggccacggtmgatacgggtactgaaacggaataggccgcgataacgtaacacgacgggtgagggatgaaaggtacgtacatgcattactgtaactatagggctaatgactgttamactcattgtcggtggatgaacatgacatgatgtggcggataaggaacaacggcggtaatgacagtgacgaatgggaacgggaaagacgaccgactcggagtggtacggacgagactatggtggactcccccgggctggcgggtggggtgtgaaaccgccaactaatattatgcgcatggacaagaccgsctaaaccgtataacatgsactgkstacattkgaaatakcatagacaaaacttgrtgkmsgcggacacgctggatttaatgttaamcgagaataaacsatttractakggttasgattggaksgaacmccttasgtttakgtggcaaaccgttakgaawagaatcgcccaattkbcctaacwaatwagttrkaawaacgcgctakgkktaarcaatttrkgkaakaattasgakdaarcgctmtscraccccmcacktyrrgraaakrrsgrctgcgtgcgygagcahttggksggtaagwaaabgckmagtraacgggbggccgcrtgavcwaygwadtccsgsawarvgggggcgmcccccggrakggcwmcgttgkgcgscwarcrsgrtgggtgggggmgmaawgygtacgmmwtckgsgacagcggggctaadsgacgggtacgacacacg

SEQ ID NO: 411674 - DNA, 1201 bp, Homo Sapiens
  misc_feature (261)..(261): n is a, c, g, or t
  misc_feature (678)..(678): n is a, c, g, or t
  misc_feature (682)..(682): n is a, c, g, or t
  misc_feature (690)..(690): n is a, c, g, or t
  misc_feature (693)..(693): n is a, c, g, or t
  misc_feature (697)..(697): n is a, c, g, or t
  misc_feature (702)..(702): n is a, c, g, or t
tcctamvgttrgatgracgtaacgcatggrtactgtctcaggggrcgaaacaaaatcggrcccgaaataggaatataaacaataaaaacagtactacatgcgatgaggacgaacgcggtgaacgaaccttaagcggcgccttgggtaacctcgccctctttcaccctccaacgggggacggtgtgaaagtgctagggcctagtgcgggccatgcgtcaacgggggaaattggataaaccacgaaaacggaaatggggaggncattggacacggcaaaccgcgggcgatggggacttggggggaaggacgcgggggcataatgggcgcgaattgccggaaatacccggggtaatgatggtgaccgcatatgaatggggaactgggtaagcgggcccggaaaataaattatgcatagaagtgtgcacgggacgcgcctaatggctaaaatgactaaatggcgggtagacacgggcgatgccacggccggcatagaacggcggtggtggggactatagatgttaaaatcggaataactgcgtgcaaatgacgcgaacatgaaaacgccgggaaataatgggttaaatgggtattacaacggggcgcggaaatcgttatgatacgccgcttaccgtaactcttacgggcggggtacatgtaacacaaaaacggtaactgtgngggntggtcggnggngggnggagnggatggggggaaaggatacggcacggctgggggcaccgaccgacccgaccccacatggcataacacgccgatggtgcacggmcsgggggtggaaagggamaacgactggtmamtgamaacgtgttacgggaggttggamaattggtgamacgggaacamttataagcgaacggtacaagacgggatatgcccgggacggggtgggtggggwtcactsatrcaacggggtgktggccacgggamsmcttgtagacacrgagacawmggggttgggagagrtggacacggacwtagtammsgtggtmmgaggayacactrmyacttacamttggggaggtkgtaggggcggggmtaytataykrtrckrmhmtgkammcsavmhtachcvhactamyckaytggggggaggrsgacasasggggrtacgsactacvgagktwaaccgacaamcvgagacttamttkkacgrytacmayatwstkasgmybkgactmtmbgk

SEQ ID NO: 411675 - DNA, 805 bp, Homo Sapiens
  misc_feature (255)..(541): n is a, c, g, or t
  misc_feature (547)..(547): n is a, c, g, or t
  misc_feature (551)..(551): n is a, c, g, or t
  misc_feature (553)..(553): n is a, c, g, or t
  misc_feature (567)..(567): n is a, c, g, or t
  misc_feature (620)..(620): n is a, c, g, or t
gcagcccctgcactcatgtttgcaggggaagggaggaggagagcttcttttccagccatggttcagtgtcctggagaccaagactgctgggtctggatgcctcctttgccttctactagcaaacactttatttccttgctcgtattttctaatctacctggaatctcaaacccccaaagcatggaggacttctgctatggtgtgaatgttgctgtctcccccaatatacaggttgaatcctaatcccgacactannnnnnnnnnnnnnnnnnnnnnnnnnnnnnnnnnnnnnnnnnnnnnnnnnnnnnnnnnnnnnnnnnnnnnnnnnnnnnnnnnnnnnnnnnnnnnnnnnnnnnnnnnnnnnnnnnnnnnnnnnnnnnnnnnnnnnnnnnnnnnnnnnnnnnnnnnnnnnnnnnnnnnnnnnnnnnnnnnnnnnnnnnnnnnnnnnnnnnnnnnnnnnnnnnnnnnnnnnnnnnnnnnnnnnnnnnnnnnnnnnnnnnnnnnnnnnnnnnnnnnnnnnnnnnnnnnnnnnnnnnnnnnnttgtgnctangncaaattctttcttncagtgcatcttgggggccatattaggatgtcagttcattgaaaggaagattgngtttcttttctcatcaatttagtgcatgcwatccaataaagattagcccacagaggggattttaaaaaacagaagagaaaacctttcaattatgccaaaggctggcctgattcaacccacctcacccaggctccaratgcttgaatggcagaattaaggaagcaaaggggcatctgccatcagat

SEQ ID NO: 411676 - DNA, 1109 bp, Homo Sapiens
  misc_feature (25)..(25): n is a, c, g, or t
  misc_feature (42)..(42): n is a, c, g, or t
  misc_feature (602)..(602): n is a, c, g, or t
  misc_feature (625)..(625): n is a, c, g, or t
  misc_feature (635)..(635): n is a, c, g, or t
  misc_feature (641)..(641): n is a, c, g, or t
  misc_feature (645)..(645): n is a, c, g, or t
  misc_feature (659)..(659): n is a, c, g, or t
  misc_feature (663)..(663): n is a, c, g, or t
  misc_feature (676)..(676): n is a, c, g, or t
  misc_feature (680)..(681): n is a, c, g, or t
  misc_feature (683)..(683): n is a, c, g, or t
  misc_feature (692)..(692): n is a, c, g, or t
  misc_feature (694)..(695): n is a, c, g, or t
  misc_feature (702)..(702): n is a, c, g, or t
  misc_feature (767)..(1007): n is a, c, g, or t
gttttttydgbtgbgtggggtttgnacaggcagaagactganggacatctttcaggcaaacgtcagcgcatgggcactagccaaaaatcagaaatgacctgccacaggtggggagcattcaaatggatttttaggtgcagtctgttaatcaatgactgtgaatgccagctggaacctggataggagctatatagtatagcactggaaaacaagcagagctttaagaaatataaacatggctgggcccccctcctgcagattctatttcaagaagcctagagtgatacccagggatctgtatttagaaatcattcccaggtgactttgatctccacccctagtgcaaaaccatattaatgacatcatatgaaccttctatcttcccaatgagcttctcctagcaagcmaggacaaagtacttgacggggtccctcatggggatgactaacaataggaattgctttagattgtttagcgtggtgatgacttaaaggatgagagagctaagcaagattaatctgacagcaggttcaggaatgaattcagaaaggggaaaacactggcaacagcggcagtgaagaagcataggcacacagtgtggntagtctcagtaaggattaaggcngcaggcatgnaggggnctanataggaagaattgncagntttttgcaattangtgnntntcacagttntnnaccactngtttcccaattatttgaaaaagacaaagaaaaatcagtattttatgaatcatcattaatatgtgnnnnnnnnnnnnnnnnnnnnnnnnnnnnnnnnnnnnnnnnnnnnnnnnnnnnnnnnnnnnnnnnnnnnnnnnnnnnnnnnnnnnnnnnnnnnnnnnnnnnnnnnnnnnnnnnnnnnnnnnnnnnnnnnnnnnnnnnnnnnnnnnnnnnnnnnnnnnnnnnnnnnnnnnnnnnnnnnnnnnnnnnnnnnnnnnnnnnnnnnnnnnnnnnnnnnnnnnnnnnnnnnnnnnnnnnnnnnnnnnnagatacgcmctgcwtccagctgggcacagagcagatccwcacataaagaataaawaggccrgsgcggggcccgccagwatccmsccttkggggcggggggtg

SEQ ID NO: 411677 - DNA, 883 bp, Homo Sapiens
  misc_feature (45)..(45): n is a, c, g, or t
  misc_feature (213)..(213): n is a, c, g, or t
  misc_feature (237)..(237): n is a, c, g, or t
  misc_feature (277)..(277): n is a, c, g, or t
  misc_feature (279)..(279): n is a, c, g, or t
  misc_feature (291)..(291): n is a, c, g, or t
  misc_feature (293)..(293): n is a, c, g, or t
  misc_feature (295)..(295): n is a, c, g, or t
  misc_feature (366)..(366): n is a, c, g, or t
  misc_feature (395)..(395): n is a, c, g, or t
  misc_feature (397)..(398): n is a, c, g, or t
  misc_feature (400)..(400): n is a, c, g, or t
  misc_feature (402)..(403): n is a, c, g, or t
  misc_feature (406)..(406): n is a, c, g, or t
  misc_feature (431)..(431): n is a, c, g, or t
  misc_feature (443)..(443): n is a, c, g, or t
  misc_feature (451)..(451): n is a, c, g, or t
  misc_feature (455)..(455): n is a, c, g, or t
  misc_feature (522)..(522): n is a, c, g, or t
  misc_feature (530)..(530): n is a, c, g, or t
  misc_feature (550)..(550): n is a, c, g, or t
  misc_feature (554)..(555): n is a, c, g, or t
  misc_feature (571)..(571): n is a, c, g, or t
  misc_feature (573)..(573): n is a, c, g, or t
  misc_feature (578)..(578): n is a, c, g, or t
  misc_feature (588)..(588): n is a, c, g, or t
  misc_feature (595)..(595): n is a, c, g, or t
  misc_feature (604)..(604): n is a, c, g, or t
  misc_feature (610)..(611): n is a, c, g, or t
  misc_feature (616)..(616): n is a, c, g, or t
  misc_feature (619)..(619): n is a, c, g, or t
  misc_feature (624)..(624): n is a, c, g, or t
ataamamavkrrggggatttaggatgcggtaaggaaaaaaaggcnccacatttaacctttcagacacaaatggtggaagacataaaataactagactgaaaatctggagccacaaggagatgaactttgccaggataagaaaaaaaattactatttaarataacaaacagtcaacactgattacgatcaactctgcccaagaatttgattacnttaarggaaagagggtagtttcantgctctggctgttgawaggkggkggbtggkggbcacggbncngggggkgcaccncngngtatgsggggggttcgggccagggcaccataatttaactattccagtggaaggagggcttggkaaccctcnctggggggtaagcatcgtggtttctgtangnntngnnggntgtttgcatgccaaastatggtgtntgcatgtytgtncstccctncccnggtgtgtggattattakggggkggkgtccagggttggttttgctgttakttccaatgtyctttytgntctcttgncccttcatgdkgggggagcngggnncaaggtgttctrggantnggggnggggccgcgnttgccmntggtcaaangagggnncagtnggngctgnagcacagacttctcttrgktagtctgataagaacgggaagracttatctgtgtgagtaacacttagawkgagaccagaacttttaccttctgchatccaccaatccgagggcactgatatgcaagttcagcctcctgrggtgttcaggtaaacwcctgaaratmcmcaargatcaatataatgarcacaaattactttccctgggtctctatgttcatctccgttctmtcwgmtgctgcctmkgsatctgmtgtcctct

SEQ ID NO: 411678 - DNA, 799 bp, Homo Sapiens
  misc_feature (118)..(320): n is a, c, g, or t
  misc_feature (349)..(358): n is a, c, g, or t
  misc_feature (468)..(555): n is a, c, g, or t
  misc_feature (567)..(579): n is a, c, g, or t
  misc_feature (605)..(682): n is a, c, g, or t
aatagtatggaaaavcagagamatgaaggttaacagtcataatttatatattagrattaaratksttctagggrtaaagasgggaaaggagaaagaaatatacaaacaaatgacaggnnnnnnnnnnnnnnnnnnnnnnnnnnnnnnnnnnnnnnnnnnnnnnnnnnnnnnnnnnnnnnnnnnnnnnnnnnnnnnnnnnnnnnnnnnnnnnnnnnnnnnnnnnnnnnnnnnnnnnnnnnnnnnnnnnnnnnnnnnnnnnnnnnnnnnnnnnnnnnnnnnnnnnnnnnnnnnnnnnnnnnnnnnnnnnnnnnnnnnnnnnngmaaaasaraarcaaaaatcaaaatagannnnnnnnnntgggttkgksgcggtggctggggkgtggkgkkgkggtgggkgtkcatsagtkggtgagtgggaakkggkgatktggkgtgtgtkcgcggtggkrtggtattkkgggcttnnnnnnnnnnnnnnnnnnnnnnnnnnnnnnnnnnnnnnnnnnnnnnnnnnnnnnnnnnnnnnnnnnnnnnnnnnnnnnnnnnnnnnnnraacataatcsnnnnnnnnnnnnnctgaggtggggttttgctcttgtgannnnnnnnnnnnnnnnnnnnnnnnnnnnnnnnnnnnnnnnnnnnnnnnnnnnnnnnnnnnnnnnnnnnnnnnnnnnnntcacacgtttctacactcaagaagaaagtattacacagctggtgtgtamagactgggaattcagggtattatcttagaacgttgtctacccacataaataaacttttaaaatagtct

SEQ ID NO: 411679 - DNA, 1071 bp, Homo Sapiens
  misc_feature (187)..(265): n is a, c, g, or t
  misc_feature (344)..(356): n is a, c, g, or t
  misc_feature (596)..(596): n is a, c, g, or t
gtctaaattgggggtgttcyktgtcaaaggmgtgtaaaggtrcagcacacgaggttagtactcttcrccctcdtcgctgctgccgctgcgagcgstktctgstcckgcctcctcgtaatccttctcgggsccggccgtgtcctgtggsgcgctgtgggakgtbggkttcgtgggtgcgcctgggccnnnnnnnnnnnnnnnnnnnnnnnnnnnnnnnnnnnnnnnnnnnnnnnnnnnnnnnnnnnnnnnnnnnnnnnnnnnnnnnaggkgtggtgttggtggagggatgsgcggcgagctgctstgtgcsttggssgaggtstcgsgcgcgggsgscgasggknnnnnnnnnnnnntkratgcsgaccttggagagcsgagtggggcgccgagatssgasgagaggctgggatggkgcgcttggttttggatggkggggagatggggagsgttggcgtctttggggagccacgtcgaccgacggtgatgaacgaggsgagcaagccaatggttattttaccmatgcgcgaggggtcaacattctcmaccmatctaggtatgcgctgggctcaaaagcaaagcmattggtggatctnctggctaacagtaaagctgttccatgggtaaggcttttctcmagcaagaratgcacagggggcatattgttggccaagagggraagtgrgatggcggggggtaagggcaccagggttkggtctggraattytkttcaggtcmaacattkcagggactcccatccaaatcttcaggggaagcmagtgkatggggagggacaccaatctgggctaaataaaggcgggttwaagggttagctgtyaggtttggggcggctcgsatatccgagggttttctacgmacagawcgtgcataaratgggcctccatttgttctaaccatgaraaggcacaatccagagtggctcccaggggtgggtgtggggtgggtggrggrtbggagtttgtagggsctcyaactamcagctcgtggaaaacctcgggggsgccggggtaaawtggaraactccaagcttgggwctttcttgccawtaat

SEQ ID NO: 411680 - DNA, 844 bp, Homo Sapiens
  misc_feature (79)..(79): n is a, c, g, or t
  misc_feature (474)..(474): n is a, c, g, or t
  misc_feature (479)..(479): n is a, c, g, or t
  misc_feature (507)..(507): n is a, c, g, or t
tcccttgttyygttcggcccgtgaggggaagggaattggtggtcaaggggaaccgggggaaggagatcagctggagsgnattgatttcggaggtttgtgttcatttcgcccgtaggccctgstcgatggggtttccaatgtcctttcgcccgggggttgagggctgaratgagsgagagcsagkggssastgsggsgssagggcgcgcgtgcstccccccaasgckgssccgtgtkgagaggatgctkccsaggsvaggggggsgaggcsgstsccgkgsstgagtgggstgtgaggrgaggrggggtcskggttccgcgacatgaatgggscgstsgattttgcgcaaggasckggktattgggtatgggcgcggtgsgststsatagtssgggagtcgasgctggtggsttstsattgattttcgtggscgagggtccttctgcgtrassccgtgtgcgtcgtgschgaccnttgcntgggatcacctttgccccaccctccagngggtcacccctgttcaatggttgcagcctccctcytgtcttcccgggktccargcbttgggcccggtgkttcyttgtgtaaataagaawtgtttggttttgkttcytgggccaagcaggccccaattttctttkggaaggtcytccaacaatctttchtccctcggtcytcktgttgcccgcataaagaataagccttgcmttgggattttgggccbtggggcgggccggtaggggcccyttcttgtgccgcacacccggttcacccgktgttcccaagttbgcytcttcggcccaatccccggggaaattccgggaccsgggtacccaagccttgc

SEQ ID NO: 411681 - DNA, 676 bp, Homo Sapiens
  misc_feature (23)..(23): n is a, c, g, or t
  misc_feature (27)..(27): n is a, c, g, or t
  misc_feature (59)..(59): n is a, c, g, or t
  misc_feature (80)..(80): n is a, c, g, or t
  misc_feature (82)..(82): n is a, c, g, or t
  misc_feature (93)..(93): n is a, c, g, or t
  misc_feature (107)..(107): n is a, c, g, or t
  misc_feature (117)..(117): n is a, c, g, or t
  misc_feature (141)..(309): n is a, c, g, or t
aggggcacvsgcctggsatccangacncggggagggtgsagsgtggtavsbvacctgangakcaggagttcaaggaccancnttkktcaacantggtaaaaccccantcttcttacntaaatatatcacaaaatatctatnnnnnnnnnnnnnnnnnnnnnnnnnnnnnnnnnnnnnnnnnnnnnnnnnnnnnnnnnnnnnnnnnnnnnnnnnnnnnnnnnnnnnnnnnnnnnnnnnnnnnnnnnnnnnnnnnnnnnnnnnnnnnnnnnnnnnnnnnnnnnnnnnnnnnnnnnnnnnnnnnnnnnnnnntgttttgtttcaaatcttaataaaacacactgtatttccagtaacaaaatcaaagtaagaccaaaggsattttcagttgaaaatgccrgargaaagaataatttctctgagaatggcatacagtcaaatcaaaagtbtcaggcaggcattagctggctctcactggtctccctgagcagacagacctgattcccacctgaactgcctacattcttatccacaggggacctgccttcctgagcctttacctagctctataaatcttctccttggctttcatgtagtacactttaagcaaaaggtaaatatcccttaacagtgatggcatataayttwtttttsttgtaggatgctgttyyctttccca

SEQ ID NO: 411682 - DNA, 340 bp, Homo Sapiens
  misc_feature (80)..(181): n is a, c, g, or t
  misc_feature (243)..(243): n is a, c, g, or t
gagagtacatactacatgattccaaagctacatttagatgctaaaagtcacaacagtggtggtcttgcagtgagkgbbgnnnnnnnnnnnnnnnnnnnnnnnnnnnnnnnnnnnnnnnnnnnnnnnnnnnnnnnnnnnnnnnnnnnnnnnnnnnnnnnnnnnnnnnnnnnnnnnnnnnnnngstttbsbyttsssttkbsvgacagggtttcactctggsacccaggtcaggsggcaggggsncggscgkgggtcastgcagccttggkttssccaggctcaagcratcctctcacctcagcstcckggggggctgggaccacaggcacacaccaccaca

SEQ ID NO: 411683 - DNA, 231 bp, Homo Sapiens
attggctggtatgtatatgtcagtgctaatccacacatagacactgatgcacagaaaatccaggatgctgcttggcatgagtccaatagaatcactgsgtatttaaaaacacagccattcaactctattaggattgctgggtgtggccttaaataggaaggataaccaaaaatccaacccaagtggtaaataattccacttagcttttctgcagaatttgttcaagaaaaa

SEQ ID NO: 411684 - DNA, 839 bp, Homo Sapiens
  misc_feature (503)..(517): n is a, c, g, or t
  misc_feature (541)..(592): n is a, c, g, or t
  misc_feature (603)..(781): n is a, c, g, or t
tattttagatgagagtttttttgcctccatcccagagcttgggcggagagcaagsgtcyttgtaacttytytgggcaggctggtgggattgttcagtctccttttgtagcctgtgcaaacctttaagaattccagcttgatgcaaatattttacgtgtctcacatgggcacaaggcgaattgtctctcatctctgcccagggattaaaatgacgagccccttcccttgaggtactttgctcaagtgtaagttcctttggytatgtgtcgtaagsggtwgtttwttgttgtgattttaaataccttttatgtttcaggtacctacaaatctttawttcaccatatttatgtwtgtgtaatgggagaagattstgcacgtgstcagtcctccatgttgwtggaattggawwtctgrgcctttatctgtwaytgtggtttgaaaggttttgtctgcccaatttcaggcaagagtgaggtgagcaggcgcttgtgagtggtctctknnnnnnnnnnnnnnngagasgaagtcttgatcttgtgcnnnnnnnnnnnnnnnnnnnnnnnnnnnnnnnnnnnnnnnnnnnnnnnnnnnnggrkttcaagnnnnnnnnnnnnnnnnnnnnnnnnnnnnnnnnnnnnnnnnnnnnnnnnnnnnnnnnnnnnnnnnnnnnnnnnnnnnnnnnnnnnnnnnnnnnnnnnnnnnnnnnnnnnnnnnnnnnnnnnnnnnnnnnnnnnnnnnnnnnnnnnnnnnnnnnnnnnnnnnnnnnnnnnnnnnnnnnnnnatgaaccatagtkcctggccttgtgggttttctcttkcttctgaaawcccactaaatt

SEQ ID NO: 411685 - DNA, 947 bp, Homo Sapiens
  misc_feature (55)..(55): n is a, c, g, or t
tgttttaataagttgatgtggtaaggaaaggcgtggtgctggarcaccatgwrgntggacactcagggcctcarccacactmaacctaggggtcwtccaaatcggtttcmgcggcaaagaggtaatcaarrgctgcmtattcacartacgtmaaataaggaarccctcggatgagcatgctgaamccmggaatcaactggtcaaaatgatgcaggaactccaagcagkcataatgaaragcttataattctgcgataggccgtgaagaaaaagaacaagatgtcccgaagacagcgcamtgtmcgcmtctgctggtcggtcattgggggtmcccctgamctccgaactgtmagcmaatgtmtgtrcaacatcacagtragcrctatgaacaaatccacattamaatggaagttggaramaataactgggggcaaggrgctmtgcacaccaagcttagamaggagcaaaaaaaactcttgttccagctggagcaattgtgtatccaaggmcactmtgtaaggcmgtgatgtgatgtaaatgtacagcagcagcaggaggaagcatgagtgggaacagagctgaggtgccagctggtcgtggtccgccagcagggagaggagctcaacaacaagaagaacgctaggaaggggtgtatctgggctgargcactttggcagcacttggaacacacactggaacctgggcaagaaatcacaggaagtgttttcggctaatttcaccaaaaccttaaggcactggggtcaggacactggcttgaaggtgacctgttgctgcagaagagaaagccaacaggtgaagaagcatcttcaacagtgggtgctgtccttggtcatcagcaaccccccttagggctgaggtcatatctccatcactaagcctgtgaaccaggctcctgtttccttccccagcagcagaatctgccccca

SEQ ID NO: 411686 - DNA, 141 bp, Homo Sapiens
  misc_feature (33)..(33): n is a, c, g, or t
tgctatgcsataaccygcttatccactgtsccnatgcctaacrttkctgaggcrgcgggtkakacaactgckcgtaggkgataaataagggttgtcgcttcactgattaagggaataaacktcaataaacttaacaacaac

SEQ ID NO: 411687 - DNA, 654 bp, Homo Sapiens
cccgcactgttttatataggtaggaatgtaatggcrgggsacaactaatagtcaagtaagagtacaaattatactatttatacataattcacctcatgttttaagaaataattgcaattttcataagtgctttatgcttccacagtaaaattatatggggccttttgtcaaaaaatatcaaagattttataaaagtcacatgskctttacattccaaaattatgatatgacctatcttcactaataaatgctcttaaatatgcttctgtaatttgtataagtkattttctcacttaattccttttctgaccaacagcacccatttgcagagaactggctgggggtagtttatgcctggraatgagatgtctggaataccaacttgcttataaagaaatttagctaatgactttggcatcattttgggacgggggcgattataaaaatctgacttcatgggatactctgaatgtcacctgacaatgagcaatattttattagagaagcagcattgttgctatcttatgaacagaataaagcctagcacaaataaataccagaattaggaacaattatctattttccaatacagtacagcctctgctgccaggagtatggaggaattctgacaawatgctgacatgcctctttatc

SEQ ID NO: 411688 - DNA, 406 bp, Homo Sapiens
agacttaagttagatgtcaaagcaaccttataaagccaaactttcactaccgtactctttttaaatgatactcatatatcccagatctcttaacttgttaatgttacacctttcattactaaatattcgtccagctaattaggaccatatcatccccacattgcatttaatcaatattcatccgtcaaatcatggctatatttagttctacctgtccaattccactcttcttattatggtttgtctgcttataacacgctaatactacaatgttataaatagcataatagtatataccttcttaactactgtaatggcccgtcactcctttcctctctagcatcctttttctactcccttttcacgtaccatcatatttgcctttcctctacctttgttccatacc

SEQ ID NO: 411689 - DNA, 564 bp, Homo Sapiens
cacgagccatttaggttttcagagtttaccttacaggcactcattttgtaacaaatctaggttctgggactaagaaaatactgaagacataagtctgcttgtttttctgcctaccttgtacatcaggtatggaataataaggccatgaatgtgagaattgggaacaggagttaggtgtgctggggaaaactagacataacaatttggttatgaactagaagaaatgaatatgcttttagagacctgcagtttgcttttatggagtgacagtttcaggtgtgatgatcttctcagtattactaagaggttcttaaagtttgtcttaaaatcctacttatgtgtcagcttagctgttttctattttctaggcctcacttaagtagcaggttgtcttgtgatcaaaaagtcagtagacacagtagttaatgccatattaacagctgaaaattactgaaaatttaacacttttagtatctgtcattcccatcaccgctttctccccaggtttcttttataatggaaaggacacaaacttgtctcctgtttacagtatttgtcattggt

SEQ ID NO: 411690 - DNA, 569 bp, Homo Sapiens
ttgacttttacagtttgaaaaagggtacctcagcctcttcagtactggttttttggcacatttcaacagaaatattagattccctttctttttcttaatagtgatcttctaacaagtttcttggaaaaactatcattctaagggaaatccctgtttataacctattaatatatttctattcctagaagagagtctagcagggattctagtaggaattactgagtgttttggaaggcacttgatagaggcatctctgctttccagcacagggattctcagccttctaaagatctagaccagtttccaagctagcttctccacagcccaccactgcctagtgtttgcttgtgtattctctaatggattttaggaggataggccttctgacagagtcatgaaagactgaaggcatgtctagggaaatcctgacttgcccttcagcaggaatgactggcagcggatctctgtgttcaagggggtgagcgctaagcatgccagtgatggatccgaagtatttagatggattgcagaccaggaattagagaccgtttgtgactcaaggcttgtgg

SEQ ID NO: 411691 - DNA, 594 bp, Homo Sapiens
agatagccttcttcaaacagcaataccagtttacatacagtgaaacacatgtagagggattctttaaatataaacatggaaaggaatctatttacaaagaacccaaactcacaccactatcaaaaatttctcacatactccaacaagcacaatggttcacggaatgaccaactcatcttcaatcatataattacatctcatggcccatgtatagggacttactttatcatttacaaactcaagatactttccaaaaccaatcactggggatacctatcacatggaggaccaaggggaaagggagagaaaagaaataaataacaaccttatttcttaacacactttctataacattatgacaaagtacacatatttttttaaatctcactaacaatattcaaaattttcattatatcttaacaaaaatataatatacactcttacactaaacttacattttattcttccttacacactaatattataatatataacctacataaaccttttacctttaaactaaacttttcttttaaatattttgtttttcctataccccattctttaatacaataactattttatgactttttt

SEQ ID NO: 411692 - DNA, 598 bp, Homo Sapiens
atatctttagactttataaaaacttttggcatatcacttatatatttcatgtagtcaaacaataatcttttcctttatggattccaatttttaaatgatttatatttttaactaaattttcaagactgaaaataaaaatatgaatgaacaaacccctctcaagcaatcatatacaaccaccctaaacaataaaatataatacattcataatacaaattaaaaaatatcatgacatacacacacatacaactgttaaaattccttttcttaataaatgcaaagaatcaagacttcttaattacttacttaaataaatattatacaaacttcattcaattccataaaaactcatagattacactacttcaaaatcaaactatcaacaaatccgcaatacactttttaactgtacattgttccaatacacatttataaattttcaatcaacaatatactttcaaacttaaaacaaaccttttactcttttcaagaaaatagacatcttatatcaaattctacatcaatatcatccctatcttattaacaattaccatttcctcccatagtcatattcaattacaatcaacttccagatcct

SEQ ID NO: 411693 - DNA, 419 bp, Homo Sapiens
gtcctaatgggtgcaagactgtataaatatccacatttgacagacacattcagagatgcatagagttcattagatatttctttgatgtgacgtttgtacttgaactatatattattccagtaccttacatcttagatgtagaagtcgctaggtcaaaggatgtgttttgaatttaaaacatgttgaatgactgttctcacattttaaacaggagtaatctactacccagccagcctaaccactgcccctgctctcagcaatgatgggctcatcagcttggtaagagagaacattactcacaatcttgcttctcaatcttaatctatttgtgcttggtgttttatataacatcactaaccctaatacttgagtatttactttggcccttctgtccattttatccgcagacagatgccttt

SEQ ID NO: 411694 - DNA, 366 bp, Homo Sapiens
gcattttagacagctaaaaaacacctcaagttgttatttgatgaggaatagcagttgaggccttactctctctttgtgggaatgatgtgccttgtgcttctttgaatatgttgtgtttgctttcaggtctttactttaggcaggagatacattcccaagaccattcacacaattgcagccagaggggtgaactgatggggagaatttgtggctgtgagactcttgttctttggatttgtgggtaggtggcaaattcctgtctatgccacagagttgtgtcacatccaggcccaggtgcctggttatgcattagttgtttggtagaagacattcctttgggctgtgtggtctttctctttgtgctcc

SEQ ID NO: 411695 - DNA, 504 bp, Homo Sapiens
  misc_feature (415)..(429): n is a, c, g, or t
gcaacaaacggacgcacttatcacgaccccccgcatttgcacacccacacagaaaggggagacaattcggaggggagaagcgagccacgcccacgaacaacggagcccgagagaacacgaacaagacgaccccacgcgcgccaggcagcgaacacgacaagagaaacagagagagacggcagaagcaggagcacgccagacaaggaacgagaacgaaccagcgcaccgagacccagccagacgaacaacgccacacgcgacgcagacgaaacgaccgaacaagagcagggacacaaggaacaggacgaaacaaccacacaacagaacaaaccgaagaccgacgcaaagaaacaccgcaacaaagcgcagcaagcaaacccaggcagagcgacaagccgaggagcaaacagggacnnnnnnnnnnnnnnncgccagcacacgagccgaccgaggacaccacaagaacgcagccaacgcaggcacacacagccaccagcccacccg

SEQ ID NO: 411696 - DNA, 501 bp, Homo Sapiens
cacgagaaggaatggacatgtacataagtggcatcatttctaccaatatgtgacttgagttgtttttttaaaaaaaggagaatgactttctcaaatttgcattaaagaagtttttaagaatgttcaaatggcatgctgctttgtctggacgtgaatttattagcaagtagtaaagcacttcactaaaggaccatgaatttttgtggtttcatggattctctcttgaagggtacttttatttttttaatataattcagaaactcagaaggtaggtatgaaatattggtaggtgtttctcgcaccttcagaaagtattggaccggtcttattattataattttaacaaaatatttccaatttttgtgcttttgacatgcataaatgaccaaagttaaagggagtagtttttatcttttctaatgtgcttgaatcgaaactctctgtgcctaattagaacattaacctggaagcagatcttcccactgatccattgtggttgcc

SEQ ID NO: 411697 - DNA, 548 bp, Homo Sapiens
  misc_feature (157)..(157): n is a, c, g, or t
  misc_feature (355)..(355): n is a, c, g, or t
  misc_feature (389)..(389): n is a, c, g, or t
  misc_feature (447)..(447): n is a, c, g, or t
  misc_feature (470)..(470): n is a, c, g, or t
  misc_feature (501)..(501): n is a, c, g, or t
gaaagcacgaggaaacattttcttcatatgttactatatttatgcattattttcccagagtaattcagctggttaaaacatgctgctactaaggtggaggtgcagattactacagataaagaatactccctgcctgtttccaatttagaataggctntttctaaaaagacattgaatgaatagggatagtagcagaatgaatgtaggaacttggctcaaattaagaattaaactagaaacaaaaggacagtcatttattagaggagatatagtatgtagccaaggaataatagcatcagaatagataccaaaagaggtaaccaaaacaggggtaaggtgtagaaccactctacanactctgccaaaaactcacttctttgagttctggntttattgagccactagtttctgcagtggcttggctgctaacatattaaaccttatggnctcctgagaaataaaaaattggntaagagctggtccttacaaccacccaatgtntcttggttttacctgatcttatatgtggcggtagtatttgacccttg

SEQ ID NO: 411698 - DNA, 665 bp, Homo Sapiens
  misc_feature (321)..(321): n is a, c, g, or t
  misc_feature (443)..(443): n is a, c, g, or t
  misc_feature (463)..(464): n is a, c, g, or t
  misc_feature (480)..(480): n is a, c, g, or t
gttgtctttcactccagccccttctgctcaacatgcatcattctttgtttccactctgcagtcctttcatgctgcttacttaggtgttgtaaattttgaatgactctaatgtctacagcatttcctgaattttacatctggacagtattgaagggcagcggggcctcccaaagagcctgttttgcttgactaagttcttttgctgtattgatttagtataagaaattctgggataatgttcaatttcttcatggttcttaaaaatttcaggcatcaacaaaggctgtgtattccaggcaagagatacaatatgaagcattntcttaggattggttcccagaatgtgatgtattttcttctgtgggtgttcaactcatttgctcttacaactgaaaaaaacagcagtaaaagccaaatttgaccagtccagctgttatactatnacttttaaagaatgcctcannatctaggtgttacttnctagttagttcggacccgatttctcttcacatgtcaagctatgaaaaacaagctggcaaataaaaaggtgacttcccatgtcttctgattatatttgactatttatctggacacaagattttgtttatagtagtccttggctttcctctttgtatttacactatggtggctctctctttttggtt

SEQ ID NO: 411699 - DNA, 553 bp, Homo Sapiens
  misc_feature (367)..(385): n is a, c, g, or t
aacaaattttattttctaatacttacaggcttatagaaaagttgcaaaggtagtacttcctgtgctaccttttccctgttgctagcatcttatgttattatggtacatttgtcacaaccaataaaccaacgttgatacattattattagctaaagtccatactttattcaggtgttcttagtttttacttatatctgttttttgttccagaatcccatccaagataccacattacacttagtcatcatatctctggctcctcgtggcaatgacatttctcaggtttttcttgtttttgatgcccttggctgttttgaggagtactggtcaggtattttgtagactgtctctctattggaatttgtcnnnnnnnnnnnnnnnnnnnaatgattagactggggttatctcatatgtatgcatttggcccaggatttataatctccaggctctgggcctgtagtgcctaatggacaaagtagcctgtgtgcacacaaatatacccagaattggaaggtgtatgtctgcttttataggctatacatatcctactgtt

SEQ ID NO: 411700 - DNA, 529 bp, Homo Sapiens
gagaaacgtgtgactcttgaccattttgtttaccaaataatgtagtgtgagatatctctactacagtaataacttccggtgtaatttacattggcgtttgttaacagcaaaagacctctcctgtgggggttaagaatatttaatcctttaaagctgacatatataacatgtagctatgtcagctacagctgtttctaaacatcagtaacaaaattatagacaggttttgaagcttctgtggtgggaatgaatacatctgaggattcaacttgctgacagtgtttttgtaatttaatcttaccatctggtagaaagtaaacattttttatttaaagtttataaagtgaatcgcttatagtttccgattgttgtgaatgacaaatttaagtgtactttcattgaagaatgaatggagattctgccactgttttgagatgcatactagatcgcaactgattttgccatttgatcttcattggttccttgaacagtaaacttggcactttcatgtcagctggttctgtgtttc

SEQ ID NO: 411701 - DNA, 686 bp, Homo Sapiens
gagagaaagaggtgtgtgaatattgaggtccacaaatcagtcaagttgaataaagaggaaattctaaggaaaatattaaaaattacagaaagaggaagctggggacgctgagcataaactttgatgacatcaattttaccgagtgcctatccactattcctccacttagtttctcagatcttgccagcaaccttagggcttgcatcctccatttctttgctcagggcatgctgaatacatgtctatgtgttttctgttttatttcctgtgtaggttttatgtgtgcacactgggaatgccctttcatctttcccatgaaccaatgtccccctccataaatactgagggttccctttctgggcatatttcaaagatcagtgtaacaaaattattttatatgagtattaccattcccagcagagtctttaaaactagataggaaactggtgtaagtctaaaatactgtaagggccagagcttagggaaaagagcaacatatctattctatcaatctcatcttctctatactttcattgattaagagcccatgactacagcatgaaattagaggcactctacagaactcacatttcttaaagtaaatcatgccttttctgagataatttcccctctggattcttttccagtcctgtggctaccaaccgtatggcctgtacttttcccct

SEQ ID NO: 411702 - DNA, 193 bp, Homo Sapiens
ccggcctcccctcgatgctaccatctgtgacccacttatcctctctctccatccactctctctgcttcatccaccatcttgtacttcctcctctcccttgctgttctatataattgcctgttgtttgctttaccttttctcctttcctatttcttctcttttctcccttctggcgcttcccttttccgattcc

SEQ ID NO: 411703 - DNA, 518 bp, Homo Sapiens
  misc_feature (101)..(364): n is a, c, g, or t
  misc_feature (388)..(445): n is a, c, g, or t
gcctaatgaaattactgaagtcaaccacatatttattaaatgaacagttaaatgaatgagagattacttttcattcaaatgggagacctggattacttggnnnnnnnnnnnnnnnnnnnnnnnnnnnnnnnnnnnnnnnnnnnnnnnnnnnnnnnnnnnnnnnnnnnnnnnnnnnnnnnnnnnnnnnnnnnnnnnnnnnnnnnnnnnnnnnnnnnnnnnnnnnnnnnnnnnnnnnnnnnnnnnnnnnnnnnnnnnnnnnnnnnnnnnnnnnnnnnnnnnnnnnnnnnnnnnnnnnnnnnnnnnnnnnnnnnnnnnnnnnnnnnnnnnnnnnnnnnnnnnnnnnnnnnnnnnnnnnnnnnnnnnnctatcctcctgacattggagaaannnnnnnnnnnnnnnnnnnnnnnnnnnnnnnnnnnnnnnnnnnnnnnnnnnnnnnnnngtttgggatgtactgctgttcatctacctttctaataccttctcacagagcctgtggactgttgtttacagtc

SEQ ID NO: 411704 - DNA, 548 bp, Homo Sapiens
  misc_feature (326)..(334): n is a, c, g, or t
ttgacaaggggattttgtgttcgtcatcacattatgatgttaggtttgcaatgcgggtagttagaaaacagttttcattgaggtccttagctggcaatgtactgtgcttcccttttggatagttagtacttatcaccacgtggcctaaaccaccaactggcctcttacataaggaatacttacagagatagggtggtgtactccctgactcagttttgctttttacataaaaacataaaaatagaacatgttgttaaatcccaggtgtaactaaattaattcgtgctgatttatcttgtaacctggaattttctctcttcatggcnnnnnnnnnccttatctttggacaagtttctgacgttatgctgtttgctttcttttagcctttttttcccaaatgggatggggtggtatattagagtcccctggaagtttttcctaaagtacacaatgctctgatgccttccgggacctactgtgctagttctttgtggagagggacttgggaatatgtactctggctccgagttggtttggcagtgcctgcc

SEQ ID NO: 411705 - DNA, 672 bp, Homo Sapiens
  misc_feature (188)..(188): n is a, c, g, or t
  misc_feature (204)..(204): n is a, c, g, or t
  misc_feature (540)..(554): n is a, c, g, or t
aggacccggccgccgcggagagatcgtaagcaggtacgacccggggccgaagcgggaaggctccctgaggacagcgcccgcagggagctgaggctcgaaaagaccaccggctcagcgtcgggcatacgcgccacctctgtcggaagacttcggatgagctccccccaaccgggaacaagtgcaggccnccatccctcatctgcnatttccaggctccaaagctccctggaagccggaaagatcgtaatcaaattggtggcaaaattgcgcttgaactgatatgaggctgttgatggtctttatttatcgcacttgtgtgaatattcatgttttgctgcagaaatgcaaataagctcgatggccggctgctgccccaagccctgctgggaggttatgtaacctacagcaggtgggtgccacatattatctttccaagtcccagctgttctatattccgaagtgcatctgggcacggaacgggggattgcgggcctgccgccagctcaaggagcctggagtcagatgagagggtggatgtgnnnnnnnnnnnnnnnaaaagaactcctgatgggtttgtttcagaaagacgtgttaagtgaggttgttttttcccctcttcagaatccagttgtgttaatctgggaaatcgaaaatagagcacgttttacaaac

SEQ ID NO: 411706 - DNA, 343 bp, Homo Sapiens
gcagagacgacgctccgtcgcgccttttagcgaggtattactctcgggtaacagctccaaatcttcaggtctaaggaatttcttcgttctagttctttaaagcgtcaggaccacattacgtttagttaagacacgatccccaaaagaaaatagggcgaaacctaaacgcacaacgagcatagaccgacctacattacccacagacaaaccgccccaagaccaaaacaaacgcctatacggaaagcgaatcatcgaaagaatcgagtcgctatcccaacacctcctatccgcaaacttccgtccctacgacagtggatacggccctagccgtcgtacgccccgt

SEQ ID NO: 411707 - DNA, 389 bp, Homo Sapiens
cgtagcaactggtatggtcttttccccaaatgtctaggcatgccgcgacgacgtgatcgaggaccacgtaatgcggcttaattggagtggttagtacgattagtcgcttaggggtcgttcttcgttcccctccccgcaaagataagacttccgggagccccaacctcgccacgcatccgtttcgcggggttcttatcgtcccctcacgggagatatctccaacccaatagacgagaacacccccaaatctcgaaaacaaacaacaccacataatgcaaaacctgagggggggtttggcatttaacccgtttcacagcgagctgaaccataacctatcggttgttgccccataatgctgcgatcgggtttcggtcccattcatccctgtg

SEQ ID NO: 411708 - DNA, 395 bp, Homo Sapiens
ggtcgtacgaacctggtatgagggaatacgcctcttagtccgtatagaacacgggacccttattcaacaccgcggaactagtagtagcaaaatacggctaagtcccatagttccccctcgaaacatgacgtatttacgacagaaacaaacttaacggcggaagacctagacggagtcgcaccgagcacggacgtaaagactaaccccgatctcaacctagttcactgttaaaagaaaactcccgactcataggatcggatttaggaagacgaaagggataaagacgtcgtcaaggtaaactctaatcataccggttctgacggaaacacaggtcgttcagccggcgtcggacaggtcacggttataacggacacctcctacggagggatcttgtt

SEQ ID NO: 411709 - DNA, 391 bp, Homo Sapiens
gagttcagaggcaagggacgacaaacgctccaataggagcgtagaatagcctagtgtagcgaaccgtttacttttcacgtataccgagaaatgtcgaccaaaaaccgaaaatccgcttcgcgaggaatattcgaaagcctgaaggatccaccggtcggtgaagaaaagacggaggaacgcgccaaccccaagggtcggcacgcggaagaagagtacccacccgcgccttgacgaacaatcgttccaaaacagctttctcagtagagaccatccgccatcaacagaagacgacaacccattctccagtttcagacgaccgtacaccacacaggacgacacacgcgaagaacctcttacaagccacccccgctacggcacccaccaccgtttg

SEQ ID NO: 411710 - DNA, 398 bp, Homo Sapiens
tgggtcgtaggaacctggcatgagcgcaaaccccaatcgccagcttaaagaggaatagtctcccggatatcacgaaaaaattccgccgagagagcaaaaaacccaatattcacagcaggttcaaaagtagttattatccaagaaagtgcctaagtctaatactcatcattcaaaaaactttaaatacacaaccgaatcttccatatttaaccggattaactcactatttcacagaagaatcaacgccagcacaagcaatacgaaaacacctcttcttgtacaagttcgtgctagaccaaaatatcgaatcgataaccaatagcttaacactcataactaattaataagccaccaccatttccatcgctaatttaatataggtacgtctacacgggccg

SEQ ID NO: 411711 - DNA, 386 bp, Homo Sapiens
gttccaagtggaagattaccttccaagaaccccgcacttaaggtcttaaaagcccgccatttacgacgacgaacgtcgatacggacgtagccgacgtcgaaaaccaagcggaatcggaggaataattaagatccaccaactaagcgccggaatcttaatatatatccgaagactctctcgtaagagcagacgtagccaaggaagaaaacccgaagtcaaaactagaaaattaagcctccggataacacacacaaaactctacgctagtcctcagcgccccctaaataatcgatatacaaagcaaaagaaagcaagggaccgatatttcctcgccccacggccgtcgtcgactacacccctcccatcccggacagaccttgccatgc

SEQ ID NO: 411712 - DNA, 393 bp, Homo Sapiens
ctgtgatcctatttattactgatgacagtcaaacagtattaagtgtctacaatgggcccagcactgtgtgacaatgtaattaataatataatgagattagtaagcaaagaacatggggaaagactttctaggctgaggaacaagcatttggaaagagatgagagtaatgacacactcaatgtggtattgtttatgagaagttcattgaggttcaaggataagggacacgaagtgccgtaaaaggagagggctctctaaaatgggtgagagccagattgtgtaaagagttgctcttgactgccttggcatgctgaggagtcagttaccttttgttaacttaagggctttaatgaggaagagtgatgtttacgtccattttgacttcctgctctt

SEQ ID NO: 411713 - DNA, 421 bp, Homo Sapiens
  misc_feature (217)..(259): n is a, c, g, or t
gcctttcatgcaaagaaaaccaaacacataagccacccttggcgtttctctttccttagtctgccactttcattagtacacgtgattagaaagagcaagcgtgctcgttcgcctcccggaggctgattcctcactctggtgggcttcagttcctggatggtgtgaggggtcttccatgcagaagtcttcagacactcctgaagtgtgtgattcttannnnnnnnnnnnnnnnnnnnnnnnnnnnnnnnnnnnnnnnnnnaaagaattcctggtggcaatatagacaggtacggagaccaggtagaaaaagtgggggtgaacaattaattacacatggattggtgatttgggattctattctttctgtcaacgaaccatttttgctaccccttaggatgctttagtgatttgtcggttgagg

SEQ ID NO: 411714 - DNA, 426 bp, Homo Sapiens
tttggatcttaagtgatggtaagtgatgttaatgtggtaagatttagagatctttaaattgtattttgtgtaaacattttagctttaccttggaaaatgctctttgtttcattgacccaatatctagacaatgtgaggctaagggtaggaataaagcaatggaggggaatagaggaatatgaatgtagtttgcatgcttgtgtgtggggagatgggtagaaacattacataaaggggtcagagggaggtgactgagaagatggcatttgagcaacttgaaggaaatggcaaaaagccctcacatgaggcctgtcctttgaggaagtggatttgacgtcccatccactaaccttaggcttgaactatgtgatttgctttgaccaatttgtaagcagatattttggtatcctttgtttgcagccggtt

SEQ ID NO: 411715 - DNA, 146 bp, Homo Sapiens
attctctgcaaaacttctggacaactgacatctccctaaatgtgatattctcatacacccccatcttctgatgtttaaattgtaacctatgacaatacttctagatgtcaaaacaatagtgattaaacattcaacggttaccttct

SEQ ID NO: 411716 - DNA, 116 bp, Homo Sapiens
aaaagatcccagtttctcaatttgcactgccagatgctttaaaaattccaaatctttctattgaaggggtcagcagacctctgtgagttctgaaaactgatttttctctgcattct

SEQ ID NO: 411717 - DNA, 501 bp, Homo Sapiens
ccagttactcaacatagtatcatagttgttacattaagtaacatgcagtagcaaagtaagcagtatcacagagtcatatatgacaagtgttttgagtccataacaagtcctcgttcttgtcctcgcagacttgttgatcccaggcaaggcacttttcctttctgggtcttttatcagtacgacttttgattcagcagcagtagtcttgtttagggggcaggggcagaggttaagggggacagggaagtatataaaggacttttattcttatgaatccaaacagagggcagagttgtctgtgctttgttttggtgccatggatgtttaaaaggataccattgtcttctgttcatttaagctacccattttatcttttctctgttacccagaatatcagtcctgtttaacaaatatgtaatgattcttcatttgcaggtttttaccttgacagtggtctcctctagcagagatttcagatactatgtattcagagacagcatc

SEQ ID NO: 411718 - DNA, 376 bp, Homo Sapiens
agtaggtgagcaccatgaggtgaggtctgtgtgtttgtttttgtttcggtttttagcgtttatttggatggtttggtatagttacgactaaggtgacttcaactcctaataatctatggcaagttgtggtctcttaagcctcattagtttcatagcgaagacatatactagcaaactaccagggagatcccttacccggcactcaagagagacgcgcccgcaacccttcagaaggaggaccaccaaccggaggactcgataataaatcgacccacagataccacgtaatgacacaccccgctcctcgcgaggacctcccagaaagcgaatccggtaccccagactcaacctaagcacccgcggataccagtcgccc

SEQ ID NO: 411719 - DNA, 398 bp, Homo Sapiens
ggtatgagtaggactgccagtggtcttgagttacgtagaagtagtagttctggcccctcgaggattagtggtgggaatcgggcgtcgcgtatcttcgggcttggaagggttaatcgttctgggtctccgacgtgacggttcgcgcggatcgcgggagtagtatttaagacttcggctatttcgacgatttatctcctctagagtcggacggatcggggtcggagtttacggaagagggcggaggtgagtagggcagcagtggcggtggcagcggcgagggagagggtcgtcaggaggtttaaggtggggttaaggtcctaagtctctacgatccggtcacggaggaggaggaagaaggtgagtctacttagcttagttccattcatagtcgtcgcttc

SEQ ID NO: 411720 - DNA, 378 bp, Homo Sapiens
gggtgtttaagttgttgatgttagactggagttgaccttcgtttcgttttgattgttagtgtgattacgctttactatcgggggcatggtaaatataatggattcgagtattgtggacaaggatccttttaccgttaagggagagtgttagcttttcgccgatactgatatctacatagttaagcacgatttcctttcgaagttttcgctcgcccttcacgactaagtaatcctttcgaggacttctaataacggctacgtccctaatgcggagcccgacgatctctaggatgtagcgtctaagggaggattttcggacggtatccatagaccgacctagccctatccctatcgtggcctatccgacggatggcctac

SEQ ID NO: 411721 - DNA, 163 bp, Homo Sapiens
tcattactttattgttaaaaatgtgtcagttgtaaagatacctgtcctttgaatcagcatgttgggaggtgcaggagattcctgcctttgaacacctgcctaaagattccataacggggatttggtatgatgagatatatgcaggtttggattctggatatat

SEQ ID NO: 411722 - DNA, 622 bp, Homo Sapiens
  misc_feature (511)..(511): n is a, c, g, or t
  misc_feature (590)..(590): n is a, c, g, or t
gttcatttaattatttaaatgaattaatgcctgtaatgtaggcagaagaaaaaaattcaattttaccattaactaaacataattttggaaacgctgagggatttcccagaacccaaagccagcctcttggctcccagtggccccgagcagccctggtgccctgcaaacccacccaccagctgccccacagaggatctcttctctcaaggagagggccattgttactcctccccaccagggaggcactggggatccttgattagggtttgggggagcaggaggaggtcccattgaggacacacaccagacttgtgctgagtaggggcttgggccacatgcagcactctcatgagatttgccaattcaccaaagcaaacccagatcaacactttgttgctctaatagggtgttgtgaccttcttcttctaattgttgaatatttaactgatgttaaaaatgggtgatattgttgtaagcaatgaaaacacaataggcatataaatgggatatngttgtatgtcagatttataacctatatgtctccccagccctgctctctaagagagaactctgttcacttgagtctcctnctgctagtattcccccgtactcttaggacctt

SEQ ID NO: 411723 - DNA, 372 bp, Homo Sapiens
tagagctcgctcgtggaatatcgatctcgtctctcaacgagaataaagccagaaactcgttgacaattcaaaacaacccagaaacgaaccaaaaacgcgaaactgggccaaagtgacgacgaccagtacgtaagaaataagtcttccttactagatccggtcatcgaccctcctcggcatgacccggcccggaagagttctccgcccttcctctcccggggcacgctcctgacctccaacacgcccgcaataccaccgagacacaacctatacattccataacctatccaccccaagggcataacccagcggcccccagcgcacctatgccgcgcaattgcgattatagctaaccccagtaccctgcctttg

SEQ ID NO: 411724 - DNA, 386 bp, Homo Sapiens
tagcagaacttgcgcacgccggagaaaccgcgtacagcggggaccccaccccaagcccgccggccaggcagccgaggctcagggtcgccagaagcttcagggcgatagtgagggtcgcgagccccacgcagagggggaccgccgcccggaagggggacgttgcggtaccgctttactcctcgtcttcattcaccacctgccctctcccattcttccctacttccgctattctcccgacccctccccccttctcttcttccccatcctctcacttccttcctcaccgtcctgattctctcatcacctctctccccccagtcccccatccattactctccatcccctctttctctcacctccactcacctcacacttccccccttctc

SEQ ID NO: 411725 - DNA, 366 bp, Homo Sapiens
gtagtagcagctccctttatacagtatcttaggtagagattattaactgactagagacgccgcgcaggcgtaaatttacccacgaagttacagatacccgtttctcggagaggttcaattttagagggcgaataggtagttagagagacttagcaaggaggaaattaacacggactgccgagtccctaagcatctataagaatctaccgcacgagcgtcaatactcggacgcggcgacgtagccagttacggaacttaagcccggagggtcagcttttgaactacgaccctcgtatccctcaggcaccgtcccgtcgggtacccctcctttcacggtcgaggcccttctaggagtacgagttattg

SEQ ID NO: 411726 - DNA, 709 bp, Homo Sapiens
gaagaatgtatttaacaaactgaagatccaggtaatatcgtatgctatgttattacattgaagaacaaattgacatcagtaggagtaggactaagtgatgctcaacctcagatggactgaggtttagtccctagtatgacaagagtagattcacagaaaataaatgggtccatcaactcacgctttcattataaatcagttcgttaatataacacctctagtagaaagcaagcactagttaaggtggcaggaaggcaatctactttcaaggcttttattaaagtttagaaatgatcaggggacttcataagattataaatttcagtctaaactgaaatgcgtttttaattctctgaataagtaacttccagtttacgatgaatgtaagtgatcagttgctctgaccaaagaacgatgccattgcatgtgattggactgacctcttactgtggagactagaaagtgctgaatattctttagtatattctctcatactaaggagttactatggaatgtgattgaaattgcaaattgaataattgaccaggatttggatctatacctcgctaaattagatacttcttgaatctagtgatagatgcagtgatgccagtgatgacagcttttcagtagcatagatagctgacttggcaataagatgacatgaatccatgactgggaataatggggactgactgtgatgccttgt

SEQ ID NO: 411727 - DNA, 255 bp, Homo Sapiens
ctgtaacaatactgaccagccggcattgtagctggtcaagcattgaagggattacagaaagaagtacactcacgagcggacacccagcaaagttggaagagtcgagcgaaacccaggctgtatgagagggggtaggttactgactcctaggacggacgtaagacttaggaaagatggtctcctgtcgtcagatgctgtacgtaagcatctactggtggtcaatcgatcttaatttctacattgagctgaatagtt

SEQ ID NO: 411728 - DNA, 192 bp, Homo Sapiens
atgcctattaccatgagtgaaatggcatgtggcactgttagcctaataaacgttatattttgtaaaaaaactattttttaaccaatggccgaatcgggtccctttaaacaacgcatgggccgccttgcgaaattgtcctcagttggacatgatctctttgcgaacgtgcaccagtagtgccccgttttcgct

SEQ ID NO: 411729 - DNA, 375 bp, Homo Sapiens
acggaacgctgctgcgcttaagggccggcctttattccgtatttcgagtcgaggggacaggtcctagctatttctgatttcgaatcggaacaaccaggcatcgtccaggacgaactcgtcccggagaaaccttaccctccgctcaaggtcaggaaaggcgttatatagacattaaagcggccattatttagcggttttctcgggactaaggaccccaatcgatttagttaaagcccccgaatataatacgcgccaagcacgagacagaagtcagcaaacatcgggatataccccataagacctacaagaacaagccccctaaggactgcaaccggtcgccgagggaacccttcgcctccttagccgactattcgg

SEQ ID NO: 411730 - DNA, 389 bp, Homo Sapiens
tgagtctgcgttgtcggcgttgtctgggaggcgaagtaaggggaagagcctggatgtaggaccggagatttatagccggcgactcgcacggatcgtctggtagatattacgattaattgttcctcttaaaggtgttggagtagttcgttcgcggatgatattattaagattactgttaagtgttcagaagttcatcattgagtgcttacttttgcgactgttcatcatgagataaaaatatagtcatataagacaaacgtagagggaatattagaggatgccccctcctaatctcgtatagtcaccgatctcaccacccctcgaaggtaaaaacgtacgcccgccagaacggaaatagaataccagcctaccttccaatatcgcccttg

SEQ ID NO: 411731 - DNA, 334 bp, Homo Sapiens
gtatgaggcaatccatagcccttcccaaaaaccacacaccgcagcactaatacccccaaaccaaacgccccatacctataagcggcggggagctccgctaccaaggagcgcgcaacccacagcttagccggcccctcctcgatcgtatccgcctctacagcagcaaaacgtcacgtgtacccacattccgtacaagcttctacctcattatgccaatttctcagtcgacaacgttatcaatcgggggaccccacccacaagggtctcagaatgagccacctatattagtactactccaatcaatacctcgtcagccagcgtagtcccctccgtg

SEQ ID NO: 411732 - DNA, 384 bp, Homo Sapiens
cctcccccccctcccacctcgttcgtcccacgcctcggttacgtcggcagtcgaccagacgaagtttacttagaccaagggcgagctcgttccctttggtttatcgatctaaacgccaactcttcccggtaatatttccatagacatatttaggactaacatcccgtacttcctaacttaactaagtccaattactatgttaattaactcaaatatcgaaggtccaccgcgaagcatgggacatcgagaataacacgacgtcggaatggaggcaaacagaatagcaggataaagaatttagaagtacactcgcgcgcgtccgtcggccactagaagcggggacccaataaacgccatcagagtccggccccttagacggggggt

SEQ ID NO: 411733 - DNA, 495 bp, Homo Sapiens
  misc_feature (68)..(153): n is a, c, g, or t
aaatataaagaatggagcaagatgaaaaaagattaaattgaaaggggagaaaactggaggagggcgannnnnnnnnnnnnnnnnnnnnnnnnnnnnnnnnnnnnnnnnnnnnnnnnnnnnnnnnnnnnnnnnnnnnnnnnnnnnnnnnnnnnnggggctgggaatatagacagcacaaagatgaagaaatttaaatgacaataagaaggctgactacagaggcctgaccacaaagaaggaggaaaagggagcgaggggaaggatatggcaattagctagacataatccaggcagatagaatacaggtatgagaacataacatggacctgcatcaatggaacacaaggaatgttggacaattaaattttaatggaatcatcagagaaagcgcgtctttaaaaacttgcttataaagatggggcagaagatgaaggctggggcacatgatatcgtaaccgaagggagaggtggtttttggcggcctactgggggggc

SEQ ID NO: 411734 - DNA, 153 bp, Homo Sapiens
cttttttccttttaatcttgaaaggaagttacatataaccatctttcttttcctgatttataaatcttcccatatgctgtttcactaaattgctgattttttaaggggtgactcagaccccaattcaaagatgaaaaccaaatccttccccag

SEQ ID NO: 411735 - DNA, 632 bp, Homo Sapiens
  misc_feature (610)..(610): n is a, c, g, or t
caactatggacttatttaagaaaaaaattattaatacaacagaattgcacatatccacaattattttgttcaggtttttcccatcaaaaccttttcaaatatgaaaaaatcagaattggctaagtaaatttagtttcctcttctaccaggcttgcaaagggagggcttccacccaagccacacctacatctctgctccaagaatttgctactgtatacacaagctacatggaatattgagaaaactgatttaaaatgtattcttggaaagtggcctctgagaggacttaaatagcagttaattcttcagaaaaatgccaaaccctgagtgccaccatgggcaagtcagctatctcagtctttcctcctaaagtgagcgttgaattttatactctgtacccaactgacttcaatccatctttattctctctaccattttcatatttaaataaaaccttttgctcttatcaaaaatcactttttaggacaagctatggtaaaagaggaaaccacgaaaatctcatttaatcaactggtatacaattaatttgcctgttgccttaagttgaagtgttttaatacattctcctgtatttcgtttgcttatatantcttttcccttttggtttattc

SEQ ID NO: 411736 - DNA, 375 bp, Homo Sapiens
ggtatgaggccttaagctacgttatatttccaggagcaggtcggggttatattagccgctcgtaatttaaggcccatagttaggggtatataatccggagggaagagtagtttccctcccctcctaccgcggccccttacaggtttctctcgcttcctcttgccccgacctaccgatttcaagagcagtaccattcctacacgtagtaccaggcgaacgccaagtacccttagagattctttcaagaagccgccgccagtacctcctcgaagaagtcgcagaaacgaagcagtagagatcccagatcagcgataaaagtaatcattcaatagccaggcaccgatcgatcggggtcaggttacagtttcacctccc

SEQ ID NO: 411737 - DNA, 644 bp, Homo Sapiens
  misc_feature (447)..(498): n is a, c, g, or t
ggatagatttagatggagctagcctccccctcaacgcgggatttcgccatccgattacagctcacagcagtcgttgaaaagataaaatgtccagcttactaatcctggatataatcattcccgaagcactgctctgaggcaagaaacctggaattcatgctctccaggctaaggggccaccgcattggataaactctcacgcaccttccctggaccactgcacacacctaccagggtggcacggtcctcaaaaatatcccttaccttgtgaatgaccatgcatataccctgccgcgaccaccgacagtcaccataacccccctccgcgccccgcaaagaccctctgcttaccattccacaaccctcccattccgtatagataccaaggccacccacatttcccctgcgccccgctcgaccggcctcccgtcgaactcgcacttacannnnnnnnnnnnnnnnnnnnnnnnnnnnnnnnnnnnnnnnnnnnnnnnnnnnacaggacgcttccctgcccgccccccttaagccacatccaatcacctctttcacactgggtctctacggcacttttgaccatcgctcccctctgccattgtggctcccacccgccatgggcccctacctccattgcgcatgcttcc

SEQ ID NO: 411738 - DNA, 201 bp, Homo Sapiens
tcaaagacttaaatcgtgaccttataaggagcccccatatcagaactttgacgggtaaagccctcaaacttgctagggaatgaataaagccaaaggacggccctaaggccctgaaatttacgggccacctggcctaacaccaaacctctggcttaatccctttaagcccgccgggcactttcgggttcgccgaccctttct

SEQ ID NO: 411739 - DNA, 769 bp, Homo Sapiens
  misc_feature (538)..(538): n is a, c, g, or t
  misc_feature (561)..(561): n is a, c, g, or t
  misc_feature (602)..(602): n is a, c, g, or t
  misc_feature (630)..(631): n is a, c, g, or t
  misc_feature (682)..(682): n is a, c, g, or t
ggagggctgagttaagttttaggaggagaatgtggttgagaatattttgaaaggaatttatggagtttgtgaaataacttcgaagtcctcttcctttacaatatttgaattcatatttgtaccttctcaaaatagtgattcatttttcctagaattacaggagggagctcttttactaatgttgttttgtttgcaactttgatggcttataataggaagtattctagttgtaaagaaaactctttagagacttttgactggtcagtatactgaggtgtgagatttgattcatgatgaagaaagcctatagattgccaaaaaattaattctccaaaccacctttcactctcagaaaatgagaccacaagggagtatgctataaatcaaatttgccaaccaattatgtagatattactcattctaggactaatgatgatggtaaagaagttgccagtgttatggcaatgaaaatttagaaaggagggagtgatgatcttctagatgtatatgaacacctgtctatatctgcatgtatatngtttgacctgcagtggttgcatntgtgatatgtgttcaagaatattccttgctacaaaactganggcccattgtcaaaattgtctttatggnntgttttatggtcacgtgtaacaattttcttacttacctacaaaggttcttngatgaccattttattatattactaatcttttaaaaaagcttctatagcttttttatcagttgaggcctatatatttacacgtggtgg

SEQ ID NO: 411740 - DNA, 594 bp, Homo Sapiens
  misc_feature (427)..(427): n is a, c, g, or t
  misc_feature (505)..(505): n is a, c, g, or t
  misc_feature (532)..(532): n is a, c, g, or t
  misc_feature (567)..(567): n is a, c, g, or t
gttccaaatattgcacagggcatatgtatactaaaaaagtattcattggtgatttgaaatacaaatttaactggacatcctgtatttttatctgctaaatttggcaaccctacatatattcccaggagcctctctttgctctctaggctctcctagttgaagattgcctgtaatgttgtttctcatctagcccagacacaggactctgacttaaggaagccaggctggtgactcatctaagtgggaaatttacttgctgactcaagaggacatagttcttggcaaacttttgccttagaataaaccaaaagggaaaaaaatatattagcaaacgttaaataccggagaattgtttaaaacactttaacttaagggcaacggccaattaattggatattttctttcaagtgattaaatgaagatttcnggggttcctcttttaccatagcttggcctaaaaagggatttttgattagagcaaaaagtttatttaaatatgatgtanagaagaataagattgatttgaatcaanttggtaccagagtttaaattcaacgcttactttangagggactgggtgctgacttgccctgg

SEQ ID NO: 411741 - DNA, 100 bp, Homo Sapiens
ccccttgctatgagataagtaatattcaccctggggtcttcttgtccatgcatccttggatacacatggaggagagcttcagaatagcaaaattaagggc

SEQ ID NO: 411742 - DNA, 418 bp, Homo Sapiens
caaataccaaactaaatttattttgctaagagaaattgatgaataaaagagaaataagtacagtctaaatttttagatatatggggaaaaaccctgagattactaattgtgtatcacagtcctcttatgtatatcctgaaaatgatggtatcaatataatacgtacagtggatttacattttaaacttgatctattacttttgaatatttgtcttacactgaaaataaattctgcatcttcaggaaaccaatatgaataagctaaatattgacttaaaatagttaaaccccttaataacttccttcaataatttctattatttcactgcttaagttcagcatttgaataacaaaggtaacatatgtacttaagatctcaaaggcccattacattctattaataatgcccatatttctg

SEQ ID NO: 411743 - DNA, 503 bp, Homo Sapiens
accaacaagtctcctagcattatcttatctttgttttttattactgtacgtttactggaaattattctggaggttgctgtctcagatcagcggactttttgggtcgtaggaacctggtatgagtcgtcggtgggttgcgtatcgaaggggtcttgttgtccggagtcggttagtaattatccttcccattcgttgtgggacgcgtcggtttaatcgtttagttctaggtattcggatccaagcaacaacctgtcggcgagttcgattcatgcgcttccttgtaattcgatatactcagaaagttcttattcggaggataacgtttctaaggcttcctataacggtatttcggtcgagccgtaaggctcattttataccagggccccttcggataataactttcgggctcgtgatcgttatacggtagatacggcgattcggtctaaggaaatagaggcagcgtagggtgactggtctattcgcgtacacttggaacgggctgg

SEQ ID NO: 411744 - DNA, 381 bp, Homo Sapiens
tctcctctcactttttcctacctagcggaagacgatgggggactcgaggtcgtgctctcgttccgttcccagaggatcctagtgcttaagatcggggtttatttcctctattagtatcaaacgtatcaataaggatcttagattcgtagttttagatttgttgcagcacaagttcaataagtaatatgcagtattccagctcccgacttaggagagtcgagtaagtcggcgaaattatctcttccttcccaaatattgccctaattaattctctttcggagttaattcgcagcgggccgaccgtcgatagtacggctcctttctttcgtaccctagatacattagccatcgaaagtctagccccgcgaccctctagcgtcg

SEQ ID NO: 411745 - DNA, 543 bp, Homo Sapiens
ggcaggcggcccctcaaaaaaggagatgtcaaaggccccgtgaaaaaaagcttcgggggacagggctcctaatgggtttgtccagtaaataatgggtaataatccggccaattggtgggtcaacgaaaaaagtccaactctaagatgaagagatttattttgacccaaatgtgagtgcccgtggccccttacaaagcccccaggaggtccttaaaacatgtgcccaaggtggtccaggcccacttggttttaacccttttaaaggggcctgagccctcaatcaaatccctttaagaaaacccttggtttggtccaaaaacggggggcccctcaaaggcaaaaggggagggggcttccaggctatagggaaatttaaccatttttgggttaaaaatgggttaagtttgtttaaaaacctggggtccccaaaaagggaatgttcaagttaaaataaaaaattgtgttccccgacccccccgggtccgactgcttgttttccccgttcagtaacgaaatccagccagattgggaaaattgcctttt

SEQ ID NO: 411746 - DNA, 635 bp, Homo Sapiens
  misc_feature (286)..(575): n is a, c, g, or t
ccgcacttagcctgagaggattttcttataaaagaaatagataaattgatagacatttaggttgattccgtatctttactgttatgaatagtggtgtaatctacatggaggtgcaggtatccttttgatatattgacttcctttcttttggatacatacccagtagtgggattgctgactcatatggtagttctaggtttagtttttgaagaaatcgccatactcttctcataatgactacactaatttgcatttccaccaacagtgtagaagagttcccttttcnnnnnnnnnnnnnnnnnnnnnnnnnnnnnnnnnnnnnnnnnnnnnnnnnnnnnnnnnnnnnnnnnnnnnnnnnnnnnnnnnnnnnnnnnnnnnnnnnnnnnnnnnnnnnnnnnnnnnnnnnnnnnnnnnnnnnnnnnnnnnnnnnnnnnnnnnnnnnnnnnnnnnnnnnnnnnnnnnnnnnnnnnnnnnnnnnnnnnnnnnnnnnnnnnnnnnnnnnnnnnnnnnnnnnnnnnnnnnnnnnnnnnnnnnnnnnnnnnnnnnnnnnnnnnnnnnnnnnnnnnnnnnnnnnnctgcccggcgtttacacgtcggactgggcccttggggtaccaactttcgcttgagacttc

SEQ ID NO: 411747 - DNA, 120 bp, Homo Sapiens
caacacccaggcctctctcctcaccgactgtctccagttttcctgtctccacctggattccctcctggcctcatctctgctccactctctctatccttcctctgggtctttttttaattg

SEQ ID NO: 411748 - DNA, 707 bp, Homo Sapiens
  misc_feature (500)..(500): n is a, c, g, or t
  misc_feature (608)..(608): n is a, c, g, or t
attgcacttatgcaggggcagtgggtccattcctgcggcattcctatgatacccaattatagtaactgtgtttgtgttgctcagttagaagttgaatgagctggagatttaatgatctagttaatcagtttataattggtaatcagaaagactgagggtttaatcagccagtgtgatatcatatgagccactggttcccagatgctggtccaacaaccacaagtattcacagatttctaggcccatctggggagattcttattcagtatgtctcaatatagactctaggaatctatcatttttcgaggttccatggaagtttctggtgcagggatgtcaaagtatgcatggtataatgactatgtcttttagtgataatgtttttcatctctgtgtgtctcagatactgctggaatgccttaactaccttctttaatggaatatgtttatatgggcattctgggctatgtgggagaaggaacctcaggctggccatcggngacctggttctagccttggttctgccactctcttaacctttcatcaggttagagaagtctaatctctgtgtaggtctaattcataaattgagagcatcagattatgcnggcatttttcagctttctaacattcttcgaagagctttgcctccctaggaattgctttctgtgcacttgtcacgaacagctgttgcctcatttgtttcg

SEQ ID NO: 411749 - DNA, 265 bp, Homo Sapiens
  misc_feature (152)..(153): n is a, c, g, or t
  misc_feature (244)..(244): n is a, c, g, or t
atttctatactcatcaaactgtaggggttgtaatagtttatccgatttctcgctgtaggggtacacgagaaccaccgagcctgatgtggttagacaggcacaatctttactaccgcaatccactatttaaggtgatatatggaagaagaatnntgaagagtcgaagagcatcctcaggatgtgatggaacaataccaggactatccgtatgactacgactattgatatcaatggtgtggacaanttcaagcgatgcatggtgcgt

SEQ ID NO: 411750 - DNA, 399 bp, Homo Sapiens
gcggactttttgggtcgtaggaacctggtattagggcccgtccaggtgtagatggggaagtggagttaatacgttagcggtttggagtcgggcccgctgttccacgcgattttgtggagatttcctgagaaactctgctctgattaagagtcgaagtcgactggtgagcacgggtcttggaataaatgcgaggctcggagggctcccatttcggttaagacttgtaaggttgtttgggaatcgtcgatgtccgacgagaaggatttatggtgctcgcctgaaggtaatgtttcgtcgtggtggtcggcttgtaccggggcgtcggacgagggtaagacgaagtcggaccatacttcgggttcggacagaggaccctccagagagatgttcgtagatttg

SEQ ID NO: 411751 - DNA, 386 bp, Homo Sapiens
attctaagtttaaatcttagactagtaactaaacaggattaacggagacaagtcttgaagaagcacgttcaattcagtttggacgttaagcataatcgttaccagcagtaataccagcctcttggctattgcgtgaaacagctagagccccgatctaagtccgtacggagtcggaaacggaaccctaagaacataactccgcaccttactattgggatagtcctaatatagggcttatagtgcggggtaccctttagcgctcacttgatagttctccaaagttatagttcacgcgagcttaattgcctaaggtagtagcaatacgttcccactaaatggtccatagtcgcaccttaatataggaacttttatattgtgtcgtgtcc

SEQ ID NO: 411752 - DNA, 385 bp, Homo Sapiens
aggcaaaattaccagacagagggaaagttagagagcgaaggagagttagggagcgaaataagggtcgtaggaaagtgtttagtcgaggacgacgcatttaggaaagttaaaagaaaaatcaacaaggggtcggtctaccattctaaggagctcaaagaggttacatacgacacgaaccctagtaacgaggatacgacaagagaacccgataacacggtcaaggcgtaggacgagaagagagtacatagaaaccgggggtgcccccgcggacgtaaagcccataggattttcctcatttcagaggcttaagggaacctatgggaggtcgtacggttttatgaagggataccgaagataccttccacgaggcgttttcggtaggtcc

SEQ ID NO: 411753 - DNA, 364 bp, Homo Sapiens
tttgggtcgtaggaacctggtatgagtttcaataaatcaggaggtgcttccgtttcaccatcacttacttctacttcagtaacaacttttacttcttacacacttaaataataaagtacaacaccctgtttatcaagttaactatcccaccgatcttcagttgtagattcttctacctcaattcgaactggaggataattagcaagtcatttccccattactaccggataagcagtacttgcatcacatcctataataacttcaacttcaacattattcactctttcaaccgaaaatcaaacatcctaacgggttcaatatactccctctctgattctttttaatgctctcttctctactattc

SEQ ID NO: 411754 - DNA, 359 bp, Homo Sapiens
aaagccttaaagaacccaccactaaaatcaaaattcctagccgcatacaaagcaacaaatcccataatagtcgccaagagaaagctgcgacgcaagcccacatacaccattgaaggtaaagaggataagtaaaggagagtcttagccggaacgccgaccatacctacgtagtccttctccgacccaaatatctacgatataccgaacgaaactactacacgggaaacctataatattccgtcgagtagcactttgctcctggtcgctcgcaagagtttctagcccgatgtagtaggtgacgcagctgctgaaggcgactcccttaccggcgtcgcactgccccgtaaccgcctatgttc

SEQ ID NO: 411755 - DNA, 464 bp, Homo Sapiens
  misc_feature (41)..(84): n is a, c, g, or t
tagaactagtggatcccccgggctgcagtgtaattcggcannnnnnnnnnnnnnnnnnnnnnnnnnnnnnnnnnnnnnnnnnnncgtctatactgtttttcctgctcatctgtgacttatctctttgttaccaatgtaattcttcatttttctctctttttatttcttccactatattctctgattctctctatattctctcctttttaacccttttcttatggatggctgtccctccccatccatatacttttcctgtgtataccaagcggcctttgctcttctttcttcatcctccccactcttgtttcttcctgccatgtatccctgcatgatacctattcagtgccagttttgcccttacccctatactatacagttttgacctttttctccccttaactaattttttactattcttgcctctatgatcttgcttttttgcttctttcttttctttcctc

SEQ ID NO: 411756 - DNA, 421 bp, Homo Sapiens
aaaaaacaattacttgctccagagttcactcatttgccctaaatatctagaccttaccccagagttaccacacaatgcatgctgtgtccctgcatcaccaaaatacaactcaaactcctcatacacactctgataaatagacatacctgacaatgtacagcttggcatcatagcaggactggctctacaacagatttattctacaacagacacactcaggctgtagagacacctaatctttctttaaggtattcagacccacccttttgggcacagtcacagatgtgatccaggataccctcacccatcccacaatactgatgcaacccacagcgtacaaacacatcctacagcataacactctaagcccacagtgctcagtgtcaggcacacatttgccatacagatttacttcacaccg

SEQ ID NO: 411757 - DNA, 711 bp, Homo Sapiens
  misc_feature (569)..(569): n is a, c, g, or t
gttcttctaagggaaaataagagtggtcaaagagtgtatagcacaatttaaattctcactaaatttttcattgccttgtagaaattttcatcccattatttagctttttggctccaatgagattttcaaaatagtgcatgtgtttagttactaaggcataatttacatgcagtgaaacacacagagcttgtgtccagttcaattgttttgacaaaggattcaccagactcctgtcgtgatgtagaatctgcctgtgatccatggagattgcctcgcaggctgctccagcgcccgcctgccgcgccagacaggagcgctgctgtgattttaccgacactctgagtgttaggagtcacacgtgcgggcggttttgcgtctgccacggctcacgcagagaactgttgttgagcttcctctgaggtgctgcacaaggagtgggtgtgggatgcactgttgcgtgctcgtcgtctctgagggcgcccgggtgggtttccgctgtctgaagagttgggcctatttttgtgcacgtgtttggcgggcttgtgttgtttctcttgggcgtgcccggngggaaggctgcatcccaggtgtggaagtcccagccggtctgtgtgtccccacaaccgataggctgtgccgtttggtcgtggaggctttaggttgcatttccctgacgctcacccgtgttgagcactgtccactctctgttgc

SEQ ID NO: 411758 - DNA, 611 bp, Homo Sapiens
  misc_feature (367)..(532): n is a, c, g, or t
cggcactagataacatatccagccttgagaagacaagggggtggagggagtgttccagggaaaggagacaccttatacaaaggctggaacaaattgaatgggttcagaaaacaaaaggaaggcccagagtgactggagcgtggcatttagggatgaaagtcaagtcagaaaagtatgtaagagtctggtcaagtaacagtctcgtaggccaaggtaaggaatttgggttttattttactgcaatgagagatataggagatttcacacagaagcgtgaaatggtctgatatagggttctaagaaccattctgaccgccattagaaagtgcaagtttgggaatatggcgatcactgagaaagctatggnnnnnnnnnnnnnnnnnnnnnnnnnnnnnnnnnnnnnnnnnnnnnnnnnnnnnnnnnnnnnnnnnnnnnnnnnnnnnnnnnnnnnnnnnnnnnnnnnnnnnnnnnnnnnnnnnnnnnnnnnnnnnnnnnnnnnnnnnnnnnnnnnnnnnnnnnnnnnnnnnnnnnnagttcttaagaaggttaagcgcgaggatttctttagcccccagagattatgtgatgagattttttggcccctgggcttc

SEQ ID NO: 411759 - DNA, 498 bp, Homo Sapiens
actagtctcgcgccttcacactcttttcaccctccttagccaagtgcaatccctttgacatccactgcatcgccgtccccaacacaccagaccactcccctctctgccaatccctgaaacaggccccattgttcacctgacccatcaatccccggccacatgctttgcggggagccaacccgccagccactcacccctaccaagactttcacccttcccggccaaggtcgcagtcaccgcccgcgcttcggtaacgcccacttctcaccgtcccaccccccacctcccactccgaccctctcccgcagcctggaccccattcgtacaccctgtcgccccacgaacgcctcactccatcatcatcggcccactgctcgccaccctccactcctcttcttccacctctccgcgaccatccccttcttctacgctctccgctatcccttccccgcatccgtctccctcccctcacccccaccttccctcctccacttccct

SEQ ID NO: 411760 - DNA, 412 bp, Homo Sapiens
  misc_feature (212)..(212): n is a, c, g, or t
aactcgcccctatggttgggaaggtgtagaccatgttatgcagccaaatgccttgcttatggttaattctttttacttcccaactgtaagaatgtgtttggggatgtgaataagaaaaacctagatattcttgggcatttaacgttggcaaccaattccacggtccaattgggtaacttttttaccccctttgggaaactttttaaaattanattggaccaatagagaaattccctatcttggggcttcaaccaatgggtttgaatattggctttggaaccctttttcttccccttttaatttaattcaaccctcttgggctttcttccatgggctaaccaattttcctttttaaatggcttgtaaacaattaaatggtttcttatattttcacattattccactggtctcc

SEQ ID NO: 411761 - DNA, 650 bp, Homo Sapiens
  misc_feature (184)..(193): n is a, c, g, or t
  misc_feature (588)..(588): n is a, c, g, or t
  misc_feature (590)..(590): n is a, c, g, or t
attttactttgctgaattttgtgggtaatttggtggatatatcctgccttatttaggattatagctggataagaaaattgccttttcattgtaagtgcccagttttggtctctagtttgaaggtactacatactgccgataaaggaaaacactcccctacaccctagtttttgtgttaccaagnnnnnnnnnncagtattggtttcatagtaggactcaaccagaattggtcctacatatatgtgagtgttcagtttttgcaaataaggtttttgagtgtgataaaacactacataagtgctaagtgtattgagaatttgctgctgattgtatttataacaattacttgacgtttgcagaaatttagcactttccctccaaatttataggtgtaagataagcgggggcaaggtgcaccacattttaaaactgcaaatgtgtgaaaatttatttagagattcagattcctaaaatgaaatttcaccacctaagtcatgcacttcttagccttttacaagccaacagactgacatgaagattgtcacagttcctaagattagcacatatcaaaaataaactttataattnanagccgcgtttacacttgtgactggccctgcgtacccacttatcgcctgagactccctttt

SEQ ID NO: 411762 - DNA, 713 bp, Homo Sapiens
  misc_feature (644)..(644): n is a, c, g, or t
  misc_feature (697)..(697): n is a, c, g, or t
gattttggtgtttctatgattgctccttttagggatttcttatcttgacttctaaccactctgacagcccaaactccattctctgactcctcagataggtaagactatgacattctgcctgagtcctacctgcccagtgccatggacaggggagtgcactcaggtaaagttgtataaacatgcatatctcctttacagcattgaatcccttacagttgctatcacggaaagtaatcattaggtgacatccccctatttaccctgaagttactgaaccatcttccctggatttgtgcagggtgtctcctaatttacgaagattccaattagattgggagtatgacttaactcatttaagtcacccaaatgctatttgatcataatttagtgtcttgttaacctaatggcttgaaataaattgacgcacttctgaaaatagggtaaaaatccctgatttttcaaggaggctaatcttccgtaaatgctaagcactatagaatcaattatgttattaatttgctcttggttgcaagctacaaagcttgatcaggctaattacagattatgctctgaggaaaatatttttatatgcactatttttttcttgcggcactttaatatgagggttaaaaaaccttacttangacaaataagccttcatgtattactttacctgcaggccaatttttaatacttnaacaacgtaacatttt

SEQ ID NO: 411763 - DNA, 435 bp, Homo Sapiens
caacacttgataggccgtaagaagggatctgatgaacaaatggagaggctggctttaagtaggaatagaaacagtccaattccagtactaggaaggcagagtaatgggcaatgggggcaaagtagtggtggtggtggatggaaacaagtggaagttttctaattgctcccattttcccagcaaaataggaaacggggtcacataggacaatctctagtgcttgtaaatctaaggaaataaaaagacaaagatggtgataacataataatttgtgctgttgctcttcctaaaatgtgctctaatttttcagaatccgacctatccactaaagtccagctccagtctagcctgcttcaaagcatgatctctttttttcagttaaattcagattgtgtgaactattcatctggctcttggcatgttgattatctttaa

SEQ ID NO: 411764 - DNA, 445 bp, Homo Sapiens
tgaggatactgcagtgaataaaaattcttgtcttcttggatcttgcttactataccagatggtgataagtgctttaaaaaattaataaagactcagagggtgatgagagttcagtgggattgcaatttttaacaagactgtcagagaagttttcaccgaaatggtaacatttgagcaaacacctgaaagaagagtgagccatgaaaattcatgagggaaggtggtctcagacagagtttgatagtaatgctgtccttgctgtagtcactaaaggattcaggctgaggaatgttccgtcttgacacatgctttgattacagagctgagacaaaaaagagtactgaatcttctgacactcttaaaacttcttcctgaaaatggtatgactgattttccctattttgtgcttctcagaagttggtggtgtgggcctttgctctggctg

SEQ ID NO: 411765 - DNA, 504 bp, Homo Sapiens
ggtttcttaagtggggtgactttatggcatctttagtcatcgatcaatgggcagcaatcagaaacaaagttctcagcattatgcagttaatgtccttcatctacttctaacacttagtaaaggaattgattggctaggtataaaaagagaattaacgaaacctattttattggatctttaagtaataatatctaaatacatttcgttcaaacatacatatgtagctgtttggacattttggacaaagacacattgagttgatttttatttgtttttctgttccagaaacttcatcaagttacgggcctggtctaagaaaacacattgcaatctattttggcagacttctttcaaataaaatactaatttcattagctgatagtatagtaattggcaaacatttcctctttggaaataccaatttgggctagccattttgcagaaatttgtgtagttttgattataacctgttggagagcatttctttacttatacatgataatc

SEQ ID NO: 411766 - DNA, 594 bp, Homo Sapiens
  misc_feature (48)..(48): n is a, c, g, or t
  misc_feature (60)..(104): n is a, c, g, or t
  misc_feature (120)..(174): n is a, c, g, or t
ctctcaccgccgcccctccgacactcctctacgccctcgcgctccccncgcgcgccgctnnnnnnnnnnnnnnnnnnnnnnnnnnnnnnnnnnnnnnnnnnnnnatcgaccagccctgcnnnnnnnnnnnnnnnnnnnnnnnnnnnnnnnnnnnnnnnnnnnnnnnnnnnnnnncggcacgaggtctcgagttttttcatattcggttatgtggaatatatgtttaactgaagattttaagaattcccttgaacttgctgtggcagtaaaggaaatgtcagtttgtccttttttgttatacttagaattacggcttttagggaatctataaatctcagaggggaattatgtggatggttttactaacttggaccataaagctcttctgggttagtcctgtgggaaatttatttcactttagtttagcaatacctcataaactttctaagaatctcaatgtgagtctcaaggtgagtataatcttaatgttttgctttagtatttttcatgctttaagaattttggaggtgtagttgggaagccataattaatgtcatttaatgttaacttttttccttttgatctatcattaga

SEQ ID NO: 411767 - DNA, 1335 bp, Homo Sapiens
  misc_feature (581)..(581): n is a, c, g, or t
  misc_feature (681)..(681): n is a, c, g, or t
  misc_feature (722)..(722): n is a, c, g, or t
  misc_feature (756)..(756): n is a, c, g, or t
  misc_feature (763)..(763): n is a, c, g, or t
ctacagtatcacgacgagtctgactatcacgctcatactcactatatacctactcgtcgtagttcttccatctatctctactacgattgacaattgctactctatagatctcgttgagctaactatactgctgaatactatgtcctctcagcactactatgactctgccactatacttactcgttcaattgtcgcaatgactatatctacacatactctagctgattgatgagttattactctgactaatctctcatacactctgtctaacgcatgtatatacctgattactactatctcgatacgctacatacatcctgctctctctactacttttgtagtctagatctcccactgcaattacgtctactctgcatcaattctatatatctctatctacttatctcactgctatcttgtctgaaagttcatatcttgattcaattgcttatatgacttactgattgtcttctaattgtatctgactcatctatatttcacattgtacttctgtaattcacattgacatttgtctcctaactacacattcatctaccttcatgtgtatgacacacgtcctnctaatcaaccttctctactcacatatatacatcttatgtctacaatgattatcgctaccacatcacgtactcactagtcctcttatcatcttgcaattangtatcaatgtcgtacgtccattcgtctacgctctatacatntcattatgtcctcaataccatcgttaacatcttntggctancactcttcatactcgactagacatctgcccctccctcacaatatctgcgtctctcgcgatctcatctcacgttgtcatctatttctttacttccatacctatagtattaatatactaatcgtctagtctatgacatctcttcctagtctactctctctctctatatctacgtgtgacgtactcatgtccccactcgtgatctagtctctctacaacttatttctttcacacccttgtaataatcatggtgatactcacctttatgaccaatctacccccattctgtctcatcctctcttacgtgcctccttctaaaccactgctttcatcaatcctacgtcaacttcttttgatcgcgtacactctctacattcactatgatctctcctctatgatgtctcctttcatcctcgtctataatctcatcttaacctacttttcgcagttctctcctctactttctcattaatctaccatctctccttccgacctattcatctatccatatgcgttactgtatatccctctactattaatcatcatatctatccatcataacctcatgtccctct

SEQ ID NO: 411768 - DNA, 592 bp, Homo Sapiens
aaagagccgaataagcaaccaggagaacacacggaaaaacacccgtaaccatgcaggtactataatcgagaaatacaacacacaaaagcgctcataaaaaagtacatgtgcgtaaacctatgagccctaaccactcattgaggtggcacagagacagactgtatatgccaatggctgtgtaacagtgactgaatgcagacacaatagcaaatacattggtgatctaatgcagacttaaaaacacagaagcacatatgctaagtacgactctcagaaccaaaagcacaaatgataggtgccagcaccatgatggaaacacatatagaggactccagataatcagcgtgaaactgaaggcaagtgatctcgatataaaatttaacagatgatggaaatgaagaggcgcagagacttacccaatgtcacagacatccagcgctagagctgcccgacacgatgtagaaaccaaacactacaagcatacaggtggaaatgcgaattaccatgggagtattggggcctaaactcaatgccaggatatgaaatttggacctatcggcggacagaccggatgcgactatgacatcacatc

SEQ ID NO: 411769 - DNA, 524 bp, Homo Sapiens
  misc_feature (209)..(269): n is a, c, g, or t
tcgcttagcagtttcgctcctcccccgatggcggctctgctctcgtcactcgtcggatccccccgggcctgcagtgccttcggctcgcgctgcttctccccttttctcttccgcctgcctccttgtcttggccagcccctgtctcctcgtgcgtgccattctcaacctcttggtttgctccctttaagccttcgggctttctcacactnnnnnnnnnnnnnnnnnnnnnnnnnnnnnnnnnnnnnnnnnnnnnnnnnnnnnnnnnnnnnttgccactgccaacattccactcttgtgctgtttgctctcacttccgttgcctcccccattctgcttgccctctcccctttctgttcctcccagctcgcgcttcgtcggttgcctttctcagcacttgtctcttgctcccttttccctcctccttgccatcctttccaggccagtccccagtacatattctctgctgtttaccatcgctttcgcttcctactctgcactactagccttcgtggcctggtttcctc

SEQ ID NO: 411770 - DNA, 694 bp, Homo Sapiens
  misc_feature (401)..(401): n is a, c, g, or t
  misc_feature (425)..(434): n is a, c, g, or t
  misc_feature (481)..(481): n is a, c, g, or t
ggttcgagcagttttatcctctagaatttttatggtttcaggtcttatatttcagtttttggtcctcttgagttgatttttgtataagatgagagatgagaatccaggtttattctttaatatgttgcttgatgatgatcccagcactatttgctaaatagggtgtcctttacccactttatgtttgtgtttgctttgtcaaagatcagttgactagatttagctttatttctcagttctctattctgttacattggtctatgtgcctatttttatatcagtaccatgcctgtttgatgactatggccttgtagtatagttgtcaggtaatgtgatgcctccagatttgtggtttttggttggttttgctttggctttccttggctatgcaggctcttttntggttccatatcaacttcagggannnnnnnnnnattattctgtgaagaacaatgagagtatttgatgggaatggcatcanatttgtagaattgctttttgcagattgatatttttacaatatggatcttcccatccatgagcttggaatgggttctatccaatggggcatctttgaatctttcaccatggtttgagttttcttggcctttcacctcctggattggattttcctagtatcttaagttttggtttttgaactttggggaattgagtctgagatggcctcttggtt

SEQ ID NO: 411771 - DNA, 678 bp, Homo Sapiens
  misc_feature (272)..(564): n is a, c, g, or t
gcttctttgagttcaccaaacagcacatttagtaaactttggttcatttttcaaatgcaaacattctgaagcctgaacttctggttcaagtgttctaacttggcttcaaggtcagaacacaaattgaaggatagatcccagaccattttagaatcatgatggcaacgcatatgccatttgtattgaactaactgaccaatgtgctgagcatagacgatgcaaaggagaataatgagaaacatgccactttagcacatgaaaatcatccattnnnnnnnnnnnnnnnnnnnnnnnnnnnnnnnnnnnnnnnnnnnnnnnnnnnnnnnnnnnnnnnnnnnnnnnnnnnnnnnnnnnnnnnnnnnnnnnnnnnnnnnnnnnnnnnnnnnnnnnnnnnnnnnnnnnnnnnnnnnnnnnnnnnnnnnnnnnnnnnnnnnnnnnnnnnnnnnnnnnnnnnnnnnnnnnnnnnnnnnnnnnnnnnnnnnnnnnnnnnnnnnnnnnnnnnnnnnnnnnnnnnnnnnnnnnnnnnnnnnnnnnnnnnnnnnnnnnnnnnnnnnnnnnnnnnnntttcagacctacagcattgaagaatagattaccaacttccagatcaaaggaatgtatagaccatgaatgactctttttaaagcacctgaattatgccttgacatgctcatagat

SEQ ID NO: 411772 - DNA, 454 bp, Homo Sapiens
gcattcacactgccactgatatccgcatttttagcggtcagctttccgtccggtgtcagggaaaaggccggaggattgccgccgctggtaatggtgggggccgtcaggcgcttcaggaacacgtcgttcatgaatatctggttgccctgcgccacaaacatcggcgtttcattcccgtttgccgggtcaataaatgcgatacgattggcggcaaccagaaactggctcagtttgccttcctccgtgtcctccatgctgaggccaatacccgcgacataatgtttgccgtctttggtctgctcaattttgacagcccacatggcattccacttatcactggcatccttccactctttcgactcctccagtctgctggcgttatcctccgtcagctcgactttttccagcagctccttgccgagatgggattcggttatcttgcctttgtccaggt

SEQ ID NO: 411773 - DNA, 382 bp, Homo Sapiens
gtcagtatgtcctacaggcatatgggaaaggtggctttttagttttttagttagtactacattttatagtacaaaatttattcaagttactgagccaaatcacaatctaacaaataaatgccaaaaatgtatcagttcaccaaaaatcctggtcaccactcaatttcatcacataggaggatcaaatagaattaggtgctttctactcacttttgataaacttcagcaaacgtgacaggctagtagaagactgccctttactgctgtattgctgagataaatattctcagaaaagtcttgttagccaatctgatcttaattttctgtttcctggggattatgtttatcagggccgtgtggaataggctacatttatctcgat

SEQ ID NO: 411774 - DNA, 335 bp, Homo Sapiens
ggttcatttctacggctcatggcagctctcatggctctactttgttcttactgcatgttccttagttcacctgtgcatccatcatccatcagccatctaccttatgtttgcctactgtgttcttaatattcttatgcttcgtgtttcctctgaatcatcatggagtccagaatagaatccagtgttgcgtgatgtcctttataggctacactatatgaggacactgggatcccttactgagatttcatctctattttaacacagtgttttcaactttgatttcgaatcaatgggtcatgtccaggtttggtacctgcgtttttggatgtgctggt

SEQ ID NO: 411775 - DNA, 509 bp, Homo Sapiens
  misc_feature (468)..(468): n is a, c, g, or t
gtgataggttcatttcttaagtggtgctacagaaggaccctaggaaaatgctgatcttgtcctgagaggcaactgatttgagaaaatgattatactacagcaggaaggcagcaccagtgaacatatggtaaatggcaaaaacaagacagttttagaaactgctaattcagtagcagccttggcctttcccttaactcaagcaggctggaatctgtctttatagtcggcaactttccaagataaagcagtgataatagcagttggcaacactaaatatcaatatcatcaccctttaatgacatgttacccctttcagatctagaaaatcagggaaaaagtgatgtcccaactctactctaaaaacctgctcctactattttagtcagtgtttctttaaggaagaagaggactatgtccccaaaagctaactctgttttatagccctggtggatccctgaaaaccctatntattctatactgggctatggaatatgaaaaatggacctgtg

SEQ ID NO: 411776 - DNA, 669 bp, Homo Sapiens
ctcgtgccgcttggaatgaaaatgccttaaggaaattagtcaataatgtcacatatgttactttttctaattggatctgccatgattgctataaaactttgtccttccactatgactcatgagtaacttcaataacaaactgcttgggaattcccaatgccacagtagaactagtatatgcaaacattatttattatcagggtgcacataaagggaaactaggacaaaaacctaccctgtttcaatttgatcttgatctcttaagcatggaaaaagaatacttgttgctataactcaacaactaaaactcttgtttctcaggagaaaatgcaaaaagaaaaccagtttatttgtcattttaggttttgcaaatgctaatcaaagttggtctttatgcaatgcaatttttcccactcttaaaactgactgataacagcaaatcagactgaacctaaaaatgactccttcaaaagtactaaaagcctgtgtgcttatgtttatatatttgtctgtgaatggggaccaaatccttttatatgctggggaagaaattccttgactcttggtcattagcaagtcagtgtacttgggtgctcatgtcactaaaatacctcatttatccctcccaccttcttctgccagaatgatatatttatctgtttctgtctc

SEQ ID NO: 411777 - DNA, 436 bp, Homo Sapiens
tggaccgatgtgttgaaacagatatcgtaacgatgaaagggaaacgaacgaacagaagagagagagtacgggcgcagaacttacacacagtgatgcaagaattagccaacaaaaatagcgctccgttcgggaatggacaaaagatttaaacacaaggagggtaagagccaaggaactagggagtaatgagagtgaggcgggaaaggtggacataggccgagtaggaaacatgactagggaaggaagaaccctatgtaggaagcgggaattttggaaaacgagaattccaaaagtgggctatacaaagaaggctctgtagggagacacagggaagctgaaccatgctgggccactgctgaggggcagtgacatagaagggggttgggacgtatgcgaaggcagctggtaccactctctgggacaggggatcggacgc

SEQ ID NO: 411778 - DNA, 721 bp, Homo Sapiens
tgagataattcatgtatatatactagatatgaagatatcatgatggattcaaattactgaaagatgaggaaactataccagttttatacaggaggaaatattgttgggagaaaggccaggtgacatagtaactacaccgaaattgaaagtcagacatcttggatttggattcctgtcgactagtgataacactcagaacaattcacttaggttctatatgactcaatttcttaactttaaaatgctagtaataattatccttttctcatacattaattatgataactaaaaaatgtgtgtgggtacggggtattgttacagtccttactgtagtaccaagcacacagtaactctctctaaaattgcagatgctattatttttatcaaacatgtgaataagtgaaatgcaatatcatttataaaatgcatatagtgctacagaattattctatgaacaaataaggtatttgtttattcacaagaagaagatttcaaatacagaaaaaggagatgtagtcgtgggtataacataaagtacagagtactactatcatttcattttttatcacattcaaagtattaacaggtattttcatttgctcaactaataactaatggttacttttgagtccaataatagcaatacaacttcagtatgccaagtttccaaagtgtttcctggatattggctcattcaaatatacgacttctttagatacgt

SEQ ID NO: 411779 - DNA, 866 bp, Homo Sapiens
  misc_feature (640)..(660): n is a, c, g, or t
cacttcgtctcactcatctttttctctcttattacccactctattctccctacctttctctggaaatgactgttgaaattagaacaggagctaagaggagccagcagaaggggacggcaggaactaggaaatttaaggcggggagaaacaactgagagaagtggacagaaaaaagaaagcttatcataaataagaaggcccgggactcccgtgcgtccagtagacctgctctgctatggatcaaaacaaatgatttgtcattctgaaatgactctgaaagggggaatggaatgtgccccaacgatcaatattaaattttatgcctgctgcacctttcaaaaggctcaagaagacattgattcaagacccgtgttttctgtatgagtccacaagatcgaagactttatggacagaagtcatgtatcttcaacacagaaaatcctataacctcctttgatgttgaccgaggttgacttgcctccagaaataagagattctgctccatgctggcggtgtcctactttgccagaaatgtgcaggtgtcaggtggactacctggagaagatgctacaggagaaagtgaaccctgactcgcaggcttcttgagtttgtgagtctatgccttcaccttgatctggcnnnnnnnnnnnnnnnnnnnnnatctgttctcatgtttgcacttccaacaccattgtattagcttctcctgtgagtgacataccagtgtgtcccaagattacttaatgtatttagtgcacgggcctgtggtcaatgaagttataattaccattccctcttgtccttaatacaataacaacctcaagacgggcccgttcccaatcacccatattaatctattcttctgc

SEQ ID NO: 411780 - DNA, 400 bp, Homo Sapiens
gagagatccctgaatctttcaggcattataccctgctcctgacttacataacctacctcattagtgctgatctttgcctttctttacatggatcactgtatttcttacttcattatggtaacatgaattggatgctttccttgctgatactgattctcaatatttcagtcatcttaagtcagcttagaaatgactataagaacaagaagaaccagaacagcctctcttattagagttaaagatcttcgacctttcaagtccagaaagatgtaatctgaagagtatgtaatcttaaatctattcaacgatgttatttaataaaatatttttttgcaaataattacaggatatgcacattaaaggaaagtgcttaaagaattaagtttaagatatataaaat

SEQ ID NO: 411781 - DNA, 680 bp, Homo Sapiens
  misc_feature (539)..(539): n is a, c, g, or t
  misc_feature (647)..(647): n is a, c, g, or t
tgatgactttgccctggataaaatcttcagcaaattcctgttgtaaatagcgatagaatatgccgggctcttatttgtagaatatttaaaggatagtatggaattaaggcaagcacacaaaaccaataagggaattaagcttttgtctccagtgactcagccgggtttttgtgtgaccaaataattcttggtgttttgcttgtggtctcagtctctcactcttaagggttgtaaacgcaggcctgttttctctttttccagttttcagctgcccactaatatgcctcttattgtgccaatctgtgatgtgtcttttactggctaaagtgaggtagtagagtgacgtgaagagagcaccaaagaatcacaaacttctcccagagccaagctccttgattctcagtagctcttacaacttacagcttagatggttctgagcctgagttttggagttagatgggcctgagctcaagtcttagctctaccattttcttggaatatggctttgagcaagtgaccacctctgtgaacttgaattntcttaattgtttaatcaactaaatgaacaaatgtaaacaaggcacttaactgtattcctgatatagagtaaatgcttagtacactacccagccagtttttactctggnttcatttatcttcacagatgagtccctgagttc

SEQ ID NO: 411782 - DNA, 726 bp, Homo Sapiens
  misc_feature (502)..(502): n is a, c, g, or t
  misc_feature (696)..(696): n is a, c, g, or t
cagaaagtggccactggttatttcacctggccccaagacgatgcaaggcacccactctgctttttttgtgatgagatggagcatgactggccttgcacatgaccttcagtcactgcctctttgctctttggttgttgactttgtcggcagggaattcatagggaaggagagtcagcgacgtgctctcgtaaggtcatcttagaagaccactctctccaattattttaagcagctctttagagctttctacattgtaaagttctttatcctacctgtgtatccctagggctttacagagtggagattcagtaaatattttgacaagagtgagcaaatgatttaacagtcgatggagtgcaaattgccacaacttactgtagcgtttccatccacagcattcatggtcagtggctaaaatacttgtcgtaaaggtgccaagcctccaggcatctagcatggcattagcacaccgaagcatttattagactcaggaatatctctntattggctcatttcaaacaatacctaaaaaagaaacctctttttttaaagccttcaaaagatggcaggatgtattttttcctaagacccataaaacaggtaacataaactgttactatttcatacgtactaggtaccagaaatactcaaacacttatccaatggagcttggacttgtgtcctttcttgtagaantacatggctcgtacctattagacctgttct

SEQ ID NO: 411783 - DNA, 720 bp, Homo Sapiens
  misc_feature (443)..(492): n is a, c, g, or t
  misc_feature (587)..(598): n is a, c, g, or t
  misc_feature (685)..(685): n is a, c, g, or t
gggcactgaaactgctcatcaattatttaacaagtacatacggagcttctacactgggccagtagttacgctaggtacgatggtctcaataagcaacaaaaattattttctacaagatgcttaaggtcaattatacatatggaatgtttgattataggatccagagtactatggagaggggtagtagggacactgaactcagttttaatggtcaggaaattaggggaagtaacttttaaactaataaagtttgctggacaaaaggcaagttagattatttcaggcaaaggaaagaacataaacagaagtcacctcaggggtctgaaatgtggtaggccactggttagagttccttcgtgagtgaaagacatgcagggggtaggacatctaaagagtggttagatcatacagtgccttagccacattaagaagttcaggttggnnnnnnnnnnnnnnnnnnnnnnnnnnnnnnnnnnnnnnnnnnnnnnnnnnatgtggaggaggtaggaaagatcaagtgtcctttcctacacatagttctctctcagtctctaggaatcaggtggtggacttctttaagctgcacnnnnnnnnnnnnatttcccaagcagcatggcttgcctgattggtctctaggaactagtctagcctttttagatgagacagtactttggctacacaattntctcatggtgaattggaattttcttcatctcctgt

SEQ ID NO: 411784 - DNA, 658 bp, Homo Sapiens
  misc_feature (589)..(589): n is a, c, g, or t
  misc_feature (591)..(592): n is a, c, g, or t
taagaaggggtctcgcccaggctgctggagtggtgcagtggctattcacaggtgtgatcctcatgtactgcagcctcgaactcccggcccccggcaatcctcccaccccagcctcacgaccagctgggaccacaggttcacaccaccacgccctactacagcaactattttagatgtctataaatagatttacagaaaagttgcaaagagtatagacagaatactcctatccataccttctacaacaggggaaactgtttctgctgttgttaatatcttacattagtatgatatatttgtcacagtcaatcaaccaatattgatatttttaaaaaactaatgtccatattctattcatatttccttagttttgacctagtgtcctttccttgttccaggatcccatttaggataccacattgcatttactcatcatgccttcttacgttcccctataccacgagttttctcagactttccttggttttgaaaaccttgactgttttaaggaatcctgctcaggtattttgcaaaatagtcagaatagcttcaaaagagggcaagggatgacttagtcaaagaaagcttntnnaaatttaagaactttggtgccacggacaaggcattttctatgccctatagggtcaccgacctatga

SEQ ID NO: 411785 - DNA, 653 bp, Homo Sapiens
accctcctatctgtctggattttaattctacccattgatatcttttcttttgggtgatgaaagcacagacactggattttagactagaatatggcctccaagtcttagtttgtgggtagccttcagaaagttacttatccccctttggcactgatatttctctttaaaattgatgtattactgctaaccttatttaattactaggaagactaaaaaagatatcagcgcaacatatgtcctgcacagggccttccacttagcacaacctctctcccttcctctatcagctgctgtaatgatgaccaaatcaggaaattctggtcctaaccccactgtatatcttaggaggttcaatcagctgaagttggtgctggtgtgtctaccctagcaggttgctgagcaacccacagtgagttgtagcagccctgaaaacagtttgcatcaacaaggcttcaatgatcacagacaaacacaagcatttactaaagctgaagggacagcaaattgctagagtgctttcccaacccctttgcatttatgatttcttttctgagaatgatatatgatccaattacagagttcacgaaagcattagggagttcatgggcaagcttatactcatactcagcttgcccttgacatcactgatggtg

SEQ ID NO: 411786 - DNA, 663 bp, Homo Sapiens
  misc_feature (44)..(76): n is a, c, g, or t
aacatgctacatcactgttgaaaacaaacaaaaatatttcaaannnnnnnnnnnnnnnnnnnnnnnnnnnnnnnnnatgaaaagctattgactagcagcaatgattctaaagttatcttagcaccaagaccatggaggtgaaggggaagggattggtaggggatgaagggactggtggaaccaagaaagggctataacaagttcagcgttgatgacatttacactatggctctcaacggtggcatgaggcctaagagacaacatcaaccaagaaggaaggaagcccccacagttctataatgtctgaaccaagcaggctgaaaacattggggccttgcctgtggccagataacaccaccctctgacaaccaagagattaacctctcagccgaacttgccacatgtatataagacacatctgactccgctacccaaaatgacctgaatccacgcgataggatctctgcatataaaatatgcgtacatcagatgtaggaacatgaacagaagttgttaacagctcacgcacattttttcttccttggcaagtataccggtagttaaatgaatcaaagaccattgatcagactcctctaggttaatcgactacttggcaccgggaataggcaattggctatgctgcttattcgcggtttgggtggg

SEQ ID NO: 411787 - DNA, 762 bp, Homo Sapiens
  misc_feature (557)..(557): n is a, c, g, or t
caagatttctttttaaatggttcacagttaaatttaaatttctatatttagataggatagtgtttatataccaaccgcagtatccaggaaattcagtggtaaagctgacacatagcgagtttatagtctattttgtagtctgtgtatttagagaaggtttgaagcttacttagcaaaaaggattaaacattcaagcagaatttctttagcacaaatgtactatttgatttcatatatttgttgagataatagtgtgtcacattttaaagattagttctcaagaaaatgtgttaggtttatcttttaaaagaaggatgcattcaggaacagcttttatatgtaactttttatagtatttcatattggatagacttggtttggtgcaatccgtaagatttgatcaaatttggaagaagttacagacacatttttatagagttttctgtagcatctttatttatttcagatgggcgtattttatgctgcttcaactaatcaaagttagaaattgagttcgcctggtgcaaagaacgtgactatcatttgtcacattcttntatttttcatgtcattcttaagtagaatatgtatcttgacttattgattcctgtcttgctttgagaaataagggttgaacatttaaggggaactcactttattgagtattggttggaggaatttccatccagtaatttttggagatgggatcgttcgacagattatgcctcaattattctctggcggatcttcactgagctgcct

SEQ ID NO: 411788 - DNA, 357 bp, Homo Sapiens
gtcctatccgacttgatggtgcagagttggttcgcaccgcccagtgaggggaagctgttttctcgtcgattgataggctccgggtctgggtaggagaggctgccctgtatgaggtagcttgaagggccgctgacaggaggaaacgcttccgaattttccagacgtgttgacgtttgagggtgctgactacacgttaaggaactttattgtcacgcctttgggaatatactgccaggctcttcctagatatattcattctctttaaaatgagcatgtctacctgggttcaccagaaactaagtttttcttagccttttgtgaggcaactgaaaaataaattgaactgtaggccctttc

SEQ ID NO: 411789 - DNA, 756 bp, Homo Sapiens
  misc_feature (123)..(135): n is a, c, g, or t
  misc_feature (530)..(644): n is a, c, g, or t
taaaagaggatcaacattgacctatttaactggcccatcagtaagtagcaaaacaatactgtagttgttgaaatgaagatagttataagcctcaaaccgagcacagtcagaggtgggaggccnnnnnnnnnnnnnttgctcatgaaacagtagtacctttcagatcttgattctactcataaaaatgtgtatcagatgactataataagtcctctgtagcctccgattatgctcagaatccttaccattgctccaaaggccctacatgatcccatgctctttcatatcctactcttgtccactagtccaggtacagtggccttgccattctaacaagccgagatggttattaccgaacgaacacatgctgcctttctcctggatctttgcatgactggctcagtagaagtctagcttattgattcctccagtagaatgtcagctccttaaagggatttttcctgtctagatcagtctagtacctcgttcagtgtctaatactcagtaggtactctaaatattttcggcannnnnnnnnnnnnnnnnnnnnnnnnnnnnnnnnnnnnnnnnnnnnnnnnnnnnnnnnnnnnnnnnnnnnnnnnnnnnnnnnnnnnnnnnnnnnnnnnnnnnnnnnnnnnnnnnnnagcacattccctttcgcagctgcgtatagcgaaaggccgaaccgacgccttccaacagttggcagcttgatgcgattgcaaatgtagcgtcattttgttcgcgtttttgttc

SEQ ID NO: 411790 - DNA, 420 bp, Homo Sapiens
tgaatgctgttatcactgtggtgtataaaaatggtcctcattttccagtcctttcttttaaagatgtccttatgtagcagagctttatgtggtgagagtagtgtttgctcccctggaaggttactatttcacaatttttgtctttctttggtatttttgcttctatcaacataactcaatagtgttgatgacaataagctgttgattttaagaagatatgaattattggatttccacttttgattgatttttccatttgtgtgtattttgtaacgtcacagctccttttatccaaggaacgttgtttcaggcaacataaggaagtaatttccctttagaactgaggggaggtgactgctgcctctaacatatacttaggctcctatttttcatctccactagccctggtttgggtttttt

SEQ ID NO: 411791 - DNA, 681 bp, Homo Sapiens
  misc_feature (176)..(383): n is a, c, g, or t
cacgagcggcacgaggtcctacaccctcattttaagaacctcaggccactgagctggtgattaccagtgactgaggcgaaagtacgtactcctgggaggaagggagctcaggtggaggggtggaggatggagcgctgctcaggaggccgactccttacagagcttacatataactnnnnnnnnnnnnnnnnnnnnnnnnnnnnnnnnnnnnnnnnnnnnnnnnnnnnnnnnnnnnnnnnnnnnnnnnnnnnnnnnnnnnnnnnnnnnnnnnnnnnnnnnnnnnnnnnnnnnnnnnnnnnnnnnnnnnnnnnnnnnnnnnnnnnnnnnnnnnnnnnnnnnnnnnnnnnnnnnnnnnnnnnnnnnnnnnnnnnnnnnnnnnnnnntaataggctggactgatcggcctttcaacagttgctcagccttaaatggtaatgggaaaattgtaagcggttaataatttggtaaaatttcgggtaaaatttttgttaaatcagtttatttcttaactcaatatgcctaaatttggaaaatcctttataaattaaaagaatttactcggaatggtgtttagcgtttgttcacgtttggaacagtatttcattatttagtgaacgtggaacttaatgttcggttgactgttaatagggctatgggccaatacttgcccatcacctatat

SEQ ID NO: 411792 - DNA, 450 bp, Homo Sapiens
gcagaagctgttatttctttgctacagatcaaatattctgatttgtttctccttacttctttgcacagaataagtaattgacttattatgaagtagtaccctggttttggagacaagttcccggaataataaaaatccagaattatttgcccagtttcagatttgaggatcagaaccctgtagcaatgatataagaatcagaagcaagaatacatttcatctacatttgttctatttcctgccatttagtttctaaaatggaagccatttcttgctgggaaaacaaaggatctttccatcctctaatggagaatcatgcagtcttagagttggatatgacttgagtgttcttccaactcatgtgccacaacacaatggtgtactctgggttagaggtgagtggagagagctttcagtcaccaacagggagtgggatggctgagcttccct

SEQ ID NO: 411793 - DNA, 360 bp, Homo Sapiens
ccgatgcacatgcaccctacacctgatccgttcactctcttcgaacctatcccatcatcaaactcgtcacctcctatgccgcaaccacaactgcattcaccactcacaacttccgaaactaactcctacaacactatccaacgaaaacaaccgagccagatacccaacctgcaccccacattctaacagtgacaacatcacgttctcgccacgcgcttcagctgacccccttacgcccaacaccccctcatttgctcacaaccaaggctccaagtctcctcctcgcaatctcatgatcagctttccacgccactgaccatcctccaatcctgacagcactcctccacatccctcccgccc

SEQ ID NO: 411794 - DNA, 632 bp, Homo Sapiens
  misc_feature (142)..(151): n is a, c, g, or t
  misc_feature (169)..(223): n is a, c, g, or t
  misc_feature (227)..(409): n is a, c, g, or t
cagttgaagaaatgaaatttgtcttttcagttatcaatatatatgctaaatattagaaagatcacatttacctcatgggtaactaaagctgggttttgtggaagatcattgtaattatctgaaactgtgactcttacttccnnnnnnnnnnggagtctcactctgtcannnnnnnnnnnnnnnnnnnnnnnnnnnnnnnnnnnnnnnnnnnnnnnnnnnnnnngttnnnnnnnnnnnnnnnnnnnnnnnnnnnnnnnnnnnnnnnnnnnnnnnnnnnnnnnnnnnnnnnnnnnnnnnnnnnnnnnnnnnnnnnnnnnnnnnnnnnnnnnnnnnnnnnnnnnnnnnnnnnnnnnnnnnnnnnnnnnnnnnnnnnnnnnnnnnnnnnnnnnnnnnnnnnnnnnnnnnnnnnacgagccacccaacccggctgtgactcttactttcaaaacacattttataatatctataatgacaatagcttctactgaatactacttatgtgctaagcatttaaactctacatatgttatcacattcaaacctcacaattaacctgccatgaattattactcacaatttatggataagctagggctcacagggcattcttcacttcttggtatattaccagt

SEQ ID NO: 411795 - DNA, 633 bp, Homo Sapiens
  misc_feature (130)..(205): n is a, c, g, or t
  misc_feature (216)..(346): n is a, c, g, or t
  misc_feature (382)..(382): n is a, c, g, or t
  misc_feature (390)..(390): n is a, c, g, or t
  misc_feature (425)..(425): n is a, c, g, or t
  misc_feature (436)..(436): n is a, c, g, or t
  misc_feature (530)..(530): n is a, c, g, or t
  misc_feature (537)..(537): n is a, c, g, or t
  misc_feature (544)..(544): n is a, c, g, or t
  misc_feature (551)..(551): n is a, c, g, or t
  misc_feature (608)..(608): n is a, c, g, or t
tcttgtagatgacttgcttttaatatcttggaagtttaaaggagtacactgaaaattagttactttcctgaacaattaacagtaatcaactggggaacaataaaagaagacccatttatttatttttcgnnnnnnnnnnnnnnnnnnnnnnnnnnnnnnnnnnnnnnnnnnnnnnnnnnnnnnnnnnnnnnnnnnnnnnnnnnnnattcaagtacnnnnnnnnnnnnnnnnnnnnnnnnnnnnnnnnnnnnnnnnnnnnnnnnnnnnnnnnnnnnnnnnnnnnnnnnnnnnnnnnnnnnnnnnnnnnnnnnnnnnnnnnnnnnnnnnnnnnnnnnnnnnnnnnnnnataaataagtaaacccaaagaactaaaggaagccanatgtgaanaattaaagaaagtattctaatgtctcaccaaatanagaacataganatataaatttgttttaaagaactaaattaaaattctggaattaaaaagtacaataactacaattgtaaaaattactataaaggctcaatactanattttanatggcanaataaanaatcagcaaaccttcagattgatataagatattcaatcttgaacataaagttttaangtattctttacactatttacacatt

SEQ ID NO: 411796 - DNA, 437 bp, Homo Sapiens
  misc_feature (141)..(332): n is a, c, g, or t
caggactctgtctctaaaaactagtaagattttgtgtgacccatgggacattgagatttccagtattctgctttgatctgtgcaaagagaaactttactggttgtaccactgtttagaaaagtagcattcttttaaggtcnnnnnnnnnnnnnnnnnnnnnnnnnnnnnnnnnnnnnnnnnnnnnnnnnnnnnnnnnnnnnnnnnnnnnnnnnnnnnnnnnnnnnnnnnnnnnnnnnnnnnnnnnnnnnnnnnnnnnnnnnnnnnnnnnnnnnnnnnnnnnnnnnnnnnnnnnnnnnnnnnnnnnnnnnnnnnnnnnnnnnnnnnnnnnnnngtaagtctttctatatcgaatgttcatggcttttaagtggtgagaatgcttgatctgcagcctacctattgactcttccattgaccccctctggtgatcgttttt

SEQ ID NO: 411797 - DNA, 483 bp, Homo Sapiens
gttcttataaaatgactttcttccctgttgctttagtaactgagaattgaaatggcatctttcctcaattgggcctattacatgcagtaatcagtggccccagacgacaactctccctgtggcggggttcttagagcagatggtataggcaacatgggggatattacagagatgatgttagaagcaattattgcaccattgggtgtcggtattctgagcttcctgacgcatggtaacctatattgtacagcacttcataactgtaaaagcttatgcagctaaaccagtgagacattggtaagaagtctgagcttcattcttgattatttgacaaaggtgaattattttctgatcattttgaaatttgccaagatctctgattaggattttttaaaacagaaagaattctggattattttttccatctggctatgaatccagtggtatttgccttaagttttctaccatctccaattaccggcc

SEQ ID NO: 411798 - DNA, 195 bp, Homo Sapiens
ttgactttcatacttgtaaactgtcagatattatgttttgctactatcagtatgctttgtctatagcagcttctgctaatagttgcttttcatctcgtggatttggaaaaccaggtttgttataattatgtataagcaaattaggcccagagtgaagacttgagagctgcctgcacatgcacctttttttggggg

SEQ ID NO: 411799 - DNA, 638 bp, Homo Sapiens
ctcgtgccgctccattactgaaagaagcagtacagccggctaatggatggagacacaggggagagattttctttgtgggagttcattacagaggcatctgcagacctctaactctctcctgcatgccctttctctttcatagcttccatctctaagctgtaatggatgcaaaattactgcagcattttgttctgccgggctgaccccattacgcatacaccacagtcataaagctctggcttagttactgtttgcatgttcaagactactctgaggcagggaggtgtgaagtttggctacattttcaaacagagtggatgccttcttcattttaaaaacaaggaatccagcctcctttcagagtgaatattgttttgattactgctggactaatccatacttatttaccccttaatgatgatgtttctctggtgtgtgaagggtctttaaataaatgttagggcagtgatgccaggaagtcatcatttcacatgcattagttgcagaagtttgggagacttcatttccaccccaacatcctgttgtcttgataatattttattaagacatagcaaaagatatagcagggtccgtagataatggttaataaaatatgagtttggggtagtgttctcgtt

SEQ ID NO: 411800 - DNA, 627 bp, Homo Sapiens
  misc_feature (65)..(65): n is a, c, g, or t
  misc_feature (192)..(192): n is a, c, g, or t
  misc_feature (212)..(212): n is a, c, g, or t
  misc_feature (350)..(350): n is a, c, g, or t
  misc_feature (365)..(365): n is a, c, g, or t
  misc_feature (489)..(489): n is a, c, g, or t
  misc_feature (607)..(607): n is a, c, g, or t
attcctaaggagatgtccataagcagcaaggcccaaacgtggctgaatatcagggtaacctgcanatcctgtcccaaaccaacacaaacatctggattcaggaggcccacggtggggcccccaaatctgtatttgaaacaaggaaccactctcctggagcacggagtgtcccctgaatgtgttatgaccganaacttacagtgactatctanactgttagtgttccaaaccataaaactgctgtgatttatgaagcaattagcatatattctgtctggagcctcccctgggtggctcacacatcacttgtgtcttcctagtgtttgcaacaactgtgacaatgtcactgnattaaaccactgcangcttaacactctggaagtttaatttgcccaaacttctattttctggctaccagcattttcttagatggttcactttcccttcacctgtatttccctgtctgactagaggctttcaaggactctntttcctaaataaatctttctaccatgctttgaatgggtactgtgcatgtgacatggcagaggacatgggcggctagctgttcccactcacttactcagcaactcaccccacaaccaanctaacaggaccccttttttt

SEQ ID NO: 411801 - DNA, 427 bp, Homo Sapiens
gtaaagagtagttgctgatttgagaagataggggaatactttgtcagcctcagcgtattggagtattgttcatcttcaagacagaagaaacacttgaagctacacttaattattttttttccctcatacattttgtttaattatacattggaaactaacaaggatctggaggaatttcctggttttggctataaattatgtggaccttttttaagcagccaaaacagaagatttcctttacacggacgattgcatggttatttcttgaatatttgacttgatcccatgaaggtcaatattttaaatgtgatgcagttggttctttatgctatagacttgtagtctgtctgcattaggggtttgaacaacctaatttgtttaacacagactacatgaattgtgtaagtgtgtgctgtttgcaggtatc

SEQ ID NO: 411802 - DNA, 453 bp, Homo Sapiens
atcctttgactgtgctgtaacagtgagggcttcagagtgttaagtatcttctcatctaaacagtacattgctgaaacatgttagagctctcattgagttttactcttaggttttgatcaagtcatggtaaaatgttagttatcatgtatatatgcggctgtggtagtaattgattctggaataaatgagcaccaataaagaataaaaattaaatgcttcattggtttctaaagggatagctggagtatgatgattctgatggggtgcctttggaattggagagtaacttgatgggctcactaaggcagtattgagagcaattgtgtaagtgacaatcttgcaatctgtgaataagtttaagactattgcttgtgattgttatgcttataatgtggagcctgctgtccatttcaactctcatctaagttcccttgtcacgtggtcaccttttgt

SEQ ID NO: 411803 - DNA, 643 bp, Homo Sapiens
  misc_feature (110)..(110): n is a, c, g, or t
  misc_feature (585)..(585): n is a, c, g, or t
  misc_feature (588)..(588): n is a, c, g, or t
caacacgaggcacattctcttctccatttccctctcttattttttggctctaataaaacatttcttctcacaagtctctatccctcaatacgaataattaacccaaatanatatctacaaacctctactaactttttaacagacacaagaacttctcaattttattgtaattactacaaactatggtaaaagtaacgacaaaatttacttactaagatctggagggcatacatggaaaaagcacttaattcgaactcaaggaagtgagcatggggagctggaaggattcctaaaagacaatacaacaaaactgataacctaataaaaaatggcaattagctaaactacatggacccttaagaagatatatatacttaaaacaagctttataacagctcagaggtgagaaaagaaaacacatttattcataagattcacattctacccttcttcaaaagcccgacccaaacatcttttatccttctcttctcttttcccattaatctatttatacccctcttttacatttatcacattaaccttctattataatgattgagtaacatatccatctgcccttactanaanaagaactcattatagattctaccttatttttcatatcctacacattaataacccg

SEQ ID NO: 411804 - DNA, 429 bp, Homo Sapiens
gagagattcattctgtccctgagttcttttgtgggttctagagctccccaacccatctctgatgagcagcaagtacatcctaagctcatctctctgagccagcagcctggttctctagacatcccagggccgctcctttaggtaatactactgcaccatggaaacccacccagggaactcatgtctctaagatgacaactcaataatcagatctgtgagtttaaggggaagatagagttcctcatttcatttaatgactctgtctaccccaggtaacacacagacatttcagcaatgatctttagaaggtaatggttccttatagcacctttggtggagccagtcagggttagtattaggagtaccaggaatcttcaaattatattgtatgggtcacagcctgtcttggctagacctagcgcgtaccag

SEQ ID NO: 411805 - DNA, 608 bp, Homo Sapiens
  misc_feature (551)..(551): n is a, c, g, or t
atgtaccacagtttaactatttacatgttgaaggacatctaggttgtttcccgattttaactattacaaagctgctatgaactttcatgtacaggtttttctgtgagcataagatttcatttctctgggagaaatacccaagactgcaattcctgggtcatagggtttaacatgtttactttttaaagaaactgccaaactgttttccaaagttgctgcaccattttacattcctgccagcaatgtatgaatgatcaaatctctccacatccttgccggcatttggtgttaccagaatgtagaggaaggggagaaaacattatttaaaacatagattaaagaacctaagaagtaatacagtcaggactgtttggtataggagaaaacagtcccacctattcagtaacttttgaacttatgatacagcaatcactgttcacgagttcagcttgattcgtactaatagaataaaataatgccaagtagattttttttaaatcatggcttacagtcttcactgtgatcataaaatggaatcatgtagaaagcanatgaacctggaagtggtaccaggaatgtgtgtcacataattccaaagatccagaatc

SEQ ID NO: 411806 - DNA, 651 bp, Homo Sapiens
  misc_feature (639)..(639): n is a, c, g, or t
actatactcagatgctgagaaacacattggagcttgttctcttcgggcatactttcaagatctgagttaaagcaagagctgaaccagcatgtccaacttgcctagcagaagtgtttacaggcttttcccctgcagacactgccttgactccgccagtggaagccctgtccttctcactacttcatactactgattagtggtctttcgtgaatcacaatctatagtcatagagatttaataaaaacagggaggaaagagctcttgctttcaggcatccaagggtgtgcttgcagcaaaacatttacagctaagccataaagtgcatggaaatatggaggaaacagcgacacaacaataaaacgaggggtaagattaatgacatgatacaatctgttcccatttggtgcagagaaaattaatttttgaagacatttcatttaactttgcaatattttgtaatttaacctttaatgttcgcaactttttcttttatctgctctcctctttaagcctaaggatgagggaagcaagttttacatctaattgtaaatatggcttcacggcagctgatctctgctctggagaaaagtgaggatgtattcagagaagagtatgcccatcatttcacagctcttcctnctactgcctttt

SEQ ID NO: 411807 - DNA, 706 bp, Homo Sapiens
gaataggtgaatttctataatcaatataatttaatttgataattagattgctggatatttcccttttatcttttcttaaagtaaaaatttgttctttaacaaatgtcttttaataaatgaacgtacagacacatatgtttgagaatctctaaatatccaacctaaaaacttgggtttgtttctgtgttttcccttaacttgtactttccccaaaccaagatcacctggtctcttctctgctacatcatttctttatgacaaagtagttatgactctctttaaaaagccaggcatttcagcactctggttactttgatcagattatctattcgtatctacttttatattttttgtaactttcataggttatttgtggagtccttggtttctgtgaggtctcttttccctgtatttaaagattcccatctcattgtaccgatgtgggtgccagatcatatgaacataagaaatctgtttacaccattctccattcttttctctgggagtactgccaattatgggatggtgtgatgaagtcattacaaccttaggtaggataggcatttaaaccaagtccactctctttcctttttctaagggatcataatcaaaggtaaatgtgaatctacttgtattttatacaggtgaagactcagttctagcttttctttctcactagtctgagtggtatacctggcactagttt

SEQ ID NO: 411808 - DNA, 106 bp, Homo Sapiens
agcataagccaccaacacccgccctctgtaatgtgaacctatcttacctagacctgaagactgtattcagagatattttccagcaaataaaaccttcagaaatctt

SEQ ID NO: 411809 - DNA, 376 bp, Homo Sapiens
tctatctccatctatataatattatcttctacttttgtcctgaaatccttttaatccatccatatactctcatcattatcctctatacatcttttcctattcctcactcattattagtttccctttactaatttttacgtgatgcacatcatccactgaactttgtatattttttgggatctaatctttttgtctctatttaataatcatataactactcactcttaattactaacatataccttccttactatcctatattcttaaccttagtacctttttttacctcactttcctgatcctaatcatttctttaacataatatatattgtcaaatagttttctcttctcttgctacgtctcttcctaatgccct

SEQ ID NO: 411810 - DNA, 240 bp, Homo Sapiens
aagaaatcttcgaaatgaaaactattcctgtttaatgactaatagactctgtatcttaccttgtatcctaaatacaaaactgttttcacaaggttagatttctgggaaagtgggtcatttaaaatattgccataaatttagaaataagcatgagaaacatttttaacagtcatgaaaatgaaatatataagaattactatttgaaacaatggaagtaaaataaattgctgtatatatgtt

SEQ ID NO: 411811 - DNA, 487 bp, Homo Sapiens
cctttggctcattggttttgtgtctggttactaaaatgctaaataatatatacgttttccagcaagctgtgcagaaagctatatgagatgctggagctctgttattgtgggcttttggtgttacttgatatctcttcactgaggatttcttatgaagtgaaattgtacttttcaataggaagaccaataattgatgtaccacaggagaaaagtttagtgatgctgggcatgcttttgatctctcattcataggatcaatattaaataaaattgtcatgagctgtgttgaagacagggtgctttcaaatagagtgaaattgctcttgtgttgtaagaggaacatgtcatctaagataggaaatgagggtgatcgtgcagatggcttgtatcttatatatgcaaaggagccaatttattagcacgaagtgtggcattacttattatgtccagattggatgatggctttttggtattagctggtctgtct

SEQ ID NO: 411812 - DNA, 623 bp, Homo Sapiens
ttttctcttatttaagttttttcatagagaaaagtatattttctctccgtctcccctctcattttcaagcctgataccttaggaaattttaaattctctcttcttagctttcaaattaattgtttgggtatcttcgctctgctgtacttttcagtttctcagagttcagacaaccaccatgagacctgcagcttttggggccctgttggatctaatctaggtaggagagtccactatggttatctgtgtccagacagttgccagatggaaccagagtgaccatgactgggaatgctttcccaagtagtgacaaaatggcctttgcccttcttgtccatttgatccccatctttaatcattgtgctcagagctactgctcccattcagaaagtggctgctcaaggacagcatatttttcccaaaagtacacactttacatgccttagcagtgagtgctgaagataagtgttttaagagttcagagaggttttatatgcaagacactaatgcttgaatgtggatcagtatacattatgagtttactggctcctaaaataccctgtaaaaatctagtctttgtcaagatgtttgccttttttcctgaggataatatgtccccagaa

SEQ ID NO: 411813 - DNA, 674 bp, Homo Sapiens
  misc_feature (440)..(440): n is a, c, g, or t
  misc_feature (574)..(574): n is a, c, g, or t
  misc_feature (626)..(626): n is a, c, g, or t
ctcccacagtttctgtgatctatctaatggtaaatgtgaggtagctctgatgaatacttaacacatatgatttataccctctgattaatcttaatatcttctaattagcaaccctctaattgataccatttctgcctaatctagctagagtatattctgtttactgcagtaacacaatcctataagcaatgtgtagctacagggagttcctatgtatggaaaacacaaatgaaaatattattataagtgcagggattctttataaaaattcaaataaatctacatatcagttttactgaaatgaaaaaatgcacttaaatctgttgctataaattggattacataagaaacatacaggagcattctggtacctccccagccacgtatagtgaccacaaatacccgacaggatcattagaagaaattacttaattcaacangtaataaataattactgaattgtgtgcatgtatatgtgtggtggtgacgataatggcagaaatggagatacatgcatggcactgtttgtaacgggaaatttggaaataatcttatatgttaggcttttgtccangttctatgatggaataatgatggtgctaacgataatgtagtgctacagctgntaatgtgttaatcagtgataagtatgtgccaggaatcaatgctgcatt

SEQ ID NO: 411814 - DNA, 402 bp, Homo Sapiens
gagctcactccttcgggcccacttggtgttgcagtcaagagactcagttccaaaaaccttcagcagaggtctcccctcctcctggtatttcactggttgctctccataagtcctcttcagaggaatgcttatcacacatgcttattctccgttttcccacttcaacagttacttcaggtttaaagtcctttttatctctgtaacctggtgacatgccaggaacattttcccacaatccaccttagcatcataacaatttcattcatcagttgttactgtgtataaccaatgaacgtgttggtcattagtctgtatttagtctttatttgtattgctatctttgagcattccaagattgcagagcatgagcgtgtgtatttgtgtgattcttttttcgctgcc

SEQ ID NO: 411815 - DNA, 364 bp, Homo Sapiens
  misc_feature (48)..(233): n is a, c, g, or t
  misc_feature (251)..(263): n is a, c, g, or t
tgttcttggatctcccgactctgggacttacaccttacccttttcccnnnnnnnnnnnnnnnnnnnnnnnnnnnnnnnnnnnnnnnnnnnnnnnnnnnnnnnnnnnnnnnnnnnnnnnnnnnnnnnnnnnnnnnnnnnnnnnnnnnnnnnnnnnnnnnnnnnnnnnnnnnnnnnnnnnnnnnnnnnnnnnnnnnnnnnnnnnnnnnnnnnnnnnnnnnnnnnnnnnnnnnnnntacccccttatccacagnnnnnnnnnnnnnctgcagtttcagttatctacggccaactgggtaaaccaaatagatgctctttactattttttaacttctttatctcattgaggattccgttccaagtggcc

SEQ ID NO: 411816 - DNA, 388 bp, Homo Sapiens
gcttcccggtaagggtgtatttattatttaatgagaagaccttgaggagggggtaccaaaaataaagtataggcaggaattccaagacggcacaatatcctgatttggtggcacaaaaatatattcgtggaaacaaatctactggaattgtcttgattgggggcttgttttacatgtgttttatctcactatgttgtcattatgcagaggtcttctatgtctttacccttttagcagcagatcttatttttcaaattaaatctcacatggtaccctaatacataaactacatgtcaaggtgggaaggaaggatgccttgtcctggtaccctgcgccctcaacttcctccattctttcaggtggcttttatgccagctggacccttggc

SEQ ID NO: 411817 - DNA, 607 bp, Homo Sapiens
  misc_feature (455)..(455): n is a, c, g, or t
  misc_feature (508)..(508): n is a, c, g, or t
  misc_feature (510)..(510): n is a, c, g, or t
tggaagtccaaaaaacagaacaaccacggagatagagggagtaggacccacacggacacagaatgttccactatatttgacaatgaatgtctggaattatataactgtctaaacacaggagtgtggggattcccagagcagggtgggcatcctgggtggtgcagtgctagacaagtttattgcctaatctgactatgactgctgagagcaggttggtcacgttactacctcttttactttagctacacaagtcatgcaaaattaggttgcttttattatctacttatcatttggagataaatgcaatgatttagtaattactcaaagcagttgagctcaagggcatctgtacctaaaattcagctggggacaaacctcgccgcatggagatagaagtcaaagcttgcattacaattttcttcttgaactcagatgaacattacttcatgcttgtnatccctgctttaaccaaatttgaaacagagtaattgagcaaagaagtaacctntncttacactatgccgtgtgtactgtagaaagttattcaccaggaacaggggtcctggggtggggtgacacatgctctgtattatggagggattcttgg

SEQ ID NO: 411818 - DNA, 649 bp, Homo Sapiens
  misc_feature (335)..(383): n is a, c, g, or t
  misc_feature (555)..(555): n is a, c, g, or t
  misc_feature (558)..(558): n is a, c, g, or t
  misc_feature (576)..(576): n is a, c, g, or t
gtttcattcatcccatctgtcattgctttccattggccaaacccagctgaaagctagagggcaagggagcctaagtgataaagtctacagagctcagccttcagggacacagggaagaggggagaatggtggatacacagaataaccagaacattcacccacaacctcctttttataaaagtcagtgttttgcttggtattgttgaccactgcctccttgaaataatcttttcctgtggcatgtgtggcagcatatttggccacttttccctctacaggatgctcctgctcagtttcttttgctggttcctcttcctctgtcctttcctttatannnnnnnnnnnnnnnnnnnnnnnnnnnnnnnnnnnnnnnnnnnnnnnnnacaaacttccaaaagtccatctataagttgttcacaaaggtatacctctatttcagatttctttcctgaactttagacttcagggtatgtaactagagcacatctctgtatatctgatgatcttgagcacctcatattcaatgtgtcttcagttgaactcacctccactctnctncctgctcacacctcttcnggatctcacttgataacatactacccactcaggtatctaatcaatcacccgccattcttttcactgctgatag

SEQ ID NO: 411819 - DNA, 323 bp, Homo Sapiens
cttctgtccagctagcaagaatggcacaggaggctcagggtacacttctcattacaaggccttaagggaagtgctgcttctccacacagagcagataggacaaaaattgggtgtttgcacaaagggagcaatgattccataaggaggtgaaagtaacacatagatttgtcaccttatttacattttctatcttcttgtctctaggcaaagggggtaacagaaacctgcttagtgtttttataaagtaaattctgcctagtatcattgaatttcctttagcacatccatagacatacaacagaacagataggagaaagaaacat

SEQ ID NO: 411820 - DNA, 578 bp, Homo Sapiens
aggaaagtcgcctccaaaggacaaaatccaagtccatctctcagcataagattcatgtccactaagtccactccagatgtggaccaaaccagtcagtgactggtcaggaaagacagtgctgccacagatcaagggccacatctatttaatccataaggacttaattttccttcttcttcaggtcacaatggccatggatagcaattttaatacaatgtcagtagcctatgagaagagtagcaggataaaataattctagagtgttggactagcaactgaaaatgtgggttctggccacagtgctgtccctgcctcacagggtgatcacggtggagtccctttccctccctgacccacacattccttgtcagtaaaaagaggggcggggatgaaatcatctctgtgggtttccctgctctaaaattctgatcctgctacatattggacaagtctgagaattccaaaaataccttcaaaaattctactagaaatactgttcctgcaaagaatggtccccattcattaaaaagcagtactagttttcaaaatgaggtaataaagctatacattcaatgtgc

SEQ ID NO: 411821 - DNA, 388 bp, Homo Sapiens
tatagttatcaactcctattgatatgtgagtgtgtatactcccgcaggagagaataaactttgaatgcaaccataacttattacccctttgttccagtgtcacttctgatagcaaacaatgccaaaacagtaacaaattgccattgtattttccattagtcatcatagtataaaagatttgataaatagcgagaaaacacattggctctttcgggtgggaaatccgtgttattgacagtagcaaattacatgtctttgaaaaagatggtgtcacggttcttagagattatttgcattgctactgagacataagcctcaaggagcttttggccgtgtctgtgagatgtggtctggtgtcctcacccagccccccttgttccagcttcgg

SEQ ID NO: 411822 - DNA, 661 bp, Homo Sapiens
  misc_feature (491)..(491): n is a, c, g, or t
  misc_feature (587)..(587): n is a, c, g, or t
  misc_feature (645)..(645): n is a, c, g, or t
cggcacgagcagaagacaagagccaatattcccagaaacggagtggtcagatttccttaaaaaatgtgcagagattgtgtttctggagtcgagggctcaagttaaaagcaaacaaaataccacaaaatatataacaatttgtttttttggaggatttgcgattctgaatttggatccagttctcttaaatacacattgaacctcataggacatggctcttcaagtagaaatgtattaatagaagcctcatttatagctgttcaaagaattggagtgatcagtgctttacttattacttctgactaaactctgcaggtgcagcttggcaatcaacagagatccaaagtagaaagacagtttcatgaaaataacctgacctctccgactggttgactttgtgggaataaagactggtttatgctgatgcatgtttttagcaatgcctttcttcgtaccttggacatagttattatgcctgggggaagagagtnccacgaagctgggatgccatgagccaccccccttgctgggcaccaggttgatccctggcctgctctgggttgctgaatgcgatccttcaagcactngtggagatgctgtaattttcttgggcaatgtgagtttaacttggagaggttatgattngaggccctgcttgctt

SEQ ID NO: 411823 - DNA, 176 bp, Homo Sapiens
gattcccagataggggcgacctgggccacagcggtacaagctgcaccccgatggacctgagagaccggaagtaacccttggccaactctggccgccccctgcagccgcagccccagaggcccacccgcgagcttcagtggcgggccctcagcgtcgtgtaaactttgcttaaaatg

SEQ ID NO: 411824 - DNA, 591 bp, Homo Sapiens
aaaacttgcacattcaaagcacatgatttgtacagtcacacctggcagtagcactgcacagttacaaatatgcacacacgttaactgctatgcataaatattgacagttaaaccagaacacaattgaaacagtgacataaatacctacaggattcagaattgttccagggtaatataaattattctacttgttcactctccccaccctcttgaacttgttagaagatttgctgctttagcataatctttccaagattgaggtgtatcaacctaggattttcattactatatagtcacataaatggaggaggagatatatttggcttctgcctctgcacaattagtatgaacatatttctttctctagggaataataggttttaaacatttgagatatcatgaagcaaagtcagggtataccactacaatcctcactaatctctattcccacattatgaaattgtacagaagaaatggtgtcattaaatcaaggtatccagataattaatggctactttaactattttttcattcgtgttaacttgagcccccaatatctttactacttaaccttatatgccatcacttttg

SEQ ID NO: 411825 - DNA, 352 bp, Homo Sapiens
gtcagctgttatacttctatgtgttcagtgcttttgggaggggtcagagtggtagcactgcttttcagacacacttttgtgagtgtgatgcttcaggacctccacgttgtcccatttttatttgtggcgcctttatgggctgtagcactctcactgggactgtgtcattcatttggttagttaacaaacacttattggacaactgttgggagctaaccttgccacttgatccaaattgaattagacatgggcttgatctttaatatgctttcagctttggtggaaataaagaagcctaaagacccggctctgttgtttcctgttatctccactttggggcccttgtggccgt

SEQ ID NO: 411826 - DNA, 651 bp, Homo Sapiens
  misc_feature (540)..(540): n is a, c, g, or t
cacgaggagattttgatgcacccatcacccagatagtgtacattgtacccaatatgtgattttcttatcccacaccctcacactcttcccccttagatatctccaaaatccattatatcactctatatgtctttacattctcatagcttacctcccacttacaggtgagaacacaaggtaatttgatcttccattcctgacttacttcacttataataatggcctccaactccatcctaattactacaaatgacattattctatttctctttatggctaagtaattctccacagtgtatacataccacattttctatatctactcattggttgattggtgcttcaattcattctatatctttacatttgtgaatgtgactaaaataaacatatatgtgcatttatatttttcatataatgacttcttctcctttagacacatacccaggtatgggattgctggatcacatatacatctacttttgattctttaacgaatctccatactatttcccatatacattatacattcccacctancactatatacaccatccctgttcaccacatgcacaccaacatctatgacttgttatatatttagatacacttcaccactgatactatattcttaacttttcttccgtgttt

SEQ ID NO: 411827 - DNA, 607 bp, Homo Sapiens
  misc_feature (106)..(157): n is a, c, g, or t
  misc_feature (417)..(477): n is a, c, g, or t
aacacgagctagatatactgcaagcatctctccttaagataaacagttgctgttaaaattatatatttttgatcaatatatttaaaaattaaaatttctaactttnnnnnnnnnnnnnnnnnnnnnnnnnnnnnnnnnnnnnnnnnnnnnnnnnnnncacccttatacaactggtgtgacaattaaaaccctctcgaaacccaactgattgcccaattaaaccatgtgacttccaatatcaatttgattaactaatatccccattccaaactctctaccaatcacgtttacaccctaactggcaactttgataaccaaacccaaattttgaatttaaaattcccattaaaattctctgaaattgcgtaaaaatttaactaatagtttaaccaaatcaccaaaatttttaaagtagannnnnnnnnnnnnnnnnnnnnnnnnnnnnnnnnnnnnnnnnnnnnnnnnnnnnnnnnnnnnacccaatttcaaaacttgaacccgcaattgaaaaatctatcaaaccaaatgttcaaatcccaaaacccattatcttaatcaaagacctctaataacggatgtacctccaaaatttacattatttatcccc

SEQ ID NO: 411828 - DNA, 559 bp, Homo Sapiens
  misc_feature (190)..(319): n is a, c, g, or t
aagttctagctttacttagccttgacattagatcagagttctggtcaatgaacatctatttatgctgtaagttaacatgtttaggtatgcctctgtcattttaaaataattattcacattaatccactttttcaactaatttcacctaatgccatcacataatatagcttttcatatactattctttttnnnnnnnnnnnnnnnnnnnnnnnnnnnnnnnnnnnnnnnnnnnnnnnnnnnnnnnnnnnnnnnnnnnnnnnnnnnnnnnnnnnnnnnnnnnnnnnnnnnnnnnnnnnnnnnnnnnnnnnnnnnnnnnnnnacataaagctgaaaagtcatactggtggcatatttatttgccataaattatcactatattttgtgtttaccatgatccaaagccctgtgggcatggctggatccaagtgcgtgggcaggtggctccaatacctcacctgcactgctgcctctgtgatggggatcctgactgtggctcactacaggatccaccctcagcactttacacttccctgggatactttccctctaggtaggggtc

SEQ ID NO: 411829 - DNA, 200 bp, Homo Sapiens
cagacagaaatctagatagaagagtgctaggttggcaagtcagttatctgcatgttgggaggaaagttaggtaggcagaaggattgttaagtaggtggagtttcagtaaaacttggttttctaagtatgtaaagtgtgctttacagttttcctggtgttcataagtttagattataggcactttagaaagttaattctta

SEQ ID NO: 411830 - DNA, 274 bp, Homo Sapiens
caagatcaggcaagtcagtagtttggagcttcttcagtagtgaccccagcttaacctacatataatcactttgcacacattttaagttaatcagatgcttccagagtcttggatttggttacccctttgttagataaggagacagattctaggttgggacaaacatcttaatttattctctaataataaagtactgattaaagagcaagttctcagagaattcacaaaatttctagaatccatgaaagatctagagaacataacaaatgaaact

SEQ ID NO: 411831 - DNA, 676 bp, Homo Sapiens
  misc_feature (545)..(553): n is a, c, g, or t
tttatacaggacttcacactggagtacaattcaacgtgtataagtcagcaggtctcatagagaaaacattgtagataggttgtataaggcatctccacaactggctgtcaatataatttaggcatgtacatcccaggacacctaatttataactaaaaataacacctgccttactctctcataaggataaaaataagagaaggaaatgcaatttggagcacattacttgctaaatgcctaataacaaatgctccactggtggtcaataccgaacggatagtaaattttccaaaaagctaaggcagggtatttcttactgccaggaactagccctgtgtactagtctccttttaggaacttaggaataacactcatcattctcagaggtactgtgtagtcaatctaataatgagtcttcttatcactaaaacattacaaagacaagacatcagaaagtactttaaacttaccataagatgtgaaaagagcaagcaaagtataataaaaatcaagttaccaaacattttatataaaacccactaccnnnnnnnnnagaaagtgattagtatatacttaaggcatgagggaattgcttaggaatcctaaggaatcaataatattttagaaggtttcagaaggtttttactttatggaatttaaattgaccccctttttt

SEQ ID NO: 411832 - DNA, 476 bp, Homo Sapiens
  misc_feature (275)..(306): n is a, c, g, or t
ccaaagtcaaactcaagttctgagtgtattgagaggaaaagagctgggaaacagactcaccagaaggaaaagcgcagacacagagagtggagagtatacgattctctttcctcttttgtgttttaaaccatcattaccacagcctattgatagggttctgcataaaacatgatttctgctaggtttatattaaatatggttgttgaacaaattttggggaccttgattctgaatgtcagtccaaatcttgtttcatatctctgtttaaagcctgnnnnnnnnnnnnnnnnnnnnnnnnnnnnnnnngtagctacagaaaaactctccctcagcagtcctgactattgactgtctaatctcagtatctaaattgattgcaagcactatatgctggtaaatctacattttcccaactgttgaagagagaactgtttctcagcatagatccagaattcgagattttccctgagctctcg

SEQ ID NO: 411833 - DNA, 257 bp, Homo Sapiens
ctcccggatcccccgggctgcatgtgggtgtgcagttgagaagacagtctcttgaatgatgtgaacagtgatggctttcttttagagtaagacaagaaagctttgtaaatggcgttgaaccccctgctcttggcaggccctgctcagcacagaagaaaagactgatcaagttgtccaagatggagccctttatccacgttagtccacttatctctttaagattaaaggaaagcaatcattaaaaatacagatccagt

SEQ ID NO: 411834 - DNA, 408 bp, Homo Sapiens
cacagtttccagtacatggaatgagcttaacaagtggtggctattataagtgcagtattttcttcattgactaccagaaggtggtaaacttcacttattcatgtttacaccatttctagtaccaatggggagaacttaaaaagttgtagaatgagtgcaatataaaaacctaatggctggctgttctctggaagcatgttctggctatgaggtagggaatccccccttccttactctggcctgccccatcaactagttatttagtcaacttgtagctaaatatggatgaaaggaaaatattcctaatatggacagagaggttaggatagacaaagtcttaggatcttttgatagtttatttttcatgttctactaatatagtaggacaaatcttgggacacagtgcct

SEQ ID NO: 411835 - DNA, 474 bp, Homo Sapiens
atttgaatggatgggatgggttattttgaagttaaaggactataaaaagacataggcacttagtggtaggagaaagtgtaggagaaaataaattgcagtagagattttccaaagttcttcctaaagggaggtctgcttcacctgtggtgtgggctttgaggatggtccaagtacggccatctctagcagcattaaatgtagttctctatgttacatttccttactccctaaattatattaaggtaatttgattgacctaaggtggtagtcagtaactgtcactcaccttagcaacattcatcaatatactttgcaccctctaaagagagcaatggtcaggagggtgggtgatgctatttaatgctaaccacactgcctgacttcactgacataattgctttacatgtcaatttccttgtcctgtgtagttaaattagtatcccttatctaacctaggagctgcacctgcctctg

SEQ ID NO: 411836 - DNA, 487 bp, Homo Sapiens
cagagatgtaatgtgccttgcttaaagccattcagctaaagatatcagactgggacgtttgctctcagttcagtgctcttgagtctggagtaggttgagtttgaagcattgagaaggtacctggatgtataaacttaaggggttggttaggcattaccaactagaaattctattctgatgtgcaagaaattaattaattgtataattgttgctttcttcctgatatctttacccaagcatctatataaatttaactaatatgcaagtgaataacagatgtgcatgtagagatcagttttgggaaattccattcaaaatgtagagaaatgtctagaaatctgagtttaggaaacaaaattcagaaattccagactcttcctaaggaggatacccagaacaaaactgatggcacacggtaaatcgttatctaagcaacagcttgaatcctgtctctggtttatgactctgtatgaaagataacttgggt

SEQ ID NO: 411837 - DNA, 494 bp, Homo Sapiens
attcaacccatctgggcctccaaattgcattcccatctaagcttccatctttgcagacaaggtacagtcacaattccagttgtgagatgtcccttctcttttcttctctattagccacaccctccttcatttaaacttgggataatcatgaccttcagaaaaaatgattttcactcaaagcaatattccaagcatataggaagaaactcagaaaacccttagtgaccagaaattaaaactgcttttctttcatttgcaaaacacacaaaaacagataatctcctgaaaaacacagacaagcaacatggacccagaggcccttaggctaaggttcatttggcatggaacttacagagttcattgttaagatagataacgccatttataacaagagtgttctcattatcatcatctcttgtagcccagttgaagacaagtagtgtcttctaagatcccatctttcatactttgcacacttttcctccaccctggtt

SEQ ID NO: 411838 - DNA, 911 bp, Homo Sapiens
  misc_feature (49)..(49): n is a, c, g, or t
  misc_feature (714)..(715): n is a, c, g, or t
  misc_feature (856)..(856): n is a, c, g, or t
ttaatgctactgatcctgacactgaccacactctcccgttccctacctnccttgtctgtgtccccccatgggctgagaaggccagaaagcaagagagccattgtcctatcccatacaagatgacttccctaggcacatagctgagtgaagggaagtggagatttgatctggagaagcaaaagatggtacacccagtaccagtgactgcatcggccacactggccatgcctgctggtcacaggcccctgaagtcagcttccttcttcttttacctttttccttcccaagcctgacagccacattaaaggcttctatgcactaagggatatgaactcctgcacaagtgaggccatccatgggcatgagcatgaattgaacccagcactgtgcattcattcagcaaatctgataaatgcctccttgagccagaatctaagccagaccatcaaatggaacccagtgaaacactgattctagggcagtgcccacaccactaccactgtggcatatcccttcataatagtatgcgcttatttgagtgtaatagaaaagaaaactagctctcaaacacttgatttacaaatgtaaacttaataaatatattgcactaatagaagtgagctacgtttaaagctgtaagaaaacagcagattccgtggtggtcatgcctgtatccagcattcgggaggccatacagatgattgcttgaggcannagtcagacttgccggacattgtatgagaccgccccttttcccggttacaaaacttcttaaaaataaccggcatgtaggaacaccgtggccaagtactgagagcttatgcagaagattctttgcgccatagctgaacttcanggacatgccactgactttacttgggcaaaataggacctggtttacatgaaaaaaa

SEQ ID NO: 411839 - DNA, 632 bp, Homo Sapiens
  misc_feature (486)..(486): n is a, c, g, or t
  misc_feature (575)..(575): n is a, c, g, or t
  misc_feature (603)..(603): n is a, c, g, or t
ctgacatgcatgaaggggagatctgcccactcttacaaagacaggatgtaattcatcctattcatggtactgagtttggaaagatcttcatttaaactatggaaaatacataaaattgcaagggaaatccaaatggcactggaatcccccagcatggtgacaagcgtggcctcctatttgaggctgcccacaaagagtttggtaacaaaagatgcactggagttgatggtaggaagttgattaacactgtagacttaatgtctgtggctatttaaaatgcagagcctattgttaggtcagtggaaaccagactaaacctgttgtctctcaggtgagaagtgcataagcaatgttatttcatgaacttctattcttacagtatgtggaaaagaactgtaaatactttaaaggaaatcaacaaattcaaacaaacaaaaatcaagatttcttcaaatcagtctcagaatttctttggaagagaaattntatatgataaaaaagaatttgataaatccttgccttgcggacatagccacacatgaagaagttattatattccttgaagacacccttgnaaaatggatataagactggatttcattngttacttacttgtatggactgaatatttg

SEQ ID NO: 411840 - DNA, 628 bp, Homo Sapiens
  misc_feature (225)..(278): n is a, c, g, or t
gagaaggtggcaggtattataaatgtggtaaattcctcatctttcattgtccaaagccaaatcactatttaatgtttttgtattaaataacagaaacaaatacattgtttcatgttttaatgataaccatcataagggaaaatagaaagtgtgaaaggtggttattactaagggctgtgactgggtcaaggttgggagggttgaacgagaacttttacttttcannnnnnnnnnnnnnnnnnnnnnnnnnnnnnnnnnnnnnnnnnnnnnnnnnnnnnaaatatgccaggtgcaattgggggctaagtttgtttggggaacaaaaggaaagatggtatcactttctccaggaagtttcccatgactaccttggggtctcttttccctgtgttcccaacaggcaagcatgagacactatccaagcatttaatatactgtactgtgtctgtgtgcatagttgtatgactaacacactagactaaaatctcctggaaggctggtgtcataacgtgacatttgtatctccagcacataacagtataataactagaagagcaataagtatctgctgaatgaaaacaacacatgaatgatggtccatagtgaaaaaaatgatcacacatattat

SEQ ID NO: 411841 - DNA, 526 bp, Homo Sapiens
  misc_feature (372)..(448): n is a, c, g, or t
atttatattcctgccagcagtgtattgagataatcatgtactttatgctactagaaaaaaagtcacatgaaattttaacacagaatgttcgacatttaatacttttgtaacataaatgtttttttatacttgtttgctgattgatttgcttctctttcctaaagatttgtggaactcagtagtattagtgttaatttgtaggtatgggtccagaagcaattcagagaggacctgaatatacctaaactgttccctgaagagtcagcagtagccattgggtagttcacttggaaatgatattcctctcctccaagttgggggtgtgtatttattggtcacagaacacacagtcatacagagcaggagagaatnnnnnnnnnnnnnnnnnnnnnnnnnnnnnnnnnnnnnnnnnnnnnnnnnnnnnnnnnnnnnnnnnnnnnnnnnnnnnggctcatcttttggagtctgaggcaggcgaatcacttgagatcaggggttcaagacaagcttggcaacatggtgaaac

SEQ ID NO: 411842 - DNA, 693 bp, Homo Sapiens
  misc_feature (324)..(324): n is a, c, g, or t
cgtgaacgctttcggtgactcatggcgtgcttatatcagatggttctgcatgacacacttagtagagaatacactgtgatagcttatgtaaatatgtctccagtgagaaccgaagtttcgtcgcgtgagcgcatatgcttgctgatcactaatacctgaggacactgaaacatagtcttatgagtaaccacatttgtctttttacttgcagtgccagtgtacatctgactacacattagcgactgtagtgtgcgcccgaaagggttgtcagcactgcagtgaccggatctacacaagactgactatggagaagactagagctantgcttacatatgtctatatatacgccatgctccgtttaccatgcccattcgaagcttatgccattgctctcgtagattaaacgacgagataatgctacatgtcttaagattgagcacctgaccctgggtgcttttactgggatatataatcataacctggtgacttagccattctgagcaatatagcggattgaagtctaagccggcttactgccttgccttcccagaattcataactgttggacccgaaccgtgacggtgacagccgtataggtaacctgtccattttgctttgatgccagcataaattgggtcatctagggaccacggaatttgcaatggaagcattgatcctttaccttggtacaa

SEQ ID NO: 411843 - DNA, 552 bp, Homo Sapiens
  misc_feature (477)..(477): n is a, c, g, or t
gttttgtcttctgaattatggtacctacaccaaattagttttagttgaaaaacaacagcaaaacagattcattcagaaaagttacaaagaatgggtagaaaaaaaattaccaacagtccagtttagaatttgacttctctgatatatataatactgtagcatgccatgtagagttacagtaatgacttctttttatccttaacttcacgtcccagttcatatgcttcaaatttcagttttgcagagggttaggatcatgtttgacatagtattgatggtcagagtcaaagaatgtgttctgaaaggaaggctttggccatgcataggaatcaagcctttctcaggaaagagacaaggccaaaacaccaccgttagtcatcctctgtttcactatgtctttgcgtatattctccttcgcctctctgtgcttgttgccacctggtacgatggaaacaataacggtacccaccttgttgngaggagtcatgagactacatgccgagtgcccggcacacagtgagccctagagcgtgagaggccagaatgtggagg

SEQ ID NO: 411844 - DNA, 674 bp, Homo Sapiens
  misc_feature (508)..(508): n is a, c, g, or t
  misc_feature (627)..(627): n is a, c, g, or t
tgagtgttcagtctgttccttcctcccccattcccaacctcaccaccccccaccccgacctctgcaaaggggctcaagaaagaacagttgccttgtctgtggttcacatgatcacggactgtgtgggttgaccagacttagatttgttttgtctctttagccaaagtgttctgatgtgaggaatgggggtggaacttgatagagatacatacaatttctttaggtcaaaaaaacaggcaagaaagaactcactaagtcttgccctgcaagtatccaggaacctctcccaccagttctttcatattcctctcttaattccttttttccttctagttctgccatccccttctaactagcttctgttctgttttaatcatccctttctgataggaagggttagtgtcagatatcctgatggtttgatggtggaaggagactaagtagaagactaagcagaagactgggatcttgtagagcagctggtagagggtgtgctccaaatcctcanagactacatcagaagagagacaggccacacctgctctttctccagctgtgcctttttagttggagctcctagaagttatagccatacattttcttcattagatacatctctaagaattncctgcataagggagccctaatccttttcttctggcttcttgaaagaa

SEQ ID NO: 411845 - DNA, 952 bp, Homo Sapiens
  misc_feature (22)..(22): n is a, c, g, or t
  misc_feature (53)..(692): n is a, c, g, or t
gctgctggtaggtggcattaanagcatgaagaatcgcttcgccaggttctttnnnnnnnnnnnnnnnnnnnnnnnnnnnnnnnnnnnnnnnnnnnnnnnnnnnnnnnnnnnnnnnnnnnnnnnnnnnnnnnnnnnnnnnnnnnnnnnnnnnnnnnnnnnnnnnnnnnnnnnnnnnnnnnnnnnnnnnnnnnnnnnnnnnnnnnnnnnnnnnnnnnnnnnnnnnnnnnnnnnnnnnnnnnnnnnnnnnnnnnnnnnnnnnnnnnnnnnnnnnnnnnnnnnnnnnnnnnnnnnnnnnnnnnnnnnnnnnnnnnnnnnnnnnnnnnnnnnnnnnnnnnnnnnnnnnnnnnnnnnnnnnnnnnnnnnnnnnnnnnnnnnnnnnnnnnnnnnnnnnnnnnnnnnnnnnnnnnnnnnnnnnnnnnnnnnnnnnnnnnnnnnnnnnnnnnnnnnnnnnnnnnnnnnnnnnnnnnnnnnnnnnnnnnnnnnnnnnnnnnnnnnnnnnnnnnnnnnnnnnnnnnnnnnnnnnnnnnnnnnnnnnnnnnnnnnnnnnnnnnnnnnnnnnnnnnnnnnnnnnnnnnnnnnnnnnnnnnnnnnnnnnnnnnnnnnnnnnnnnnnnnnnnnnnnnnnnnnnnnnnnnnnnnnnnnnnnnnnnnnnnnnnnnnnnnnnnnnnnnnnnnnnnnnnnnnnnnnnnnnngtcagggcgcgtaggttgcactttttcgggaatgtcgcggaaccctatggtaatttctaaatccatcaatatgatccgtcatgagccataccctgataagctcaatatatgaaaaggaagggttggtttcacattcccgggccctatcccttttgggattggctcctgtttgtacccaaacccgggaagaaaaacctaacacatgtgccaagggtcactaaccgttcaaccggcaaccgaagttttccctgcgaaacttt

SEQ ID NO: 411846 - DNA, 509 bp, Homo Sapiens
  misc_feature (342)..(342): n is a, c, g, or t
aacagaaaacaaaagacatttaacctggcccagtaggataagacaagaatgatgttgtttaatgactgatttccatttaacaagttgtactccttaatatagatgtttggtgtatttggtaaggggatatcagtttcagaaacatttacctcaaagtggagagaagccgactaggagctgctctggtttaatagcaggtattctactcccaacccctccaggagattcttgccccacccccttctgtcttcagctaggattcccattttcctatgaagacaggacagttttgttgttttaaaggaagaagctgctacttcctaatcaggatctcaggctggngaagaacagtgtgggaccacgttagcatccgcagatttccagcagggctgtcctgcgtggacgctactccatggaccggcttaaaccacacactggcctgtgcgcaccttggggctctttgccctctagctaggagttaattagggcagagccctatttacagtccc

SEQ ID NO: 411847 - DNA, 986 bp, Homo Sapiens
  misc_feature (602)..(602): n is a, c, g, or t
  misc_feature (651)..(651): n is a, c, g, or t
  misc_feature (683)..(683): n is a, c, g, or t
  misc_feature (724)..(724): n is a, c, g, or t
aacagcaggaggatagtcttgaggaggagcgtggcgtgctagatgtgtaactacgtcccgaactggttcctgtgtttttctagggcatgtggactagggatgggtacttgagtagaagcctgcaacttgaagagtttgtgcaggagttagctgcagtgtcggaaattagtgtcctgtatgctcaacaaggtattcggactgggtgtgcacaccacagctctcaggactggaaggtggaaatttaatctacgaagttcccttaaactgcataagcttcgggacctcttgattcactgatattttctggtggacccagggcttattcatgttaaaacctggttttcattaccatcagaataaactgacagctccattaatgaaatgcagcatttggtaaataatgttaagtggaatgatagaaacctatctttaacctaccggataaatcatttctaccattaccaagagtattgtagattcttaaagccaaacataccgtctgattcagttgctggatatttgaaaagggtttggcttctggcttttgaggagaggcgcttggtcgctttatagtcaaaatggctaatttgacttatcggctntgctggtcatttgtattgaatggacctttctcattacctacttgccaantgcttgtatgtttgggttctgactctgcaggnaatacgtgagtcttattaaaagttgggtcttctactttaangagcatatgtttgtggatgatatctacattagaacttgaatttaatacttttaattagcaacatttaaagtgaatccactatttcgtgcttgtaggtgaattggcttaataactaatctgatgctaactatgaaggtggcgtaaagccctcttgttaaacgccccttgaaaacataattctggtttttctttttggggagttttggatggctataaacaggggctataacaaatggtggtagacaaattttaatcttgagtt

SEQ ID NO: 411848 - DNA, 308 bp, Homo Sapiens
gaatagaatttgggataaagtggatgaatagctgactggccaaaaatcaaatgagtgtttcaccgggaagggattcttccgggaattcatggcatgttactcctccaggatgtatgctccagaccaccccgccggtttgtgctccaaatgttccaaagcgaaaagtttccgcctcaaagatttgaggcacctgcttgctggcgaccctacgtgtcgcaggtcttagtgtccaataagaccttgtggcctgtaacatgggtgtaaagagcctccatctttacctttgcagggataaaagtgagttttgt

SEQ ID NO: 411849 - DNA, 475 bp, Homo Sapiens
gcttagtaggtgctcagggctgaggaacataattgatgttagcttttattatctttatttacttcaaataacctacttaattgggaaattttccgggtctggagggactctgagtttgagtccagtatcttccctgggagtccttgcttgcacaaatgtgtgggatagactcccgctgtgtctgtggactcaacgtctcagctccaggctctttgctgccaggcatagtgagccgtgacatttataaatctctgggctcttaatcccctgctgatcctcggagaggagtagacatttgttgctaaacacattgccccactttgaacaaagaaacgaagagataccccaagcatcaatacaacagctgcctgcgatggctgtgacgtcccttctatcctaaggaggagggtactgggactcagtcctgtgcactgacctgccccactcacctggctggtgaggggtgcagttactt

SEQ ID NO: 411850 - DNA, 677 bp, Homo Sapiens
actgatcgagggtgtgctagagtgcgagacagagtgacagtgagagagtgtgagtgaccgacaccgagactgtgcgcgctagagagatcatgatcaaccatgtactttagacgagacaaatggtcatagacgtgcttcaccatgctaaggcatcagggcccttgacagctgttaacatacaacttgccggaatgatccagaccacaccggatgtcatcgatagcattggatgtacagcttatatatgatagggcatgactgctggctgtggcatgacatatgactccctggattatgcaaagctatgtgaacccaaacacttgacttgtgagacatggcctgtatgacaagaacaagacctcaagagagagcgaacgtatcgcaagaacagaatgacgaacgtgcttaggactgcctaagccaatgaacttgctgcaaaaagtgagttcgagatcgctcacagactgatgagtaaactgctagctagatgtaggacagggccactgaggattattcgtacgaactttgattacctatatacttgtatacacacagacacacacttccggaggagcagcgtacactatacccctcatgtgagtacatgtactatcactgagaggggcttacaatgacagactgagctagaactgagggcatatcattgcctctcaaca

SEQ ID NO: 411851 - DNA, 996 bp, Homo Sapiens
  misc_feature (455)..(455): n is a, c, g, or t
  misc_feature (605)..(605): n is a, c, g, or t
aacaaggaagtctgcgaccatgaagcgaatgcttagtctctgatatcacaggcttaaagaaaatgataaagacctaaaaagaaaagaaatatcccagcatgctgaaggaaagaaaagttccccaatacccttcctgcttatttttccaatatattacacagctgggtccaccttaccacgtcctgtttgattccagcgttaccaacttttctattggagccaaataagacatactgcaatcagtgatgaactgtctatatgccaagtgtatcccttgtgtaactgtgtaatggctgaaactgagaaattggggcgaagtatcaagtggcttaaaggattgccaaggatccaaaatttgaacgattaccaaattaccacgcacaggaaggaatctatgcagatgactgcttagcacagagagttactcagcataagtgttgtagccacgaacctgngaccttaaaagaagaatcctaagaatcttggacgttctatcatgtacatttctaaccatagatacaacatgggaactgatgtcagatgaatatggagcccctttggtctaaatcttgcccaacgttctctgcctttcttcaccaactttntcttgttgcagtcaataacattgatataaaaggattccggtcattacattggctttgttatagttgaatatggtaacacactcacatttaaggcgcgttaaaattggattttgtggctttaaaaaattaatgtagggcagaggtcccaaaattcgcacggaaaatctctttatactttttagaggtgttgacaagtggggaaataagtgggtaggttatccctcaaaaatgctatagtaaattcaaaggtctacttcaaaagtaggatttgaagggatggtttctaactagctcgcttattatttaactggttccacgatttgcatcattggaaccaaaattatccaatttaaaggctttcacgagaataattgtggtctttttaaaaaaa

SEQ ID NO: 411852 - DNA, 679 bp, Homo Sapiens
ttgaaccactgtacctggccaaaaaccagttatgatcctgtaagaacgtcggttctcatccttttctgactcagaatgagatgaaagctgtggggacccacctggaaaactgtatagttcgatataatttcagggagtacttaccaccctaccgccagcttaaaaattataagttatccagtagcacataccctagatactaaagagtgtgttcaaagctattcattcaggctgcacctaagtcaccaacagagggtccaattcagaacatgatggcacaactgtgtgatggagtacagttcagactacttgcttactggatttacagacagaggtattaggctaaaaagcaaggcagactgcgactactcttatcttatcttatttgagcaagtctactcttgccagctgactgagtgctcactgtcactgaacctgactcccagctagtgatctctactagcttgagagtagctcaatgagcacacactgctatctgattttgttggaatgtaccctgtgcaactgctgactctggtagcattccatgtgctcaagtgtgatcaagtacacagctgctagattatgagcataattttgagctagagtacagtgcttggagactagatacttgcagtgaaagtttacgggaaatatctacgtataaaccgttaaccaa

SEQ ID NO: 411853 - DNA, 408 bp, Homo Sapiens
  misc_feature (235)..(235): n is a, c, g, or t
  misc_feature (264)..(264): n is a, c, g, or t
caaaatgtagccgttattatttggtaaaattgcggttaacttttggttaataggtcaatctttacccatatggccggaattgggaaaatccttattaattcaaaagaattaccccggaattggttgagatgttggttcagccttggaaccagaaggtccctttttaaggaacgtggcgctctacactcaaaaggcgagaaaatactggttattaagggcaatgggccacatactngtagacccttaccctcaattaaatgttcntgggggccacgggggcgcgaaagcctcttaactggagaccttataggaggctcccctttttaatctgtcggggaaaagctccggacctgcgcagcgtgtcaacctttggtgtgacacaccacaccgcgcgcgttaatgtggccg

SEQ ID NO: 411854 - DNA, 645 bp, Homo Sapiens
gtttgcatctacataatacccccttttgactttctgatatagctgatattcatggtgttagcacacagtaggaccttgaacatgttgataagcactccttgaagaaattaacttttgagaggctttaaatatatagggaagtattttctgggttttgaagaatagcaagccatggattaattttattggacagattaatacattggcaacaattcaacacattctgattcaattgtgaaaggggaggcctttaagctaccaacaactatgagtcaggtaataaataaatgaggttggtaatgattagaggtctacagtgagggagtcaatattcaggctaatctgctgaacttgagcatactaatagtacgtttctagacctgggtcaagtaggcacatgtgtctaatcatgctgtatctgcatactgggggtctctgttgtattggacagtataggtactactgtcttactttgctctacgaaacagtggtatgcttagattcatttgactatgagtgataaatctagattatgttatttatgaggatttaagtgtaacaggtacttatagagctcttgccctagattgagcacatatggctagctttcgaagtggtatatccagtgtcaagcttgaaatatgt

SEQ ID NO: 411855 - DNA, 376 bp, Homo Sapiens
  misc_feature (212)..(212): n is a, c, g, or t
  misc_feature (302)..(302): n is a, c, g, or t
tcatgcccagccagattattatttttcaattccactgactaaaatatttgcaaatgaacttgcaacatagttaataagaaagtgttcctaaagataatcgttgtcagtaattcaatcatttcaagttaattatgatcaatgtttcatatgatcaacttgtagcatcacatctcactgtttatattaacctgaccaccggaggttgccatctnccatccaagtgttctgtgaaggtggtattccaccatcagatgtggtaattctcatgtttgctaccaaaatagaaaaagagttataccctntaaagttattttagggaaaaagaattttcagggtttgatttattgatgggtgcttttatttgtgtaaaagtccc

SEQ ID NO: 411856 - DNA, 295 bp, Homo Sapiens
  misc_feature (67)..(110): n is a, c, g, or t
ctgagaattcctatggaaaataaatttgactttgcttaatgcagttcctctaaacttacttaattcnnnnnnnnnnnnnnnnnnnnnnnnnnnnnnnnnnnnnnnnnnnncagaccttgcagggatgaaaggtccccttttctcaaaaccctcttatgatcctctacactctgcaagggcttctgaggacagcaggctgagaaaggccgatcctagcacttacctctttgaagacacttttaaaactgttaacagtatttatagctttaaaagtatccatgttcttaggccagtt

SEQ ID NO: 411857 - DNA, 439 bp, Homo Sapiens
  misc_feature (43)..(110): n is a, c, g, or t
gggctgcagaattcggcacgagctcgatgttaagatagttatnnnnnnnnnnnnnnnnnnnnnnnnnnnnnnnnnnnnnnnnnnnnnnnnnnnnnnnnnnnnnnnnnnnngtttacatgcttttggcattttcctgaaatagttggtaacttgtaattacatggctttgctaattctgtgctcttgtcatatgtcaagaaatttttttcatctaatgaagacattgtttaaatatgttcttggtaataataatctggacattttattttacatatcaaagtactacacatgctcaattataaccagtctgcctcctattttgttctcagttcattttgttatacttcaattgaactatccaatttcctataaacaatatatttaatttccttactactgatggtcactgcctattcagttttcagctgagaaacctgtt

SEQ ID NO: 411858 - DNA, 902 bp, Homo Sapiens
  misc_feature (137)..(137): n is a, c, g, or t
  misc_feature (253)..(578): n is a, c, g, or t
  misc_feature (725)..(725): n is a, c, g, or t
  misc_feature (760)..(760): n is a, c, g, or t
  misc_feature (878)..(878): n is a, c, g, or t
acctgggtggacatcagcactgccattgtcagccctgtgagggttagaagagcttggtgcatattaaacactgaacagatgttagctgttgttgtcttgagcaagttttcttaccattctgggccttaatttctttntgtttaagatggaagtaatacctaattcttaggttgtgagaattatttgaaatgtgaaaaatattgtcagtgggtctgagccgtagtaaacagtaaatagcagctggttacagtannnnnnnnnnnnnnnnnnnnnnnnnnnnnnnnnnnnnnnnnnnnnnnnnnnnnnnnnnnnnnnnnnnnnnnnnnnnnnnnnnnnnnnnnnnnnnnnnnnnnnnnnnnnnnnnnnnnnnnnnnnnnnnnnnnnnnnnnnnnnnnnnnnnnnnnnnnnnnnnnnnnnnnnnnnnnnnnnnnnnnnnnnnnnnnnnnnnnnnnnnnnnnnnnnnnnnnnnnnnnnnnnnnnnnnnnnnnnnnnnnnnnnnnnnnnnnnnnnnnnnnnnnnnnnnnnnnnnnnnnnnnnnnnnnnnnnnnnnnnnnnnnnnnnnnnnnnnnnnnnnnnnntatcacctttaatatccatctgtagtatcgtatcacttgaatcatgtgagcttctctaccattctgcaaatgcttacataagattactatcttttacagtttaatccttctagttgtagggattttgagatatgcatagtgagactnacttatatgatagatgttctctgtttacactacangctttctgcgttactcattcttgtgaatgcagttcactatcaacacctgattcttctcttaagagttcgtgactgggattgtctgtgaagatggaaacttatcttatctagaaaatgncattgaagtacattttctatttat

SEQ ID NO: 411859 - DNA, 353 bp, Homo Sapiens
  misc_feature (140)..(291): n is a, c, g, or t
aaattgagacagggtttcggtctgttgcccaggctgaggctggtggtgcaatcatagctcactgcaacctcgacctcctggggttgcagcatgggccaccgtgactggcctgaaatagttttcttagcatttaattttannnnnnnnnnnnnnnnnnnnnnnnnnnnnnnnnnnnnnnnnnnnnnnnnnnnnnnnnnnnnnnnnnnnnnnnnnnnnnnnnnnnnnnnnnnnnnnnnnnnnnnnnnnnnnnnnnnnnnnnnnnnnnnnnnnnnnnnnnnnnnnnnnnnnnnngtctgtcttggctcatacaggcagccttgagcccagagctcgagctgccgtgagccgtgatt

SEQ ID NO: 411860 - DNA, 719 bp, Homo Sapiens
  misc_feature (390)..(390): n is a, c, g, or t
  misc_feature (455)..(455): n is a, c, g, or t
caaagccaaatccataggacttactattaggacaaaacccctacatgtcagcaaagtatccgactgcttaagagggaggcaaagagataatttttctggccagagtgaacattcaccctctctcctggttccagaaaccacatgcatcaagttggaaacaatggaaggaaatcatttcgagcatcagtgggccagttgaggctacatttggccaattttatcagtgtgttttctggatgagtgccataggagatgggtctttgcttgggcacattcccaactatttgctcgtctttgacagggtctaaaaccatgaggctaaggatgcaccgagaagcaagcctgacttcaataactagccattcacttctgtgccaatttgtgcacggngcagtaacaaactccggaaacagatcagtccaactgagttgctatctaaacctcattaagccggngaagggatttagtgtttaacagaagagaagtcttcaatgcttttatcgtaaaaagactggccagagtcacttaatgatcatattacaaacatgccaagcaataaactgacacatatcaagaggatgcctaccttagtacaggcttttattttctaaaacttgctgccttgatgatattttgaggttgcccaagtttacacaatagtgtcaatttcagcatcccatacccgattatcccataactccatatcttgatatcctgtt

SEQ ID NO: 411861 - DNA, 654 bp, Homo Sapiens
  misc_feature (586)..(586): n is a, c, g, or t
acgaggttgaaattctaatatctctctcagctcaactaagtaactttgatcataggtgtcatagaaataattagttggataggtggaaagatagattaagagcccaccaagttttatgtctgttattattgaggatccattaaccaccagttttccacgtgaagtgttttcattgtgataaaagcctccatattttttagtgaatgcctgatcattttccaggcacaagacatcactatttccactagaagacagtaaaatatttctgaacaaaagaaagagtggagactcccatgtaatgggttcctatttatttttaaagtaatcgatagttgtttgcaagtaattgcaccgtgtaatctgtaagtaaggtaagactgaaaacacacatctgagtaatcacatggtctaatctgttcaaatggacagattatagatgatcctgagacctctaattttggtaaattgtcattgtgacccttacatggctggctttgtactgtatgttccttgtgaatttcaaaggaagtgtaaactttcttgaactactcaactactataatgattgaagttaagtactgcattntctatagaaatcaatgaagctaatcacacaagcacagctcaacatatcccattcagcagtcttgatcc

SEQ ID NO: 411862 - DNA, 243 bp, Homo Sapiens
cctttcttaattatgctcatagttgtgtattgtcctgtcagcttgctcattgtgtaaaatgagcggacatgagaattcacgagcagagctttttacactgatatgtatgaaagcatcatttacgtcctgaaagccccagccgagcgatcactggcagtgccaacatttttgagtgtgggctccataggaagcactgttttccctattgagaattatagtgggtttttttcatttacgagtaat

SEQ ID NO: 411863 - DNA, 733 bp, Homo Sapiens
  misc_feature (712)..(712): n is a, c, g, or t
actccaggaattcggcacgaggatcgaccgccgcatgtatcacagactgatcctgaaggctaagggtaatgtgggcaaatacgagctgattatcatggatcacattcactggctgaaggctgactgggaccgtaagaagctgctggctgaccaggctgagggccgcatgtatatgaccaatgaagcacgtaagtgccgtgaatagctgcctgcaggccaagaatgaggagagcatcaagactatattcaaagaggaagacgtcatgaaatgaaacctggcactttgactgtacatactggacctcgtgacttcattgatcaggcgttacaatatgacatggctactgaatacatacagaactctaggggatgtccggtacccaatagcgcctatagtgagtcgttatacagatgagtggacgtcgtctacatacgcttgactggggctagggtcatagctgataggacagtaccgatgtgccttccgacaattgaagagcctgaatgccataggtcacttgtaagcgtaatatattgttagacaccgggttaaatctatgacaatcaagcttattcattgacccaatgtgcccaaatgagaagagagccttatagttaaaggattgaccgagaaagggtgacccgttttcccggttggtaccaatgcctgttttcaagaaagggcgcttcaacatgaagggcgaataccccntttaggccatgggccaatatc

SEQ ID NO: 411864 - DNA, 1000 bp, Homo Sapiens
agcccaggtgagagctctcttctcctttgagacctagttggaaaggcagagatagggtctctgaaaggaatagtgaatgacacctgtattttttggggaaacttcattgaacaagagttccattataatcattttctcttcacaagtaacctcttccataacagcaggaattttacatgagtttagatcattcctctatgggagggatttgcttcagaagtgcacttgattggaagtactcataagtgagtttcttgacgtttcgtaaagagtttccttatttgataaatacattctagcaatctgaacctttgactctttgcagctatgaatgtatacatactaggaggatttttctaactgatgtaatattttatcatacctagtatctctctgtcctagactcttcatatattatacatactcataacctctcatcaactgtactatactccacatttatttctcttcataccttatctcatgtaacaatctattaactactcactctattctcatactctgctatcatcctagacacactgtgaccttatccctctagcgtacttcacctaccattctttaccatctatcatactcactacattgctcacctgaaccacacttctttgctcacatgcctacggtaccattaattttctaccatcacctatccctgtcctaatctactcacttcctatcatctcacacttccttcttttccatttcgatcactctatattcattccactcacttttcgtcctcatctctcttcctctactcgatctattcgcattctgtacttccgatttctgctctctcttattctacctcattctattcctctcttgtacctctattctatatcttcatcattatacttcctcctctcatctctcattcactactcctgactcctccatcttctctcctctttccttactcctttatctctctattaccatcctctctcttctattctacctttatctctctcct

SEQ ID NO: 411865 - DNA, 236 bp, Homo Sapiens
aggcatagaacacatagaaggtaaaagtcactggaaataacttctctatgagggagttcatatctttttgtattagcagcatgatccgccacttaatattttaaaatattcttaccatggaaccctgtgctttcttcactgtggatccgtagcaatcatggcgttttctcttttttgtctccaccaaatcaactcactcttgctgagcatcattcttcattaagatatggctttgg

SEQ ID NO: 411866 - DNA, 419 bp, Homo Sapiens
tccttttaatatatccaaaaaagtatgttcagcccaagaaccatgttccttcttgatgttcttgggggcctcaatgtacttacttatgaagaggagatagatttatggttgaaatacattgtctttgtcttctctaggaggaggttagatagatatctatccccagaaggattagatgtcctggtccaaatggtggtcagtattcaaaatatctaagccatgttggtgaattaaatgtagctaaactactgaggacagatggcattttcctgaggagttctgagagaactcaaggatgaactgggataatgatgtcccagaagtgaaaactgctaccattcctactctgcagattgcaaaggtgagccagttgaaaacaaactaattaattacttactaattagttttcatctctggcc

SEQ ID NO: 411867 - DNA, 593 bp, Homo Sapiens
ggcagagccacagcacactcgagaatcactttgacagcagtgattctgtggccttggaaagtagatacaatgtgtctgaaaacatcatgagtcactcctgtccagtcagggacccagggttgggtagggtgacgacaggttacttggagcccaaaatgataagggaggctttcttatagggctcagaaattcactcgagatagttctcaaagaaaagggcctagagtgttttacatcctgtttgcatattcattttttctttatcttgatatttactgtctggaatatccattttttactcttccccatccttgtgccttttctcatattgattattcctcctgaaatgcctcccatccctccccattctttgtatctctgctgatagaaatcttagccagcccctaaggcccagctgagatggcaggtcccttacaccttcgtgtgccctgcaagattggagcacagcgactcattgtggctgagtgaatggatgctggtgctggaatgctacctgcatagtatgaatacattttcccattttaaaaataagcagtattcactctagaaaaatttagatgttctagaaaggg

SEQ ID NO: 411868 - DNA, 666 bp, Homo Sapiens
  misc_feature (500)..(500): n is a, c, g, or t
  misc_feature (509)..(509): n is a, c, g, or t
cggcacgagcaggcgtgagccagtgcacctggccggtatgtcatattttttgtaactactataaatgggaatgctttcttgatttttcagattgtttgctgttggcatatgtaaatcctcctgattttcacatgctgattttatatccttcaactttacttaatttgtttatcagttctaacagttttttggtgaagtccttagatttttctaggtataagatacatgttgtctgtgaacaagactaattttgacttcttattttccaatttggatgctctttatttctttctctttcctaatggtttttgcttgattataactttgagacctcacaaacaagaggatatagttttaagtattacaaagtcatgtgcatttaggttatatgactatatcaaagattagagcaatggaaagagctgttcgtttagatatatagttaagtgaaatttaatgctacctaaagaatactggagggcacagtactaagaacacanaagatgttntacttttcctttgaggagaggagaaagtgaaatgagttcaatacaaatgaattttagaaacagatgggagattctaggatgcagtcttattcctgagattcttaacgggatgagttttgcccccagttgctagtattacactattcacagttgacga

SEQ ID NO: 411869 - DNA, 717 bp, Homo Sapiens
  misc_feature (533)..(533): n is a, c, g, or t
  misc_feature (544)..(544): n is a, c, g, or t
  misc_feature (576)..(576): n is a, c, g, or t
  misc_feature (581)..(581): n is a, c, g, or t
  misc_feature (626)..(627): n is a, c, g, or t
ggaaccctgtagtccaggaaccaggtctatttttccaagacggctttttaaagcattgactccataaagtcaaacttagttgttaaaatattggtcatatctgattcaaggcacatcagtctcaaatatgacaatttagtcaaagccttcataatataacctatgtttccaattatttcttgtttcaaggggaagagatttttattaaacttacgcaaatagctgtattgccatgaaaataagaatactcaataagagtttctgaattctgcagggcttatagagagaaaaagatgaatgtttcatttttgtttacagacatataatctactaaattgctgtaagtatagagggtttaagagaaaagagaaaggggttccttatatccccagaaaatagaacattagagaactaaccatattccaaacaaaaaaggccacaaaattttaactcttcttcatcaattcatttagtcctatgcaattcatttttgttttgcttgatctttagcagttaaatgaaccccctatctnctcctattagntctgggaaaatctaacctcagtcctagtggtnataantcattcaagtaacttaagggtatggtattaggaaacctgtacttnntgagtaccttggcataatccctttccgtggttctttggaagaagccccttttgtaaacattgaagcaactttggcaagttgctgattgta

SEQ ID NO: 411870 - DNA, 314 bp, Homo Sapiens
  misc_feature (65)..(247): n is a, c, g, or t
ggatgtaacagaatgataggctggtggtaaaatctgtctaatcttgttcagtagaaggcataacnnnnnnnnnnnnnnnnnnnnnnnnnnnnnnnnnnnnnnnnnnnnnnnnnnnnnnnnnnnnnnnnnnnnnnnnnnnnnnnnnnnnnnnnnnnnnnnnnnnnnnnnnnnnnnnnnnnnnnnnnnnnnnnnnnnnnnnnnnnnnnnnnnnnnnnnnnnnnnnnnnnnnnnnnnnnnnnnnnnnnnnacagtgatctggatagtgatcttgatgtactatgactcatttgcggcatacaaccacatcatatggt

SEQ ID NO: 411871 - DNA, 733 bp, Homo Sapiens
  misc_feature (263)..(295): n is a, c, g, or t
  misc_feature (599)..(599): n is a, c, g, or t
ataactttcagccaccgatctcaatatttataagggaaatgataatgtctcaacacatgccccatagggaaagagccagaatagaaatatttttgacacttccatttggaaccagaatctctcatatttactatctaaaactaaggagcctttcccaagttagtttattatgatactaccacgaataagttaaatattaatctgttccctaaagataagttttattgctttgaaggatgaaaaaaatatgaaataatcacttnnnnnnnnnnnnnnnnnnnnnnnnnnnnnnnnnaagtaaaaatcaagttaggaataaaacatctttttaaagtttatcttataattccaaacgaatccctggaaactgaactactgtgtgccatttgtttttgttgaaatggttgttaaattattctgattatttagcgatgccagaggctctcttagagtaatttgatatatcactcggtgtctttgtttcacctcagctaggtccagaaagagacctggaagggaggtggataatcataataaatgaaagccagcctttctagtttagttatgcacaaaggttaaaataatttgttagccaacanagtgtttgtgcaattaccataggtctttaatcatgtttggcactattggccacctgtctgaatcttagacatcctaatgtctggtataacattatttgaagttgccccgacattgatctatgtgatccctcaga

SEQ ID NO: 411872 - DNA, 185 bp, Homo Sapiens
ccttgccccaagttatcacggagcccagagaaaccaggcctgggctgtgcttcctccataaagcagctgacatgtttccaactgttaatacttctcctaccgaggttctgaaaggggtctgttctcagcctttggaaacatcttcagaaagataaggatgattgtggttgttgaaaataaacacg

SEQ ID NO: 411873 - DNA, 647 bp, Homo Sapiens
  misc_feature (53)..(62): n is a, c, g, or t
  misc_feature (185)..(315): n is a, c, g, or t
  misc_feature (624)..(624): n is a, c, g, or t
gtttaagatacctgttttacaggatactggatctagtctttaaaattttgccnnnnnnnnnnaagtccgattcattaaaagtttaagctggtaggatttatccttgttatacctaagacagactaataatctgtattatttaccttaattatatgctttcccccgaggaggcattctggtgtgannnnnnnnnnnnnnnnnnnnnnnnnnnnnnnnnnnnnnnnnnnnnnnnnnnnnnnnnnnnnnnnnnnnnnnnnnnnnnnnnnnnnnnnnnnnnnnnnnnnnnnnnnnnnnnnnnnnnnnnnnnnnnnnnnntgaataatcattcaatataggttagctgttgtagttgtgggctgtgctgttgctcactttaagagagtggagtttgctgtactgtattagataggcagtctaaagaccagtcttggctaattctgatacttgacagaacgctagcctatttgccacttctgattatactcttagtttaattcatactataacatataacccatacgtaattatgttagattctataaagctatgttcctccaactttgctccatggtatttgttcactttgtgaaagtcattacgctgcatgtcagattcctatacttntctgaataatgttataccttaat

SEQ ID NO: 411874 - DNA, 625 bp, Homo Sapiens
ggtttgttaagcatgtcaaggcttttgcgaaactagtcaatcttagcatctctaaacaactaatcccagttccaagcaaactatataagctgtccgattataaaggcacctccaacgattttgcaatgcaccaatatcctcactatacaacagctcactaatcattctatactataatctaactaccttcctgtgtctcctattctcataatcctacattccctgtcacacaacataccttatcaaacttctccaatgactattaatttcattacattcattacatataaatactaccaattcaaaacacttaaaccaaaacattttatacactattatactgttaactcaaatctactacatttacaccctttaccacattttatcactatcatatcatattgccatttaactccaatacatctacattaaacctcaacttttctacatcatcctatttatcataagacaatatcattttacaatatatttttaccctattatccaattattaacttacactatattcaatctttttaaacatatttctcctttattacatttttttaaactaactaatttattatcttcatttttatatatattatctaaagatctaatctct

SEQ ID NO: 411875 - DNA, 709 bp, Homo Sapiens
cttcaatctcaatagatatttatttattgtcataaatatatgctgttatccagagacaaataataaaggctttttaaagtcaaagatggtcaaaagtcagaatttgaaacacaggtattcctcaaagatattgggagttcagttccagactactgcaataaagcaaattctgaaatgaggcaagtcacacaattttttggtttcctagtgaatattaaatttatagttacattatattgttgtctattaagtgtgcaatagcattatgtctaaaaagtgtacatagctgaactaaaaatactttattgttaaaaaatgtttgcaatcatctgaacctttagtgagtcatagtatttttgctggtggagggtcttgccttgatgtttatggctgctgactcaatgcggtggtggttactgaaggctgtggcaatttcttaagataaaacaacagtgaagtttgccacattgattaactcatcatttcatttcatgaaagatttatctgtagcatgtcatgatgtttgatagcattttgcccacagtaaaacttcttttaaaaaatggagtcaatcctcttaaaccctgccactgctttatcaatgaacactatgtaatggtctaaatccttcgtggtatttcaaccatgttcacgggattttcactagaagtagattctatttaaagaaacactattttggttctcataa

SEQ ID NO: 411876 - DNA, 620 bp, Homo Sapiens
  misc_feature (416)..(416): n is a, c, g, or t
tttacactctgagtacatgatgggattgtatctagatggccctcatgatcatgaccttgagggtcgctttctgaagcacaattttacctatactgaatgttagcctggatcctccattttcaattataaccaattgtgtgccctttctccgactaacttccactactgccctctttaaacaccatttgccatggagttcatgcaagtgttcattgttaacgctgcatataatcgtgaatgcgctccccagtgtatagtgaacgtttaagtgtgatcgatagcttatgcatgctaggagctctccaatactcatttcattgagatttaatcatacgctaatggaaagcttaccacctgtgatatgacctctgtgtccacatctcagctcttaagagctgctgtacaatctttgattngcttttctggcctctctttagtcacctgtcacaagaggttcctgctcagtcatgatactcgagagtacgataatgactcgttttctaatgcgctgcagatttataagaaacgatcctgttgtcattcgaaagaactgctagcttttatcttttaacgcactgaacatttccccaattgagtctatggatgagcagttctttgaa

SEQ ID NO: 411877 - DNA, 703 bp, Homo Sapiens
  misc_feature (472)..(472): n is a, c, g, or t
  misc_feature (559)..(559): n is a, c, g, or t
  misc_feature (569)..(569): n is a, c, g, or t
  misc_feature (574)..(574): n is a, c, g, or t
  misc_feature (595)..(603): n is a, c, g, or t
  misc_feature (626)..(626): n is a, c, g, or t
  misc_feature (661)..(661): n is a, c, g, or t
agatgttacagaagtaataatatcttttatagaaacaaaatgttatttatttcttctcttagagaccctacacttgtagaatatatactgggcaaaaaaagcaataagacaacgagagtctcactgctgaaagagagagaaaaaaatagccaaagattacatatgaaagagacagagggaaatacaggaagaatacataggtattaaaagtttatacatccatatatctaatagatattcatagatatagataaggtcataatgtgattaattttttactaaaatatgtgaatgtgtccatctattttatatagctccattctggaatgcaaatattgctttaatttttactcaatactgaggcataaaatgctataaaatttttacaaagttgttttgaagttttaaaaagtatcaatagcactattcaaatgtttaatgtgcattaaatagtacttctatgcaatcattntgtatttctagtagatttaacatgtagtatgcttagagttatgattcttccagacatactattttcttgaagcaattcctttggttntaaaacattngtttncaataataaaaatggaaaacnnnnnnnnnggtttcctataacttacaatttncaatctggcaattaaatagggatacaccatttcanaatatgttctcaatacatggtttaggtttcaagttaagcccg

SEQ ID NO: 411878 - DNA, 667 bp, Homo Sapiens
  misc_feature (180)..(466): n is a, c, g, or t
  misc_feature (470)..(470): n is a, c, g, or t
  misc_feature (492)..(492): n is a, c, g, or t
  misc_feature (530)..(531): n is a, c, g, or t
  misc_feature (579)..(579): n is a, c, g, or t
  misc_feature (626)..(626): n is a, c, g, or t
  misc_feature (634)..(634): n is a, c, g, or t
gtacatttcattctgcactatttgaagctatgattaagtaaagctacacaatgaatcaattctagtggtgtataagatgttagaggtagctaacttttcaaggagtatagctacttatatacatgggagtgactgtacaagtttcgatttaagcttttttaaaaacatcagtaaagaggnnnnnnnnnnnnnnnnnnnnnnnnnnnnnnnnnnnnnnnnnnnnnnnnnnnnnnnnnnnnnnnnnnnnnnnnnnnnnnnnnnnnnnnnnnnnnnnnnnnnnnnnnnnnnnnnnnnnnnnnnnnnnnnnnnnnnnnnnnnnnnnnnnnnnnnnnnnnnnnnnnnnnnnnnnnnnnnnnnnnnnnnnnnnnnnnnnnnnnnnnnnnnnnnnnnnnnnnnnnnnnnnnnnnnnnnnnnnnnnnnnnnnnnnnnnnnnnnnnnnnnnnnnnnnnnnnnnnnnnnnnnnnnngaanaaaaagttaaatactatatatntttctaaaaagaggagatgtttctgatttctcacaatnntgatttttcttattgaatgaacttgtagcccctagggaagaacatcanggcattctctcaaatcaccctgagagcaatttaaaagcaggtttcangcctattnctagagaatctggtttagtaggtctgtggtaca

SEQ ID NO: 411879 - DNA, 703 bp, Homo Sapiens
  misc_feature (509)..(509): n is a, c, g, or t
  misc_feature (558)..(558): n is a, c, g, or t
  misc_feature (567)..(567): n is a, c, g, or t
  misc_feature (633)..(633): n is a, c, g, or t
atcatttctgaagcagtgaaaagggttgtcatcacagtaaacggtggaaaaacactgaatggtgcgttagaatcaccagatctaatttttgtgtaccttattaatacatcaaaatttttgcatatcttattaatgtatcgaataattaggctaaatttttgcataacttattgatacatcagaaggtcaacaacatgaattcaaggatgcctatgttctgttgagtgaaacagaaatgtctagtgcccagtctattgtacctactcttgaaattgccagtgctcagtatacacctttggttgtcattgctgaagatgttgatggagaagctctatgaaccttccttttgaataggctaaaagctggtcctcaggttatagcagtaaaagctccaggtttgttgacaatagaaagaaccagcttaaagatatggctcttgctgttggtggtgcagtgtttggagaagggggtaggcctcataacacagggaaagtttgagaggtcattgngaccaaaggtgatgctatgctctttaagggaaatggtgacaagtcttgnattgaaaantgtattcaagaaatcattgagcaagtagatatcacagctagtggatattgaaaaggggaaaatgantgaatggcaaaactttaaattggagtaactgtgctcgaaggttgtggtacaagtgatgtcaaaactaatg

SEQ ID NO: 411880 - DNA, 428 bp, Homo Sapiens
  misc_feature (275)..(291): n is a, c, g, or t
  misc_feature (295)..(344): n is a, c, g, or t
ccagtgttacagcttcaaataaaaggaacacatattgaaggaagaagacaatgtcataaagcttatctagtgtttgtggtatggcccatccaatgaacagaaaaatcatgtgaatcccggagcttctacctagcagtaaactcactgatcttcagggtgtttctttgcaaaatccaggcttttggattcagactagaactacaacattggctctcccgggtcttcaacttgccaactgcggatcttgagacttgtcaacttccataacctccaannnnnnnnnnnnnnnnngctnnnnnnnnnnnnnnnnnnnnnnnnnnnnnnnnnnnnnnnnnnnnnnnnnnaagtgacagaaagacagacacacacacagttccatttctgtggagaaccctaatacatctacctacttaagacatcgaattcct

SEQ ID NO: 411881 - DNA, 458 bp, Homo Sapiens
  misc_feature (20)..(20): n is a, c, g, or t
  misc_feature (211)..(219): n is a, c, g, or t
gtggacacccatgaaacctnccccataatcaagacagtgaattgatccggcactcccatccccaccgccactgcttggcttgctgtcactatagattaattcccattttctagaattccatagaaatggactcatacagtgtatgtctggcctctttcactcagcacaattcttttttcatcaggtgtttttgtgcatatcagtactccannnnnnnnnattgttggtaggatcccattgtatgggtggaccacaatacctgttgaatacctgttgatggacatttgggttgttaccaggttttggccatgacaaataaagctgctgtgaacatttgtgtaccagattctgcgtggacatatgttttcatttctcttggatatacggctaggagtggacatgttgggtcatgtggtaactctgtgttcaactgtgcgaggaactaccaagctctttca

SEQ ID NO: 411882 - DNA, 615 bp, Homo Sapiens
  misc_feature (371)..(371): n is a, c, g, or t
  misc_feature (573)..(574): n is a, c, g, or t
  misc_feature (590)..(590): n is a, c, g, or t
gcacgaggacaaaagagatgtttctacctgttggtaaggttgatgcaactgtcataattagatgttcttggtttttaatagatgcagcaatgagagagtacattgctaaagtcagaacttaatttgaattaaattttcaagtttccaccaagtatttgaaaacttagaaattgtatttcgtaattacacatgcagacatttaaatttttattaagcaccacgatggaactcaatctaaaggaataatggcacctgataattactaacaacctttgtttatataagaccttgtgcaaactgtgtgataacgtatgtttgcattctgtctttaaaataaccctgtaaggtgcgttattttaattcttagattntaaaacttagcttcaagagaaattaagtgattagtctatagctacaaatcctgtaaatggcagagtcaggaattaccactgagcatgactccatggactcttacattgtttcctgcctcttaataaattgaccatccttgagactgactagccttcagatttttcatgatggagctatcataacttctcagtggatacatanntatatcattatggcanataaagggaaccatttagaagcctc

SEQ ID NO: 411883 - DNA, 512 bp, Homo Sapiens
  misc_feature (476)..(476): n is a, c, g, or t
  misc_feature (499)..(499): n is a, c, g, or t
tgccttcatgcactgtaagaataggcactacttgtagagagctgccctgtgccagatatagctggtgccttcacactgtatctcattgaattcaattttgagaacaatgttatgaagtaggtattggtatccttagagataacatacagagaagttaatcaggttggctgaggtcatatgactaatgcggagatgtaactcgggtttgctgactctgaagcttcttttgtctatataatttccaaagtttggttttccgtaccattctaataaacccagaagacacttaccagtgctgcttccttcaaactggactccttgcctatatgagttaccttcttacctgcctttagttgtggtgtgggcagtgggtgctgtgttaatcccaagggaacagttgatatcaaccaagaatcactaaatgatgatgcacaggctgagtgcaagttgcttgctgccattttgtcagaggtaantcctcacggtaacttggaatatngcatgttacctag

SEQ ID NO: 411884 - DNA, 300 bp, Homo Sapiens
  misc_feature (112)..(126): n is a, c, g, or t
tcaataaacaaataaaatgttgtccttccagtctaattgcattgaaaaatatagctattacccaggcatatcacccatagttcagagtttgatattctaccattagattaannnnnnnnnnnnnnnggttcatcagtgcctctctcaatcttgtaggtacctgattcactctaaagtaccaaggacgttcatctctattagcactagcctcctggggtgtaacgtgactcttcacagaaagctgcactactcttgaagaaagcaattgtgttcatttcagcaacatggaaagtccaggaa

SEQ ID NO: 411885 - DNA, 434 bp, Homo Sapiens
ctgggactgtcacaaggcagagggtggctaggccatatcccaggacccacttgtaattaataatgcttatgaagtatcatgttccactgtacactcattgtcattgataacatcttatcatgagatacgctttgagagcttacaaccagtctcaccaccatatattatctgtgaatttcctcgtcctaattagcctctcattgcttccaccgactggaccttatatcatcctttatctccaaccttaaatgacttacattccctgcctgtccatttcagagaccttccactatgaacgcattctctgtctcattgttcatccttgcttataatatgaattcagctactctttcttctattcgtcttttttacgatgtcccttgtttctctcaacatcatttattatcctgttccttttctctcggtgcccatct

SEQ ID NO: 411886 - DNA, 517 bp, Homo Sapiens
  misc_feature (68)..(68): n is a, c, g, or t
  misc_feature (178)..(194): n is a, c, g, or t
  misc_feature (415)..(415): n is a, c, g, or t
  misc_feature (439)..(439): n is a, c, g, or t
  misc_feature (472)..(472): n is a, c, g, or t
caggaattcggcacgagctgtcttgtctgggcttcctgtttcccttaatctatcctcatctatgctgntgccaaagtgatatttctactatgcacactggatcctatccctctccagttaaaactgtcagtggtccgccactgccttcaggatgaaagtcaagctccttttcacagcnnnnnnnnnnnnnnnnnggcatttaacaatcagatcccaaaatgtctttcctgactggcttccaccgcttctctggactgttccaggaccctgactagtgcatgcactctgtaaggtgcttgtgctggtccctcctcctgatagcccttctgcctctgttccaccagattcactcctgatccctcatctccctcctcaaaaagaagtctccctcaattatcaactctctgatggattntccctggtaggtaatcagttctgntcctgtaaccctctagtagcaactatatacaangatgtgacttctattaatacttttccctaaatcaggacatatctt

SEQ ID NO: 411887 - DNA, 790 bp, Homo Sapiens
  misc_feature (46)..(46): n is a, c, g, or t
  misc_feature (520)..(520): n is a, c, g, or t
acaacaccatcccgccaccaccccgtcgacggccgtgggaagcccnaagaacagccgtgcaagcctattggatcccccgggctgcaagaattcagcacaagacaattgttccctaagcaaccaactctagctcataactacaatcaaatttcacgtagacaaaacacagagaacagacaacgtcgcgaaaatctaactacactaataaacaaaataacttatacaacggattattaccctagacttttctatatgggccatattcattaaaaaccccaaaacgctaccttagccttaacccttcaataatacaggaactatccttaaacatgcatcactccgctatataaccaaaaattccactccaaaacaacccgagataataggatatatagtaccacaccacctaacacactaaatgcataacaaactctaccctcaccaaataatataaccacacatcaaatcaatggtcctggtatcaaagataacccacataacatccttacacaactactantactccaaaacgctaactctacaaactaacgacacaacattctaaggaggcacaaactgctcaaatacttgacgacattattaacataactatccatactatctacatcattcaccaactaccattacacaatgcaaccaaacaatactttacactttacacccgccaaatcacactccacttccaacagatgtgtaaccacaattaccaccacaaactattcctaaatacggcctaaaccaatcaaccttactaccagacaacctaacc

SEQ ID NO: 411888 - DNA, 691 bp, Homo Sapiens
  misc_feature (340)..(348): n is a, c, g, or t
  misc_feature (465)..(465): n is a, c, g, or t
  misc_feature (547)..(547): n is a, c, g, or t
  misc_feature (612)..(612): n is a, c, g, or t
  misc_feature (624)..(624): n is a, c, g, or t
  misc_feature (656)..(656): n is a, c, g, or t
gcacgaaattaacttttgattattatcgaataacttcatccttggtatacaaaaattcaggtttatgtgatttagactaactgtagatttaatttaaattctggggttgctgtgtgtaaatattctctaaccttctcctgtatctgccaatgctttgcatttccaaaagcacttgtgttagcaacttcttcaagttttctattaaagactaataaaattgtgacctatgatttcatttacagttttaaccgaagctaatttttcatctctacactttaagtaatttcacagatgaatttctcttagttttgtttttgaattcttttatgttaacctaagnnnnnnnnncaaagctggagcatatttttattcatcaatttgcagagatataatcttactgtgagaaacttaagttgttttgtgtgttttcaaaaatggtttcccactaaaatttgctttgctatnatctccctggggtatgtatcaattgcaagtaataaaaaatgcctatttgtcctcaatctttctaaatatgtgtaaattacangttttctaatatgtcaatttaattctatcatctcaaatcaaaatgtcataaatgctagctacttngcaagtatgatnattatggatcttctatggtaaatgtgtacagnctggaaaaatgtccttcagaatatcctttggtaaa

SEQ ID NO: 411889 - DNA, 676 bp, Homo Sapiens
  misc_feature (261)..(305): n is a, c, g, or t
  misc_feature (505)..(505): n is a, c, g, or t
  misc_feature (538)..(538): n is a, c, g, or t
  misc_feature (541)..(541): n is a, c, g, or t
  misc_feature (556)..(556): n is a, c, g, or t
aatgtatatttaaacaacacttgtgtagtggattgtggtggatgggcaggagagtgggtaataatgataaattttagaggatcttggtatagggtcttttttacacattgtaatttctttaacctaaattaggttctatataaggacaaagtagcaagctataaccaattaactatctgaaggatggtgctccaatgagaacaattttttctttttagctagggaaaaagatgataggtaacagtaagcaaatctttggannnnnnnnnnnnnnnnnnnnnnnnnnnnnnnnnnnnnnnnnnnnnagacctttagtgagatattcttcttgggctttggtgaaaggcccatcctgtgtatagtaaaagttagactggacaaaaagctggttatttcttagggaccaagatttcccaacatgtgggtggatacattgacttcataggtcatttcatctaatttctgtaagtactatttgaggcagaggatcagaatctaactcagncctctgctgaatttgggagctacaactcgtagnctnctgaggatttcttangggcacttgaatggcctggcctgggagtatgcagtatcttacgttacttaagcttatttttaactactgataagtgaaacaaacttgattatagatttggagcttataaaagtgtattgt

SEQ ID NO: 411890 - DNA, 129 bp, Homo Sapiens
gcatgaagctgcatggaggaagaatagattcctaaacaaaactagagctctgttaggaaggcaaagagaatgggtaagcagccagcattgttcactgtaactgtagacacctttttacacctaacaccc

SEQ ID NO: 411891 - DNA, 633 bp, Homo Sapiens
  misc_feature (29)..(29): n is a, c, g, or t
  misc_feature (176)..(176): n is a, c, g, or t
  misc_feature (349)..(349): n is a, c, g, or t
  misc_feature (358)..(358): n is a, c, g, or t
  misc_feature (456)..(456): n is a, c, g, or t
  misc_feature (524)..(524): n is a, c, g, or t
  misc_feature (570)..(570): n is a, c, g, or t
gctgcaggaattcggcacgagcatagttngcaaatatattctcccattctgtaggttgtcgtgtactcagttgatagtttcacttgctgtggagaggttcttgtgtttaattaggtctcataggtcaatttttgtttttgtttcaatttcttttggcttatttgttatgaagtctntgccaggtcctatgaccagaatgatattttctaggttatcttccaaggtttttatagtttttggtttagattgaagtttttaatcaatattgagttaatttttgtgtctggtgtaaggaaacggtccagtttttatcttccacatatgactagtcagttatgccaacattatntattgaatngggattcctttcctcattgcttgctttagttaatcttcttgaagatcagatggctgtaggagtatggcattacttcttggctctctattcctgtcatngatctatgtgtctgtttcatatcagtaccatgatgttttggttactgttgccatgtagtatactttgnggcttggtagtgtgatgacttcagcacttgtctttttgttagaatngctttggtattcagattgcttctgacttcatatgacctcttaaatagatcttctaaatctatg

SEQ ID NO: 411892 - DNA, 384 bp, Homo Sapiens
  misc_feature (288)..(288): n is a, c, g, or t
gcagagcatttcagcatcggggaagccaatacaatttgagttagttgtgatggctgccactttaaataccgcagtgaatttctgtcagcgagctaatgcgtggaatagggaattgcagaaaacttgatcatcagagtgcttcagtcgattctgaccccaagctacagtgctggcagcgtcttcttcagagagagctggaagagaagagactaggaggaaatcaggatgtttgccgcgggtccctgggattttagagagtgacagtcttcatgggaggttgaccattgngagttggggtggtgagttcttggtgagggataaatttctaaacgacagcattatggcttagtaataatgagttttctatttaacaaagcataccag

SEQ ID NO: 411893 - DNA, 685 bp, Homo Sapiens
  misc_feature (287)..(287): n is a, c, g, or t
  misc_feature (319)..(476): n is a, c, g, or t
ctccttaaatttcacctcacctttaaaagattggggaagaatccagaccgtgtgggaaaaagattatacgcaaaaatttaagaaaccgagaataaaaaaccaaaaggaaaatagagattggggataataaaaactgagacacaggttagggagcctggctctctaactgccttggttttcaactttctacggaacagacattcacaacagaaaactacatatatcatatatgtacaactctgcattttcataagctgaacacacagttatgtaaatagcatccacancaatattttagcaaatagtgctcaaataaaannnnnnnnnnnnnnnnnnnnnnnnnnnnnnnnnnnnnnnnnnnnnnnnnnnnnnnnnnnnnnnnnnnnnnnnnnnnnnnnnnnnnnnnnnnnnnnnnnnnnnnnnnnnnnnnnnnnnnnnnnnnnnnnnnnnnnnnnnnnnnnnnnnnnnnnnnnnnngttgttgttgaaaaatcctggttatagcaacccagaaaccttcctgtactgcttctccagaaaggacttttaccacaaaaatgcaagactccttatgctctggtagaaaagctgctgtaacatactgccatgaggaggtggtacagagcataaatgatcacagatgaaactactcacctgcctggaaagacaagagaggctgcaaggag

SEQ ID NO: 411894 - DNA, 449 bp, Homo Sapiens
  misc_feature (405)..(405): n is a, c, g, or t
cttctataatgccatcctgtcagtacatattttagtccatgctgaatccaggaccctgagaaaccttatagcctagaatttgattctatatatagtcaagaatatacacaacatacctctgcattggatcttctggggttttcttaattttggatgaaaagctctcagcatattaattccagaatatacactgaatcacatcaagccaatccttgtatattaaggctgttgtatgtagcatggagtctaattaatttagaattgtagaatttattattttgtttcctgatggcattttggagcgattttaggctacatactgttgctcatcatttttttaaaaataagattctatcaacattagatgatgccattttagataaacagtatatactctgattactntatcttctgtcactgcatgaataactataggagcccagaagacc

SEQ ID NO: 411895 - DNA, 590 bp, Homo Sapiens
  misc_feature (21)..(21): n is a, c, g, or t
  misc_feature (28)..(28): n is a, c, g, or t
  misc_feature (306)..(306): n is a, c, g, or t
  misc_feature (441)..(441): n is a, c, g, or t
  misc_feature (518)..(519): n is a, c, g, or t
  misc_feature (531)..(531): n is a, c, g, or t
  misc_feature (556)..(556): n is a, c, g, or t
aggttcatacaaaccaaaaanaagacanaaatattattcagaagtgaccttagtattacttcactattctaaacacattgaagacactcacttcatgtggacttggagctacagaccttttacatccatcacagattggctggacgggttgcaattgctatgcacagcctgattggcactgcaggtttttagagccattttgagtttgtgttgtttaggaggtactgagtcaatgatgagggaggtatgcctgaccagagtgggactctcagtcatagatccacctgcaagtctctgcttcctttntgtgttttgttgcttttgaacataaaaccaaccatacataagcagcgccaagtggattaactggcttagaacattcaacatattgacttaaccacctgacattcacagtgtcttgtttcctagcaacagatgcanagtgataaatcatttccccactcttgcgtcacagcacaaactaccaaactgtaattattggattcccagcataattnntaatgctttcanactggcggaattttacagtgctagntcgagtttgaagcttttgaatagatctctaaatg

SEQ ID NO: 411896 - DNA, 396 bp, Homo Sapiens
caggggtccggtgccactgggtggaagggggcgtggctgagggaactgccatatatgcagccttccttagttagagattaaactgggcacttttcacttatctgctttatgctactggtacccttgtgaggtaggcattgtcccccttctacaggccgaaacaccaaggcacgcatgtctgaccccacatcctaagtctttcttctgctctgctaggaaaccctcaacgttcccagccagaggaatgatgtggcttgctggggtggttgatgtgacacctgaaaggtactgtgagctgacagcagggctgccaaatggcacgaggaagccaaatgtacaatagatttgacttttcagctatttttaaaccgagagaaatcaccagcagggctgttt

SEQ ID NO: 411897 - DNA, 654 bp, Homo Sapiens
  misc_feature (583)..(583): n is a, c, g, or t
  misc_feature (605)..(606): n is a, c, g, or t
cggcacgagctcttaagctccaggtacatcaaaatagatggaaaatagtagctggctcagagctgttgtgaagattaagattatgcacatagtattaacaagtgcctaatagatagtaagcagtaaataaatggcagtttctggtgatttcatagtcttcatcccgacatatagtaggcacccaaatgtttagatgagtaaatgacttacgcactagatcctttctaacttctgtttaagtcttaaatttagttattttgacatttaatcgcatattattttgtatgtgctattaatgactggtagcgaggtgttttttcattataacagactatatgtttctcaagggccttaaattccactgatttttaatatcctttacagcaaactaacatgctatgcacatagtatagtaatttcttcagttcttacagactgttgaaagtacaccaccttttttccaagtgaattcacatacagttggctattcttcctgtaacttgatgatgtgagtaatcattatttcatatgaatcctgattaggttaggatgcttaagcttagacatacctgtctaagtactnctataggaatgaagaatatgtnnaatgaacttgtaccataaatggtatataagccaatagtacttcgtata

SEQ ID NO: 411898 - DNA, 631 bp, Homo Sapiens
  misc_feature (424)..(424): n is a, c, g, or t
ctctaacttactatcaaacttacttcaacacaccatttacccaactattgactcagctatagaatttgcaacctaactcgatacatatcgcaccacatgtgaaacctcaagggttatatccaaacttattatcacacgtactatcccctatacttactgcattacctattaactaaagatttctctacaagtaactccacaactctatacacccaactatttagcagatttataggaagatgcatcagtcctaccgaccctcctaataactctgtgtacaacatataatcctagatcaactcttaattcaactacaaatccctctacataaccttgtaaattcaactgttaatccaactaggaacacctatatgaacactactatagacactaggaaagagccttataaatatagcacccatantaacactcatagcaggcatcaattcagacaccatttaagctaaacatccacttcctcacacactacctacatattactaaactcctgacatcacatttgacacctctatcaccctatctatcaacctatgttagaactactgacattataacatacatctcacatgatcctacgtatgattcaaactctgatcttaacactaacatc

SEQ ID NO: 411899 - DNA, 758 bp, Homo Sapiens
  misc_feature (497)..(497): n is a, c, g, or t
  misc_feature (550)..(550): n is a, c, g, or t
cgaattcggcacgagcctcagtcacctttcttttccttggtgccaaatatgtgcccagttgaggaatttcgtacagtcacatgcctcatgctatcattttggttaaggatggactgcatgtatgatagtggtcccataagatcatagtgtcatatttatactgtaccttttctgtgtttagatacacaaacactttgtgttacaattgtctacagtattcggtacagtacgtgctgtacagttttgtagcctgggaacaataggatgttgcatacagtctaggtttgtggcaggctataccttctaagtttgcctgggcacactgcaatgttcccacagtggtatcgctgttgttaagcaacacatgactgaacttgcagttccctacccgaaacacacgtgtaacttacatagccacatccctgatttccttcagggtctgttcacatgttatcagtgagtccttttgccaaagtattatgaatagtccccacccncacttttccctaatgtgctccctgttctgtgtcttccctgtactatctgtccncatccaatatactctaaatagttcatggttcttaatttttaagtttctctttttccccggaaggtacgtgcgtcgtcttcacttacctgtagaatattgccttgtattaataggtgctaaatattttgttgaccgattaaatcaacatacaatttagtaggcttacaacttcttgcttattttatgaaaggaaatatatggatctttt

SEQ ID NO: 411900 - DNA, 610 bp, Homo Sapiens
  misc_feature (497)..(497): n is a, c, g, or t
gttttcattttcatttgtttcaagaaatttttcagtttccttcttaatttcttcattgacccagtggttgttcgggagcatattgtttactttccatgtgtttgtctagtttccaagttcctctttttattcatttctagttttattccattgtggtcagaaaagataattcatatgatttcatttttttaaattgtttgagatttgtttgtggcctaccacatggtctattcttctgttctgtagatgtctattaggtccatttggtctatagtgcagattgatatttctttgttggatttctgtctggatgatgtgttcactgctgaaagtagggtgttgaagtcaccagctattattgtattgggtctctctctctctttagctctaataatatttgcttaatatatctggatgctgcattgagtgcatatacatagacaattgctatattctcttgctgaattgactcctttatccttatataatgaccttcnttgtctctttctaccatttttatcttgaaatctgtttaactggataaagtatagttactcctggctcttattcatttacatttgcatagaatatctttttccatcccttcatt

SEQ ID NO: 411901 - DNA, 261 bp, Homo Sapiens
  misc_feature (41)..(41): n is a, c, g, or t
  misc_feature (69)..(69): n is a, c, g, or t
  misc_feature (93)..(93): n is a, c, g, or t
  misc_feature (127)..(127): n is a, c, g, or t
tacagcacccatgttgagttaagtttgaggttttccaactntgataagtcaccacttattcatctattntaaacctacactttattagctctntctttttcattatcaccataaagcatatgctctntgccctttgagtttattattttactaaaatttactggagattaagacagaagcagacattaatatgtgtacttaatattctatatttaaagaaatatataacatggatagaatttgaaagtgaaattattgagt

SEQ ID NO: 411902 - DNA, 654 bp, Homo Sapiens
  misc_feature (424)..(424): n is a, c, g, or t
  misc_feature (606)..(606): n is a, c, g, or t
atctccaccttcctggcggccatataatataatcagccttaccagtaattaaaccaatcgaaactggaccgaatgaattagaatcagctgaatgttcagtattatcaccttccacccagcagtgtccctgaggaactttaacatactcatttttataaccttttgtacgaattatatcactttcaagtcctacaattcgtttaacgatagtcacatcaggatccatgggagaaattaatgtgacaatatctccttttgaaatactgtaaaaatttgttgaccatctatttaaataaataaaatcggatgattctcaatgtgggttaaattcatgttgcattgatattccttcaactcttgcaatacttgccacattatcaaggaatgtgactcctacaggtaccgctaatgatataaatttggnggacatcaccacactacctatttttacgattaatttaaaccgattaagcttttcaagtaaaatcatcactctgttcattatggcacataaatttcatttatactcataccgaattcagcactagactagaatcctttcaaagtgtttacatatcaaaacctatatacttagataataactangataagaatcattttttaaatagatactgataagagaccacataatat

SEQ ID NO: 411903 - DNA, 683 bp, Homo Sapiens
  misc_feature (541)..(541): n is a, c, g, or t
ctaatctcttgtcattattcaaatacaagagagtacttcttcatatataattcttagggaaattgtcaatttcccattttccctgaaaatctatttttatagaaaaatgtgggcccaactcactctttaaaaaattagatttggctttattggacattacataaacaaggataaaaaacgtccaaccaagcacttgactgaatttttcaccatttcgtcatttttgttattgtatagatggtctaaaaatcacattatgaccaaccaacaacttggctttggtgataattaagtatctgagaaaaatatggtagcccttatgacagactcaagcactaaaaatgggctacaatagaagagtgacttggggttctttatggggttcaagctcttcagcccatgtcttctttgggctgctcaactttctctggggtcaaatgaaagtcaagtttgggcaacagtgatcgttacagctctctttggctcccctaagactcataagagcaatatatctacaagcggcttcttctctactctacanattaagtggaaagggaaagaaatgctttctgaattctcttttccttcactcaaatggcccttgcatttctcttaattcacctacagacatgcaactacaggcacatccgtgtaactctgcacgtattatttcactgatctgt

SEQ ID NO: 411904 - DNA, 160 bp, Homo Sapiens
attcagagctgttcagctagtgcaaacttttcttcaatatttctacgtaaatcctccttcctgactcacgttccattctgactatgaaaaatcaataagaccttgaccttgttgctttcatgtttcatgcactaattcataactagaattaaactccccc

SEQ ID NO: 411905 - DNA, 359 bp, Homo Sapiens
tgagccactgtgcttgcccagattctctaatatttatatgatgacttacatagattaaataaatataaaagcgtatctttcttaaaaatttttaaacactaggactaataaaaatattatactcaaataatttaaatgcagaagattgtacttacaaattatgtgaaatagattactatatttagaaagtgttttatttattacttatggggaagtggtggaaatgtgtaaaatgtcttatctcagttatgtttctgaaactctatgatctatacactggtttatgatattgtcttgtttcccttggacagaaaattctagtaagttataaaacaatttataaaatacatataaattat

SEQ ID NO: 411906 - DNA, 497 bp, Homo Sapiens
  misc_feature (464)..(464): n is a, c, g, or t
ggaaggtttagaaagtgattgttcttaaaacaaacagagcgttttgctgtgtgttcctcaaagtggtcccggtgggagtggcgcctcattgtgagctgtgccttatctgatgaattaatggcaggtgaaagccttgcgcctccggagcgaatatttacgacttttgaaaatgtctttaatgtctaaaaaaagtcttttagaaaatcagacggcctcttgttcttatgttatcaagagtttagatttctgtggtaaatataagtgagtttcattttaagtaaactcattttacgagatttgagatttgaaagtgaaattaattaattttgcacaatctagccttgggctctgagaaaatgttgtaaagctgtaattaatcttgtgggacgaagtgaaaaggaactaaagtgtatggtgtaatgaatagtttaaatttctgtggtaaatacaagtgagtttcattntaagtaaactcatttttatgggatttgagattt

SEQ ID NO: 411907 - DNA, 220 bp, Homo Sapiens
acagcaacaacaaaggtaatagagatgtttgcttattaagctatacttttaaatgtttcctaattattatagaacacagagacacaaaacttctgtgattgaaacagaaccagaggcaggatcagaagctctgtctatatcccatcaccctatcttacccgcatacgacccatcagcctcatataaccaaaccctattactcctaatatgaccaaacccc

SEQ ID NO: 411908 - DNA, 611 bp, Homo Sapiens
cattattaattctatgcattaatgttattaattccatgaatgtggcaggtatttttttaacatttattgtaggctcagctgtctactgggtgttctgagaaaatacaaggaagctatagtaatgcagtgtatacatacattctttcctgcatattaggaacctatagtctaattggggatgtaagctttcacgcatgaaaagacaggtaaatgtagaagacaatttcttatgagtttcagtgagtcatgcagacagtactggaggagttcacaggtggaaggggatgcagggaatgagagttatggagaggaactaggagatcaggaaagtctttctgggggagtgaagatttgactggactttaaaaaatgggtcatgcatggaccatttgagggatggtgaagaaatcaccccaactggaataaatgtgttgggtagtgggagatgaatctaggaacgtggcttggagttctatcttgaaggatcttgctggcgaagttaggatcccaggtcttgccctttgcaccccgactatgttccttcaccctttatcgcctcgatccgatgtctcttaacccgtccctacagctctacttcttcattctcccgg

SEQ ID NO: 411909 - DNA, 554 bp, Homo Sapiens
taacttcacattttaccattaccactcttaagacgctagaaacaagtaagatttaaggaaaaatataaagaacctaaacccgatagtactggatataccaatacagagactgattgcagaagactacagcagttctctctagagttcatccagctgcttattaagacatttaattacatttattaatatgccttgcacaagaaaatactacttaatctttcacatctgctatctttcaactatgttctgtataaataatacttctattacattactaactccagcttaaataaacctcataaatcatgtcaaatgatataatttcaaaattccacacatatattactctacaaatatactccttagtgaaaagatgtcaacagtctcctttctgaaagctagtactttgatgttagatcaatcactgactaagcatttattgatcatctactataactgtacccaagctttaactaataatacactctttctaatataatgctccgttaatcaatatcgtccatatgaaattatatgacatattaacctcacat

SEQ ID NO: 411910 - DNA, 687 bp, Homo Sapiens
  misc_feature (93)..(381): n is a, c, g, or t
  misc_feature (630)..(630): n is a, c, g, or t
tgtaagtgcgtgagagactttctatgtcttagcagcctcctgataaaggaagtcaaatgaccaatcaagtttttagtgaagaaatccaatcannnnnnnnnnnnnnnnnnnnnnnnnnnnnnnnnnnnnnnnnnnnnnnnnnnnnnnnnnnnnnnnnnnnnnnnnnnnnnnnnnnnnnnnnnnnnnnnnnnnnnnnnnnnnnnnnnnnnnnnnnnnnnnnnnnnnnnnnnnnnnnnnnnnnnnnnnnnnnnnnnnnnnnnnnnnnnnnnnnnnnnnnnnnnnnnnnnnnnnnnnnnnnnnnnnnnnnnnnnnnnnnnnnnnnnnnnnnnnnnnnnnnnnnnnnnnnnnnnnnnnnnnnnnnnnnnnnnnnnnnnnnnnnnncaaacaaacaactattttagttttgatggcttaaccattcattccctatgtcttcatggttaattgaaggttactgacagtagacaaaaaatgtattctcatttgactctaattttcccatattctacttgaacacatttaaatgttctgctgcctatacaccccgacatctatgagtattaagactagtcaatcatttctggtttaagaatgtcagaataaatttatattggttactggccatctagnaaggagtcttcaaggttttaatttttttccgtgtgagcattcctaaccaatttgatt

SEQ ID NO: 411911 - DNA, 715 bp, Homo Sapiens
  misc_feature (56)..(155): n is a, c, g, or t
  misc_feature (535)..(535): n is a, c, g, or t
  misc_feature (624)..(624): n is a, c, g, or t
aagcattccttccaccacaacctcccaaatagcccagctaacttttaaaaaaattnnnnnnnnnnnnnnnnnnnnnnnnnnnnnnnnnnnnnnnnnnnnnnnnnnnnnnnnnnnnnnnnnnnnnnnnnnnnnnnnnnnnnnnnnnnnnnnnnnnngtgtgagccactgtgtttggccatatgctgatattcttcatggtatcatacacgtctttcaggctctgttcgttttttggttttctttctgtttctcagactgtatgtcaactgatcaatcttagagttcacagattctttgttttgctagcttacatctgctgttgagcccctttattgaatttttatttcagttactgtgcttttcaactgtagaatttcaatttggttcttttaataatttctatccctttattgatgttctctatttggttaagctgtaattctctttggttctttaaacatggtttcttttagttctttgaacatatttaagatagctgagttgaagtcttttgtcaaaatgtacagtgccttanggataatttctactgaatgcttttttctctatgtatgggtcataccttgctctgcatgtcttattttttttgtgttgagaatttttcangtttggtattcttaacgtgttttgtacctggttggttagggatttttttgaactgattttgtaatgcctggattcttttgccatattgtgg

SEQ ID NO: 411912 - DNA, 715 bp, Homo Sapiens
  misc_feature (518)..(528): n is a, c, g, or t
  misc_feature (569)..(569): n is a, c, g, or t
ccgggctgcaggattcggcacgaggttaatttatcagaatctatttcagatttataataactttattacagtgagttatttagttactactaaatagctctgaactctcttctccctttttgtgctattattgttatacatattacatctatacatgctgtaagcccaacaatacattgttatatttttcctgtaattgtatgtatattaagcaagcagagacttgagaacaaattatatttatagagtttcttctagtaagcttttaatttaccatttctggttatgttcattttgtcttgtaaatttgagtcaccatctggtgtgatttcttactccagtactactttgttcttatttacctcctttgtgttgtcattgtcaaatatgtcacatttgtatatgttctgggtctaaagcataattacatgatattttatacaattgctctttaagagaaggaagaaatgcatttatactgtctttcataattacataattacatttaccagtgcccnnnnnnnnnnnggaatggattcaaattagtatctggggtcacttcattccangcagaagtcctttttttaatatatctttatataaggcacatctgatagggacaaatctttagtttttggttatatgggctatctttaatttaacttctttgagatagttttgtaaatataaaactcctgtgcttaagaggtttctt

SEQ ID NO: 411913 - DNA, 575 bp, Homo Sapiens
  misc_feature (65)..(73): n is a, c, g, or t
cctttaaataattgaactgttacaggaaacattgttaaaatcttaaggttagggcatgctttcannnnnnnnngtctaaagattactctgcaccctagacaaaggaaatatttaaactgttaaatttgaacaaagatacagtctgcatatgacttctctgaagccctataaaaattctttaaaattgcctattcactcaaatttactgagtgtagcaaaaatgtcaaaggcataaagtcagagaagattgaataaaataatgcagaaagacagattagtcatgcacagacccacacagcctttcagagcacacaataccgctctttattaccgttctatctttacaaagactacgttcaatacatagaagatgatacatggccagccatgtcatctgcctgtgattccagaactcatctatctgggcccttttcacaatgacattgatgagagatcgcagtgttttcagagcattgttttatttatcatatataatggctggtgaaagaaataggaattatgtcaccgatagcacataaaagagttgcatagaagattctgtgacaaagtttggt

SEQ ID NO: 411914 - DNA, 499 bp, Homo Sapiens
caatgaatagacaaagaaagatggaaagaggatgtgtgtgtaacccagagcagaaggacttgaggctgactgtggagtagaaaggagaagggagacagagacaaggcaggcagcaggaagagctgtaggtgtgggagccagcatcacaaagggtccatcccaggtgaccacatccatgcctgcagcacccgggtggacggcgaagcagttatgctcgttggctcatggtcactgttatctgaagataactgtgagtcacattttctctgggatttcaaaaactaaataaacctatttataatcccctcttaacagtataatttagttcagtgttttgtgagcccttttctgtttcagatccagttctttgagtattgacacaccatcacagtcttactgtgacacgggcctgtcttgtaccagtgtatccagcagatggcattagaattcttaaatgtcagctccatactcttaaaacagcacactccaacagaaataa

SEQ ID NO: 411915 - DNA, 452 bp, Homo Sapiens
cctaagtgggcaactctctggcatccttaatattcttctatagaaattgtgatgaaagaacagataagcctaagtaaatctagcgtgtggagctcctttaaaatgtgaagaccttgccaactggttaaaaataaaacttggttttgtcctaaatatccttgctgggcctattatacataaaaaaaggggccacagcccatttgcaaggcttctgaatgaactccattcattctgtacttggaaatgtctcttcagccacaaaaagaaacaatagttataacctaatttctttggtgccaatatcagcagaagaagagccaagagaccattatgaaaactctagtaagttctcttggtgattatataatgctgtattcattgatcatatttctgtatttaaataagtacattttttcaacattttttgaaatggagtactccaaagtaatttg

SEQ ID NO: 411916 - DNA, 450 bp, Homo Sapiens
gcaatttataaaagttgaataagattgattacttcgagaaaagttggagtgtctttttctgtctctaccagatacccccagaaaatgaggactatatttaactatacttaatatgtagcagtgtaattatttgcatacattccattagacttataaaatgccgttataagcagttgttatcttaccaaagtttttttctgcaatggcatactttcagatataaagagactgctttaaaaatcaaagttgacttatacagctttttaaaagaccattggaaaatctatctctattttttgtttatgggattcctctacaggctccctgaactctgatgattaaatcatgtacttttctgacaggcccaggatctccaaattatcctgggaccctcagtagagaaatttatccaattaacacatatatatgcaagcacacacacaaagtttc

SEQ ID NO: 411917 - DNA, 574 bp, Homo Sapiens
  misc_feature (498)..(498): n is a, c, g, or t
tgaaccactgtgcatggccgggacttaggatttttaagtgactaacagggtcccagtccgggaagcccctgactagcattaaagggcagcctctggagggtgaggtcagcagggtctaagatgcaggaagcaaagtcctggctggaccagggcggacagtgtgcacccggccagcactgatgttcacagggcagcctctggagggtgaggtcagcagggtctaagatgcaggaagcaaagtcctggctggaccagggcggacagtgtgcacccggccagcactgatgttcacagggcagcctctggagggtgaggtcagcagggtctaagatgcaggaagcaaagtcctggctggaccagggcagacagtgtgcacccggccagcactgatgttcacaggggtcgctgcttcttcctcaccaaggctggatctggggtgctccttcccaatcctctggcttcttcagtgcccagagctgagtcctctcaggccacggncagtgtctgtgcttggccctcccagacggccttttgctcccgattctggtgccaggtcagggccggcccgcccact

SEQ ID NO: 411918 - DNA, 410 bp, Homo Sapiens
ctacttgagagtatgaatgtatgtgcactgtcactttgctctgggtggtcctatgttgctggatctccctttcccttcttggtgcttacacatctcagaccctttagctgaatgcttgctaaagtaaaatgcttgaacagtattttggttctcagttctcactgttccctctggttgttgaggcgtcgaataaaaatgcacatagcagtggggtttagctggaaaaggtgaccttcttccaacttcacctctacttctggctcctcaaacagcgggtggacagtaaggcagggaagttgttttctcatttctcactgaccagactgtgaatattttcatatggattttctcttattaatgttactctggtgcttctttgttttaagataaaaattctgaatgtacacatg

SEQ ID NO: 411919 - DNA, 145 bp, Homo Sapiens
aaaaggggggaacaaaaagagggtatctcaaggtagggtatctcagggtagggcttctgttgaccacttttcttagtatgtctttaaataaaatgttgatgccatttttaatacactaataagcaaatgaaatggcattagattc

SEQ ID NO: 411920 - DNA, 424 bp, Homo Sapiens
  misc_feature (194)..(202): n is a, c, g, or t
gaggggtgattatttactttacccaaagacctataaattactacttcatatcctaagacatttcagaaattaaaatataaacatcattactctaaggcagttccttaataaggaaagcttgtttatagcaaaaataagatatactaaggagaaagtttcagataagtcctttagttacttttaaataaatttgnnnnnnnnntttttaacatttctattacagaaagttttaaaaattgaaatatactgaataacattttcattcaaaattgtcataactaattcaattaaaattttttaaatacaagtactgtcatcagtaataactaacattcttttaatggttattatggaccaaatattcatgtcaaacactatagcagccccttaaagtagaatcattattatatcaattgcacagatt

SEQ ID NO: 411921 - DNA, 367 bp, Homo Sapiens
aaaattttgtagtcaaattaattgcgacttgggtaagattgaatttttatttcgttgtgtttttagcatctgtaacttacttgccaaagcctttattcaaaattctttaacttaatatagcaggttactgataatctataattttcaggattgcatttctaatgagactgactttgatatatactttatagtatgttagttatttctgtaatctcataaggggagtaggaacttcgggaacaaggaaggtgtaaagaagtgtctttttcaaaaataccaattagtgaggcatgtaaatgtaaaacccttattcctttttcggtattgtattgtttctggttgctaaacattaaaacgggtgattatg

SEQ ID NO: 411922 - DNA, 489 bp, Homo Sapiens
ttctaaaaatatataactatacagaaagctgactcttctgcttagtttcctgttcctaatgacagatgcaatgttctagaggcattttagtcagaaagctctctctacctggacatccattcccactggtctgctgttactgatttgtcttcggggtgggaaatttagtttggaagtaccatcccaccaaggcctgcagtgcctaagagcgtctctcttggaggatggttaaagtagtcagggtattttacaaccgcatcttcctgcacaaccattatccaaaaacatttattttttagtctaaaggtgttcttttcatatttgtctgtgtagagctcaggaatgtatttcaggttaaaatatagtaggaatcaggtaaacaacatgcatgaatgaagaaatataataaatctttcagtacctttttcatagcatagagctctgctatgaagaatacatacacatacacagtatttaagattacatgtg

SEQ ID NO: 411923 - DNA, 438 bp, Homo Sapiens
ataataccagtgtggaatacatactgtttctttgcatttatagtattccaaacacactatctttccatctatgtattcaacaaaacatatttgttgagtaccaagtacgtgccaggcacagtgcaaggtgtgagagaaatacataggtttgcattgtgctgtggcaaaatatagaaaatctgaatttaataaacacagtaatctattatgaagtcatttttagacttgtttatattttgtaatcacccaggtaaaaactcaagtatagttgatagacagatatgtttccccatggtcttttgccattgtgtataaaatatgcttaaacatttgtggaattagattgtcttgttttgaagaaaggctcatcaaagtttgaattttatgagtataatatgtattcaagtatcagtgttcaaaggcattagcctagccaat

SEQ ID NO: 411924 - DNA, 453 bp, Homo Sapiens
  misc_feature (68)..(195): n is a, c, g, or t
ccatttgtatgttcatctgccaagcacgtccacctctaggttcaggagaaacttgaaaatatatgctnnnnnnnnnnnnnnnnnnnnnnnnnnnnnnnnnnnnnnnnnnnnnnnnnnnnnnnnnnnnnnnnnnnnnnnnnnnnnnnnnnnnnnnnnnnnnnnnnnnnnnnnnnnnnnnnnnnnnnnnnnnnnnnntgattgaacaacatctatattcaaaaattctgctacataaaattgagtgaaataattaagttccaaaaggtcaaatatgcttaatattcaaagagcaacttaaactaagctacatactcttcagaaaaatatctatatctgtgtgcatatctattatttgcatgtgggaggtggaggatgggatggagggaagatcacatagctgtataaaaatgtcagttttctagttcctatattgggttcacagtgtttattatt

SEQ ID NO: 411925 - DNA, 702 bp, Homo Sapiens
tctgcccatgtgatcctggaaagcattgtgttgtttgcacctttgtgaagtttttaaaaatgaagatgcaagtgcttcattttcatttctaaacactaactccttttatagactgataaaatttttttctgaatatttcatgtgcatctttaactaaagggaattaatgtagagcaggtactccttaaagaacactaatttcattatatactactcgttgtacagcagcattcccgttttcacagtgcctatttaaaatgagagttgaagtaaatgacatgctggttgatttttatcaatattctggacttaacgcatacctttcatgtctaagtcatggttggcttttaaaactttttataaagcctcttgacaatgtacattgctaacaggtaactataggctttgaaagtaatgctcgtagattcagtgttcacagtatgtggcctccagcatgtaacatgaggaatcctttatttcattaattaatggctttttgacttgagccaaaacatatgtaaaggaaacagaagtaccgcaccttctcttacaccagtcagctcctttgccttcagtgttactagaaagcggtctgtgtccatgagtgtgctttgcttgtggtgcacttgaaggcatgaaggagacaagattttctaattactcatctcatgatgtcatttgaaaggcatgttcaaatatctt

SEQ ID NO: 411926 - DNA, 780 bp, Homo Sapiens
  misc_feature (451)..(451): n is a, c, g, or t
  misc_feature (496)..(496): n is a, c, g, or t
  misc_feature (587)..(587): n is a, c, g, or t
  misc_feature (595)..(595): n is a, c, g, or t
  misc_feature (616)..(616): n is a, c, g, or t
  misc_feature (647)..(648): n is a, c, g, or t
  misc_feature (678)..(678): n is a, c, g, or t
ctgtcacgtacgtgctccacaaggcatagtcatgctgttggctcagaggaaacatcttaaagcagcaatgtgtaatgcattaaatggcctgattatgtcttaagggaagactcacctatagatttcacttaatggttagaaatgattcaggaaacctgaggaaattgcctacaaagaggcaaatataacgagagactctgggcatctttcatatgatatgaggagtattaaatgaggaaaaaagaaaaacctaacacttaagagcaggtactgggtaatgttttacatatctttgttagagtaaatatcttggaagcttaatttagaatcaatacactctttggactttgatttagaaagattcagaaatgtcaaacccctttcccatataacttttataaagttatataaaagtttacattaaacctttaagttagtattctgtacattntgtcttaagtgacattttggtgaattttcaagaggtagacattgngagactattccctgaggtattaatggaagaatgctccttgagagttgaagtcccatgatatttgaatagaagacatctctcacagtaattnttattaanacaggctgagaaacgcatacncaatcatacttatgggcacaatgccctatannatcagaacttttattcagaatggtttgtangtgcacaaggcagatcagagactataagccatcatgaaatagcctggaaaagcctataaagaggactacagccctcacatgaattatcatccttctacggga

SEQ ID NO: 411927 - DNA, 662 bp, Homo Sapiens
  misc_feature (255)..(539): n is a, c, g, or t
  misc_feature (607)..(607): n is a, c, g, or t
  misc_feature (652)..(652): n is a, c, g, or t
aaagaatcagcacaagattactggcaccattaaaaatctgaatgtagtaacaccaccaaaggattgcacaagctttccagaaatggttcctaaccaaaatggaaactcagatatgacagataagtaattcaaagcatgaattgcaaggaagctcaatgagatccaagacaagactgaaaatcagcacaaagaagcttctaaagctatccagggaatgaaggaagagataaatatcttaaaaagaaatcaaccagnnnnnnnnnnnnnnnnnnnnnnnnnnnnnnnnnnnnnnnnnnnnnnnnnnnnnnnnnnnnnnnnnnnnnnnnnnnnnnnnnnnnnnnnnnnnnnnnnnnnnnnnnnnnnnnnnnnnnnnnnnnnnnnnnnnnnnnnnnnnnnnnnnnnnnnnnnnnnnnnnnnnnnnnnnnnnnnnnnnnnnnnnnnnnnnnnnnnnnnnnnnnnnnnnnnnnnnnnnnnnnnnnnnnnnnnnnnnnnnnnnnnnnnnnnnnnnnnnnnnnnnnnnnnnnnnnnnnnnnnnnnnntaagcttgctagagaggtagacatccagttacaagaaatcctgagaacacctgtgagatactatacanaatgaacatcactaagtcatatagtcaccaaactggtcaaggtcngtgctaaaga

SEQ ID NO: 411928 - DNA, 407 bp, Homo Sapiens
ctcctctaaggatcctcctagttgagtatctgctcaccccaacagagaaaaaacaaagttttctacaacatgtactactctttagaaactgcttgcctctcagtgactttacactgtcatttaaggacaacttataatttccaacaggtctatgaaagttaaaacaaagaagattatgtaaaagaggttataaaatgatttagaggtaaaaactgtcaggagtaacctggttctgcgtaaattagatagctatctgcaagggtctataaaggcatataggcttttaaataatgcttctaatttaatcaagcattaatgaacttagaaaacaatataatatgtagaactgcactgagattatatagaaattatttaaacagagtttttacagaaaggaagggaaaagg

SEQ ID NO: 411929 - DNA, 404 bp, Homo Sapiens
ctgcagaattcggcacgagctacattagagtgctaaccttgagcagatatagaaagagctcctaaaatggcaagatgctcataaatcaatgaggcaaactcctcaagggtgacaaactgggaaggaacaggaaaagtactccagggctgtacacagcacatctttgggcatggaggtgagaaagactggggtaggagggatctgggaaaacttcagcagatgctatgcctgagttaagttttgaaggatgtgctggagttagcctcataaacagaaattctaacacagaactctaagtggtggtggagtatgatgatggaacagacatatttgttatgggaagggcaggaaaggaggctgcgtgtacagattgttggagctttgtggcttaaactggtgtttaa

SEQ ID NO: 411930 - DNA, 361 bp, Homo Sapiens
ttagcttttgttttgtcacaccctcctatctcaatctttcaaaaccacatcaaacagatggtgagaggcatcatgaacagaaaaaggaaggcattacttaagaagaaaagattgtagaagagtaccaatgaaactcagttgtgctcaaacctactctccaaatatctagcatactggatttgccaaacaatccagaagcttttgtttacttaaataaagtctattggccattgagtgataagctattaagctcttcctcaattaatatctaacctaactgagaagaataaaaggtatgattcagaaaaataagtcagaatatgaattatacctactttttcagcattatgtaacaaaaaaa

SEQ ID NO: 411931 - DNA, 617 bp, Homo Sapiens
  misc_feature (486)..(486): n is a, c, g, or t
agaactcctcctggcactccttacactctgatccaccattttgtgaaacatcaactatacccttatacaattataatgggaaggcccatgtgtcaggaacccaaataaccgacccaacttttctccagggagatatattgcaatatattgtaagggactaattcatcaccttatgaaaagccaagttttggtaaaggattctttttacagtgccctccctgaagatgaggtttctggtcataatctgtagcctagagactttgtctcttacaaaagagaaagtctttggtaaaggactcccttaatccccaatggaagggtccataccaggtagtattgactaattcatgtgctgcacaattagggggtatagacttatgtatttacatgtctcatcttaaaaaggcacatcctcctgagtgaacagtgattccagccaaggatcttagcctccagttcactaaacaatatcaacctttgacttgngactagaagcagataacagctgttgttgacagctttaacccaagacactggcccacccatgcctatgtactactggcaattgctatcttatggagaacccagcacctggtttatctgatttagtgtctttg

SEQ ID NO: 411932 - DNA, 651 bp, Homo Sapiens
  misc_feature (540)..(540): n is a, c, g, or t
  misc_feature (597)..(597): n is a, c, g, or t
  misc_feature (615)..(616): n is a, c, g, or t
  misc_feature (623)..(623): n is a, c, g, or t
aacagtctgagacatgcaaatgtgtttaaatacacaagttcataataacactaaaaatttttttaaacttaattggtcgccattgggggacactaatagactacttcatcatttttaaaactattaaacaaaagcaaagaatcaaactattattttataaattgcatcacaggtagccagtgaatgagagaaagcctctttgatagaatttttcacaaataaatgagttggaaaggatagaattagaatactgccccttagttccatatgaattattaaatataggcaataatcactcgttactactatcatctctcaaagaaagacatcctgatgatatgtcccttctgatggaaatgtgtaatatcatctagaaaatattttttgtcccaaaattgaatctgagtctgatgaagcttctacatctaaataccaagttacagggaatacaggggcagagaaatacatgaaataacaccaaaaaacttaataagcaagatctagactgtaaaaaactttataggatagacaaacaggttntacttatttgaattctcattcaaagtataaagatattatgacacaattgcaaaaatnttatatttataaagaatnnataattnttagggggtatgataatgatatgttttt

SEQ ID NO: 411933 - DNA, 109 bp, Homo Sapiens
cgttgactcgaccttaaattcgatgggtcaagttccctaaatactaaatttgactcttaaggatccgcctttacacttaccggaaaccccgaacttgcagaaagcagta

SEQ ID NO: 411934 - DNA, 722 bp, Homo Sapiens
  misc_feature (481)..(481): n is a, c, g, or t
  misc_feature (670)..(670): n is a, c, g, or t
  misc_feature (692)..(692): n is a, c, g, or t
ctagaatctagatataaaaaatttatatttgtctctatattctagaatctagatattaaaaaaaggtagaagtttattataatgaacagtcattccctcatttattaattcaaattaactagttatacctattatgtactaggtatgcctttagatgctacagattaagcagtgaaaatgacaggtatatttttggtatttgttcttcaaatatgtatctgacttgctcttctctacatagctatttattttagattaactcatttgtctcaatggcacaatcgtaagtctacttgaaaagactgaacaaatgtgtgcatttttggtaagaagccaaaggtacctcggacagttctttgttcctctgatgacaggaagtcctccagagatgtaactactcttaaaactgacaaatctgaagttgcaaaccatagatattatatatgcatgcagagtcaacacattttctaggcgactgctntatgtcacaatactaggtgctaggaatacaaagaagatccagacatctcacagccaacgctccaataaagttcagtgggaagacaataatgtaaacccaaagggtaatagatattgtgagagaagtatgttgggtagcaagagtaccaaggggaaccatgtttttatttgatggagaaataggtacggngaccaagaaatttccacagagnaagccctttaattgagccctgaagtttgaa

SEQ ID NO: 411935 - DNA, 198 bp, Homo Sapiens
gtaaagcataaattatataaaatttgctttatattttggattgcaaattaattgctgtactttatagaaaagtttcccaaatccgttttacttttttgtatttgaaatttaatcacaggtggaatcttaaagagagcatttagggatattgtaaacagatgttattaaggactaatgttaacaaacattgaagaagag

SEQ ID NO: 411936 - DNA, 492 bp, Homo Sapiens
  misc_feature (151)..(311): n is a, c, g, or t
cttctgtttgtgatgacatgatatatatgtagaataccctaatgcccaataaaaaagaactgttgcaataaattcaatatagttttaggatacaaaattaatgtacaaaaaccagtggcatttctgtacacaaacaactgtctgaaaaggnnnnnnnnnnnnnnnnnnnnnnnnnnnnnnnnnnnnnnnnnnnnnnnnnnnnnnnnnnnnnnnnnnnnnnnnnnnnnnnnnnnnnnnnnnnnnnnnnnnnnnnnnnnnnnnnnnnnnnnnnnnnnnnnnnnnnnnnnnnnnnnnnnnnnnnnnnnnnnnnnaattggaataattaatattgttataatttttgtactacccaaagtagtctataaattcactgcaatccctatagaaatcccaaagacattctttacagaaatagaacaaacaatcgtaaaattcatgtgggaccacataagaccacatataaaacaatcttgagcaagaaaaacaaggctg

SEQ ID NO: 411937 - DNA, 647 bp, Homo Sapiens
  misc_feature (237)..(332): n is a, c, g, or t
  misc_feature (501)..(531): n is a, c, g, or t
ataaaaatataccataaaaactataagcattagagagttggattctatattaatatcagacaaaatagacttttaagacaatgattattattagagaaaaagatggatattctataataataataagactcatcttaaagcttcaaaatacttgaggcaaaacctgacagaattgaaaggagaaatagactaatcatcaagtacagttggagattttaatattcgtctcagtaactnnnnnnnnnnnnnnnnnnnnnnnnnnnnnnnnnnnnnnnnnnnnnnnnnnnnnnnnnnnnnnnnnnnnnnnnnnnnnnnnnnnnnnnnnnnnnnnnaacagcaaatgttgtttggtgttgaacattcaccatggtagaccatttgctgagttacaaggcaggtctgaatatattaagtcttaaatttatgaatgtaaaagaattgaagtgacacacgtatgtgttctgatttgcaactgagttaaattagaaatcagtaaccatnnnnnnnnnnnnnnnnnnnnnnnnnnnnnnngcccactagtaaataactcattgatcaaaagagaaatgaaagactgtcttaaactgaatgatacttgaaaactcaacatgtcagaacttggtgggatgcacctgaagcagtgctta

SEQ ID NO: 411938 - DNA, 686 bp, Homo Sapiens
  misc_feature (511)..(511): n is a, c, g, or t
  misc_feature (526)..(526): n is a, c, g, or t
  misc_feature (614)..(614): n is a, c, g, or t
  misc_feature (631)..(631): n is a, c, g, or t
ccccgggctgcaggagagattctggccgttacgcttccagtcatcctcacgatgaaagtccggcatctgaatccccgccagatgataagcatcccggaacagtgtgtaacagtccgtcacaccgtgctcaaagcgccgcccggtgagatgcggcacacagcggaacttatgaatcgtcccccggcagaccagccaccacggcaaatcactctgcacctgcagccgccggtcggcctcactcagccagggcagaccaccggggtggctgtggaccagcgccacaatctcaccctgcatttctgcctgcagccagtcttccggcgacatacggaaatacgcctccggctcaccggagatattcacgcaggggaaatatctttccccctccggcgtgcttaccacgaagccgcacgactccgctggcgcacatcgccgggcgtgcgccagaatcgctgattctgtctgtgtcatgggatttactgcgaaagtttgttaatggaaaggaagccgncaaagttgccgacgntattgcggaacttacaaccgctcaggcatttgctgcatttatccttcgtgatatcggacgttggctggtcatattccatcgcgacagncggaccgctataaccgnactcgtcaccgcgataggtccaagtgcaggtgttgccagcatgataccgtccggt

SEQ ID NO: 411939 - DNA, 453 bp, Homo Sapiens
ctctaaagagtgagattattcttttctccccacagacaccctaaggagctttacttgggaatcacattgttcactctagctcagctgactttgtttataattcagctaaacaaataaatggtatagatatggaccataaatggtgccatataaaagtctcagtgaatgctagcaaacataattagtacatcaggcctacagatcatatataggcctaacattttctggctaatataaattagatggggaaattatatttactaattattgtgatgttaatgccttttgtcagtgtttgctttcctaaaatactctctactctggctaagatttggcatatataaaagatggttttatattcagtggagcagaatttcaattcaaaccgcggatagaagctggccccagattcctcttctatgaatgaagaaatttcaaatgacttctcatctc

SEQ ID NO: 411940 - DNA, 705 bp, Homo Sapiens
  misc_feature (116)..(215): n is a, c, g, or t
  misc_feature (543)..(543): n is a, c, g, or t
  misc_feature (610)..(610): n is a, c, g, or t
cagatattgtcagtacctactctatacttatttataccaagtacttatcacatatagaattaaagattggtcgtttaatggtgttatctgtcactaaaaagaaagttcttattgtnnnnnnnnnnnnnnnnnnnnnnnnnnnnnnnnnnnnnnnnnnnnnnnnnnnnnnnnnnnnnnnnnnnnnnnnnnnnnnnnnnnnnnnnnnnnnnnnnnnnaaaggagattttttaaatggggctagaaggtatattgcttccaatcgtcagggactttggatttgtgtttgtgtgtttaggctactagggagccatgaagagtttttatcagtagattgacaaaaggaaagcaatactcttgtcaggttgtaatgtgtagagagctttaagtgtagcaaaactgcagggaaggacactatcagagtactgatggcagttcaccttgaagacagtatggtaacaataacatacgagatggtagcattgggaaaatattcatgatacattccaagggaagaatttatagcacttttgctttgattcatgntgaggaggagtatcctagataattttaagggtttactatggctcgaatgcctgcttcacacattcangtgttaccaatgtggttgattgagaggttgagcccttaaaccatgattatggcatgaaggcttcctctgggtgaatgagaataaggccttattaa

SEQ ID NO: 411941 - DNA, 371 bp, Homo Sapiens
  misc_feature (114)..(174): n is a, c, g, or t
aagaaaacaagactggtgatggttggtgtcagcatgctcagtgaggaggctgagagcccagcatctagagtcatggatagacacctgggttctgaccactgttcctaccaagtnnnnnnnnnnnnnnnnnnnnnnnnnnnnnnnnnnnnnnnnnnnnnnnnnnnnnnnnnnnnngttaaatagagacaataaaaggtcacacctaatattttgcatgcacaatcacacataaatgtgaagtgctttgtaagctgttaaccatcatctaacatactaacataaaaaggaggggaagaaggaaaatatgcatgactcacaagctccagtgaccactgctagcaatacaccctggggttgaaacagtccctcat

SEQ ID NO: 411942 - DNA, 115 bp, Homo Sapiens
cgggctgcaggattcggcacgaggtcagaaatagataaaactgtcaaaagtatgttgtcaaacacgtcagagttctgtttttatgccataatgtaacaattgaaaatttttcatc

SEQ ID NO: 411943 - DNA, 712 bp, Homo Sapiens
  misc_feature (547)..(547): n is a, c, g, or t
  misc_feature (550)..(550): n is a, c, g, or t
  misc_feature (615)..(615): n is a, c, g, or t
  misc_feature (631)..(631): n is a, c, g, or t
  misc_feature (636)..(636): n is a, c, g, or t
gtttgtaacatctggaagggagaggataatattactcgcagtatcgcagggggtgtacaccccttgtgatattgcttgtagtatctgttggggagaggatgttattcctcgcaatatctcagtgcgtatactcactggaatattagaagtaatatcctcgggagatattactcctaatttcacagtgggtgtacaccctgtgatattatttgtaatatccttggggtatgttactcctcatgtgacagcgggtgtacatcctgtgatattatttgtatcatttttagggggtgttactcctaatgtacagggggtgttcaccctgggatattattggtaatatcctagagatatgttaccgtaatgtcacaggcagtgtacacttagtgatactattcgtaataccctaggaggatgttactcctaatgtcgctgtgggtgtacactctgtgataatattcgtaatatcctaagagtatgttattcctaatgtcacagcgtgatattattcccaatatccaaggagaatggctactctaatgtcacnagnggtgtaaaccctgtaatagcacttgtaataatttaagggggatggtacttggcaatgacacaggntgttgtacacccctgngatantcattcataatggcttaataggcattttaactcctgattgtcaccaaaagatctacaaccttttaatatgcttcct

SEQ ID NO: 411944 - DNA, 103 bp, Homo Sapiens
gctctttcgtcgtattcatctgctacttcacagttgcaatgttgagttatgattcatacagcctagagtcagatagagtcactgatcagcattttatttgggg

SEQ ID NO: 411945 - DNA, 411 bp, Homo Sapiens
aaggcgtttttgccctttgtttcatttagaaataaatataatattggaaaaaagaagtcagtggaatattgctacataaaggcaagaatgttaagtaaaccatctctagatatctggggtaatataactacacaaggactatttattttatagtcattttctgaggtacactctagcatgtggtgagcacatcatacaaacaaatgattaatgaccgtgataaatcactgaacttgaaatggtggctctccatgccgtcaagccatcactgttttaggtagaaatgtaaaaaattattcttctgaattataaagttatctgaggtgagaaattaattgcttactaaaggatgtgtgtaaattataagtaattgcaaggtttcattttgttggagttgaatatattagaatt

SEQ ID NO: 411946 - DNA, 413 bp, Homo Sapiens
ctgagtgctgcttagctgtatcgtagacaccgcctgtttgtgaacagacaccctgcttcttgatgataacacaaaggccagcagggtccactgctgtgtggaatggccttcggtcatttctgcccagagcatagaggtcattttcactaataacataactctccttttgattgaaagtgttaaaatgttcctcctaaaagcacttattttttaggctcgttcttcagatttgccccatatcctaagcaaaatgccttcaatatgaagtggatattgcttgaccgtagggagcttgtccatactgtactcgagaatgtagacacaaagaaagaatgtctgtgtcaaatgttatcctccgcaacttaacgttctcttgcactttcagctcaagctcttggactcaccgaggcagt

SEQ ID NO: 411947 - DNA, 622 bp, Homo Sapiens
  misc_feature (163)..(225): n is a, c, g, or t
gttattaacaaaggagactggagtgagacctgcttatgtttgtttccttggtgagctgccacttctttctgacagtccctgaaatctgtgagtcccttgaagccagtgtggttcaagacaggatgcagttataggtgtggttctagagcccaccttctcagcnnnnnnnnnnnnnnnnnnnnnnnnnnnnnnnnnnnnnnnnnnnnnnnnnnnnnnnnnnnnnnnagaagtggaatggcctagtgccagcccaaagagtttttgagaggatttagtgtgtgccattgttgtaacatgggatgggggaagagggggcctcgaacaagagcccagcaacttctacgtggggaaatacgggatgatgcagattgcttccagagcagccagtcagctgcatcgtcgcagaattcgagcccattcaaaaccttttaatcctaaagaaagtagagttacatttctgcttcagatacacaaaaggttgggagcacgttttaaaatatcttgtccatctacagagttcacttgaattctcgttgaacgtctgctattcaaatgtgtctgaccttcaaagggggttcacggagtggttattttggggaacttaaatctatcttccacgttg

SEQ ID NO: 411948 - DNA, 399 bp, Homo Sapiens
cctccttctgggacctgggccacaccagggcaggcaacaagtgacttgtagcggaaaggcttcagccgtatcctttaagtgacatggccatgcctaacttccagggggtggggagcaccatttcgccttgtccctgggagaaagagaaccaggcactcgtgcctacgatgggagtttcccagcttgcttcactgggttgttaggatggagagggaattgtgtatgatgtgccttgtgagatatcaagccctctgcagatgtaaattacacacacgaaacacaaatgtaaattacaaacataaaccatgaatgtctcatcattggtgttgtcactcccatcttcaacaccattccaagaatcagccgtggccgtcggacgcatccccttcctgtcaggac

SEQ ID NO: 411949 - DNA, 606 bp, Homo Sapiens
  misc_feature (315)..(315): n is a, c, g, or t
  misc_feature (592)..(592): n is a, c, g, or t
caaggaatttttagaaggtgctttttatattactcttcacagagttaaattttcagaggatttagtattattgaactaagtttcataagtgtattttaagcaagtaaatctctaatgtaggaaaatccccaaaatggtagcatttactaatgttttatatggtaatttttgaaaaatatatctgatatttcttcagtaaaaatggtgttgttttaataacttaataagaatgtttaaagattctttaagtctggcttatctagctaatgtgggcctattaaataataggcagacttctgccttccttatattctntagatcttttcaaatactccattccaatatccatcaaaagacttctctttatgccacttattatctatactagtttttaatgttcaattactacaagattataattactgtttatattcatgttcccaagaaaaatacataagattcacacccaacacacttcgaaatttatttcactccctttgactatatgtgattatcaaaaaagtatttccaagatttaaaaataagtaaggaaaatgaaatattttaggacattcgactttcatacggtagntaaccccacaggcg

SEQ ID NO: 411950 - DNA, 100 bp, Homo Sapiens
agatagacgagataggtgagtgttgtcagtttgaacagagtcactataaggacgtgactccacgtaaaggcggcgcaagccctaacggaacctaaggggc

SEQ ID NO: 411951 - DNA, 208 bp, Homo Sapiens
tgagccaccgcactatgtgtttttttatgtgtaggtgatctcaatatctcatagatatttaattcaacatttgccattgcattactagacataaaatatttcatttaacacccaattcttccaattgattgatgaaaataaatccataatcaaaagaatttgataaaaaataattacttgacagttattattttttttcccaattacc

SEQ ID NO: 411952 - DNA, 419 bp, Homo Sapiens
ttgcatgactgcagttaagaatgcatctttattttgatggttgggctcctgatcgggaccattatagagctactcactagtttgtgcctcttcttgactttagtaggactgtgaagttcaagttgattcctgatttgctttcataggatctttctttccattctgggcctcagagtcaaaccacttaatcattcatgtttaactcatggtgagacctgtctcttgtttgttgtagtcacttaagttcctgttacatgtctagacttcatggggtgtccaactcagttaccacaaatgtctgtattacattttcaatgatagcacaatcttctttccttatgcatgtttttatctttacacaagtctttaaagcctcttgtatttaatgcatatttctctatttggttactcagacactt

SEQ ID NO: 411953 - DNA, 423 bp, Homo Sapiens
cacagctgtgcatctcccatgggtgccctggatatgcgggtccttgtgttcttttgactctgactcatgactctggggctccgtagttgacttttgggaaatgctgctttggagagttttctcctgagcccccacagccaggggcactaattgcttattggtgatttgccctgaggtgccatatcccagcacctggggcggcacagggccttgacatctgcgacagcactgctgctcacaggccctgcttgccatccctccagttctaggccccaagcgcctggtaagtgagcagccaagctggtgtagactaggatggaatctccccacccaataatctgaagcttcagaagtcacagttccacgtgtaggtatgtcgccaacagaaacgggtgtatatctgctgcaagatgcaaactagaa

SEQ ID NO: 411954 - DNA, 489 bp, Homo Sapiens
  misc_feature (374)..(404): n is a, c, g, or t
gtctttttctttctttcccttaatatgagattacatagattttcgtaccatggaccatacttgaattccaggagtcaatcccacttgttcatggggtgtaatcctttaaatgcactcctttggtttgatagtattttgttgaagatttttgcattagcattcataagggatattggtctgtagttttcttgtggtgtctttttctggcttttgtatcagggtaatactggtgtcatagaataagtcaggaagtattacctcctcttcagttttttgaaagagcttgagaagacttggtggtaattctttaaatattggtagaattcaccagtgaagccatctggtccagggcttttctttgttgggagtttggnnnnnnnnnnnnnnnnnnnnnnnnnnnnnnnggattaccaatttagtctctttgctgaatctctttgctaatagatttatttaccctttctggttctttctgattaatcgtgtagg

SEQ ID NO: 411955 - DNA, 372 bp, Homo Sapiens
cggcacgagagactgcttgttgtaagaatgatttcggttgattcctatgaatgatatactagtatctgatttccagggtatggtggggagtaccagatttatccaaagtgcaaaaaactggcaaaatagggattaaaatcaggcctctgattgcaagcctgaatttgttcaacttgaaggcagcccatcttctcagaactttcattttcccatagggagattaaggtattaaatatctcatagtgaagatgtatcccagttcttgatgtgctgaaagtctgagcgttcaggagctccagcgggatcaggtccttaaagcagcatggcttagatggccatgggcaagatggtgaacctcatgtgggaagagtg

SEQ ID NO: 411956 - DNA, 512 bp, Homo Sapiens
  misc_feature (313)..(313): n is a, c, g, or t
  misc_feature (483)..(483): n is a, c, g, or t
gaaccaagtttgaacatcattcatgtctgggcttgaagaatagacagaaaggacaatagctagagatgccacagagataatgtcaccaagcaatgattacctaggctaagtcagctaagcctagagagtatgattgaaaggggtatgaggaaagttaagtgcgaaagtatgtatgtaaatgaatcacttcccttcaaagtagaatttcagatccatttagtattcatgacattattggtcttatgtgtgttgttttctagacaataggagtttccctcctaagtgtaagtagtaatacttaaatataatatangaacatagtatttccttgtccccactacccatccttacgccgtgttgtataatttattggtaataaacatgtaatgatacattcttgcactagaagtgcacaatttttggttcagtatgtttcttaaataagaggtcacagtaaaccaaatacttactattaaacaaatnactggtacttcacagttacaaatctaatg

SEQ ID NO: 411957 - DNA, 440 bp, Homo Sapiens
  misc_feature (423)..(423): n is a, c, g, or t
cggcacgaggtgaaaattacaaatctttccttagaagtgatggtaagtatttcaacaatgaactgtaagtaaaaaatcttaggaatatctcaaagttggtcagcaactacatttttcttattccctagataggatcatccattcacttattcttagggaaatttaaccactagcagccagatattcacctagaaaagttcggaaaatagaaaatgcaactgagttctttctattatatgtcgtattccatcaaagtatcagtgaacgcaccatcgtggattaatcacattagtaaatttaatatcttacatgtccagctagtgctataattctagaaattcaattcttctttgatattaccaagaaaggagaaatttgtcattcttggtctatgaagaactgactcacatgtgacttaattgntgaagtcaactgtgcat

SEQ ID NO: 411958 - DNA, 188 bp, Homo Sapiens
tctatttgaggagccttcctacaagagggacatagacaaactacatggaggaaggacaaaccacggggatggtggtaacgccacatttagatcctgcgaggaatggctgaaggaaccgggagtatttaatgtgaagttcaaggaggtgggagggggttagaaagactgccttgaaatatttgacaggc

SEQ ID NO: 411959 - DNA, 687 bp, Homo Sapiens
  misc_feature (515)..(515): n is a, c, g, or t
gttggccattctgacacctgcgtgttcttttttttcctcagaagttgagatgttatttttaatggtgtgcttaataatactcaatttacatttttttgtgagatgtcttttgctttacggttaataattctaaatgagactaataatagctacatatcatacttgctgtgcgtcccaagagtttttaagagatttgcatgttaattctcatagtaaccatgtgaggttggaactaggattacttccatttcataaagaaattgagctacagagaggtcgtataagctacccagatcactctgctgttaagtagtgagcaagagatccactgccattcctcaggagaataggcctttaaaacaataatatatagaactgaaagcaccaactgtcctcttaggttatagctcctgatatctcctaaaattttagcttttcgagggggaagtgggcgtgcagtggtgagcacgtggtgactcttcctaaagccttgattcttagcatggaatcagttntagtgtatctctgtatgttaacgtaagttatgcacgtacctcaagggaagtactcccggacagttccaggaatattattagaagtactcaccacattatctgctgtatcttccattaaacacattccttttttacccccttttgaatctggactccctactctatacattat

SEQ ID NO: 411960 - DNA, 513 bp, Homo Sapiens
  misc_feature (264)..(264): n is a, c, g, or t
  misc_feature (400)..(400): n is a, c, g, or t
  misc_feature (409)..(409): n is a, c, g, or t
aattaaaaactcccttccccaagagtgaccagtctcctgatctttatcatcgtaaattagtgtagtctgtccttgaaacttctctaagtggaattatacagtatgtagttatttgattctggctttcttcactcaacattgtggatgaaatgtggatccatgctgggtgtctttatttttattgctgtgtactatttatcgcatgaatgtattacaacttattgcttcatccctaccttcatgaacattctatgtttctagttntgggatactatgaatgaagctaccatgaacatttctgtccatgtctttttgagcacacaggaaagtttttccctcagatgtctgcctagcagtggaatcgctgagtgatggtatacgtaccttaagctttcgtagntactgacanaccattttttaaagcagcttaccagtttaccattctgtcagcaatgtgaggaagctttcatttgcccatattcttgagaatagttgtcggtcgtctttttcatt

SEQ ID NO: 411961 - DNA, 380 bp, Homo Sapiens
ctggtggaccttctaagtaactgctagaatgattgggtaatgtatacagcttttgcttctccataaataatgtaagtattaaaaaggagattttaaactagaaggaaggaatctctggagtgagaggaaaagtttaattgtatttcagtatctatgtctatgaaaagttgatatacggtgtcactgtggtatacccaaacttgtttatacacatgtataaccagtacacagtaagtaccatgagtggcttttagtgattttatctttttaccttgtagtacagtctccctggtgtctcacaaggctagtttacttactttggccatatgcttcacatagtaggtttctggaggttttgttttttctaagatgagagagtg

SEQ ID NO: 411962 - DNA, 281 bp, Homo Sapiens
tatagacagagtcagagtgagagattgttcgagggacagatataggttgtgcaagttacttacacaagttatttcttaaattccaaacattttttaaaatctttttacagcctatgccttggatattaaaacctattggtggaaatcattctctatataggttaccatatttgacactgtaaatacttcccattttaattagactcatcttctaatagatttactgtggtccacttgtacgtattcctctttatgatttttttctagataatccgtgcccc

SEQ ID NO: 411963 - DNA, 416 bp, Homo Sapiens
ccagctcaggctgctactactctgtcatcctaagagaagaatctctgaaattttgacagcatgtggaaatattcccactgattattggattatgaagatggagaagagtattttaaaggagttttgtaggagctgcaggagaggattcaggtatatttatattcatagtatatgtgtaatgctttgttcctgctccttcattacttctattaagaagagacaaggagagagacatggaaatgactaaggcaccaaaggaaaggcattttttacatttcaaagtcacaggtaaaaaacatttatcattttcatgtggaaacattcttccaagctgtaactaataatggtctctcctactatttcctcccacttctgcagctgctgtttctaaaggggaacatctttttaaagccttt

SEQ ID NO: 411964 - DNA, 439 bp, Homo Sapiens
  misc_feature (198)..(211): n is a, c, g, or t
gattaaaatgttagatattttttactggagctaagacttaaaattagggcattttgaaaggtgtatttgtttctgtttcttgtttgatatattttggttatctactcttttaaaaaactaaacgtataaaaggtatcttcaaattactgagtgtttcatccatcccagtaggtgaagtattctccagtgaataaatcnnnnnnnnnnnnnngattttaaatagcttgagcggtgtagcttgaaatgttttcagggaaagactatttgaatcataaggaatagctttgattttcttttttatgtctcaaatatagaattatttgggggtggtcactcagatggaagaatattggcaattgtgttgaacattctaccttatatagttttgagaatttttgccaaaaactgatttcttagaaatatcctcccccagctgtgc

SEQ ID NO: 411965 - DNA, 394 bp, Homo Sapiens
gaatgtgggaagggttgaggaattccaataagaagattatcacccacaaagaatgccggagacaggtttttttccacaagagattaagtcattattcttaacccaagaggtgatggattgtctttctggtgcttactagtataatagctaagcagaaaataattgtctaatgtgaagtaggggagctggagataacatagaaaggataaaagtccctcaaattaaaaacaaaaaggcatcgacatgatttgtggtttcaaaaaaacttttttgggggaattgcctacatactattcttactggaaatggagcagtgtaggaagccacaaacatctaaatagtcatttctctctctttcttgtcagttgcttcaagtcacaaatgcagtttcaat

SEQ ID NO: 411966 - DNA, 433 bp, Homo Sapiens
  misc_feature (45)..(46): n is a, c, g, or t
  misc_feature (108)..(108): n is a, c, g, or t
aagtcatctttaaaaataggccaaatcgggaaatccttataatannagatagaccagataggttgagtgtgtcaagttgaacagagtcatataaagacgtgactcacntcaaggcgaaaacgctataggcatggcactacggacatacctaataagttttgggtcagtgcgaaaactatatgaccctaagagccccattaacttacgggaagcgcaacctcagaagaagataaaccaagacgccctaggcttgaaataacgaactgcgaacacaacgcggctaagccgtaaagggtagggctttgggaaggccgacccattattttaaacataaattctataaaaaccaaattaatttaagaaaagttaactcgggccaccttgtgcatcccttgtacaaactgaaaaataaataggccaggttcatttacag

SEQ ID NO: 411967 - DNA, 923 bp, Homo Sapiens
  misc_feature (120)..(120): n is a, c, g, or t
  misc_feature (184)..(184): n is a, c, g, or t
  misc_feature (191)..(191): n is a, c, g, or t
  misc_feature (525)..(525): n is a, c, g, or t
  misc_feature (534)..(534): n is a, c, g, or t
  misc_feature (542)..(542): n is a, c, g, or t
  misc_feature (563)..(563): n is a, c, g, or t
  misc_feature (598)..(598): n is a, c, g, or t
tatacgtagtggtcaagcagtggatgaccacgaagtagtgggtatacagccatgggtggaattcagccattatgcagacaaagtaggaagcctgggcattctctgccattcttgaaattntctgcttaagtttcaggttgaaatgtttggttatcaaatgtcttaaaacatagccctgaatccnccctttntaaaatagaacctttatagccatatagagtttcatttcattaaaggaaaggtgtgacagcagccttgttaatcggagggtgaagaagatgatcagctaaagctttggcattcagtatggcccagattagcattctcacatgcagatttctgcgtgcgctctcttcccaactctcatctcctaatttactagtgacatgaattcctgggtgactctgatgtacgctaacagttgacaacctctattctggactatggactgggccgtacgagagagccgaggcaatcacagtgaatagaagacaacgcatcttagatgctggtattccgcgcctntcgcgcggntaaggtantaacatcattactactatttntaggtaaattcacatggagaagataatatagctcncacgcataccatggaacttcaatgggaagcttttaggagcttctacagctgcttggaatttctatacaacgatcttacttaacctactttctttcagatcaattccttgcatctaaacgatgatgacgtttaccgaagctctcttgacacatcttgcaaacctcttgttgatggtacttaatgacagttcaacggccgcgatgattgctgtcacttacttgggaaccacctgccggacgactgcgtgagtcccttgcgattctaataaacatgtactagcttgtattacgaccacacgtctcatgttaccctggagtggactctc

SEQ ID NO: 411968 - DNA, 434 bp, Homo Sapiens
caaaaataaggatgtggccaagtgtaaagaaactttgaaggaaatagtgccagttatagaagaagaagagcccagcttgagaatgaggactcagctttcactctggctatgccccaaatcctgggtgacaaccaggagtgctcttgtctttctgagccaaagtctctccatctgtacaagaaagatggtgcactccacaatcagattctgatcctaaagacatttgaatctttattcttggtggtcaagtcaatttgaatctttattcttggtggtaaagactttgttattttcaaaatcttacaaggacctaacaggaaactttaggattctttggagtatgttgtaaaggcatacctctcatctttaacaatgtgaaatgaagatgacagaagggaatcacagcatttcatggcatttgactgataacattc

SEQ ID NO: 411969 - DNA, 375 bp, Homo Sapiens
  misc_feature (166)..(239): n is a, c, g, or t
  misc_feature (315)..(315): n is a, c, g, or t
cacgagttaaggcaatcattccctttgtccaaactatcttctttgactaggctgcacagaaggatttccaacccccagaacttgaattcccccaggtgtatttgtcttcctggttggtactttcagaatcattttaatgtaagctgctttcttgacatttgcattnnnnnnnnnnnnnnnnnnnnnnnnnnnnnnnnnnnnnnnnnnnnnnnnnnnnnnnnnnnnnnnnnnnnnnnnnncttgcagaaagacacaggctgttctcttggatgaactcatcagagttaaatgtttcatctttgaagataacgcggnggttatcaggcacatcagaatatacctgcattaacactattgccagcatgagcaattcga

SEQ ID NO: 411970 - DNA, 487 bp, Homo Sapiens
gatcccccgggctgcaggctgggtgagactgagacatcctactacttgtgtgtttaaggctaatctggctgctaaaggcagctggaagctgcttggtcttcagctcctcttgcatgtcagtaaaagcaagacacagctggtctcaataaacagactatccacaagtgatgtttgcaaagttaaggttgggaggtggaagctccatctcctgaccatccaaagactggtggatgcctaaatccaacatattaatacaatgagtgctacagagataaccaaaggtacaatgctagaacagttacttttggttatcagaggcctgcacttgatcaagttctaggcacacagtactgacatttaaatttaaatgctatatgtaaacgtcccatctgttcagctgccttccttgtaaaataaaaataaaacttgtcttaatcttctcagaaaaattcactgctacatagctaccttcaatgtaagaaagtag

SEQ ID NO: 411971 - DNA, 512 bp, Homo Sapiens
  misc_feature (227)..(227): n is a, c, g, or t
  misc_feature (357)..(357): n is a, c, g, or t
  misc_feature (496)..(496): n is a, c, g, or t
tttataacactgtaaaaccatggaggcatattgcccccatttgcccatgtggagcatggaagcagccagccacagaaaagggtcccagcatgagccgagagcaactctcagggcacaagaggagccacatctcttctgtctttttctacccaaagctctgatggagaactatctcagagcaggccccaaggcagtgggctggcacctggaagttatttggaggcggngagccaggcaagatagcaagacagcagcagtcccattccatttgagaatttaatactcaaggttccaacaactcaagagcatgctgaaggatgtttgagcaagcgtggggtgggaagatgcagagtgcangtagccatatttgcaaagccacatattagactcactttctcttgaagacaggactatctcagcatgaatgaggtcttctaagctctggttgctatgagaggacccttgtgagatgtaaggcaaactagcttcttacggngaaaaagcattgcggt

SEQ ID NO: 411972 - DNA, 436 bp, Homo Sapiens
gtttatgaaacaatgccgaattgtgatattttaataaagctcacatcataattcccccaaataaaaagttaatcaacttaaaattctctttatgacctcgacccatgtcctacatgatgaggagagagactcatgttctcagtcacttacatatcgttcagtcttctgcattttctaaatttctggtctacagtgttaaccatttactggtagagccatgtaaataattgaattggattcaggccgtatgcttatatgatactttctactggaataggacatattcacttaaagaaggtctgatagtaaatacttatgatctgtcttctgcttgctgtacctatactgccctcaccaagaggggagcagccatgctgtctcagatggtaatggtgtgctgcttatttactctccttataagttcgcatgctttcaa

SEQ ID NO: 411973 - DNA, 450 bp, Homo Sapiens
gaatttccatccttcgaaaggctggataatattcattgtgtgtttataccacactttgtttatccattcagccactgatggacacttgaattgctgtcacctttagctattgtgaataatgcttaagtatatttctttatgcgttgaaaccttttaagatgcagtaggctcttgataatccagtgaaaagaaaaggaaatctcaacacaaaaacattccattccaacatccaccttacttagagtgatggctaaatttatttgcgaacatgcaacagcaacttggaaaggataccctggagtgtgctgggtggcccagaagctggtttaggattcaaatatggaccaacctacagacaactagcagtttaagttctgtgttcagtgtgggaattatattcagcgatggtatttctcacaccaatacaattggccttttggtcttagcctt

SEQ ID NO: 411974 - DNA, 264 bp, Homo Sapiens
  misc_feature (61)..(61): n is a, c, g, or t
gacttccccgggctcgcagggtttttaaagtcagggccaaaatataaacacgaagagcacnaatggaacaataaagcgaaaatatatgtgaaaaacaatagaacgcaaatataaagccagggcagcatatatgaaaggggaagaagggagaggaagaagaagctcccatcaacgtgagcgaaagcacgatgagacagaactggatttcaaagcacacaccggcatttctccccacaagactctgggcaagatgaactcttgtca

SEQ ID NO: 411975 - DNA, 213 bp, Homo Sapiens
tgtaactagactgaaactgtaatgcagaggagagtaaggttctctgcccccaaggtatgtgccattttgtgagggcacagacacttataagacattgagggagcctaagagaaagagtagctccagctcggcctaaggaggaagaggcaggacggctctgccaggtgatggtatctgtactgctcttgaagatgggagggtttggacagatat

SEQ ID NO: 411976 - DNA, 385 bp, Homo Sapiens
  misc_feature (67)..(146): n is a, c, g, or t
cgggattacctagtgccttcacaatcggtcagagctggattcagattcctgctcgccaacgcccagnnnnnnnnnnnnnnnnnnnnnnnnnnnnnnnnnnnnnnnnnnnnnnnnnnnnnnnnnnnnnnnnnnnnnnnnnnnnnnnnacgtgtactgtataatagtgcgtataaggcacgtaatgtgaagcctggcccctgaagatattagctattgttatggagataaataatacgcgtaatagaatgagaaaaattataaattatataaattcgctaattgtagtgccctttctgccatcaacttctttcctagaataaattaaagataaaatagatataccaatttttaccaatgaaataatttgttatttgggaattgcctc

SEQ ID NO: 411977 - DNA, 682 bp, Homo Sapiens
  misc_feature (563)..(563): n is a, c, g, or t
  misc_feature (565)..(565): n is a, c, g, or t
  misc_feature (608)..(609): n is a, c, g, or t
  misc_feature (629)..(630): n is a, c, g, or t
  misc_feature (668)..(668): n is a, c, g, or t
ttcattatcatatgatctcttaccttattctcttagcactcttaagggtttacaggcaagaattgcaacaaataaggaaactgagatccgagaaagctaagagaatcacatgagatgagagaattattaagtgactagtcttgagccaaattagggtcctgatttgccaaggatcgttctagttcacacgtattacctcaacataattattaaatgattccccttaactctcaaaaaagaatttgactgattccttggtcactctaagtagaacacacatttccttagccccagtcctgtgccctttccactgcatgaagctgggcttaaatgtatctgctccttcagaaaactaacatcctgtttcagtccgtgtctcactacttttgctgcttcagagcagagtggagataaaccgtaggtgtagtcaatgccatctctgcactaataaagcttctgtttcccggtcagcttcctgcagggcaagagctccttttcaaattacgatcaagagcattaatttatcagacatcatgctgaatatgccctgaagtttggttggntntttctatcattacatctccccagagttgcagtcaaggtctaannatatactggtaattatatannaagatcgaacttgcatttaattctacttagtggacagnttaataggtcaccc

SEQ ID NO: 411978 - DNA, 644 bp, Homo Sapiens
  misc_feature (54)..(110): n is a, c, g, or t
  misc_feature (343)..(436): n is a, c, g, or t
  misc_feature (522)..(522): n is a, c, g, or t
tattcacaggaatgatcttagtgtactacagtctcaaataccaggcctcaagcnnnnnnnnnnnnnnnnnnnnnnnnnnnnnnnnnnnnnnnnnnnnnnnnnnnnnnnnncagctatttaatttttaatgtagtttttccttctgtctctgggaagtacatttccaccttttaaggcatatctttctttctgtgcttgtgttttgagtccaatttttcagcctcttttgagattttgtttactcatgcagtggtagcctctttcctacaaccctgcctttccctcttcactgccttcatttgtaagctacagtgcatgggcattagagtctggacctcagctnnnnnnnnnnnnnnnnnnnnnnnnnnnnnnnnnnnnnnnnnnnnnnnnnnnnnnnnnnnnnnnnnnnnnnnnnnnnnnnnnnnnnnnnnnnnnngggagggcaattgtgtcaattaagtaaaaaacatgttaacttcctgacatataatatgcacctaatgatagctataaacattatanaaacaatcagatttcgcttatctgaagcactaacagaaatgaagacaacgccaacattctcttagctctggtctccctggatattaatggcttgctgcctatctatgttcatgggcactcct

SEQ ID NO: 411979 - DNA, 498 bp, Homo Sapiens
  misc_feature (264)..(264): n is a, c, g, or t
tgccatgatgcggcatggttgggtgagcaggtgatgggggcggtgcgtatgtaactccaccagcaggtctcctctctaggctccatctacctaattgggcatcaactcaccatctctccatgagtccaacacacctaggttcctcttggaccagattgttgcttcatagggaagacaccaaaggcggtaattgtgcttgtgtgtagtgaaaatggggtataaagatacaaacatttagcttttagcttcatatacaagtgaggngagctgcttatttcttattccccagagagatgggggcctgagacagtgagggcagaatgagggactccattttctgttcatgctggtgcacatgctcactgagtgtattgcaagctagcagcccatactatttcgatcctctctttcctaattggctaaattttacctgttgaactttaatatattaaatatggccaagctgttccccataccttttatctgagtccttttctt

SEQ ID NO: 411980 - DNA, 671 bp, Homo Sapiens
  misc_feature (193)..(539): n is a, c, g, or t
tcagcgtagatcatatgttgcttgccaataaagacagcatcctttcaatctgcaggacttttacttctctttcatgccttttccagtggttaagaccttcagttcaatattataagtggcaagtgccttttttcctgatctgaggaggcaattcttgtgatgctgttagtaagagtgtttcctttacctctannnnnnnnnnnnnnnnnnnnnnnnnnnnnnnnnnnnnnnnnnnnnnnnnnnnnnnnnnnnnnnnnnnnnnnnnnnnnnnnnnnnnnnnnnnnnnnnnnnnnnnnnnnnnnnnnnnnnnnnnnnnnnnnnnnnnnnnnnnnnnnnnnnnnnnnnnnnnnnnnnnnnnnnnnnnnnnnnnnnnnnnnnnnnnnnnnnnnnnnnnnnnnnnnnnnnnnnnnnnnnnnnnnnnnnnnnnnnnnnnnnnnnnnnnnnnnnnnnnnnnnnnnnnnnnnnnnnnnnnnnnnnnnnnnnnnnnnnnnnnnnnnnnnnnnnnnnnnnnnnnnnnnnnnnnnnnnnnnnnnnnnnnncgctggtagatgccctttattttcttgttctgctgagagcttttatttcttaaagccatgtggttttgaatattgcacgccttggataacttattgcattttcatatacacgcatccatacttcctggtccc

SEQ ID NO: 411981 - DNA, 644 bp, Homo Sapiens
  misc_feature (507)..(507): n is a, c, g, or t
  misc_feature (536)..(536): n is a, c, g, or t
  misc_feature (568)..(568): n is a, c, g, or t
  misc_feature (606)..(606): n is a, c, g, or t
cttcatgcaaaggaagcctagttccttcagacacttcttgtttgacactgtcttgccttcttctgcatgacctcctctgtggcggtgtttcccaaaaattattatagatgagagaattgaatgtgacataagttctactatacgcgtgacttctttgggtacgatttcactactacatttttaggaaacctttatgaaaggaattacttagcactggagattctgtattgtagtgacaataaccctgtgaaaatgtaggaaggtttcaaagacattttggaagaaagaggaaatcagagtctgatttttaaaaattcgtttttgtagctgaagcttcttcatttaatttgatgtggccacctccctgaccctcatatttgtaaggccgtttctgggtctttgccaccaggagctccttggaatatcacaggccttaggctggaagaggttgacagcagtttaattaattataattataacctaatttccaatgtttaggactaacanattatgaagaatactccttaatccaaganactattggagacaagaaagaggaacgaacggncacaccccaagacaggacactgttaccagatgagaggntggagagtttgaagccgcttgacacagatgatgccgtt

SEQ ID NO: 411982 - DNA, 678 bp, Homo Sapiens
  misc_feature (56)..(85): n is a, c, g, or t
ccattaccatgcatagttactactgtgtgtgtatatgtgatgaggacacttagaannnnnnnnnnnnnnnnnnnnnnnnnnnnnnctcacatgattaacagcatttttcagtgtagctggtgtctgctgtacatcagaagggaagtgatgtaattaacacatttttctaaggtatgaatgagtgatgccttcttgatcttaccaggattatacatactttaaaaaggtatgcttaaaatatatatgttgaatcacagggtatgtttagaatctaagttaagctttagtttgtagaaatcaagcccttttgtatgttgaacggaaaatgagattttaggcaatatgagagacagattatacagtttttatggcaatgtggacaagtatccattcttgtggcatgcttgaccaagagcttctttatttcattgggaaagacccttttatagaacactgttaagtaatgcatgtatttacaactataaggaattctaatttgaaaacatttgccaatggttttgagtttccttctgcgaagatggtgacaattccagaaaaatttcagccccaaggccagccaagaaccaatgccattcgaattggttaacatggacaccaggcggatgggactctgacctttcattttagcttgggacttacaggcccccctgttgggcc

SEQ ID NO: 411983 - DNA, 706 bp, Homo Sapiens
  misc_feature (509)..(509): n is a, c, g, or t
  misc_feature (541)..(541): n is a, c, g, or t
acccctagtgaggaggaaacattttacttacgtgtgacatttactcagaaacctgactataagtatggtgaatgtatggtttatggcataaacagcaacatgtttgtgaagtaaagatggcgttcttcataacaatggcggttcaaccagcatgaactagaactgtcctgggaaaactagaaaacacaactgaggaccgagaaacaaaaggtctcatgtataccccaaaatggtattaaaaagagacaaaatactaaagtataaatagcttattataagacacaattttgagcatgctttctttactttagatacaatttgcaaaatcttccctgtagctttatgtcagtccagggccgctgattatgaaattgcaaatttgaagaatgaggtggcttccttaataagtagcagttgataaccgctaaggaagcatgaacaacaaaagtggccaaatcaaaaggcacaagaagtgttcaaagtaaaccaaaatttaggagctacagttntatttcataagtgaaaatttagtaagcctcanaaacatcacatagagtgtctgtctgggctgcaagaccctgaagtggaactccacttccaaacttgcatctattccaatctgaatgggcttttattttcttgagagatgaagttcaatttacactgtgttgattgagttcttatcactcggtttaaggtgtgtcct

SEQ ID NO: 411984 - DNA, 677 bp, Homo Sapiens
  misc_feature (526)..(526): n is a, c, g, or t
  misc_feature (537)..(537): n is a, c, g, or t
  misc_feature (551)..(551): n is a, c, g, or t
  misc_feature (566)..(566): n is a, c, g, or t
  misc_feature (658)..(658): n is a, c, g, or t
gttttcttactagagtgctacaggagaaactgtgtaccaatgctaattcatccttgtaaaaaggaaccaaagatgtcagtcttaatcctttgtttacaaatagtcattaattactgctctatgtaagggaatgattttcttttatccatcaggaaacagaaaggaaacgatggctcagtctttgttccttatgaattaattacaacattgcatcaatgagcaaaagagaaaacactattgttataaattgtcctcgtctctccagtctcttgaatatacatattttttgcatttcctttctctgccatcaagttttccctttgtgaaaaaatttcctctagatacaaatttccttctaggtatcttcatatttttctcctttcattcacaaatgaatgtcctatatctattccctctaattccttaccatactatatatttataacaagcatcctcccaagacacacacaaatgaagaattaatcaaactctataatctaactttgggtctttacctagaacttgngaaatacattntctctcaacattgntcttgcgagtgttgncttggaatgccaaatttctcttggttgctacttctgcgaaccctcctttgcctgtggttgggagatttcgcccatggttaccatggtgctgncttggtctctggtgctttt

SEQ ID NO: 411985 - DNA, 711 bp, Homo Sapiens
ctacttgttataaaccacataatagtcatttgtcttcgaaagaatttttaaaaataaggacatttatatttacccacagatttgccatttctagtgttcctcatttttctagatttccatctgatatcattttccttctatttgaagtacttcttcctttaagatttcttagaatgcaagccttctagtgattaattatttcacattgtgtaaatctaaaacagtatttggttgcaggattttgttgttgttgttgtagtgcacataacattacatttaccatcttaaccatttttaactgtgtagttcagtagtgttaagtgtattcacattgttatgcaacagatctctagaacttgcaacactgaaactctatacaatactaattcctcctgcccatttcccccagcctttggaaccatctttctactttatttctctaactgtgactactttagatacctcgtatgaatggcattacacagtatttggtccttttgtgactgcttattttggcttattcattttgcgtggcccttaagtttcacttatgttcgcacatgtgggcacgatttccttattgctgcttaggcttccgctgcgcgcattattcccacatctcctttcataacctgtcgagcggcattgcacccgcttccacctagtgggcctcttctgggcgcccactctcgatcactcggccgccctcct

SEQ ID NO: 411986 - DNA, 315 bp, Homo Sapiens
  misc_feature (137)..(151): n is a, c, g, or t
ccactatataaatatatgactgaaaggaacatatgaaatagggataattcttagagagtgggattagaaagagaagtaacaatatggaaatttttctttcataatactttatttttttccagtgaacacatattacnnnnnnnnnnnnnnnaaacctgaaaaatatcagggcaatataagtggttgttaaaaaacatcaacttttgaagttagatttgaggtcaaaatcaagttctaccatgtactagttttataactttgggtaagtcacttaacattactgagtctgtgttctcatatgtagaatagggaaaa

SEQ ID NO: 411987 - DNA, 413 bp, Homo Sapiens
  misc_feature (394)..(394): n is a, c, g, or t
taggcagattatttaaaacgtaaagaaaaccttttacaatcttttaccaagaagagatcaatactacaagaaatctttgtcattttaacagagagaagaccaatttttagttttgcattagtgtatggtattttgatgttgagtcatttcagacccttataataagttcattcaatggtagtcaacttgaccacacaagattctctcttcccaattttctatatcaattttttgtccttcattctccttttacattctgaaaaatttaaataatctccaagctagaaaaaaattcttttttcaacaaacacacattttcatactccataccttttcttaccatacaccctacttttcttatacacgttgttttccctattatctctagtaattntaattgcatatactaattg

SEQ ID NO: 411988 - DNA, 436 bp, Homo Sapiens
  misc_feature (402)..(402): n is a, c, g, or t
agacttaaagaaatttgggttttgggattgatgggtaatggattatagccctagatccctagagtttcattctgtagggatactttggtggaaaactttaggaagcatgtcttaacatatcaggtaatctttcaaaaataactttattgatatatgacatactacacatattcgtgtgtagtcttgatgtatgtgtacatccgtggcttcatcctaacaatcaaggtaatgaagatactcatcatccgcgctgcttccttcccatttgtcatctctcctttcattcctccccaccctccaacaagtatgcaggcaacaactattttgtctctgtcactgtagattactttgcactgtctagaattttatataatagtcatatagcatgtacttttttgaggngtgtgtgtgtgtccaggatctttcattcagcatc

SEQ ID NO: 411989 - DNA, 437 bp, Homo Sapiens
  misc_feature (383)..(384): n is a, c, g, or t
  misc_feature (404)..(404): n is a, c, g, or t
  misc_feature (407)..(407): n is a, c, g, or t
cgagtcttattggaacgcgggaccctatgcaccagtcccaaggctggacacttcatttttatcactagtttcactatttgccctttctccttccccccaaatctttgcttttaagacaggaaaacctacaagataatttggttttattgtatatgtttagtctattcacagcaattaaatgagaggggttttgaaaattctccagtttatttataatccatacttgacattatgcataaaaaatgaagacagtgtcatttttcatgcttgagattttactatcaactggccttatcattgaatttactttagggttacttaaactagtctagtgcctattaaactttcttccatgtgttgtagaatagtgtgaattggcccannaaggaaattgttcatgtgtnctngatgggatgcccttatctatttgcgtgttc

SEQ ID NO: 411990 - DNA, 419 bp, Homo Sapiens
  misc_feature (66)..(116): n is a, c, g, or t
aggatttaagctcttaggaaccagaggttaaaaggtagtcagtatacactactatacatactagcnnnnnnnnnnnnnnnnnnnnnnnnnnnnnnnnnnnnnnnnnnnnnnnnnnngttgtagtcagtaaagaaattttaaaacacaacataatgaacaaaaacaattagctaatctgtatctatgtatctaaatccgtaggcatttattgttttattaagagtgaggaaaccttagatgggtgcagccagaagctaaaaacaatcttatcatagtgaaagatgcatcagaggtactgaaagcctttaacatctccactagtatttctcatcatctttgaaatcagaacaattttgcttccctttaggaacgtcagcccatacagttgtcagggtcttcacggagttgcctctgtttgg

SEQ ID NO: 411991 - DNA, 748 bp, Homo Sapiens
  misc_feature (442)..(442): n is a, c, g, or t
  misc_feature (523)..(523): n is a, c, g, or t
  misc_feature (580)..(580): n is a, c, g, or t
  misc_feature (587)..(587): n is a, c, g, or t
  misc_feature (601)..(601): n is a, c, g, or t
  misc_feature (608)..(608): n is a, c, g, or t
tccctgaagtgtctttccccatttatcttccatgttctcaagactgggctcagatgtccttaagccccatgccttgtgcctgtctcacagcaccttatctgtgcttgccatttaggattatgtacagctgtagtggttccagatcttgacctagtgtggcagctctgcttcccaaaatcatcagggatccagtgtccttctactttgcacaatgtaactctttgattgccatatcatatccaatttggctgcttaaattccaaccatcatacctttaacccagcacataggaaggatgaatagtcaaagaccagcacacaactcctccccttgaaatacctttttgattagttgcaaatatttctacttacatcccattaaccagaacctggtcatacagctatactctgctgcaagggagtctgagaaaatgtagcctttntctgggaaggcatatattcaggtcaatattgaggctctattatagtactaatgaagaagagataatgctgagggatactgnaggtataacagtctctgcttgcaagatgaacacggcaagccattgctttcatctccntttcagncttcactcaatcanaacttgnctattggagttctactgtctaagaagaaaacaggaccagcatggtcccttgctttatgaaccttcaatccttaaccagtacccaccagatgattcctgatcgctctgttagcccataaggttccggccggcgggggttcc

SEQ ID NO: 411992 - DNA, 438 bp, Homo Sapiens
  misc_feature (358)..(358): n is a, c, g, or t
  misc_feature (401)..(401): n is a, c, g, or t
  misc_feature (407)..(407): n is a, c, g, or t
aagccttcttcatatgattgtgtgatttgttctctacacaaaacaactcagcttagagaataagaggtggccgaatgtcaatctatactctggctatattcttgcacagggctgtattctaccagaatacagcaagccactgagcctttgctaagcagttcgcctatggacataagtgcccagaaggaacaactttttataaagtgtctatgtaccttttaaagatgtcttccttgacagaaaaaagtcaagactagcgcaatgaaaagttgtgcaaggcagacccgaataccatgaaacaatggaatgcatatgcatgaggcacacaagaacagtagtgacatttaattattggttntcatttgatcttattatacattgctgaagaatataggcatcangaatangaagtcatcttttatatgtatattcctttgg

SEQ ID NO: 411993 - DNA, 422 bp, Homo Sapiens
catatttacactcacacactttaactttatgtacagatgggcatataaacatacataattgcctatgaagatatgtggaaaactgaaaagagtaactgaatccttgaggaaaagggaaatatgaaagacaattttactttttaactaatttatcattacaaatcttgtatttttatgaggaaaatacaattattatgtattacttgtatcattgaaaataaaaatctatgttgcatacattataagatactgtctctcgtcttgcgggaaaatgacttaaggaaacccataatttaaaatgaagcaaaatgaatttttttgttataaaaactatttgtaagattcacagaatactcactgggggttcagctgaacatcaatttactgtgtgggactgcttttgccacacgtctgtcacttct

SEQ ID NO: 411994 - DNA, 462 bp, Homo Sapiens
  misc_feature (66)..(66): n is a, c, g, or t
gtggttcaaaagtgtaacacaaatgtgaaggtatgccgaatgaggccactcttatatagagcacanatgtgcgcaacagagctatatagcgctggaattataggatttggtaccactctagagaggaatattccctgtgatagaggtatatgagggatgaggagtttattatgaacactactaatattataattgttgatcggggggaaaatcccattactgaaatttctatgccgcgtggtctaactttaggacgtctttttttagtgattgtcctcttaaataattttgttaaaaaatatatttgtggcgttatttgttcatgcatgcttctatttttatgatgattttttagaaggggaatactgtgagttgtgctaactctttttgtaataacctcctgcgattgtactttcatggagggttttgtctattggttatggcttttattccctctttgcg

SEQ ID NO: 411995 - DNA, 732 bp, Homo Sapiens
  misc_feature (373)..(373): n is a, c, g, or t
  misc_feature (711)..(711): n is a, c, g, or t
gttcacggcgtgtaagtaacggagctgagaccgggacgctggtctttggatgttaagtgcaagtggttccattgcccttcagcactggggagagagttgggggccgttttcttcttctaagtgatattttggaaccaacacagtactgccccattgccttccccacagccatttctttattacattatttttttcctgctgcttccaacccattctcttctgcacaaaacccccagtttcgctctcccaggctttcacacacattactcaatccacccgaaaagtactctgtactgcttcactcaaactccgacacccagcaagcctttgtcagggcaggaagatgcgtgcccctattgcacggttaggctgnggctctaatattggccactggtctgcactgggatctcaggcaagtcacgtactgcctctcagcctctaagtgccctttcaattatagtctgccatcccatcaatcagtggatgcaatcctttttaatggagtatccagctaactctcaatgcgtctagataatagaatgctgcaatcttaattgctctcttctggagaagcttgttaatgcttagaacagtgtggcgattcaggatccgcggaagtttgagtgcaagctccctcactggtagaatcaagcttgggactccaggactgtgctgtttggcctgaggcttttgaacccttggtgcttgctnccttatggcctcctggttccc

SEQ ID NO: 411996 - DNA, 694 bp, Homo Sapiens
  misc_feature (93)..(143): n is a, c, g, or t
  misc_feature (592)..(593): n is a, c, g, or t
  misc_feature (626)..(626): n is a, c, g, or t
  misc_feature (631)..(631): n is a, c, g, or t
  misc_feature (643)..(643): n is a, c, g, or t
  misc_feature (647)..(647): n is a, c, g, or t
  misc_feature (675)..(675): n is a, c, g, or t
tcagtcaagtagaggagctcttagtctatagttgtctagaatcttgttactaaaagtatgatctgagaactggcaccagtggtgtcacggaannnnnnnnnnnnnnnnnnnnnnnnnnnnnnnnnnnnnnnnnnnnnnnnnnngcattttaagaaagatacctcaaggtgatatatgtatacatattaaactgaactatgtgccacattagatactgagtctttttattctatcatgtttaaaaagcagtttatcttagctatttactgtaccaacttattaaatttatcttatttaacttagtaatttatcttagcttagttagaaagcaatttatcttgccatatttgtttctgcacctgttagatccactttattctgacaaaactttaatattcagctgcctctaccaaataagaggtcattgaagattttttcatgaaagcaacttatgaaaagtccctctgcatctgttgcaaaagtgaggctgaggacattggttattttagtgattaacttttccttatgtggagggatattctttaagtgtatcacaaaaatccccttcctatatgtcattaaatcaacatannagagtaaaaactagaggaaaaaccttcacaagncacanccaatatagcanacancatagcttcgtaagtctcgctggatggntaagggacagcgatctttg

SEQ ID NO: 411997 - DNA, 677 bp, Homo Sapiens
  misc_feature (153)..(593): n is a, c, g, or t
  misc_feature (595)..(595): n is a, c, g, or t
  misc_feature (600)..(600): n is a, c, g, or t
tgggggcaactccaatataaagaatggatgatgttattttaactatctcgattaattttgtaagtttacatttcaaagatttattgtagatagactatctactgtgccatccaggatggcagccacttaactacatgttgttacttaaatttnnnnnnnnnnnnnnnnnnnnnnnnnnnnnnnnnnnnnnnnnnnnnnnnnnnnnnnnnnnnnnnnnnnnnnnnnnnnnnnnnnnnnnnnnnnnnnnnnnnnnnnnnnnnnnnnnnnnnnnnnnnnnnnnnnnnnnnnnnnnnnnnnnnnnnnnnnnnnnnnnnnnnnnnnnnnnnnnnnnnnnnnnnnnnnnnnnnnnnnnnnnnnnnnnnnnnnnnnnnnnnnnnnnnnnnnnnnnnnnnnnnnnnnnnnnnnnnnnnnnnnnnnnnnnnnnnnnnnnnnnnnnnnnnnnnnnnnnnnnnnnnnnnnnnnnnnnnnnnnnnnnnnnnnnnnnnnnnnnnnnnnnnnnnnnnnnnnnnnnnnnnnnnnnnnnnnnnnnnnnnnnnnnnnnnnnnnnnnnnnnnnnnnnnnnnnnnnnnnnnnnnnnnnnnnnnnnnnnnnnnancacanataacctgccggccgaaatttgagcttacttggccaatttgcccttgggagccgattacaattcctgcccggcgttt

SEQ ID NO: 411998 - DNA, 349 bp, Homo Sapiens
accttcacaagctttattttctttatccattgtggccaataatattcaccacagaaggttgttcatttatttatataataaatttttattgaatatctgttttatgttagacacttttttgagcactgggaaacaataatgagccctcactgagcatggatattctggaattactgaagctgaagcaacatatggaaactccttatctcagtacctggctcattgcagctatttaaccaatagctgtcattttattagtccgagatataagaatgtgttgattacagtcctatgatctggagtcagatctggatttaagttcttatttagaacattagatccatagctt

SEQ ID NO: 411999 - DNA, 531 bp, Homo Sapiens
ctggggcccgaatttggggctcattggcccatttccccttttggggggcggtttccaatttatgggccggtgttttaaaagggtgggactgggaaaaccctgggggtcccccatttaaaccccttggagaaaattccccttttcccaggtgggggaaatgccaaagggccccgcccggtcggcctttccaaaaggtggcccacccgaatgggcaatgggaattggaaggcgtaaattttgggtaaaattccgggtaaaattttggtaaaacccgtcattttttaacccaatgggccgaattgggaaaaaccctttataatctaaagaattcccccggtatggggtgaggggtgtcccagttggaacacagggccttttttaagaacggggcctccaagcgcaaacgcggcccgtttataaggggaggcccatttggggacccttcccctatcaagtttttggggccgggcccgaaaggccttaatgggcccctaagggggcccccgtttagcttgcggggcccgccccgct

SEQ ID NO: 412000 - DNA, 721 bp, Homo Sapiens
  misc_feature (426)..(426): n is a, c, g, or t
  misc_feature (525)..(525): n is a, c, g, or t
  misc_feature (534)..(534): n is a, c, g, or t
  misc_feature (571)..(571): n is a, c, g, or t
  misc_feature (629)..(629): n is a, c, g, or t
catcataagaaaagatgttttaaatcttatgaagaaggtttagaggccatttgtgtagtaaactaacaaaagaacaaacttctttgaagaaacattctctctcagagttgaaaataatttctgatttcctctaaaagtaccaaatgattgtgtaataaatgagggttgagaaatagaggattaccttccaagaaaacatcaaccacagcttgtgtattttttaagtgttgtgaattgtactttgtggtacaagcagtaataaaagtaagtatctacttctaatagtggtgttcaatcgtatctagtgactttttaggagagctgaatatacaaggacacctttttactgatgttcatatacatttcactggcatcgttaaaaagaatgaacattccagagttgtgataggaaatgatagataactntggcttctatctcagacttcctatatgcccgatttgttctagcacattgcacacatttgcctggttccttatctgtaaggtacaaccagagccaaacangaactagangtccgtgaaaagtgaggtttttgttgcaccccacctnctaaagtgctgacaagcaggaaacagtcattcttataagtatgtgctaacttcttggngaagggttcttttcactgtgggttgagaatggttgatgctttagaccgacattagctaaccgtaagcttcaagtttagtagtttggcttctg

SEQ ID NO: 412001 - DNA, 414 bp, Homo Sapiens
ttaagcacttgaggtgaaatgctaaaccctgagaggatgagactatggagaagctatgacatgtgctgactgccatgcagtctgcttggcagaacgcgaccatgcatcgtattcactaggggaactgttgcatgtgtacacactagttagtctgatcgcatttgctgtgagctagagtggtacagctgctatctgcgcctgactctgtgatgagtaagttctattgaaccttgtgcagactactgacttattcagacaacatgaaggtgctttgacaggtatgcgatgactcttagacccaggctgagagatcgggacagttatccaggacagagccagtgacttcgctagattccactaccctgagaccgctatgacggacaccacacagccgagacacgactagcatcgtct

SEQ ID NO: 412002 - DNA, 406 bp, Homo Sapiens
ctaggaagcaaaatagttgctagcaccaaaactgctcatcttggactttaagcttggaggaacctgtagggctgtagcgaaaactatggtgacaatagaggctttatttggagttccagagctgcctctgagttaatgtgcaactgacctttggcaagtctgttggatcttcagttttctcctctgttggagataaatagagtttcttgcctgtcctgcagggctgtgatgagagagtgtattgcagtgagtaaagtgctatatggtgcagaggatgatttatccaggtttgtctgaccagtccttttaactagggagatggcatcaagctagtcccaacccacaagtatcctcactagcagcagctgcagtgctcagtctagttccataggagtcctttagagtg

SEQ ID NO: 412003 - DNA, 409 bp, Homo Sapiens
ttctcataaagagcagcagcctgcagggtagcccttctggtaggctgggaagcatagcctctgatcagaagccgagaacagatacttggagataagggcaaagggaacaggaatttatgctgagcagagtggctgaatatgcctatttaataaactataagaggagtcatgaatatttatgaaaggagaaacacacgcatgtgcaattgagatttatgccccattcataggtcccatgtataaaatacagcagcattagcattattcgagggtggagttttctgccttccgatgtcaaaaggtgaggcagaggatatgacccttactgtgcattatctgtagcacaactccatggtcagtggtctcttatcaggccggcggcactctcagatagttggttactgacgtg

SEQ ID NO: 412004 - DNA, 429 bp, Homo Sapiens
  misc_feature (320)..(320): n is a, c, g, or t
  misc_feature (409)..(409): n is a, c, g, or t
tatactgattttatggtttcaacatttctatgaagctaatgcccatgtccctactctagccctgacttccttcctaaactccagtcctcattacaaactacgatatattcaaaaccaattcattttcctcttctaccaatcacattccttccataactgctatataataatttattgaacacttacaacattaccaggtattatgtattatcaaattaatcttgtacaaaatcatctccatagtttctcttttccctcattttacaaattggggaaatctgaggaattaagtaaaccttaccaaggttaccccagcgcanaataatccagaggatttgagtttggttaagaacaatgtcagtgaactcaggtctgactccaatgtcatcaacttttccacaaccctcangcttactgttcccttttgct

SEQ ID NO: 412005 - DNA, 285 bp, Homo Sapiens
tatataattttataatatggtattactgtaattttatagtaagttctaacttaaaacatgtaaacttaataaacaagagtaaagctgttcttgtgaacccatttaaattggttatagatttaataacctcaataccaaatttatttcaatattttatttaggataagcagtgccgagaggatactaattcacatagataaaaatgtaatggtctggattttacaattttacataaaagaacatttgcagtctgaatgcagaaaggaggtggggatgttggtgtag

SEQ ID NO: 412006 - DNA, 435 bp, Homo Sapiens
catctaacattaggatgagagactaatatattttcagatactttcagcggacggcgcactctgtatccatgctatgaaatgacctaatctcaagtgatcgacgaatttgaataaagattgagcacatacttatgaataatgagaaccgccatcacagatcatgatgtgattctatacgctagattggcacagtagggaagcagagcacacacagatgacatgcccgccagacggatactgaggaccctgattgagagtacagagaatcgcgtgatatagagatctgatgaatgagcctggtcctgcacagaggggagatcgctatgatactttctctgcgctggatgcactggacttagtctgctcaggctgttacatgaatgtaccaggctgtatggcccatatacatcggatatgtatctcatgcgtccttgg

SEQ ID NO: 412007 - DNA, 430 bp, Homo Sapiens
agactatcagattctaataaattgtgctttttagttcaaggtttaaaagaagcttgtggttccaggcaatggtcaaatgtggtcagttgttagggctaaaattacattaatgacgttatataattttatataatgaggaaaacagagcaagaaacatgtaccttttattatctgcataagcaaagcaaacatattaatggcacaaattttacggggcgagagggagttgggaattgggaaggagacaagttctctttattctcacacatggacaataaatgaaattacaattttcccttgatttcttctctacatgaaagctgatcctggatatacctgtcactgatccttgttctcagcttagtcttttattttctatttgactctgtggtgacattgatgagctacttcatcacttctctattggtcc

SEQ ID NO: 412008 - DNA, 410 bp, Homo Sapiens
tacaccagttatataatttacacttattagtatacaatggggctaggataaatttcaatagaaaaggtctttttttcaagatagtttattcttattttcctgtcaccttcctcacttaactgtcgggttcagcaaacaaatatatcaagataacattaaataccaataaaacaaccatagcatctgaagagaaatgttcatgttgaaatttagttttcatactaatttcatcctccactacattatataatgatattatgtatttcctggggtagtggggatactctgaggggcctgctgctgtgtgggtagaggatagccatagtacagccagggaagctgcccaaggaacagaagctgaagctgtagaatgatcatgggtgagaggttttatttagtctgctctgttt

SEQ ID NO: 412009 - DNA, 280 bp, Homo Sapiens
tgtgcatggaagggcactgccaatcttccacctctatttcttgccattcttccccttgcctaccacattctagcaacatcaacttgtttcccatgtatagaatatccctagaactttcctgtctctggcctttgcattttatattgtctggaacttgctttaaccagctcttgccacagttgacttctcagtttcctccttctcagaggccttctctgaccttcctaagtgccacccaccaccaggtagtctcttacacatcactctgttgattttcttc

SEQ ID NO: 412010 - DNA, 410 bp, Homo Sapiens
  misc_feature (86)..(94): n is a, c, g, or t
gctaataattaaatatggggaaagactcctgcaggggtatggtttacatttattgaaaagattaagctaaaatattgggacacaannnnnnnnnaaaaaaggatatagtgttcttaaatagaagatttcagcaattccacacatgaaacaagaaggtagagacaaaatatttatttatgtgactcattttgtaacattgaagacatagaggttgtttataaaaatgtgtaagttggtaatacaaattaattaaaacatacatcagcctatggtgaaatgagatgagagctgatggaaatggagtacagacttcccttcaaccttatttggaattttaaagaatattatgttcctttatcgtcttgtgtagcatatactttattatagtattatactgatgactctatcgc

SEQ ID NO: 412011 - DNA, 674 bp, Homo Sapiens
  misc_feature (598)..(598): n is a, c, g, or t
  misc_feature (624)..(624): n is a, c, g, or t
atacatatagatttgttctaattcagaaggtggaagcctcttaattattaggatcctatgattaagattgaaatggtggtgttgtttaagttgcatgctatgaagttagaaaaacctttgataatttctttgagtgttgttccaataagtgacaaaaaatatgattactgcatcttctgtcctttatgtattcctaatttattaatcttttcctactttttgttgacagccaagcaatttattacatagtagtatgtattgcctaatatgcaaatacaactatatgaggcagtcatatttttttaaatagaatccctactgtttttgtagtggggaaattggtatagctgtctttaaaaaattgcagggaatagtatctaggcatgacaatataaaataatatgaatttgtgtttttatcttcagcttacaccttttgcccttattggtttagcttctggtgtgaatacaaacataagagcatacgatgactgtttttaacgaaacttgagaaagattgatgaggtggtcatagagctaaggaccaattttacccacataaactggtcacctttatacagtaaaaagaaagcatgcanaaaataagttatttcattaagcatgnttaccataaatgcctggtatgttacacaaatcctgactgttgcgtttttt

SEQ ID NO: 412012 - DNA, 218 bp, Homo Sapiens
aaagagactaaaatatgcatttgtgcttttaactctgaaaacctgaatacctattcaactgttgattctgagtatttacagaactttatttcttctttggacatgctttcgcagtttttacctaatgtatacacatttttgccttgttcttaataattaaatatctgagaaaaagatattcaaaaagtggttttttgtgcgtactcatgataaacagt

SEQ ID NO: 412013 - DNA, 549 bp, Homo Sapiens
agacctcttgtaaccactcactagctactgcctatgtttgcttaatgccctgggacaacaatcatcagatggactagccaggcctgtgtccttcccttcagggcagcaatgtttcccaggccccaggtgggtccagatgtgccatccaggagtcagggattacagtcaaacaaccttaggagtttatctggtgttcttttttactgttctgagctggcactcaaatgacaagacacagtcctttctactgttcccttccctttacaaaggcagaagagccttaccccatagctattgccacccctcaccatggggcgtactgccagactgctgccaatgttcccttaaatcccaaaggctctttattcagcttttggtgaatgttgcttggtctgggactcacctttcagggtactgggttcccctctgcttcagggcaggtttcagaaatgccatccaagggtcaggtcctggaatcaggaataccatcaggctacttttgtgctctacactcctgtgaccatgctgtacctgccagcgtctcagggc

SEQ ID NO: 412014 - DNA, 422 bp, Homo Sapiens
cattgattctgagacaagaacaatgaatcactgagcacaaatgggttaatctggaggcacagcctctagtgttgctccagattcaaactaacatttgatgacaatataagacattcatctcttgtgaatctattggttagcgtgggttttaatttgatgcaatagttataagccacaacagatgcaggttttcagagaatcagaaatggagtaagaatggaacactgcatgttctagatcacaggccatttatgtatgtatgtatccctactataatgctgatgatgcttacataatttctttatatgtagaacagatacttcaaatttcagatagatgatcacaccaacacatggcaaatgttgtatttctgtccatttttggcatgcttggtgattcttcaacatggaatgaccatcgtt

SEQ ID NO: 412015 - DNA, 191 bp, Homo Sapiens
ttcatttactctccctaacaaatctacgtactatttttaatccctgttccaaagttggggagaccgcatgcttacattgttaattaactagtgagaggcagaccatgaggcctaagtttgcagtcccttgtgagaagcaggcacctagtgtctctgagatgcgcctgtgtgagccttctacgtcccttttt

SEQ ID NO: 412016 - DNA, 422 bp, Homo Sapiens
tatgtttaatgttggggaaaagattttctgaggacacaccatacaattgttgaggacagatactttttacaactaactgtcttagcctgttttgtattgctataacaaaacatccgagactgtgtaatttataataaaattaaatttttttggttcatggttctggaggctgggaagtccacaatcaaggggccacaactggggaaggccttcttactgtgtcattccatggcagaaggcagaagggcaaaacagagcaagaacaacagagagcaagaggggatcacacttacttttataggaaactcactgccacaataatgacattagtccttttcatgagggtagatccctcatgacctcagttcccactaggccccactttcctactgcatttggaattaagttttcaagtctgctct

SEQ ID NO: 412017 - DNA, 434 bp, Homo Sapiens
tcctcaccattcagagcgggggatgcacctgtgtgccgatgtctgcgccatcgcgcgtgataggagcctgggccacccagaacgctggcctcacccttacccaagtttcagtatacccattctggaataggacaaatctgcagacaaaagcaaggatgggaataaaggagctgaataatgcaaagcacacactccatttaattatgtgcagagagaggacttatctatttaagtccatgaaatattcgcacaaaaaatcatgtattgtgccacacaatagtcacacaaattgccagatgtgacacatgattcgattacacatcaaatacaatcctagggctacaaactgtagcaacaccgttgatgggctatgagcttgcgctaccgtgagacccatttcggccagcttttacattattactatgcgcagacgc

SEQ ID NO: 412018 - DNA, 282 bp, Homo Sapiens
catcaaggcgggcacaaaccctttaataagacagacgacaaaatataaaaccggggagaacctaaaggaaaacacgaaaatacaaaagagagagaggaccccgaaacacacacaacgatgaactcaaccttacccaagattaagaatacccaaacaggaatacgacaaatatgcaaacaaaaacaaggaagggaataaaggaactgaataatgcaaagcacacactccattcaactaagggcagagagaggacttatctaattaagtccatgaaatactcgc

SEQ ID NO: 412019 - DNA, 422 bp, Homo Sapiens
tgcaccaccttggcttcctgggctgggggaaggttccctcacatccccttcggcatgaacggcctcggctttcccggtgggtcagtttaatcactgaagccgaagcacagggttgattgtacacgctccccgccagccacaggggctgacgactgcctgccccgtgaaactccagtggagacgtttcagctccacaccattcagtatgggagacgccagccccacggcgctacggtgcaagcagataactgaatttcgaagtgtaggttgcgttcaatttgaatctgcttatatttcggtagccccatggggcggatggccacagtttcagtgcagatgttccggaagcctccagcacctgcagctcatagacagctctcgcccaccttctcccaagaccaagccgcccgttcagtccagtg

SEQ ID NO: 412020 - DNA, 615 bp, Homo Sapiens
  misc_feature (406)..(406): n is a, c, g, or t
  misc_feature (518)..(518): n is a, c, g, or t
attctgtgtgttctgccttctagtactagttatctgtgtaacccaacttctctagaactcaattgtctcagttgtttttttctagttccaaaattctacagattttcaaagcataaggatgataatggcacattacttccttcactggaccatttatttcttgagtggaaaggttccaaccaagatattaactccacagagaatagagtacaagttaattttaaatcttttaaaataaatacactctcaagaacataacttgattttagaaaagataacagagtgttttcaattaacaggaatgaccaaggcaaaacgtccatctacttgcatcagaatggagatgcagatgcagataatgaattaaagggactcaaagaaggtcactattctgccttgaatttgntttcatggttctctgagaagtgtctagaggtgagaaagtcaatttaactgattattttctaaaaatagaataaacagaaaattttggttaaaaaatattttcttagcatagntaagtacgacattttctatagctatccacagtactttaagttaccatgtactgctagaaatttgagtgaaactttagtttatgtgctttggatggtg

SEQ ID NO: 412021 - DNA, 655 bp, Homo Sapiens
  misc_feature (594)..(594): n is a, c, g, or t
attcaatgattttttggggtgaatatttgggataatgacatttgtttgtcagctattccctttgattgatttaggtttgttaattctggtcttagcttaatgcttattttattaacacttctgtgtgtcagaagactgcttgtttcaaaacacattgaatagtttgctttgcaaataaaactatagtcctggaacggttttatgattttgatatcctaaaagtttctaatgagtgcagtagtagtttttgaccaggtaagcgaatatttggtggtatgttcatttgctggttcataagcttaggcacgtaggataagtttgtgaccataattatgccagtttcctagtttgagcggttaaaatgactttgcatttcaaacacagtatttgaatcattatacatgtgattcattagagagataatagtactgaggtagcatatgctggaacactttaaaaataagctttcagatatgtcccagtatcttttttttcctggcaaatagaaattgttataataatactctttcaggatcctcttattaagtgccacctaataagtttaaaatgatctccaaaatgtcactaacacanatagggaatataacagaactatacaagcctttgcctgtcctgggtcactagagcatttctt

SEQ ID NO: 412022 - DNA, 670 bp, Homo Sapiens
  misc_feature (501)..(501): n is a, c, g, or t
  misc_feature (573)..(573): n is a, c, g, or t
agcttcttaaatataaacttaatttttaatcttagttacaatattttagagtacatttaaaaattgtattgactaggattatctttatttttgcttccattatgctaattgtatttgattaaatttagagagatttaaatattaatgtgtttttttcatattataaatatgaatgtttggcctctatttcaaaatacacatgaataaaacattaggtttcctctgaatggcaatgttaaactgctctaccgaatggaattatgatctgtgaatatagagattatatattgatttaatttatttctggtgaaatcttcatactaacatcaataaatatttcctggcaatattctcatccttggcattttattgttctcagttcaaatcctcaagaagattttaaatgccttgtacctatgtgcactgaggggatagggaagacagtttggagatgtgaagaagttagaaaaatgtaaacaggttagggctggagaaagtggngaagctgcacctttaactgatgtcctcctaagactgtaacaattgctcctttgcagtcactgaaggctacanggtacaatatgtagtgaggctcagcaatcagtatttagtaaaagacagagaactatccctctttagtaccatcatttgctgagtggctattaccgcc

SEQ ID NO: 412023 - DNA, 672 bp, Homo Sapiens
  misc_feature (503)..(503): n is a, c, g, or t
  misc_feature (645)..(645): n is a, c, g, or t
  misc_feature (659)..(659): n is a, c, g, or t
ttccaaaaacaaaatatctactggtatcatcagctttagccctaattgtaaaggatcaaggataggaaaatgttgagcttatcaaataccacttaggtgggaaaaggtaattattttgtttcccaaggcaaacacaaaaagaaatttggcattagaagatgaaagtagataatttttaagttaccaaatcaagatgctgtttgcagaaatatttggtccacagtagatgattcatttaaaaaatacactttacctgacacagtgcaaaagttaaaatgatttttattttattttgcggtttagctttaatacaacctgctaaaatggcacagaatcaatactgcaatgaaaaacctctgtttctttgttgagtctggtgtctgtcaataggtttccaggggcatctgatcattatttaagcttaagctcaattattcagaaaatgccctgtggccctagcgtcagcattagcagcaagaccttactaaactgctcagaactgngtgaagagtttcatttcccaactttcagggtgaaatgttcaaggcatctgaggaaggatagtgtaccacattaaacatgcacagtgcatatgcctgttttgtaatgggcacaatagtattatatttaactcttggaatattntcaccaggaagcancaggctgcatttg

SEQ ID NO: 412024 - DNA, 452 bp, Homo Sapiens
agtgactagttagtgatggcccaaagaccgatagagaaggggagctcaagcagtcttattgggcttgtgagatgaaactcggaattcatgggccaccaagcagaaagaaccccgataaccatcccaggccttccattgggatccccaaagggctacagcctggaactggaggttgaaccagaatttgactcatctcaaagacagaagcccaactgtgaatctgttcaatctctaattagattaaagtgatatgcccatattctaaaagtgatacgtcacttccagaggcaatgggaagtcctctagagaaaggtcaccatcagcaacgtcaaattatctcctgttcttgtatacatgtccagcaatccattaaaaaccaaccaaacgaagcaggcaagccaggagatatgaccaaatgaccaaaaaggagaacatagaacagtagatccacg

SEQ ID NO: 412025 - DNA, 259 bp, Homo Sapiens
  misc_feature (44)..(44): n is a, c, g, or t
ttgttccttggggcccaccttcattccaccgttgattacccagnccgtcggtttgggattcatgagccaggaagacatgcatgtagataaagtgactcacctgcctcctctgttcctttctttacctgccttctctagctacaagatgcctccattgctctcatggtcctgggttcaagtctcagttatctgtgcgatttaagccttatgaccctgtacagggagcactttgcacctgaaggcctggctttctcatttg

SEQ ID NO: 412026 - DNA, 450 bp, Homo Sapiens
agaccctttgttgtccagaagtagtgggcatttcatataagtttcttgaaaaatgtctatgggatattctttcttttattatgttttaaaaacattctcattaatattctgtgacttgtgtctttcccttgttctcttgtttaaggatgtaatctatttgaaaaataaaaacactttcatgcttgcaaaattactttaaatcatttctaactctttattataacaattagtaaatcttgaaaaatcattaatagcaatttttttacctatgtcaatttttattgatattgccaacatgatgcctgaaaaacttttaatcagaatgtaactgcattattgtaatagatatgtaactagccatttgctttccatgcctgcaaattaaataggcttatactttgtttacaagaagttcggccttgacatgctattccagttgtcatatccctt

SEQ ID NO: 412027 - DNA, 452 bp, Homo Sapiens
tcattatgtccgcaatgccacattcttcccaaggagctctacaaaactctactgggcctatcatataacaccttatgaccttccataatcacgccctcataatcattctccttatcctcttcctaatcctctattcccttttcctaacacttcacaacctaacctaatactaacatctcataccctcaccaaatacaaaccccttcaactatcctccccgccatcatcctactcctcatccccctcccatccctatccatcctttacataacacactacctcaaccatccctcccttaccatcaaatctcgccaccaatcccacttactctactactacacctacttctactcactaatcttcaatcctacatacttcccccattattcctataaccaatccaccttcctactccttttcttctctactccattacctactctcccccttct

SEQ ID NO: 412028 - DNA, 446 bp, Homo Sapiens
attactcagagttcaggtgcagataatagaaaccggtggagcaattttgagcagttgtaatataggcatatggtgcggataaacctgtgggaaggggtggaacagcaggcttccggtgggccctccagaaatgattcttaaattgacacttcaggacctatctgcttcttggcctcaggaacacacaccttagccatgatctgtgtataaaataagcaagccaactcagaaccaagctgcacctgttagattctttttagcaaaatggagtcatagtgcctggcccttctctccctttaattcaatagctcaaatcttggaagagtgtatctgattggagcaatctaaatcacttccagaactctaactgcaaggaatttgggggaaatttctttagcttttttaatctgctattgttcaggaacgaacactaaggagagtggttg

SEQ ID NO: 412029 - DNA, 221 bp, Homo Sapiens
ccttgaataaatctttataatttaaaacacaaatcatccaaagaaaggactcagttattctctgagtggataagtcaagagcaaactagaagagcattctcatctctaccccggtgaccttcatttcagcatttcggtgctattgcttccccatttcccagtggcaggtctgaggcatcatctcaggccccttagtcaaaaacttgtcctacatcagtgcc

SEQ ID NO: 412030 - DNA, 655 bp, Homo Sapiens
cccctacttaccctccttacctccattaaggactttctgctcccagatataaggaatcagcctaggatttgaagcagtacagctctacatactgagttaaatttcctattttggactatcctaaaaatgtaccactgtgtatagtactacttttgtaagaaaatgagttcctcattccaagccactatttgctcggctggcaatgccctgtagactctggtatgcagtgcccatagtaaagctcgttaaacattagttcttagaaagaaataaatgcattgaagttcttcaatgtaactatattcctgaacaaaaaactaaccaaattcattctaatatgtgtaatggccaagtttagaccagactgtgattaaaacattcattcgtcaactcagaagccacctttgatatagcaactacaaaaatcttctcaatagctggaggccatatgttaaagaaacttgatgaaatattttcagcagtgaatgccagcttttcacatctaggactgtcagaatgttgagttctgaaatttgatctaaattcagtttcacattaataaatgaaaggttatttttctgttactgacactgtacacaaatggcactttcaaatttgaccatgttccctggttaaattttcaaattgttgtgtc

SEQ ID NO: 412031 - DNA, 451 bp, Homo Sapiens
aagaagtctaaataaatgacacagttcttttataaaattggtatcatgtgctttgtgaccgtgaaaagcctgtcattaagagggtacttaaaacagtaaaaaaatacatgagcagagattaggtcaaatcattaatcaaatttgctaactctgcccaagaaaaccctgcaaatggtatcacagaaatataaagcagagatggtcattatcaagtagggatacttgatattagttcctttataaaacaaaggaaaaacttatagaggaaatttagtgctttggatgaatttaagtggataaaagaaaccactcaaacccagatctttcatcacttaataaagagatctacttgcgatgctttgtgatatgttcacttatcatcttgtctccatcatttggggatgatggtcagtacctgtgattgtttgtcagtggggacactgctggcggt

SEQ ID NO: 412032 - DNA, 453 bp, Homo Sapiens
caagccatcttcctctcatagcttcattttcttggtaagatgaaacaattatactagccccgggaggactatgttcgagtgagttctagtatgacttcataaacttgaaaggactacacaaatgagatgttgcaagcccgtttctcttcctggctctgtgcttcctgaaccctatggctagaggggagcatggatccccttcttgacttgctctgtcataaacatgatcttaaacgtgaacatgctcactattctaccttcaaggaaaggtcagcctaatgtagggaacaagcacttctgatcctttctcacctgactgtgctgatacacaagctctttggctagtgacagtcacctggtcagccttggaggatgttactgcgactgctgtctcttgactttgatgaggacagttctgtgctcaagggagtgggggtccaggcattgtgctct

SEQ ID NO: 412033 - DNA, 680 bp, Homo Sapiens
  misc_feature (334)..(334): n is a, c, g, or t
  misc_feature (480)..(480): n is a, c, g, or t
  misc_feature (585)..(585): n is a, c, g, or t
  misc_feature (666)..(666): n is a, c, g, or t
tcctgtttgtctgaaatttggaatatgaaccacttttgctttttgagaaaatttaagctattatccagtaactcgtctggatctgcactgcagtagcagtgttgtggcttcagtagccatctgcttcgagatggaaagtctttggtacccatggcagtggaggagatagggaatggctttaattatgtctgccatcacacagctatgtgaatttgatctacaactttaaacagaaaagagaaatttacagccaatctacagtctatattaataggatgtagccaatcaatgacatttccaaactaatgggctataattaccttaaataatgcanaaatatttatgcaataaagaaaaattaagtcactgtattaaaactttctaaatttatacagcattctttcacataatttgtcatcatttaccaccaagatgcttggacggagccactgacagataacttggctcactcaaactggntcagctccactcagggcagacagtttagggaagtgagaaaatggcagggtctttgcctgttcccaaatccctactgatatcctcacaactggaagttggaagcanggaagcaaaacctttccctgaagacagagagagggctgagtgaagctaacctttttaggaagatggaaattcaagtgtaanataatttataggtt

SEQ ID NO: 412034 - DNA, 682 bp, Homo Sapiens
accatacagttgctttctttgaaagaaggatttgtcaagcaaactaatcatatatgcaaatcaaaaggcgactatttaaagctactcaaaagaataaactgattaagcattctcaagtacatacaccctatattaaagcatctttacccaacatatttgtaggctcattacaaattgtctattaaccagtcgttccctcatgggactgtagaaagcctttctttgttgacctgtttcctgtcactgtcaatacttgaatgcaatgacattgtatctcttttaaaagatttcataattcaaacttttcactaattcagaccaagcttccacaaattagtctgaattaaagaagtttggctgtactaggttgacccatatgaaattggtgctatgcaaccattttttacctaaaaaatgacaattttatatggttcaatctaatacatttcttttctggtgcccctttccaaggaactaaaagcattctttattcccatgctttcctcctatggtattttaaaaataaaagcagaagagtgggattgactgccacagcccccaaccacctgcccctcagttcacaagtacagaaactgggagatttgacagaaagaagatcattccacaacttctgctatctttgctgtacagagcttttacattcgatgtggtcctcctgctt

SEQ ID NO: 412035 - DNA, 148 bp, Homo Sapiens
gtctctttgtcatatatgtgtgtttgttataataaagaataatctggttttgtcccaggtgcctagcataaaacatcagaagcctttagaattttgtgttaggggtgtctctcatataacgaggtgaaaaagagaaattacttctcct

SEQ ID NO: 412036 - DNA, 608 bp, Homo Sapiens
  misc_feature (507)..(507): n is a, c, g, or t
  misc_feature (516)..(516): n is a, c, g, or t
  misc_feature (586)..(586): n is a, c, g, or t
  misc_feature (592)..(592): n is a, c, g, or t
ttggtgttggatagagctagtttcaggaacagtgaggcaagctaaagcctctttcctcaccaaatggcatgctgggagaaaatgaaacaatggtggagatattgtagaactgggaaaactggcacttttcagaagttaaaatatataattaaaattagcagattctcaaaatcagttttgaactcttactgcttatcagcatgtggtaattcagttggcctcttcaaactccagctggagttcaagcttcccaggtcacacacgctgccttcggtgaggtccatgatttatgtctgtgtaacctctagggcctactgcagagccattgggtctctggaaaggaaatataaatataccccctgcccctgtgacatacacataccaccccaaaaccttttatctgtgagcttcaaacatttgtgttgacacctgttaggccagctgtaatatctttacaataatgtcttcactaataaaagacaaaattgaacacaaactcagatgttntacctttgntttgctatattattaattatgtctattcttttatttattaaatatgttttgaacatcatatacatgctgntctccnttcttggagagtaggc

SEQ ID NO: 412037 - DNA, 670 bp, Homo Sapiens
  misc_feature (223)..(528): n is a, c, g, or t
  misc_feature (531)..(531): n is a, c, g, or t
  misc_feature (572)..(572): n is a, c, g, or t
  misc_feature (574)..(574): n is a, c, g, or t
  misc_feature (577)..(577): n is a, c, g, or t
  misc_feature (580)..(580): n is a, c, g, or t
  misc_feature (598)..(598): n is a, c, g, or t
  misc_feature (614)..(614): n is a, c, g, or t
ttctctcccttaataaatatattgagcattccaaacatattttaaaagactgagattgttgaattgttttatagtcttgtccttaaaatataaattagtgagtttattatttattctctctatttctcccaagcaaaagaaaatctcccacaatggcaaataaattaatataaggtattttaaaaatattttgtgtggttacataaatcattaacattgatannnnnnnnnnnnnnnnnnnnnnnnnnnnnnnnnnnnnnnnnnnnnnnnnnnnnnnnnnnnnnnnnnnnnnnnnnnnnnnnnnnnnnnnnnnnnnnnnnnnnnnnnnnnnnnnnnnnnnnnnnnnnnnnnnnnnnnnnnnnnnnnnnnnnnnnnnnnnnnnnnnnnnnnnnnnnnnnnnnnnnnnnnnnnnnnnnnnnnnnnnnnnnnnnnnnnnnnnnnnnnnnnnnnnnnnnnnnnnnnnnnnnnnnnnnnnnnnnnnnnnnnnnnnnnnnnnnnnnnnnnnnnnnnnnnnnnnnnnnnnnnnnncanaacaaaaaagttatataaatcaattaacattaatttcattngnttntgntaggggaagagagaatgnttaaatggctttaggnaaaaagtctcttttcttgctgtaacagaaaggcagtgttgtattataggtagacca

SEQ ID NO: 412038 - DNA, 792 bp, Homo Sapiens
acccgtcaattcgggcattatggccggtacctgttaagtctctacttgatgtttgtcttaggctaagaaaaagagaagagaaagggaatgagtattagcatctggattctggggctgcttcttggcctctgtgagaatccactgtttcacagcaatcacagcctagaaaactagactttatggagtaaacaataggtatcattctgacctgggcttcaccacaatcacccactgaacactcccaagagaaggttgttaccatttatttatgaaaataccaaactatgtgatacatactctattagaagtattatggaaaatagagaatatgtctacctggccagagaatagaggatctggatcacaaaaaaagtacaaatatttaagcagagacttaggacaaatgggcattcaacaatttaggacacatgggcattctacaatttccagagtgaagtaaacattctaggcagataaatcacacatgtgctgtcttaggaatgtgcgcttattttgaaagcatccctatcaaatacgtgctaaaacttgtgacaagatcccaatcctagagtacttacaggatacacctaagtgactgaagatgcaagacaaatttatattggtgtatggatatagcatcttatcattaattgatagatctaaaactaaacaactcttcctttgtacaggtagtctttcgttggatttgttgagaagatcttcaaatcaccaactttatcttatcaagttaagttcttacaatgaatccatgcacttaagtatttttcctct

SEQ ID NO: 412039 - DNA, 680 bp, Homo Sapiens
  misc_feature (568)..(568): n is a, c, g, or t
  misc_feature (583)..(583): n is a, c, g, or t
  misc_feature (631)..(631): n is a, c, g, or t
  misc_feature (635)..(635): n is a, c, g, or t
  misc_feature (637)..(637): n is a, c, g, or t
  misc_feature (650)..(650): n is a, c, g, or t
ctatttgctaacggcaggaattgattatttcacactgcacatctaattaaagtggagaggagtaatgagcagtgaagttataaaatgaatatgataatcaattaggtttttacttctgcttaaaataatttagaatagcccatctactgtatattgaaactaatataatcagtttaacagaccttgatgcattcagagagaacaacagactgccaaatcctgcctatctcctcgtaggacattatcaaaacaatatcttgagccttggtgagaaaaatcacaaaaaaaccacattaggcagaacatcacttttccattatgtcatacataccaaatgctttctggtcctgcttatgtttacagaacaaagtgggtcaaaggaatttactgagatcataaagggcaagataaatgctggagctgagcaccccagtagctgctagacttgatggaattaaaaatggttaacctatgactcaggaaatcaaccttttagatagttctggaacactaagtgtggaaggacattcatttaatatagtacagactaagaacagcactgtgaganttactagatgtactnagaaagcatggtaagatggagctagtatgtgcacatgtgtgcccttgngtgngnatgtgtgtgctgngtggactatgtggctctattggggtggacc

SEQ ID NO: 412040 - DNA, 443 bp, Homo Sapiens
aggtggcagatgtcaacttcaacgtaagaatctgtcttgtaagaggcaaaggaggcattctttaggctgcacaggaatgggaggctgtgatgattccagcaactggaagtggggcagaaagggtaactccagacatgactacccgtacttcacagctaccaagaggcttccacacaacaggtcacacttactttctacaacttagagaatatgcccttcgtgtaatttgtaaaattgttacttttcttcttaattttgtaattcttacatgggcatattcattcaagttttctgtcaccctttcatcatcctgtctccttatttctgcctttgaataagttggttcgtttcggaactttaaaatgaactggttttctttttctttcaagaagtcaaggattatcttttccattagctactttatacactactttagctggttc

SEQ ID NO: 412041 - DNA, 131 bp, Homo Sapiens
acacatattatcacattatttaaaaaggcccaatgcttaaatgtaggcctaacttacaaaactctttgagtaaactaagggacttattatcttggatttgcgatgaattctttgtatgaccccagcaccgt

SEQ ID NO: 412042 - DNA, 100 bp, Homo Sapiens
tttcatctctccattacacctgtccactctgccatcactcgtcagccgtcattactaatagataaattcgcctttaaatgaacttaggaagcctggaaag

SEQ ID NO: 412043 - DNA, 691 bp, Homo Sapiens
  misc_feature (489)..(489): n is a, c, g, or t
  misc_feature (491)..(491): n is a, c, g, or t
  misc_feature (501)..(501): n is a, c, g, or t
  misc_feature (533)..(533): n is a, c, g, or t
  misc_feature (554)..(554): n is a, c, g, or t
  misc_feature (579)..(579): n is a, c, g, or t
  misc_feature (588)..(588): n is a, c, g, or t
  misc_feature (592)..(592): n is a, c, g, or t
  misc_feature (633)..(633): n is a, c, g, or t
  misc_feature (640)..(640): n is a, c, g, or t
  misc_feature (646)..(646): n is a, c, g, or t
cctatggcagatagcaatgggcatctgtgcagtctaattgtagtaggcaaagttagccacatcagatacaattttaaattcacctttaggccaattttttccctaatgtcctaacctaatgtctctccagtcctggatctctaggcccagactactgggttaacttgccttagccagagatctttattttgtgagtgaccccaaactcaaacaagcttgcataaactggagagctattggctttcacaactgggaatgacttgggaggcttggagaactgaaggaagagttcctgaccccagggacctggggatggaaatgagggaccctacctggcaggaccttctctcctctccacttgccaggttttattttgtagacaggtgaccacataaggcaggaaagatagtcatctgcaacccagaacctgcctccttgtatcttaggatcccagaggaaaggagaacaactctcctcccactttgattngngaaatttggnggaaaggctccagttggcctgatttatgtggnatgcccacctcttggaccagntcattcactgtcaatcattcaacanatatgagcnaaanatgatactgggcctagccccatggaagtcataatcactggngagacanacatanatcaattagccagcaagtgtggctgcacttgtggcggtgctttgc

SEQ ID NO: 412044 - DNA, 675 bp, Homo Sapiens
  misc_feature (476)..(476): n is a, c, g, or t
  misc_feature (583)..(583): n is a, c, g, or t
  misc_feature (601)..(601): n is a, c, g, or t
  misc_feature (630)..(630): n is a, c, g, or t
aggtgtttctctggcttctgctgcagagaaaatgttgcagagggagtggaaagtagcaggtgccggtaacccccaaccagctcccagatacttggtaaggcagatctcacatctgtagtattctgctagcagcagtgagttaagttccaggtcattttcgattagaactcaaaactgcctcaggccataagccttcctcagggaagtagctatcccagctttcaggccacacccctcccagtctaaccacaaagctggggcaccccagctcttgcactcatggctgcagcacacttccactcacactacccctgattcagttctggccaagggacttcatccccccttgaggtcatattgcttcaggtgggagtttcttttaacctatgaccactgcctgagttagttggtagaattctgtgaagtcccctgtgacacagaataagtggcttcccttgatccatgctggagactgngaatgcacacaaggctcttctcactgctgtttctccttttatattcccaccactgcctatatcattgccagcactgggtaagataaggggccttccctgtgactggnatttctaggttccccaantggagagtgtatatcctggaagcagtctnttccaactacacttttgagacttacgtttttgcctggctctggcg

SEQ ID NO: 412045 - DNA, 676 bp, Homo Sapiens
  misc_feature (385)..(436): n is a, c, g, or t
atactttttctggttgagtcagattcaagaaaagaaacaatttaagcagtaagggattcagtactgactctaccaacatttatttttgcttattcaatgcacaaaaagaatgatgagaaatcatttctctctagtttaatgttatttcccattttttatttcgatatatattccaacctgttaactttatttcttctttcctgtgatgatctcccccattccctcttctgcagcattttctcttcttgttattcaattaacaagagaccctaggataacaacctttcttctttacagactaattgttcttttttcttagacataaaaaactagatgggcatacaaatatacatcaattgagttgtgaaggttacgattcactttnnnnnnnnnnnnnnnnnnnnnnnnnnnnnnnnnnnnnnnnnnnnnnnnnnnnaatgcccatcttcaattttacttatctttctgttctttagagataattagcagtgtgtcactttttacactcaatctccaaggcagaatctacttcataattagtttgaatagttatgccaacctgagcagtccttggcagcagtttagttaggtactagaagcatatggttaggattttggtcagtatatagcagaatcaatatgaagttgaagtaaatttaattattggtacccctgg

SEQ ID NO: 412046 - DNA, 402 bp, Homo Sapiens
taatattcttttatgcttcagaagttgatattaatctcacctattgggaagctaagcacaataattaaaaaatacactgctgattgtctctgcttatgtaaagaaaacagtgtccttgcttaaatggtgtattgcgatggggctatgatcgttcagaaagtcatgaatgcttaattctgtaccaagcccagtggaaccagttagttgaaactgactctttgcatatgtgacctaatctctgccttattatcagaatcccagaaccatgcaaatggggacagcacagcaaccctgcagattcagccaattattcccaaacagatcatccaactgtctaaaaaataccaacttttgtaatagcttgatctcattgctcctctgtatagatcaggtactttctac

SEQ ID NO: 412047 - DNA, 633 bp, Homo Sapiens
  misc_feature (463)..(463): n is a, c, g, or t
tcctggacttttacccctgtttcctattctctagtccccctcctgaaattagtgctgatcagaacagaagtttgaagaaactacctgaggctggagaaagtagcaccagaaaagagcagaaggaacaatcctcagagtaccagccccaacaagataaaattcactatgtctgacattcaaaaaaagttatcaggcctgcaaagaaacaggaaaatgtgatccataatgaggagaaaaatcaaatcaataaaacagatcaagaattatacagaagatagaattggtagacagagacattaaaacagttcttataactgtattccacatgttcaagaagctagaggaaagattgaaaatgataagtagggtcatggaagttattttaaaagatctaagtctaacttctagagatgaaaaatatggtatttgatatgaaaaatacaatggataagattaacagcanattaaacattgccaaaggaaagactaaataacttgaagacatagctataaaaacaataagaaatgaaacacatagagaagactttaggaagagcacatcagcgagccttgagacaacatcaggtggcctaatatatgtgtaattagagaccccggaggggagggtacgtt

SEQ ID NO: 412048 - DNA, 234 bp, Homo Sapiens
  misc_feature (162)..(162): n is a, c, g, or t
ggaggccagggaaatgtctgtgcctggatattcaagggagaccagctacggtgctttcaggggactcctccaaagccatgcctggctgtctccagttttcctaattgggaaatgagccgcccaaggtcagacactgacacagcgttatcttagctcacattntaaaaataaagatttcccctgttctaggtacaagagaataactgttccacgtgaagtatacttagaatagta

SEQ ID NO: 412049 - DNA, 679 bp, Homo Sapiens
  misc_feature (478)..(478): n is a, c, g, or t
  misc_feature (537)..(537): n is a, c, g, or t
cctcaaatatttatctattgagttgcatacaatggaattacactctttaagttatttaaaaatgtacagttaggttattcttgactatagtcggcctgttgtgctatcagatagaaggtgttattcattctttctatttttttgtacccattaaccatctccaccttcctcccaaaccccaccacccttcccagtgtctggtaaccattcttcttctctctgttcatgaattcaatatgttatcattctcagtctctatggaaaaaacacaggtagagagtagataccttcaatcctactttcctaagggttttctaattgtgttggggtggaacaggtgtacttcgttttgaactaaactaaattaacccaatttcttctgggtcactcttttatatacaggcctgacctactttatgaattccgacaacagtcatgagtgaatgtgtatgcacctatgcagtttgtatgtggaggnagaagtaaactaacatttaccaagtcaagattcatggcaaataattgtatttatttggnggacaagactagggaaaagcaaatgagacacttgctttaagctcaaaatttaagggggtgccaaaaaactcagtaatcacaacaaatcatagtttagtgcaatatttttaatctcaaggccaggcttggtggctcaccctgt

SEQ ID NO: 412050 - DNA, 604 bp, Homo Sapiens
acccattgattatccagttttccaaaaaataactaatgtgtaacatgtaaaataaaatccatgtgtaagaacagatgactaatacctcttgcatgaagttcttattcacttccaaatttatagattacaataacaatagcattattttatatatcattttatacaattctcaggtattataaattatccttgaagtatgtgttaacagtgataaacttttaataaattatattctcccccatgtcatctgcatttgcttttttgtattcctacacaatatttcatatccaaactgaatcactgtaatttaagacaatgtcaaaatctcaccacttttgctctgtctgcttaagacccagtgccaaatatccttggaaaattggcagagtttaaggtgaaatctatagatgttgatagagatcaatgtggtctctaagaagtagatggttatcttgctcaaagtcatttttttcacttaagaaatgtcacttccattcaccattataatcaatagtctttgtaagtgatgcaactagagacacttgagcaggtacaaacgagctgtccagttataactgtctacctggaatattatgtcctctcc

SEQ ID NO: 412051 - DNA, 681 bp, Homo Sapiens
  misc_feature (606)..(606): n is a, c, g, or t
acatcaacatccctgccctctgagaaacctttaagatcggtaatccaaccacctaaaagttgctagaaatacttatttctcttagcctgtgaactctaatagagcacaatttttctttagttgcacatctgtgagcctgattccatatagagcctaacatggaatcatgttttaaaatatgttatttttaacacctgtagtcaaatctcatttatctcttacaattggtttactttctattttatttgtggtgggtttttatacccaaattgaattggtttaaccactagttttgcttttatcacttggcttgtacccaaggaacataggtcgtttttcatattattctgagaaaaatgtaatcaaataaatctcttttaaaaattaatagaccattcaaagccaactagtagtggtttgcaagttatttttgatcatccgtgtttctacctttggttaatatcaaaagttgtttgtggcacaatataattcttgagcagaacagtggtcttctggttataatacttataatatcagccatctgtcctatatgaatttacacaccagagtctcagattctttactaaacacctacccatatttganatcagtgttaaccccaggttcatttgtttagaggaattatacttaatctgaagtagtattaatgggttgaactag

SEQ ID NO: 412052 - DNA, 316 bp, Homo Sapiens
gtttaatgaatgtagggccatcaaaatcctgatgagctatatagaatattttgaatgacccagggtgatatacctgactgagttggaagatgtagtcttaattaagaattagtttcaatttagtcagatttttatctgatacgatgccctcataggggagtttgttttttagacatcatttgcaagttgggtgcaagatctcacccacagattttcctatgataggccccacaatgcagaagcaacttgtataagagggtctgttctctctgtgtgcgtccacacaattggattgaattgttaagatgtgggattc

SEQ ID NO: 412053 - DNA, 494 bp, Homo Sapiens
  misc_feature (100)..(100): n is a, c, g, or t
  misc_feature (154)..(263): n is a, c, g, or t
agaagttgaagtctcgcttctgttgccaaggctgaagtccagtagctcgatctgggctcattgcaagctccgtctccggggttcacgccatcttcctgcntaagcctcctgattagctgggactacaggcgcacaccacattgcccggctaatnnnnnnnnnnnnnnnnnnnnnnnnnnnnnnnnnnnnnnnnnnnnnnnnnnnnnnnnnnnnnnnnnnnnnnnnnnnnnnnnnnnnnnnnnnnnnnnnnnnnnnnnnnnnnntgagccaccgtgcccggcccactcaggatcatttttatctataaggctcacatgcgaaaaggatatgttttaggcaaatgctttataataaacaactctgagaattttctaggacctgagctttcatgaacactgatggtgataatttgtgatgacttggcagacacagagatttgacatttccataaaatcaaatctgagctttattgtggtaagaactgacattgtggg

SEQ ID NO: 412054 - DNA, 660 bp, Homo Sapiens
  misc_feature (47)..(115): n is a, c, g, or t
  misc_feature (457)..(457): n is a, c, g, or t
  misc_feature (471)..(471): n is a, c, g, or t
  misc_feature (575)..(576): n is a, c, g, or t
  misc_feature (609)..(609): n is a, c, g, or t
gttgctgggaatcaggcctgagttcagaatcacagctctagtgatgnnnnnnnnnnnnnnnnnnnnnnnnnnnnnnnnnnnnnnnnnnnnnnnnnnnnnnnnnnnnnnnnnnnnntattttcagttatgaaaaagagctattgtaggtcatggctctactgctacacctacaaagtgcagagagcttattaattgacttgtctggggttcaacaacctgacactgacaaacataaatatttgttttacaagttgactggacttcagatattagcctgagaggtcggcaaagcttggacttcagatattaccctgagaggttggcaaagctactgccacaatcatgccattcttgtgggtacaagaaacatcaccaaacccaggtagtgggagagtgccctttccaatatatcctgccacctctctggaaaaatatgtatacaccggaagtttagcanaccacgttgcattnttctatttccatattaccatttaagaggtgtttaatctattgcattattgatttttaatcaattctaatatggtagaattgctttattatggctccctccattnnttgctctcttcagtgtaattaacacttcatgancatgttaatgtattggaagaattttatgagatcatattaactatattggtt

SEQ ID NO: 412055 - DNA, 269 bp, Homo Sapiens
ttaaaaaaactgttggcagagacagggtctcactatgtagcccaggatggtcttgaactcctggccttaagggatcctccctccttggactatcaaattgttgggattataggcatgagcacactgcaactgaccagagctgacttttgaagtcaggactcagtcctagtacagtctttgcaaatcttactgtttagatgatgtcttaaactcatttttctagaagtgctactatacatattacttgtggctgttggatactaactatt

SEQ ID NO: 412056 - DNA, 423 bp, Homo Sapiens
aattattataacaatagatagcaagaaacttggctttcatttgattcctctgcccagcttcttataaagtgacatccatcttatttctgtattacaccaaagtacaatatttatatacattaagattatgtaaagactaggatgctgtaatggtgtctggtatatatatccacgatacaatcatatagtacctccactctgaagacacagaatatgaattcgctttagtacctagcaaggagccaaagagtaccttacttcctatgtctgagcatttgaccgaacttaagaaacaacaccccagcaaccttgtcatttcaatttttcacacttttgtctgtatgtgttttatgtctcaacaaagacttatctccccaacccactgccacaggataattctctgtaacgctcagtctctctccc

SEQ ID NO: 412057 - DNA, 399 bp, Homo Sapiens
gcttcaacaataattgtgttaatgttttggaaaacaaacattaactaaaataaaagcaatatcctagcaactctcttgattgcctatgctttccccctaacaataccttctccgattatgaccaggtaaccaacactcaaggaaagatgaccctctccccagctcagtgtaaaatcttgaacagatagtaaattgattgaactaatctcacctatttgggagtaatcagtttaggagtgaagatgtgtttcagttccaacaaatgagacatgaggaaatcagcttctgggttggggacaggaggttcttcactcttgagagacttggtggagagttcaccagcagtgcaccacacaatgttgcatgtgcacgtgcccccgccacagcgaccatttgtgt

SEQ ID NO: 412058 - DNA, 399 bp, Homo Sapiens
aaaacatgaatctaaaatattcagcttgatgagttttttcaattgcttatactcaggtaatcaccaacccaaacaacacataagcatttcttctgccaagaaagtttctcccgccaagtaactttctccctacctctctacaatgttccataatccaaagcataaactttctaatttccagcactaggttagtttgcctatcattgggcttcatataaatataacatacaatacgcactcttttttgaagttttttatgttggtataatatgtataacatgaaacttgccattttaaccattatttatacaatttggtgtcatttattacattcacaatgttgtgcccatcaccaccgtctacctctttgtagctcatttcattttaccagcctactgc

SEQ ID NO: 412059 - DNA, 541 bp, Homo Sapiens
  misc_feature (48)..(48): n is a, c, g, or t
  misc_feature (79)..(79): n is a, c, g, or t
  misc_feature (89)..(89): n is a, c, g, or t
  misc_feature (114)..(114): n is a, c, g, or t
  misc_feature (161)..(161): n is a, c, g, or t
  misc_feature (207)..(207): n is a, c, g, or t
tgctgaagtctgcagagcttctgtcaaccttttcactgtagttttctngagagtctttcccttctcagcaagctccctntgctcttgcncttcttcagctacgtgttcctgtcncagttccaataactcctcattcctttaggagctcctcaatgccatcntcagccaaacccagattagagttgtttgccatctgaaccacagccntgttgacttttgcaacctcctcatccttggcaaatcctttgaaatcatggaaaaacctcttgagtgtcttcctccagatgccattcatacattcctcggtggcatcaccccaagcccaagctcaaagtgcttgacacagtaatagatgttgtaatccttccaaaattacatccatgtcttctcagggtcttcctcagtttcagcaacagcctgggcaaaagtcctccttaggtaatagtcttaaaagctgttataattccttgatgcattggttggatcaaagaggtggtatttggagggagaaacaccactttgatattgagatgaaaatgac

SEQ ID NO: 412060 - DNA, 620 bp, Homo Sapiens
  misc_feature (595)..(595): n is a, c, g, or t
  misc_feature (599)..(599): n is a, c, g, or t
gaaataatacatttaaagagagggaaggcatatggtttaagccaactccctgccacactcaatgtgtagttttcatgttttaaactatcaatgctcaatcattactgttgtgctggcagtcctttcttttgtgtatgtgagtttctccctattaaataaaccctctcttttggaagaattctcatggcaatgactataattacaacccaaagctgagctgtaaaatgcagtgatatgacagcttttgtgatagaaagggtggagaaacaatgaaagcttataattttctttgagatgtctcaaagtctgacagcagccccacccttatgatgtaaatctgcagtgacctaaagtttcaggaaagatgaagctagagagacatgccaagtcaccgccacattgaccaccagcaaacaagcaagaaaagattcagcataatgctgaattctctatgacttcttcaaatagtctggaatggtatttcctgacatttccgaatatgaggggttcttttatgtcacttttgttcttacttgagatgagctgttctttttatatccatcatttgaggaaatatatggtgataatatgcaantaanttattacttttgtgctatttc

SEQ ID NO: 412061 - DNA, 418 bp, Homo Sapiens
taattattcactaaatcctacagtatggtacattcagatgggaagatggtagatttgaactaaagtaataagaataataaaaggtaacagagaagatgggatttgaagtgagctttgaagactgggtaagattcaaattgttaacgatcttccaggcaatgaaaaccatctggagttatgcatggattcatgattcagcaaggaaatgagcaaaactcaaatgcagtagacaaggagtaatgggacagaaggttagatgggcagaggccagattatgaagcaccttaaaaagggggtaaggggtttaaatttgattaatatctaacacttattgaagcttaaaatctgccaggcaatgttttcacttttcattgacttaattctcatagctctctaaggggtggtattcttatctctt

SEQ ID NO: 412062 - DNA, 670 bp, Homo Sapiens
  misc_feature (589)..(589): n is a, c, g, or t
  misc_feature (600)..(600): n is a, c, g, or t
  misc_feature (607)..(607): n is a, c, g, or t
  misc_feature (616)..(616): n is a, c, g, or t
ggcagctcttagcagagcaaaggcaaatggaataaaattgaggaccaagtttctcttaccatatattgacacttggctctcaaggaaccatttttctgaaaattcggtcttcttttttcctcagtgtgaaactccaacctcaggccacccaagctgtgtgtttctttctctttagtgaaaaagttcctttgggctattgctttgtctgtacctttatgagttttgtgtgccttcttccacacagcttttttggcttcctgttttttcaactgcaaagtgggattgtgggaatggtttaacttccccattctaagggctcttcagaactatcacaaacaatatatttgttttcttgaaaacagctttaattgtaaacagtttactaatggtagaatagagatttggagaaccaaaacatcattgtgattggtgttgaaagtacacagcaagcattcatgatctgactgcttacttctcctgccttgcctttctttgatttgccacatactttgatgtaaccatgagacactacatagagttaattgaatgtgccgtgcccctgtgtctttatttgtactacttgtgcttnctgaaaggctntcttctnctgtgtctntacctggataatcttcaagactcctcagtgttgcatcgtctagcataaggcttt

SEQ ID NO: 412063 - DNA, 680 bp, Homo Sapiens
gccggcagtctcacataaactccaggctgaaatcacaacatccattagagtgctccacagctcagagcaagcaagcaagtggttgtcagtgcagctagtaaatcacctgatcctattacaaaatcaattactgcagtgcatttccattgctacacaatctgatgatgacaaaatgatattggatatctactgcaaggtcaagaaactgctaagaacatctttaattggtcttttatttttaatcatttggtcttagtcataatgcatccattttcattgcatatttttatttgaaataaatctatgtagttacctttggttgcctgggacattcgatggataatctctgcaactggtctgatgtatggctacaagagaacaaatcggagcagcaggtcgaacggctcaacctcttcattaaagaagaaataatgctgcagccacagccacacattgacttgctcattagatgagaatttgacttaaaaaatcagaactggtgatgtcacatatatactcaaaattgtcaaactgcctcattctgcagctctctggctgaaagaaacactactaaaaaagaataaaacaacagctttgctacagaagatgccagccacaaactcatcgccaagaaaaactggatattcaggtctcccagctactctttaggacggtggtgc

SEQ ID NO: 412064 - DNA, 419 bp, Homo Sapiens
gagagaactagttgaactaaatgattactgtacatctgaaatggaagcaagacaaagaccaattattctaaggagaaacaaaagagggcagatgtcttaaggtgaatccaaaactaaaaggtccatatccaggccgtaatccaagcagaggtgtgaacaggatatgagaaaaaatctaatacctgtcattggtgaaagtacttatgagtggtcagttggtactaagaaaggggcgtggagaaaggaaatacgacagcaattgtacccactttgggatagtgatattcataaaaagaatttccttgggagcagggataaacatcagaaaacagagttttagagagaagatcaagaagtaccacgttcgatgcactgagttataggacagtgagtatcattgatagaatagaattttctgg

SEQ ID NO: 412065 - DNA, 411 bp, Homo Sapiens
tagtctacaaacagctattgtatattttgttcacgttaacatttctatcacctagacccatttctgacctacatcagggaatcaccattattgaccaaactgtccttttccattccagactctttaccaatgctcagggccttcaggaaacgggaaatacctccttttcaccctgtttctttacattaaaacctctacatctctgcctcttttacctgttggctattagttccaagtcctaccgctatccaccacctactcttttctgagaagttaggattaaggttccattacattttccagactcccattttcagccatctctgggtagattttgccagtaggtgtggacaggaggtggaagttggaagggattcttttctgacttccaggttgggtctccctctcctt

SEQ ID NO: 412066 - DNA, 716 bp, Homo Sapiens
  misc_feature (598)..(598): n is a, c, g, or t
  misc_feature (679)..(679): n is a, c, g, or t
  misc_feature (683)..(683): n is a, c, g, or t
ccgggctgcaggaattggcacgagtcagcactggtacggcaaagctgtgtctcttctgtcactgccacattgaaaggagggcagtcttcagaggccatcagatcagcattgggttcaggtatgagatccacacgaaggtgcatgggctttggggccagatgtctctgaattaatcactggctctaccttcattagctgtgtttttagacaaatctaccagcctttccctcctcagaaagaaacgggggtgtcaaacacaatgttcagggctactatgaagaacacagcatatgcaacagtctggctcagagtaggccactgataagttgtagcatttttattagattataaattatctcttgcttctatccacccttctgcatctcatgcctggaccactgcagaatcacctgccaagtctacctgcccatagtcttggccttcccattcatcctgcaatgcagccaaagaaatgttgtccaaagcccagacacagtcatgccacttttttgcttaaatccccataatagttccaaagggccataggattcactgtgcaagagaatatgaagagatgggcaccaccagagctgagaanacctagtcttttaaatactttgcaaggacatgccctatgggctacgccaaacttgccacaatcatatcttcttacatagantctntgattcccatccattgagcacttattccagggc

SEQ ID NO: 412067 - DNA, 684 bp, Homo Sapiens
  misc_feature (620)..(620): n is a, c, g, or t
gcaggataggcaaacccatatccggagtaagcatctattcgggtgaagacagatcactgcccttttcatgaaggaagaggaccaatatatcaacctgttaccaagtagctggcttatcaccccaaggaatggtgccatatcgaaggctcagtgtttgtttctgctgctggcaaattgggcattcagcagtgtctgtagccaggtcagccttggtgagtggaagtccatgttgctgaatccatgtgtaacctccatcgctgccaccatggccactttgttcatgggctcattggatgatgacaggagtggctggggaagaagcctggggaaggaggctgagtgggtcatcccatccacttgattatttcctcctctgctgaagtcacccttttgtgagcattctcatgagatacaaatatcttaacaggttttgaccattcagagaggtccatccacatgcctcttctccaaatttctttgtcaccgattttccaatcatgcttcctccaagtccctgaccatccagtcaaaccacttgctacagcccatgaatcaatatataatcgcacatatggccattttttcttttaagcaacgtgctcacccagtgcactgctcanagtttgcccactgggaagattgcctttggttttctcggaggtgtatggttgacctgtcactttg

SEQ ID NO: 412068 - DNA, 666 bp, Homo Sapiens
  misc_feature (539)..(539): n is a, c, g, or t
  misc_feature (585)..(585): n is a, c, g, or t
tggatatatatcatttctagacttgactcattaaaaactcccatgtatggtcctttaagctttatttgctccctgtctagtggaatggagaagactgtcagggaagtcttggatggcatagggtgaagatggcagagtatctgttggccatttggaggagaattgttctctgatctgtttactcttgtaaacaagaaatacatttccattatgtgctatttcatattttgagtccatttgttgcagtagctagttgatcttgcctaataaaaacaagattattgaagaagtaaccgtaagcacatgtattaataaattcatcctgaatgaaacatcatttacttctagcttcacattattgtttgtaatcaattttacaataatacttgtataactatgtggtcctaattcaatgtctaaatcaccaaattattttttatggtgaaaacagtaagttttaagtgaaataattaaattcagcatgaaaagagctaaattgaatatttctggcttatgtcatgatctattaaagtgcattntatataatcagaaatctgtcctactcctttcctttggcttagattntctctatgttgatttcttttctgcacaggttctctatggtgaagatggcaacttgctgactcagtctcagtgcgtttccac

SEQ ID NO: 412069 - DNA, 694 bp, Homo Sapiens
  misc_feature (589)..(589): n is a, c, g, or t
gggaggtggaagggggagcggcatgacgttagcttgactgtcctgggtcatgttttttaatccagagtattggacatgtaacacagcaacaagagctgatcattttgtttaatcaccttttggatctttgccagatggtctctattgagagcgctgcaaacagagagagatgaactgcatctaacacgccaccagagctttcccgtaaatgtctgagaactgattccaacaagaatttagtctcagagcagaaagggatacatttaaaaactatgtgcattaactatacttttccccatagaatcctcacttggcatgaataatttacccactcttatgctaatgggatcatgaaagtatccctctgtctttagtgcagctattctcagctttcagtaattaccccacccagtgaaaataacatggcttctgcattgaacggctgactcgtacctgacaattagaaagatcatggctgacagtggaagagtctagaactggacagagaaacccttgtagcccaaggaagagcagagccatagagtaacactggccgtgaagtggaatgcatgcccgtgagaagtggcangaaggggtaaaaggaaaaatcttcactgtcaagctttttcttctttgacctaatatcgagatttaacttaataatggttctctttctaccagatggggacatctg

SEQ ID NO: 412070 - DNA, 699 bp, Homo Sapiens
  misc_feature (584)..(584): n is a, c, g, or t
  misc_feature (617)..(617): n is a, c, g, or t
  misc_feature (625)..(625): n is a, c, g, or t
  misc_feature (637)..(637): n is a, c, g, or t
  misc_feature (688)..(688): n is a, c, g, or t
gcttgatgttcccctgagcagcatgatgcttctgtatttcatactcagaaggcaaatgatgaatagatagttaatcaggtaaaataggatcaaaatgcagtagaggttttaacaatctcattctgcctttcctttttagaatcttatgagatatagtgctccattgagagagaaggacatggggggtgagagcaagagagagtagtctattatcttactcgatttcctgatgcagtggttaacaaaagggggcctttttatattagatatgtgaatcacagatgaagcctaaggtggtgtcagaaggaaggtttgggctttgtgaaacagagaaggaagttattttacgtggatctgcggcagaagatttaaaaggaggatcctcattgttcctttccaattgccattctatccaggagggatggaagtgaacaaaggcaagcagagtaatgatagccttattacaacacagactgaagagacagcttctgaaggcagacagtaacacagcttatggagagacatgggcaggactaaccatagtagagtaacagtcctttgaatgccacttgtgggagaatggngaaatatttctcacatctgtgtgtcaagagtangaacattngtaagaatgatngcataggcaatatgaaaggctgagggaatctgtgtcaagtcaagggtgtanggttttctgtt

SEQ ID NO: 412071 - DNA, 634 bp, Homo Sapiens
  misc_feature (449)..(449): n is a, c, g, or t
  misc_feature (500)..(500): n is a, c, g, or t
  misc_feature (530)..(530): n is a, c, g, or t
ggcatgtatctattctaaaaatattattcagagtctcttcttcacaaaacgaaagaaagacccctctatcttaaaaaagtactagaacacatgaaacaaaagaccctccatatctatgagaagataaggctaaattttcaagttctttttttaattactaaatcacttcaaacagtttccaaacataatagggacaatatggtgtgactcttgatgttggcttctacaattagtgtgttattaattaaactcttgagtaatataataacttgacagttaaagcccttctttgcatttaaagtgcatgcaaactgtggctccaattataaataaactctactgcgatgggcttaaaactgcaaatttaattattcagagcaaattgttcaatctatgctctattctggaggatgcttcctgaatattctcgtgtgctcgatatgaatggnggtctaaagtagggttccatagcataggcctgcttgcgcatctctctgccnctagcttccctaccctccctgctactgctncaaaccggttcacgtggggtttccaggcatgcctcattcagtccactctccttcaccatggcgctgcgccttccatgctcacttgcccgcgtttcacgtcgtgc

SEQ ID NO: 412072 - DNA, 704 bp, Homo Sapiens
  misc_feature (523)..(523): n is a, c, g, or t
  misc_feature (601)..(601): n is a, c, g, or t
  misc_feature (654)..(654): n is a, c, g, or t
cacgagggaatgggtccttcactacctggaaagattattttgagaaatgaatgatttatggagtaagaatccacctggtaaaccactaaggaccatgtaaatctaaaatcaattaatctataaactagagaaagaaattaggccaaaacccagcactattctgaccaaagaagtcaagaccaggcagtgagttcctttacttaggagctggggacagaatataaataaatgggcctttgggtttgtgggaaaaggagataataaagataaaggcaacaatgaatggcttggaatggaaaaagaaccatcagaattgatcattacaattaggagctatttctttgggaaaaaataaggaaaacccaagagggaataaggagaatgatataatcaggctggcagccctgtgtcttccactcccccacaagtctggctccagctgctgtcagccacaccacctacatcttctcagcagcgtatcctagatttgcaccctgacagctacccctgaccccctacgcanaaattatcttttgatcagtgacagtggccatttgtttgatgctgggaggttccagtgccatgctcatttcggaatggntgaaatggttctcttttcgtgagtcagaggaagaagattatgacacaggtggntaactggttccctatggtacctgtctcttgcatagaagcccagcatggac

SEQ ID NO: 412073 - DNA, 422 bp, Homo Sapiens
atcacactcatacattgcatttctgtgtgattatcatgtaatcaatcaatgaaaaatttgtccttggataaaatagcatgttagctttgttaggttaattttagtttttatttatttacaaccctaaactctatcttatatagcctcgcccttcctggatagatagtgattgactgtatttatttggccacaactaaagcttactaggtagtgttggtctgacttatcatgtcggtgctttgctggggaacttcccagagagagttcacagccctgagagtgagtccaaaggaggaggctttccctaccttctccacaacaagaaccatgcctatgtgtagagtaggaagggcacctcatcccagcagaatgtggaggggtcatatttctgggtgattctggtcaatgcttctaccattgtg

SEQ ID NO: 412074 - DNA, 338 bp, Homo Sapiens
attcttcctcacttcagtcaggtctgtactcagatgtctttttcaaagagggctcctctgacctccctatccaaaatagcatccttaccccactttatttttcttgatagtacttattacctcttgatgttgtttgttctactagagtacgggaaggagtaagctttgttttgcttactgctgtattttatctcctctgtgtagcccttaaccctgagggaatttagggttttctctaatttgttgagtgatagtaacagttgcacacttctgtggataggacccattgtcacttgttgtttttaacctcctaggccctcagcattgctcagtgttct

SEQ ID NO: 412075 - DNA, 672 bp, Homo Sapiens
  misc_feature (550)..(558): n is a, c, g, or t
  misc_feature (639)..(639): n is a, c, g, or t
ttccttttttttggtgctcttttctctatatcctgttgtaatgctctcccttggctccagcccttgctcttggaagcaaagttcagtccttataatcggctgatgcaagtccagaaccaaatacattgtatatagaatggggaggctatccttttttctacatcagactttttccttactggacattataaaggttgccctgcttcgatagagtgattattctatggatgaattataaatattcagtttaagttattaatgatgtattcagcatgtttcacttgtatcagtgcgcatttaaatatgtcatctcagcctgtcctcatgagacttatttcaatttcacaaatgaaaataaatctaagcctacagcctctgcacaactccctgatgtcacctagtgttctgttctttccccagcatcatcattgtcaaatcagctcccaagggtcagtgaggcagactgagcatgtgaatcttggtggaataatggagtttctatgataactggagaccataataggccatgcactggttttccaataggagnnnnnnnnnaacaaacagaaccatttctaagggcaaaggtatcagcctcgcattgatcatcttgcagactattctcagtggccttgattnaacaagtacagtttaaccctcaatgcgcttttg

SEQ ID NO: 412076 - DNA, 419 bp, Homo Sapiens
  misc_feature (394)..(394): n is a, c, g, or t
gcctttcaatatacttcctgaaaaatcttgtgttctacaaaatagtgccctaaaaatagtgcagtttatgagagaactaagagcaaacaactcaaaatctgtccagctttttaaccagaagccaggaaaacccaaattggttcctggaatataatttgacaccccaagtaagaaactcagaactctggagtctgtctcagggaatattaaaaacatacaacatcaaaaaagtggcacactggcttgcaggtgccagggcagggcggtgaggcagagctctgagccagcggggtagccattacaggtgtacaggaggaagcacaaccaactgcagtcctggagcttcagcgacctcccctgggggcagccccaggcatgtgctcatgtctcattnttttgccttacacatcttgctcctg

SEQ ID NO: 412077 - DNA, 198 bp, Homo Sapiens
cacaagagagcgacacatggggcctccagacctgaggtgagaggagattgtccccaggtggaaataaagatctggtgcttcccataacaagttctcattagccaaaggctatagtgttgaaaatacatgctatgtataaaaggtgacttgtcttcaaatcttgtaactagaaagattgtcagaattttaaatgctccg

SEQ ID NO: 412078 - DNA, 471 bp, Homo Sapiens
ccggcagctcgcccctgagctcaactggctggcaggtctgatggcttccctcacaccatccgcactcccaagccgtgtgcaaagatccagcacgttatagaaggtttaaacaagggtccttgaagtaaagttttcagaaccagttgtctggcgaacaaacagatgcctgttccaacatttgtgtgaggatggcttgaaattttcattgacagctgaaaatagagccctcatgtcctatagattaatataaaggatgtgagggctctatttatcctctagcacattctagacggaaaccaagtttcccactgttagtggacagaagaaggaggggagatgggcaactcccgaagtccgctctatgccagacacaagttctgatctcctatcatctgtacgtgtccggggtgggcgtgggggccttggtcgtggtgtcctatgattcagacacaaccgtcctgtctattcttt

SEQ ID NO: 412079 - DNA, 678 bp, Homo Sapiens
  misc_feature (301)..(617): n is a, c, g, or t
aagagactgactttgtttttgattattcaacctttgcctggaaaagacaaaaaaccagtctacctgtccacctgtcttcatcacctatcacacagtaggcactgaatgactgaatgtccattaagggcagaggatcatcccttgtcatgattttcccacttgggcctagcattccaaatttaaagttcccaatgacagtggtaccttacctttccaaagatcacaagacccattttctccttatttcaatttcgcaagcatcattcccaatagatatctatgtgaaaatgttgtatttctnnnnnnnnnnnnnnnnnnnnnnnnnnnnnnnnnnnnnnnnnnnnnnnnnnnnnnnnnnnnnnnnnnnnnnnnnnnnnnnnnnnnnnnnnnnnnnnnnnnnnnnnnnnnnnnnnnnnnnnnnnnnnnnnnnnnnnnnnnnnnnnnnnnnnnnnnnnnnnnnnnnnnnnnnnnnnnnnnnnnnnnnnnnnnnnnnnnnnnnnnnnnnnnnnnnnnnnnnnnnnnnnnnnnnnnnnnnnnnnnnnnnnnnnnnnnnnnnnnnnnnnnnnnnnnnnnnnnnnnnnnnnnnnnnnnnnnnnnnnnnnnnnnnnnnnnnnnnnaaaactaagaaaactagataatcttagcttcttattccagaatgatttcctaagatcactt

SEQ ID NO: 412080 - DNA, 644 bp, Homo Sapiens
ttcgtgcaccatgaaaatggggcattttgatactggctcatggtcttatttcagatccaacttctacatggtcttgcaattaggaagagtactggggcccagtggaagcctgaaaacagttttgaggttggataacttcatgcttttttttactcctaaatgaatcccagattttgagtgctgtaaattttctgtttttctgtctgacatcagccagaatacttcagggttttgactactgtcttcctttagttttatctgagaggcactctggcaggatcatggcagcccttacctaaaaagcagataagtccaggaaacagtccagaggcttctgggagccagctgggcaggtctcacctcttcaaaggtgggcatccaactccatggtcaaaaagtaagaggctgcccaaagcccagcctaatcccagaagatcaccacaggagcctaccacagcaccccaaatgcccagcactggggccggtcctttagaataaaatactgtcattacaaggttcctttcttgaaattatattattaggttagaagtcagctgacctaccgcgcaaataatccaagcttcaactatcgaactttttttcccctttacatataactctccgggtctgtccaggatcactgt

SEQ ID NO: 412081 - DNA, 441 bp, Homo Sapiens
cttgaggaggcagtttgtcccttatcagagcttgaactctgtccttggagatccactgctctcttcagagctgtcaggcagggatgtttaagtctgctgaagctgcatccacagccaccccttccccgaggtcctctgacccagggagtttggggttttatctgtaagtccctggttggggctgctgccttttttttcagagatgccctgcccagaaaggaggaatctagagaggcagtctggccacatccgccttgctgagctgcggttggctccgcccagttcgttcccagcagctttgtttacactgtaaggggccacctactcaagcctcagcaatggcggacacgcctccccaaccaacctcaagcatcccatgtcaacctcaggctgctgtgctggcagcaagaatttcgccagtggatctgcttgctgtgctcc

SEQ ID NO: 412082 - DNA, 422 bp, Homo Sapiens
aacagagtatgatccagaatctggtacaattctaattgagaattctctgctcttaacgactgactgacctatgtactactgtgcctgatcttagagacacataaatctagcagggccatcctcacagtatggacttaacgaccatctgaacggcatggaatgactgtaggcagaaaggacagggtatcatactgtgagctgatacatcctaccaataatatccaatacaatggatcaccctcagacataagagacagactagctcaagaatgaaggctcacaaccggtgatcctcacatgagcggagtttctaatatttgaatcaataaagagattgatatcattctaacatgcctgatatccagctataactatttccctttccaaacacaaacactgcttttaatccaagtttggtcttt

SEQ ID NO: 412083 - DNA, 441 bp, Homo Sapiens
gttctttctgctgatcctgccctcccgtgggaacttactgccttgtgctacaagctgcccttcctgccagctggtctgcagggctctttgctgcttgtctgacctccctccaagagctgccacagctcccagctcaggcagctgagcctctattccaagagggtggacactccaggtcctaccgctctgggatgagctggccactctggcatgcttctatccagggactggatagctgtgtggccacagctgtgcttgggtaaatggacaccaattaaaggattactggcaatgagaagtcagtcctgattctcatttgattggaaagggaatttgggactcaatgatagagctgccacagccacgtgtcttccccaatccacctgctctgattccatccaggactgccacaaatctaggcatgtccctgcaatcattagt

SEQ ID NO: 412084 - DNA, 411 bp, Homo Sapiens
atttttactcacttaaaagtaaaggtgcaagatacaagttagaaatctaaaattcttctcatttgtcattggcttgtaattgttaatagtccagaattttctgagtgtctgaacctttatcttcccctctctcccctaggtaaagctatggtactttagaaaaagtcaactctgtgtaaaccactgtatcaggaaaatcttctggttgtgcctcaaaatctgctttatccaacttgttcctccttgcatttacacacttctctactactcagtacttataaaaactttgccttgctctgtaaattcctgaaactactttcattgcttttttaaacacttcttacagcacattttattcttgattttggccatttcattactgttgagttttagagagctcacctagtttcg

SEQ ID NO: 412085 - DNA, 413 bp, Homo Sapiens
  misc_feature (53)..(89): n is a, c, g, or t
tgtttaggtactaataagttgttaatttttattctaccatgaaaggatactannnnnnnnnnnnnnnnnnnnnnnnnnnnnnnnnnnnntaccacttgactatcgtctacatttcaattttaaaaaatttaagcctaaaaagtaggatggacataatttcacaatgagggatcatccttcccaagaaagagaaattgataacactacattgaaaacacaacctacttacacatgtcatcctttctttctcactttgccatggtaatgtcagtttacctttagtttcttgttgtacttgattttaataagccactttgaaactcaggcttttcacttcttcaaactggctgtttcctaatcatctggatacagttggcatttcatgtgtctgttttgtgccattgggcgcctgc

SEQ ID NO: 412086 - DNA, 414 bp, Homo Sapiens
  misc_feature (175)..(175): n is a, c, g, or t
  misc_feature (180)..(180): n is a, c, g, or t
  misc_feature (185)..(185): n is a, c, g, or t
  misc_feature (190)..(190): n is a, c, g, or t
ctggctcaaaggaatggtacccattatgattcctgatacttaaactcttatatcagacaccaaggagacctctgtatgtatccggaatgctaagggtcctctcattgattagggtctcacaaacggggtgcagagaaatgtgtgtgtgggagggttgatgatggaggggggtgtncaggnttggngtttntagcttggcacatacggacaggtgatgtttgagctgcctgaaagagaagcatgatgcttacgggaatacagtttccaagaagtgatgatctggctccaagctcattcttcagttggatttcaagttgcaacgcccatgcttgaataagcactgtgaacgagcattcaaccaacggaatacatgtttcacctgcagggatttgttagcatgcagcagatgtttgt

SEQ ID NO: 412087 - DNA, 612 bp, Homo Sapiens
  misc_feature (361)..(361): n is a, c, g, or t
  misc_feature (394)..(515): n is a, c, g, or t
gactagttctttctcacactgctaataaagacatattcaagactaggtaatttatcaagaaaagaggtttaattgactcacagttcagcatggctggggaggccccagaaaacttgacaatcatgacagaagggggaaagggaagcaaacatgtccttcttcacattgcagtggcaagaagtgctgagcaaaagggggaaaagcctcttataaaaccattcagatcttgtgagaactcactcagtatcatgagaacagcatgagggtaaccgccccccatgattctattaccttccaccaggtccttcccgtgacacatggggattatgggaactacaactcatgatgagattcgggtggngacatagccaaaccatctcagtagtttctcatnnnnnnnnnnnnnnnnnnnnnnnnnnnnnnnnnnnnnnnnnnnnnnnnnnnnnnnnnnnnnnnnnnnnnnnnnnnnnnnnnnnnnnnnnnnnnnnnnnnnnnnnnnnnnnnnnnnnnnnnnntatgggtaaaaacccgaaggaaccccaacatttcgttaaaagaacagattggattgtggtagaatcacataacagaatgctcagcagtagttggtgg

SEQ ID NO: 412088 - DNA, 684 bp, Homo Sapiens
ggctacactcgtattatacctggtgatccattagaaaacatttgttttctatccccatgaccttagtctcttttgaattagagggctgacttccaaagggaggaatgcttccaccaagaaacacaatgattttattgaactggaagtcatgactgcaatccagctactctggcctcctcattcatctaaattaggcaaagagaaaatttattgtacttgatgggtgtttgatcctgattatcaagaggaaattgggctgctactccataatggaattggagatagtacatctggaatacaacagatcccttagggtatctgctagtactaccatgctactgtgtgtggcagtgggactagtgaattttatttccatgtgtccactgatgcactgcatttactgtgaagtgagctccttgatcagcaagaatattgtttggaagagtatgacattggataagaaattcaacaggtcccttagggtatctcttagtactgccatgctaccgtgtgtggcagtgggaccaatgaattttatttccatgggtccattgatgtaccacatttactgtgaagtgagctccttgatcagcaagaatgttgttagagggattatgaaatggataagaattacataagtccacaataggaaatgatgccatggatggcagtatttcatacatg

SEQ ID NO: 412089 - DNA, 687 bp, Homo Sapiens
  misc_feature (154)..(172): n is a, c, g, or t
  misc_feature (620)..(620): n is a, c, g, or t
  misc_feature (667)..(667): n is a, c, g, or t
gagagaccaggagagtgtgttggatctccagttaataccctggtctgtgccacagcattgggaggtctgtcacagcgcatgaatgtgggcactggcctagccatcagcatagttcttgcagggtcaatcctccagagcaggttttgggtgttcnnnnnnnnnnnnnnnnnnnaaactgcggtattcccagctctgtgggtgggtttctgattaaacaagatacctgtttgtacttgcatctctaccagggcaggagatggtgacatgctaggggacccagcaaagggtggcattgctcactcgcccttgggtatctgtgctgtgaccatagcctttcgttgagccaagaaggtgctagacagatagcccttgcagaatggtcttcttattagagacttctcttagagattcgactggcatctgcagccccacagcaggctggaccatcagggaagtccctgctcaaagccctggcctgttccttgagagaaggctggctatgacttgataggaaccctgctgctccctatgacacctgcctgcccatgggtccatataagtaaatttggactctgatttttctgacttacagattcagctgaaccatttctctgagtggngccagatgaagattgccactttaggtctttctgcacgggagctatanattgttgagagtctattggt

SEQ ID NO: 412090 - DNA, 663 bp, Homo Sapiens
  misc_feature (150)..(172): n is a, c, g, or t
  misc_feature (470)..(470): n is a, c, g, or t
tatgactttagtactttactatggtggacaatgaggcaattgatatttttatgtatataacttttttctttcacatattgttggaaatttgatattattaaatttttaatacatttgttaccatctctctccttttcaactgttacttcnnnnnnnnnnnnnnnnnnnnnnncttatggctccagctcaaaggaccattacttttcttagagtcacttctaaatgcaagtgatttagtgtgaagctgcttcctggtgaaacaccatctcccatgatgacctgtggtgctaaatagacagatggtgcttcagcaaatttcccatgcaggctcatctgagatgtgcttttgccaggtgcaatagaatttggagtgaaggtcttctgaagtctcagttcttgcaacaacctttctctcttatatctagcttctctccttaggcagcttcatagaatgtgtaaccctcccttgngagagagagaacaggaaggggcttgtccttagacaacaaccgtctgtcacctggggagctctgacctagagaagcgtggtgtgacatgcaagttgaagtcccttccagaagcatgttgtggcctatggttctgcacactcttgtgtgttagtctgacccacctgtatggcgataccatagattggtggcttat

SEQ ID NO: 412091 - DNA, 667 bp, Homo Sapiens
  misc_feature (375)..(388): n is a, c, g, or t
  misc_feature (396)..(523): n is a, c, g, or t
  misc_feature (655)..(655): n is a, c, g, or t
gttacagggagtttcagcaattcatttttaccatgcccattattacataagtcaaggtgtcttagcctaattgcaagtcaggtctgaatccccttgtcccagccatatcacttgaccaaagaacattttgaagactgtttcactcacatggttgccactaacttctgtgctgccatggtccagattttctaaaatctctgtgttcaaacaaataataccaggaattctaagactgagaaggtaagataggattcctttggaaattatccattaagtaatataaattaaaagaactttttgtatagtgaatacattgactataactgaaacaacatttggagttgcttgaatatattttaataatttttagatacnnnnnnnnnnnnnnaaagttannnnnnnnnnnnnnnnnnnnnnnnnnnnnnnnnnnnnnnnnnnnnnnnnnnnnnnnnnnnnnnnnnnnnnnnnnnnnnnnnnnnnnnnnnnnnnnnnnnnnnnnnnnnnnnnnnnnnnnnnnnnnnnntaatttaagttcataatatgaaagaatatcgtgcaatattggtgatggttttgggtctagagaagcctttgaaactgggacctttgttttcctgtgttttaccatatacagtatagtgccatacacagtggngttattcagtcc

SEQ ID NO: 412092 - DNA, 425 bp, Homo Sapiens
tttttaaccaatcaaattttgtgacaaaggcaattatactcttatttcccagggtgtgcccagacacataagccaacaacacccacaggcattcacgcaaatatatgcatagatgcccagaatgtccacatagacagtcacagggaggtgcacacaaggatagtgggtttatacatggacacatggacccagaaacagatacctccctgggctgtgcacacatcataccccacccttgctgacatcactgcctttgctcagagctcctggctctgcagtttgggctcagttccttcaggctggaacccagcaggacccagcctgggctggctgggctgagctgtactggacaagatggggcagggcagggccagccagggcgccacagatgagctcaggtgtcagactccgcccgtggggcttcc

SEQ ID NO: 412093 - DNA, 509 bp, Homo Sapiens
  misc_feature (76)..(97): n is a, c, g, or t
  misc_feature (176)..(266): n is a, c, g, or t
  misc_feature (387)..(387): n is a, c, g, or t
  misc_feature (430)..(430): n is a, c, g, or t
  misc_feature (463)..(463): n is a, c, g, or t
  misc_feature (478)..(478): n is a, c, g, or t
  misc_feature (480)..(480): n is a, c, g, or t
atttcttaacaaaagtcaccaggcttccaagctccaatatttatatcccctccacctctactgagtcaatgccacnnnnnnnnnnnnnnnnnnnnnngcgttccacttctatcaaattttggtagttaatacaaataataaacaaagatcaatgccaattttgttagttttcaaannnnnnnnnnnnnnnnnnnnnnnnnnnnnnnnnnnnnnnnnnnnnnnnnnnnnnnnnnnnnnnnnnnnnnnnnnnnnnnnnnnnnnnnnnnggtactcatacatgaatattggcaaaactatattttcacttgattgagcaacatagatcaagattaataatgtattttgatttgcagtaacattgatacaaaccttttaaaagaataatanactttattataacaatgtgtatgattggcttcctgtcatcaanttaggaagctatttgcctaagctggttgagctngctatacagatacantngactagtggctttataacagagtgttttt

SEQ ID NO: 412094 - DNA, 418 bp, Homo Sapiens
tgttaacatatatgtacagatggtcccgtaatatataaattactcacacatttttttcaacttcatgcaaacactaactcccctgctccccatattaaatgctgtgcatgcactgactgaaaagtatgcttccctgaacgacttcctaaaatacagtttagtcaaaagaaataagttctcctgggttcttacaagtgaatgtgtattttattctcaatccttatcatttaagggactagctatatacaggacaactctttgtgactttttttaaaaacttgataataggcactttctacaaagaggatttgaattcaaaagactttcagtctttagtatccccctttcacaaatggacctgcctgagccacaatagcttattgaatcaactcagcagaagtccagcagtggtgtgtgc

SEQ ID NO: 412095 - DNA, 681 bp, Homo Sapiens
  misc_feature (588)..(589): n is a, c, g, or t
  misc_feature (597)..(597): n is a, c, g, or t
  misc_feature (600)..(601): n is a, c, g, or t
  misc_feature (659)..(659): n is a, c, g, or t
aaaccagcctcctgtttgtgcaggctgggcggctgtctgtgcaaattgattgctaagtgctcattttcccactgtgggtttctgaaattgcaaatatggaggtaggatggcagtgtgtgggtgaatgaggagtgaactggtgtgtgctgcatatgacaagtgcctcccatgtgtctgcttttgaatgtgccatcctggagctaatgacacttctcaattaaattgcagttttgctctcagtagctttgccctattgtccaggccacttgacctgtcaggcaaagaggagacggtgtgtgggaaaagaaaattccctccctgctcacagagagagaagcctgttcgcattctgagggtctctcaacttctcagagctggaatggcctatctcaagacatcatcagatgcaaataaaacaaagcctctcagctctggctgcacagtattctctatctgcactgtgagtcaccgtgctcatagtaatggcttgccttgtgagccgctatcaagcgtgtgcgtgtttttctttctgagagatgacagttcccaagtgaaaggacacttcagctctgatctttccttctattnngttgagtntgnngttggtttctggcgcccactgctgcctgagcattgtgtgcagtggcatttttcatttntgtatggtgagggccagcctgt

SEQ ID NO: 412096 - DNA, 389 bp, Homo Sapiens
  misc_feature (128)..(264): n is a, c, g, or t
ccaaatcagagttgaaaacatgaagtttaagtaagtcatctcatagacagtaatctggacacttaccaaaatactacagagaagtcagaccatgttccacagggaaaacaagaatcttatatatcccnnnnnnnnnnnnnnnnnnnnnnnnnnnnnnnnnnnnnnnnnnnnnnnnnnnnnnnnnnnnnnnnnnnnnnnnnnnnnnnnnnnnnnnnnnnnnnnnnnnnnnnnnnnnnnnnnnnnnnnnnnnnnnnnnnnnnnnnntcttagtcatatggtttgaatgaacctctgtgtacagacttcacgaacaccatcaagattagccatggcaagagatggggcccccagtggtcactacacatatctgagggcagatggcagcagca

SEQ ID NO: 412097 - DNA, 418 bp, Homo Sapiens
  misc_feature (394)..(394): n is a, c, g, or t
ttcataacccatccactagtaaattccgaggtctgtgctttgcactgcttcccagagcttccccatggggtaacgccccagcagccaactgcgggcactggccttaaagctccccctgtatctggctgccttgcatcattcctgtattccttgtatcagcccttccgtgtattattttacccgtgtcccttgtgcttcccaactctttggctcagagtttgcttctgggagaacccaagcgaagatagaaagatgaatacaagcagaggtgtatgaggcagacgttttctctactacattcaacatgaagggatttctccccacaccaaccgattctccagctctctgaacaccgtgggtgtcctacaattcaatcatgatgctaactacctgnggttagtgcaccccccacaggcgg

SEQ ID NO: 412098 - DNA, 444 bp, Homo Sapiens
  misc_feature (429)..(429): n is a, c, g, or t
agcaattaaagcataaaaagtagatctaagattttctaaatattagatattctaaaatattgacattatacaatgtctagcatccgtaacttttgaagatattttatttcaaggtaatttcataagaattcataagaatttacctactcagactttgggcaggatggaaaatagagtttctgtgaggtgtgcctatgaatcataagaagggcttcttaatgaggtcagtaattaaggaaatacatttcaatagtgacatttgacttacaacattgtttgggggtggagtcttagaagaattgatagggaacttttaacttcaacaagtgctcattaactccagttgttgttacctaatacaagaccagtgcccaataaggactttggaattctttcacaacaactcctttgcaggtgcacttcacttgntctggaagtgatttc

SEQ ID NO: 412099 - DNA, 424 bp, Homo Sapiens
tggaagagcagcctgttcaggaacgaacaccaggtggaacaaaagcggggcagaacaagagcatgtgcatcctcttaccaccatgacattaaggccatgtctgcacccggaccaagatgggaagggagcacagagctgtgacttcagggaataggaaggatggcaacagacatggggttctctatgactttccattttatcttccattttcacagtaagttttctctacgtctccagattcagcatgagaaggagaagttccttgaatcctctgggcactggggacagccagtccacccaccctgggtaacagggatgtggtcagtcctcacgtgaggagggactgagtgtcctccatggacctgcgacgtcccgtctgtgaggccctcgctactttctgctttctacatggatcagagacagg

SEQ ID NO: 412100 - DNA, 305 bp, Homo Sapiens
gaaatgtgcccatatcacatgctcttctgactcttcttcactcgtattttagtgcgacgcgctccataaagagtctcactgttctgattaacactttagatatatctaagatgtgacacttatatatcgcgacaagtcactaggctctcgtacacatttatattagtgagcgctatacacacgcactttctctatagcgcattgaccatactgcgctcttgctattaagtgcgcacacacctatatagagaactgagtatatgcgctattctgcgcatgtgtgtgtaacactggtactcagttct

SEQ ID NO: 412101 - DNA, 199 bp, Homo Sapiens
  misc_feature (43)..(43): n is a, c, g, or t
tttaaaatttctgttaaggaatgaggaagagatacagaaacanaaaatgtattcactcaagaagatcaagttgaaaaattatttaatatggaatattgtacaagtaatttgtcaaatgtaaatagctttttcttatgtcagcaataatcagttgatagctattgtgggcagagttccatgctgattaattaattttttc

SEQ ID NO: 412102 - DNA, 470 bp, Homo Sapiens
  misc_feature (301)..(301): n is a, c, g, or t
  misc_feature (360)..(360): n is a, c, g, or t
  misc_feature (373)..(373): n is a, c, g, or t
  misc_feature (397)..(397): n is a, c, g, or t
  misc_feature (419)..(419): n is a, c, g, or t
  misc_feature (424)..(424): n is a, c, g, or t
  misc_feature (436)..(436): n is a, c, g, or t
gaatgagagtgctctcgtgcaaatttcatgacctctttacaattttcagtaaatggaaatgataaaggaacctatttcacagagttcattgaagagttaggtgaattaataaatgaaaatcacttagtacaaggccaaacacttggaaagcactcagcatacttagtagttatttttagtgaacaagattatagcgactacatctctgctatagcaatttcttctgtaacctcaaaagcttgccactcaatttgatatagtaaaatgtttatgtcacttaacagtttgcagattccaacanagctcttatgataaatatgaagcttattaacctcagccataaatttggggagaaatgcntgactcacttcanaatggatggaaactatagtttaantgcatgactactaacctttctncattnattttatatgangtttttactgtcttcaggtatctgtctcctgtat

SEQ ID NO: 412103 - DNA, 630 bp, Homo Sapiens
  misc_feature (463)..(463): n is a, c, g, or t
tcagataagtagccccatgtggaaatactttactgtaaacattgtttttattcttcatcatcttggataaaatttactatgtattatttcccccagaataagcttttccatatactttgcaccaaacatatcctcatctcaccctatttgatctctctatgcactgttgggagagactgtgtatctgattggctgtcaaggagtctctctactcaagtgactttattactattaattttttaactcccagaaattatgaagaaaagcaaaacaaagcaatacaaaccaaattgatcaaagagaataaatgagctgacgtctgtgaaagcttggccttaaatttcttttgcctctgaagataaatatgatttctagctcccatgtcttcatctttaaagatgagttttggaagagctcactggtggtgagtgctggaagaagtaagattaatctatgtgtgctntacattatatttcccagataattgtacactttgtataccttgtgttattcttatttgaaggtgatgcaatggacattgtcatccactttatgaattttctagacattctatggttatttaggtatttagaagcagtgtttaagtgtctaatataatgcatatttttt

SEQ ID NO: 412104 - DNA, 297 bp, Homo Sapiens
  misc_feature (192)..(193): n is a, c, g, or t
  misc_feature (212)..(212): n is a, c, g, or t
  misc_feature (232)..(232): n is a, c, g, or t
actcaaaaacacttaatctttactggtgcctaggaggtagatgcattagcattcttattttatatatgagaaagctcagatttggaaagattcattaacttattatttaagttataataacttaataacttattatttaagttaaatggcagagccagtcctaaaatgctcctccacctgacttaagagttnntggtcacacctaaccaganattctaaacaagggaagcanatgtaaaaacttatgaacatcacatgaacatatgaacatgagattcaatgtcacaagcaacgata

SEQ ID NO: 412105 - DNA, 665 bp, Homo Sapiens
  misc_feature (621)..(621): n is a, c, g, or t
  misc_feature (631)..(631): n is a, c, g, or t
caacagataactatgttttcaatagtacagggcatgctagtgcagctacaactagatagctatgacctggtatggggaagtctgaaatcagagtgacttcttccatttggcaaatatcagttaaaatatctactgtgtgcatgtacactcctgggtattagggttacaagataaatgagctggacacggtacctgaaattctattgatgagaccaaaaaaacccaagcaaagtgagtaaaaaatatttatttaaggaaaagtactatgaagaaaatagggtgattttatatagtgtaattgcactgaggggcaactttagccagtagatcggagaaagtatcctatgcagtgctgtcgaattgagatcttggtggaaagtcattggagaggtttcaataacgaagtgacttgatgttgttttcatataaaaatgtgaatcaggctactgtgtgggaaatggctagagagggaaatagtgaaagaaaggcaagctaccaggctatagcattccattcgtacaaagttccagtgagaaggaagtcagctgttcttatgggcctaataagcaatggccagccaagtctaatacgcacacccttcggagtggacagcgtgagcanttaggtacanactggtgggcccattgtggctacagatgagcatg

SEQ ID NO: 412106 - DNA, 660 bp, Homo Sapiens
  misc_feature (270)..(282): n is a, c, g, or t
  misc_feature (509)..(509): n is a, c, g, or t
  misc_feature (584)..(584): n is a, c, g, or t
  misc_feature (620)..(621): n is a, c, g, or t
gaatagatcatttttttcagtcttagatagcaaagttcaatgttttagaaaccataatatgactttgatgccctttaaataaatacatttgcagggctgtatataaatacgattaagttaagggcatatctatttcccttttagaaaaggaaaagataactcctccctattgtttagcaaagttttagggaaaatgtaagggagttaaaggagcatatcttgtttgtttgtgtgttttggaatgtatacaaagaaccttattttattcannnnnnnnnnnnngctaataaatagttgtttgttgttgttgctttaacccaatctcaacaactgcaatagaaaaattttctaccttatgaaaatatttttaagaactacatatttggctgcagttacacaactggaaggcatgttagacggcaaaatggttttctagaacatgaaatggaatatacattgccctcatttctataaaccaggactctaacaagggcttccacatttagcanatgtagaaaaatttctgatactagtggcattaaatcctaaagttctactataaaattaatcttcattaatctttnttggtacttcatgaaagaaacgttgattcaagtaanntattcacaattttcaggtctttttccactaactttaaca

SEQ ID NO: 412107 - DNA, 403 bp, Homo Sapiens
gtctatgtctgactaccactggatcacgctacactgccaagtctgaaaatcgagtccacaagatttgattggcagaatgtgctatcattggacaactgaaaatatctactaatttccatttatccatttgacatgagttgtatagaaatgtatgcatcagtatgtgagatagcaacaactcgtgagacccatagacttacagacatacctaaacataaaatttaaatattagaaactatcttacaagcagacttacacaaagagtaactgacaagaaagcgagatcgtgataggatgacggaatgtcaagaccaattgtcccgaaatgactgacacgggaacgacaatcagacaggactaaggacttagaagatccgaaactatgaagctactgagcatagag

SEQ ID NO: 412108 - DNA, 301 bp, Homo Sapiens
tgtccttcccaaacactttaagcctgcacactgcctgtggtttaacgtgcctctagtatgagacctcattgtcttccttattactttgtaaactgtgaagtaacatgttcgctatctagttccaagctttgttcagtgatttagaggataaatgcctatgactctcagtgtcagaaacagagtttacatatcttatttacttattttcttggttaatatatgttccctctactggaatttctatacaaggtggagaacttgatctgccaataatgttatcctctgtgcctagcgtgtctgg

SEQ ID NO: 412109 - DNA, 268 bp, Homo Sapiens
ggagaccaggcaagtcgccatagagtgggtggcattgcacaaaagtctaaaggaaggaaggaggcttggggctgtgtatcagaagagcgtttcaggcaaggagaacagaaaagacaaaggcccaggagaggccagcgtgcctggacactagtgaagactggggctttcagccagaggtgaggttgcagggtgagggcacatttaactgccgacttccaggtcaaacctaaagaatacccaaacttgtcttaattttacgagagatgtg

SEQ ID NO: 412110 - DNA, 427 bp, Homo Sapiens
ggagtggtgctcgggtccgggaggcttgggctgcgtgggagcccatggcgggtttggggggaggctcaggcatggcgggctgcaggtcccgagccctgccccacggggaggcagctaaggcctggcgagtcaagcacaacagctgctggcccagatgctaagcccctcactgcccggggcttgcaggcgggccagccgctctgaatgcggggccgcagagcccacacccaccaggaactggcgctggcccacaagcgccacacgcatccccggttcctgcccgtgcctctccctccacacctcctcgcaagccgaggcagctggctccggcctcagccagcccagagaagggctcccatggtgcagcggcagggtgaagggctcctcaagcacagccagtgggcgcccagggcgaggaggcacggag

SEQ ID NO: 412111 - DNA, 407 bp, Homo Sapiens
  misc_feature (170)..(264): n is a, c, g, or t
gagttttaatgctagcctttcaaaatcctattcgtttataaaagtaaggaaatttactcattccaggtaaaatgtagttaccaaagcagtttgagaggcagacttattaccattcaatctggggtctattgggctctggcacataagaacaagaaaggcaatggtgcaannnnnnnnnnnnnnnnnnnnnnnnnnnnnnnnnnnnnnnnnnnnnnnnnnnnnnnnnnnnnnnnnnnnnnnnnnnnnnnnnnnnnnnnnnnnnnntaaatggacttactatcattacaaggtaaaatttaatcaatgttaccctttagttgtcatctttatctttctccctaagatagtgtagtatcctgtttctgccttggagccacgctgcctgggtttgtcatttatgagccatt

SEQ ID NO: 412112 - DNA, 422 bp, Homo Sapiens
atgaccatggggaaggagaaaggcgtgcttggcatgtgtgccctgaaaagacgggacatacttattcatagagataacacttgttccgatgaagtcagaggcctggtgggagtagcctctttcacagggcttcaagggattgtggatattgtgcctgagaggaaggtgaggcaaccatctactccctgatgtgtgaaaatgaaggaacacagaggggaaaggagaggcagggacccaatgccagggaccgttccttactctgatgtgtgcacagccaccaaagctggcccttttcttccagcctcttgccatccctctgcttgaattagcagaggcagttaagcaggaggtagaggagtgtcagccagacctttgcttccttcccagccaggcccacagccccagcccccctggggttgggg

SEQ ID NO: 412113 - DNA, 528 bp, Homo Sapiens
gagagacttagcacaatagcagaagagagggaaggcagaagacctgaaggaagagcagcagaggaggggcaggcataaagaatggtaaacatagaatggcaaccatagtcacctcagggatcagctcatggcctcctggtcaagcttcctctccctgtgattcttggctgtcttccatctgcagctaagtagccagaccagaatagtcaataattctagtgatctggcaactataattttctagtcttgatgagtatcggtattgtcactgtattaaacttcccctattcgtcatctccatctgatcatcattattattctaagaatcccatgtggaagtaggaactggggtgacaagaatctgggtgctggctgccccttgaatgcatcccatggccccatagccatgactgcggtgccagtgaagcagcagttcccaggaaatacatggattgccttgcctggggctgaatgggagtgcttcaatggtgggtctgtaagcaaagattgtgaacttgttcaggacaa

SEQ ID NO: 412114 - DNA, 425 bp, Homo Sapiens
taaaaaccgaatccctgaagcactgtggaaatggttgctcttgttatccagggacaggaattttcctaggaataataattgagtagcagttggttagactggggcagagtaacagctcagcacctgaaactgacctgtgaacagatgagctggtgtatgtatctcaacacacatgcctgtatgtcttgttttgttttctaagtctaaaaatcaaaagaataagctaaaaaaatgatatgtttgtctattaattatcttaattttcctatagaactatgagtttttcaaaagccttctacatagaatactcttattaatatttctgagtttttaatattgcaggttaacttttgggattttgaatttctacaatagatttcattaggtgattacttagattatcttctctcatttttatgcgctct

SEQ ID NO: 412115 - DNA, 417 bp, Homo Sapiens
gacttctgtacgtagtcatctatggtttccccagtatgcatggctctgtatatctttagtgagaaggccactttctctgcaaggtgtaacctacagactttttacggaagcacaaatacctacaacaagtgaaggacatttggattgaactccaatgtgtgctcagcatgaactctacatgtgatgactaatgcattgatcatagagagtaggagataatcatgctggttgtccatggtgacacacacatacagatgtccctagctgggtaacgtactatacagacagttattacagcttataactcatctgacactatacttggcactctatagctcagatgtctacgacatattaactacgacgatacgctcacaatcatcatccatgaatctatacatccagggagtgcctgct

SEQ ID NO: 412116 - DNA, 683 bp, Homo Sapiens
  misc_feature (482)..(596): n is a, c, g, or t
  misc_feature (640)..(640): n is a, c, g, or t
gaggagcacatctttatatgtcccactaggtcctatgcgatgtgctcctcgccaacctacagcttcatccctcattatcctcccctcttacgtccatttccagccctatctctcaattcacatttcaagtcacagcaacacaaaactggctgtggtttctgcccagtaatcaggccacttccatctctgggtgtctgctaatgctgggatttctgttttcttgcccttttctgtaagtttctaggctcacttcttccccctttgcctccctaactcatttctcattactggacgctccaccatgggggctgcttcactaggaaggcttctgtaagctcctccctgcccattgtcccaggccagaccaaacacctgtgccttatgcccccaatgctgtctgtgaatctctcaccaacatgttctccttctttatatccctagtactgtacctggcacagagtaggtatttaaaatgatttgtnnnnnnnnnnnnnnnnnnnnnnnnnnnnnnnnnnnnnnnnnnnnnnnnnnnnnnnnnnnnnnnnnnnnnnnnnnnnnnnnnnnnnnnnnnnnnnnnnnnnnnnnnnnnnnnnnnntatccatagccggcatggtgtgcaacctataatccaggtcctangaagctaggcaaggagattgcttggaccttgggtgaggttgcg

SEQ ID NO: 412117 - DNA, 423 bp, Homo Sapiens
aaccactgcttgtcacatttttgtggtttttcggagctcccttgccttcatgtctgtatgtcttccacctgtagttcttcagattaagggcattgccatcttaccaggcctaagatggggcatctattagacattacttctctgtaacccaccccctaagactgcctcttggttttcagtaccttccaggaaggcttcatgtgcaaaataggaatgtttcctccttcttcactttttcttatatttttttgtttgatcaagatggtatcaattcctacttcatcccctttagatgctctcctgtgcctccccactatatatggagttacttacattatcctagttctttttagacatatatgaaagcattattcaacgatgcctacagtttttaccactgacactatttcccctctctgctcc

SEQ ID NO: 412118 - DNA, 632 bp, Homo Sapiens
  misc_feature (127)..(220): n is a, c, g, or t
ctgagctggattttgtaggattagtagaattggatagagaaaggccaagggaagggcaacagttttctaaatagttcttttatttctatatcattgtttactctctctgaactcagggttgaaatgnnnnnnnnnnnnnnnnnnnnnnnnnnnnnnnnnnnnnnnnnnnnnnnnnnnnnnnnnnnnnnnnnnnnnnnnnnnnnnnnnnnnnnnnnnnnnncacttgttgccagaatccttttcctaaaatacagatgacagctggggctaccactcgcaatgtatgcacgcctttatgcaaattagaggtgtcccattcccctaggttgatgcccttcttctctaggatttgtggctaggagaatcaatctggagttcacctcacccatgaccgaccccaaccctactgcctggccaatcttccttctgaggcccctgcccccaactgcatacagggctggcaatcgcccttctcaatctgatcccaactttcctgctccatcagaacccattttcaaccttgattccgtgcttatgctacagtagtcctcaacttcagtgtatgaattccactacttgcttatccaccatttaacactttacaccaacacctaccattaatgagggccttc

SEQ ID NO: 412119 - DNA, 533 bp, Homo Sapiens
  misc_feature (454)..(454): n is a, c, g, or t
gtggttactaagacacagctagaaagacaatgttgagggaataaaaagacacttttgtgagacgtgaggaatgggaaaaaaatatagtaggaaaggaatgaataaaggtttgaagagccaaggaagcctaacagtgaaagtcagtctctgaataaaacatgtcagaatctgaaccacaccagttcacaattttacttctttgaagcatattattaaagataaggaaagaagttttgacttcatgtgtttatattaatgaaatgaatccacttagaattgatatgcaaataataaaatactatgtactaattagcatgttccatctaggtcctttttattttttctgattattgagaaacttttggtttctgacagagctgtctttatttttgctttaggtagccaaatatatgtctatagctagaaaattttaggagcaggaaaaagaatgcanaaatgacattagtcaataaagttttagaaagggcactgactgactgacaaccatttacaggctgatttgtctcaaggca

SEQ ID NO: 412120 - DNA, 692 bp, Homo Sapiens
  misc_feature (219)..(234): n is a, c, g, or t
  misc_feature (244)..(345): n is a, c, g, or t
aaataatcaggaaaattacccatgttcaattgcccggttgctccagaacccttggagtgcctaatcacagttaataattaaaacaaagcaagaagattcaaatgttggatttaagtattatcaagagggaaagaaaccatttgagggggaaaatatgaggagtcttttgtggtaggtagattttatggacagaaacatgggctctaaagagagaatgannnnnnnnnnnnnnnngagacagatnnnnnnnnnnnnnnnnnnnnnnnnnnnnnnnnnnnnnnnnnnnnnnnnnnnnnnnnnnnnnnnnnnnnnnnnnnnnnnnnnnnnnnnnnnnnnnnnnnnnnnaggaaagagtgatcttttaaaatggatgtggattatggtagatggataacttagtatctatgaagctcctatagtgtccccagctccgtgttagaccatatgtctaacctagccaaaattgtgtccacaggatacaactagcaaattatatgtgacagaaacaaaaactggaacctgcagttttggtatggaatatttgaaataagaacattgacagaaatttaagacgtggtcatagttttaagtaatatgagttaggatggggctgagtatgctgcagtgacaaataaccccctcatagtagtttatacgaacgtccttttctagggtctcttgctcttggaccc

SEQ ID NO: 412121 - DNA, 691 bp, Homo Sapiens
  misc_feature (498)..(498): n is a, c, g, or t
ggcagatgtcatcaaagtgtaaataaggtgactaaattatgcaggttatatgtaaggtttgctaagtactttgaggttataaactgctttttggattttgagaagtatttaacttgctagcttcacagttggtaaggccagggtacatatgggacacacacgcccttaattatgctgggagtcaaaccatggctgcacctcccacacaattaaaacaatttaccaggttttaaattaaagttaataattactaggagttgccattataacatgtaattgagactactggaaatacttacatgcaagttgtgtaagaacagtaaaatgtggggggttttttggtaaaagattataagaatgcacagaaatgtaattttctgcctaaggttaaaggattattttaaattaggataaagctgaaggtttaaacaagtggtggaaggactgtggaaattaattttgtagaagaggttctctgtgtgaacaattaactcacanaggtattacatgggttttctgtaaattaagcattaaaatgtaaaacacaataaggtattcttaagtgttaacctgctcttaggtaaaatttgtgaagggttattaaaaggttttgcttggttattctgagtcattatttttgccaaatatctatggtaatatggaattctatttcataattcgggtttcctcc

SEQ ID NO: 412122 - DNA, 663 bp, Homo Sapiens
  misc_feature (557)..(557): n is a, c, g, or t
  misc_feature (594)..(594): n is a, c, g, or t
  misc_feature (647)..(647): n is a, c, g, or t
cccccctctgcccccattccataaatttgtgcctgatcgctcttgaaaccaaaatacttcccacatctatttgtggttaatgatccagataaacatatcctttttacctgttgaaaaaggaccctggggagttgtacctggaagtcttggacccttcagtaactgcatgtacttttttctcttgctacaccacaaactttatttttgttaaagccttatacgagcagaccttagtgagtcctgtgagagttttcaactctataaccttgtatagatgttgtacctacctatactcctccatcctaaccaaggtgtcagactttctcatacctttcaaccaaagtaatttttacatgccagaggccctcagaaacttctaaggtatagcttgaatatttctttgacattttgtgtttatctgtaaatatataaattatattatttctcaaaatattaccatgagattgttatgctgaatgtgcatcgtatttctcctatgggtttcttatatcctcaggaatcctttccagtcctagaatatccttttcggatctggntagggtgatcaaccattcagatttgcctaggactganaaggttcaaggacatgggactctcagtgcttaaactactaaagtcccagacanactggctggtcccctt

SEQ ID NO: 412123 - DNA, 411 bp, Homo Sapiens
  misc_feature (235)..(235): n is a, c, g, or t
  misc_feature (368)..(368): n is a, c, g, or t
  misc_feature (389)..(389): n is a, c, g, or t
cagtgtgttagtttgtttttgcattgttataaagaaatacctgagattgggtaatttataaagagaagtttaatttgcccatgtttctgcaggctgtacaagcatggcttcagcatcttctagtgagggcctcagggagctcataatcatggcagaaggcaaagggagagctggcagtgccacatggcaagaaagggagcaagagagagagagaagggagaggccccagactctnttaaacagccagatctcatgtgaactacttgagaaagaactcacttatcacaaggggatggtgctaaatcattcatgaaggatatgcccccatgacccaattacttctcaccaagccacacctccaacattgngaatcacatttcaacatgagnatttgagggggacacattgcat

SEQ ID NO: 412124 - DNA, 540 bp, Homo Sapiens
taatagcagtaccaatttttattgttaggataagttgtaggagaaattagcaaaggttaactgactgctgtgggtagacagtacaattcttcttcagtttctgacttaggagtgtttccgaaaagttaagtgaaaacaaaagtttgaagtgtttcccttttagttacataacagacactcattacggaattgaacagttttagacccataaataattaagttaaaagcataacaaaatcctgttaggaaactgatgaaaaatttgtttctaaaacactttagattttaaacttgaacacgtagtgaaatgtcttttcaatgaagatgggtgcagtgttcacaggcctctccactaagcagatgtctactgagaacacagtattaggggatgtgggtggtaggatgcagtggccaagcctcaccctgggccgagctgggcaggctcgctcactcaggcacagtgaggaaggcacactgaagggggtttgcctgactgccagcatgccaggtatacatgttgactggctgccacggtctttt

SEQ ID NO: 412125 - DNA, 538 bp, Homo Sapiens
  misc_feature (413)..(413): n is a, c, g, or t
  misc_feature (439)..(439): n is a, c, g, or t
  misc_feature (471)..(471): n is a, c, g, or t
gctttatatttagacccaagccccgaactgccccgacaccccctgtttcctttgtgagctgagaatcttcccacagaggccagtctgggtcatctctttcctgtgatcaggtagggtccttcctgacaaggccctgccccctcctggccttgactacccctgggcagtggcccctggggtggacctgctctcctgctctgacaagcagtcatctgtcttagagcacaggctctaattacccctgccattagcctgcttggcaggactgcagatgttattaatggcggtgaaattatccaatgcctttcactccccagccactcgatgtttgtccctgtgacctctcacagcacttcatttctttattcactttgctgctgtattgaatcttaaccttgagtgtgagataacanggaggagaatgtcactctctccaacngtcctttattcccttcctcagcccctcacccnctacttattttgggatgtcccagcaccatcctcactgccatgctgtttgtcagcagggagctcttgc

SEQ ID NO: 412126 - DNA, 423 bp, Homo Sapiens
gtggatatcaaggacttatacaaacatgaaatgtcctgagactccagaaaaagggaggggagagtaatcagggaaagctttgaaggatggggacaactatactaaataaaaaggtgaaaagcaatcagcgtatggaagaaagtctattaactagaattgagttcatctgtgagtaacagaagtgccaaaataacaatggctgaaagaagacaaaagtttgttttactctcatatgaaattaagttgctagggacctaggttctttctatcttgcttctccaccatctttagtgtattgcctcgtggtttaatatggctgcttatgctccagccactacattcagaatccacacaccaggaagaaagaaggtaaagtgaaagggacgaacttaggctaagttcttttaccattttgctggacgc

SEQ ID NO: 412127 - DNA, 425 bp, Homo Sapiens
  misc_feature (275)..(346): n is a, c, g, or t
ctgtcctatcttgtattaagctcttctaatcagctattatcaggaaagcactgaatgtctgcctgatgcgattgctacccacctgatgggaacattcaatgataatgctgaacagataattcaagtgctgacacgccctgtggtctgttgccttatcacagtgctttgagtctacggcagatagcattatcttcatcagatcctggacctctgaagatgaggcgacttgtccaaggccacagggagtgctcatttctctgcagagccagatcacnnnnnnnnnnnnnnnnnnnnnnnnnnnnnnnnnnnnnnnnnnnnnnnnnnnnnnnnnnnnnnnnnnnnnnnntgcagtgctcctctcagtgccccccttaccctcaacactgtaggaagtcctgcccttctgactgccatcaccttcattt

SEQ ID NO: 412128 - DNA, 423 bp, Homo Sapiens
actagtctctggaataatttagggctgagaagagacaaaaatcaggagactgtaagactcatataatgaaacaatgtgttgagtatagaatcatatttcctaaatgacagactggatgatcaggctgctcttgggaagttgcacagagaacctgagggactcaaaagtcagtgcgttacctaaaactgaagcccggagctaagtatagaaaacccaggaagtgcaggcaaaacagtgaggaagtcatgggaacaacgcagaaacaggacacctggcgataccagcatggaggttctgtaaagcaagcattgtggcttccacacccatggtggtcacagagcaggtgcctaacaggtgcttgttgaatgaactacttctgcctccacctttgtcacccagagcttctactctgttgttttctcc

SEQ ID NO: 412129 - DNA, 405 bp, Homo Sapiens
ctttgatgtccttcatggcttccaaagtagcattttatttaggctttcttttttctccatattcttaaaggaaaagaataaaattgtagatggacctctaattatattttatctttccaggggagagcaaatattgttttaatgatattgtattagtctgttgtcatgctgctgataaagacatacccgagactgggtaattttttaaagagaaagaggtttaatgaacccacagttccacgtggccggggaggcctcacaatcgtggcagaaggcgaaagtcctggcttacatggcggcaggcaagaaagaatgagagccaagcgaaaggggaaaccccttatccatcagatctcatgagacttattcactaccacgagcattataggggtggcccccatgttc

SEQ ID NO: 412130 - DNA, 597 bp, Homo Sapiens
  misc_feature (309)..(309): n is a, c, g, or t
aatatagggctcagtgaggaagggaaatcccataagcaaaggtggctcacagtgcattgagtaacaatttgatagtaactacacctcctggaactgaagaatttctttatgagataatttctagagcactgaattccagatgtttaaagagatggagatttaccctttgaacactgaggagtcacctggggtagcttcttgaatggggatgattcaaagaatgggacatgattttcaaggccatagtttgagaatattaatctaggagccgtgtgtagcattcatccacactttctcatttggacctgnggtaaacagtaacatggatttcatgagagctgactaatcaagactgtagtctctggacttggaacatagtaaagctaattcaaaatggaagattgactactagcctccttcaatgacttcagaagaggaattaatacctactagattgaactattctattttagtcttcttattgtataatgaaaccttctcaaccaaagagtgaccctcagtgctcctttcttctaagagctggcttgttcctttaatatttcatttggccattatttcgcctttagcgctaccccg

SEQ ID NO: 412131 - DNA, 577 bp, Homo Sapiens
  misc_feature (448)..(448): n is a, c, g, or t
  misc_feature (492)..(492): n is a, c, g, or t
gccagagcagggcagaggatggccagaggaacaaagaggggagagaaagagaggatgggacgaccagctgtagagaggagctattctctctgctgatagctgcagatgatgggatgaccagttgcagagaggagttatcctctctgctgagagctgcagagacgacttgctggcagagaggagccgtcatctccagggcctcctctctgggggagagctgcagagctgcagacatcaggatgaccagttgcagagaggagctatcctctccagggccacctctctgctgagaactgaaaactccatagatgacctgcctacagagaggagctacccactgcaggtctcctctgagctgttgtaacactcagtaaagctcatttttgtcttgttcacccttcacttgtctgcatacttcattcttcctggattcaggacaagagcttgngcggtgctgtggccacagaggtttctggccagttgacaccccanagatcccataacaccaggacatgacttctgatgtttcttctgatccttggcacatttcattcctcaggaaggagggcacctgtcc

SEQ ID NO: 412132 - DNA, 597 bp, Homo Sapiens
ctcacctggaaactcctcacacaattcagtgatggtttagcaatttcattataatcatgaaacaacagacaccatagcactagtttaatattaactttccttattatattttcattcatattactgtcatgcttttttgaaactgattattctgttttctacagcttcctaacaggttaggaaagcacacatggaagttagcactgtataattctttatttaaagcatataatttgatagcatgtgaaatttagatgacaattcttaagtaaaactaatcatattatatctgacatttatttttatgtgcagattgtgtactcagatgttttacattagtgattcttttaagttatcacatcagccctaagaggaaggtattcctactttccttattctgtaggtaggaaatctgaggatttgacaacttgagttgtttgttaatgtgatactgccgggaagtaataaggctgaatctaaacctcttgagacagactccacagtccataaacttaccactaattaggaaggctgccaatttgggatataattcttttcttgtcctgataatcataggttatttaccgagtcacgctt

SEQ ID NO: 412133 - DNA, 359 bp, Homo Sapiens
  misc_feature (202)..(313): n is a, c, g, or t
gaaggaggtaattcacttggctgatgacaggctgtgaggggctccaggggagagtgctggaaattgaagggagaactgaaggtatacaatccccacctggtgatcactaccttgggcccagcacagaaatgcaacataactttctcctgggaagtatcccttgtggtcctcacacccaaccctcagaaaagcctttagcacnnnnnnnnnnnnnnnnnnnnnnnnnnnnnnnnnnnnnnnnnnnnnnnnnnnnnnnnnnnnnnnnnnnnnnnnnnnnnnnnnnnnnnnnnnnnnnnnnnnnnnnnnnnnnnnntgatactgagttttcactgaggatttcataagggacataggataga

SEQ ID NO: 412134 - DNA, 341 bp, Homo Sapiens
  misc_feature (190)..(256): n is a, c, g, or t
caaagcaagcacctctgtagccaccatcaaaacatctatattataggaattacctataaaaagtaaataggaaattatacgagagcgctttgtcataatcagttattcacagctaagacatttttcaaaacaactttcctcattttttattaatggataatactataaacattttgcatggctaaaatcnnnnnnnnnnnnnnnnnnnnnnnnnnnnnnnnnnnnnnnnnnnnnnnnnnnnnnnnnnnnnnnnnnnatcatttaatacattaatgggattttgataacaattacacttttcaaagatatttaactctgattctatattctatgtaatgttt

SEQ ID NO: 412135 - DNA, 401 bp, Homo Sapiens
gaagtaatgtcaatctgtccctatcctacagacctcagtaggtgcttagtgagtttgggagatttagaaaagcactgctggattaagggcaagcagagcattttcttggatgttcctcatgggtgaggaaaaggatactggattcttattatgcaagctggccatagcccctaggagtcctagaaggcttcaggaaaggacataggaccagactggaccactctgttctctctgggagaactcaacatcttgcactcaggacttaagccatgtaggaaagacacacaagaataggcctctggatcagaggtacccggtggcccagaatggtcaggggcaagagagggaccaaattcatacagctcctggtgggctttcttcagataagtggcaggtgctgc

SEQ ID NO: 412136 - DNA, 272 bp, Homo Sapiens
catatttcttgatatgtcacaatatgcataggtatcttacacaattatactatataaattctactttatatttactttttccctttaacattaaattatatgcatttttccattttgctgcaattgttgtaatgttcactttagtagatgcataatatgcataatttacagtgttaactgtgtcaggtgtttacaattacctatttgatttaattctcacaactataggacaagtatggtttatttattcacataagtctgggctgatgggt

SEQ ID NO: 412137 - DNA, 677 bp, Homo Sapiens
  misc_feature (129)..(451): n is a, c, g, or t
caaatgtaattattcgctctcgccaagctctcatagatgcgctcttattggaaaactcaaatcattttctatgaacatgtaaatttgatatttacactgtaagatcagcattaaagctattctatagcnnnnnnnnnnnnnnnnnnnnnnnnnnnnnnnnnnnnnnnnnnnnnnnnnnnnnnnnnnnnnnnnnnnnnnnnnnnnnnnnnnnnnnnnnnnnnnnnnnnnnnnnnnnnnnnnnnnnnnnnnnnnnnnnnnnnnnnnnnnnnnnnnnnnnnnnnnnnnnnnnnnnnnnnnnnnnnnnnnnnnnnnnnnnnnnnnnnnnnnnnnnnnnnnnnnnnnnnnnnnnnnnnnnnnnnnnnnnnnnnnnnnnnnnnnnnnnnnnnnnnnnnnnnnnnnnnnnnnnnnnnnnnnnnnnnnnnnnnnnnnnnnnnnnnnnnnnnnnnnnnnncttacagtttaaaaatttgtaggtgggactgccccctttctgtctcgtactccaatttgacttaaacaaaaaaattggcgtttttgaaacaaagcttccttgtatggaaaagaactcttatgggtaaaaaaactgtcagagaaggtaagtggcaaagctgggttaacattacatttcaatatcccatactgagagtcaggtctataccatgatggatatatattgt

SEQ ID NO: 412138 - DNA, 324 bp, Homo Sapiens
  misc_feature (152)..(193): n is a, c, g, or t
atttttaagaagtaatgaagacctgctccctcaacatctatgaaagccattcaaaacatatctttaagataaatatgaccaatagatcttaaaagtgtatacctgatttcagtacctactcattttgagggtaagactaaaggaatcaggannnnnnnnnnnnnnnnnnnnnnnnnnnnnnnnnnnnnnnnnncttagagatcttcttgactgttacacaaattgctgtacctcttccctaatagccttactaccctagtgtggttatgaataggggagtgcattgtctattgtcacattcttcccttagaatttgatttcttt

SEQ ID NO: 412139 - DNA, 355 bp, Homo Sapiens
ctggagtccagaatggtttgccagcaccaccttagacaacacagcgtacctgcaagccttgggtttctcatctcccaaatgaggatgctaaaaagtaagccaaatgcttttgcaattcatgttatacaaacattgccacttttttcaatatcctgaacatcctgaattgttaaatagatccttctagacaccaactcttaggaattctatttgaatcaggacagccttgcatgggccaccagactgcttgtaaatgcagaagatataattgaaacttcataaagacaacaggaaatttatttggtgttgaattcacattgcagtgatttatgcacagttacgatttatgcagttg

SEQ ID NO: 412140 - DNA, 507 bp, Homo Sapiens
  misc_feature (429)..(429): n is a, c, g, or t
tgctttcactggaggaggatggttatgaagaaggtttccattaaatgaaatgccagttttcttgagggaattcagagggcagagcattttatgaaaattgcttattgtctttgcttatccatagtatccaggagatttgagaagaataacctcagtgtgatcctttatttcatgccttatatttcatcccaagaagctaagttttgtattatatgaggaaaatcacatgatgaaccacaaaaataaaacatggattagagtaggatcactgaaaagtttacagtaatgatacagtcatatctgcatggcaatgaccagtatttcttacagcaaagaagcccataagtttgtagatgatattctttttcaaatacattttagattgtctaaaagtttctaaatcaatggtttcattctgtttcttttcgntatttttttacaaatatcgagtgcttaccatgttataggccccttgaactttgatcagtggagtgtccttgctttctc

SEQ ID NO: 412141 - DNA, 449 bp, Homo Sapiens
  misc_feature (335)..(376): n is a, c, g, or t
ctttaaaatatttggttaaactttgatcatggcagccttgacctccccagactcaggtgatcctcccacctcaccctccccagtggctgggaccacaggagtacgccatcacgcttggctaatttttgcatttttttgtagacatggagtttcatcatgttgcccaggccggtctcaaactcctgggctcaagtgctccacccaccttggcctaccaaagtgttgggattataggcatgagccactgtgcctagccaggttaaactttaaatatagcacttctctgcatgtcagtgaatgttcactatgaataatgattttttttaaaagacccnnnnnnnnnnnnnnnnnnnnnnnnnnnnnnnnnnnnnnnnnngaattgggggcaacattaagtatattctggcctcttgtctttgggtcacactcaagataccatcccaggagac

SEQ ID NO: 412142 - DNA, 395 bp, Homo Sapiens
aaccgtttaaggtaggtgtttagcactatgaacttttttctaacactgtttttgctggatcccagctggtatgctgtgactgtgttttcatttatttcaaataattgttttatttttgtattaatttcattgttagcacaaaagtcattcaggagaaagttgtttaatttccatatagttgtgagatgtaatggttttggatcttggtattgatgtctatgtttattccactgttgcacgtatggttggtatgattgcaactttttttactttactgagacttgcttgtggcgatcttggagtatgttccctgtgcagacaggaagaatgtatattctgtgtttgatgggtggagcatcctccagatgtcttttaggtcttattggccgtgctgg

SEQ ID NO: 412143 - DNA, 494 bp, Homo Sapiens
gcttaaaagcagctccaattatggccagtctgaaatataccatattgatataaattgaaaataaaataattatgctctagttcatcagtattcagagtattaagaatctcaatcacattcagtggttaagggggtgggatattctctattagctcttctatgttttcaggcaaaaaactgattgtggctcagtcttatgaaaagtggaacttttcaaaggaaacttctaacgaagctccttagccatggctgatttctagtccttcgcaatccccaaacaagtcctatacagaaatttttgaccaggcattgaccacaccagtgtcagcatttacataaatatcataattatttcatacaatatgaattagtgtaaaacaccaaatcaaccatgttgtgctgtgctctgttatatcctcatggtttggtagaacctaaggactatgcaatcagtgacaaagtaaaagactgcctggaactggtttactgagcgg

SEQ ID NO: 412144 - DNA, 406 bp, Homo Sapiens
  misc_feature (274)..(350): n is a, c, g, or t
ttgagggaaacccaggctttgaaaagcaactcagtggtaaggcttttcaaattttatgagaatctctgcgtcagcaggtctggacaaatgcaaaatataaagcgtctgtgttggacttcagttttcccatctgtattgtcagaactccttttttattcccacccatttttcccccatcatagcttcttgagacagatatcaggaagggatctaatacaagaattagaaaatttttatgttttttggaggtgggagggaggccaggtcttactcnnnnnnnnnnnnnnnnnnnnnnnnnnnnnnnnnnnnnnnnnnnnnnnnnnnnnnnnnnnnnnnnnnnnnnnnnnnnngcttttacatttttaaaaggacttcaggagtgcttagtgagtctcactgggacttt

SEQ ID NO: 412145 - DNA, 423 bp, Homo Sapiens
  misc_feature (100)..(123): n is a, c, g, or t
gcaatggttctgaggtccaccaggcagccgtaggagccagttgtgagaagggcaagttccacaggcttgggctcttagttgaaagagctcctttcagaannnnnnnnnnnnnnnnnnnnnnnnattgccttcccatagaagattatagatagctgaagtttgtgagttggattacttccatccataaaataaagactaaaatctttccaccctaatcagaaaaaagcatccttttgtcccactatattcatcaatatgtcatatttaacagttacaattattgacaggcatataaaacattttgtgacagagtagcttcctataaagtgtttattcttttttattgataataagttgacttctctagccctaccaagagaatacggaccactaacaagagatctccatttatatgacttcttc

SEQ ID NO: 412146 - DNA, 543 bp, Homo Sapiens
  misc_feature (480)..(480): n is a, c, g, or t
tgaaaatatattttcagggaatatttgctaactccttattatgctaggagtttaagatactgactcaaagactttgaagtgattagagcttcctctagagtactgtggcctatgtgtactaaaacatctgattgtccgtccaacttgataatatactgctatcttttgggcctctggtgtattgtgtatttccattatcttcttgctatgaatccttgatgtcaaatgtcagatatggacacagtaatgatgacagttacaatgaaccagtgctgatccatgaagggaatatggaggaaagagtaggagcggtggtaccagactcaatgtgataaagaagtgagtttgctatttgctgctgggtatttttgattctgtgatagttagtgaagttaattgctcctattttttctttttaaccagttgatgttttctttacttacagttcagctatcttgataataatcatgctcatattgngagaatagtcttaagtgcaataagataaaactgggaagagagttcagagatcttcattgtcca

SEQ ID NO: 412147 - DNA, 598 bp, Homo Sapiens
  misc_feature (253)..(396): n is a, c, g, or t
  misc_feature (400)..(480): n is a, c, g, or t
  misc_feature (506)..(506): n is a, c, g, or t
  misc_feature (522)..(523): n is a, c, g, or t
  misc_feature (527)..(527): n is a, c, g, or t
  misc_feature (572)..(572): n is a, c, g, or t
cagtaacttagcatatacagctaaggaactgaattatgcagggaagaaacatactggtaggaagagactaaaagacattgaaaatagaacaaaacgatctaaatatatctcattaatttcaaaggaaagggtagataaaatgtagtggaggctatattaaagaaatattgctgacatttttccaaacctaataaaagacaccaaacttcataatcaggaatcccaccaaaatattaataggataaatgttttnnnnnnnnnnnnnnnnnnnnnnnnnnnnnnnnnnnnnnnnnnnnnnnnnnnnnnnnnnnnnnnnnnnnnnnnnnnnnnnnnnnnnnnnnnnnnnnnnnnnnnnnnnnnnnnnnnnnnnnnnnnnnnnnnnnnnnnnnnnnnnnnggtnnnnnnnnnnnnnnnnnnnnnnnnnnnnnnnnnnnnnnnnnnnnnnnnnnnnnnnnnnnnnnnnnnnnnnnnnnnnnnnnngaaccagactctgcgacaggaaaaanacaaaaagcaaaacannacanaacaaagatgcacatttgggcacataatagtagaactgcagatcnaacaaagacactgcagacgttggcgt

SEQ ID NO: 412148 - DNA, 212 bp, Homo Sapiens
  misc_feature (63)..(63): n is a, c, g, or t
  misc_feature (85)..(85): n is a, c, g, or t
  misc_feature (143)..(143): n is a, c, g, or t
  misc_feature (171)..(171): n is a, c, g, or t
  misc_feature (188)..(189): n is a, c, g, or t
cctagacatgtacagccccatccaattcacccagtgtactccacctctctttcaatggcacanaactttcaaattccaccaattnttagcaggatatcttagactcctagaagtctgtggtgatatgacgggaggtgactganatctgcacaagatcttctttttgaccangaccgcaccctcacttnntatgtatagtcatttccattctc

SEQ ID NO: 412149 - DNA, 648 bp, Homo Sapiens
  misc_feature (424)..(424): n is a, c, g, or t
attgtttctaaataagagagtcagcattttgataggcttaaatgaaacgtatgatttatgccttgacaacctggacaagagagcagagtttgagttaatctttgcatgtcagtcagtgcttcatcgctagtatattcccaatgactggtggttgaattgtatttaaaggtgttgaaagggaggtggaaaggccattaaaagacatactccaacagttctactatttttttccctgagtctacaaaccatgccagatccttaacaaaggtaggtattcttggaatttcatgaatggcaccatttgaaaagcagagtgtttagtaaatattgaaaaataataatgagataatttgtgtatttcccaccatctgggagttttcacactagtattcagctttcaggctcttattcatgctcttctatntaattatgctctttgtatgaacataaataattcttttcactgaagcaaattcttaaatattctcattctctaattctaatcttaaaaatttaggaattatataatttcatattcttgaagttattccttctccttttactttcaaatcattttaatttatattatttacttttgggggattaatgctaaatatttggatcccatgtagttgatgatatatcacg

SEQ ID NO: 412150 - DNA, 270 bp, Homo Sapiens
ggtctcagacaccagtgatgaaggcttgggtcatattactagtagaagcagcagctgggggtgaggggaaagaaagtatagtagaggagacaatggacaccagctgcagtcctgcgagctgtcgtagtgatgcagttgtagttcattccacaaacctgtcattccaccggatccctggaggagctgctcctggaacatacatggaggatccatgcctggcaaggagtggactgtggcagacaccaagatgtgctactttacccaccttcc

SEQ ID NO: 412151 - DNA, 336 bp, Homo Sapiens
gaagaaggaaccaggcaagggaaggttggggtatattggtttaggttcccctagaagcagactttgagccggaagtggaagtgtaaataagtgtatttgggagaggatcccaagaaacaccatcggaggagtgggaaatgagggggaagaggagcagtcattgaagggtgccgggtaaaacacgcatcttggattttggttgctgagagagtcagtcttttttctcacctttatctggacaaggaagtggctaggattattgtgggagaaactagctcatcggtggttctgggatttgaacccaggattctcggccagcattccagcaacagggac

SEQ ID NO: 412152 - DNA, 717 bp, Homo Sapiens
  misc_feature (467)..(467): n is a, c, g, or t
  misc_feature (565)..(565): n is a, c, g, or t
gttaatagctagctgaattcacacttcagtattctcccaacaggaaactcctttggtgggtgggggagccaaaggcatctgtattttcaggaggccctgcttaagtttggataatgtttatttctgtagctgctggttgtacaggcattttcagtttaaaataattttcatatcacttttgtaggccattaatttcttcagtaatttctcagcaactcatagcaccccagtaagatcatggcaaagctcacacatcacccacctgtatgattgtagaggggccaagggaaagcgtccgtcatcctgttaagggtttgttgaaaattgttgatgaaaagagtgaaactttgttatttaagagatttattctgagccaaatagaagtgaccatagcccatgacacagccctcagaagaccctgagaacatgtgcccaaggtggtcggggtacagccttagtttatacantttagggagacatgagacatcaatcaaatacacgtaaggtatacatttgtttcagtccagaaagggtgggacaacttccaagtgggcacgagagggtnaggtaggtttccttggtctttggctccctctttcgcttcctcttctctcggccttctggctgcctgttctttcctttcttctgatcggctctttttgcgtctccctttccgcgttctttgtcatctccattttcttctctgctcctcggcct

SEQ ID NO: 412153 - DNA, 675 bp, Homo Sapiens
ctggattatgtgaggactactttgccactctttggaaatgcctagttgatccttggtttagacataaccttggttaaggtgtattggtttggtaagtcattgaaaaagaacctttgttttaaaagaaagaatttgaacaaaatatttataaaagataggccctcaggtaaaataggctttcttctttcccagagctgtccatgccgagtccaggcatagagaaggctttctttgccctgttcattaaagagcttcacaatgatgtcagtcatctcaccaagaaacaaactaagttgaaaagcccacctatttaactaagttggtctgttacagtaggcaggcagacatgggcaaggcaggagatcacccccaaccttcaccaaggaatgtcagacaaccattaggtgatggtcaggtggttgttaaactgtctctctcaaataatatttggttgcagccggcgccaggaaaaggcaatcttccagtagatagaaaaaccctgaaactgatgatcagtaggttcctgataagatctcaggaggttgggcgagtaggctcaagcatgcacacttagaggcaaaaatggtacaagttaactggtatatgacctttctttaggaacagtcaactggtaaggaaagatgcctaaagtagcatgcacataacttcaatcct

SEQ ID NO: 412154 - DNA, 169 bp, Homo Sapiens
gggtaatacttggtcacattgtccattattaaccaagtaaattacttcaatcattttgcaaaatgctgattttctaactctctcattccctctgcatgtatcaaccttaattcttctgttagaattaattgccaaggcatcatattttatgttacaaatttttctttgg

SEQ ID NO: 412155 - DNA, 163 bp, Homo Sapiens
ggtttctctaattcgggcagtctgttctgctgatttagaaatgggaccccttccatgttcaatatcactctttatgtataaaccacaagactaggggaagtagagtgacactgatccttaaataaaatttctgccacaaaacactgtgaatgaatttgaaagt

SEQ ID NO: 412156 - DNA, 428 bp, Homo Sapiens
cagctccatgtggctcaaaatcaagagagagactccatttgtttgggagaaggtaagggaagagaacaacagtttctgcctggtaatctagagaatgttttccgatcttgcccaagaccatcaaggtggcacctctaccagtctgcaagaaccacagtgctattgggcttggggtactccctgaaacagaaattgcttagattgcaatacctacatcctatctaatatctggaaagccttccaaagaaggaagggtactagcaagcccatattgaaaagtctaaaataaatacctaactcttcaatgcccagatacagaagaacatctaaaagtatcaagaaaaacatgacctcaccaaacgaactacatccaccagtgaccagccctagagaagaagagatatgtgaattttcagacagaggtctgc

SEQ ID NO: 412157 - DNA, 415 bp, Homo Sapiens
  misc_feature (282)..(293): n is a, c, g, or t
ggcttggtaatttttcccccctcagctcacaaaaccaggcagtgggatttggagggtcagcaactgagctagagatggtaagtgacaaagtgagggaatatcgtggatcccagttgttcctccatgtgtactggtatccagggcgaagcaagagagactgatttagaatcaagaaaaaagctactgaccacggatgttgccatttggagtggtttagcatcagagccataggagctgctcaggttcagggcttgcttgggcagctatggctgtctgaaaacnnnnnnnnnnnngagatataactactttcaagtcctcggattttgggggtagtaattccacagggcttgtcatttgtgtttgaagctggtggtgaggagggcggagtgaggagaagcgagggggtggagtgggt

SEQ ID NO: 412158 - DNA, 439 bp, Homo Sapiens
cacgagagtaattgatttctggagaagtaagcaagctttgttgagatctcagagctagtgactaacacagcctgaactgcattttctgacttaagttacagtatttttttactgcttattgtatataattattcaagtgggatatttggttttgttcgcagaacctgggtttactttgaactttttctataaagtgacattctgtgtttgcagcttgtacaggataaacagggagcccttaggttacagctgaaagatttcctgaaccctccaacattcattaaggccccctgggcagttcacagttgtccaggctccagcaattgtagtgccctggtgtttctaggaatacattatcttggacctaattgagatcaacataaccaatgtttcattttattattagtccttattggtggctgggtccgaggctctgctg

SEQ ID NO: 412159 - DNA, 424 bp, Homo Sapiens
ggatttctgggacagatgaaggatttttcttaccggtgaaaagaacaactaatttctggcattgttctgaaacactgcagctctcttcagcgtagtgtctgtattgagcagccagctgaagtccagtttctcatccctcaggccttctcctcttcagatggactgcagggggccacgagactctagtggcagccgctcaactctgaacacagccactgcatagagggttcagtgaagtgagtggggttgttactccccaccaagcagtgagtggctttctgctgttccactccagaggcctcacctcctgtgtttttaaactccagtttctgtctttccctgttggcaccaaacttatcttcattataaatcatcacattatttccccatgtttgttgacgcctgtggctagtgggtcggtgcc

SEQ ID NO: 412160 - DNA, 646 bp, Homo Sapiens
  misc_feature (526)..(526): n is a, c, g, or t
  misc_feature (547)..(547): n is a, c, g, or t
  misc_feature (555)..(556): n is a, c, g, or t
  misc_feature (560)..(561): n is a, c, g, or t
  misc_feature (581)..(581): n is a, c, g, or t
  misc_feature (586)..(587): n is a, c, g, or t
  misc_feature (594)..(594): n is a, c, g, or t
  misc_feature (621)..(621): n is a, c, g, or t
ccaactctgagtatacttagggaaacataatgcctcggagctaatttctggacactgaagttggaataataaattattttgcaagtaattgtgtttacaattctcagcttccagcaaaactgaaaaagaacctaacctagttgccagttgaccataaaatttaattaggggcatataattcaaaaggaggtttaaaaattgagtgtcccatctattcctaactcggtgagaattttatcacaacaggatgttgaattttgtcaaatgtttattcttcatctatggatatgatcatatggttaagcttatttaatatgtcaatattgagaaatatattgatggatttttttaattgagtaaagttgctattcaaatctagttccatccccatctactcacttctgtgaatgaaaattctcagtgatacgtgtataagaattttaaaaatagcaatataattcatgctgaaacctgtatttttctattaataagtagcattcaaattaagatacctgaacaaaatggnaaaaacccacattcatcgaantaatactnntatnntatatttaataatttaattntatanntagtatntaaattggtatctatgactaaataatntggtaactcaatccaggaggttgtt

SEQ ID NO: 412161 - DNA, 628 bp, Homo Sapiens
  misc_feature (101)..(101): n is a, c, g, or t
caaaaacaagtgagggtacatacagcacactgtgaagtggatcttgcaaagcgaatgcttttatcaccgagttagctgcccttgatataatagagatgatntgttttggaacatagcacaagtgtacaaggtttcttgcatatatcaccacaaattctacacagtaacttcttgacataattttaacattctcgaaaagcgtgctcttttgtttaactctctcaacaacactgacccaggcaggataagcgatcctgtagattatcaagagtaggtgatttatttcatcatggtcaaaacatatacaaaatctgccttcaaacccatctgttcctagaggtagagatagatacatatttatacaaaatagagatatgtatttatacaaaaatagaagggagccatgggattttgaggtatgctgtgaaattcctactatttatcttttgtgtttgactatccgtagggctgtaagcttactcagagctcacatagatgcgtccaggtactgtaagtcaacgactgtgcttggtctctgccctgttcttgttctgtgaagtgaagaaggcctcagatgcatttggtttggtgaggctagaagcacttgtatttgctacctctgtgttac

SEQ ID NO: 412162 - DNA, 301 bp, Homo Sapiens
ccaactattaaaccaaggataccagaccagtgccaagccaccagggcaaaatacggtacgctgcagggctagcataaaccccaagtgcgcactatctctgagacccatgtgtcggaatcacgttgagtgataggaagatgccatccaaatccaattagggactaatatatgatgaggacaactcagggctatagggccagtccccagaggacaaaacctagacgaggactttggaggacgacaggcacagggaccgtgcagacgggtagcgacctcagagggaggctgaaccggtccactg

SEQ ID NO: 412163 - DNA, 785 bp, Homo Sapiens
  misc_feature (86)..(125): n is a, c, g, or t
  misc_feature (132)..(361): n is a, c, g, or t
acaccgacagacccaggtaccccgccacagcacgcacgctgccacgcctctcccctgcagaccattggaataaccggcaggtggtnnnnnnnnnnnnnnnnnnnnnnnnnnnnnnnnnnnnnnnngcacgannnnnnnnnnnnnnnnnnnnnnnnnnnnnnnnnnnnnnnnnnnnnnnnnnnnnnnnnnnnnnnnnnnnnnnnnnnnnnnnnnnnnnnnnnnnnnnnnnnnnnnnnnnnnnnnnnnnnnnnnnnnnnnnnnnnnnnnnnnnnnnnnnnnnnnnnnnnnnnnnnnnnnnnnnnnnnnnnnnnnnnnnnnnnnnnnnnnnnnnnnnnnnnnnnnnnnnnnnnnnnnnnnnnnntaaaaacagaaatgaatgtgtgtgaaagtgtggaccactgaccatgtctaaccaagtcaccaataggatttgttaaacatggatattctcacacttcagaactcttgaatccaaatcctcatgggtagggatggttgttcatgagaaatctcttattttgtggcatttcaatggccagaagctgcactgcggagcttagtgctgtaggacttgttagtccccatcctggtgacctggctacttctttattgcgcactgaagtatgccacaggtgattggataagctttgggactgaattagtcttctatttgctgctgtaacaagtcaccacaagtgtagtggcttgaacaacctgaggttatcatcttatgaacctggatttcagaagtccatcatgggggtaaccggttctcggtgttggcg

SEQ ID NO: 412164 - DNA, 679 bp, Homo Sapiens
  misc_feature (194)..(228): n is a, c, g, or t
  misc_feature (550)..(550): n is a, c, g, or t
gagttttgatttaaaagtgtagagacaagggttcttatttgaactttctacctaattgtaatattgggaaatttattcaacagtcagatattatagagtattattgattaaaagcacaaaaaacttgagttagggaatttgggtttgaatctcagtgccggcacttattagcttaagtcactttcttgaggctnnnnnnnnnnnnnnnnnnnnnnnnnnnnnnnnnnntactttctgaaaatatgtgtaagtacaaagtgctatactttattctaaataatttcatgattcgttcatatgtgcaattttattactataaaattgttaataaatgtaaaatgattttttcatcagaaattatacttttcaattttatggctcagaaggtgctattgaattgataaactgcttagtggttaaataagacattgtaaaaaacaaaatgcaattactgtgataaagggtgtcatataaatgactctttccatgcacaaagtcaaaatcaaattgaatgtaaaacctaaggttatgtacataatatgccatcagntattttggggtaaaagtgtacaaaacacacataaccacattgaattaatgtgtatttaattaatgaccttgatgcttttaagcgaatacattttaatttatttatatgagcttgtaattatattatcct

SEQ ID NO: 412165 - DNA, 660 bp, Homo Sapiens
  misc_feature (410)..(410): n is a, c, g, or t
  misc_feature (419)..(419): n is a, c, g, or t
  misc_feature (563)..(563): n is a, c, g, or t
  misc_feature (568)..(568): n is a, c, g, or t
gagaaactctttctgtctaaatcttataggaagtcctctaattcataaaatgaggttctctgctttttttggagaaagtgagggggtacagagggactgggagccccagggcactgggagcctctaagtcacaaaatgcagtttgagagtcagtggactgagggacattggagtctctttcacttgcaacaatctcagacccttggctgagcccagtccagtttactgtggaccagctgtatgtcagctccatggctgtgcagctgagaggtggaccgggacagaggtcctggcccctttactgccagtgtgagagtcacccttggtgataggagggagtgcccacccttactgtacctccatgctactctcagaggttctctgtagcttcctgcccaagcttttaactngatttgctntattagaatttttagggagatctcaaatggaatctgcgttacttcctaacactaagtgtgatttttattggaaatattgtctgaactaacaagctaaattctgctttgatggttgaatccctggacttgcagcagccttggttngaatncctgcatcaccacttgtgtgctgtgaggtcttgtgtgctcaccacttgtgtgcctgtacttcctgtgggcctagtttccccatagttggggt

SEQ ID NO: 412166 - DNA, 684 bp, Homo Sapiens
  misc_feature (235)..(244): n is a, c, g, or t
  misc_feature (507)..(507): n is a, c, g, or t
  misc_feature (539)..(539): n is a, c, g, or t
  misc_feature (549)..(549): n is a, c, g, or t
  misc_feature (558)..(559): n is a, c, g, or t
  misc_feature (564)..(564): n is a, c, g, or t
aaactttagatagagcatctacaaagtcttcctctggtttttatttaagccttcctttattatgtttacttcattgggttataattatctgttcctttattcatctcccgaactctcccaactgaagtgtgacatttcttagtttcaaggataaaatacagtgtctggtgcaaattaggccatcaataatttttccctggattacattttttagggacacacatggaaaaaaacnnnnnnnnnnccctgggaaagaaatggggttgaaaccaggaaaagcttcagaaagtgggtaaggaaatgcatagaagcagaaaattacatgccacatttgggggtagcatgacaggaagtaaccagaaagttaaagtaaaggctggttgtggccaggtaatgaaaaaccaccaatgtcctgccaagaagcttggactttctcccttatgcaatgtgggagcccatcagagattttaccacaaaggaggcataaacaaggtcttggaggcaganaaatcactctagtagctggtaaagaaatggangaaagagganaggcatcanngaggngtatcaagtcaaaagcagcttccatggtattgatgagaaaagagggagcttagctcggtatgacagcatttacagagagacacaatgtggattcgagaccttattgagagtcagtaggcc

SEQ ID NO: 412167 - DNA, 678 bp, Homo Sapiens
  misc_feature (399)..(546): n is a, c, g, or t
  misc_feature (570)..(571): n is a, c, g, or t
  misc_feature (588)..(588): n is a, c, g, or t
  misc_feature (606)..(606): n is a, c, g, or t
  misc_feature (644)..(644): n is a, c, g, or t
caagaattcccttgaatcatttttctggcagcagggtgtcctccccaaaggcaggactattatccatgtgacctcccaagatccatttctctcctttgatttattcagtgacctcctctggtgcaaaaaatggtatctttgtggcttaaaagagtttttccccctcctccttcttcactctgagtcatttatttcttcctgccagtaggacacttctcttgttcattcccaaatcatccctgtaaagaaggcagtaagggtataaaaataaacccttcggaagcagaaatggctccaaagccctctgctaggaccaccccaccatcaccgtcatggagtaaacttggttagaatgtcagctctaaagtctgactacctcaattcacaccctcactccannnnnnnnnnnnnnnnnnnnnnnnnnnnnnnnnnnnnnnnnnnnnnnnnnnnnnnnnnnnnnnnnnnnnnnnnnnnnnnnnnnnnnnnnnnnnnnnnnnnnnnnnnnnnnnnnnnnnnnnnnnnnnnnnnnnnnnnnnnnnnnnnnnngtctgccacgtggtaagagctcannataaaatatctagaatntctttctgaggccactantaattctcagcattgattatatacatgggataatgaanaatgggatttgactcgcgctcagagtatgcatgt

SEQ ID NO: 412168 - DNA, 182 bp, Homo Sapiens
cttataaagaacgtcgctctcccttccagggccacccctatcctgctcatgtccccctcctgcaccattccccttatccagttcttggcgtctaggtgccgtaacgccctcattggtactcttgggagcccccttattacagcttgaccggtcctggctactttcctagataggaggtctct

SEQ ID NO: 412169 - DNA, 462 bp, Homo Sapiens
  misc_feature (171)..(179): n is a, c, g, or t
  misc_feature (384)..(384): n is a, c, g, or t
gggacttaccaggtggactttattgaaagaattatgttttcgccattgagaaactccatgcaggactgaaaatctagttcctagaattccaagggttttaaaaaatcgatttcttgagaatgattaagaatgtcagtgaattggacacattttaattttctaatgtttaannnnnnnnncaagctactacagcttaggttcccaggtacagtaaactagaaggaataaaaatgtctaacatagtatttcatacaggagaagagcaaggacacaccttctaccccaccctgtcgccatcttcctttctcggaagcaaagttgtataatctgaaaaacctgacattccatattgagggtttattgtaaggtagtaaaaccagattntatatctcatttattcctacaacttctgatgtgcttccatggtattaaggcagcagctgaggttttatgagatatggc

SEQ ID NO: 412170 - DNA, 463 bp, Homo Sapiens
cagttttcttaaagacttttcttatgaggaacttgagacaagttctctcaagggcaagacagagaaatatgactatagtacttcaaattatagtattaaaatatccccaactcttaattctgaatgtgtcacagacaacacaattctctccaacaaattcgtaaagtaatagcatactccatataaagtagtccataaatggatatgaaggtactttttaagtcattattttgttttagattctttagtcgggcatcctggtatccaactataagacgaaagtcatcttaatcggttctctgtatgcaaataaaactactaagggctcattctaatatgccagagttcacgaggtgagaatatgaattaatttacaatgactcttagagtatttaaattaagtaggaagagcataaatattaaatcagtgcactgtcagcaccaggttatggctatttttttg

SEQ ID NO: 412171 - DNA, 416 bp, Homo Sapiens
agtggatcccccggtctgcaggaattcggcacgagagaatggtattgcctaggttgtcttccagggtttttatacttttgggttctacatttaagtctttcatctatcttgagttaatttttgaatatggcagaagaaatggtccagtttttatctgctgcatatggctagccagttatcctggcattatttattgaataatattgaatattgaatttattggtttcattgatttcataaaagatcagatggtcataagtgtgtggccttatttctgggctctctattctgttccactggtctatttgtatttgtcgcagtatcatgctcttttgcttacagtagccctgtggtatagtttgaagttgagcatgtaatcttagttctaatctcaacattttcctgtgattttattt

SEQ ID NO: 412172 - DNA, 414 bp, Homo Sapiens
gtggacttagggtggatacagactcaaggctgaaagagaagagagctgggaaccctacaagaggttgccaagcatcaggacttgttcctggcccccagctgctcctagggaagggctgagtgaaataggcctggagtggtccactctcaccattgatctctgggattctagctgaaggagaccccaggacccccaaggacatctgagctggcagagaaaactgcctggagagttggtagagacaaaactcctgcattaatcaagcccagaatatttgacacaggaacagctgcagtggagcatggccatgggtgcccatcccacaaagttctccatactccattaggcagctttagactttattagctgctggcattggacagagcaaggctatgcttcctgtgggatggggtc

SEQ ID NO: 412173 - DNA, 687 bp, Homo Sapiens
  misc_feature (447)..(447): n is a, c, g, or t
  misc_feature (458)..(458): n is a, c, g, or t
  misc_feature (575)..(575): n is a, c, g, or t
  misc_feature (668)..(668): n is a, c, g, or t
gatatttttgataaataaccccgatgtaaatgtgggatgaatcaagcaatggtgtattctaagcagtgactggcccaaaggatgagttacatcttaataagcaatagacttttctcatattcaaaagaggttgaagaatacaatacaaaaattaagttttcacccaacttagttatataaatatggggagtcctaacactgaagaaaaaaatacgttttaaaaaactagtttgtgagaaatcttctagaataacaatcctactttttatctctctctagtagtctttccctagaggaggttaacgttagatcagaaagttctctgcccagatgtatttggggagttgtattgaacatatccctttgccacagaaactagtcatctttaaatgtcagcttcaatgttgaaattttatgagaatggaaaggaatacacatttttacttnatttagacctncctttggaaatgtagtcggctgctgttgtctcaagttggaagggtttacaatgttttcttcaaatattcatctcaaatactcatggaaagcaaatgcaatccagaattagacatgangaattgtaccttcctttaacttattaatggagcacatcagccttaggcattttttttgacttttctcttaatttatatttaccctggatactnttcttttgccttgcttatt

SEQ ID NO: 412174 - DNA, 670 bp, Homo Sapiens
  misc_feature (623)..(623): n is a, c, g, or t
  misc_feature (625)..(625): n is a, c, g, or t
gttagcttgttattgcaatgacttgtttgtctggttgctttatagtgtcactggtcttcatatgtaaatgtgtttttgtattggctgatagcattcttccttctatatttaatgctcctttcaagatctcttgtaaggcaggtctggtggaatgaattccctcaacatttgcttatctgaaaatgatcttatctctccttcacttaggaaacttagtttggctggatataaaattcttggttggagatatttttctttaataatattgaatataggttccccaactcttctagcttgtagggtttcagctgagatgtcttctcttagcctgatggggttccctttgtaggtgacctgccctttctctctagctgcctttagtgttctttctttaatttcaaccttggaaaatctgatgattatatttctggggaatgatcttcttgtgtagaatctagcaggagttctctgtatttccctttcactgttggcctttctagcaaggttagggaagttttcacagattatatccttatgttttctatgttgctggctttctcctcttccttttcagagatgctgatgattcatagatttggcttctttatatttccatacatccngnaggtttttgtcattctgctttctttatttttggctgctggcttct

SEQ ID NO: 412175 - DNA, 651 bp, Homo Sapiens
  misc_feature (492)..(492): n is a, c, g, or t
  misc_feature (549)..(549): n is a, c, g, or t
  misc_feature (632)..(632): n is a, c, g, or t
ctcagtgaaaactttctaaactttaaaataagccatctatactctcaaacctgctgttttggtcacaaagcttcatctgttgttttgattctgttcggggctgatttgaatgaactgatgaacttaactaaacacagcagagaattgctcaatccccttttactttcttgctaattaaattttgaatgtctgctgtggaaaagggaggtgggaagattttagaactccaattaattgcagatgcttaatcacaccagctgaaagctggcaagccaccccataatttacatagtctgtcgactggacagctgtggctgcgaatgggcagggatggatggagtgcaagccccttcaccccagtgctggcgtcgtagtgcttgccataacagacatttgtgcctttcaccctccccattgctgacttcacttttcctggcctctgtatattcctctgatgcatttcttagggtccttaagcctccttggctattntgcaattcagtaagtttgttgtaggtgtggctcagaattaaggagtatagacagaangacacggatggatcaagttggttcatttttttctttggagtcctttaaatactaattgtatctatttgcttacctaaatagtngtcagaatcttcggggcgt

SEQ ID NO: 412176 - DNA, 295 bp, Homo Sapiens
acaataaagagaagatcctaaaagtattcaggaagaaaacaggtcatgtacaaaggatcaggaatcaaaatggtaagagactttacaaaagcaacgctggaagctagaagataatggaacaatgccttcaaaattctgaggaaacatgatttctatctagaattccatactcttaagtgtgagcgtcaagatgttttcagacaggaaagatgtggtggttttcatgtccaataatcctttgatactcctaatttcaaatggtagagactaatactctttcttgaatacgggtagg

SEQ ID NO: 412177 - DNA, 698 bp, Homo Sapiens
  misc_feature (352)..(418): n is a, c, g, or t
  misc_feature (593)..(593): n is a, c, g, or t
  misc_feature (653)..(654): n is a, c, g, or t
  misc_feature (661)..(661): n is a, c, g, or t
cagggttgagcctcaatactgtgtccttcctgagaccatttctgcttttataacattttgtttatttgattattgaaactattattgctgataatgtggtgtggcctacactggcgcattgaaaacgtgtggtagccagcctgagtggtcaccaggagaaatggaccagaccagagagggtagtcccatccaggtttggtcacattgtctgagtatccaggatcaacggggaagcagagtggtatagtggaaagagtctaggctttgaaatgagagaggcctgagtagcccacgggcaagtcattgactcttgagcccttttccctgatctaaaaatggagataataatacnnnnnnnnnnnnnnnnnnnnnnnnnnnnnnnnnnnnnnnnnnnnnnnnnnnnnnnnnnnnnnnnnnnaattttaattaagagttaggtgtgaagtgaaaaccaaaccataaaaaagttgaagacaatataagttttatagcccactctatagttatggaagcactttctaacttcaaaagcaatggaaagtatcaaaaaacaaagagtgaaaaaattaaattgagtatgtaaagatccatanatttgtacatgaaaacaaatatagctaaaaggtaacttggataaagtatgatggaagggnntatactnatgtaatgatcttctagaagcaattaatatgttcttt

SEQ ID NO: 412178 - DNA, 717 bp, Homo Sapiens
  misc_feature (451)..(451): n is a, c, g, or t
  misc_feature (493)..(493): n is a, c, g, or t
  misc_feature (499)..(499): n is a, c, g, or t
  misc_feature (589)..(589): n is a, c, g, or t
  misc_feature (623)..(623): n is a, c, g, or t
  misc_feature (630)..(630): n is a, c, g, or t
  misc_feature (667)..(668): n is a, c, g, or t
  misc_feature (677)..(677): n is a, c, g, or t
ataagtctcaactttcttgtaaggtttttacatactaaagattttattattcatctactctgatctatagacaagttgtataataaattattcagccacttcctgatgaatagcagaatgatattatatactagagtctatctgaaaggaatatttctttataggctagaggccagttgactgtcctactctttgaagaagagtgacagttcctgattaaggttatttttcctcaatactagattccaggggagcagaagatatcacagagaggaaatccacagtgatcaaatgggacaacccatcacaggccttatcttcacctccagaacgagtagttctttgttctggggtatgctttggtgtaggaaaacttgaggattacccccacctgcctcaggatgtatccatctgtgaaccaattagggcatgggctatgatctcaccattntatagcagaagaaaagagaaagacctaaattcagcctgactnttgatngaattcttgcctctggtaaagcctgctcccatatgtgtcaaggataaatgccaagtaagaagctcgcatttgtacccaggaacagcttanatcaaaccctgtttctgctggatcccagaggttntgacagntcatggagagacacctctcatggttctcaagctaccnntttcttggnggacctcaccttttttcctatttatgtcacatatggagca

SEQ ID NO: 412179 - DNA, 660 bp, Homo Sapiens
  misc_feature (283)..(617): n is a, c, g, or t
ttacgaggccagtatgtggctgggagggtttccaatcccctgaactgctgtcattggctgcattcacagattcatctctccctattacttatgagtctgccacacacaaaaactagtaacaagtacaaccctgaaaacacaggtagcaaaacaagtgaaagtgaaaaatccagtcttgagggcttcatttcaacacaaacctattcatgtgacaccagcttaggttggcatctgcacaagttaacctcatgcttgtgcaccagggcacagggaaaggaaaaannnnnnnnnnnnnnnnnnnnnnnnnnnnnnnnnnnnnnnnnnnnnnnnnnnnnnnnnnnnnnnnnnnnnnnnnnnnnnnnnnnnnnnnnnnnnnnnnnnnnnnnnnnnnnnnnnnnnnnnnnnnnnnnnnnnnnnnnnnnnnnnnnnnnnnnnnnnnnnnnnnnnnnnnnnnnnnnnnnnnnnnnnnnnnnnnnnnnnnnnnnnnnnnnnnnnnnnnnnnnnnnnnnnnnnnnnnnnnnnnnnnnnnnnnnnnnnnnnnnnnnnnnnnnnnnnnnnnnnnnnnnnnnnnnnnnnnnnnnnnnnnnnnnnnnnnnnnnnnnnnnnnnnnnnnnnnnacctccgtcggcgacgctatcaggcgatgcccactactgacct

SEQ ID NO: 412180 - DNA, 662 bp, Homo Sapiens
  misc_feature (453)..(453): n is a, c, g, or t
  misc_feature (639)..(639): n is a, c, g, or t
caggtttcctagccccttgctctaattggcctcctcaccattcccctctctacacacagctcattttcctgcctgcttcaaatgccattacatagccctctgtacacgtggaacaatttttgtcttccatctacatattatatatccttcaaggcccatctcctctgcagaccttctctgactgctcctacatacatgggttcctctgttttctttgatttttgttgaattgcgggtagcatcttaccaatcctgtcttaattatgtttgtgtttgtttcatgattgtgcatcttgtctcctctagctgaagggtgaggattctaaatcagtggtatggtccatggttcattggtgtgactcattttttaagctgtaacaaacagtttgaaggggcatagttcatgtgtctcagcaaagagtgatctatgctctaagcttcttactatccagnggaatcccagcctcaggtacctctctctcgtcgcagggtcccaggtgttcccctttgctgctagaagcatgtcagatcagtgccccaagatcatctctgcagtgcttggtctttgctgctgtaggttgtaggccttactgcaataggtctttgacgttgatcagtgctcagtaaacacctttcctntctttctgggtggtcatttcctg

SEQ ID NO: 412181 - DNA, 600 bp, Homo Sapiens
  misc_feature (537)..(537): n is a, c, g, or t
  misc_feature (544)..(544): n is a, c, g, or t
aaaaattatccagtaaatacaggatggtcaagaatatttcacagaattgccttcagttacattcattattcacatagccatcattttttatcattagagacagcatttgagcagtaccatgaaagtacaatctgcaaaatgagaattaattatatgtaataacagttatgtagatataataaaattttaaaagtaaaatgattcaaatattaagatatttaaaatatcgaaacctttggtccttcaattattttcacataatttacttaaatcgtgagaggtggacttgggcttttactagtattggtaactttaatatattacttataatttgagatttcccaaactgcaataaatgaaatatctgttaataacttaattattgtttgcttatattggtttattgcataaaggaaatcccacagtctgctcttgaattgatggcaattatcataacattatgttactataacaggaatatacaattaatcagttctatatttcatactaacatgtgtgtgccctgatgcattgctntcagcantatagcagctgctctttaatgcattttttatggcttccaggtatttcttcatgtgt

SEQ ID NO: 412182 - DNA, 107 bp, Homo Sapiens
cacgctagcagtatgcagcacgcatgtatgcatgtagtacgtcagcacgtatgcatgcacgcacgtatctcgcgatcgcctcgccgccatcgacgtatctctctact

SEQ ID NO: 412183 - DNA, 669 bp, Homo Sapiens
gatgaaggaagattcagtctcaggattggggctcctccatgctgggtcggatcaaagaccaaatgtccatgaggtccctccagtcactggttcccctgggcaccctggagagacctgggatggggaatggggactgtgaagtggtcctttctggggtgaagggggcgggccttgtctgttctggaactcttggcttacggcgccctcttcctggtgcaggacacaaattctagacccctcacctccagagcattgcggcagaaccaggtcaccaggcctgcctcactacctgctcccagcacacgaaaatctcgctccctctctccatttccctccagaaccagcaacagctttccttgcaagctcaggtgtgaccaacgtgtagttctcctggtctgtggcagtctggctgcgcacacggccacgcctgagacccggagacctcgcttcccctttccttgcttctgctggaatgggaatggaagtgtccacaacctgcttcacgggcttctccctctcccttctctccgatagctcgaatgtggctcttgtctttaccactgcttttaccatgctcttgaggcccatatccatgggcggctggacgactcgcatggccggcctggcctccacatcattgttctgccactccttctcggctccccctgc

SEQ ID NO: 412184 - DNA, 246 bp, Homo Sapiens
ggagggagaaagcaaaggagcgcgctgggcctggaaggtgcggcacctggcgtaccaccaaccgcggcttatgcccgttcagggcgtagtggactttcgggaaagtcgcgacccctattgttattttctaatcatcaattggttcggtatgagcaataccctgtaatgttcaatattttgaggagatttagttttaccttccggtgccctattccttttgcggatttgcttctgtttggtcccccc

SEQ ID NO: 412185 - DNA, 278 bp, Homo Sapiens
atcatttccaagttgacttttgtcttctcagtgtaacatttggcacttcttttcctaaaattatcacttgtggctgagatacaagctgttgaattcagactataagctaaattgttggctctcgattattcttgagattgaaaatctttctggcatcaacaatttagatctatcaaaatgtgttaatagcagtaaatcttcaacttagagacttagaatatactgcaatatttcaattctgatgctaaccactcaaaagttagcatagaccccacaag

SEQ ID NO: 412186 - DNA, 626 bp, Homo Sapiens
gggggatttatggaagacggtttagtttagcctcttgaaaaatggatacatttgcaagaaggaggaaaaaaccagaatttttgaaaggaatcaagaaaagagttcagaattgcacgggacatgatagcaggaggaaagggaagatgaggtcagtttgcagtgccgaatgttgtgagaggtcaggaaggagctggactgtgtggggacaagtgtgttcagagattgtgctgtctgtggtatctaggagaaggttataagcaggatgggaagtgaagaaaaacacatggcatggagttgagcagtgagaggaaaacctcagtagtgtgctgagaaaggtttaacagctggctctccatgtgggtgagtgggtggaaaccctgatgtgtaccatttgctggattccagtgtgtaaatatttctaccatggccaatttcaagctacccatggttaataactggcttacatgttccagaaaaactaagccattagttcttacaagccgttatgagctggctacaatacattacctggaagaattgaaagataaatgcatatgtccaatttttcaaggcttatattatatgtaagggcattctttggaacttctttggggcctggaatagtg

SEQ ID NO: 412187 - DNA, 669 bp, Homo Sapiens
  misc_feature (292)..(349): n is a, c, g, or t
  misc_feature (596)..(596): n is a, c, g, or t
ccccagttataacatgtatgaaaatgtacagaaatgcaactattgtgaaaatcaaagacagatattacttccatttatttggagctttgtgaagtgttgtcaccatttgagtaaatcattcactactggtgttatttgagctgttcagaaaagatacccttatcagtcttcacttgcagctgtcactagcccagtacagctgacctctcattgttccttctggggtaaatataaatgagcactgatgtgttgaaataatttaatatgtaatcactttatcttttaaaatagnnnnnnnnnnnnnnnnnnnnnnnnnnnnnnnnnnnnnnnnnnnnnnnnnnnnnnnnnnctttaattgacacatgatagttgtatatgtttatggggtacaatttaatgtttcaatacatatgtgtgttgtataactatccaatcaagcttgttattgtatcaatcacacatgtgtttgttgtttctttgtggtgaaaacatttaaaagtttatcttctaactatttggtaatatactatttatcattaaccatattcaccccctctgtgccatagaattccagaatttaatcctttccattaatngaagctttgtacccagtgatgtatccccatcctctgctttcttctcccttcccaatctctaataaccgttttt

SEQ ID NO: 412188 - DNA, 400 bp, Homo Sapiens
  misc_feature (348)..(348): n is a, c, g, or t
gacattatttctttaaaagaaacatagattcctctccacattttgggacagttaagtacattaagtaatttattaaatttttgttttaattatatgttaacacaagattatatgaaggacaatattgttaacatcatttctatatagttaaaaagcaatacgacacaacatgaagacaagattcttctcatactgtggcatcaattgacaactccatatgacttttgttcaaaaacgtacgtccagaagaacaatgtccctttataggacacaattataaaccatattttacttatttgctttacataaaacaatgtacataatgtatatctgaatttacttttattnttgatatattgctctttgtcactggtatcttatatttctatggcattggtcc

SEQ ID NO: 412189 - DNA, 654 bp, Homo Sapiens
  misc_feature (128)..(154): n is a, c, g, or t
  misc_feature (161)..(219): n is a, c, g, or t
  misc_feature (254)..(349): n is a, c, g, or t
  misc_feature (507)..(507): n is a, c, g, or t
  misc_feature (557)..(557): n is a, c, g, or t
  misc_feature (582)..(582): n is a, c, g, or t
  misc_feature (611)..(611): n is a, c, g, or t
  misc_feature (616)..(616): n is a, c, g, or t
gtcaattattaatgatatgtagaaaattagagaattgtgcctgttgataagcatccaattctggttgaactcaatttttatctgtatcagagagagctgagctgatatagctaaaaattgagatatannnnnnnnnnnnnnnnnnnnnnnnnnnatatatnnnnnnnnnnnnnnnnnnnnnnnnnnnnnnnnnnnnnnnnnnnnnnnnnnnnnnnnnnnctgtgaatttattatacttttctattttactggtnnnnnnnnnnnnnnnnnnnnnnnnnnnnnnnnnnnnnnnnnnnnnnnnnnnnnnnnnnnnnnnnnnnnnnnnnnnnnnnnnnnnnnnnnnnnnnnnggtcagtttattctctttgaaggcagacacacttaacttcttgcatgaatatagctttaactattttatcactatttatcatgttagtatgctacaagtttctggtagaaaagctctatcaagctaagagagcattatatggaaagattattgaattntattaaatgacttttttcagcataaactaaaatgatgacgtttggctttntaaatgggttaatatttaattattntattattggcttagaatcttacaatattntattntgaatttatgttatgtttataggtggtggccttctttt

SEQ ID NO: 412190 - DNA, 654 bp, Homo Sapiens
  misc_feature (392)..(417): n is a, c, g, or t
  misc_feature (433)..(433): n is a, c, g, or t
  misc_feature (453)..(453): n is a, c, g, or t
  misc_feature (471)..(472): n is a, c, g, or t
  misc_feature (538)..(538): n is a, c, g, or t
  misc_feature (548)..(548): n is a, c, g, or t
  misc_feature (551)..(551): n is a, c, g, or t
  misc_feature (565)..(565): n is a, c, g, or t
ggggtaggaactggggaaaaaccttgtgcacaagacctatggcctaaagtccccctgcctcttttggggtcccacctggagctggagattctccattgtgaactttcctggcacaggaaagttcttgagggttgagggaaatgctgagtgagttctcctctttgctgagcacagaattctcaccctctgttgtacgtggtgttttccctgcccggttgagtcaccgctcctggtcccctccctgctactccccaggttttgcttctttgctcatatgcttatccttttctagatttctcttcatggagcccccattgtagccttgagtgacaacatcaccctagttcacaacaccttagcatgcctgaggactccttttgtaccactgtgannnnnnnnnnnnnnnnnnnnnnnnnncagttccccacatccnctttcaatttcatacagganaactcatgactgtgttgnngaaatcatttgcatggccataggagacacaatgaggcatcatctgtctctgagaatacaggatctncatgtccaangangtgagagactgcangtgcacagaagcccaaggtttcaggatcttggagaggaatcacaggagaccaagtacagcaggacttgccaagaggaccgctctgtggt

SEQ ID NO: 412191 - DNA, 673 bp, Homo Sapiens
  misc_feature (416)..(416): n is a, c, g, or t
  misc_feature (476)..(476): n is a, c, g, or t
  misc_feature (562)..(563): n is a, c, g, or t
  misc_feature (570)..(571): n is a, c, g, or t
  misc_feature (619)..(619): n is a, c, g, or t
  misc_feature (632)..(632): n is a, c, g, or t
ggtaaattataaatatatgctattgttattattccacctcatacacatttttcaattaagtcctgttgtctctgtcctaactcatatccttttatctcacctgggtataccacactatccccttaatttcagaatggatctccttaactccttttacctctatgatgtatccaaacactgtgacactcagaattggtcctaaacacaaatctgagcaattcagggtaattttacaatctactggtgatttctcactgcccatgagataagcttttccaatttggcattgtaattctccaagaatagattcaggcagcagaacagaaagtcatgagaagcccagaggtgcctctatgtacgataattgcttgcaggaggaatgaatggatttaaacattaagtctggtctttagttntacctctatcacaaattagctatgatgtgctccagtggttttagtttcctcacctagagngctgatatcattatcattcgtttctttgcttaaatccctatatctacccagctttcctgccatgggctgaagcctaaactacgctnngtttacnnttatctctctaaatacttttcacctttactagtgtccctttgcttaanaatcttctgcccnttcccgtcatatctttctggggctgtaccctctctatattc

SEQ ID NO: 412192 - DNA, 400 bp, Homo Sapiens
  misc_feature (282)..(282): n is a, c, g, or t
  misc_feature (323)..(323): n is a, c, g, or t
  misc_feature (345)..(345): n is a, c, g, or t
aatcatatgagcctctgctctgattccaacccagtatggctggaccataaggagacctccctgtgtgatcggatcaaagcccctatgcagtgtgtcttttcagagcagggtagagataaattaatcacacctatctaattttaagtaacatagtcaaagaaccattgggaaaaagtcacggcaggagcaacagaaagtcagcctctaaaaaggttcatgtcactaaagagacaagacgtcatgcctgacaatatatatttgcagttttctgctttgtaattnttctcatggctatttaaaattaaattagctcttttctgttntaatagcagatataggacactntggtcatgatgcatagcacatttacaattatgtcaatatatctttctctgcctct

SEQ ID NO: 412193 - DNA, 706 bp, Homo Sapiens
attattagaccagggaatggtcaggaggaggagtggagaggatctgatttagaaagattagaagaaataatagaaatgatagacttgaaataataggatgatggaaatgataggtggggattagggagatgcacgtctcacatttcctggaaattgtgatgtgtgaggcccatttcagatgcatttcctaagcatgctcacagcagcgtgctaaatgtatccactttcattcaacaagcatttcctgagacctcttctggtcagccagagttatattctgggagctcagttctaaatactccctgatcttaagtagctcacagcctaatgagggacgcagagagcagtgatagtagagagtgctttggagcacacaggaaggtgttgaggtcattaggagaaactgtctcagctgagtcttgaaggataagcagggattagccagatgatgaaggggtgggagggtgattctacccagaatagaagcactttggcactcatatagcaacatgaggaacagaagttattcaagatgtccagagcaaagaagatgtgccgttgcaccaagaggtgaccctggagagcatacaggactctcacatgtgtgttcagacctaaagtgtgtgtgtggggagcctgtgacaggttgttagcagaggagcaattctaccctatggagactggcttgagaggggaaatttttggg

SEQ ID NO: 412194 - DNA, 647 bp, Homo Sapiens
  misc_feature (583)..(583): n is a, c, g, or t
  misc_feature (592)..(592): n is a, c, g, or t
  misc_feature (628)..(628): n is a, c, g, or t
cggcacctctattttaacaaccaaaaatgtattgtgcatcttgggggcctttactaaagacactgataaagtatttttcagtagatgggccaaagtgctggttgccagaaggttctgatcaattagagagtctttctcttactacattttttaaaggctttgattccattgcccttttcctagatggggaagaaatggaaatccaagcaactttgattttgcatctggggatctccttcgaccaccatgagactcttggatgaaatgtacacccagagctgcttgccagtcaaacctctgcccagttcaccccagaaaaatgctcatcttggaacaatagaggagcttttgcaaagttctagaactctcagtttttcaagcagaactcaggacaggggaataacctattattctgaaagagaaaacagagattaggaaaggaaatctgccctgctcaacacacacctatgattatgggatataggaattttggatttgtaaaatacacctactttctaagtctgtggtgacagctcttctttccagatcttattgagggctgttctctgggtgtccctacatnctagtacanggactgggcttgcagttcccctgcctccctctcatncccttctcttgctttctct

SEQ ID NO: 412195 - DNA, 611 bp, Homo Sapiens
  misc_feature (429)..(429): n is a, c, g, or t
gtggatttaaaatctcgtctgtcccatttgacaggaagcttcttggtgatgtgaaccatgtttacaaggacagggccctacatgtaacagacactccataagtgcttctagaatttaactagaattgaagagttgaaacttgtaccaccagtagtaagttaaagagtggggatgtgtaataatacaaacatgaataacacagagtatgaacattctaaaaattccccttttccctttccacgaaggctcagagacagacaagcagcacgtggaggagataaaattagagagagttacaaagcatgagtgcacaggtgcttgtttgtattatttcaatttgcacatgccatctttgtgtttgtcaactcctgtgagatttaaccaggcatgatgctgaaaacaatggctgatggtgaaaccactcatttncatggagcttccattgaaagaagccctctgttttttctttcaaagtagtcacattagggagacagtgcatattttaaggatgcagagattatttcacacatatttgagactattaaatacccagttatagactacactaccattccttgccttgagttccctcttgctgctgtttgtttttt

SEQ ID NO: 412196 - DNA, 638 bp, Homo Sapiens
  misc_feature (556)..(556): n is a, c, g, or t
  misc_feature (582)..(582): n is a, c, g, or t
  misc_feature (600)..(600): n is a, c, g, or t
  misc_feature (610)..(610): n is a, c, g, or t
tgaaaatctaacttagtcttctgtccatgctagtgaatgactccctcaattagtgaattcactatagcaatttgaatttttggtgctgctttacttatgcctgttccttacttcagtccagaacaacctgtttatttccacaagatagtagtatcacaagtgaaaacagatccagctaagtagacttgtatcctgttttgcaacagtttattggaggtggggctagtgttatggtggttggtaaaaagtagatcaggtgtttagattatgtgcatcttattcctgactattgtcggttgtacttttagacatgaatgctactgtgaacaaataaagaaaacaaggtacattgcatgcccattctgcaaatttgatggttttattagtatcacgaaggtggtgtggcagagtggaaaggctctgccattagtagcctgctgtatgaattaggaagttaacctctgtaaaattccagctctgtccttcataacattgaagactcctttctctactaacactatatttttttactgcttttccttgcaaaatatggttntagaagttagaacttaagaataattntcttttttcatacctcanaacactttanaagacagtttctaacttaatattactgt

SEQ ID NO: 412197 - DNA, 462 bp, Homo Sapiens
  misc_feature (309)..(309): n is a, c, g, or t
  misc_feature (332)..(332): n is a, c, g, or t
  misc_feature (355)..(355): n is a, c, g, or t
  misc_feature (374)..(374): n is a, c, g, or t
  misc_feature (387)..(387): n is a, c, g, or t
  misc_feature (436)..(436): n is a, c, g, or t
agagtgaaccatatgaggtccagattgaaggctaagaccaacttcacatcaatttctggtctcctggctctcaggccagggctgtttgcaccaggtggattgcgctacttccttaacacctattctgcaggcagataggtacagtcattggctccagcctttcttcctggagggcttcctcctgtccttcaactttgaattccttcccatctttagaatctagtgcaattcccacatagcttcttcatgaagtgtttcccaattattccagctacaagtccttgctctaagttttgctggcattcattntcttcacaaactgtaattgactntctctttatgttaacctttcccnatgtctctcaactagactngtagttccttggngccccagcccagctatggctcaggacccagcacataagagctactcaantaatattaatggatggatacatttgt

SEQ ID NO: 412198 - DNA, 663 bp, Homo Sapiens
cacgagactaagcgctttagagcatctgtagattgctgagaagtctctcaaggaaccggaagccatgttccaaccagttctttgttccctgtagcatggaaataatttaatcgaattgaacttattgcaaaagcctgctccattcagccagatgaggcactttcagagcaattagtcacaccttacttggaagccacaggatatatttaccagctgcccaggccctatgcagttgaacaagcagccaccccagggacgtgaatttctgactttaaattctctcccctaccgaaatgcttcccacttcctgaaatgactcagcaacatctgcaacaaaacaagtgtttacgtgccgcagtagcatttgcgaaaacactcactacattgacaaggtggtagtttactgctctaccagccgaaatgccagtatcaaaacctgaatgcacggcaacgacagaccagggatttcctgcaggagcaaatgagacgcgttcggccaagcgcatgctctcttgtagtcagcaccctgccccacaggacagcactgcctacacgtttaccggcagccttcccatcggccacaggacgacactcgccattgagtacacacgcacccacacctgtcaactccgtactcaccatacttctgagggcctctggccc

SEQ ID NO: 412199 - DNA, 676 bp, Homo Sapiens
  misc_feature (414)..(414): n is a, c, g, or t
  misc_feature (463)..(463): n is a, c, g, or t
  misc_feature (500)..(500): n is a, c, g, or t
  misc_feature (504)..(504): n is a, c, g, or t
  misc_feature (588)..(588): n is a, c, g, or t
  misc_feature (609)..(609): n is a, c, g, or t
  misc_feature (642)..(642): n is a, c, g, or t
taaagcattaataatgatctggtcttaacatatcacagtgactacatgtcttactcttgatactgatggagagacctatcgtcatcaccttatccatgcaagtgttccctaggcctgtaatctttgaggggtggctgtgttgcccagatgtgttattcaagtgcaaaccagaactgattgtgacattcaagtgcaaaccagaactgcagagggtaatgcaggagagtccactcctttttgcttacatttgaatttcagtccacactgactctacttgaggtgtaaattggagaattccttctccacagcctttgttttcttctctttcccccgcaaactacttctcgtttctcctccctttttcttgtttgaaaacctctgccttcttcacactcacttccccaggatctgctntttccttctttcagcctcttgttctcccagtcaagcaaacaggaagtgngaggtgagggagcctcagatcctgtgcaggatatggngtgngagaggtattacagaaagggcttctttcagagtagacttctgatgaagcgcaccttacagacaagcctttctatggtcatgtgngtgtgtattggtgaccaaggnaatatctgctcatttctcggccttacatcttgntcaactatcttagtctggtgagttgaggtactag

SEQ ID NO: 412200 - DNA, 121 bp, Homo Sapiens
  misc_feature (18)..(18): n is a, c, g, or t
aaggccaaaagcatattntgcatccttagaactttcagtgcatccaggttttattgcattgatcctaaagagaggaaagaagtatgcagggtctccatttttcagacaagagccatttctt

SEQ ID NO: 412201 - DNA, 525 bp, Homo Sapiens
gaaaggaccatttacctgcccggccttttccatgccttgggcctgggaaacccctggcgttccccaatttaatggcttggctgcacatccccttttcgcgagcttgccggaattgccattgggcccgttccgatggcttttccaagcagtggtgcagcctggatggcgaatggcaaattgtagtgggttttttgtttaatttcgcgttaacttttggtaaagtgagcccattttttacccaatgggccgaaatcgggaaactccctggtaaagcatgagattggcccgcgttagggttgagggttgtcccggttggaaccgggagtccccttttaaggaacgtgaactcctccgtcagggggtgagcaccttattttaagggcgttggcccattgggggatccgtggccctagtcaagttttccggcgttgcggtcctctaagcccctaattcgtacccttaaggggagccccggttttgaactgtgcgggaaggggccgtccgtgccatcgttgtgttttttgt

SEQ ID NO: 412202 - DNA, 673 bp, Homo Sapiens
  misc_feature (576)..(576): n is a, c, g, or t
gggagagagagctggaaaaagagaatttctaactcaaaatctctgaacatgtgtaggcctttctttggctttagctttgacttccatccatcaattattattttttgaagtttgaagccctgcatgatgtaactaaccagaaacttctcccttatgacccttccagcatctgagacccactttccaaccattccttctgccctgcctcctttacaataactcctgtttttgaattcatccctatgtaagtgggagcaaagctggatctagcaaggaaacttgccaatagatcagaccaaggtaggagagaggtttggttcccagccatgtgcctttgggtggtcttattaatagtcaggtttggtactgattactgcctagggtttccctggcactgaaagttggcagaactctgccttatctggctagcagaatgtctcccaccctaagcaattttctctctgaggtggaaaccaggggttgcactccctgacatgttaataaactaacatgataattaggtgacaggtcacaggttccatgacccataacgaagacaacaccactctcaggcanataacatgctgtgggaatttaaaatgttttcttctcatgctggcaatctaggacatattcattaccatgattccggcggacggactggttcttgggg

SEQ ID NO: 412203 - DNA, 656 bp, Homo Sapiens
  misc_feature (426)..(426): n is a, c, g, or t
  misc_feature (487)..(487): n is a, c, g, or t
  misc_feature (520)..(520): n is a, c, g, or t
  misc_feature (618)..(618): n is a, c, g, or t
ggcatgtagtgatataaatttccctcttaccattgctttagcaccatcccagagattctggtacattgtctctttgttctcactgatttcaaagaacttcttgatttccaccttaatctcattattcaccaagatatcattcaggggcaggttgttcaatttccatgtagttgtgtggtttttagtgggcttcgtaatcttgaattttaatttgattttgctgtaagccgagagactttgttatgatttcacttcttttgcatttgctaaggagcattttacttccaattatgtgatcaattttagagtaagtgccatgtggcaccgagaaaaatttatattctgttgttttagggtggtttctatagatatctatcaggtccacttgatctgtagctgagttcaagtcctgaatacctttaattntctgttcagtgatctgtctaatactgacagtggggtatttctcccactattattgtgtggnggcctaagtctctttgtaggtctttaagacttngttttatggatctgggtgctcctgtattgggtgcatatatatttagaatagttactcttcttgttgaattgaccctttaccattatgtggaccttctnttgcttttttgaccctttgatggttggtctatttgtcc

SEQ ID NO: 412204 - DNA, 663 bp, Homo Sapiens
  misc_feature (588)..(588): n is a, c, g, or t
gaacacggtaagatcagtcagttccatgagcataagaccactggcatacttctctagttgtgaaatgagagccttggttagaggcaatgttgtgaggaataccatgatggcagataaggcattctgtgagaccatggatggtagccttggcagaagcattgtgtgcaggataggcaaacccatatctggagtaagtatctacacaagtgaggacaaactgctgccttttccatgatggaacaggtccaatgtaatcaacctgtaatcgagaagctggctgatcaccctgaggaatggtgccacaacggtgccactgtccttcagcgatgtcccagggggttatagttggcagctgtccactttctggtggttcctgcatattttgcacaaccatctgtacaccaggccctagtctcctcttcctttatcaactgataatagggaacttcccaggaggccatcagtgcaggctccaggagggaaggcagggtggcaggagtgggaaccatgtgcatttgagccacttcctcatgtaagttacttgtgcccttagaacctgctcaagcccaatcatgtatataccacttncatttgaggatggaatgctgctgtgcacgcccctttatggctagatggtcatataggcagttcagatctcatggt

SEQ ID NO: 412205 - DNA, 675 bp, Homo Sapiens
  misc_feature (433)..(433): n is a, c, g, or t
  misc_feature (447)..(447): n is a, c, g, or t
  misc_feature (507)..(516): n is a, c, g, or t
  misc_feature (590)..(590): n is a, c, g, or t
  misc_feature (606)..(606): n is a, c, g, or t
  misc_feature (612)..(612): n is a, c, g, or t
attgttagaaggtcattgcaaaccgagtcatcaaatttctaggtcataataaagaagtaagcgaagcagttttcctttctagatccctgagaattaagttaactttggatttgctactccctattcaagctgagattttattgttacctggcaataaagcctgtttaatagctctcatctctttctttacttcttgtctaagcttctggtcttcgtagattcaacttaataagtctgttttctaacttctcctgtgttcattttttaacatagtaagtactcaggaaatgcttacttggaacaacatttatatttaatatgcactttaagcgcctcttggtgagtggagtacggcagtctcctatgaaacatgttgaatttagtattctcttcctatcaacaatgcaagcaataatcagtcgggttctttggntcaagaaaatggcngatgagaatgatattcaagaaaataggcagggacttgagaaagcaccctattgatagaannnnnnnnnnggatgtatgattttggaactaggtcaagacaagcagtgtttatgaaaccatggtaagatgggattctctatatngacccttctattaatntaatangatattaacaactagagttgcccagaatatagtccatatttatgactacctatgattgctcct

SEQ ID NO: 412206 - DNA, 653 bp, Homo Sapiens
  misc_feature (591)..(591): n is a, c, g, or t
  misc_feature (598)..(598): n is a, c, g, or t
agaacatgcaattaacagctacaataattataaacataagcttcatttataattttacttatcaatactataagttttgtttttaaaataaactaaacacagaaatttatagaatataaaaattattgtcaacttataattacttcattggactagattcattaacacatttcctcaaatcctaaaccacttctcactgaatatgtgtttgaaatgtgcccagatttacagttttaaaacatgcagggcttatatcacttaaaacggctgagctcaaccacagtctccttcaagtttttaaatgttggcacaactgatatactggataaatgtgttgtttttaatcatacttaggaaaaatatcagagctcccaggaaatgtattaatagcaatgtgcccttcctacttagccaagctttggtcagcggctgcttaattaagatggagacttggagcatgtacgctattccagggtaacagataatgacagggaagtcagaagactggtttcaacttgatggatatgatttgactgacagcagctgaatttcacaagtatccaccaagagtgactggtcttgaaatacttntgtacanaatactttgtatttcctggttcatttgcacctggatactgcgaggtggccttctt

SEQ ID NO: 412207 - DNA, 254 bp, Homo Sapiens
  misc_feature (193)..(193): n is a, c, g, or t
  misc_feature (196)..(196): n is a, c, g, or t
ggagcgggagctccagaatagaaggaataacaaacaatagggtacaaggatctcacatctcattaaatatcgatatagtatggatttttttataaggccctaagtacaatctagtgatggtcctaatactactcaattttgatgtcgtggtgagataagtacttcagattctgcaagcaactctactgtgatntcntgtgattctgttggtccaaagtgacagatatcaatagtgccactatggtttattgcat

SEQ ID NO: 412208 - DNA, 672 bp, Homo Sapiens
  misc_feature (57)..(209): n is a, c, g, or t
  misc_feature (397)..(397): n is a, c, g, or t
  misc_feature (424)..(425): n is a, c, g, or t
  misc_feature (430)..(430): n is a, c, g, or t
  misc_feature (462)..(462): n is a, c, g, or t
  misc_feature (515)..(515): n is a, c, g, or t
  misc_feature (527)..(528): n is a, c, g, or t
  misc_feature (569)..(569): n is a, c, g, or t
  misc_feature (573)..(573): n is a, c, g, or t
  misc_feature (577)..(578): n is a, c, g, or t
  misc_feature (589)..(589): n is a, c, g, or t
  misc_feature (603)..(603): n is a, c, g, or t
  misc_feature (632)..(632): n is a, c, g, or t
  misc_feature (634)..(634): n is a, c, g, or t
cacagtcaaaccatatcaccccatttcacccttggatgacataacaacaagatgctnnnnnnnnnnnnnnnnnnnnnnnnnnnnnnnnnnnnnnnnnnnnnnnnnnnnnnnnnnnnnnnnnnnnnnnnnnnnnnnnnnnnnnnnnnnnnnnnnnnnnnnnnnnnnnnnnnnnnnnnnnnnnnnnnnnnnnnnnnnnnnnnnnnnnnnnnggtgtctttttccacagtagagattatttttgtaggttatacaaatacttctgaagaacatttaaagctacatgtcagtcataccatagtgtaggcatagatatgtaacagatttatcccactctcttccactctgataactaagagtagatttgaatggagggctgaaggaggaaggcaaaattaanaggataaatagagcataaaatactatnntgaangggcagaagtgggtaaccgatggcatgagcangagcattagacctcagagaaggaagacacaggtaggatgaaacaccagtgatnaagttcactcanncaatacacaatttcagtaaagtagctctagcttgaacacanaggntttnntgcttttattnttataaaactatanatatatataatggcctatttgctttagtngntgatgtgaagtctttttttcggctatgtttcactgtct

SEQ ID NO: 412209 - DNA, 645 bp, Homo Sapiens
  misc_feature (595)..(595): n is a, c, g, or t
aaataaaactcttcatttgtctctaataaaaatctgaattttaagcagactcttggaccgctgactcaaatccatcaagtcattcaactttagcccctgtctcattctcagtagcatttcaaaattactgcttttctataaagcttcaagagttttcccaattcttgaacttcggcttcctcaacatgttttctattttatcagagacatcatggagagaataaatggattgcaaacttttctaggtattttccactgctttctgcaattaatttattaaccacttttttcaaggcacttgcctgctcctcttggatcatgatttccatcttcttcttccggatttgatgaatctgtgtgtgctgagcataagaggactttcaaatttgattgttgcaattcttagtaaaaacagcactgaagagatgaagcaaataatcattggtagtcttaacatcaacatcagcttcaaaatggtctgtcatttttttaaaattgataatggaggtcacttctcatgggtaagatctgtgtcatagaagatgatcaggcggttattttcggaacatcctcataagtaaattgaattttatanaagcacctttcatccttggatcagctctcacttgccacatcacttgggcc

SEQ ID NO: 412210 - DNA, 447 bp, Homo Sapiens
gcccatggagagaggacggaaattcagcaaggacgtagaagagagtgcttctaccttaatcatcgccctgaggaccctgaggccaaagacaccagagctcctcactttcatctacagtttcagaagccagactctaacagatgagttggaaagatgcctttgaagggctcggtaatgatggctcaatgaggagttttcatttataaatgtgactcactgtggccaggccacggagggtctggagcagggcagacacaacagcaccaccctccaattaatggatgtgcaagaaccgctgtgggactcagatttgggccaagaaccccaaatcatctcccgtggctcagccctgagagccacccggtactctcggggcaacaggctaatgagctcctttctgttctggttggttttgttttgttatgttccccagcaacagggctttct

SEQ ID NO: 412211 - DNA, 174 bp, Homo Sapiens
  misc_feature (94)..(94): n is a, c, g, or t
  misc_feature (107)..(107): n is a, c, g, or t
  misc_feature (145)..(145): n is a, c, g, or t
acaagagaatatatctctgtaagaagaacagtgcagggggtgggagtgggacactgatttctacctatttagatataatccgtgcttaatgcangacctaatgaggntagtgaggcctgagcccacaagatccctctccaggaantcgcaagttaggtcgccaccctttgtggg

SEQ ID NO: 412212 - DNA, 675 bp, Homo Sapiens
  misc_feature (446)..(446): n is a, c, g, or t
  misc_feature (521)..(521): n is a, c, g, or t
  misc_feature (540)..(540): n is a, c, g, or t
  misc_feature (650)..(650): n is a, c, g, or t
  misc_feature (653)..(653): n is a, c, g, or t
gaggcatgaagagaggcactatgtccatgtgatatgatgcaaaaccactgaactcatttgaggtgtcaaacttagaggctgatccttactttttccttcccaatgtgtaaaaataaacatcccaatctccggcttctctgattgcattagtcacaagttgtcacatgattcctttgttcttaaaacatttttaatgactgaaaataacagttttcatctcatcttcaaaaggttatttctaacaatcccaaatctgaagatatggttttaagtttctgagtggcaggaagtaaactaaactttttttaaatgaaagatatcaaaagaaatagttaggtctttgtcagactctagccttgtggaaaaattctagatgaaaattctgggataaattttgcaattctaacattactttattcttttttgatccattaactaggaagttntccttaatcatctctactttgctagacataatggaataatactaaatagggctcaatttctattcaggactgtangatctaatggtacagatanaattaatacacatgaactcatacagaacaatcgagagtgagcaattgtgtgctgactttaagtataacaggtgtttgggacaaagtagagattagtgaagatcaacgtantanaaggctttatgggaggggtgtt

SEQ ID NO: 412213 - DNA, 244 bp, Homo Sapiens
  misc_feature (130)..(193): n is a, c, g, or t
gaaaaatgaacggagctggtactcatgtcaaaaaagtgaaggagacttagggggaataactagattagctcataaaggctaggatccattcagaaaactgggaaccatagccatggaccatacaactgcnnnnnnnnnnnnnnnnnnnnnnnnnnnnnnnnnnnnnnnnnnnnnnnnnnnnnnnnnnnnnnnnataacctaagccgacgagttgtaggctacagtgcccaatgagtgaatgtat

SEQ ID NO: 412214 - DNA, 248 bp, Homo Sapiens
atccctgcatttctagtagttacttattcacagtgtcttaattcttcttttaatatgcttctgtgttctaataacaaattatctgagatttttgaaaattacaactttattgagatataatttacttactatacaagtcacccactgaaagcatatataattaaatggcttttagtgtattcacagagttgtgcaagcatcacaatcattttagagtattttcatcacccccaaaagaaagctcatac

SEQ ID NO: 412215 - DNA, 409 bp, Homo Sapiens
  misc_feature (232)..(346): n is a, c, g, or t
ggaggagaacagtggagagttggggagggagataaccatgggatgagagattccatttcactccaacaacacaccataggactcagggcagagagaagttctctcgcctaacctttttgagatttcccttaacaatgctcaggcagctgctggccccttgggatgccagagggcctagacatttcttctgtaaccacttccaagccagacagaccacccccttgataatttnnnnnnnnnnnnnnnnnnnnnnnnnnnnnnnnnnnnnnnnnnnnnnnnnnnnnnnnnnnnnnnnnnnnnnnnnnnnnnnnnnnnnnnnnnnnnnnnnnnnnnnnnnnnnnnnnnntctatacaaaaggtattgttggtgtagagagttgaacccaatatgtgctgtgcttgccgtgct

SEQ ID NO: 412216 - DNA, 317 bp, Homo Sapiens
  misc_feature (96)..(275): n is a, c, g, or t
ttgcttcagagagtagagatctattggatacttcctcaacttagtgattaaagttaatatccccagtactgtgacaagtcaacattatatgtttcnnnnnnnnnnnnnnnnnnnnnnnnnnnnnnnnnnnnnnnnnnnnnnnnnnnnnnnnnnnnnnnnnnnnnnnnnnnnnnnnnnnnnnnnnnnnnnnnnnnnnnnnnnnnnnnnnnnnnnnnnnnnnnnnnnnnnnnnnnnnnnnnnnnnnnnnnnnnnnnnnnnnnnnnnnnnnnnnnnnngtattcccagtcttttagtagactgaaacacgacacttgctt

SEQ ID NO: 412217 - DNA, 674 bp, Homo Sapiens
agagttagagagaaatatgagaagaggacaaagagacatacatatccttaagaagtccagagatgcacaagttgcgtagcaactgatacatgctgtcaggggttaagcaagacacagaaaaattgtaggtgataagtaatattttaagaacttgtgtttaaattatttaggtaagacattatgtgtggttaaatatcagaacttgtgaaaaacagttaacaaaaaaacttggtatccgaatctctcttttacaaggaagccaagaaatatatacaattgtatattaaaatcagtggcagcattctttttaccacttatcatctatccatttgtttaacaaatacttttttggtgtctctcatgtgccaggatgctagaaataaagaaatgaatgaaataaagtccttgcccccaaaagctcactataaagtggataaaacaaatatgcaaataaataattacactatagattgataatcatcattccagagacattaacaaatccatgtacgaagtgacaagctctgcccataaggaaccagagggagctagacctgagcatttgagttaggtctcgaagggtgaataggaatgtgccatgcagagaaaggacagaactttccacagagaacgaggttggactctatcccattaatgcagagttcccctgctgt

SEQ ID NO: 412218 - DNA, 597 bp, Homo Sapiens
  misc_feature (136)..(144): n is a, c, g, or t
tcactaatgcatagagctcccctgcccccacattagcaggtaaagctgaaaaaggtagataaaagcataagtgacctcagaagactgaaattgcatctgaagtctatctccctatgatcctcagcagcacaggtannnnnnnnnctacacctgattcttgggaaaatgatggaataaaaagagtctttttccatctccctagctctgcttttatactcttctgccccctcccatgtcaacaccccataaagatctctgacaaagtttcgctttctgttctacaatccacccctacctccaataaacacacctgttaagggtcccatcacatcagtgcctgtggggatgggcaaatggattctaatgtatatggtattcaaggaggaggtggctggctcattcaaatcaaggtgtcttcccactgtaaatagtctttctggatctcatggggaaacttcatactggaggatatcccaaacatgcaatgttcaacatatgtatggagtgcttatgtgccaggtgctatggccaagtccaggtggaaggtgtgggacacagatcccacactcgcagacctcacagcctcatgaggaggtt

SEQ ID NO: 412219 - DNA, 338 bp, Homo Sapiens
  misc_feature (164)..(164): n is a, c, g, or t
  misc_feature (184)..(184): n is a, c, g, or t
  misc_feature (205)..(205): n is a, c, g, or t
  misc_feature (245)..(245): n is a, c, g, or t
  misc_feature (247)..(247): n is a, c, g, or t
  misc_feature (268)..(268): n is a, c, g, or t
aaatgtactttgtccttgaccaaaccattgttatatggtgtgtgactgtacttaggtgacatgggggctgaaatgaaaggaattacccctcattgctctgagacttgactttggtagagtctttccacctgaagtgtttatgttagttatggaggctctggttntatttcacttgaattatttntcctctccttctgccagagtncacataagtgttcttacttggatccttgacaacctggtangnttccttggaagtaaggtcttncctgcatgtgggggtctacctgagacaactggccacattgtgtacaggcatgctgagtgtgacacttccc

SEQ ID NO: 412220 - DNA, 123 bp, Homo Sapiens
gtcagtggaaaggtaaccaaaaatgacacagattatagaattagtagacaatgaaattaaaacagttaaacaactgtatcccacatgttcttaagctagagaaaagactgaacatgatataag

SEQ ID NO: 412221 - DNA, 507 bp, Homo Sapiens
  misc_feature (342)..(342): n is a, c, g, or t
  misc_feature (447)..(447): n is a, c, g, or t
taacaaagttagctgtttttgctattgctgccactgctaggtaaactactcagccacctgctatttttattatttgctctctctctacttgaaacaatgaaattagggttttggggtcagaagaggagaaaccaccctctctccccttctcttaacatttccacccatgttagaatatgtagaagattttgcaatttggttaatttcctctaatttgtacacatctgggaggtgataccctgtgtggagagaggaggagtctttgtcatgagaagtatcagatcagacaaggtccacatgcatttagactgaaggaagtgggcaggggaggtgacatcacanagctctcagaccgagggtcctgctgggcagagaagactggctgccctgagaggctgacaaagtcacatgcagggtctctgagagtgtgaatgggcactgcccggngcacgtgccatgtggatcccaagtgcggtgacttctagaagtgcggaccactcccctccc

SEQ ID NO: 412222 - DNA, 294 bp, Homo Sapiens
  misc_feature (203)..(235): n is a, c, g, or t
tttaaaaatcaaaaatcctgaaaggtacttcctgtggatgtgcaatgggctttccgcagcattgcttatggcatgagcacagggaaagccttctgcagtatacatcaaggtccttgacaagttcacactctgaatgccgtcattctgcttcggggactcctcccaagggagtaagcccaactcaaggaaaggctttactaacnnnnnnnnnnnnnnnnnnnnnnnnnnnnnnnnncaagactcttgaaaaagcttgtgtggttatcctgagcacccactggccagcacatgcgt

SEQ ID NO: 412223 - DNA, 115 bp, Homo Sapiens
tagattatcaacttcacattcactgagtgatttcacatccagtgtggcatctagtccacattttaagtgtaaatcccactatgaataacttacaggaaatcatttcatcatttgt

SEQ ID NO: 412224 - DNA, 482 bp, Homo Sapiens
  misc_feature (406)..(406): n is a, c, g, or t
tgcaggcaggcttgagggtagttgtgggtcctacgatagaggcacccagggcaacaagaagctagatttggggacaaaagcaatttaacacagataagaacctccatttaaaccataagcctcatctgtataataaaattcatcatgttaaagaatgccagtgtggttttgtataacaagcacagcaagtcatggtgggttgtggttctggtgctgcttctgttcttggctttgtgacctttgagtctgcttccttatatgtaaaatgaaagtgttgaactaagcactcggtaagctttcttctctgtcgaacacactgtgtttctgggtaagtgtgttttcatgaatatctgtggatatgaatatctgtggatatgcctctccgtgctcattagacatttctttntctatatggcactactatatgtaaagggtgtttttcaataggttctatttttttgagcttcaataacacttggtgg

SEQ ID NO: 412225 - DNA, 643 bp, Homo Sapiens
  misc_feature (91)..(125): n is a, c, g, or t
  misc_feature (561)..(561): n is a, c, g, or t
  misc_feature (606)..(606): n is a, c, g, or t
caaatctttcctgacgtggttttgaaaccccacccttcgaactttcaaattatatattactgaaacagtcatgcagtcccgctggagactnnnnnnnnnnnnnnnnnnnnnnnnnnnnnnnnnnnagtcataatttaattaatcataccagcttggcaaatctttaacaatttagtttatcatctatgtcctttagtttcttttcatggaatgtgaatttacagacatacctcagaagtattgcgggttcagatccccaccactgcaataaagcaaatatcacagtaaggtgaatcacatgaatttcttggtttcccaatgcaaataaaagttatttttccactatactgcagtctattaagtgtacaataagattatgtctgagaaaataacagaaatactttaattaaaaatatcttaatgctagaaaatgctaatgatcatctgagccttcagggagtcataatcttttagctggtacaggccttgcctcaatattgatggctgctgaataatcagggtggtgtttgctggttgtgatggctgtgacaatttctttangacaacaatgatgttggcctcgtcaatggactgtttcttttacangactcctctgtagcatgtgatgctgtttgatagcttt

SEQ ID NO: 412226 - DNA, 669 bp, Homo Sapiens
  misc_feature (288)..(301): n is a, c, g, or t
  misc_feature (468)..(468): n is a, c, g, or t
  misc_feature (538)..(538): n is a, c, g, or t
  misc_feature (552)..(552): n is a, c, g, or t
  misc_feature (603)..(603): n is a, c, g, or t
  misc_feature (621)..(621): n is a, c, g, or t
aagagagagaatatttggcaaggaggggtggtggggattttctacttgccttttctcagcaatgggaaggccctcctgaccccaggcaaatctgatccaggcagaggatatggggctccacgttgccctcctgaacttccaatcaccacgggtgcatctctactcccctgctgtatgtcagcactctcccttagctgtttattaattgccttggttcttgtttggggtggtgaatgccaggtgtctctagttagccatctttcttccataattcataatctgaagcannnnnnnnnnnnnnggggtcttagcacatttgcacattgattttggtacagttgtaaatccctgcctagagtagggccaggttcatgaacatagtcaccatgtcactatgatttattgcatgtttcccaattgctaggcattgtgctgagggcttcattttctctacagaaagtgtaacanatttcagagctacagagctgaagttaggcaccatgagttcaaatccttgctccttcttccactaactctnttctatagagatanactaatatgacaggtgacttctattgtgaaatcactgtgccagctgtaggntaaatgctttcatacatnccttatttgtgcaccttcatcagtatgtggattttcatttcatttatg

SEQ ID NO: 412227 - DNA, 648 bp, Homo Sapiens
  misc_feature (608)..(608): n is a, c, g, or t
  misc_feature (614)..(614): n is a, c, g, or t
ttagagagttcaaataatggccattgagctctgaattttccttggtgtcattttgccaatcacttaaaaaatgtgcatgagaatgggccacaatatgtaactggctggaatcccagcacaccaggcataccttaatgtgttagaatctcattcaattcttattaatctcttgagagcaaagaaaatctgcaaatccagccagggaatgtcaggagtttagaccatgtttgagatggcggtggctgccctgatggcctttagttagcaattctgcactcaccatttagaatgtttatttttgttctcagaagatttttaaaaaccatcaaggggaaagactcaaatcaagtcaaaaggaaccaaggtaagagtgttcacaaaaattttaacctaggtgtccacatagaacaaaatgttaaaccaggcatgcagatcaaaagtgaattcacaagtaaacacatgccttacagagagaatgttaattctgtacaaatcagagcattcaacccagaaagatttatgcctttgtaccagaaaggacttagcagaaaagacaaaaaggctggttatcatctcgggctggatgtgtggtcctttatcaaggcagnctcatncgtcacattctgagtagcatcagccttcagcaca

SEQ ID NO: 412228 - DNA, 685 bp, Homo Sapiens
  misc_feature (431)..(548): n is a, c, g, or t
acagatatcagaatcctttgctggactttatagatgatttggtgcacttgttactagccttcttgggtcaaagacacattggaggacctcagaaaaggcaaggaaattccattttgaagaaaacataagaccgcctgacacaacaatgtgcatacaatttcagaacattaatggaggccttagagctcattcacagatctatgctaagggctccagaactcccccagtcccctcggtgtgtgtgaatgactaagtcaaatccaaagtcagagcagcttgcagcataaactggcctccaggttcccagtcccactactcttgatcatgatgtcagctctctacagagctctgagataaggggacactgataattcctgaagtgattgtactgattgaatagcatcttcaaaatttattctacttggaattgnnnnnnnnnnnnnnnnnnnnnnnnnnnnnnnnnnnnnnnnnnnnnnnnnnnnnnnnnnnnnnnnnnnnnnnnnnnnnnnnnnnnnnnnnnnnnnnnnnnnnnnnnnnnnnnnnnnnnntcatgtggagacacatgggaaagaggccatttgatgacttgcacttgtgaactggcatcatgtttagggatcatggtgaggaagaaattggaatagggcaggaatgtcaaggctctggccaccaggagcccacggct

SEQ ID NO: 412229 - DNA, 383 bp, Homo Sapiens
  misc_feature (229)..(229): n is a, c, g, or t
gtaaaattaaacatttaaaagagcagaaatgatagccaaaacatttaacaactgatacagggtgggcacataaaccaatcagaatggaagatggaaccacttaaaacaaaggctggtcattaaaacctctcattcagccaatatatcaaatgaatatcaagactgctaaagagttacatttgcaaagatgtatctttaaaaatcattatcctggagcataaattaactngaaagaataaggattccatgaagacaaacaaaaatagtccaatacttgacagtcttaatttatacatcattatttaagacaacagatagaggagtggtttgtgaaatacaatatatgacaaaagctaaatctaaatctactttttgtcattctt

SEQ ID NO: 412230 - DNA, 235 bp, Homo Sapiens
aaagggggttccttaataactgggcaacaagagtcttgtgctctcgtagcctgcgggagtgagattggtgggggaatctttggcattgtttgtgtctatgccctaaaattacattctggctttacaggaagaggcttttggattgagttgttactggaataagtacaccactggaaaccctaattgtcggtggccagaagacggatcctttaagttagactaaaattcctaaatt

SEQ ID NO: 412231 - DNA, 671 bp, Homo Sapiens
  misc_feature (97)..(159): n is a, c, g, or t
  misc_feature (263)..(320): n is a, c, g, or t
  misc_feature (358)..(416): n is a, c, g, or t
  misc_feature (600)..(600): n is a, c, g, or t
acgagggggagggtatgtggggggcaggggaagctggttcagaaacgggctggcttccgccttcttcagccacacagatctcttggtccccctctannnnnnnnnnnnnnnnnnnnnnnnnnnnnnnnnnnnnnnnnnnnnnnnnnnnnnnnnnnnnnngctcacttctgtttcttatctctgtgtttcatggctctcatctcctactgtttcttgcctttctctctgacctctctgttgcccatctttcttgtctctgtttnnnnnnnnnnnnnnnnnnnnnnnnnnnnnnnnnnnnnnnnnnnnnnnnnnnnnnnnnntgcttctcaaagctcttttggtctttcctctccccatnnnnnnnnnnnnnnnnnnnnnnnnnnnnnnnnnnnnnnnnnnnnnnnnnnnnnnnnnnntctccacattttctccttcacccttttctttgtctcttatctccctttttctgtaccttttattgctctttgtctgcctgcactccaccccttaccctgtgcagcctgtgaagtgggatcagcagacgagaaggatagagacacaagtcccttctttcctctggtcagaccacttgcgcacacntctctttatccttcattcttgtacctacacaagctacaggtagagctgaggaagctccccgtgggctctgc

SEQ ID NO: 412232 - DNA, 607 bp, Homo Sapiens
  misc_feature (139)..(205): n is a, c, g, or t
  misc_feature (410)..(422): n is a, c, g, or t
caatttcccccactcggccactccaagttctaaccttttaaactctgtattttctttctttagaagttatcctacaaaaataatcatgcaaaatttgaaagaaacaaatgcataaatgattcttacagccttgtatttnnnnnnnnnnnnnnnnnnnnnnnnnnnnnnnnnnnnnnnnnnnnnnnnnnnnnnnnnnnnnnnnnnntttaacatcaatgaaacagaattaagtagactcattgattctaacacagaaacatgtccaacatatggtagaagtaaatcaaagagcttaagtagatgtactttcatgtcagcagaactgagttcttttgcagactctgcttcctactgcatgatggtgagaaaagtacttaacctatctaaacctacatctcattttcttcaannnnnnnnnnnnnaataagatgtcacatgcaaagcacttaccacataattaatagtcaacataaattagctggtcttttgttggtatattttaagttaaagtgttaagtacgagaacactgtgattcactgaatggatttggagtatgtcatagcatcttacaatgtagttcagatagtattggttgatgccttgttt

SEQ ID NO: 412233 - DNA, 680 bp, Homo Sapiens
  misc_feature (413)..(413): n is a, c, g, or t
ctctatccaaagggaggtgaccttgtcctcagactggagtgaaacatgatacactaaatcttgttataacagattgacgcctaccctgggaggggaagtttttcttaatgaaggccattagctagtttgcatgattacatttatccatgctccttatctatctctccacacctgcccttctgaggcacacaaagacatcctccttgacacactcctcctacccaggtgttattgatgtgttgtagagggtaacctctgccctcaagaatgtgattcaacagtctgtgaatctgtggtttgcctgtcccacaggattattgtggggatgaacattaaaatgagatcatatacattaaatctaatgcattatgtaaatgtaaggtaatgttatgtttctaagcctctagacattntccatctttggtaatagaacaatgtcaccacaagacaaatgttcagctgttcacagaggaagttgaactctgaccccccttgagcgttccacacatttgttaacatccatttctcgatgatgtccatttatttaacacctctgatcaataacctcgtttctccccagtctctcttttactagcctcttcggtagaattaattaaagtaatgcactctattggggatatgccaggcacttgattatgtcactttcttgggcggtcctc

SEQ ID NO: 412234 - DNA, 664 bp, Homo Sapiens
  misc_feature (550)..(550): n is a, c, g, or t
  misc_feature (625)..(625): n is a, c, g, or t
gcaattcctttgcacagagagaatatgtacatatattttgtcccatcaaagatgacttcaaaagtcctcctccaatttgctttgagaaaaaatagcctttaagctgagattaagaagggaaaaacttccgataaaagggagtatttttcaaaaacttgcaagtgactgcaaagccagttaacacagaaaaccttgtcaccttaagtatgccatttgttatcacacatgccggaatacatctattcatcttcttttaattgcttagctgcgctagaaatacaaagcagctcactgaagcagagactgtgaaagaatattttgtcatggaaactttgaaaacatttcaaagcaggagctcttctctggttaaatgaaatcttctagctgtttcttgggcattgtgtttggctgataagagtctagaacaggtcttctctctgtgtggcttttgcttatatcttcttgtgctcacggatggctgatttcctgcaattttccaagtagagtttagaagagtagcaggttattctttcttcctcttctcttgcanaatgacaagtgagatgatccctgagtaaggaggttactggttaccactctgtgtgtaaccaagatgaatcttggngccatttttgaacccatcttccttcttgagattttgctg

SEQ ID NO: 412235 - DNA, 479 bp, Homo Sapiens
  misc_feature (158)..(172): n is a, c, g, or t
tgagccaccgcgcccagcctacaggtgtctctttgaaaaaaaagtaggtttattttaaattctttaataaatcttcatattgctttcaataggggttgaactaatttacattcataccaacagttcccttttttctgcatcctcaccaacatgtcccnnnnnnnnnnnnnnnaatagtagacattctgactagtgtgagatgatatctcactgcggttttaattgtttatctgattagtgatcttgagcatctgctcatgtgtgttgccacttatatgtcctcttttgagacgtatctggctatgtcctttccccactttttaatgcggccttttttcttcttaataagttccttatcgattctgggcaattggccctttgtcacaagcttagttctgtatttcctccggtttggacgttgcctgtccctgggtagcttcttccctatgccaacgctcttcgcttaatttcccttctct

SEQ ID NO: 412236 - DNA, 669 bp, Homo Sapiens
  misc_feature (577)..(577): n is a, c, g, or t
cttcatccttgatggcaacagccgatcgtggtggtgactgagggtgggcaatatcagtgggcctccagagatgtggaggtgcagggactgttgggctcccagtcaggatgcagcctggtgggggctgggttctcaggaaggcatcatgctatataattgcttaaggctcagggggtgtgtgggacccaatgtgatcttgatccttgaagcaatgcctttgcccagtttccaggcagtttcctatgttattcttgggctcttgagggtttagggactttgctgtggctgggaggcaggagtctacagtaggaatgcagaccactggggtcactcacttatcctttcctacactcggaagcctctctagggtctccacaaattcttgccaaccaggctttctcactttcctgttctttccttgctttgggcattttctgtcacttttctgttgaatgaataataatagatttctttaaaacagaacaatttatctgagctttctaaactgatgagaggaccactaaatatgttatatggaggtgtataccctagatatactaggaaaaatttctagtanatatatatatgatagaaatactgaaatgaggtggtgaagagagtggcatgtatgtctattcatcctatatgagcagcaccggtattgctatg

SEQ ID NO: 412237 - DNA, 611 bp, Homo Sapiens
  misc_feature (483)..(483): n is a, c, g, or t
  misc_feature (543)..(543): n is a, c, g, or t
tttatgcttcagtagatctccaatgtcctcaagacagtgttcaaaccattaatataatctacaaaacccatcatgatatggcctctgctttcctctctgtcatcataccttgtacctcttctatcagcactttaaatccagaattctgaactactttcaaatccctaaatggcccatgctctctctagcttccaggattttgcttaatctgtttggctaaccagctaatcacagcctggctgtatccatcacttattccactctagccttaggtgacatcaccatcactaggaaacttttcttggcctctaaagcccaggatggatctatcatcagctcccacagcaacttgtgcatttgttgtaattatcttcatttttctacaatcctcagtagatttgaaatgaatgatttctcaatcttattcaacatatttctagggtctaaaagaatgcttgacacatagttgtctttcgtatgatnattaattgatttgaagtgtcatcaattttgagatgtgtcattatttcatctattactaanaaaaagtatgccaatgaaaccattacacatcatgaattgcgatgcatcttgatttcacaggtgtgtga

SEQ ID NO: 412238 - DNA, 222 bp, Homo Sapiens
agacactgctggatttgatgtgcttatattctgctgaggatttttacacctatgtttatgagagatattgctatgtagctttcctttcttgtaatatttttgtctgcttttagtactagggtaacagtggcctcataaaattagttagaaagtattaccacaacttctattgtctggaagaaatggtaggaccttggtataatttcttttaaaaaatgctgg

SEQ ID NO: 412239 - DNA, 419 bp, Homo Sapiens
tttacaggacttttgttttcatctaggctttttatttccatgtttcctagattgtgcttatagattacactaaatctccaggtgaatgaaaaggactggtcatgatacttatttagaggagtagtttttcatataccatgttgaaagtgtcaggaagagaagatcccttgtcggtccaacaaagtcaaacaaatcaaaacctgttaacactagggattgggctgggaacaattcatcagagagtatcatagcactgtaggtctcaagagggcatttaatagcgcccgtggcaataacaaagagatgcagagaaattcactcaccagatcttttggcagaaaaaaataaattgatgaaggcaggttattgttgggcccatagggagtattcccacaggtaagggtgcatcatactggagt

SEQ ID NO: 412240 - DNA, 421 bp, Homo Sapiens
attcacttccagagagcaaaatatctccatgatttctgtattattggtgaagccacctcaaagcccctaataaataaaataattacctttattattattatggtcacattatagctaggtaaggacttattttcttgatcttagctacctgtgtaacacaagacctgcttaaaggtaaaaatttgcttgatgtcatgattgattaaaatattgctaattcggcaaagtgatattattcagcctcaagggatagtaatacaatatttcatgtttaatacatttaataaaatggtattctgtctataagaatcactagcctttccattcttactacttaaatctcaactccctgttgacattttgcttttattgcaggaataatggtaaagagagactagatccatgttagcctgatacactt

SEQ ID NO: 412241 - DNA, 396 bp, Homo Sapiens
ctggcctgatgtccaccttgagatggatgtccacctggggacagatgttcatttgtggcctgagtgtccatctcgtatctaatgtctacctggggcctggtgtttgcctgaggccttatatccacctggggcctgggcatccatttgaggcctgatgtctaactaagacccggtgtttaattggggcacagacttcttcctggagcccaatgttcacctggagcctgaagttcacctatgcctgttgtctacctgaggcctatgtgtcaacctagcgcctggaccaccctgagttcagtgttcacctgacgactgacatctgcctggagtcctggtgtacacatagggcctggtattggcttgtgaccgtatttacctagggcctgtgtgtctctt

SEQ ID NO: 412242 - DNA, 409 bp, Homo Sapiens
cagggagtggcagcctggtgcctgggaggacacacggatccctcaaaacactggagttagcctgtggaaccggcctcttggatctccagcccccaattcccatgcaagtctggcctgcaggttaatggtgctacatcagactcttctgggcagtgcactctgccagccctaaggcactggggagccctggacagacaatggcaggtaaaatgaacaatgagcacctccctaacacaaagacaagcaaaatcacacactgcaggagtccctgacgggctacccaagagaaagtgtgctgcagccagaggaaatagtgccagtcacacacagaagggaatggcagattgcacatctagaagtgagcaggtgtctaccatgcttaaagtgaaactgctttattgtgggtgtg

SEQ ID NO: 412243 - DNA, 435 bp, Homo Sapiens
acattaagaaagcagggtaagtaggtggagagtggctagcgaaggagctatttctgatcataggccggcctttataaaatgacttttcagcacatgaattaagtcacggtttgagccacgagaagatatatttgaggctgaaggaggaggaagtgccaccaacctgacataggaatgaactggactcagcataggagaaggcctaggatggggacagaatgagggggaaattagcaggctatgaaatcagtaatggaggcaagggcaagttcatgtgcagccttacaggtaagacctcagctggtgtgattggtgtgacaggaaacccatggaggattttaaggaggcagtgacaaacttggacttacaatatcttaacttggttctggactttaggttctgggactgtcgccctttctttattcctttggttgg

SEQ ID NO: 412244 - DNA, 409 bp, Homo Sapiens
tttatacatatatacattgtaaaatgattactacaatcaaactaattaacatatctttcactttatatagttatcatttcatttcctttggctatgtacccagaaatggaattgttggatcacatggtagctctacttttaattttttgagcaatttctatactgttttcaataatagctataaccaatttacattttcacaaacagtacaagggttccctttcctccatcctcaccaacacttgttattttttgtcttttggggaatagctatcctaataggtatgaggtgatatctcattgttatttttttgcatttccctgatgtttggttatactgtttttttcatatacctgttggccctttgtatgtcttcttcggatgtctattcagtttctttgttcactg

SEQ ID NO: 412245 - DNA, 714 bp, Homo Sapiens
  misc_feature (462)..(462): n is a, c, g, or t
  misc_feature (611)..(611): n is a, c, g, or t
attcggcacgagaggcattcaacgggtaagtggcagccagaattcaaatccaggcctgcctatcatgcaagttcctccctctttgctgcaccacacaagcccaccttgtctagcactgggataaattaagagaagagcctggagtctggggatctgaggacagaaagggaaagacattccacatgatggcaggtcagccaccaggaaggcattgagggaacatttctaagagtatttttgttagctgggccttctctacacacggccataccacgcatatacgttccaggagtccaatctctttcctcctgaggtggctctgagctggtgctggccacgagctcttgcaggcccagaggggaggcatggccctagcaagcggcctgagctccagacaaagctgagcctcatgaaaccctgacacgagagctgtcagccctgcccagcaaattctggattgtncttggagtgtgatccacctttggttccagagaagctgttcatctggtgcccaggaagcccagacggtcactcaggtcaccagtttctggtttccccatatatctgaaaccctcacctggacaccctcagactcttggcctcctgggcangcagaactagggtgtgagtgggaaccgccagacttcctcgtatacaccacaagcacagatggccattaccctggcatcgtgacccagagccttgctgcctggg

SEQ ID NO: 412246 - DNA, 352 bp, Homo Sapiens
ggctattcgggctcctttttagttccatgtgaattttgaaacatttttttctagttctgtgaagaatatcaatggtagtttaatgagaatagcaatgaatctacaaactgctttgggcagtatggctattttaatgatattgattcttcctgtccatgagcatgaaacgttttccatttgttcttgtcatctctgatttctgtgagcagtggtttgtagttctccttgtagagatctttcaccttgttaggtgtattcctagatattttgtgtgtgtatggcagttgtgaatggaagtttgttactgatttaactctgggcttgactgttgttgctgtataggaatgcttaa

SEQ ID NO: 412247 - DNA, 618 bp, Homo Sapiens
  misc_feature (131)..(367): n is a, c, g, or t
aaaacttttcattaaaatgaaaatcctgaagaaatgtagttttttttcactgtcaaagaacaaatacaattatgaatgagtgagtcattgttctcctgagtcatttcatgaacttataacagtcgtatccnnnnnnnnnnnnnnnnnnnnnnnnnnnnnnnnnnnnnnnnnnnnnnnnnnnnnnnnnnnnnnnnnnnnnnnnnnnnnnnnnnnnnnnnnnnnnnnnnnnnnnnnnnnnnnnnnnnnnnnnnnnnnnnnnnnnnnnnnnnnnnnnnnnnnnnnnnnnnnnnnnnnnnnnnnnnnnnnnnnnnnnnnnnnnnnnnnnnnnnnnnnnnnnnnnnnnnnnnnnnnnnnnnnnnnnnnnnnnccaggacaaaacacagtcctgtcccctttgttagccacatcaccttcaccactcgccccaggctggcatactctcggcttctgggtgggatgagtatgcttggtgcccaaggctgtatttgttactttggaccatatctgccgcaggagactaccaccttcttccaatccagacaagaacagctgatgcggggtgtgctggttgtggcccagtgtatcacttatctgggtgtggttcctctctgcttcctt

SEQ ID NO: 412248 - DNA, 594 bp, Homo Sapiens
  misc_feature (566)..(566): n is a, c, g, or t
gccgggactgttttgtttaggtctccatccacctgtgtggtataaatctgccagcctcaaggcggcgggggaccggagtgagaaagctctgacgctcccaaaagccccttttcgcaacttacagatctaggaccacatttgattctccacgcctggaaccggctagatcctagtttacgctcaccccgccctccagcctcccatcaacgcttcccgcacccgctgtgtgcagggctggcgctccgcagagcaaacagcgcccacgacccagggacagctggccaccgaagtccctccccggcgcccttccccgttccttgaggataggggagctgaggttttcatgtgaagggcgcccatgaaattcgtgggaacttgttctggcgtcttctggagtggagttctttcaggggtttcgggtctgcccgggactactgggatcctgggttggctggagtttcccagactaggctggagagaggtcggctgttggctcgcgggagagcccagaggaaccccttgggcgatggcagtcaagaccggcggctgcgttggcctggaagaanagccttacattagcgagctgggtaagct

SEQ ID NO: 412249 - DNA, 586 bp, Homo Sapiens
cctacttagccctacctgtgctccctgacagccccgcattatcctgcctttcagcctgccatcctgtggaatctatttcactgactggctcctcgacccccaattcaatcgctcattaccatacgctctgagcttccagccaccttctcttgctcaccaactgaccttactgcattcatatgctcgttacacagttctatggcccacttagatcatcatgcagttgtaattgctgatccggaactaatgtcactgtctggctgtactgcctgcaacgtatacaccgtcaatctagttcatctgatcgtactcgcacactaatccacttcaggacttaacgaccagctattcaagatctacactggctgagatagacacttctctcacagctccatctaactcttagaactcccatgacctgggtattcctgctcagtcctattatcttatcggaccgactattcgtcagctagtataccgactctttcacctcaggcttctcatggaggggcattctgagtcatccgactggcctctgcgccattccctgcctgtttaccacttggctttcccatcgctttgcccc

SEQ ID NO: 412250 - DNA, 670 bp, Homo Sapiens
  misc_feature (515)..(515): n is a, c, g, or t
  misc_feature (524)..(524): n is a, c, g, or t
  misc_feature (598)..(598): n is a, c, g, or t
  misc_feature (635)..(635): n is a, c, g, or t
ttttctcactttcagagctcctggcagctaagcaaaccctttgcaatatcctggcttttatactctcctctcctcctttccccttccctagcccaggcaactccccatctacactttgtctcctttaacaccctctgcctgcatgccaattctaatttttggaaccgcttcacaattaacctgcagcaactttccccatccccaactccccttagagagtctcttgagggaaaaaatgctctgtaaatcattccaggcccaacagcattgcactgcagcccttcttttatactggtttatgctgttaggctgaaatgatcaaggaggcatgaataattctttttcttgggtgtcctagaaacacttaaggtgccgtgtaattcatgcaaaattaccatgggagaattctctctcctgagctgttttgttctgtaaccctgtggacatgtcagttccaagaatggccctgtgtctcacaagttcaccatcagtttttcctctggaagtacctgctntatggactnttctccagcagcctcttataattttcccctaaggtaaatattcagacacaaaggtactggtagaagctcatagntgattgcatagggcttgtcgctgagatacatacacangcagagttcacgggtattgagatgctgcgcccggc

SEQ ID NO: 412251 - DNA, 127 bp, Homo Sapiens
caaatcatttatatggacttagttcctttaacgtgaaataatgccccatatgtgtacactccattgatttgtaggaattgatgcaaggatgagggatgcatggaagaatttctccagtatctctctc

SEQ ID NO: 412252 - DNA, 681 bp, Homo Sapiens
  misc_feature (576)..(576): n is a, c, g, or t
  misc_feature (602)..(602): n is a, c, g, or t
  misc_feature (629)..(629): n is a, c, g, or t
ctggtcatatgccaggcttatgaactagataccatgttgtatttagatgctgggatggcctggtctagatgctgggatggcctggtcagagttatggggctctcagtacttttttcatttcatgaagatgcaacagtcacttttataaagatgataattaatgagatattttttatcaagtacctaccatatactaaggcattgggacagacatttttcaagcattatctactgtatttaaagtttgccttgtgaaataggttacttattttgtagcaaaggaatacttattcctttatctttgagacagtttggaaacctctctctgaaaccgtgatatcactgttctcactgtggattttggatccttccagactcagcctacaataactatttctccatctgcccaccagtcccctttctcagctctccaaatttcaatcacacccttatttgtatcagatctaccgtcatctctagtttgtgagctcctctgagaacagatagactctttgtcttctctgtatcacatagtgctgagctcaatgatttgtgcacatgggtctcaaacatatnctcagagctcatttcttaaagcagantccgggttgaatacacctttcaagggncatgtcctttgtctcagaagtaagtagatttcctttatttttgacatatagc

SEQ ID NO: 412253 - DNA, 609 bp, Homo Sapiens
  misc_feature (197)..(294): n is a, c, g, or t
  misc_feature (301)..(332): n is a, c, g, or t
  misc_feature (342)..(516): n is a, c, g, or t
  misc_feature (542)..(542): n is a, c, g, or t
gcagtatcttcctggattttttcactccagccacactgactggccttcattttttccttcaagagtcttcaccctagcatttcctgctgccttaaactgctccttctgcttaatcttcactcaccctcagaaagcaaaggattggcttttcaaagaagtttttctgactctttcatattaacacaggctcttcctcnnnnnnnnnnnnnnnnnnnnnnnnnnnnnnnnnnnnnnnnnnnnnnnnnnnnnnnnnnnnnnnnnnnnnnnnnnnnnnnnnnnnnnnnnnnnnnnnnncatgtgnnnnnnnnnnnnnnnnnnnnnnnnnnnnnnnngtttcagctnnnnnnnnnnnnnnnnnnnnnnnnnnnnnnnnnnnnnnnnnnnnnnnnnnnnnnnnnnnnnnnnnnnnnnnnnnnnnnnnnnnnnnnnnnnnnnnnnnnnnnnnnnnnnnnnnnnnnnnnnnnnnnnnnnnnnnnnnnnnnnnnnnnnnnnnnnnnnnnnnnnnnnnnnnnnnnnactgtattttcatattcaaaagaatnaaaatagacccttagtttacaccatggatgaaaggccccgtagatcagaaactatttttctagaatg

SEQ ID NO: 412254 - DNA, 414 bp, Homo Sapiens
ctctcctcctcctcttcagcactgcgtatgacacaagcagagtgccttcggagcagcttctccctctatacatgaaggcatgttggggtcaagggaaaagttcaatacgtcatgacacacccaaactgagctgctcgcacctcaacagaactgcatttaatggtaaccatgtcaatgccagccatgggatgcgtgacaagattataaacctgatgctgaggaaggatgtctttcgggtgtttttggagaactagggataaatccctaaatggctcagctgtttattgggatgggcacttgcctgtaacttgaagtaacttagtctgtgcccaaagtgataccaatctaccatggctccaggtttaaacccacactttatcctttcctatagttcctggtctgagcacttagtgt

SEQ ID NO: 412255 - DNA, 676 bp, Homo Sapiens
  misc_feature (193)..(251): n is a, c, g, or t
  misc_feature (578)..(578): n is a, c, g, or t
ctcatttgaattatgtttttataaagcactatatttagagtcattgaaataaccaccataagcattaaagatagaaattgtttctgtagagaagtctttaggggagaggtgcagtggggctagggaatactgcctttcattgtatatctctcattaccgtttcatttttaatcatctgcatatatcactgcannnnnnnnnnnnnnnnnnnnnnnnnnnnnnnnnnnnnnnnnnnnnnnnnnnnnnnnnnnacttaagtaggcagactatttctggggattttgtagtagttcatgggagaaataatggtttttctctacagtcagtagacagccaaatgatcagttcaaacaaagtaggtgggaggacagtaatgaaaggggagaaagaataggaacaggatttttatggagcaaagggctttgatgtagccacaggttgataaataaattaaattcaaggtattgccctacttgtgtctaacaatgatttgagggatgtgtggtctttcttagggccttaatttcagcccaaggaatagaaagctgttcaagggaagtccttgtctgacccatacnctacccctggtgcacacacttaccaagctaaggagtatgacattgacagacacaatttgagaatgtgcaaccttaccaggttcctaatggccatggtt

SEQ ID NO: 412256 - DNA, 588 bp, Homo Sapiens
  misc_feature (152)..(291): n is a, c, g, or t
ttacactctgcgcaatggcccctacatcatgaagaaatggggatattactgttttccttacgagaacagagagaggaccatacctctccaggagctcaacgagtggtctttcttgtttataggtattaggactcccacatctctacataaannnnnnnnnnnnnnnnnnnnnnnnnnnnnnnnnnnnnnnnnnnnnnnnnnnnnnnnnnnnnnnnnnnnnnnnnnnnnnnnnnnnnnnnnnnnnnnnnnnnnnnnnnnnnnnnnnnnnnnnnnnnnnnnnnnnnnnnnnnntcacaggactgatggacaatggcatactgatagcgatgatattatgataaaattggggtgaaatgtttgcaaaatcacctcattttttaccaataagacgcaatggggcagaatccttataaatcaagagaatagacaccgattgggttgaagtgtgatccatttggaacaaaagcccttattaaagagcggggactccaacgagaaacggccgccccctttcaaggcgatggcccacttcgtggcccatgcccttataagtttttgaggtcggggagccgaaagaatttggacccg

SEQ ID NO: 412257 - DNA, 280 bp, Homo Sapiens
  misc_feature (95)..(103): n is a, c, g, or t
agaggacgtaggagaacaagaaaggaggttataacgtgaagaatataaaaagggggggcccataaagggtacgaaatatttaaaggagaatgacnnnnnnnnntttttgaggaaagggttcagaaaggggatattccccttaaaaaagggttttgagcttttaaggttgaagcaaggttttaaaaaagggaactcttgtccaaaagggaaaaagactaaaaccaaatgggggaagatttttttaattaaaaagggattttccaaattgggccaaatgggt

SEQ ID NO: 412258 - DNA, 501 bp, Homo Sapiens
  misc_feature (294)..(341): n is a, c, g, or t
atatggacaaaaatgtccacaaattcctttcattcctatataaatattccatttcaatgtgacttggcatctatttttccaccaccaaatcttgttctgggtatgtttcttgctttagaccaataaataatagcagtagtccagaaaagtgcttgtgcattggaacttgtcttttctccttggcctttaacgccacagattgacatgtgaagaagcctaggctaatagactagaaggtgtgagaccacatggtgagcggccccaaggatccaagcagtctcagccatctcatcnnnnnnnnnnnnnnnnnnnnnnnnnnnnnnnnnnnnnnnnnnnnnnnntcatgagctaaataaaaggggggctatttccaactaaagtttcggagtggtctattaatcatcaaaaatgctaacttgatacaacaccttatctgatgtactaatcaatactttgtcactacgggtgccctatcagtcaaaatgtcactgaattggatgt

SEQ ID NO: 412259 - DNA, 373 bp, Homo Sapiens
caaaaatatatgtatatgttccaaaaggaagatcagtgaaggtgttccgatgcttacatgactaaggtaattaaacatctacatatgtgaaggatttttgaggaggggatgtaaatacaatggatattataaggacagcagtcctagtatgttcctggtctgtggacctccttccttatccctgcacctttcctcctctatgcttgtgtatgttcacatgcatgagtgttcatgtgtacgtgtgcacgtgtgcatgaccatgcacatgcactgaaagatggggatgtggggaggataagagcagcttaccctatttctcatttgtggaaaaaacttttactccattggatttggtaatcaaaaagctgctggg

SEQ ID NO: 412260 - DNA, 650 bp, Homo Sapiens
  misc_feature (150)..(217): n is a, c, g, or t
  misc_feature (423)..(423): n is a, c, g, or t
  misc_feature (473)..(473): n is a, c, g, or t
  misc_feature (516)..(516): n is a, c, g, or t
  misc_feature (529)..(529): n is a, c, g, or t
  misc_feature (546)..(547): n is a, c, g, or t
  misc_feature (564)..(564): n is a, c, g, or t
ctgcataaagcagttgcctgccacacccaaagaaaatgataagaaatgtgcctcttttgcatgctgtgattcatttccactttgaataagagggaatagaaaggagattctaggagaaggctttggcttagaatcaggggtagagagtcnnnnnnnnnnnnnnnnnnnnnnnnnnnnnnnnnnnnnnnnnnnnnnnnnnnnnnnnnnnnnnnnnnnnctattatttttattactatttatattttattgataatgtcagcagcagtgcagggaacctggcatctatttctagtattgtgtgtcaaggttgctgtaaatctagagaatggcagcatctatgctctcttttcattgcaatgcccccagtacagctaattttttattgtctcacctggatcagatcacagctgctagcatggcctncacttgcaagggctttcagtttaccatccagttcattctctttaaatgtngcaactatcttccttaaggacatctttggttatttaacacttncttctgcgatggnttctaaaggctcaccannatacagtgaatgccttnaccccatacattgaggtctctaaagctagcctcaactactataagcttagtttcatcataggcttaagagtgatataaagatgcaa

SEQ ID NO: 412261 - DNA, 683 bp, Homo Sapiens
  misc_feature (304)..(304): n is a, c, g, or t
  misc_feature (469)..(469): n is a, c, g, or t
  misc_feature (476)..(487): n is a, c, g, or t
  misc_feature (512)..(512): n is a, c, g, or t
  misc_feature (520)..(520): n is a, c, g, or t
  misc_feature (556)..(556): n is a, c, g, or t
  misc_feature (571)..(571): n is a, c, g, or t
  misc_feature (577)..(577): n is a, c, g, or t
  misc_feature (617)..(617): n is a, c, g, or t
  misc_feature (623)..(623): n is a, c, g, or t
  misc_feature (633)..(633): n is a, c, g, or t
  misc_feature (635)..(635): n is a, c, g, or t
  misc_feature (646)..(646): n is a, c, g, or t
gttttccatgatgattccaacacgctgatccttcatttgtctaaactcatagaaattttgttgttctgacaacttgttgggtacatatcagtatacgacattaatatatctccctgtccccaattaggttatcagtcacttgatggaggagattgtatgttatatattactttgtattcttcacagtgtctaatataaaggacacaagtcctttctaagaaaagagtgctgggattctctctacaactcaccaaaatatcttctgtcacatttcccatctaaactctgaaatataacccaattntattatttgtgaatttggaatcagagcagactctcattctcctcaaatcccctgctgtaatggatgatatttcttcctagagttcttagtatttttctgagggcctttaaatatagagccagaaattaaggtgaggagcatagaacatatacataatagcctaanaatctcnnnnnnnnnnnnagacagagtctcgctctgcactcangcactcangcaagtgcacggtctcggttacagcaaccttgcctnctgggcttaagcaantctctngtctcagactccgagtagctgggactacatggtgcaccancatggncagctaattntngatttttaganagaaccggtttttgcatgttggccctagtcttgctcc

SEQ ID NO: 412262 - DNA, 617 bp, Homo Sapiens
gagagaagcaagaactcaagatgacaccacatttctgacttgagtaacacagtactctttcccagaaggaagagcagattttgccaggggagatgagttgaatttgagtgtgatgagttagagatgccgtaaagtccaatgggaactgtcatctgctgctggaagtcagagcatgtggtctgctggagctgtcttggacggctggcaagagtggaccatgcacacctcacctcctcccagctgctttcagtgacctcatgttggtagcttgaaatcagctatggtgggtgtatttataccacagacattggcaggtgctctatgaggcagggctctcctctccaccctcccccactcagctaatggttaaacatttgccggcaaggagtcttgttggtgagggaggcagaatgaggctgcccctgggcagagacacaactgaccatctctcaagggtcaaataagagaagggagacttcttggtaggctttttccaacaggaatcttctgtctgtgtatttgcaagtaggaggacagggaggagtagacataggggtctgctttcagaagtggggaccttcttcggctcccttttcactctgacctttgaataaggg

SEQ ID NO: 412263 - DNA, 697 bp, Homo Sapiens
  misc_feature (519)..(519): n is a, c, g, or t
  misc_feature (557)..(557): n is a, c, g, or t
  misc_feature (613)..(613): n is a, c, g, or t
  misc_feature (629)..(630): n is a, c, g, or t
  misc_feature (642)..(642): n is a, c, g, or t
  misc_feature (673)..(673): n is a, c, g, or t
ctgcaggaattcggcacgattcttacctcccaggccctctgccactcataccacatgccagcccaccctccatttcacagggccaccccactcccatctcacagaggcagatgccagggccaagaaagggtgggggaccatttgtagccacacagctggtgtggcatggccagtgtggccagcaagcagggagtgagaagctgctccactgatgggtgcccaagaccccgaggcaggcgcaggtgaccatagcctgagagctcctggcaacactggtctgcagaccagcagtccagcctccactcatatccacattggccagaaacaagagtggtgctgctacacatgacagagtaactgaggacaagcctggttgaggttctggctgggactgcatgaagttaagagaccataagcctgaagtggctggtgtgtgtgatgcctcatccaggggcaggggccaggcatctgaggccaagcacagggtgggattgggcctgctgggcccagcccagtgtngcccctcagggccccagagccccaggggagcaggcggnggcccatgaggcttggcagccgcagagacaaccagcactttccttccagcttgccnctgcttgccagatgtnngtttcatggtanaagagccggacagttgcgagctctccagctnacacgtggcaggcatagcacggcc

SEQ ID NO: 412264 - DNA, 166 bp, Homo Sapiens
ctgaacctctctccagaaaggaaactccctggggaaggactatcatcatcttcttcactactgtctactcagtgcccagacacagccccgcacagagaagacaccaggattgtcggcctgcacaaaggcatctgagtaggagagagacagaatcgcagtgtttcag

SEQ ID NO: 412265 - DNA, 297 bp, Homo Sapiens
gtagtcttccagtaggctttatctaataataacacccccttcccatttagcatggaagcctgaatcaaaggggttgttgagctcatcctgttcatttaaatgtagcacgatccattgagaaatgaacacagataccatcctcaggcaaaagcatgtgcttagaaatgccatctggcagtcctcctgatatccccactctaataagaaaagtatgtcaggctcttagatgcactcaacaggtgactaagaaaccagacttcaggctaacttttcaggacagccccctcatgacgttgg

SEQ ID NO: 412266 - DNA, 391 bp, Homo Sapiens
gtagcttaatttaatttcctaaattaaatcctccagagcagaccccagatcttgagctttacttcaactcatcctcctgcccagtacatcgatctgcatattgtcaatgcagatgatagacaatgtgaagcaagaggaagaaccacatacgtttaatgcttctcacctggactcacagggaattcatagtactgcagatgtggcactagccctagcactgagcttccttgtaggctagacacagcattttctactaaacatgaacctgaaattcagttgaacttccaagaactgtggtttgaagtagtaggttcactgcaggacagctcttcaggccaacagagtcatctgatggagaggcagctctatctgaggtgctagcggacttggg

SEQ ID NO: 412267 - DNA, 262 bp, Homo Sapiens
tagaactccttttaacatttcttgtagtgctggcttgatagtggcaaattctctcagcatttgtttgtttgagattttatctctccttcatttatgaagcttagttttgccaaatacaaagttcttggctggtaattgttttgtttcaggagagtaaagatgggaccccaattccttctggcttataaggtttctcctgagtctgctgtttctgataggtttttcttttagaggttatcagatgcttttgtcttacgctctt

SEQ ID NO: 412268 - DNA, 398 bp, Homo Sapiens
ttttgatagggattatactgaatctatagatagttttgggtagtacagacgtttaaaccatattgattcttccaatccatgaacctgaaatattttttcttctttgtggttcatttccatttctttcatcagtgttttacagttttcaatgtatcttttacttcttttgttaatttaattccaaagtatttaattgtatttttgcctactgtaaatgggattacttgtttgatttctttttcagattgttcactgttgacacacagaaatgctatagattttgtatgttgatcttgtactgtgcaactttactaaatttgtctatcagttctaatagattttcagtggagtcttcaggttataacaaatataagatcaagccatctaccaagggtttg

SEQ ID NO: 412269 - DNA, 662 bp, Homo Sapiens
cattcaaagattgtcattaaacagaaaagaagccatgtagaacgtatgcattgattcttgcggtggaaatccagggaagaaacatatgcagaggcacatagtcaacatgttccttctcctaaatttactgataatacccactttttgagctgggaactaacccctctcatttcatgtggctccagtgtgattaccaatctctttctcctacttttccagccagaagtatgtaacccaaatctgaccaatcaaaacaaccatttgcctagtcagacgataccttcaggaatgggcatgtgacaaaatctgggccaagcagagtcttccctggcatttctctatcagtgctctgagaaaagatgcttttttcttaactgcattgctaagcagtagaatatgagtcttgggttaagagcagccatcatggctatcacttgtaaacagcttaagaaacagtggagatctcagatgtttctaaagctacattgccttaggacttttcagtgctatgagcaaatgcatgcccctttacacttagttaagttaagtagagtatctaacataagtacaaatcaatttattatcatagaaagcagaagagttcacaaaataatgccctagagccttagaaaatgaaagatgcatggactttctggctgctc

SEQ ID NO: 412270 - DNA, 596 bp, Homo Sapiens
  misc_feature (451)..(451): n is a, c, g, or t
  misc_feature (516)..(516): n is a, c, g, or t
  misc_feature (537)..(537): n is a, c, g, or t
  misc_feature (541)..(541): n is a, c, g, or t
  misc_feature (543)..(543): n is a, c, g, or t
  misc_feature (547)..(547): n is a, c, g, or t
  misc_feature (550)..(550): n is a, c, g, or t
  misc_feature (557)..(557): n is a, c, g, or t
tacaattggaaaattaatgtgaagttcagaaagcattgaagagaagggaaagaataatcaataaagaagttttggccagagttgagataaagctatacagatccagacctcaggggctgcagtgagaatggaaaagaagagtgaaaataaaataaattgttgcaggagttggcagaaattgtttactgacaatttaggaagatgccaaaggagagaaaggagataaggtttagcacctggtttctgattaaaagaataatttcgtgactgagagaaataagagataccagaaagagaaaggtggcaaatttgacttcagatatgggaattttattttcatgattcagggaacttatttctcttggtctactatgtattcccaatgcttgatccatggtaagtttgtaattaatgtgattgaataactgaaaaatactccaatcagaaactntagcaaaatatgtaagtgcagataaaccaaaatcaagtcattctttgtttggacatcatctcttnctaaatctacatgtgaaacangaantnaggngtnctgatantccagagaaatgttgaggtggagaatatccttttcccct

SEQ ID NO: 412271 - DNA, 668 bp, Homo Sapiens
  misc_feature (541)..(541): n is a, c, g, or t
  misc_feature (552)..(552): n is a, c, g, or t
cccccattttatatctacccatttttttcaaaatgagaattttcaggttgggaatgtttattgaaataatacagctcctataccagtagtgtatattagttgtgtatgtgtagggcagaaaatatgttttagtttatagtttgaagaaaatgaagatttatctatctatctggatctggtagagagcactgcacttctccacattgcctagaaataatggattttagagctggatgtggaaatttaaaattgcctcctttgtatgtgtgagtgggtttatgtattgcaagaaatatatctgtggacacttgtgtgcttagaggaacggacgttggccaagcctgacaattattccctaatatctccagtttctttcttcccttcagcaataatgtcctaagttctgagcatatagccatctaaccaaaaaactccattttccagcatctctaatagctagggataatgctaccaagtgactacattctggacaaagggatttaatgggaaatgatgtattcaacttttgagagcaactttntaaagatgctngcccttcacttttcatttttctttgttgaagagcagtgtctgtagcttcatcttcttcaggccagtttatgattactatatcattatcgtcacaataagtaagccaagacgacttg

SEQ ID NO: 412272 - DNA, 330 bp, Homo Sapiens
atatcgagctctatcacactctatcgatcgcggcgggacacggaacccaatgcgagaaaaagagagaaacataacaaaacagtgaccaacaacatacaacgataggcactaggaaaaccatagcggagaccaactgaagagcgctcgaagcacaacacgcacacaccagcaggcgagaagcagaagaggagcgcaaagatagcccgaaaaaacgcgtgagaaggctgtatgatcagaggcaaattgaacgcgtatacacaaagcgaaaagccctatatagcagaagaatagacacagatatagccggccagaacagaggaacacgagacc

SEQ ID NO: 412273 - DNA, 415 bp, Homo Sapiens
ataatttcaaaatcctttcagtcaggcaaatttttacactgagtactttttatttggttttaaaacctaatgatctatacgttgctgaacagtttgttctaccctctctactctttcacattaaattgaattaaataaacaagacacatcaatgaaaaatccaaatgtcaaaatggctgatttttagctccctttggctagaaaatatcagtccatggactccttccaggcgtgcattgccagggcattctgtactgaagcagtgagaagtcttcaaatccatctacaaaacactccagaaagcatctcttaactgaggatgtacagaaagacagtacaaactaaagcatgtgtgtaaagatcgggctcagtcctttttctagaagtctaagtgctcatattccaagcacggtgt

SEQ ID NO: 412274 - DNA, 675 bp, Homo Sapiens
gatagtttagcctgaacaacacactctctgtctagagactcagccagctatgctttcgctgagtgaagggctccactaacacatccctgactgacgctataaggctggccaggttctgggcctcaggaatcaccacccagtctgtgcaaggcttgggatgagaagcgaatcactccaggaggctcagttaatggcagagtcaggcctcaaatacaggtttcctgatgtctaaacctgggccctttcaaaagcccccaaacccagggaggactggtcttgatcatgagctccttaaggttttttgcttgctgtagaagtttaccgtaaaatgttacctcagaaatacaggatgtacttctcaggggattagggggacatccaggggtcttggggtctctggctgtgtccaggaacactgctcagtgaggaatgggcccagccatggagggtgctggtgcccagttagagtggctgtggctaagtgacccatatgcttttcatggactggttcttacccttataacaacctaagagccggtatgaattgtcatttatggatgaagcataagactagagagttagtcaactattgaagactaggtttgctgactcgccaaggactttttttaccactcataccgtgcaacccttgtgaagcttgctctgggcagactg

SEQ ID NO: 412275 - DNA, 414 bp, Homo Sapiens
ggtagatggattttttctatcagaaaaaaattatgcatattctacaacttgtcctcataaaatttaattcaacggtatatttttaaaatgcaaacttgagtttgaatttacaaatcagcctcttaatatttaactcaatgacaatgacttcattgatcttcctagtctcttggacttagcaggggaaacctgcttttttcccatgtgttaattacaaagctagtaaaagtaaattatggctaaaacatgagtacttaaaacaatctcaacttttcctaccatgcttagtagcatcagtagaggaggtacaaagaggaggtgagatgatgggagtggtgtctgagtggccactccttcccttcctgtccccatgaagatgggtatgcagccagctagattcacacccagatggct

SEQ ID NO: 412276 - DNA, 171 bp, Homo Sapiens
ctgagctgcgtaatttcatgccgcgtgacacagtccagttaaaaggaacaaacccccgggggtcagcgtctactcacacaggtggactgatggctgatatccagcacgagccagagcagtcacagtacccatctactcacacaggtggactgatggttgattccagcaggg

SEQ ID NO: 412277 - DNA, 335 bp, Homo Sapiens
gttttgctgttttgcattgaaattgtgcaattatttaggcattggcttattttgattgttaagaaatgatagtagggaaagttcatggtgatgaaatcactggaaggcaagaactactagctctgttgattaataaaagatttatagctctaaataactggtttttggtatagaccccctgcttttcttcacaaattatctgtaataatagccttgctagcttcataatattcacataccaattgtatacctttgccttattagtcttcttgccagaaataatgtacgttagtctaacctgtccaggttcctgagattcatagtgagtggataaa

SEQ ID NO: 412278 - DNA, 313 bp, Homo Sapiens
actaatacagtttccatctgacggtactaatacagtttccatctgctgttgtcatagtggagcaaagacaaagtcagatgacctggatttgatccaggatccaccacttgatagcttggttacctttgtaagtccacttaactaaaccctaatttcctcatccccacatgagataagcctcatgattttttttgtgtgacatcaccaatggtggagtatatattatggaagaataggaggacttaattaattccctaatattattactattattacttttccccttattaactacttttcactattcggtttt

SEQ ID NO: 412279 - DNA, 655 bp, Homo Sapiens
  misc_feature (148)..(300): n is a, c, g, or t
  misc_feature (554)..(554): n is a, c, g, or t
  misc_feature (641)..(641): n is a, c, g, or t
ccaacgactatatgctaaggatgccaaatctgtatttccagctcaaatatgtctcttgagatcctgcattatatatttaaaggctttctgggcatccccactcggaagacccacagataactctaacataagtacaaaactgagcctnnnnnnnnnnnnnnnnnnnnnnnnnnnnnnnnnnnnnnnnnnnnnnnnnnnnnnnnnnnnnnnnnnnnnnnnnnnnnnnnnnnnnnnnnnnnnnnnnnnnnnnnnnnnnnnnnnnnnnnnnnnnnnnnnnnnnnnnnnnnnnnnnnnnnnnnncacgcccccaaaaaaaccctgagcccagaatctgaacccgagtggaagggcattcccgttacataccaaggggggcatgaatacagggaggagtataattaaagtcattcttaaaaataacctaccacatttgcataaaccagaaattcattctgtggtgacaataattagtttttggcatgattataacactcagcccttgggtatttggccaaaagttatatttggtgcacctctaccaacgggcacagtangtatcttataagctgtatcttttagctaagccagaagctatggctcagacaagtttcttaggccacaaaactcaggtggttgaacangcaaccaccacggt

SEQ ID NO: 412280 - DNA, 653 bp, Homo Sapiens
  misc_feature (589)..(589): n is a, c, g, or t
ataatcccactagcaatctaaagaaagaacttttattccaaagaaacatactcataaagctgtgagttgttaaagagaacatgtgagtttctcatattcctaccttccactcctcctgtttgcccaccctttcctccaactccacattcaacttaggatagttttatttacacaatgaggtctgattgttttggggctttctttgtcatatatcatgccatttaatggtaagcaatacatttgtgactattcttttaggatgcatcagactttccctataaatctgaacagagtgagtggtatggaaaactagctgctagaattttgtttttgcgagtaaaaggcaacgtaacataaaaattaaacaaacatcttcctttccaatcactatctgcatgttacaaaccatgtagatttgtaacttttgcaatacactatggtggaggaagggtgcctcttgttcaagggcttcactccttggagatgtgttttcagacccgtgaacacagtggggtcaagtctatcagtatgaggcacagggacaatggggagactaatttaaaaacataatggggggcatagacagaantgggtttttctggatttccttaaccagcaggcgtgcttggttcaacctgctccatttcctttct

SEQ ID NO: 412281 - DNA, 700 bp, Homo Sapiens
  misc_feature (59)..(94): n is a, c, g, or t
ggctgcaggttcaaatgtagaccacatttagatgtcatcttaccctagtcaaaataacnnnnnnnnnnnnnnnnnnnnnnnnnnnnnnnnnnnncaatagcttctggagtacaagtggcttttgttacatggatgaattatatcttggtgaatttggagattttagtccacctgtcacccaagtggtatatgtcatacctaatgtgtagtttttttgtccctcagctcctcacactctccctgtttcttagtctccagtgtctattttgccactctgtatgctttcgcatactcatagcttagctcccacttataagtgagaacatacagtttttggttttccactcctgtgttactacttcacttagaataatggactccagctccatccaaattgctgcaaaaaagacattatgtcattccttttcatggctgagtggtattccatggtgtagatataccacattgtctttatctactcattagttgcttggcgtttacgttgcacgtgtgaattgttgctgtataaacatgtgtgcaggtgtcattttcatataatgacttattttcccttcggtaagacccccatagtgggattgctggatcaaatggaagatctacttttaactctttgaatctgggaatctccatactgtttccattcagggttagtccaattttccttttcaacagcagggtg

SEQ ID NO: 412282 - DNA, 688 bp, Homo Sapiens
  misc_feature (572)..(572): n is a, c, g, or t
  misc_feature (640)..(640): n is a, c, g, or t
cacgagggtaaactcctgcctgcttttgtgtaactctctcagtaaaagatattaccagaccctcccctcacccgattccttccataggtttccttagtctgtccaactatcttcatacccagggctacccctctgctttaggctctcatcatctctgacttggattattagaacatcctttcagtgaactccctaataaccctgctttatttaaattttcataagttgttcatcatggtttttttgcattaatttgattttgtaaaatattgcattaaaatttcatttatcttgattcccaaatattttggtgcctccttaaggtgtgcacaaaaagcaagtgctgtcctcatttcactcttgtcctcgcccttctcctacctccagtcttgtctccctcaatctgttttccatttagccaggcagccagtcaactaaaatacgtaagtaatcatgccacattcctgcttttcatcgtattcccctcaggttaattccacaagacctcaccagatcaatcttgttctggtccctgctttctatttcaacctctattctggatttcctctttntcctctatttgtcattgccatggctaacatcatgtactgacacagaatgcacattatgttcttagagncttacatgtatttacttattctatatgatgaggtgatacagatactat

SEQ ID NO: 412283 - DNA, 558 bp, Homo Sapiens
  misc_feature (441)..(441): n is a, c, g, or t
  misc_feature (444)..(445): n is a, c, g, or t
  misc_feature (488)..(488): n is a, c, g, or t
  misc_feature (492)..(492): n is a, c, g, or t
  misc_feature (508)..(508): n is a, c, g, or t
tcaaatatgtctaacttacttccaaggagtgtctaatttgaaatatgtaaaatttgatagatcagaaagtttttttgctgtgtgacttttcaatcatttattaagatttcagtgcattattatctgggttccctttaagactgtaagaaatgttagacaattttagcttattacttataggatgagaagagaataagagtggttgatgggactaaataaacaatcttaaagtaataaaaaggaccgaggagtatgactaccccaattttccatatctgaagctgagataaaaaattaatcaggtttcctgggttacatatcttgttacccactaactacattagtgactctgggacatttattcagtggtctctaccccataagagtattgtaatagatgaaatattcatgtaaatcgctttgcccagtattggaacacangannacattcaaatatagttcttatcttattggtaatagatcatttncttntaagagctgctaactntctgggtgaataaggtaaatcataagcaattaggctatgtctggagtccc

SEQ ID NO: 412284 - DNA, 712 bp, Homo Sapiens
  misc_feature (114)..(471): n is a, c, g, or t
  misc_feature (546)..(641): n is a, c, g, or t
  misc_feature (674)..(674): n is a, c, g, or t
tttgcatcttaagtctgaaaattggttgaggttccacaattccttattgtgctaatgcaggtatggcgtcggttcaccagactgcttgtgaatcaagtaggacattaatggagnnnnnnnnnnnnnnnnnnnnnnnnnnnnnnnnnnnnnnnnnnnnnnnnnnnnnnnnnnnnnnnnnnnnnnnnnnnnnnnnnnnnnnnnnnnnnnnnnnnnnnnnnnnnnnnnnnnnnnnnnnnnnnnnnnnnnnnnnnnnnnnnnnnnnnnnnnnnnnnnnnnnnnnnnnnnnnnnnnnnnnnnnnnnnnnnnnnnnnnnnnnnnnnnnnnnnnnnnnnnnnnnnnnnnnnnnnnnnnnnnnnnnnnnnnnnnnnnnnnnnnnnnnnnnnnnnnnnnnnnnnnnnnnnnnnnnnnnnnnnnnnnnnnnnnnnnnnnnnnnnnnnnnnnnnnnnnnnnnnnnnnnnnnnnnnnnnnnnntatgataattacctgtttcagttctagggataccatgatcaactattaagtagaatgttaaagatctctatcttnnnnnnnnnnnnnnnnnnnnnnnnnnnnnnnnnnnnnnnnnnnnnnnnnnnnnnnnnnnnnnnnnnnnnnnnnnnnnnnnnnnnnnnnnnnnnnnnagtgatgccctgctctacaaacaaacaactttnccagtttggtggcactgttgtccgtaccttctttcttt

SEQ ID NO: 412285 - DNA, 714 bp, Homo Sapiens
  misc_feature (527)..(527): n is a, c, g, or t
  misc_feature (648)..(648): n is a, c, g, or t
  misc_feature (652)..(652): n is a, c, g, or t
  misc_feature (680)..(680): n is a, c, g, or t
cccccgggctgcaggattcggcacgaggttttgatttgcatttctctgatgattagtgatgttgacattttttcatataccttttcacatttgtatgtcttcttttgagaaatgtctattcatggcctttgcccaccttttaattttatttatttatttctgttgctgttgtttgagttctttgtatactctattcctattatattggtcccttgttggatggttgcaaatatttttccgatcccataggttgtctctttactctgtaggttatttattttattgtgcagaagctttttagtttaacagagtctcacttgtctgtttttgtttttgttggctgtgcttttgaggtcttagtcataaattctttttagaccaatatccaggagagttttccataggttttcttctagaatttttgtagtttggggcctcatgtttaagtccaatccattttgagttgatttttgtatatggtgagagatatgggtccagtttcattcttctgcatgtggctattcaantttcccagcaccatttattgcagagggtgtcctttccccagtgtaagtcttgtcagctttgtcaaagattagttgcttttcttgggctttatttctgggatatctattcttgtccattggnctgngtgtgtattttacaccagtatcatggtngttgctactattgctttgagcataatttgagtcg

SEQ ID NO: 412286 - DNA, 703 bp, Homo Sapiens
  misc_feature (407)..(452): n is a, c, g, or t
gtggatcccccgggctgcattttcaaagtttcaaattattttgtaacatctaagagtgataattgtatctctgaggaggcacatctaatgtttaaaaagaaacgttgacttctaagacaatgaaggagctatttacacttgctgcagaagccaaatcacttatcaatagcctgcctctcctaaatgagttaatagaactattcacagggccaagactattgatgtttagtatatcttgggccttttgagttaatttttccactgccgagttgcaataaaagacagtgaaagactttgtcttttaacagtgaagtaaatagagctataatagaaagtacactggcctagcctcggtgtccaaaaaataggtcaactctcccaaccatattttttatttttctatcatnnnnnnnnnnnnnnnnnnnnnnnnnnnnnnnnnnnnnnnnnnnnnnaaacaatctggaaattctcttaaagtctagtgtacctctaatactctaagattataatatttacatttgtatcaatatgagagttgcaaagacccgttcttttcccgcaagagcatggcttttctgggggcgggaagtctaattcctatggatacactatgacatggcttggaagggcatttgataacttccttccaaatctccacccagttgtcctggaaattcagaaacacgatgagccattttttggg

SEQ ID NO: 412287 - DNA, 190 bp, Homo Sapiens
  misc_feature (71)..(144): n is a, c, g, or t
ccaaacctatgagtataacctcattagcatatactcaagggttaccaaagaggcttattattaataataannnnnnnnnnnnnnnnnnnnnnnnnnnnnnnnnnnnnnnnnnnnnnnnnnnnnnnnnnnnnnnnnnnnnnnnnngtttcatattataccacacttacctaggccattcattaactcttca

SEQ ID NO: 412288 - DNA, 333 bp, Homo Sapiens
aaggtccattcaagtgggcattatgcccattttagagaggagaaggtggagtctcagaaaggttaaaaaatttcccagagattccacactggaagaggtgatgtcaggatgtaaatctgtgtgttgtggaagattaagtgcctggatcacagatgctgtcaccctttctgatcacaagggctcccctgtgagtggtcattttaggaagggatgtttcctgggagagacggggctgcttctatcgttttgatgctgatatttttgcctcattgacttttcagtaatgggattcttaaaataagcagtaatcttacctcatcctgctgccttcct

SEQ ID NO: 412289 - DNA, 698 bp, Homo Sapiens
  misc_feature (596)..(596): n is a, c, g, or t
gttttcccaaagtggaacctaagcagggtggcctgctgagttttatttaaaggggcaccttacagacacctcaagtgggaacccaaatatgggggcatgggtcagagtgtgaatgagtgtctgtgagtgtgagttgaactgagtgtgagaataccaacaggaggagaggagtggctaaaggtttaggggatagagtcaaatgtcagcgtaaatggtaggatcctggtcagagagcagctgaggaggcttcagggcaggggacccagatgggcagaaaggcgggtctggacctgcagctatgggacagtgtgcacaagtcaccaagtttaaatggaagggcgtcggtgagattaagtgtaactttctacaaagcttcagaaaacaccatctatccaggacacgtaggacacacagacacagttgctacacgcccagaatagctcctgccaacacatccctgtgttgtcacagggaaggtaacatcctcccaccccatccaccttgcagctaggccggtgtggggcactcagttggagagtgcaggatgctcccaggacccgccctgggtcacccgggtgcccagcttggcagaacanggttcatgaagtgtgttgccattacagacataggcacagggttgatggcaaggtggcttgacccgactggttacacccttcctcaggatcttctgcacgggc

SEQ ID NO: 412290 - DNA, 667 bp, Homo Sapiens
  misc_feature (75)..(89): n is a, c, g, or t
  misc_feature (367)..(367): n is a, c, g, or t
  misc_feature (453)..(453): n is a, c, g, or t
  misc_feature (478)..(478): n is a, c, g, or t
  misc_feature (482)..(483): n is a, c, g, or t
  misc_feature (500)..(500): n is a, c, g, or t
  misc_feature (502)..(503): n is a, c, g, or t
  misc_feature (547)..(547): n is a, c, g, or t
  misc_feature (599)..(599): n is a, c, g, or t
attcattattcacttcatctttttttcttacatttctcatcactctggcttttctatttttagcaacagggtaannnnnnnnnnnnnnnacaaaattttacattaaattgcattatatattttctaaatattttctgtattggttttgagaatttactatagatggagaagttttcctgaatattatgactggaaagcaagtgtcaattgtatcatgctagcaatgttttaattgcgtcgtacatagcaaggggtcaggactcacaggctgttctgtgctctctccatggatcctcaaagatcactttgtgacaaatgattctatagctgatgcagagaaatgtcatttagaggcgaatgcctggtntgtgcttccttttttttagcatatatttttaataattatgtcattttacttcatgtatgctaactaatgattcaaggtttgtacanatatgtaacattttaacttaagcanacannatttaacacttattaananntagatgactgaagaaacgcaagtatttatggtatctatttacangtataacattatgaaatctacaggcttgatacgtcactgggtcctttcaacntgggttttgatctactgcttctggttgctttgtgaagaagacacttagacatgttcgttgttgcttgt

SEQ ID NO: 412291 - DNA, 394 bp, Homo Sapiens
ctcatatctattcagccctttggccactatgttcacagtcagcaaatctgccagttttcataaataggaatggagaatctggaaccatccttgcacatctttgctccaagatatatttccctccagtggacaccattatctttgaaaatccccctgagcacaggaacctggccaaagaagacatggagaactcactctgaaaggaatcatggctaagccctcagcaccaaggagctgaattccctcagaagtcacctacaggccacgccacggaaagcaccaatgtgtgctctggaaccagctagacctgggttcagttcctaaaccccatttaccagcgctgggcgaccctgggtgaggtccttattgttcgccacagtttactcatctgcat

SEQ ID NO: 412292 - DNA, 394 bp, Homo Sapiens
gcaatgacaaatgtggccagttcactttctgactccacatatccatgcaactgcttcagtatcatcattccaccagttctttgtcttctttaatctctggtgcctggtatgcctctgcattttcctagcattcatctctgctgtcatacctttcatcactattcacccttagatctcatgattctgtcctcgcaatgtcttgtctgattactttctgtgtccctgtttggggaaaaaataaaccctccattccttggtgaatgtaagtcataggtctgactcctctcatgtctagtcacaggctgctaagcactcctgcttcagacaacctgacattattataaattcataacctgtctcaattagatttattagcaatgtctaacttctctgg

SEQ ID NO: 412293 - DNA, 697 bp, Homo Sapiens
  misc_feature (461)..(461): n is a, c, g, or t
  misc_feature (489)..(489): n is a, c, g, or t
  misc_feature (609)..(609): n is a, c, g, or t
  misc_feature (617)..(617): n is a, c, g, or t
  misc_feature (644)..(644): n is a, c, g, or t
  misc_feature (666)..(666): n is a, c, g, or t
  misc_feature (676)..(676): n is a, c, g, or t
gcgggctgttccatgtggtcatgggccaaggttcacacaggagtgcagagtgatttgcagtcagttgggagtgattacacagtgtttctcatcgataggcaggagggagccttgatgggataatgagatgcagctgatggaaaatcacagctgactgtcgccagtgagcaagctcgcacagccctacagtgctgcagtcgagtcctccccactgcaaagagcaggagaaaaatctgtggaattttaatactaagccaccccacagtgccaagggaaattgactggagggtccaccagttgagtagcagataattgggtaagaacaggatagaggggattcctctggacaaaccacaaaccctgccaggatagggctccaaatagctttcctaaaaagagagagcagcaatgcacaggcagcccctgggaaagggctaaaatgcagggtactaacgcatggngcccctttatcttgcctggccccagcanaacaaaaagagtttctttgccttcgtgcattacctgtgcagggttagaaactgccaaggagtgttttcctcactgtgctcaatgagaagaatctgttaagctatgttttcatagatcagntcactaangggccaacttgagccctgtttaccctnctgtagtcaacgagacagctgnttgctttganggtctctctttcatgacgcat

SEQ ID NO: 412294 - DNA, 603 bp, Homo Sapiens
tttgtaatttctgtctgacatttctcaaaaggtttctgtgcagtaccagttcttcttccaccatttgctttcgttttagtgtccatattgtagaagagttcatgtcgtgaaagaagtcgcaatcttgaataagcggaacccttctgccagatggtctaacgtcaatttgctttctggcactgcttcttctatgtcttcatcctcattgtctggcactggttcagaagcactcatctccatcaagtcatctcctattagttcctctagcgtggtgtctattaactcttgaatttttctaagatccatatcttgaaactcttctcccactacattttatgccatatccaaatctctttcatgatttccttgatttgctctgttgtgtatcttcggcattcacgcacacatctggacacagttttctccagcaggaatttattgtttcgggttgatggctttcccagctctttctatagcaatggtgatattttcagtcctgcaatccttctagactttcattgacaatcttttccatagggtgctgtgtgtaatgagtcctgagggtccttatgctcctgatctagaccctgagttgtgctgtgg

SEQ ID NO: 412295 - DNA, 400 bp, Homo Sapiens
gttaaggggagacaacaatgactgcacggggtcttctttcttggcaaaaaacctgttatctggcatgaaagaagcaatttcaatatgctggttgatgattctacaatggggacatgtacttagttacagaggtgggctttatccaatagattcccagagtccttgatactggtttttcgatggacacacatttgttcaagaagttttggacctctcaggattgcactggaaatcttcaattatctcccttgaaatcagagtggcaatgtgaagatcagttaagtaggaaacgcttttgtacaaaaagctaacaatttaatcattcttaattttctgtgtatggtactgactttgacataatgtcaaggtaagttttaccattgttctcatttttttgtgc

SEQ ID NO: 412296 - DNA, 398 bp, Homo Sapiens
agaatatcaccagtgactttacagaattagtattgtatctatatttatatgaaatattggtctgcagttttcacatgatgtttttgtctggtttggtgtcaggttaatgtaggcttcgtggtgtgaactggcaaattttgctcctgttttattttttgacagtatttataaagtattggatttaattattctttaaatgttggtagaattcaccagtgaagtcacttttttctctgtggaatgttattttactaattcaacctctttatttgttgtgttttttcgtaattatatttcttcttgagtcagttttgatagtttgtgtctttataggaatttgtcaattctatgtaggttatctaatgtgttggtgtacttgttcatagcatttcccttgt

SEQ ID NO: 412297 - DNA, 647 bp, Homo Sapiens
accttttaaaactagtctcatgaaggaagaacagctagcctgtctttctatgtggacatccgatatatttgtccctatcttttctctggcaatgacactgccatttcttttgggaaactggctctcttccattccttgtcattctggtagaggccaccagttacagtatctgtgttcctcccttgccatggccccattgacttatccaggaacatggatgtgactcaagcaaggctgatccatggacctggaaaagaggaggtcttcctccttcttgggtgttacaaactgaagtgctacaaatgtagagccacctgaggcctctgtccatgccatggaggagggccatacatggtaagaaagaagttgaagctaacatccagaggaaagcagagttgagagatggaagagttgcaaaaagagtttgagagatggagcgataggttagtagatagatagatacctgatgacattcttcatctagataggcttgcattagggtccactcttggtatttgggctacaataattaaccttgttcttatctaaattgctttgttgaagactcgtagccaaaaaagtcttgactaatccactcacccatttcagacagggactcctgatgtgcgttactttaccgccttctg

SEQ ID NO: 412298 - DNA, 149 bp, Homo Sapiens
ttcatcctttccctcatgaagcaaataattattaggcacctactgtgggctcttgtaggtaaagctaagacagggtctttgccctcaggcgggaatagacaagtgactcccacatactgtagcgcgacccgtggtctggtggggggtgc

SEQ ID NO: 412299 - DNA, 658 bp, Homo Sapiens
  misc_feature (506)..(507): n is a, c, g, or t
  misc_feature (519)..(519): n is a, c, g, or t
  misc_feature (597)..(598): n is a, c, g, or t
atgaatatcttggaagcacaaagtagacatcaaatggatatttgctaggtgaataaatcactgaatgaatgggcaaatttatgaacaaatgaatgaatgaatggctgtcaggcaatgggagcacagttgaggtaggtgggagcagggctcagtcaggcatctggctgcctctggatctcacctggacctggagaccttgtagagtctgcggctgcctcagtgttcccaacccctgccggaccttgccgtccctttgtgccatcctctctccatccccactggcctcctgctggctcctgctggctcccgtgggctgttaggaagagtctgggcctgttctccatacttacgccaccttataggacagagcagctgctcccctgccagacagtagcaagggcctttactgagatgtaattcacacaccaagcaattcatccctttaaaatgtacaactccatggtttttagtgtacgcacagctacgtgcaactatcaccacagcannattgagagggtntcatcgtttcgaaaccctatacccttaactatcgcctctatggagccttttctccccccctgctttgacaacactaannctacttcatcttttagcttccctgcataatactatggagcgcatatgcatgcccctttgt

SEQ ID NO: 412300 - DNA, 310 bp, Homo Sapiens
  misc_feature (270)..(270): n is a, c, g, or t
  misc_feature (298)..(298): n is a, c, g, or t
ttttacctcagagcattcataaatcaatggaggctacatctttggcccaggactgagactaggaggaggccaggtggatgtctcctaggaggagggacaggtgtattgcctcgtccttcttcacaggcacacagtgcagtcaagggaggatgacagcagaaacttttcttctatcagctccaaactaatgattaaaggggaggatttctccaaggctgctacctcatttaagggacatcagatcaatatgtcagtgctcctttaactaangttgggatatggatgccaggtttatctnctgtgcttcttg

SEQ ID NO: 412301 - DNA, 538 bp, Homo Sapiens
  misc_feature (106)..(144): n is a, c, g, or t
  misc_feature (391)..(391): n is a, c, g, or t
  misc_feature (400)..(400): n is a, c, g, or t
atgagccactatgcctagctgaagcttctgtttaaatgtggcattctcctacacaaaaattataggccagtcatcaagatacacattctgccatctaggaatcttnnnnnnnnnnnnnnnnnnnnnnnnnnnnnnnnnnnnnnnaattacacacacaggctacgccataccctacaaacaaagaaacttggtctaaactgctccaaaagacaagggaacaaatgtttgtagaaaatataagaatatgcatttcagataaacataagaaaagtttttctaatgttaactaccccaaaaatgacgcaggcttcctcactaatgagtgagtttcacatctcatcatgcaaggaacagttaagctagcacagcacgttgaggacaaacagcaganatggctggngtggaggtgggagcacacagagcaacttggaccagagcatcagggagatgggtgcagggaggcctgaggaatgtcgctgaggccatagcaacagtcccctgattcacggaggcagataagcatttcagattctccctg

SEQ ID NO: 412302 - DNA, 663 bp, Homo Sapiens
  misc_feature (510)..(510): n is a, c, g, or t
  misc_feature (558)..(558): n is a, c, g, or t
ctcaatgggaggcaccaataagagagcacaggaaaggaagagaaagagtttggggaatttattctctggttaccttccagctgagccatgggttggcagtgaccaccttctcaactgaaagctatggcttctgccaggaactcctctatcacaactgctgctgctatgtctgggttccagaaacccgagctccttcaaaccttggtgtggtaagagcgccactgttcctagctctgggttgcttcaactatctcataatgagttcccctaaaccttccacaactttgtaaacagacgctttgcttggactctcctctgttgacttttgtggtgtgtttcatttccagacctattctgatgcaatatccatgagcagaacattcccacaatattccttatggtgacccagaagtgccctgtccttaaatgctatcatgggaatggaatactggaggtatagaaaaaccaaagctatcaatgagagtgtaaagaaggtgaaggagagaggcnattgtgtggagaccctcaagatcaatggtgggggtgtgttgggggcanagcacattggcaattaacctttgggtttggatttgaaatgccctccatttcccgcggttttaataggccacacttccttttttggcaagtttatagaagtcgggt

SEQ ID NO: 412303 - DNA, 259 bp, Homo Sapiens
aacacattatttaacacattctctcatcacacaccccaataccaatttaccttttcaaaccaactatcaccatacctaactcccccaccacaaacacatttaccaaccaccaacccccattctcacaaaatcattcaatcctcttctcacccacaccctctttccttaccatattcccctacccctttcacctcatcccccataacattttcctaacttctcttccatccctccctttttatcttccctctccttctcc

SEQ ID NO: 412304 - DNA, 680 bp, Homo Sapiens
  misc_feature (543)..(543): n is a, c, g, or t
  misc_feature (614)..(614): n is a, c, g, or t
ttctgaaatcaaaaaatgccagacagcagtttccggataaaaacgtcgatgacatttgccgtagcgtactgaagaagcaccgcgaaacggtaacgctgatgggattcacaccgactcatttaagcctggcaatcggcatgttaaacggcgtctttaaggaacgatgaacatgaaaagcaaaatcatcagggagctacaggctccttttttattattcgcattcaccctcaagcgtattaaccaacagttcagggattaatgaaagatggcagacatcattgattcagcatcagaaatagaagaattacagcgcaacacagcaatatgcgccgcctgaaccaccaggctatatctgccactcattgttgtgagtgtggcgatccgatagatgaacgaagacgcctggtcgttcagggttgtcggacttgtgcaagttgccaggaggatctggaacttatcagtaaacagagaggttcgaagtgagcgaaattaactctcaggcactgcgtgaagcggcagagcaggcaatgcatgacgactggngatttgacgcagaccttttccattgaatgggtacaccatcgatggtgctggaaactgctgatgaacggganagaaaccagcaatacatcaaacgccgcgaccaggagaacgaggatattgcgctcagtggggctcgg

SEQ ID NO: 412305 - DNA, 238 bp, Homo Sapiens
aaggtccatcaaaccgggccacctccactcaatacatgtgctgcactaggacatcatcacaacttggttatgagtgtcgttatcaaaaagaatagaagttgagtcaccacataagaaaattagaaacgccccccaaatcttataggtcatgtacaaaagaacactaaatagaattacccaaatttgataatccagaaaacttataaggtaaaagaacttataaatatcagccatacaa

SEQ ID NO: 412306 - DNA, 731 bp, Homo Sapiens
  misc_feature (192)..(200): n is a, c, g, or t
  misc_feature (281)..(327): n is a, c, g, or t
  misc_feature (344)..(457): n is a, c, g, or t
  misc_feature (547)..(547): n is a, c, g, or t
  misc_feature (588)..(588): n is a, c, g, or t
  misc_feature (603)..(603): n is a, c, g, or t
  misc_feature (614)..(614): n is a, c, g, or t
  misc_feature (636)..(636): n is a, c, g, or t
  misc_feature (694)..(694): n is a, c, g, or t
cccccgggctgcaggcttgcattgcaattcatgaatactaggaacgaaattacttggcattattgaaatgtatacctgaatgttcaggaagtcagaattcaagaaggtcacgaaaaagatggagtgcgatcctgtagaatgagattctgaaagcagtgttaagtactcagggaagtccccacccaccccacnnnnnnnnngagacaaggtcttgctctgtcggccaggctcaagtgtagtggtgtgatcatggcacactgcagctttgacctgctgggctnnnnnnnnnnnnnnnnnnnnnnnnnnnnnnnnnnnnnnnnnnnnnnnaagtgccaaccatgctnnnnnnnnnnnnnnnnnnnnnnnnnnnnnnnnnnnnnnnnnnnnnnnnnnnnnnnnnnnnnnnnnnnnnnnnnnnnnnnnnnnnnnnnnnnnnnnnnnnnnnnnnnnnnnnnnnagaggtgtgagccaccaagcccggcctcactgggaaagtcttaaaagcatgctacttgggttaccattaggaatcctttttgccacacangattagaaacaccagagaagagtggtttcagtatcttgctnacacatcatgtgcanaggagacagtncagggcttgcatggactctgangatcagggacctaggttctacagtggttctttactattggctgacatgaggttttttnctcatggtccaaggacgatactgaacactgcccttgg

SEQ ID NO: 412307 - DNA, 684 bp, Homo Sapiens
  misc_feature (670)..(670): n is a, c, g, or t
ttttaataggatttgcaacttgatgcaagtatagcgttggtatttatcttatatgttctataataattactttttattctaatgaaatgcattgtattatgatagctaactcatttaactcttaactaggctacatttatgtccaaaaattaatataattttgaattttgatttttaacttatgagtgattgctatttataaataagctaaacagcttattttaccacagtgtcttcatatgctacctttggcctaaaggagatgttataatcatctaagggcccagtgattataacagactctaacaagaaatttgctcttcacctttcaaagtggttgcaatgaatatactgtcatggtcatgatcatctcttttggtctacttcataactctcatattgaagtaaattcaaatgagacatttttgccctaaatgtgatgtttaactattaatattgaaagtatatagtgattgtatgaaatacacaaccgttcgtgtagcactagattgatggttcttactaaaatgctttattttttctgatttcctatagatgcatatacaactttagaggtcacctaatatttgacttacaatgcatctgattcaggacagtttgcctctgatggctcttagtttcaatatgacctgctgggccatcaatcggnaggagacatttcct

SEQ ID NO: 412308 - DNA, 608 bp, Homo Sapiens
  misc_feature (144)..(153): n is a, c, g, or t
  misc_feature (204)..(507): n is a, c, g, or t
aaacaggaaggaggaaagcagcagctgcgtcagtggttgttgggagggccaaaggagcccacggctttgaaagctctttgtaaacaaagtactttatgcttttaactttttgtttactttcagtcagtcaaatgaagtgataannnnnnnnnngtttactcttgagagactctaaagcaatgattctcaccctgcagcgtgctnnnnnnnnnnnnnnnnnnnnnnnnnnnnnnnnnnnnnnnnnnnnnnnnnnnnnnnnnnnnnnnnnnnnnnnnnnnnnnnnnnnnnnnnnnnnnnnnnnnnnnnnnnnnnnnnnnnnnnnnnnnnnnnnnnnnnnnnnnnnnnnnnnnnnnnnnnnnnnnnnnnnnnnnnnnnnnnnnnnnnnnnnnnnnnnnnnnnnnnnnnnnnnnnnnnnnnnnnnnnnnnnnnnnnnnnnnnnnnnnnnnnnnnnnnnnnnnnnnnnnnnnnnnnnnnnnnnnnnnnnnnnnnnnnnnnnnnnnnnnnnnntcaccaggctggctacaaaggattggcgttttcactgcccttccactccaatccttcgcccacgccatctccaaccccacaccccttaaccagatcactgg

SEQ ID NO: 412309 - DNA, 525 bp, Homo Sapiens
  misc_feature (335)..(335): n is a, c, g, or t
  misc_feature (387)..(387): n is a, c, g, or t
  misc_feature (415)..(415): n is a, c, g, or t
  misc_feature (439)..(439): n is a, c, g, or t
cagaataaggtagatttatatgttctgacatggaaagatcttgaagatatagttaaatgcaaaaacaagtggaccaatagagtatgatatcatttatgttttttttaagtttaaaaaactgctatggggtagcatgtgtgtgcacatacatgtgtatctgtgcttacagacacatagtggtctgaaagaacatacattaagaatctactgagcttgcatgtgttgggggtgggacccgtggcttccccctgtgcctccaggccaccgaggtctgcatctgccctgtggagttcaacccccacttcgtggcacctatgatacccaaggtggagtgngcggtgttcctggaggtggctgataacttgcacctgacccaggtgctaaagnggccgttgagggatatgaggagaacganagagttctgaggaccatgcacctnctgctgctggaggtgggtgatgggggcaccttgcagtgcccagagtctggatgtatgttctctcaggcacaggatcccccactgct

SEQ ID NO: 412310 - DNA, 609 bp, Homo Sapiens
gaacctcagtaaatatgttgatggtccagacgaaaatgtgtagataatatccattcgtgattgaggccttgccttgacaaaccacttcttgtcttgaagacacactcttcaactcagcttctcacagaaaccaaaacctcagctcatggcagaaggctggaaccagagtgagaaggctggttgcaacaaagggtaaaatgcttccttaggggataatctaaggcagcttacccagacccattgctatggtaatccacccacataataattacaggttatttgcatatctggattccttttcatagccaggggatggtgtgaagtcagcgctaaagaagcaacaagtggctgtcatgtgtcatctctgccccaaggggttctgaaatcggtttgaagcttgaggagccttcattctttctgggataaaggataagaatcctaacagaactcacccccagtcatcactagtcagagagagctttctgccagagtaagtcagtcggccctggctcagcacacaaccccgaccatcgtcgaggcgaccgacacccaactcaccacgacgccacaatctggacgactgagccacccccacagcgagtccccagg

SEQ ID NO: 412311 - DNA, 306 bp, Homo Sapiens
  misc_feature (110)..(127): n is a, c, g, or t
taattattctcatatatttcttttttcttcacccctgaagagttagtgatggtgacaactgcagctgtgggtttgacggctatagcaatggtagtgcaggcagtcattgnnnnnnnnnnnnnnnnnngtttatgaaatgattgaaggaacttacaatattgttcctgaaggggtgagaacttggggtagtgacagttgccttcgactctatgatgtgctttatatgtagagaaactgctggacatttctgttttgctctaaacttttgaataataggcagtgggcattgaaaggcaggttgatgta

SEQ ID NO: 412312 - DNA, 677 bp, Homo Sapiens
gcggtatagccttctctgactcagttacttgagatcaatcatggtcccaaaatattagatgaaaaattctagaaatatacaattcataagttttaaattgtgcactcgtctgagtagcctaatgaaatctcacaccatcaggaaggctcggtccttcctgagtcgtgaatcatccctttctccaggtattctgctgtaaactctactcgttcattagtcacttagtagcaggcttggttgtaggattgactgttgaggtattgtagtgcttgtgctcaagtaacctttgttttacttaataattaccccagagtacaaaaatagtgatgctggcaatttatatatgacagagagaagctgtaaagtgcttcctttaagtgaaatgtgaaagttctcaacttaataagaaaaggagagaaatcatatcctgagattgctaaaatctgtggtaagaatgaatcttttatctctaaaattctgatgaaagaaaaagaaatctgcacatactatacataaggttcggtactatccgtagtttcagacatccacttggggtcttggaatgtatcccctgaggataagggagaaccactatattcctaaatattctgagttaaagatttcttaagcagagattttatagattattttagccttttcggactcttatcatcgtg

SEQ ID NO: 412313 - DNA, 568 bp, Homo Sapiens
ctgaacagtagtctcagcagtgggcttcaaatattaaataaaccatgctgtaaagagatgttctgtcttacaagctttcttgttccatttatagagcacagttcaagtaggtttagtgtaactcttaagagccctaaaagttttagaatggtaaatgagtattgtcttcaacttaaagccaccagccatgttagctcctcacaagagtcaacctgtcctttgaagctttaaagccaggcatttttcctccaacataaggtgatttcatctacattgtatgttttcatatttgtttagtatagccatgttcatcaaacatcttaccttgatcttctggaaacttgctgcagcttataatcagcaattgcttttttaccttgtactttcatgttacagtgatggcttctttctttaaacctggtgaaccaactttttctaacttccaacttttcctctgcagcttcctcacctctctcagacttcatataatagaagcttagggccttgatctggattaggtgtcagcttaagggtcttgtggctagttgacctttatccagaccattca

SEQ ID NO: 412314 - DNA, 408 bp, Homo Sapiens
  misc_feature (351)..(351): n is a, c, g, or t
tgggaagaacaaatagatatgagacatattttggaggtaggattatgactgattggccaaggccggtgaggaaaaaggaggcattaaggatgactccaaaacaagtaagaatgtctcaggggccccgaagcttggctactttgcccgaaatagattcttctggtcctgggatgctccatggatcatggcttagcacagatttcacagccagacagtcctaaccaggcctgttgagctggtcatgggagatagtagttccttattgctttctcgtatattctggtgatgattcttaaggcatcacagagtagaggtcaatgataaagacgatggtagtacctactaggtctncaaagcagacatgacaccaaaatagggtattcactttgaagtcctacttaaattatg

SEQ ID NO: 412315 - DNA, 362 bp, Homo Sapiens
ttatagctagagcgtgttccacctcgatttcgttgtttctttccttgattcatcactctcttcatcctctccacttctactctctttggacatacctgtcatactccttcaaggctgttactccacatttcacgtgattgagttattgccaattctgttaccatggtaatccatgtttctttctcatacctatcctttattcctcccactgtatcttttttgtccatatctccccttgactttttttatccctctatcccttcttcttccacagtatgctttactcccatcactttacttctttccttccatcacatcctagttcttttccttcctctgcctttctctttgtgattttcttt

SEQ ID NO: 412316 - DNA, 419 bp, Homo Sapiens
gatgtatggttaaatataaggaccatctctttatcttctgtgtaggctgaccctagcacagcttctgcctagtacatttccacctagaatttgtggattgataatgaatgaatgaacaaaaaatgtatcaacaaatgactaaaaggacatactggcagagtccttcaaggctgttaggacaaatttaaagtgagtgagttattgtcaattatgtgaacaaggtaatccatgtttctttaaactcataagtagcctttattcctcccactgtatctttaatttgtaaagagaggggatagacttttgtcatccaagaagcccttcttctgcacaaaggatgcagttaatgtcataactttacctctatgcatgtcttttgggccattcatatatttcatataccctcaacctgtgagatt

SEQ ID NO: 412317 - DNA, 674 bp, Homo Sapiens
  misc_feature (519)..(519): n is a, c, g, or t
  misc_feature (575)..(575): n is a, c, g, or t
  misc_feature (614)..(614): n is a, c, g, or t
caataattttgtaagcacctaaatctctgcttgaaatccttcaagttgtttccagtttcttgtctgaacgttgaccagtgttgtccttaccttcttctgcatgcttcttttcttgtaaatgctatttaactataaatttactgctagatcccaggcccacccttcttgtcttcttacttaagacatttcctgggatatcacatatctacggcttctgttatcatccatgtgctgataactcccagtttaacatttccagcccagacccctattgtgaactcccaaattcagacagccaaatccagactggacatgttcacatgactatcttatgtgtatcctgccccaactactattgctttacaccaaactattggaacagcccgtgggagattccctccaactggtagcatatttttcaaaacaactagaccccatttagaaaggctggcctctttgctcattttgtccataccctctctattatccgtaggcacttcacatctatgaacccctcangtatttcttctacagtctgcagacatgctcagccatatgtgacacttcatctcatnctttctatgtaggcctacatgcaactctctttaactgtnttctctctcatagatgctcccattagctccgccactctttgcctcaacacgattatgccc

SEQ ID NO: 412318 - DNA, 677 bp, Homo Sapiens
  misc_feature (341)..(341): n is a, c, g, or t
  misc_feature (498)..(578): n is a, c, g, or t
  misc_feature (652)..(652): n is a, c, g, or t
gagagaggtctagggcagagtcactgtctggggaagctcacctacccacaccacccctaggcccatcagcctctgcctctccttcatgggccccagtctaatcccctgacactaagctgtccctgatgaattgcatctccccaacacccccaggcatgctcaccttctgacactccaatctctgctattcctccaagtctgaccccaaaacatgcccatttctgcccctgttcacatcctccacccctaccctgtcttggagggagtccttctgctgggaagaaggtgtggcatgtggtggcaactaaggtcccaaagctgtatctgcccttttgacctgngccttgcctgagagctgagctaagctccaatttgtgaatatttgtagggactaccaggcaccaggctccatgctgattttataggaggtacagggacatctaggtagggcagtggaaagtacagggactttggattcaaatggacccaagtcacatnnnnnnnnnnnnnnnnnnnnnnnnnnnnnnnnnnnnnnnnnnnnnnnnnnnnnnnnnnnnnnnnnnnnnnnnnnnnnnnnntccctgccttagagagttgctgcacacagacaaatgtgcacacagctgcccccagaaagcaagatgaggaagcncttgggggagggcacagtgttgtgt

SEQ ID NO: 412319 - DNA, 704 bp, Homo Sapiens
  misc_feature (521)..(521): n is a, c, g, or t
  misc_feature (538)..(538): n is a, c, g, or t
  misc_feature (613)..(613): n is a, c, g, or t
gctgaggtttcccatgcatatggcacaagacttactaaagaatagccgcaaaggactgaaggagaaaaagaagtgtgtgaacgaaaagtatgtgagacagatctcaatcaacttagaaagtttattttgccaaggttaaggacgtacccgagacacagccttaggaggtcctgacaacgtgtacccaagccggttgggcacagtttcatttcatacattttaaggagacatgagacatcactcaatacgtgtaagatgtacattaattcagtctgggaaggtgggacaactcaaagcagggagggtgcttccaggtcataggtagataagagacacctggttgcatttttttgaatctctgattagcctttcactgaatacacaatttacatgtgagacaggggtaaaggaatacttacttctgccttagtctggttcagtgaatctgcatttttacatcaatagtagggcagaggaagcaatcagatacacatttgtctcaagtgagcagagggatgatnttgagttcttgcctttngtctatacctgtggaagataaactccaatttacatttgccaggatgaaattcaacagaactgttttaaggtaaangatcttgggccccacaaagaatttttgtgttggccatgtgatggaagcatgtagccttttttatccttgtgtataagctaacttatttggt

SEQ ID NO: 412320 - DNA, 684 bp, Homo Sapiens
gttatttcaaaaataaagatcactctggagggtttcatgcagacatttaaatgctatggcccagaaatgccatacatcatatggcctcacaaagaattaaccaggattagttgtgtggctccaaagaatcatgacaagaaggtcggatagtgcagcctatcttgtacccaacagtagagagctgtggtacacaattctgcagactactgctactggtagtaatccttgtccatatgataacctgccagctaaacagtctcttcctgtagctttatggcccaagtcttccattttttagggcaaactgccagagtagccaccagcttagagggaaacattgttatcaggggaacccgcccccaatatttcaacatagattctttatattttccctaagtgtcggccagtctgagcaataaagagaaagaatacaaagagaagaattttacagctgggccgctggggatgacatcacatatcagtagatccgtgatgcccacctgagctgcaaaaacctgcagtttttattagggatttcaaaaggtgaaggtgtgtatgaacagggagttggtacaaagatcacttgcttcaaaggctgcagagcaaagatcacatgcttctgagggaaccaggccagggcacaaatcggaactcctgtaggctctatattcggtgccgttttgc

SEQ ID NO: 412321 - DNA, 266 bp, Homo Sapiens
ttttaccactctttaaaatcaagtgggactggaaggatggtatggagattttattggtaagggcatttttcagaaaatataatttttgtggcctattgcttaattaaaatttcaacgtaaattctatataaataaataccaaattttgtttactgggtacctatcccagatattgctcttatccatgtaataccttacgtaaaattctgactcatttgtttatattactaaattcaccccaaatttcacctcattcaggatgaggt

SEQ ID NO: 412322 - DNA, 403 bp, Homo Sapiens
gaattccttgggtctaagaaagagggttttagtatcttttccttaagctcttttatccaatttaaagagttatttaatccattcagaggtttccatggtcaggccttgatttgataatctgtagtaagtaaacacaaatttgataatttgtgtttgaatctgcctttgacttcaagtgaatttcctaattttattttttgccatatgtggttaataataagcaataagtctctgccacatgaattgcacaatttggggacaatctctattattcccttttattcttacttacaaatcaaacaattctcttttcagctgatttcttttcttgtaattcctccataaatgcagccaatggcaactaacacatgcttcttgttgtcatccaacctctttccctgct

SEQ ID NO: 412323 - DNA, 413 bp, Homo Sapiens
cgaacatttagattgcttccaaatcttagctactgtgaacagtgctgcaacaaacatgaatgtgtgggtatttctttgataaactgatttccttattttgggtatatacccagcagtgggactgctggatcatatggtagctcaatttttagttttttgaggagcctccagactgctcttcacggggctgtgctaatttacattcccaccaacagtgtacaaggattcccttttctccacgttctcaccagcatttgttactgtctgtcttttggatgccatttaactggggtgagatgatatctcattgtacttttgatttgcattcctctgatgatccatgatgttgagcacttttttatagcctgtttcatttatatgtcttcttttgagttcctgttctctttttgccc

SEQ ID NO: 412324 - DNA, 706 bp, Homo Sapiens
  misc_feature (572)..(572): n is a, c, g, or t
  misc_feature (578)..(578): n is a, c, g, or t
  misc_feature (590)..(590): n is a, c, g, or t
  misc_feature (634)..(634): n is a, c, g, or t
ccccgggctgcaggaatccatcgctgactgcgtatccagctcactctcaatggtggcggcatacatcgccttcacaatggcgctctgcagctgcgtgttctgcagcgtgtcgagcatcttcatctgctccatcacgctgtaaaacacatttgcaccgcgagtctgcccgtcctccacgggttcaaaaacgtgaatgaacgaggcgcgcccgccgggtaactcacggggtatccatgtccatttctgcggcatccagccaggatacccgtcctcgctgacgtaatatcccagcgccgcaccgctgtcattaatctgcacaccggcacggcagttccggctgtcgccggtattgttcgggttgctgatgcgcttcgggctgaccatccggaactgtgtccggaaaagccgcgacgaactggtatcccaggtggcctgaacgaacagttcaccgttaaaggcgtgcatggccacgccttcccgaatcatcatggtaaacgtgcgttttcgctcaacgtcaatgcagcagcagtcatcctcggcaaactctttccatgccgctttaacctcgcggnagcacnggcttcttcctncccgatgcccagatagcgccagcttgggcgatgactgagcccgngacccgacgatatgatcctgatgcagcttggatggcgtgggcggcatagcccgtattgcgtaccagtcgtct

SEQ ID NO: 412325 - DNA, 356 bp, Homo Sapiens
  misc_feature (335)..(335): n is a, c, g, or t
ccctcatgaaaacacctgcgttagtactcatgcattttagggtactataggatctagtttcagaggattttctgactagtatgtatttgacacagggacaattgaaactttcacagatgcagtgacacgaactgtgtacatctaaacagactcttagattgattcaggctacttgatagttcggcttctgtcacgactttttaaacagttctacatcaaatcagttataatcaacctgtgtttaataaccatcctggacgcctatgaggcatcttcctgcgttctcactagctcatggagtctgtagaagtcacccatgaatgagcattgtccangcattctgagtgagtactgct

SEQ ID NO: 412326 - DNA, 615 bp, Homo Sapiens
  misc_feature (471)..(471): n is a, c, g, or t
  misc_feature (522)..(522): n is a, c, g, or t
  misc_feature (531)..(532): n is a, c, g, or t
  misc_feature (546)..(546): n is a, c, g, or t
  misc_feature (550)..(550): n is a, c, g, or t
acttcaccgaaactgcacttgtcaagatcttcatcacatcccagttgccaaatccaatagccttttggttctcatcctattccatctgattaagctgatgttttccctcactttatacttttccctcttgcctcccatgtctcctcaaactacatgattttacaatcctcattggccagtctttggtctccttcaccacctctttctcttgcaacccctaaatgctgagtttctacctgctcagtcccgaaccctcttttaatcctttttctaactctctcccaagatagtctcatatattgacaaagcttgaaatgccatctctgtgcttatgagtctcatagtgatgtctctaattcagaccttttctcatatatttaattgactattttgcactccactgaaagatctcacattcacttttaatataacatggcaacatggaaatcttgaatctcccctaaatctttntcaccctaacttatctctatgaagtagcacaatcacctcatgctatctcanacccagaannatgagagacagttntaantctgctccctttctaccttcacctctaatccatcagtggatcttatcttgtctacctcttgattt

SEQ ID NO: 412327 - DNA, 521 bp, Homo Sapiens
  misc_feature (177)..(370): n is a, c, g, or t
cttttccactctcctcaaaccatggtatctatctactacgtctccccttcctctcaacagatttcacttttgcaaaatcaaaagccacaaaccttctggctaccaaaccatcacacttactaatacctacatctaccctttttccatcttgtcacagtggaacgagtgactgcctcnnnnnnnnnnnnnnnnnnnnnnnnnnnnnnnnnnnnnnnnnnnnnnnnnnnnnnnnnnnnnnnnnnnnnnnnnnnnnnnnnnnnnnnnnnnnnnnnnnnnnnnnnnnnnnnnnnnnnnnnnnnnnnnnnnnnnnnnnnnnnnnnnnnnnnnnnnnnnnnnnnnnnnnnnnnnnnnnnnnnnnnnnnnnnnnnnngaccatgaagatgggcctgctatgtgcttggttctcttaacttacatatgaatggagtttccgagggctcccagcactctttctgttcaagcgttgaaccggaaggcaattctctttctttctaattacccgccatggattttttttctgg

SEQ ID NO: 412328 - DNA, 605 bp, Homo Sapiens
gagatttcatatggctatccctacaagatagttgctgattatttttagcttggggtcaagaaagtggccaaaattagcatagtagttgtaaaaaaaatagttttattttttatgtattgaatgacatattaggttactattactaggaattaatttatataattaatattcaatatttgtcacacagatgtatgaaagacaatcataagcaaatgtatactttttcaaatatgcattagatgtaaatttaaccactctaatataaaaattctgttggatatttttctactgggacttccgaataggccaagcgagtggaggcattctaatacacaaatttgatgaagtttgaactcacaaaaccactccattatttttttgtttctgcaattatgtaagactctcagaaaagtctctagatctgacatgagaacttaactagactacatgaaattgtttctctttgcagctcattattaaaaaaagtagcatagatcttacattttaaaaaggaaaacaagttattggtgcaaatcccttcctttggaatttgctttgtttggaattaattctacaatttgcatattgttttttactttataagt

SEQ ID NO: 412329 - DNA, 677 bp, Homo Sapiens
  misc_feature (650)..(650): n is a, c, g, or t
cttgatgtaaatgagatttgaaaacttaaagctcaaaaatcacttaaagtaaatgaggtatttggagattagagcggctgaagtttcccaagcattctgctagtgttactctattttaaaaaataccacaaacccattgatttaaatataaaagagaagtggctaaaggtataatcctcgttactttatagtcataccttataactgactacctcttacttgtaaatagatagccaatgtgtgaagaatagtttaaaaagcaccattatatcagtgctgacaagcagaatactgaaagagagcggggaaaggccgaaactatccccaaagatgttgctttaaatgatcatgaaaagtccagatagagatgataactgttttttgacagattccaattttaagagttcaaagtaaattctattatatatttttagcaagtttacttccccctttattttgaaaaacagctttatacgtttctgactataaaaatgttgccccaaacagaaaactaaaaagatactgggataaaaagaagtatttgcttgtaaacccaagagtctttttgtggtataatttgacatttaatatcccttaagcatgggttttgagatttgtttctgtgcctatctttgtcacccccctgttgncatgatatgaagtcaagagccttgcgc

SEQ ID NO: 412330 - DNA, 672 bp, Homo Sapiens
  misc_feature (521)..(521): n is a, c, g, or t
  misc_feature (579)..(579): n is a, c, g, or t
  misc_feature (582)..(613): n is a, c, g, or t
cccttagcaacagtccatgcataattgcttggagttttaaatgctaaagaaaaatggtgaatttgcactcactaggttttgtagtgaattcttgacaggcatagccaatgcaccatcaggctaaatagtactcatgaagaaacagagataagacacttccggaagtgtgaaaattctgatttgagagaaatgtatgcagaattgatatttatagtacttattttctggctctaatatgttatatattctgctcttggatattggctaattatcatgtcagtaaatgctgtatctggaaaacattttgtcaagtgaataagacttttcatatttctggtaaaagaacagtatatatacttttatacatgtttccaaagatcaaacagctttaggtgtacatctggctattatttaaccagactgaataatgcatgaaagaatgtagactctttggaataatgtgttattttaattcttacatgactctgttacagagcaagtttatttccattctgagggtngatgtattcttctagtcatagaaccatatgaaccaatcactgtctcttacctcctttnaannnnnnnnnnnnnnnnnnnnnnnnnnnnnnnnggaaggttaatgataatagcactttttctacctatatactcatagtatgatgagactcg

SEQ ID NO: 412331 - DNA, 688 bp, Homo Sapiens
  misc_feature (113)..(149): n is a, c, g, or t
  misc_feature (573)..(573): n is a, c, g, or t
cttattcctcccaggataagtaagcccatctccctttcttattttttatggactttccccagtgaaatacaaaccccaagagagcaggagaggggtttgctgcattctcttgnnnnnnnnnnnnnnnnnnnnnnnnnnnnnnnnnnnnncgtgatggaacgaagcactgataaatagcaggctggtggggttgccggatggatggaaggagggaggttctacacacagactcaggccctcagcctcctctggagggagggaggaggcacgctatggcatggccccattcctatggcagccatcctgcaacagctattcaactttccacttgtggagtgaaagcatgaagtttaattccaccagatgactaatgtcctaataactttggtaatatgccacccttataaactgcctgcattctccagcaggatcccaaggaagcagagataaatacatatatttagggaaaattgacctttaaaagtcaaggttccatgggccaatttccaagtcataaagagctcatgtgaaaaagtaacctttagtttgccatcaaaactggtttcataaagnaagcggtttaaatatacatttgggagtttcacaatagggttccttttacactgctgaactgtgacatgagaacaagcttgccatttctaggatttattgtcttattaccttcttt

SEQ ID NO: 412332 - DNA, 537 bp, Homo Sapiens
ttaccctaaactgccctttgttttccaccttccgaactgggaacaccctgtcttaacccaattaattggaaaagcactacatcccccttttttaaggtgctgtaaaaacaaacagctccgccccgatggcctttcccaaaagtggcccaccctgattgccttttgcaaaattgtaaccgctaatatgtggataaaaatcgggtaaaatttttgttaaatcaaatatttttttaaccatttggccaaaaccggcaatttcctttctaattgacaaaaatggcccaagaccgttttgagtgtaggtccagtccggaacaagagtccacttttaaacaacttggactcaaacgtcaattgtcaaccggctctcaagcggatggcccactacaccaacctttaccctaattaggccttttggggaccagtcccctaataactttttcggaaccctagtgccgccccccttatatagcttccctgaggaagccccccatcttgccctaacggaaggaaccgcggggccggacgctaggcctt

SEQ ID NO: 412333 - DNA, 743 bp, Homo Sapiens
  misc_feature (16)..(16): n is a, c, g, or t
  misc_feature (28)..(28): n is a, c, g, or t
  misc_feature (84)..(84): n is a, c, g, or t
ctccgaaggttgaggntatagaaccagnggatccttttggctgcaggaattcggctcgaggctaatgtttgagactgagcaatntataaaagaaagaggtggaattgactcacagtttctcatgactgcggagtccttaggaaacttaaaattatggtggaagccaatggggaagcaggcaccttcttcagatggcagcaggaaagagaaaaagaaggggaaactgccatttataaaaccatcagatctcaagaaaattcactcactatcatgaaaacagcatgggggaaactgccccatgatccaatcacctctcactaggtccttccctcaatacctaaggattacaatttggattacaattcaagatgagatttggttggggacacagagccaaaccatatgattccactgctggcccctctcaaatctcatgtcctcacatttcaaaacacaattatgccttcccaacagtctaccaaattcttaactcattccagcattaactcaaaagtccaagtccaaagtttcatatcagacatgttccttctgcctatgagcctgtaaaataaaaaataagctagttacatccaagatacaatggtggtacggacattagttacatccaagatataatggtgatatggacatcgagtgaatgttcccattttaaatggagaaattagcccaaattaggggctacaggccccaggcaagtccacccagctgggaagcttcttgcc

SEQ ID NO: 412334 - DNA, 694 bp, Homo Sapiens
  misc_feature (549)..(549): n is a, c, g, or t
attaggttttccaccattttaaatggtgcacatttaacagtgttttatatgggattattactatggccctcgggttctgtgttagaacaattacatactgtaaagaattagaagtttttgaggatttactctccagaatagtgactgaatgtactttgatagaaatggagtaacaatagctaactctaatttatctactgcaattggtaataaaggaagatagttaagatctcaaatctggaagtctgatattttagccaacaatctcaaccttctcattaaacaaaatatttctttgcagataaggcctctgcccttattctctcatcttgctattgatgtccattacgtgcatttggactatgttatgcatgtgttggacatttatagaacactccttgagtgtaaagctctgttgggtattgaagggtacaaagactctatccatcccttcaataaacctagaactgcagagagagatagacacctgcaactgaagttcctgcctctcacaatattgatataattgggctctcccctcgccaattntatggtttgtgaaagttcgcatgtcttccatatcttttctcacctattggactcctgttgctgcacatgctgcttctgtgatgcattcagtggactcagatgtctgcactgcctctttgagttacaattgcattttttattcacc

SEQ ID NO: 412335 - DNA, 712 bp, Homo Sapiens
  misc_feature (489)..(489): n is a, c, g, or t
  misc_feature (593)..(593): n is a, c, g, or t
  misc_feature (602)..(603): n is a, c, g, or t
  misc_feature (616)..(616): n is a, c, g, or t
tagatctcgtggatcccccgggctgcaggaattcggctttagcttctttttagtgagttagaacataatccttcagctcagggaagtttattattacccatcttctgaagcttacttctgtcaatttcatccatctcagcctcagcccatttctgtgcccttgctggaggcctgtggcaacctcctgaaggagaagaggcactctggctttttgagttgtcagcatttttgcattgattctttctcatcttcgtgggttcatccatctttgatttttgaggctgctgaattttgatggggttttatttgatgccttttttgttgatgtggctgtgttctgtttgtttttcttttagcagtcagaccactcttctgtggggctgctgcagtttgcttgcagtccactccggcccctattcgctttgatccctcccctccctggagttaacatcaggggaggctgcagagagcaaagatgtcaggctgctnttttctcggggggctctgtcccataggggcactggcctgatgctgactgaaacactctgtatgaggtgtcttgagactcctgttgagaggtcccactcagtcangaaaagtgnngttagggacctgntttaagcaatgtgcctgcccctttacagggtgggtgtgcttcacttgggagattcaccctcatctgggctaccctgattctttagagccagaagcc

SEQ ID NO: 412336 - DNA, 524 bp, Homo Sapiens
tgaaaagaaattacagcttgttgcatttccatgtactatcaaagaataaccacaatggtcagaaaaaaactatctaaaaacttcttccagctacatatctgtgtgaagccagattttcttcatatccttcaactaaaacaacatattgcaacagactgaatgcagatgcatacatgagaatctattagctaaagctgacgttaaagaaatttgtaaaaatgtaaaacattgacacccttctcattatattttttgttttggaaaatataactgtttttcataaaaatatttatgttaatgtacaataagtttgctgttatttagttttaaattctagtacagtaattgataatacacatattccacataaacgaaagctcattagtttttaagacttcttggtttgagaactactactcatttttgttttgagagaaggtctctggtgctcagactgtagtgcaatggcacaatcatagctcctgactatctgaacctcctgggcaatcctcccaatttagact

SEQ ID NO: 412337 - DNA, 528 bp, Homo Sapiens
gagtttccaggatttttcacttagaagagtgaagattagaatttcagagcaccttctcttcagagtaaacaggcagggaattccctgggatgagactcttaaaatctataaccaagctcctcagatttaccttcaggcccattgcaagccttaatgtttcctgatacattgttatgaccctgccatttctatagcatctttcctgttctgaatccttaaccctctgattatttgtgtccttcatttgactctgatcacatatcaccctatttggagttgcttgggggcttgcacgcaaccaccacacactccttaacctggaagttaggtttctgctttgttgaaacagttctccaagtggtcaccaactccgacctgctctgagtctttactctcctccatttacctagggcaggcatttttagccttttaggatatgaccagaatgcagatatgcacatatataccatattacctacaatttgatcatctggtttttttaatcctttctcttgtataaggaacagg

SEQ ID NO: 412338 - DNA, 638 bp, Homo Sapiens
  misc_feature (71)..(370): n is a, c, g, or t
  misc_feature (576)..(576): n is a, c, g, or t
  misc_feature (595)..(595): n is a, c, g, or t
  misc_feature (605)..(605): n is a, c, g, or t
ctatggcattggattatctgggaaaaggagattggtatatggatgcaacagaactaaatcttatcttaaannnnnnnnnnnnnnnnnnnnnnnnnnnnnnnnnnnnnnnnnnnnnnnnnnnnnnnnnnnnnnnnnnnnnnnnnnnnnnnnnnnnnnnnnnnnnnnnnnnnnnnnnnnnnnnnnnnnnnnnnnnnnnnnnnnnnnnnnnnnnnnnnnnnnnnnnnnnnnnnnnnnnnnnnnnnnnnnnnnnnnnnnnnnnnnnnnnnnnnnnnnnnnnnnnnnnnnnnnnnnnnnnnnnnnnnnnnnnnnnnnnnnnnnnnnnnnnnnnnnnnnnnnnnnnnnnnnnnnnnnnnnnnnnnnnnnnnnnnnnctaaaaacccagaatcctctcacctctatcccttgacaacccctaccaatggcagttacattttcacttctgccctctctaccagcaaattgatagctccaagctacacagttcccagcacatcattacagcttgttaacttggagtcacccagactttctcttcctcccaattcaatttgaattaagtcagagacagattagcanaacattaccagagataganattatgacangcagctaattttccaggactttcactctctccc

SEQ ID NO: 412339 - DNA, 480 bp, Homo Sapiens
  misc_feature (287)..(287): n is a, c, g, or t
  misc_feature (307)..(307): n is a, c, g, or t
  misc_feature (314)..(314): n is a, c, g, or t
  misc_feature (350)..(350): n is a, c, g, or t
  misc_feature (366)..(440): n is a, c, g, or t
  misc_feature (445)..(445): n is a, c, g, or t
ctgagtaacagaacaaatgtatttatgtgtacgaatgcatttgttctattactcaggtctggaaagtaattttaactggcttgccaatcccagatgaattccagttgaagtggcaagccagttttaccagccctgagtaacagaacaaatatccccatcctgggagctttatttctgataatagtcaagtataccttttatcagacaccctcttgcaggtaacagtggtcagctctggaccaactatatggagacatatacctaatatctgtggccttgctcaactnttcaatgtcagcaatggttntcccatnaccttgccaacagttgttggttttttaaacagcttntgtagggtataatacnnnnnnnnnnnnnnnnnnnnnnnnnnnnnnnnnnnnnnnnnnnnnnnnnnnnnnnnnnnnnnnnnnnnnnnnnnnataantcatccataagcttatgggttaattgagtaatggg

SEQ ID NO: 412340 - DNA, 399 bp, Homo Sapiens
gtgatctgatgacagacagcatcagaaactcaaatcctagcttctcagcccaaatttagtaaataaaaaccacagcaatgaaacagctagctctgtttgggagctcaaagctcacttaagcttgggaacattcccactcatgttctttctagtaattcatcagttcccctattgaagccctttccatggcccccatgctggcatttctgaatcacatctgagcaaccaacaactttctagggagaaaaaataactattatttttggtctggattaatggtgtggatgagtttgtatcacttcacttgctctccattttctatcttcttttgtctaactctgcatattgtgttttattttccctgataatattgttttatgtgccctttatgtagtaggg

SEQ ID NO: 412341 - DNA, 585 bp, Homo Sapiens
catgcagaccattgctatgaaagttcagagggtgaagcgcgtgcttctggttgggaagagcagaatatccttcaaaaggaaggtgttgatgaaccagtcttgaaggacaacagaagtcgaacggaggtgcatgtgaagtgaccattcagatgccagcaccagcataaatgaaggcccagggaaggggatgcagggaagcaccacaggacacagaaagagcagcaagccaccagtcaccatgcaaggcccagctcagccacttagggcggtatgaccctggatggacctagactttggtatctataatagaagatagttagatctggcccgtcacctcgcaaggggacatgaggactcaatgagagggtaaatataggcaaatgaaacagcttattcatgtgtgtaggataatatcaaacacagtagagatggataggagatggtctcttatggacagcagcacttgttcacaacttccacctcctaacatgagaagggccctctttctgtcctctctggcctttcatgcccccgcccttcccctatcttgcttcattttcttcataccctcgtgggtggtttttc

SEQ ID NO: 412342 - DNA, 683 bp, Homo Sapiens
ggcacgagctggttttaaagacaacttggcgcttgagatttaaggtgggacatagtgcggaggggcttggttagggccgctcatggaactgctcggaggaggtggtccagaaacaccactcatgcctgcccggcacgcagtggatgaccccgtggaagcctagacgccctccgttgaaggcatcaggcggggtggatcagccgcctctcagaaaacccttttagtgggacggggcaggctgtgtccccacaagagcgagaaccggcccgaagcaggactgaggaattccatctgcctgtaaaccctgcgtgtaggcttctctcgggaggataaaccttggtctaggaaatctctttagattccacccccaccccaggccccgcccagatattttcttttctgggctggacgtctgcacttcattcccctctgggggacgggataggagcaggacaatccccaggcccgggttcctcgattttgggggcacattctggccaccggagcctctttggtaaaccttgttcccacaggggttgttccaaagaaggcttttggcctggaaaaggctggtcccgcccccacaactttgaccgttcctggagcttaatacaatggatttattctgaaaacaggaaacaaggagttggggctggcagggctctcccggaatcccccggcgg

SEQ ID NO: 412343 - DNA, 277 bp, Homo Sapiens
  misc_feature (79)..(79): n is a, c, g, or t
  misc_feature (221)..(221): n is a, c, g, or t
tatggaaataccagtgcaagcttgcaatctcttgttccacttgatgcattaatgctggtatgcagggctttctcttccnctaatagctttctagggcccagtgtggtatttctgtatctgtggactttatgatgctgaagatttctagttgttcagttatataaatgaatgaaggtcaaataggtaagactgatttgggaagataatgctaacagaacctntctttttctctgggaatagattttttcatgctgccccaaccctgcagcttgttctc

SEQ ID NO: 412344 - DNA, 641 bp, Homo Sapiens
  misc_feature (66)..(263): n is a, c, g, or t
  misc_feature (269)..(371): n is a, c, g, or t
ggagaagcccacccagcaagaaactgaggatggccaccagccaatcaccagtgaggaactgaggcnnnnnnnnnnnnnnnnnnnnnnnnnnnnnnnnnnnnnnnnnnnnnnnnnnnnnnnnnnnnnnnnnnnnnnnnnnnnnnnnnnnnnnnnnnnnnnnnnnnnnnnnnnnnnnnnnnnnnnnnnnnnnnnnnnnnnnnnnnnnnnnnnnnnnnnnnnnnnnnnnnnnnnnnnnnnnnnnnnnnnnnnnnnnnnnnnnnnnnaatagnnnnnnnnnnnnnnnnnnnnnnnnnnnnnnnnnnnnnnnnnnnnnnnnnnnnnnnnnnnnnnnnnnnnnnnnnnnnnnnnnnnnnnnnnnnnnnnnnnnnnnncattaaactttgggacaatcttcttgctctacttcctaaatgtcatcaaccatgcatatggtttcagggcaagagataaaaagattagagaaccattctctaaaaaaatgattcttgggttatatgaatcacagggaagaaatagtctcatatatttcttcactggcaccaaacaaaacatattgctctttaagatagcccctctttatggaggattgctatgtggtggggggggtgatatatatcatatgagagacagagatatttttg

SEQ ID NO: 412345 - DNA, 588 bp, Homo Sapiens
  misc_feature (438)..(438): n is a, c, g, or t
  misc_feature (455)..(455): n is a, c, g, or t
  misc_feature (473)..(473): n is a, c, g, or t
caaaatcagttgtttagtatcagtatcattagataaataggcaattgtgtgtcagaagtatatacagatagattttgttacattttaattaaatactaatttctctctcacacacgcactccatttaactattcagttctttatttatcttattcttagtagctgctttaactaaagaaaaataaacttgagtcaggctagacagtacagggaatggaggagacaggtagtgaggggatactcataaatcttcatagatatcaacttacccacacttggcaaagtggctgtgtgcacatatttgacctcttcacttttcagacaagttgaaccattttcgggccagggagtacaaagaatgatgcagttatctgaaaagttgtttctacagtgatttctctttaatctcccctacttccctcataatgcctgcagttnttgtgttttctacatanaagggatttaaacagaanaattgctaaaaataagctggttacttgttcatgactttcagccaccaatggcattaagaaaacaaatattccttccttgaatcacttgagtccgttgccatacacttcttgtttt

SEQ ID NO: 412346 - DNA, 639 bp, Homo Sapiens
  misc_feature (148)..(321): n is a, c, g, or t
  misc_feature (439)..(439): n is a, c, g, or t
  misc_feature (565)..(565): n is a, c, g, or t
agcacaaccctttttcttcttcttcacttcccttcttggtgctcagcctgttccagccaccgtgtcaacatgccttggtccatagctctggaaggcacacaccaagcaggaccagtgaacagaagatgagaagggtacattttgacannnnnnnnnnnnnnnnnnnnnnnnnnnnnnnnnnnnnnnnnnnnnnnnnnnnnnnnnnnnnnnnnnnnnnnnnnnnnnnnnnnnnnnnnnnnnnnnnnnnnnnnnnnnnnnnnnnnnnnnnnnnnnnnnnnnnnnnnnnnnnnnnnnnnnnnnnnnnnnnnnnnnnnnnnnnnnctgatatgataagttttattattatcatcatccaattatcatgatttctggcaagtgggcactttccgtcagaaatctcggtgaggagacagggccatccacccgtataagaatgcangctcagcggttggcactttcattgagaatcaacggtgacttattttgcagtccccaatcccctcattgtcttccatcgaaatgggctcaccgcttggtctgtgtgttcgtgggccccatgctttanccattatgccccgaatagccccttttaggtcacattaattgcgtattttggggttccccctttggggtgggggg

SEQ ID NO: 412347 - DNA, 623 bp, Homo Sapiens
  misc_feature (540)..(540): n is a, c, g, or t
  misc_feature (555)..(555): n is a, c, g, or t
  misc_feature (576)..(576): n is a, c, g, or t
catttctctgatgattagtgatgctgagcatcttttcatatacttctaggctatttgcatgttttctttggagaaatatctattcatatcccctcatccatttttaatgcagttagcgtttcttttatttatttatttttgctattgagttgtaggaattctttgttactttggatatcaaaactttatcagatagaaatatggtttgcaaatagtttctccaattctataggttggtgtttcactctgttgattgtttcctttgctgtgcacaagctgttcagtttgatgtagtcccacatatctactcttgcttttatttcttgtgcttttgttatcatatccaattgtttccaagctcaatgtaataaaggttttccccttttttggtatgttttcttctagaagttttacagtttcaggccttaatttcaaatcttaacctactttctgttgatttttgtacagtgtaagatatacactatactcattcttttacttgtaaatatttagttttcccaacatttgttgaagagaccntgccttctctattgngtattcttagaaagcctgcanaatatttagtgatcattgtgtggatttatttctgggctctctattct

SEQ ID NO: 412348 - DNA, 678 bp, Homo Sapiens
  misc_feature (521)..(521): n is a, c, g, or t
  misc_feature (552)..(552): n is a, c, g, or t
  misc_feature (578)..(578): n is a, c, g, or t
  misc_feature (617)..(617): n is a, c, g, or t
  misc_feature (637)..(637): n is a, c, g, or t
gtaatttcagtggctttgatcctttttgcatagttcccctctgtgcagaatgctgttgttaaatcatcagacttgatgctgtaaatcaacctgacatcttttttcatcaattaaacagtttaaaatctccaactgtgggccaaaaaagacaagacaattgagataaatagatgaatatgactcggtctcttcccttacaatatggtaaacatgtaaacaaagtgtctacaaaatccattacagatgccgctatagcagtatgtgccggcacagggccatccatgaggttgtttttgcaatgaagtggaggaggtgaggaagcacacttccagcattgcttgttaaagccttagggctagggttccatgattgagagtttattttagtacactagcatagtatttaggagagtgctaactgctataacaaagagacccccacataggcaaatacccaagcgagataagttattttctcctgatgtcacagttaagagcaggttaaaggcagaagttcccctncacgaattaattcacccaggctgatagctgntcttgcatcttcaatgtgtgacttanaggactgcttgtgtcatcactattcacagcaggaggcanaaaccacagcagcccacaangtcataacaacaatatgtctcttatggcgatcacgctcttt

SEQ ID NO: 412349 - DNA, 667 bp, Homo Sapiens
  misc_feature (359)..(400): n is a, c, g, or t
  misc_feature (551)..(551): n is a, c, g, or t
  misc_feature (569)..(569): n is a, c, g, or t
  misc_feature (633)..(633): n is a, c, g, or t
cagacattaagcagcagagcaacttagcaagagaagacagatcctcaggttggtgggcaatgtctgaacagtctgctcatggcaccaattgttagtcacttgcaaagatgtggctttaagagggtaagaaattactactcacataaattacatttgtgaggtaagtaggaaggcctttcaaggtgatctgacatggcttgaatgtgcaagaaaaggagccaggcctggatttttattgagggtaggtggcatgctagggtgagaatttattcccatggacaggggtttgaatggtttcaatctgctgctggtaccagaaaagggaccacccaggtttcctcttactgtattattttatnnnnnnnnnnnnnnnnnnnnnnnnnnnnnnnnnnnnnnnnnnggtttaggattaaaaatagagacaaccatcaaaaagtgaagatagttccttttggtcagcctggcaagtaaggacgtagaaggtgacattcgcatcagcgaaagtaaaaagggaaacataggccagcaattctcctaacatctatcagaanaataagttcacagggcanatcaccatcccaaattggacaggaagacacacacatccagagaattatacttacttggtagtanaccacaagaaacccctattggacctacagtgtgc

SEQ ID NO: 412350 - DNA, 686 bp, Homo Sapiens
  misc_feature (26)..(26): n is a, c, g, or t
  misc_feature (33)..(33): n is a, c, g, or t
  misc_feature (357)..(380): n is a, c, g, or t
  misc_feature (408)..(465): n is a, c, g, or t
  misc_feature (494)..(494): n is a, c, g, or t
aaacacttttgagtatcccctgcagngcctggngtgtgagctctggttaagggaatatggacaggagagttaaatgccacttccaagcctgacctccaaaacccttcccacagtctctcacatgttgtctcttccccattaaccagcagaggactctggtagtggagcttaactgtgctccactagcaggaccagagctaagattctgctaggtaaagaagagggaactgcaggcaccctggcccagaggcctgacacctgatgcagccaggagaataaaggtaaagagccccacaggagagaaaggattctgagtctctgaaaaactgcaaagagaagagcctcccagcccaaccnnnnnnnnnnnnnnnnnnnnnnnnagctgcactgggctgtgatatgaataannnnnnnnnnnnnnnnnnnnnnnnnnnnnnnnnnnnnnnnnnnnnnnnnnnnnnnnnnacgttacttactctagctaacatactctnaggttttattaacagatgggatgagataatgcatgcaaagtgcccagttctatgtctgatatacagtaggtccctagcatagcacttctacctgcatggtaggtgctcagtaattaagggttatagtcaaccaagtgcttttcttagaggccctagagacagcatcatagccaacatgagccttttggtgtg

SEQ ID NO: 412351 - DNA, 502 bp, Homo Sapiens
  misc_feature (70)..(363): n is a, c, g, or t
ttcatgggccggcgtttaaaaacgtcggaacgggaaaacccttggggtacccaaattaaatcgcttggannnnnnnnnnnnnnnnnnnnnnnnnnnnnnnnnnnnnnnnnnnnnnnnnnnnnnnnnnnnnnnnnnnnnnnnnnnnnnnnnnnnnnnnnnnnnnnnnnnnnnnnnnnnnnnnnnnnnnnnnnnnnnnnnnnnnnnnnnnnnnnnnnnnnnnnnnnnnnnnnnnnnnnnnnnnnnnnnnnnnnnnnnnnnnnnnnnnnnnnnnnnnnnnnnnnnnnnnnnnnnnnnnnnnnnnnnnnnnnnnnnnnnnnnnnnnnnnnnnnnnnnnnnnnnnnnnnnnnnnnnnnnnnnnnnnnnttttaggccaatggcccctacggagaccatcaccttatcaaggttttgggggcccagggcccgaaaagccctaaatcgaacccctaaagggaccccccgtttaagacttgccgggaaagccggaaacgtggcaaggggc

SEQ ID NO: 412352 - DNA, 644 bp, Homo Sapiens
  misc_feature (398)..(398): n is a, c, g, or t
  misc_feature (431)..(431): n is a, c, g, or t
  misc_feature (530)..(530): n is a, c, g, or t
  misc_feature (613)..(613): n is a, c, g, or t
  misc_feature (622)..(622): n is a, c, g, or t
gagagaactagtaggatgaacaagaaatatatgggcatggcagtcttcttctcagtgtaaggccataaggctccaccagactccatggatggcactagccaccaccaaccagtgattgaatctgcattacctgaaagagatctacagccacccacccaaaaaaggagccacaactatgttggcaagtagagattatgctttttgccccataaataaaagcaataggagaaaaatcgcaatgccaaaaaaagattgcagactgctcacctgatttagtgtaaagtactttgctcctggctggctcaccacagagctgaagtcagagggcttaggtgggccttcagatgccagacagaccctagacccagccaatgttccaggttcttgcactatcacanaaaataattcagggatggatcagaatcatgcanaaggcaaaaaaacttctatggcaaagaaaaagtaaacacttggaagtgtgggcagactcaggagagtgagatgtgcaatggagtttggatttctaattntacaggctcttctaattagaggggcggataatcatgagttcttttaagagatggagatttcttagaactgggatgcaccattnttatactanatctgggtgtttggatcttgct

SEQ ID NO: 412353 - DNA, 159 bp, Homo Sapiens
gccttccatggcctactcttaaaaataggcttctctgccaagattttaagatccttcatgatctggacccacacagaccattgcaacctcacttcctaatactagtcagcatgcacatcttttatagccaaacaatcatactagcagccctatacttaa

SEQ ID NO: 412354 - DNA, 151 bp, Homo Sapiens
ggacaatttcccctgtatcttttgatcttcattccgaaggctcccatatatacatgataaataaatctgtatgccttttctctaattaatctgccttttatgagttgatttttcagcaaaacatcaggggaccaagggaaagctctccctt

SEQ ID NO: 412355 - DNA, 675 bp, Homo Sapiens
  misc_feature (377)..(579): n is a, c, g, or t
  misc_feature (595)..(595): n is a, c, g, or t
  misc_feature (625)..(625): n is a, c, g, or t
ggccaggtcccttgaggaaggactccactacattaccaacaatttatgcagtgaatcttcctcccaaccttctgcaaggagacctctggccttttaccagggtaactgtgcactgaggaaagggaaatgaatcagacatatcagggactactggacaccggctctcagcttacgttgtttccaggggatccaaaatgtcactgtggtcctccagttaaagtaggggcttatggaggacaggtaattaatggagttttatctcaagtctgacttacagtgggtccagttggtccccagactcatcctgtggtcatttacccagtgccagaatgcataattagcatagacatacttagcaactggcagaacccctacannnnnnnnnnnnnnnnnnnnnnnnnnnnnnnnnnnnnnnnnnnnnnnnnnnnnnnnnnnnnnnnnnnnnnnnnnnnnnnnnnnnnnnnnnnnnnnnnnnnnnnnnnnnnnnnnnnnnnnnnnnnnnnnnnnnnnnnnnnnnnnnnnnnnnnnnnnnnnnnnnnnnnnnnnnnnnnnnnnnnnnnnnnnnnnnnnnnnnnnnnnacccaagactccaaanacaacttgcaacaccaagagaaatagtggnggccctaattagaccagatattttaatgtatcaatggctttcaactattt

SEQ ID NO: 412356 - DNA, 496 bp, Homo Sapiens
  misc_feature (144)..(333): n is a, c, g, or t
  misc_feature (388)..(388): n is a, c, g, or t
gagagaacaaggagttagcgatagggaagagaaaggaagaactctctgtttttgacataagcatctgagtaaatggaggtaccattcactaacatggacaaaaatcaaagatgagcagctctctatgagcagaagcaaagcagnnnnnnnnnnnnnnnnnnnnnnnnnnnnnnnnnnnnnnnnnnnnnnnnnnnnnnnnnnnnnnnnnnnnnnnnnnnnnnnnnnnnnnnnnnnnnnnnnnnnnnnnnnnnnnnnnnnnnnnnnnnnnnnnnnnnnnnnnnnnnnnnnnnnnnnnnnnnnnnnnnnnnnnnnnnnnnnnnnnnnnnnnnnnnntggaaccaagaggtgatgtcaagtaagacaatacatgaataggtttgaagcgcanaagagatctatatgtcagctagatgtatacgtttgagaattgttggcatattcatagcactgaaaactataaaaataaataaggtatccaaaggcacagcttgtgaga

SEQ ID NO: 412357 - DNA, 632 bp, Homo Sapiens
  misc_feature (315)..(315): n is a, c, g, or t
  misc_feature (424)..(424): n is a, c, g, or t
  misc_feature (436)..(436): n is a, c, g, or t
  misc_feature (441)..(442): n is a, c, g, or t
  misc_feature (467)..(467): n is a, c, g, or t
  misc_feature (530)..(530): n is a, c, g, or t
  misc_feature (547)..(547): n is a, c, g, or t
  misc_feature (598)..(598): n is a, c, g, or t
agaattcgtgatatttgttacgctgtggcaaagttgttagtaaaactattgcttctcacattttaaaggatagcaatgggcttatttaactcttattccctatatggaaggaaatcttcagaaagctgttgtcttgctgtttcttattgtttgaaacaagttcttcagaagtgagatgaactcaggctagagctagccaacctgcaagcggagatgaaagggaatattgctttgataaaaggaggtgctatctgcctgcagcctgtaattgaaactgattgagagtatgataagtcaggaccattcagggcacanaaatctgactgttatgctacgtggaatggaagcagttacatgccatggctacaaaacagtagtctttgtaggaaatatcactgtggcctaaaaactttttcaagcattntcctttagttangacanngacatgggagctaattcagcagcanagatcagattaaggatagtactttaccattgtgacaacacctctgcaggtgcttcaccctctnctaacttgacttctgantccagcctttctgtgtaagatttacctcacttttgcctgtagtacctgtantagtcagggtttccagggaacccttaggatatcc

SEQ ID NO: 412358 - DNA, 623 bp, Homo Sapiens
  misc_feature (117)..(216): n is a, c, g, or t
  misc_feature (409)..(409): n is a, c, g, or t
  misc_feature (416)..(416): n is a, c, g, or t
  misc_feature (419)..(419): n is a, c, g, or t
  misc_feature (569)..(569): n is a, c, g, or t
  misc_feature (600)..(600): n is a, c, g, or t
ctgattctcgttggatggaagtcttgtggaccctatagagatttggccataggagtaacacttaaccatctgctgtggtggaaagaacactcactgtagggtcactctagcctggannnnnnnnnnnnnnnnnnnnnnnnnnnnnnnnnnnnnnnnnnnnnnnnnnnnnnnnnnnnnnnnnnnnnnnnnnnnnnnnnnnnnnnnnnnnnnnnnnnngcctgccataatggcttacataagataatcaggaagttcctggtttaaggacgaagctgaatgtatgtcattccccctaaatttgcgcccatttgctctggttcaagcttactatccaagagtgaatatgttctctcgcttttccaaatgatagccgctctattaagtacaaccatactgtcacccattatgnattactncanacacaatggaccaggttccttcaaatgtcaagtatacggcgtaattcatgatcctttggtgatgacatcattgaaggcgaatatggactcacaaggcaatagtgaagtgagcctgacaggcttcatctggatttctttaaggagaaacanggctttaaggaatggattggctctctcatgncacattcatgggggggtgccctt

SEQ ID NO: 412359 - DNA, 519 bp, Homo Sapiens
gtgaacctggactctgaagaatgtgccatgtatgtaacaagtttttaataattcaactaagctattttataatgaagtgaatgtcacagaagatggaaatcaataaaattcattaactagggccccttcatggataatgtttggataagaattaatagcactggcttcttgatttcccaatatgaccaccagttgctatgtagcgctaaccaaacgactttacctctcataatcttgtatccaactccaaagtttactgtgatgattaagataatatttatatgacccacctatataaaaatttctcaatgaagatagcaccctccatattcactgcctacttctgttttaatgccagaaagagttttgagctatgaaataactcatgtctacctaactgtgctgcactgaaagcagaacacttgtgactcaactgaagagttaggcttaagagctgaactagcacatgttcagaagagggagataattataatgatgggataaagaattataatactt

SEQ ID NO: 412360 - DNA, 690 bp, Homo Sapiens
  misc_feature (387)..(387): n is a, c, g, or t
  misc_feature (400)..(444): n is a, c, g, or t
  misc_feature (453)..(453): n is a, c, g, or t
  misc_feature (467)..(467): n is a, c, g, or t
  misc_feature (517)..(517): n is a, c, g, or t
  misc_feature (557)..(557): n is a, c, g, or t
  misc_feature (610)..(610): n is a, c, g, or t
  misc_feature (621)..(621): n is a, c, g, or t
  misc_feature (638)..(638): n is a, c, g, or t
  misc_feature (641)..(641): n is a, c, g, or t
ggaaagctttctctgatgggttcataatgaaagacattttataagagttgagttagagaagggatttgaaaagagaagagatgcaggtggtaggatttggagttacctgaaaggggagtgaacctttctacaaatgaagcaggttttcttttgcttccttttatgctttcctatttttatgttatcattccccaaggctctaagtcacgcatgtgcttctttaaataaatctcacaagataaaagccaagtgcatcaaaatcaccaggcattgatgcctgtctgtaaaataaaatcacatactaatcatggagtatagattcgctttcttccctaaggcaagacgttccctggcacctgtggaggtgagccccagcatgaatgatcntgttttgacagtnnnnnnnnnnnnnnnnnnnnnnnnnnnnnnnnnnnnnnnnnnnnntttaacaantccaactagcattntgtgttgctgtgaaattatgcattcagaaaaccaggaagacttcttcagncatggccatctggtgcttgctttgaaaagtctaacttggncactcaatttaaattaataagtgctggctggctacatgtgggtatttaaggtnaaatttatttnagattacccaggttttnggncacaagtgacattttcaagtgctcattagtcgtacctggctagggctcc

SEQ ID NO: 412361 - DNA, 360 bp, Homo Sapiens
gcctgtctcaatcaatttaggaagcttattttgccaaggttaaggacacacctgtgacacagcctcaggaagtcctggggacatgagcccaagggtggtttgtgtacagtttacttttatacattttagggagacatgaaacatcaatcaatatgtgtaagatgtatactcgttcagtccagaaaggtaggacaacttgaagtggggagggggttctaagtataggtagacaggaaacaaacagttgcattcttctgggattttgatgagcctttcagtgaatacacaacttacatgtgagagggggtagaggaaatgcaattagccttagtctggctaagtgaatctggattttactcg

SEQ ID NO: 412362 - DNA, 715 bp, Homo Sapiens
  misc_feature (45)..(45): n is a, c, g, or t
  misc_feature (69)..(69): n is a, c, g, or t
  misc_feature (81)..(432): n is a, c, g, or t
  misc_feature (437)..(528): n is a, c, g, or t
  misc_feature (547)..(607): n is a, c, g, or t
  misc_feature (618)..(641): n is a, c, g, or t
cggctcgagacaccagtgacacacacctttcacacacaccagcanacacggaacatttgagggactttnaggcaacccacnnnnnnnnnnnnnnnnnnnnnnnnnnnnnnnnnnnnnnnnnnnnnnnnnnnnnnnnnnnnnnnnnnnnnnnnnnnnnnnnnnnnnnnnnnnnnnnnnnnnnnnnnnnnnnnnnnnnnnnnnnnnnnnnnnnnnnnnnnnnnnnnnnnnnnnnnnnnnnnnnnnnnnnnnnnnnnnnnnnnnnnnnnnnnnnnnnnnnnnnnnnnnnnnnnnnnnnnnnnnnnnnnnnnnnnnnnnnnnnnnnnnnnnnnnnnnnnnnnnnnnnnnnnnnnnnnnnnnnnnnnnnnnnnnnnnnnnnnnnnnnnnnnnnnnnnnnnnnnnnnnnnnnnnnnnnnnnnnnnnnnnnnnnnnnnncatgnnnnnnnnnnnnnnnnnnnnnnnnnnnnnnnnnnnnnnnnnnnnnnnnnnnnnnnnnnnnnnnnnnnnnnnnnnnnnnnnnnnnnnnnnnnncaccatacacacaggactnnnnnnnnnnnnnnnnnnnnnnnnnnnnnnnnnnnnnnnnnnnnnnnnnnnnnnnnnnnnngcattacgtannnnnnnnnnnnnnnnnnnnnnnnacacaacaacacacacgcggacacatccgtccaaaagccggaaaggtttcatcaggtacccatattggttcggt

SEQ ID NO: 412363 - DNA, 586 bp, Homo Sapiens
cctttaacttcacctcctgcatgcctctgccacagcagggacctctctctcgtttcctgctcccagtctttctcataagcacctcacgcaggcctgtggaaaagtttataaataagtgtgggcttccctgtgggtggagttcctagatatttcaaactaataatagttcatacttgtcttttagaaatttgtgaaacttttagctaattttttcctactcacatttgtagggaggccacctatttttcccatgctttgccaaagattaaatactttgtatgtccctcttgaggggcatatcactctttgaacttaatttacttggctgccttgaacctcagctctctaatgggctcaaggaaagtagtaattttgtacatcttctggcttttggtcattgttagcaggaacaacgttctcttgtatctctctacaacatttaccaaagtggaactcctcttttcagcatcttaaacaaattttggatttgaaatggctcgcatttgggaactctatttacatacatttttgaagcttctatagttctgtggtatcttatatgatcttaattgttaattgttggggg

SEQ ID NO: 412364 - DNA, 686 bp, Homo Sapiens
  misc_feature (414)..(427): n is a, c, g, or t
  misc_feature (616)..(616): n is a, c, g, or t
gccagattcaggaatagaatccatctctgttgaggtccgtgagggcaaggcaagtagctcctcttgacgtgtgtcactggataaacagaactctagtaaagagtttgctcatttttaaaagtgagaagagttgctcagttgttctaaaaatattgtgtccttattaccattgcctttggaatatatttgttctgttatttatctcagaaataattctacctctagaatacatgcaacacagttctatagcagaagtaataatacacaattgcagggtcacgttcatgtatagaaaaccgaaatctgtatctatggcatgcaattgatgaatgtcctctccacatgaattttattggcaaatagtaataattgatagctgggcagttctctacttttccaagcattctcaatctnnnnnnnnnnnnnnattctcagagaaatatgtgaggtctttgggcaggtggggctttgttctttcattctaccttgtaagaagccaggacttgaagagctttttacagatcatggagccagtcttggataaagagctttacagatcattggacccggcttgggaacctaagtgagaccttggcttcctttacacaaaagctcnccttaatcatgtaacgcaaaatcattagaatttcccttgcttaagaaatatattgctttttgatttcatc

SEQ ID NO: 412365 - DNA, 668 bp, Homo Sapiens
ctcagctaatcacaacgggagaagggaacactggaaaggcaaatccgactggtcattgaagaaacgatggctcgatggctagcgtagagggaaaggccttccaagtaagacgtaagagagtcatcaactaaatgcatggtgaatgctaataggtatgcactctaacacactggctataataaatgacattttgaggggattagcagactattaaaataagactagccgagtattagatgcaagatgcgcatccgtaatccaaaaatcaaggccaaaatgctccaaacttgtaaaatttggagtacctacatgataccacaagtaaagaaagtcatacgcgacctggtgaccacaacctttgtttcatgcacaaaattagtgaaaatacataagtatcttgaggctatgcatataaggtgcatatgaaggacaaatgaattacgtgattagacttaggagctcgccccaagatatctcattatgtatacgcaaatattctaaaatccccacaaatctgaaatctgaaacaattctgatcccgaacatttcagacaaggaatcaacctgtacctataaagaattatcggtaatgttttagaggccataatttcactggaaatgtgtcaaaaagtcattatttggtagatttatatgctacaattattttt

SEQ ID NO: 412366 - DNA, 250 bp, Homo Sapiens
atttcagcaaacaaacttagttgttatcagtttaatataacctgttagaactataagattttttgtaagtctaattgtaaccacaaaacagaaacttgtaatagatgcactaaaaataaaaagcaaggaatgaaaacatactactacagaaaatcatacaaccatgaaggaagatagtaaaagtggagaaaaggaggaatgaatctacaagcaaatagaaaacaatgaacaaaagagcagaatatgtctt

SEQ ID NO: 412367 - DNA, 673 bp, Homo Sapiens
  misc_feature (337)..(471): n is a, c, g, or t
  misc_feature (475)..(510): n is a, c, g, or t
  misc_feature (582)..(582): n is a, c, g, or t
  misc_feature (636)..(636): n is a, c, g, or t
taattttcatcttattccaaatgtcctgacataaaagtctgttcctgatcaaacttgaataaaatgcttagcatatagtacacatgaaacaaatatcaatttcatggccattgttaccattatttcatgatatcattaatccagtggatagaagctcattccttcagtcaacaattattgatgagcttctgccatataataggtctgaggcccaacagtgaacagacatagaccctgccctcaagaagttgacagtctagaaactgatggatgtctcaaccagcaattacaacatcgtgagatgagtactacaaaaatgctaactagccaagtgctnnnnnnnnnnnnnnnnnnnnnnnnnnnnnnnnnnnnnnnnnnnnnnnnnnnnnnnnnnnnnnnnnnnnnnnnnnnnnnnnnnnnnnnnnnnnnnnnnnnnnnnnnnnnnnnnnnnnnnnnnnnnnnnnnnnnnnntgannnnnnnnnnnnnnnnnnnnnnnnnnnnnnnnnnnncagtgtaactgcctgcaagggaaatagcgaacacataaaacggacatttaacccgcctgaagaaagaagganggcgggctttgagaggtataactttgaggcaagggctgctggcttacacctcgnatcccagattttcgggcagccgagctgcccgcccttt

SEQ ID NO: 412368 - DNA, 660 bp, Homo Sapiens
  misc_feature (578)..(578): n is a, c, g, or t
  misc_feature (613)..(613): n is a, c, g, or t
  misc_feature (615)..(616): n is a, c, g, or t
acttaaatttctgctcatttgccgccagcagttgggcggttgtgtacatcgacataaaaaaatcccgtaaagccgcacaggcggcctttagtgatgaagggtaaagttaaacgatgctgattgccgttccggcaaacgcggtccgttttttcgtctcgtcgctggcagcctccggccagagcacatcctcataacggaacgtgccggacttgtagaacgtcagcgtggtgctggtctggtcagcagcaaccgcaagaatgccaacggcagcaccgtcggtggtgccatcccacgcaaccagcttacggctggaggtgtccagcatcagcggggtcattgcaggcgctttcgcactcaatccgccgggcgcggttgcggtatgagccgggtcactgttgccctgcggctggtaatgggtaaaggtttctttgctcgtcataaacatcccttacactggtgtgttcagctcgttaacggcatcagatgccgggttacctgcagccagcggtgccggtgccccctgcatcagacgattcagcgcagtgtcactgcgcgcctgtgcactctgtggtgctgcngcccagaatgcgcggccccgtttcacgtcataccngnnggttcttgcagcacgcgtgcctggtcttcgcgttcgtgagcctt

SEQ ID NO: 412369 - DNA, 177 bp, Homo Sapiens
  misc_feature (44)..(44): n is a, c, g, or t
ctccgtgtccctcgctttttgctcttcctttcggttttccttcnctcgcttcttctcttttctccttgtccctcttcgctttctcttttgttgccctctccctcctttgtccggtcctctcttttccctttgttgcctctcttcttccttctcgtctttttgttccgcctggcttcg

SEQ ID NO: 412370 - DNA, 416 bp, Homo Sapiens
  misc_feature (253)..(253): n is a, c, g, or t
aaaaaaatacaagattctttttgaatcagaatgagagatgacttccaacagagctgacaaacactgcaacagcaagcaatgcatggatgtgtaatgagaattcaatttccacttgggcaggcagccaccaggaggctccgagcccaggggtcagctgtagctgctagaggggcatctgacactgaagccacgacgccatcccagcacctacaggctttgctgcagatgcccacccactctcagagacagctgnttttctttacatgcacaactgccctatgctctctgaaggctgtggaagacagctgatgggcaatatgctcatggttgtttctatacatttgctggggtgtggagaggtctctgaagccatcttctaattatttcccaggactgcagtgctgaggtcatacatt

SEQ ID NO: 412371 - DNA, 398 bp, Homo Sapiens
  misc_feature (194)..(260): n is a, c, g, or t
taagactcgaaggaaggatactcatgaagctgcttaccccagggcctggtccattttagaaagagttcaataagagtaattatttgggaataataattataacaaaagtagcactaatgcccctgaagttgtcccaggctggattttggtctcattgggaggtggctctggatttgaatgtgggtagtttgaannnnnnnnnnnnnnnnnnnnnnnnnnnnnnnnnnnnnnnnnnnnnnnnnnnnnnnnnnnnnnnnnnntttggtgtaacattggcccctacagtcccttctgaggatccagggagctggatctttggcatagtctggcctggccgttggtgggcactcaattgactggtattgataaccacaataataacaaggagatgccgcggt

SEQ ID NO: 412372 - DNA, 605 bp, Homo Sapiens
tatactcttacataactgaaatgacaatatgcttctggtaaatactacataattattttgtaagttaatatttattattctttaacagctcatggtaaatgaccatatcatatggcattccattgatgtgccataatctatttaactctctgttgtttcatctttatgttgcttccagttttccacttttactaataacacatttttacagaaatatttattcaactttctaaatagattctttgaataaatcctaaaagggaaaacaatgggttcaaggggttcttggtacatgttgctaaattatttttcataaagattctaacaatttttaccctggaagcagtaagtattactatcatttttaaaaatacatgttactttggtgtttatcaatgatattggtgataaattggtattaccttgatggctagtgagctttgacacaatcccacatgtatgctcacatatacttattcttctataaatgttttgttcatgttcatttctcagtttttggtttgctctttcatgtttgccttttctctatttattgacattcatcttttccacggctttaagtggagcatgacatgttcgtttgt

SEQ ID NO: 412373 - DNA, 654 bp, Homo Sapiens
gaaaattttgatagtgataacattgaatctgcaaagtgctttgggccatatgtccattttaacaatattgattcttccagtccatgagcatggattatttttccgtttgtgtcctctctgattgctttcagcagtatgttacagttctgcttgtggagatggttcacctccttagttagatggattcctagatatttcattttacttgtggctattgtaaatgagattgtgttcttgatttggttctcaacctacttgattgtggtgaattgagtttttgatgtgctactggattcagtttgctagtattttgttagtaagttttgcatctatgttcattagggatattggcctgaacttttctttcttcattgcatctgtgccagattttggtatcaggattatgctggcttcatagaatgaacttatttaaatataaaagagataaaagagatatacaaaagagattgtttttatagcagccagtaggggtgacccttcccttccctgcattatcccttatctcttgaaagtaactattccagtgaaaatctaacttattgctattctaaattaagggaaccagtttaacagctatacaaatatgttataagaaaaaatgtgtaaaatagcaataaaagcttttttacaagg

SEQ ID NO: 412374 - DNA, 588 bp, Homo Sapiens
  misc_feature (448)..(448): n is a, c, g, or t
  misc_feature (460)..(460): n is a, c, g, or t
  misc_feature (515)..(515): n is a, c, g, or t
  misc_feature (570)..(570): n is a, c, g, or t
tgagagccccactcatgcagcaaacatctacctggacaaccaggtgttcctatacatcctctgaaatctaggttgaggttcccaaaccccaattcttgacttccgtgcactcgcagactcaacaccatatggaagctgctgaggcttgggggcttgcaccctgtacagccacagtcggagctgtaccttgactccttttagccatggctggagtggctgggatgcagggcaccaagtccttaggctgcacacagcagggaggccctgggcccagcctatgaaatcatcttttcttcctaggcctctggcctgtgatgggaggggctgctgtgaagacctctggcatgcctggagacattttccccattgtcttggggattaacattctgcttctcattacttaggcaaaattctgcagccagcttgaatttctcctcagaaaatgganatttcttggatngtcaggcttcaaattttccaaacttgtatgctctgcttccttatacaacttgaantccttagcaggacccaagtcacctttcaaatgctttgcttgctaccaatttcttncaccagataccctatatc

SEQ ID NO: 412375 - DNA, 132 bp, Homo Sapiens
gttactggaattcttacatcccatccctctcactaaattcctatttagcaaatcacattaggctaataagaaggctaaattctaaccacctgtcttcctatacttccatatgatcaaataaacatgattact

SEQ ID NO: 412376 - DNA, 419 bp, Homo Sapiens
ggaataacttgagtggtccttaaccccactttattgagacttgaggttgagaggtacgctgggataaacatgggtttttgtttctccataggtgaataagccacagagtagattgtgtctggtaagatgaggactctggctggcttctccagcaacctggccccctgctttaaggactatggtctgtcgccatcactgcgtatgtctgagcagcccgttaatttgaatatattttgtagtcaagaattgatagacaggtagaaattttatttgcatgtatacataatacatacaatgagtcaaagaacaattttttttcaattctgcgatttgtgtcattcatgtattgacatggatcattgagagctatggggttatgctgacttacagcccagtagcctgtattgctgagttcattg

SEQ ID NO: 412377 - DNA, 407 bp, Homo Sapiens
gaaagatattttttcttattcatataaaaccaggcacttgcttaagggatttgctaaaatcactggaggtcaaagcaagattgccctcttttctgtagatgtgcataatttataagcatcaagcaaacaagtatggaggatctgtctttcatatggcatatgtgagccacagcagtcttccaggtagaagctgaagcaggctagttccatttttagtccacttccctcagccctacctctacctgaagctgtttgtgtgtaggtttgctttccctaggagcccttcagtgcctcgaagacagatagaagcttaatttttgtggtaggttgagcctgaagcagagtgacaggcacagagtaggtgcttagatatgtacatttcaatctgtttgttctttcccatgctg

SEQ ID NO: 412378 - DNA, 666 bp, Homo Sapiens
  misc_feature (433)..(433): n is a, c, g, or t
  misc_feature (483)..(483): n is a, c, g, or t
  misc_feature (633)..(633): n is a, c, g, or t
ctgaccccagtttgtgcttttctctttatactgaagcatgcagtgaagactggaccagatccacagggaactgattctgtgttccaagatggggggctggccctggtgttgagtttgcaggtgaaggagctccaattataggaggaaacaaaaggctaggagcagcaagagcccaacacattttcaagggagaaatttagggacaggggacacaagcacaagagatgactataactagggatcccattaatgtctcagaaataaggggaaaatcccagctactggaattgaggctctggcaggcagactaagtgactgagtaaaacgcttgcatcccttccctgtctcaccactggactgcacagctgccttggctgtgagtacagcagggctaaagaatgtgggagtagggcggattatgagaacagttcanaggtggtccatccacgtttatagagtagagaaagaaatagaatccaacanaagaaagtggaagaaataatcattgaggtagaaaaaatggaaatagcgtagaaggcaaaacttttcataggaaagggatggtgccaaggtctggcatagaatatgagtggaatacacttggatacatccacgcgtgcatgaatgaataantgcttgatgaattgccaacacaggggaaggcct

SEQ ID NO: 412379 - DNA, 365 bp, Homo Sapiens
cttgtccttcatacattaactaatcaagtaggaaaatgcaaatgagaacacagtgccaaacataggcaccacatggaaacaagtatgaggctgtcaggaagccatttttgtagctttgtagcccaattatatttttcctaatgtattgcacacaaaacttgggggtcatcctatcagaggaggaactatgtaaaacaaattttattgattgaatgtcctatttaatcgcaaaactgtatgagaacacgcttgtgacttatttagcagcttgtttgctttccactggcttcacgagtgtcctctggaggtacatttggccctgtacaccttttctttctccagtaccctcttctcacttccatcct

SEQ ID NO: 412380 - DNA, 209 bp, Homo Sapiens
  misc_feature (54)..(71): n is a, c, g, or t
ctcaactacagatcagcaccacatgccaggaccaaaatagggaaggaggcgacnnnnnnnnnnnnnnnnnnggaaatgatgcaggtacaggtacagtattaataacttcaaactttattttcttagataaagcagattagagtaagtgtatgcatatactattcacacctgaatctaccacccctcatactcagctccatcatcctcat

SEQ ID NO: 412381 - DNA, 602 bp, Homo Sapiens
  misc_feature (506)..(506): n is a, c, g, or t
cggggtgtctccaaaggcagcttgtgcttgtttgtgaccagggtgacaaaggacttcactgtcctgtagcacagatgaggttccaccctcaggtgggtggaaacagcccaggccattagtgcaaatcccctgcctggcccagggccacgttcagcccactgtctgtttgctttgggacccacccaaggtcacattttagcttttgagaaatgtgaaagtggaaaacattgcaaaacaaaaagcccctggaaaactgtgcacacacccatcccctcagcctgatgctccagcttggctgctaggagatcaatgcagctctgccttcctgctccctgtgcagaagtgccggctcctgcttcctgttcccaagtttccttttgggaactgcctgaggtgtttgacacacaagctgtgggcttctcttcccttgaggtctctgaccaaggcacccatgcaggtaacacaaaaccggagtggggtggaatggggggctggcttgatccctngcaaaaggggacccgccttcctcttacaagatccagaagggggactgaatattgacaccccactttggcccccatgtgagctaatgccgggcctgg

SEQ ID NO: 412382 - DNA, 265 bp, Homo Sapiens
gttgagtgaaaggaagaaatactgtataccttcgtcttcattccattagtgtcagagactaataaccctttgccttgaaaattggactaacacttcattcattcctacactgttttccccagtccttgctctgctctctggcattgatagcttataactgcaaatcttgattctgccacccacctatctaccatccttcaatgtttccttggaattttcaagataaattttacactcctccataattaggtccctgcaaacatct

SEQ ID NO: 412383 - DNA, 613 bp, Homo Sapiens
  misc_feature (478)..(478): n is a, c, g, or t
  misc_feature (486)..(486): n is a, c, g, or t
  misc_feature (490)..(490): n is a, c, g, or t
  misc_feature (578)..(578): n is a, c, g, or t
cttcaaagaagagagggtttgaagagtggagaccatctctttctccccatcggaatctccattctatgaagggtatacacaagcctagggccatttgcaattgaaaatacgaacaagcaggccttgaccccagtatcaaggatacgttcatctaaatgttttctgccccttcctaaccctagaatcactttgttcctgataatggagaggacatggagcaaatgtagatgtgtgggagataaagaagtaggattaggtgtgactctcctgctagtccagggttgcagctctgttcctgatcctcccttggtgagaccgtaaccctgtgggttcaaggacgctgcctcagttaccactcctgccccaggagcgtggcataacacacgcttgttaaacactgatcagtgggctcagcaggtgcagtggaaatccacctggttgtcagagctccgtggctaacacctcacctctggacttntcgctatntctntctctgtagtgttatctaataaaccttccagttaatttacgatccacatggggcctgtgatatgcaaggtgctcatttcatggtgtanatgggtcagcactggctgagcccatgtcgtgtatg

SEQ ID NO: 412384 - DNA, 633 bp, Homo Sapiens
cccgagtcactcagctgatagtcatcagaaacaagtttcgaacctagtccagacctttcctgctcccacacctgagtgcttttctccatgccctggtgcagagaagttgctgggaatcttcacccagcttctcccaaagttaacctcctacaaaacatagtacattatcaaaatcaggaacctaatggtgatgcaatactatgaactactctataacttatattcacattttgccatttgtccacaaatgttcttttttgggtccagggtcccaacagcgtatttagttgccatctctccttgtctcctccaatctggggctgtttctcagtctgtcttccataacttcagaatattttaagagtactggtcagttatttgtagactgcctctcagatttggcgtgttggttggttctttgtgattaaattctgattatgcatttttggcataccacagacataagattttactcttcttgggcatcctatcaagagatacaggatgacaggtatgtcccattacaggtgatgttaactcaggtcatctggtttaggtggtatctattagatatctccaatgggaaagttgctgttggcccctttgtgatgaataagcatcttgcagggcttt

SEQ ID NO: 412385 - DNA, 314 bp, Homo Sapiens
  misc_feature (134)..(172): n is a, c, g, or t
ccacattttaatgcttccagaagcaagaggcaacatgatataatgaataaaacacaagaatggaggaagaagactccagtctgagtgctagtaccatcactgtcatcttcaagtaattagtcacttccatattnnnnnnnnnnnnnnnnnnnnnnnnnnnnnnnnnnnnnnntttgtgcagaagtactgaggggatgtgagagaaagcagtttgaaaactgtaaactaagataatattgtatattaccaacatggaggtatacttctgtttattcctcctgtaggcttcactgtgggagttaaaaggtgcccca

SEQ ID NO: 412386 - DNA, 674 bp, Homo Sapiens
  misc_feature (442)..(442): n is a, c, g, or t
  misc_feature (446)..(446): n is a, c, g, or t
  misc_feature (488)..(488): n is a, c, g, or t
  misc_feature (492)..(493): n is a, c, g, or t
  misc_feature (504)..(504): n is a, c, g, or t
  misc_feature (527)..(527): n is a, c, g, or t
  misc_feature (562)..(562): n is a, c, g, or t
  misc_feature (567)..(567): n is a, c, g, or t
  misc_feature (573)..(574): n is a, c, g, or t
  misc_feature (590)..(590): n is a, c, g, or t
  misc_feature (602)..(602): n is a, c, g, or t
  misc_feature (616)..(616): n is a, c, g, or t
ccgtctctcggcgtgaccccctcgcccccgtcgcacacggcggggcggttcagcacccaggtgcgcaaggagggcctcacccctgcccgcggcctcccacgccctccttgggcctctcctttcgacccccttaccctctccctgggagactctaccagaccttcgaggctgcgtgtcccagtcagctaaaaaggaggccccgcccgcggcacctggtagctcctcgggcgctgcgggttcgacgcggcaacagcagctgttttctctcctggattcgtgtgagccgccaccctcgctaccatccctgtcctcccagaccacaccctgctctgggccttgccgggagccacctctttggcttttcacatccctgggatggatcaaaactaagaaccttaatcattatttattacaaaattgacatctgctccttaaaatacanacanaccaatcccccgataagctttggatatgattccaacattcanactnncttatataccnctctctcaaaacaccaaattganatataccttatttcttagtctggtccaagataganggatngaaggnntttgtatcataggaantagaagtgcggnttgggcgcaccggngaagatggattaaattggtcaagttgagctgggttaatgattttttatctgtatgccg

SEQ ID NO: 412387 - DNA, 624 bp, Homo Sapiens
aacagactctgtgtgctttcaacgagccggtctatggagcacagtttgaatagtgaggatgtctgatggtcaggaaggagatgtgtagtgtggagatcagatctccagaccataagaggagaagatacaccttatgttttccagtcatgagtcatcttgaccctccacccctgcacaaaatctgtccttgtgtatgtcggcatggagcccagcattttctgggagatataaaacatccatcaaattaggtggcctgttgttttgtttggcttcactttaacttccctattataagttgttctgtctggagaaggcaggtgaaccatttcccaccacagtggaactgacgctgcatcccaatgtccttctttaccttctagaaaacgctgcagccttaggttgctataagcagataatttctctatttctttctttaactcttttccaaatacatgcaataaaacatctggaactttgctattgactatgttgagcagctacttcgatcttactcaagattagttccctataggttcacacacactagcaccaagttcacatctatttcagtactttgcttaggtgatgacccaataactgttttccaattgaatggttatctat

SEQ ID NO: 412388 - DNA, 690 bp, Homo Sapiens
  misc_feature (236)..(499): n is a, c, g, or t
gcagtgtttccttatttagtgtttggtgaggtgatttttgtctgagatggtcttgatgcctgtggatgttcaccaatgtttgggcattgaagatttacatatttattctaatcttcacagtctgggctgatgtgtacccatctttcttgagaaagctttccaagaattcaaagggaattgagtgttatgaaataagtttttggtcactgcagccatatgtgcattagggaacactnnnnnnnnnnnnnnnnnnnnnnnnnnnnnnnnnnnnnnnnnnnnnnnnnnnnnnnnnnnnnnnnnnnnnnnnnnnnnnnnnnnnnnnnnnnnnnnnnnnnnnnnnnnnnnnnnnnnnnnnnnnnnnnnnnnnnnnnnnnnnnnnnnnnnnnnnnnnnnnnnnnnnnnnnnnnnnnnnnnnnnnnnnnnnnnnnnnnnnnnnnnnnnnnnnnnnnnnnnnnnnnnnnnnnnnnnnnnnnnnnnnnnnnnnnnnnnnnnnnnnnnnagcctgtggtggctgctgcctggctactgctgatgcttattcaaggaccaagggctctttagtcagcatgtggtgaattctgaaaggacatggaccttctcttcaggcagtggcttctcttcttgcccaagcaggtctagtgtcatcttggaactggtattggggtttcggactctgcttatgcttatttt

SEQ ID NO: 412389 - DNA, 684 bp, Homo Sapiens
ggcatgtgggtattttagttcacactgtggtatttgaatagaaatgctttcacatttttgttttctgacgaaagagaacagaagctatctaacctcattttttccccttatttatccttattcacttattctctaggtggcatgtgtgtcattagcttaacccttatttttcccttaatattgttgacatacatggagaggtttgttaactaggaaaaccaggatgattatcctgcctcttttcagggcagtgatagtgcatttaatatttatcttagtgaataacagaatatgaacctcacttgaaaattcggtcaataactaactaggaaaaatggtggggagagggcatagagcttaaattaagaggttgaaattttgggtaagtctctgccacggagaggctgtataacccatgagaaatgcaaataaccttctctgcgagccaagtttctcattcatagaatgagcaatgcatttagatgatttaaaatcccttttaattttcaaatttcatgattttggaatgctttaaaagttacgaagagaaagaaattcacaattgcgttttattccggtgtaaggaatcggagtctttatagaataagccttcacccaacagggtaattttaattcgataatggcccatcggattttaacaggttggtcttattatttttagct

SEQ ID NO: 412390 - DNA, 664 bp, Homo Sapiens
  misc_feature (421)..(421): n is a, c, g, or t
  misc_feature (483)..(575): n is a, c, g, or t
  misc_feature (629)..(629): n is a, c, g, or t
caattattatgttaacacatgattcatagcatatatgtgtgcaaataccctcaatactaatatgttatttcttccgtatgaggtttaacattccaggctaagtgtttaaaaatatataaaagaagtaatagggaaaacatatgttcacacaccttgctttgcatgacaattcattaaagaagaagaaatataaccaaataacgtcaatctggctggtgttaaatattatttgctgtgtaacaatcaaccacaggagaaaaatatttgaatatttagaccggcagttttaatcctgcaagatagatgtgttgttagaaaaacacctgttgctaatgtttccaattaatgtcactttacagtagatctttatgagtccaaacataacacctttctcttgccttatgcttatttaataccacanaaccaaagataggcaatgttaaccttgatttacaagttcttctctaacgcttgaaatggacnnnnnnnnnnnnnnnnnnnnnnnnnnnnnnnnnnnnnnnnnnnnnnnnnnnnnnnnnnnnnnnnnnnnnnnnnnnnnnnnnnnnnnnnnnnnnctttcatctgcttcctttcctttctcagtatctctctcctcttccttttctatnctgtactattttaaattcagccaggtcctttttct

SEQ ID NO: 412391 - DNA, 678 bp, Homo Sapiens
  misc_feature (98)..(130): n is a, c, g, or t
  misc_feature (371)..(371): n is a, c, g, or t
tgtgtaagtcataaacgtgggtttaaatttgtgtcctccttcttcatcacccctcacattccaacattcatcaagccccctacatatgtatatatgtnnnnnnnnnnnnnnnnnnnnnnnnnnnnnnnnntatttttcagatttatactatatctttccttcccaattgccacttccatagaaagcagctcttctatctatcgtgaatcaagaccagagccctttaattggtctgcctactatcttactctcttctatttaccttctactatcctatatctacaagcagcagagccactattttcctctccattatcatctgttggctacaccatccattgtgtacattaaactccagaaatgctgaattnttctcagtttctcaatacactggactctctattttgccttgaggacttgcgatagctattctctcctatgcaaatattcctcagacctacccccattcccctattttacttcacttctgcctagatgtcaacttttaggctagatgtcacttctaagtagtgtttatggccccacaggagcctctcaaatgctcacctagtattttacccttttcagtatgccatggaatattctttcggaaggcctgttcaagattttaatcatttttaatttacaatggctatttacatggatgatgagagttat

SEQ ID NO: 412392 - DNA, 658 bp, Homo Sapiens
  misc_feature (105)..(235): n is a, c, g, or t
  misc_feature (312)..(330): n is a, c, g, or t
  misc_feature (597)..(597): n is a, c, g, or t
  misc_feature (612)..(612): n is a, c, g, or t
  misc_feature (633)..(633): n is a, c, g, or t
gcctgtgatgccacccaaatgtcatccatgggcgcaggaccatgggctggttgtgagtgggctttagtattgaacagctggatctcaaacctgattcttcctgannnnnnnnnnnnnnnnnnnnnnnnnnnnnnnnnnnnnnnnnnnnnnnnnnnnnnnnnnnnnnnnnnnnnnnnnnnnnnnnnnnnnnnnnnnnnnnnnnnnnnnnnnnnnnnnnnnnnnnnnnnnnnnnnnnctgagcatggcggttggcaaatagcaagtgctcgatgagtattaaccagttaagcactcagcaggtagtagctgtcnnnnnnnnnnnnnnnnnnnttatttgcaagtgggttttgccttctaattcttgccgaattatcttcccgctgcgccacatcaatggcacgatgggtcagggcagccaccttcagtgccccgtaggctcagattcactaacagttagaagcacctgttcctagatgtacccattaatggacaggagagtctgcggcccacccattagggacagagttcccacagccatcctgtcttcccagtcatagcagcaccccttccccagaagcaccctccctcagcagcctnacacctgcctgctangaggtcgtgtggctcatgagncgccccagtctggggccggggttct

SEQ ID NO: 412393 - DNA, 653 bp, Homo Sapiens
  misc_feature (116)..(153): n is a, c, g, or t
  misc_feature (571)..(571): n is a, c, g, or t
ctcgtgccgcagttcgcagatgaatgatcttattcagagccaacaacatccaagtgttttatgagaggcgaaaatagtgcagggagagcatgggaggtaaacaggtgctgctgccnnnnnnnnnnnnnnnnnnnnnnnnnnnnnnnnnnnnnnagagagctgcaccaccccatgagcttgtcagttctgatcaaagtcagcacctgcagctcccgatcaccatcgcccccttggaaaatgggtgttgattcatcatgtcaaggtcgatcactttgtagttctgcctaaaatacttaaaacattgttaggataggttttagatgtttttttaagtgcaagtattccctaaaatgccacaaattgcatcctttgaggacatctgttgcaagagaccacctgggaacatcccatcccatctacagaacccctgaagcccccagcatctgggaaggagatgggcgtgtggcaagggttgctggtatgaatcccttcctataaaccaaaggcccctggagggcagcctggtaccaaacaatgtatatacagaaacattcaggtcttagaataacanagcgacaggcactgacttggggaagtccggatggctgcggacattgtgtgggatccacagtgtcattttcctagggtgtccc

SEQ ID NO: 412394 - DNA, 654 bp, Homo Sapiens
  misc_feature (506)..(506): n is a, c, g, or t
  misc_feature (607)..(607): n is a, c, g, or t
  misc_feature (624)..(624): n is a, c, g, or t
gaaattgattttcaggatcatggggtgctggctaggcaagtttgaaatatataaagcaggccagcaggctggaaattctcaggcaggagttggcacttcagacttgaggcagaatttcttctccttcagggaaattttagttttgctgttaagaccttccaactgactgggtgagctatggttttcatggataatctcctttgtttaaagtcaactgactgtagaagttaatcatatctacaaaaaccttacagcgacacccagattagtgtttgattgattaattatagcctagccaagttgacacgtaaaagtaaccatcacagtgacttacctcaaacatttggtgatcttagcctgcctgttcatatttaagggtgagatctagaaaaactggtgggggtatttataggagaagattgccaactggaaatcattgctttagggtgaccaagaggaggtatagaatcttataatgggaaaccccttaccagattgggaagttnttccctccagagggccttcaatttcccctggtctctactcccttgggaggaggggatgtgctatgtgtgggtgctggccttcgataatgagtggatctggngaggcaggagggacttnttccacattagagtcctttaatgtgtcctg

SEQ ID NO: 412395 - DNA, 651 bp, Homo Sapiens
  misc_feature (580)..(580): n is a, c, g, or t
  misc_feature (626)..(627): n is a, c, g, or t
caggctgattacttccttgtaaatacaccagaaggtgaaactagtttctgtgatcactatatcacaatagatttttatagagtactgtaaattaaaatccctaaggaatgtttatgagtggatacattccatatttcccccattttgtaaatatgtagttggtattttggattcattggtaggacctcatatctgcactaaatttaatttaaagaattcattccagcctttgagatacctatcatctcttggatcctgatttattatttcttctgttttttcccctaaaattctcatatgattttgatagaagtacattctgtatatatccatccaatatattaatttataatgtcaatggtacagggcagagatctgaaatgttttacgggaagacttatgcacccttctaggtaagagaccacacttaattattttattactctagcctcaagctcagtacttggctggccggagctgctcaagaaatatttgctgcattgaaagagctgttgaacatgcttaagctgtcttcatctaaccactctctagtaccaaacccatcagctgggctaccatncaatctgcattcctgcatgttaaagacaagatataatgagaaactnntgcctgccttgttggtgtgtgtct

SEQ ID NO: 412396 - DNA, 674 bp, Homo Sapiens
  misc_feature (607)..(607): n is a, c, g, or t
gttacatccatctgccagatggaatttggagataaacctctagggttaactcctgttccttgatgtggcagatacagggcttggcaggcagaacagtgttacacaatttctttagcttgtttccatgatagaccatatctttttctaaggcctgctgcattaagatgggttaaataatgaaatgtttgtgcatcagcaaaggctgcagacatgaatgcatccaccctttaattaaatttaaagggccagggaggttagtatgtgctctcaaatgagtgatatagaaaggtgaatgcctttgttgtactacttgctgtaaagaatgaaataaaagattaagtcgttcatcagtcacatttcaaattaaggcacattcaacattttgcatggcttgcacaacataggctgaatcagaagcaatgtttactggctgcttaaaagtttttaacactgttatcacagccataagttcagccctttgagcagaagcaaagtcagtttgaaaaacttgctgttgaggtcctgcaaatgaggcttttccattactagatccatcagtacagtaatgggccccttcaataggggctctttgagtaatagaaggcantaccaggatgttaattttagaaactgtaagattttagacctaggataatgattaccaagatgcccct

SEQ ID NO: 412397 - DNA, 684 bp, Homo Sapiens
  misc_feature (507)..(507): n is a, c, g, or t
  misc_feature (509)..(509): n is a, c, g, or t
  misc_feature (535)..(535): n is a, c, g, or t
  misc_feature (538)..(538): n is a, c, g, or t
  misc_feature (547)..(547): n is a, c, g, or t
  misc_feature (575)..(575): n is a, c, g, or t
  misc_feature (581)..(582): n is a, c, g, or t
gtctcctttaattttcggtctatttaagaatgaaagatggaaaggaggtgagtggggcacaatgaaaatacaaaagcgagcatattctcttcccaaatctgggttctttagtacgggggcaaatgtcccactgcctcaggacactctggagttgagaagaaagtgttttgaacattgtgctttaaacaatctttttaagaaagcgaggaaatgtataattcattttgcagtcttgcagaagtggttaatgtggctgattttgtcactcagctgcatttctctggggcgtttatgtggcatggtttgttcactaatgatgctaagtgaataagctgtttctgaattatgggtgccagcagtacatgtgccaggtgaggcagttcttacttgtatttgtcataaactgatacctgccaagctgcactcaggcccttggggctgtagctttgctggcatccatcgtaccccaggcctctgaatggctggcagttggtacccacccacatncnctcaggaccattggtcaaggctctgnctnccctgctgntagctgcttcccttttgcttgaggactngctcanngctgcagagcctgctcttgctcaggccagaagtacctgaggtacaggcgtagaagccctttcacagtgactgactgaagtggtgggattaccccagctcctt

SEQ ID NO: 412398 - DNA, 670 bp, Homo Sapiens
  misc_feature (530)..(530): n is a, c, g, or t
  misc_feature (547)..(547): n is a, c, g, or t
  misc_feature (601)..(601): n is a, c, g, or t
gttcccttttctctgcatcctcgtcaacacctgttgttttttgactttttaataatagtcattctgactggtataaggtgatacctcattgtggtttcaatttgcatttctttgatgattggtgatgttgagcatattttcatatgtttattggccgcttgtatgtctttttttgataagtgtctgttcacgtcctctgcctactttttagtggagttatttgtttttttcttgttgaattgtttgtattccttgtagattctggatattagccctttgtcaaatgcattgtttgtgaatattttctctgattctgtaggttgtctgtttactgcgttgattgtttgttttgctgtgcagaagcttttcagtttaatgaagtcccatttgtctattttgttgttgttgttggtgcattttttttgaaggcttagtcataaattcttagcccagaccaatgtccagaagagctattcctaggttttcttttggatttttatagtttcaggtgttacatttaaagtcttaanttcatctgagttaattnttatatatggtgaggagcagtccaatttcattcttctgcatattgctctttaantatcccagcaccatatattgaatagagtatcctttcccagtgtatatttttgtcaactttgttggcctg

SEQ ID NO: 412399 - DNA, 654 bp, Homo Sapiens
  misc_feature (437)..(445): n is a, c, g, or t
catgatacatagtgtctgtttccccatagaatatacaccagatgaacatgtctgccatctccccagagaggacaaacagttgcttggtttgctgtcagaatgcaacgcaaagggtgaagccacgcacctcctcattcaacagcatgcaaggtgatggagaaaacctgcaactgggaccccccagtcttctcttccttgaacagcctacatctccttgggtgttactgctcatcctgtcaaaacccaaactttgctctcctctgacggagctgagtttccatacagacagagcaatcaggtccccatggaaaccccaggcttgctgacccccagaggaaaacgctattactcacagtgctggaggcagattaatgtagaataaccctaatgaaaggcgttatcctcaaaattgtagggcctttgggtttaaatttccnnnnnnnnnctgcctaaactcccataatttgcacatttgcattctttgaaagggtgccttcactggagatgctgattacccacagctgaatcttgttgcccttttggcatcagataggtgtgcactgcagagaccatcacccacccttaatggggctggatgaatatttattctctattttcatgagagccaagtggggccttctaactccttgggcg

SEQ ID NO: 412400 - DNA, 527 bp, Homo Sapiens
ggtgcagaggaggcaaaaggataggaatgaaccagtgaacaaaaaaatgaaaaactttggaacccctggaaaaacccccgcaagtaccagattgaaccaggggagcccccaggcgggggaaaccggccaggggcatttttaatcttttaagagactccgtgtccagaggggaaacgactggtggcacaggaacacaagttaaaaaaattacctggtaaaaggttagagaactgatctattaagaagaaattcaaggctgggaagggacagatgaaataattgggactttaagagaaacaactctaatataatgcgaagaaaacacaatttgaaagaaaccaaatattcgggaaggtagcgaatccaaataccaaagtgggggaagccatgccagaaaaaccaatcctgaataaaaaaggaaaggagtggagacgggaaaacaggggaaattggaaaaaaggtgttaatgggttaaaagaagggaaagggttttcaagagggaaaaataaggtaagggttgatgttcc

SEQ ID NO: 412401 - DNA, 662 bp, Homo Sapiens
  misc_feature (53)..(371): n is a, c, g, or t
  misc_feature (435)..(435): n is a, c, g, or t
ggaataaggcctgatctaatctggagatgttacatattacatgtgcataggtnnnnnnnnnnnnnnnnnnnnnnnnnnnnnnnnnnnnnnnnnnnnnnnnnnnnnnnnnnnnnnnnnnnnnnnnnnnnnnnnnnnnnnnnnnnnnnnnnnnnnnnnnnnnnnnnnnnnnnnnnnnnnnnnnnnnnnnnnnnnnnnnnnnnnnnnnnnnnnnnnnnnnnnnnnnnnnnnnnnnnnnnnnnnnnnnnnnnnnnnnnnnnnnnnnnnnnnnnnnnnnnnnnnnnnnnnnnnnnnnnnnnnnnnnnnnnnnnnnnnnnnnnnnnnnnnnnnnnnnnnnnnnnnnnnnnnnnnnnnnnnnnnnnnnnnnnnnnnnnaacgtataagcatgagtaggagtcaggagggaccagctaaaataatacattcaaccaaacgcanagcttgtaactgccccctcctcataaatgctacacttttattataatatgaaccaatataaaagtttgatttactaaaacctattgattaacattaaccaagagaaaagtgtaaatgagtaatgcaaattatcatgtttgaatgggactccttcattttgggcctttttgaggttggacacaatcattcatccatggtggaataaatacgctctgtgggcctggggg

SEQ ID NO: 412402 - DNA, 597 bp, Homo Sapiens
  misc_feature (513)..(513): n is a, c, g, or t
  misc_feature (515)..(515): n is a, c, g, or t
  misc_feature (555)..(555): n is a, c, g, or t
  misc_feature (562)..(562): n is a, c, g, or t
  misc_feature (569)..(569): n is a, c, g, or t
gcgcggccgtgtcgttacctctgcgcggcgacattagcgtccaccactccgacattccggacccaggacctgaccgaatccatctccgcgcccagcgatttctctttcagagttggtcctcttcctaaagtatcttgaattccaaacatttaaaaagtctgatcctctactgtcgctttaaaagtaagagttacaacacagtcctgactgttcccaacgttgccagcaaatcgtctcctccaaagcaatccaagaaaagggatcaagtgcccaaatttgagtcttagaaaagtttgggttcttatcctccgcaagttcagatctgccgcctcagccactccaccctaggtcgctcgcatccttccagctgcagtgctgcctcctgaaagtgatcacaatttagaagcatcacctgttctgggagatactggaggaaattgatggctgcctaatctctccccttctccaggtcccccctccctggctctccccaccgttcccaattagtaaaananaaatccccaacagggatcagttgtgaaggggaagacctgnagccganaagaggncgttgctgctaagcgcccggctcggtgt

SEQ ID NO: 412403 - DNA, 171 bp, Homo Sapiens
aaacatctctccagtaaaagtatcaataaattttattggactatttctgattacgcccctcaatgtaggttaacagcataatgccaaaagcattggtcagtaaaaccaattacacaagaggacaaaacactgctcatatacgcagctttctcataatcttgtttaggaaga

SEQ ID NO: 412404 - DNA, 685 bp, Homo Sapiens
  misc_feature (616)..(633): n is a, c, g, or t
atcctagtgtgaatgccaattcaaatactccagatcatatggggggtttccagaataccaatgttgaaaactcagaaggcccaagtttcagccaacaagggtcccttcaccaaatcctgaaaaccctggggcacccagaatgcggccaacagtcaatccaagaccaaattggggtcagcaaacaacatgactctagcatcccgaagtaaaaacagtggggatctctcacaaccaagtatcctgccttaaatcgccccaaacaattaacagaaaggtaaaaccaaacataagactggacacaatttaagactgaaaataaaataactaatgggacaacacaatggaagtccgagagaaaagtcctaaggaaggggtgacaaggacatgctttaagcaaaagacgttatttcatttcctaaggtctctgatactatggggaatggggcataagggacacttaactggtcaacaagagacaaatggggctgaccggattttcccaagggacccaagtgaaaaacttgccggataacccaacttgggtggacttaacttggcccaaagggggggccctggcaagggggggctgtgaaccaattgtccggcaagcaaaaannnnnnnnnnnnnnnnnnacaccattggttcccttccgaaggttttcccaagggagggcctcgccttgtt

SEQ ID NO: 412405 - DNA, 679 bp, Homo Sapiens
  misc_feature (12)..(12): n is a, c, g, or t
  misc_feature (203)..(490): n is a, c, g, or t
gaaagatttctngtcagaactatctttgtgcaacagttctggatttattgccagctgcacatgtaagaatgacaatcacatgtgtaaacaattctcatgtagtataaatgtataattctcatgtagtataaatgtataaataattctcaagtagcttatttgaaaaatgtggcaatgaaaatgttattagaaacttactttgnnnnnnnnnnnnnnnnnnnnnnnnnnnnnnnnnnnnnnnnnnnnnnnnnnnnnnnnnnnnnnnnnnnnnnnnnnnnnnnnnnnnnnnnnnnnnnnnnnnnnnnnnnnnnnnnnnnnnnnnnnnnnnnnnnnnnnnnnnnnnnnnnnnnnnnnnnnnnnnnnnnnnnnnnnnnnnnnnnnnnnnnnnnnnnnnnnnnnnnnnnnnnnnnnnnnnnnnnnnnnnnnnnnnnnnnnnnnnnnnnnnnnnnnnnnnnnnnnnnnnnnnnnnnnnnnnnnnnnnnnnnnnnnnccaaccaacttacctaaaaccaaccaaaattccctattatggatgacaacatgctatgatgggggcaccatgcaaattagaatctgtatggtaacccagcactgggaagaaagttgggccaccaaggatcaatccccggtacttaaaaccttttggtttaatcaacgttaaggatggcttggccttctt

SEQ ID NO: 412406 - DNA, 578 bp, Homo Sapiens
aacatacagacagggatagcaatgacaggtacagggatagcaatgacaaggttcataatatgaccaaggaagcaaaggacaaaacacattgaatagatgagaccacgtaagagagagactagagtgcctgaataactaaaaatagtggcaggaatagtaatggaagagagacagagatacaaacttgcttcaagggatgaggattagggactcagaacttttggtggctgaaagaaggacaggtagcaggaagcttagtttgatggcatgacttcaaaggagttgaagactttaaataggaatagttgtctggagcaacaaggagcccagctacccaacactggcatgtggagtgacagcttctagctaccacttgagtgtcttcagaggagatccaaattccagtcagaggaagaagaaggaaaggttcagagaggaggttgaagactttgatgactctgtgttccagcagggctggaggttttgcagccagaattacagccatatatgtagtgcagatagctttgtttcccctgtgtccaacgaactccctgctatttatgttcctggcctcctgc

SEQ ID NO: 412407 - DNA, 699 bp, Homo Sapiens
  misc_feature (539)..(539): n is a, c, g, or t
  misc_feature (583)..(584): n is a, c, g, or t
  misc_feature (631)..(631): n is a, c, g, or t
tgattattccttagatactaagtcagtgagctgattatcactgcaattacattaccagtgtcaacagatgccgcgtgtaggcaacgagttaacaattaagtgggctcctggccctgagacctcactccacagcaaagcctgtgtaaactcttccactttagatacctgcatggacgaatctgatgcctgaaaacagaggaaggtgtttcctgaccacggtgtagctgacagacaggcttctctgctttcagggcggggatctccccttcagatgaggcgattctgcactccaagatctgactttattgacatctgtaaattaattgagttacaaaataagaaggtaaatgtggccacatgcaaatgcgcatactcattcttccagaaaaaagtcacatgatgatgaccatttgcgtttttgaataaaatggtgtttcttatttctttaagaagcttccataccagcagaacacatttcccaacaagggatagtgagtttcactgtgagtgtgtgtttctggataaaacacaatgctctncctagaaggcccttgagggctgtttggttccagctaacaatgcnntgggtgggggtggtcccgttctttgctgtcagaagcacatgcgcttngccctggcttcctttcctgggtctgctgggcaacgtgcactttgtataggtgagtgcgtctctttttt

SEQ ID NO: 412408 - DNA, 329 bp, Homo Sapiens
  misc_feature (45)..(74): n is a, c, g, or t
gcttttataatttctcttacagtttttcaaaataaaaacacacannnnnnnnnnnnnnnnnnnnnnnnnnnnnngagtgagccactgtgcctcatctagagttagtatttctatccctaccttcctgctctagaataccatcacgtcgcttttagtttctggttaattcttttctcttgttctgagatggagtctcactctgtcacccaggctgaagggcagggtgttgagttcagctcactgcactgcctccgggattcaagtgattcttcttcctctgcctccagagtagctaggattataggactgcaccaccacacctggctaac

SEQ ID NO: 412409 - DNA, 413 bp, Homo Sapiens
cagaaggcaattggaacacagggagctcattcattgcaacaaaagttgaacacctactatgtgctcattacaagaggaacttcaatgaagaagggagaggtctgccttcctgggcctggggtctggtgggggagattgtcagtgataaacctaaggtgcactgtgactggggacatgacatactaaagtggtggcatttcacatgcgtccggaaaaacaggtagaattctgagaggggacaccagaggaggtggatattccaggtagaggaactcagttggtttctccctaatagaggaaaggtctttccgataacatgagctgtccctagacaaggtgggttgtcttgtgaaggagtgagttttggtggcatttacataaagaataggaccacatgttgggactgccttctg

SEQ ID NO: 412410 - DNA, 411 bp, Homo Sapiens
aaagaacccacagctgttgtaaaaccttacactctccagaatgcttgctccctcttttctccctccctcatccccaacagatggctgcaagtgcttcccttgctgcttccaggtgactctgagatagagagattatccaatgtatgctgtaccaaattctgcacgttgtctgcgactgttatagaaatttagatcctttagttgaaaccttcccaatcaaaacaaataacatcttcttagccttcttgatttcagggtgagccacatatttgaggcccaataggacccaaattttaatcggtgcatgatctaaataagcgaagagtttatccatgaaggcctatgcatgcctgtgtgtgttgactgatgtgaggctactgagagagattagttagtgtttgcctgctgtgg

SEQ ID NO: 412411 - DNA, 375 bp, Homo Sapiens
aaatctcttttcctcaccattgattccagtctgaactaatgatccagatgtgttgtgcatgtccttcctcttctacaaagtgactcgggaagcagtttttatgctatttgtagaaaggaagcattttctggagcggggccttctctgcttctgctacaccttaactccctagattagaggagagctgtgaggccgcaaggaggggggcctggagaggggcttgggctgagggtggtagaggtctctgaggactgtccttgtcttctgcctcctgtgtttatttggaggcccatttaactgtacaggtctttacctctatccctcttggggctgtctgccatgtatctttcattgtaccaactcagatggaccgtg

SEQ ID NO: 412412 - DNA, 674 bp, Homo Sapiens
gcaccagaagatctgatgctacaacatagccttcctaatttctcaaatcttacagatagattatagcagacttagactgtatctgactacataatatagtagaataaatattgggaatgcagttatagttttggataaaaaagatccaaatgtatgttcatccttttacttagctaaaacagctcaaacaagtaaaaattaattctctaaatgtaaatattcttgtgtataaaatttgaaaatgatgatacctgacattgttaagagctataaatatgtagctaatgcatattaagtgtggtggacactgtgttatgtgcccaaattctgtttcaggattaaagatgtattcgtccagccactgaaggtgccactatatgacagccctcagatgttagacttgaccaataattttcctgaactgaaagaacggtctctgccttatctaagatgatacacttcctagggcagccatcatctaataactcgaaatacgggacgtacttactagaagaatggaaattgttgatatccagtggctattcgattaatgcttgtcccagagcaattttggaagtagatgatttatcacatgaatctggatctctaagggaagaggatctacaagagattgttagttacagccatcaattgtcgtggcaagatatcctggg

SEQ ID NO: 412413 - DNA, 687 bp, Homo Sapiens
  misc_feature (212)..(342): n is a, c, g, or t
  misc_feature (517)..(517): n is a, c, g, or t
  misc_feature (546)..(546): n is a, c, g, or t
  misc_feature (592)..(592): n is a, c, g, or t
  misc_feature (602)..(602): n is a, c, g, or t
  misc_feature (612)..(613): n is a, c, g, or t
  misc_feature (616)..(616): n is a, c, g, or t
  misc_feature (646)..(646): n is a, c, g, or t
gttagataatacattccccaaaataatttagcatgtgataaaaattattccatggagagtcagaagggactcagagaggtgtccaaaggcttgagggggagactttaagaactcctttaacatttctggatgatcttgtttgtgccacagttaagagcatatggttaagagcatagctcaggagcaggtctacatgggatgaattccatggnnnnnnnnnnnnnnnnnnnnnnnnnnnnnnnnnnnnnnnnnnnnnnnnnnnnnnnnnnnnnnnnnnnnnnnnnnnnnnnnnnnnnnnnnnnnnnnnnnnnnnnnnnnnnnnnnnnnnnnnnnnnnnnnnnnacagtaggtgcatttaagtgcaatggcccctggctggacaacagctctacaaaaaaagaataaaggaaatcaagaagaaagccaagactaggttagcaactgctcaacatcaccctcaaacctatttctaaacccagggctttctacagtaatgcactgctgccatgagaccagnggcccataactagaaggaatcaagtttangttcatttcctcttgccatgctctatgacagggtcattaagcagtnatcaagtggntgagaactgnnctngtctacagggtcttaaagtataacatggtngatctaagtcattcccctagaggcagtcagttctcacatct

SEQ ID NO: 412414 - DNA, 425 bp, Homo Sapiens
  misc_feature (309)..(309): n is a, c, g, or t
cctagctctagatgacttcgaagagggactcagctgaatccacagaagtccctgtgcactggagtcctgatccactaggtaagaagcataaccatcctgaagtcattttatctctgacacatcagcattgaccataataaatactctagccagtttggtggagcccaatccactggactacaaacattaaatgatgttatttttgtccctaccatgatccagtcaggaagctgaatgccatgtggagaccatgtacaggaccttgtcagtagccaatagcagcccatgagcccggcccgaagacacctncagatgatcccaaccaccagttattcaaggcaacagaaatcgtagagcagggataaactataaccccatgtctaaatgcccgagccacaggacctgtgagcattctggtcctgttt

SEQ ID NO: 412415 - DNA, 658 bp, Homo Sapiens
  misc_feature (580)..(580): n is a, c, g, or t
  misc_feature (605)..(605): n is a, c, g, or t
  misc_feature (608)..(608): n is a, c, g, or t
  misc_feature (614)..(614): n is a, c, g, or t
  misc_feature (635)..(635): n is a, c, g, or t
ggctcctatcttgaagctgttgggcacctacgcaagtggcacagggaggggcagggtgttggctccgagtgagagatttgcttaagccagatggtggccgatgaaggaggcccaggcaaccccttctggtcttccagacagcaccacaggtttgtgtgggttggaggggtgctatctgtctgtccatccacaagcacatgccagaaagaagaggatggaggaggtgaagattttggggggttctcatcattttccctttccaagtttcatccttatccatgcttctaatcacatggagaccattaccactgggggagtcatttccatttttctttagattccattcttcccctaaagacctaaagtaaagaacgtcagcagtggcatttctattcctctaaagggtattttagacaataattttggatagccccacactgcatgaagcagggaactgcatgcccttcctgctcgggagcccagccctgccttcagcagctccagcttcctttcctctctgtcatggtgctgccttctgatgagcaagaagttagacccgactgggccctcgcaagctggngcttctaagagaagggctgggctgnccnctgcanatcctgggatatgccactcangggaacggagaagctgatgcgca

SEQ ID NO: 412416 - DNA, 637 bp, Homo Sapiens
  misc_feature (395)..(395): n is a, c, g, or t
  misc_feature (401)..(402): n is a, c, g, or t
  misc_feature (449)..(449): n is a, c, g, or t
  misc_feature (457)..(457): n is a, c, g, or t
  misc_feature (461)..(462): n is a, c, g, or t
  misc_feature (491)..(491): n is a, c, g, or t
  misc_feature (519)..(519): n is a, c, g, or t
  misc_feature (529)..(529): n is a, c, g, or t
  misc_feature (536)..(536): n is a, c, g, or t
  misc_feature (539)..(539): n is a, c, g, or t
  misc_feature (606)..(606): n is a, c, g, or t
gaaagattttacagtaataaaacaaatttaatgggccagttcactctttttcaatcatgctgttaaagtttactattgaaatacttgctgtcttgggaattaccatcacttcagtttatttgcagcctctgtcctaaagtgaatctcacataacaaaagcacttgtactttaaaaaatgtcttaagacttcctactacaaataacagatttaaagcagatttaagacgtgactaactttatttaatccaccataagggatcctaaatgtaaagaatgagactttgtaagaaacaaactgcaaattaatctctagcatcacagaaatattccccattcactgccttttatgactttcaattcattgataatcaaaaacatcagttattctctaatngatggnnaaatactggttgtctattaaaaggaccagactttccaaatatagctntaaacttntcannatatcattcttttcccaaattcataacangaaagagtcactagcttgtactgacatncttttaatanacatggnaancttgaatatttcaccagagggattctttccttatggtcctatcctccttggtctcttttccatgaantccccttttttattttcctaccttcatcttc

SEQ ID NO: 412417 - DNA, 689 bp, Homo Sapiens
  misc_feature (400)..(400): n is a, c, g, or t
  misc_feature (407)..(407): n is a, c, g, or t
  misc_feature (421)..(421): n is a, c, g, or t
  misc_feature (457)..(457): n is a, c, g, or t
  misc_feature (467)..(467): n is a, c, g, or t
  misc_feature (490)..(490): n is a, c, g, or t
  misc_feature (562)..(562): n is a, c, g, or t
gcacatccctggagagggtactgcgtggagtgggcccaagccccatccccacctcagcagggaaaagggaccttcttggctgtagaccctgggctcactcccatttcctgtcctgtcagctggattgagttgtcagggctaggagaagggcggagagtgaggcatcctggaaggccaccaaggaacaagtcccttctagccctttccttctgccagatgggccatggggcccagagcgtgggggtacaggagagggtcagctccttgcctcagggtgatcaaagagaatggatccaaactcagattcccaatgcagatgggagcaagggagaggctaggaaggacttccaggcctgttttaaatcatatgtcaaggtacatctgagggcatcattgccgngaggctnttggtggaggtggngttcgtgtcagggtgacacagtgaaaggtgtctggngaaccaggantaggtaactgtgactggcgaggngatgggtagaggacaccagagtcaggatacagagctattctctgctctgatggctctaatgctgaatacccnctgcccttgcccaagagacatctccccatacccagccttcacccatgtcgggggcagtacacacacattcattgcccattttgcactttaaagtcaggatcattgatatagcaacattattattgcc

SEQ ID NO: 412418 - DNA, 698 bp, Homo Sapiens
  misc_feature (38)..(38): n is a, c, g, or t
  misc_feature (54)..(288): n is a, c, g, or t
  misc_feature (296)..(413): n is a, c, g, or t
ggagcccccgggctgtaggcaaaaaaattgaacggaancttatcgaaaagaaannnnnnnnnnnnnnnnnnnnnnnnnnnnnnnnnnnnnnnnnnnnnnnnnnnnnnnnnnnnnnnnnnnnnnnnnnnnnnnnnnnnnnnnnnnnnnnnnnnnnnnnnnnnnnnnnnnnnnnnnnnnnnnnnnnnnnnnnnnnnnnnnnnnnnnnnnnnnnnnnnnnnnnnnnnnnnnnnnnnnnnnnnnnnnnnnnnnnnnnnnnnnnnnnnnnnnnnnnnnnnnnnnnnnnnnnnnacgacttnnnnnnnnnnnnnnnnnnnnnnnnnnnnnnnnnnnnnnnnnnnnnnnnnnnnnnnnnnnnnnnnnnnnnnnnnnnnnnnnnnnnnnnnnnnnnnnnnnnnnnnnnnnnnnnnnnnnnntggaatagaaaggagtgggcatgaaaggaatggactcgagtgaccagtaaccgataaccagacccgaactggccacacaatcttcgctctcaaccatcctgacttgcggaaggtcgccgcactcatgcctccataacccccagggtctctcacaaactctcactccctcccgcgctggctgcccactccactcgccattccccaatctccgctgctaaacggccctcacctatactccctggcccctccacaatcactcctagcccccccgctccaatctgctcc

SEQ ID NO: 412419 - DNA, 128 bp, Homo Sapiens
aggggagggaggctgatccagggactgggaaggttgaagcggggaagatgcgtagacctggagggaggaccagtacgcgaaatatgggccaggagtacaagctgggggacaggacgaaggtctttctt

SEQ ID NO: 412420 - DNA, 380 bp, Homo Sapiens
gctttaggaaaaagttgtgcttttgcagaagttgacgttgggttatattatttcacataaaacagaatgtggtcagtgggcaaattctgcttcttaagggtgttctagttccttttaagaaagattttatgccaagagaaaataaaaagtaactgaccttaccttgggccacccctccttttttcatgattgtaacatccatattatgtcaggaggctaacaggtcataggtagtggtgttttttttaactaaaaattagtgtcctccactgttgtacattttggccaaatgtttgttccacactggtgtggagtggagatttctgattctcagaaggccttgcctaactgttcaccatcttctatcagctctcacaacc

SEQ ID NO: 412421 - DNA, 674 bp, Homo Sapiens
  misc_feature (513)..(513): n is a, c, g, or t
  misc_feature (650)..(650): n is a, c, g, or t
cagccttctcctgccctccgatgctcatctcttgtacttgcctctttatcctgtgagcagctctgagctcaaatgggtccccaatggcagagagccacactgctcctctctgaagggcgtagggcctatttttaaatacctgcgctcctttcattgtcttgtcttacaaattctaacttggcagactctctctccccatcatctccagttcccttgaatcactgtccgtgtttcccttccggtcacaactgagctgagggcagcctttcctcccatgctttcccaacctctgagtctacaatgagcagctgggcaacatggaggccatctctggtgctctcctctgaatgcgattcgggtttcagcagatgtccaataaacaaagctcttgctaaaaatgcaaatgcctctcctaaggatcattgtcatttttaaaccacataaatactcagataattatctaagtggccaagtgtgtatgagccaggctcgcagggcagagaggcatcgccntggatcctaagcccccttacagctttccaaaccaaacactgacacacaggaaaatcagcaggaacttgccattctggttctgataatttgcagcattagcctatgcgccgagatgtggcctgttactttgatagaancacccacgatttttctcaggcacc

SEQ ID NO: 412422 - DNA, 677 bp, Homo Sapiens
  misc_feature (429)..(429): n is a, c, g, or t
  misc_feature (464)..(464): n is a, c, g, or t
  misc_feature (470)..(470): n is a, c, g, or t
  misc_feature (509)..(509): n is a, c, g, or t
  misc_feature (523)..(523): n is a, c, g, or t
  misc_feature (548)..(548): n is a, c, g, or t
  misc_feature (562)..(563): n is a, c, g, or t
cagtgtcaccaaaaggctaaaagtcttaaactaatttattttcactggatatatttcatctgctgctataatcaaacatgatttaatgaactcaacatcaataaaatattttgccttgcttgcataacaaataagccacttggaaacttattctggttgtagtctcattttcactttttattattttaaagaaattgtgctgtgatgagatattctgttttaaattttctaatttttcttgtcattgcttttgtgtaagttgggatgtgatgagtgcttaatctattatattgtttggagtgtcaacatgtaataaacacaatgctttctcctctgctttgtttgttttgtgctgctataacagaatgctacagactgtgtaatttatgatgaacagaaatttatttggctcacacctctggaggctgngaagttaaatatcaaggggccaacatccagcaggngcattnttttgctgtgccatcccgtggtggaaggtgacagggcangagccagagagcangagaagcccctcacttttattacanacccactctcacanntactaaccactccctcaataactaacccactcctacgataaccacattaatctaattatgcagagccctcatgatctactaattacaatctaataggccccaccttccctgttg

SEQ ID NO: 412423 - DNA, 524 bp, Homo Sapiens
  misc_feature (480)..(480): n is a, c, g, or t
ccaccaccactccattccccagctgcccaccccaattccctaacagataattctccctaatgtttattgcctttctgcttatttattagccaggctatgtcaaaatgtatgctaaatcaatgttgtagcacagctcagctgtgaggattgatttcttttatttaaggtgaaacaagtttagtttggagcccagagcaaaattctaacgtgctgaaaacatgctgccttgcaagattcctgggaaggattcctaagaatcctcccaaaagctggagcccctctgggaaagcagccttcaaggcacatggttcccaaggtaccaccagcaaatccaaggaggacaagagagagggaaggttcagggctgagtccctcccatgtgcccagtaagagcaaaacagaaaccaccacctcagcaatgttggggagggtatgtgtgtcctcccttccacttcctagctcagattactaaatacaganactgaggcacagaagtgttgagctcacccaagccacatagctaa

SEQ ID NO: 412424 - DNA, 693 bp, Homo Sapiens
gttttaagacattggcttttgtaattatggaggctggcaagttcagaatctacaagatgcgccagcaggctggagactcaggaaagagccaagcatacagttcaggtccaaagaccatcagctgcaatgtccacctatttaaatgttaatctcatccaaaacaccctcacagaaatatccagaataatgtctgaccacatatttgaacagcatggtccagccaagctgagacataaaattaattatcatagtatatgttcaacttttgtaagtaacactattttccaaagtgactgtactaacatagagtcattatgggtggggatcttcaacttctcattaggatatggttgacactgataagcaccctattttattcctatagaatgagtacgcccccaaaactcgcacaggagtgggggttctgaaataaggccttgactcctgatgctcagtggctaatataattggcaagcctttctgtcatcaacaacaggcccgctttctactatactgacaggatgcggtgcctgtggctgaatgctggactttctgcctcattttccatcagcacatgatgtcacaggccacccgataggaccattcggaactcaagtctcggctttgactttaccacctgttaatagttataacctcaggtcctattggctctgcttcccatggtctgtcctc

SEQ ID NO: 412425 - DNA, 602 bp, Homo Sapiens
  misc_feature (471)..(471): n is a, c, g, or t
  misc_feature (483)..(483): n is a, c, g, or t
  misc_feature (577)..(577): n is a, c, g, or t
  misc_feature (591)..(591): n is a, c, g, or t
gcagatgtagatttgcatttccctgctttgttgaaattaggagtgaccatatgacttgctttggccaacgtaatgtagttataagtaacactggccattttcaggtggaagatttaagaactagctgtgtgatttgctaggtcctcctttcctctacaacaggaactagtagcgcttttcatggaggctgttccatcagcctgggtcctggagtgagaatgatacagattagagaaataaagctctgttggattaagctgctgacatttaggagttgattgttacagcagcatagccctgactcacaagcctggataagctgtatctttgagggtccgatgatttcatgatttctgattctgattccccagttgtgtggcagcattccagagctgtgctgagactctccaagaagttgcttactaaatttttccagccaccatgtggttaagtgtttttaccgcaatttanaattaacctcanaaagatcaaggtcacatgtcgccatcttgaaaggaccagagatgtgctttgagtgcacatatcttggttagaaagccacctatggcattgtacnctgccctcagcttnctttttcacaa

SEQ ID NO: 412426 - DNA, 411 bp, Homo Sapiens
agcacatagagaaagagaggaggagtgtcagctgcctgccatagctgatggcaagaaaacatcatttataccaggaattggaacagagttagtttctctgtattgagttacccatttttcaagccatatgttagtaagtgaaggattttcagcttttcagcctaagatcccaggttagagaacaatgattcccaagcacaatcgaaaactacacacaatacttacccttctcttaaaattcaatagttttagtccccactttatgtttcataatgaagtgaaacagaggcactatgcatgtcttaaaatgtatacaaacttgtatcaactttataaaatatattcctgtgtaataacatttcataaatcttgggtttttatctctatgtgtttgggacttacactggtgtt

SEQ ID NO: 412427 - DNA, 385 bp, Homo Sapiens
  misc_feature (71)..(327): n is a, c, g, or t
gctatacgaagaattacaatcaagcatatcttaagtactgaaaaacgaaattgtatgccgtacatggcgtnnnnnnnnnnnnnnnnnnnnnnnnnnnnnnnnnnnnnnnnnnnnnnnnnnnnnnnnnnnnnnnnnnnnnnnnnnnnnnnnnnnnnnnnnnnnnnnnnnnnnnnnnnnnnnnnnnnnnnnnnnnnnnnnnnnnnnnnnnnnnnnnnnnnnnnnnnnnnnnnnnnnnnnnnnnnnnnnnnnnnnnnnnnnnnnnnnnnnnnnnnnnnnnnnnnnnnnnnnnnnnnnnnnnnnnnnnnnnnnnnnnnnnnnnnnnnnnnngagctacttatatattttggtcattatacagtctgggcatgtacgatcaggcaagttg

SEQ ID NO: 412428 - DNA, 410 bp, Homo Sapiens
  misc_feature (275)..(275): n is a, c, g, or t
caccaggagaatgtaaggaacctaaaatagtgcttttcagacaataagcgttctgtaagccttggctatgttttaacattttgtaacagggaaataacatgtaaatcaggggaaaattgtacttttttccaaactttattaatctttatatatactatataaaatagacatacctacaatgatacaacagtcgcttttagtgtttaaatcaccaacagtaaacaaaggtacctttttgttatttggcaatctccgctgaatgaagagaatgcctnctctgccaccccagagatttatgaatgttgagtgtaatgacatatgagtgccaggatctaatgtttattgcacacatagtaaaaaggaaatgagtccaacgagatagactcagtctgaagagctagcggagacat

SEQ ID NO: 412429 - DNA, 164 bp, Homo Sapiens
cctgaaagcagagagctctgtagttgctcaggaactcgggaagagctaacatatttagagggtcttaaaggaaatagggctttttgactccttgaaggattaatttccttatgtagttttcacataaggtgttttctctaagaaagttcaatcaggagatacac

SEQ ID NO: 412430 - DNA, 389 bp, Homo Sapiens
  misc_feature (365)..(365): n is a, c, g, or t
gtccagactggtgtttcctaggttttcttcttggattcttatagtttgaggtcttatatttaaatatttaacttgtttcaagttgatttttatatatggtgaaaggaaggggttcagttttaatcatctgtatatggctagccagctgtcccagcaccatttattgaataggaagtcctttcctcattgcttatttgtgctaactttgtcaaagattagatggctgtaggtgtggctttatttctgggttctctgtcctgttttattggtttatatgtctgttttgtatgtccatttttatttctgttatgtagcctattagtatagtttgtcaggtagtataatgtctctgcctttgttctttntacttagttgctatggctattcgg

SEQ ID NO: 412431 - DNA, 269 bp, Homo Sapiens
aactattaaatgggcctcttggtctaaggcaatgctaggtatgatgccataaccatataccagatacttcatatacttttagatactgttgtttgctgagacactagagtcaggaaagtcaaagtcataccttgaataaacattaaatatattaatagtagggatggattgtgttttctctaggatataaggaacgtacaattaacttgttaccaagtagatgttgtatcacatcgacacagcattagtcttggctgctcattggtggg

SEQ ID NO: 412432 - DNA, 392 bp, Homo Sapiens
tacagattattttatcgcccaggtattaagcccagtacccattagttatttttcccaattctatctctcctctcaccctccaccatccaatggaccttagtatgtgttgttcccctctatgtatccatgtgttctcatcattatgctcccacttgagagaacatgcagtatttagttttctgttcctgtgttagtttcctgagataatgggctccatctccatccatgtccctgctcacatgatctttttcttttttatggctgcatagtatttcatgctgtgtatgtaccacattttctttatccagtctgtcattatgggcatttaggtttattccatgtctttgctattatgaatagtgctgcattgcatacacgtgcatgtgcctttt

SEQ ID NO: 412433 - DNA, 411 bp, Homo Sapiens
  misc_feature (238)..(308): n is a, c, g, or t
taatcattgaaataaataaggcagtacttgtttattacccataaatagagtaaggatctatgataaataaatgatctagaagtccttaatgtagaattctgactaatgaatgaacataaaggaaaaggtggaattagtaagttgccttttggcaattataacagttgatttaagtaagaaccataaatggatcttaaaactaagtgggtaaaaatggatgttaaaactagtatgtgannnnnnnnnnnnnnnnnnnnnnnnnnnnnnnnnnnnnnnnnnnnnnnnnnnnnnnnnnnnnnnnnnnnnnnggtaacaactttacagggggaaatctgacaccaacttgcccatgtgatggtcaacatctttgatgttactctacataataattgagcagagtttgtttctttg

SEQ ID NO: 412434 - DNA, 394 bp, Homo Sapiens
cagacaggtggcccaagcacaatggattcaatccataatggactcccaatccagtctaacaggtctgggcatctctgcccctaggggactgagcccttaataaacagatgtgtcttccagctcagaactgcagacatgtgcgtgctcatgtttatgtcagtagcctttgttctaaatccataccaatacccgtttagtatttctaacagattggttctttctgatgtgactgtctgaacaaatgaaaagcatttccctgtggcctacctgtcacacttttttccgtcctctaattgagaacactttcaaacctctccaactcctgtttgcctcgcagtaaggtgaagatttgatttcttccctattacttttcttttgagtcacgagttcttgg

SEQ ID NO: 412435 - DNA, 709 bp, Homo Sapiens
  misc_feature (467)..(467): n is a, c, g, or t
  misc_feature (480)..(480): n is a, c, g, or t
  misc_feature (482)..(482): n is a, c, g, or t
  misc_feature (495)..(495): n is a, c, g, or t
  misc_feature (511)..(511): n is a, c, g, or t
  misc_feature (569)..(569): n is a, c, g, or t
  misc_feature (576)..(576): n is a, c, g, or t
  misc_feature (686)..(686): n is a, c, g, or t
gtgatttatttattttgttgagggtttccaaagaaccaactctggtatttatttgtgatttggggtttttaattcattaacttctatctatcaatccctttgtcttgctttccttgtatttactttattcttctcttattaacttgaattgaaaacttgccttatctatttttcttctgttcttcataacattgaaaagcatttaaggtcatgaatttgcttcattataactttgacagttctcctagctcttgatatatagggttttcacgttcctgttttctcactattttgcaattgcagttttaaattcctctttgattcaaaagttacttagaaaacagttgcaatgtttttatgtttatgtttaattttcacatggatggagatttttggtttctctcttgttgttaatctccatttttgctgtactaggtcaaagcactgacctgtacaatttctattangggttactagaantntttttcttacttntgtgcctaatgaatgncatatttctgtaagtggtccatggggcactgagaagaactgggcttctcagccttaanggcacangttgatatgtcctataagtcatcttacttgatacatactcagaatcccaccgtctaatgacttctcaggccttaggaaggtatgtatgggtttcactcttactgcgtatnttcgttttcctattgtctggtgt

SEQ ID NO: 412436 - DNA, 406 bp, Homo Sapiens
gaaacagccaaaatggttctgagtcaaggtgattgtgatgattgtgacattagagagaatgaagatgacattttaacactgcagaaaaagtgcctataggtggcatggtgaaaatgtgtgatgggtttactgaaggactagagcagtgtgtattcataacagaacaataaatcatgtcagtttgtaaaatcaaagggagacttctaagttaaaaactgttgttaatgaggcagaggaactctggaggaaacatcttaaaaagccatttagcaaaatgcctcctgatacctagaggacccactttctggtccctcaacagcttctgctatttctcctcactccccaaaataaaataaagtgtacagtaaccttttaatcaacacagcattatggtggcgggctgctg

SEQ ID NO: 412437 - DNA, 456 bp, Homo Sapiens
gcagacttccagtttccacaattctcaggggttaagagtagatgagctaataattgaaggattattttataattttagagagaattaattgcaaagtagtttactcttcttaaagcactaagaattatatgatacaaatattagcttttaatttatttaagcgattaaatatatttccctgtgaattaatatgatattaaatctaatctaagatgtttataattatatgcagtgctttatccctaccttcatcatgaaggacgaattaacaagaagctaactttgttttcactaacttgaaatttcaggatgggcataaaaaatgaaatatatttgaactgaactaagtaattatgactaactgatgttatttgtcattatatgtgtgattgaccaataactactatcattgtgtttaagtacgagagccaattacagaatataattctaaaaagt

SEQ ID NO: 412438 - DNA, 695 bp, Homo Sapiens
gctttagaaactgtttgcagctactgctggttgtcgaagcgcactccggactccaaagtccaactttaaaggatcgtatgttttagcagctaccattcttaaaagctttctaagcaccccatggtgctaagtgccctatgtgatagcctcctttaatcctcccaataatactatgtggaaggttctattattaagccaggacttgaaccgtgtccactgagtctggagtccaagatcttaactacaaactctcagttacctttacagaatgaaagtctttgctaggcaagaaaaaagtcggccaatcattactggcaacaggcccctgttgaagcaataaattttccgaggccaacacttggcaaatgtcattcagactgtacttggttatcctgaagttctgagggactctctggaaagatgatcttaaaattaggataattctttaattgtggcatactgagcacaacatcaaaatgaagcctccaaagtccaaacacacactataccctacaggaaaaaatacttctagcaaatcagaggaaactgctgttggctaatcttaggccagaaatgaaaggggctgcacaagcaggcaaatggatgtctgggtgcaggttctggtctatcacatgctaatgtgggacccctggcatgggttaattttcctaagccctgttccctcttctgggagg

SEQ ID NO: 412439 - DNA, 692 bp, Homo Sapiens
  misc_feature (511)..(511): n is a, c, g, or t
  misc_feature (618)..(618): n is a, c, g, or t
agcccctttatatcatgaagtgagactatctctttggaaagggcttaagagaagggcttcccccgttctggtttccagaaatgggataaccccacggaagctctcatcctgaaggatgctttgcactcatttccaatcttcaggccatgttatctactggccctgaggcacaacgagactgcacacacagtccacgcttgccccaacagcccaggcttttctctgtggggagtcctaagccccacttgacttccatgtgcctgatgtgtgcacagagtggcatgcagaccaaagttctacgttcaaaggcatcccattctaccctctccatactcccaatgctgcaaactggtggctcacccagcacagcagcttttacatgggtttggtatgtcccacccagagatggcccatgctatgtttttttaaagtttgcatttgttgccaacatttagaactgtggtttttattctttaatctctaggttcatttcaacaatcaggcccaattnctacatgacagtgatgggcccgaggggaacagcaactgtttaggtggcttctgtcctctatctacggcccacagttccctgtgaaccctcctctctgacatcaaggntcaacttgcactgaccactgtgcttgcattactggggttctaccatggccgcttcctgtgtacctgcttgttgc

SEQ ID NO: 412440 - DNA, 677 bp, Homo Sapiens
  misc_feature (519)..(519): n is a, c, g, or t
cttgacagaaggttttgagcagattatttttatgcctgagacaggatcctaaatattttcaagactataaagaatccactaggatgctatatagcaattaaaatttcaaagacttcacaatggcagctataagagtaactaaaatcaaataataataaagtgttccatttactcagaaagaagcacaactggtgtaaacaatgttaacgactcaaagattgggatcaaaagttttgagtgcctttaatgtcatatccactattaagtgtccatttcgctctcaagtaaaccttgttagaaatcacaacctaggatggttttttgaattctaatggatatcaggattgagaaaagaggattttgaagttttgcttgttgttcctgtcttttaaacaggtaagggtttgtttgcttgtttgctgctttggtatctgggcagggggcagggtcaagagatagtcaataggtagtcagtaggagtcttggaaagcaatctacttttgctaaccgacaggacangacatggcaatgctctattttatagacagtttctgtggcaccgagttaatctgctgcctgcatgtttcaaagtgagacaccaagcagagcaatggattctctggacccagacacttttaactcacgctggggttgcatcctctggggcccttcttcgg

SEQ ID NO: 412441 - DNA, 689 bp, Homo Sapiens
  misc_feature (238)..(258): n is a, c, g, or t
  misc_feature (271)..(532): n is a, c, g, or t
  misc_feature (585)..(585): n is a, c, g, or t
gagcctttttcacttgaaagtgctcatatttagacctgtgacattactttcaaaggaggttttatatacaaattgtagtcacagagatcccccagcagaactggaagatcttcttcatataacttaatacttttatcttgtttctaggtcacatcctttatagtgtactagaatttaattatttctataaatcttgtaattatcttgtgaataacagaattatattccccccccaccnnnnnnnnnnnnnnnnnnnnnaatttaaatggannnnnnnnnnnnnnnnnnnnnnnnnnnnnnnnnnnnnnnnnnnnnnnnnnnnnnnnnnnnnnnnnnnnnnnnnnnnnnnnnnnnnnnnnnnnnnnnnnnnnnnnnnnnnnnnnnnnnnnnnnnnnnnnnnnnnnnnnnnnnnnnnnnnnnnnnnnnnnnnnnnnnnnnnnnnnnnnnnnnnnnnnnnnnnnnnnnnnnnnnnnnnnnnnnnnnnnnnnnnnnnnnnnnnnnnnnnnnnnnnnnnnnnnnnnnnnnnnnnnnnacagagtgcagtgggttctgccctgtattctaaatgccttcccaacgcctaantacatctaaggataccataactgtaacattctggtttgatttttttcttctggtagaagttatgcctggcctggtctcagctcctgggtttaagacctgattgg

SEQ ID NO: 412442 - DNA, 446 bp, Homo Sapiens
atttcattctacctttcaacatgctactcacttggggataggagaattctgtcattttgttgataagtgagtgtttcaaaatgactgtctactcataagttaattgtgagcatatggagagatgacattcattgaagctagtgtgtgtgtatctctctaaatccttattcttaaaatgaagggtcccctgcaaagattattggaagaaagtcagatgacatagtttctaaaaactttatataacatggctatgtaattaaattaatttccactaaattatgctagctcagacatttgacttataattgtgcaattgttggaaagccaaattacatcaggttgcacagacagcaagttattaaataagacattagcagatatcagatgttattatctgtttcttatgttctgttttgtagaagttgcatcgtttttgtatcactggg

SEQ ID NO: 412443 - DNA, 674 bp, Homo Sapiens
  misc_feature (546)..(546): n is a, c, g, or t
  misc_feature (608)..(608): n is a, c, g, or t
  misc_feature (620)..(620): n is a, c, g, or t
gagggctgtgcttcaccatggtgtctgaacaggatgggtgggctggctcaggctgttgattcaggtgagtggatgctccaaatgcctggatatctgccagagggtggagcagagagggcctgggcttcaccacagtctccacacaggaatggttgggtggcttggtatgctgatctgggtgaatggtagctgcaactgctaggagatctgcctgggcatgaagcagagagggccctgctgtaccatgatctctgcacaggcagggtggggtatcttaggttgctagtcaatgtcaccaggtgtttcaaatacctggatttctgcctgggagtggagtggagagggacccactgcaccatgatcccagagaaggaggttgggccacccagaaatgatacacataaacctgttctatgtctccaagctggtcctggctgcaagtctcctcatccaggagaaactggatgagcagctttccttcagctccaggcctgtgacaggggagaagcacaatccagtgcctactgatgaggcactttctataantctggctgtagagacctctacaccacttcagagcaagcgcttcaatctctggcccaagacantgcctgtgcagncacgggtgccagattgcccaagaatggctgactttgtatgcactcgggttcgct

SEQ ID NO: 412444 - DNA, 659 bp, Homo Sapiens
  misc_feature (362)..(422): n is a, c, g, or t
caagagcactgagaccccagccaacagaactatctaattcagtattattaagatctgaaggatcagtggcaaagcattggctattttctgcaccttgactatgcaaaaattaaaatttggccaggattgttgttcgtagcaggagtcatgaatggttttgtggtgttttatgacatcttaagggccacattgaaccttgttcttatattatgatctgctaagcaattcaccaaccatacttctccacctcagtcctgactttagcctccttaggagaatattggagacatgattggtagtaatggcccatttcttgacatttttgaccagctatagagcccatgccagatacacatatatannnnnnnnnnnnnnnnnnnnnnnnnnnnnnnnnnnnnnnnnnnnnnnnnnnnnnnnnnnnntgacttgcttaaagatgttacagggaagattgtgtttaagaacagttagagggaaatgtctttttgagtttgtttcctaaaccctaagccattcagctgaccttattatgtctctttacctcatagtgtaaaagtctgtgtgtgcataatgggggagagaggccggaggagaagatgaagggattaatatccatgagccttttagtggacctggcttttactagagactgagcctcc

SEQ ID NO: 412445 - DNA, 653 bp, Homo Sapiens
  misc_feature (515)..(515): n is a, c, g, or t
  misc_feature (546)..(547): n is a, c, g, or t
  misc_feature (620)..(620): n is a, c, g, or t
gagacactttcaggagtgcataatggaaggcttatgtagaactaggaccaagcctctcaattacactaagttgtccatgattgaccagagatttgatggaaaccccactgccttcctggagaagataagagaggccctggtaaagcatacctctctctctcctgattcagtcgagggacaactaatcctaaaggataaatttattacccaggcagctcctgacatcaagaggaagctacaaaaacaggccctggaaccagacagtagtttagagaacctccttaaactagccacctcagtcttttataatagagacagggaggcccaggaatgagagaggaaatacagtaaagagacagaagctttaaaggccaccaagcaagctcacaaaccccagaattctcagtgtgcacctgttaactgctaaagatatggcaagaacagttatttcattctaaaagtttatccactcccatgcaagggttaatgtgtttcacctgggtgaaacagcgcanggttcaatgttgttagtataatttactgctnngctctgtaatctttggcactaaattctttttttgatcatacacatatttagcccatacatacttaaccctatnctggttttttctcttacgcctagaagccatctt

SEQ ID NO: 412446 - DNA, 606 bp, Homo Sapiens
  misc_feature (310)..(403): n is a, c, g, or t
gaagacaggtgtggcctgtgggtgcttgatacatggtggtggctttgttactgaataacagggaggtatgattgcaaaggtcactgttgccttcaaactctacattttggtttgaattccttctgaaacttgcttcttgcacatctctgctcctgtagtccatccacaaagggccatctgaggaaacttgctctgcaccacgctcccccatggtgccaggaacacagcagtgcacaagacagacatgagtctgctgggaaagaaacattaggcaaatacagtcatccctgggaatctgtaggaaattgcnnnnnnnnnnnnnnnnnnnnnnnnnnnnnnnnnnnnnnnnnnnnnnnnnnnnnnnnnnnnnnnnnnnnnnnnnnnnnnnnnnnnnnnnnnnnnncgggcagattaaatcctgagatactatattctctatctgtgtttgggtgtggatacataaaccacggactgtattttttggattcaaatgggaatcgaccctattaagactgcatctgggatttgattaaccttctgctattagtcaacctgtactgttccctgatggtatgtcaagccgcattttggggttcccttgccccg

SEQ ID NO: 412447 - DNA, 636 bp, Homo Sapiens
  misc_feature (607)..(607): n is a, c, g, or t
  misc_feature (621)..(621): n is a, c, g, or t
ggcagtctgggtagcctcaggaacctgtgtgctgtataccttcaattgttcaactatctcctcaaattcaagccaaccattatttctttttgctgtcactatgtgttttgaactatttccaggcttagcattttgttttagagtctagaagctgaagctgctgaaactgtcagaaatttgacttccttttgaataagggcattaaatattcctacactcctaatatcattctctataccaaaccaaattccctgggttctcaacccaaggttgggttctgtgctctcatcatgccctatgagtccagccacatagagatgatttgcaactttaatcttttttccttctaagctagtctctcttcatttttaattcaagaagctgcctttctcatagaaaaacatacgcttcattaaattttcaaatttcaagatgctcacatgatataattcaatccaaatagctagcacaactaaaccttataaaaataagtcatagcaatttaggggttttaggtagaatgaggatgccaagtgtttgcacattatttttatcttacaatattcttcttgaattaagaggtcctggccaattccttgtgactcangtgatgtatgctgngtgtccacatactta

SEQ ID NO: 412448 - DNA, 412 bp, Homo Sapiens
gtcagttgtgtatcctgagagaaagtataaacttaagacgatttctttgtgagacagaggtctcactatggagctcaggctgacctcgaactcctggcctcaagctaacctctcgcctcagccactgcgtctagctgatatatttggttattcattgcacatatattgattgaccatgaaggatgtaccatgcacaattctaggctcttgggataaggccgtaaatgaggctgccccttgatgaggggtccctgctatcactgagcttacattccagcagggaggctgatgatgagaaaggaaaccacgtgattgccaagacctgtacattgcgccagggcagggaacatgttgcatttgtaccttgatgctatcctgcatgagacagggcctaagtcaggcacttgtgcct

SEQ ID NO: 412449 - DNA, 389 bp, Homo Sapiens
  misc_feature (189)..(198): n is a, c, g, or t
gtttagtaaaccacggatttctagccaagctggctctttttgataccactgtctttggatgtttttatgccacaatgacagaattgagaggttgtgacagagacagtgtggcatgcagagtttaaaatgtttactacttggccccttacggaaagtgtaccaacccctgctctagaatgagctgtggannnnnnnnnnaaatctagttaaaaggcaggcataaaactgggaaagttttacaaatcaaagcacttcttttgtagtggcagggggattttaaggcatgaaaaatggagtcatctttctggttctaggaggtgtttttcatgacatgctttttttcctttgattcaagtattttcagatgaatcagttagtctagcagccgt

SEQ ID NO: 412450 - DNA, 415 bp, Homo Sapiens
  misc_feature (136)..(256): n is a, c, g, or t
gcatattctgcgtgctaggcactgttatgagtgctggaaatgcagcagcaaacccgataaattccccatcctcaagaagtttaccttctagttgagaagtcaaatagtaaatcagtaactaaatatatatgtgtgnnnnnnnnnnnnnnnnnnnnnnnnnnnnnnnnnnnnnnnnnnnnnnnnnnnnnnnnnnnnnnnnnnnnnnnnnnnnnnnnnnnnnnnnnnnnnnnnnnnnnnnnnnnnnnnnnnnnnnnnntttaattactaggtcatacatttaacttaataatgtcataacttattgcaacttgatgtatcttaggtcatacatctaatttaattaaattgttattaaattaaattgttaagtgaaagttaactgagtttatttccattcatctgctggtttgttgcg

SEQ ID NO: 412451 - DNA, 415 bp, Homo Sapiens
gaatgctcctgtctagtttttatgtgaagacatacccgtttccagcgaaggcctcaaagctgtccgaatatccacttgcaaattctacaaaaagagtgtttccaatctgctctatcaaaagaaaatttcaactctgtgagctgaatgcacacatcacaaataagtttctgagaatgcttctgtctagttttatgtgaagatattcccgtttccaacgaaatcctcaatgctgccctaatatccacttgtaaattcaacaagaagagtgtttcctgctgtatcaaaggaaagttttaactgtgagttgagtacacccatcacgtagtttgtgagaatgcttctgtctactttttattattattattattctttgttttagggttcatgtgcacattgtgcaggttagttacattgt

SEQ ID NO: 412452 - DNA, 609 bp, Homo Sapiens
  misc_feature (150)..(484): n is a, c, g, or t
  misc_feature (518)..(519): n is a, c, g, or t
  misc_feature (548)..(548): n is a, c, g, or t
  misc_feature (550)..(550): n is a, c, g, or t
  misc_feature (563)..(563): n is a, c, g, or t
  misc_feature (598)..(598): n is a, c, g, or t
tttatgagtttggaagttaactattttgttacaagtcagctgataagctttcctgctacttaagcctatgcgagttatagtatagccatttctgattattcattgtttttatgtttgtcatgtttttgagacagagtcttgctctgtctnnnnnnnnnnnnnnnnnnnnnnnnnnnnnnnnnnnnnnnnnnnnnnnnnnnnnnnnnnnnnnnnnnnnnnnnnnnnnnnnnnnnnnnnnnnnnnnnnnnnnnnnnnnnnnnnnnnnnnnnnnnnnnnnnnnnnnnnnnnnnnnnnnnnnnnnnnnnnnnnnnnnnnnnnnnnnnnnnnnnnnnnnnnnnnnnnnnnnnnnnnnnnnnnnnnnnnnnnnnnnnnnnnnnnnnnnnnnnnnnnnnnnnnnnnnnnnnnnnnnnnnnnnnnnnnnnnnnnnnnnnnnnnnnnnnnnnnnnnnnnnnnnnnnnnnnnnnnnnnnnnnnnnnnnnnnnnntgctggcttcaagtgattctcatgcctcagcctnncaagtaagctggatatacaggtgcgcacnancacacccagcttntttgattagtagagccggggtttcacccatgtggncagctggtctg

SEQ ID NO: 412453 - DNA, 687 bp, Homo Sapiens
  misc_feature (218)..(368): n is a, c, g, or t
  misc_feature (642)..(642): n is a, c, g, or t
tagatgttctgacctttaccttctttccttgcttagttactcccattactaaggcttccagtccttttagcctttgtttctatgtcacattaaattaatgaaactagataactttggatctccttaagccatctgaaactagataaaccaatgaaactagataactttggatctccttaagtgaatgccatgagtgcatgatgaccaaacactagaannnnnnnnnnnnnnnnnnnnnnnnnnnnnnnnnnnnnnnnnnnnnnnnnnnnnnnnnnnnnnnnnnnnnnnnnnnnnnnnnnnnnnnnnnnnnnnnnnnnnnnnnnnnnnnnnnnnnnnnnnnnnnnnnnnnnnnnnnnnnnnnnnnnnnntaacatactgtatatgaacatatgtaagtgcctaggataagtgaggagctagatggttgttaagtactaactgcagtaccaggaatttcataggaagctataacagctacatatgtgtgccttcataagccagaaacacttattcagtgaattgtcaactacttattcatgtcctctgaacataggactctgctaagctcagctcaggatttgaagctgaaccttgaagtttcattaagtagggattagttaagtggagaaggactgatcgacngttgtcagtatggcaggtggcctctagctacgtgtggctactcgc

SEQ ID NO: 412454 - DNA, 719 bp, Homo Sapiens
  misc_feature (511)..(511): n is a, c, g, or t
  misc_feature (552)..(552): n is a, c, g, or t
  misc_feature (574)..(574): n is a, c, g, or t
  misc_feature (589)..(589): n is a, c, g, or t
  misc_feature (613)..(613): n is a, c, g, or t
  misc_feature (624)..(624): n is a, c, g, or t
  misc_feature (699)..(699): n is a, c, g, or t
gaatgctggaccagcgatacgtaacgatagtgttcagactcaccacctaccccgtcacccgaaacaagcgcatgaatgtcttcatcatttcagctttgcgatctgccagatctttgaagcgctggaatacatcattgagggcctgctcgctctccatttcaatgccgagagcctctaatcgttgcttgaaggcgtttcgacccgatagcttgcccagcacaattttgtttgctgaccaacccacgtcttcggcagtcatgatttcgtaggtctggcgagccttgagcacaccgtcctggtgaataccagacgcatgggcaaaggcattggcacccacaattgctttgttgggctgcaccacgaaaccggtaatattgctgaccaggcggctggcggacacgatctgggtggtgtcgatgcccacatccagatcgaagaaatcccgacgggttttgacggccatcacaatctcttcaagcgagcagttgccagcgcgttcgcccaatccgtngattgtgcactcgacctgacgttgctcaccaatggcaacanctgccagtgagttggccaccgncatgcccaagtcgtngtggcagtgaaccgaccacactgncttgtcgctgntgggcgtcaatgtgcgctcacgcatgaatttcgcgtacagcgagggcacagcatagccctacggtgtccggtgtngattgttttgcacctgcttg

SEQ ID NO: 412455 - DNA, 413 bp, Homo Sapiens
ctgaatatgaagaagacagttcaacatctagtagttgtttttcactctagattatacaacttcctaatttttgcaatctcattgcctacttaaaataggtacagtgaaaggaggactaagtgactaggaagaagacaattcaaatgcagaactgaatagagtttcacaacttggaatataaaaagtgctgcaccactgaggccataagacccaaatgagcacatgctattagacattctataaatttgtccaccatactcatctggctttttaatagaagtcagatcttgcctccacaatcctctgctacaggttactaaggatatacatctgggagctaccaaatgctgcttctcctttcaatacaattgatttgatgttaggctctagtggcagcaatcatcactaatagt

SEQ ID NO: 412456 - DNA, 261 bp, Homo Sapiens
  misc_feature (157)..(193): n is a, c, g, or t
ctggcatcaagactttgcctactcatattttttattatttaaaatagtctataggatccaaagatgccatgtctttttatctaggttcttctagtcagtatttctggacataaggccgttattacctttctacgagttttgtctctgacacgcacgnnnnnnnnnnnnnnnnnnnnnnnnnnnnnnnnnnnnnccctaatctatttatttaatggaattgtaaataaaggagaaaaagcacatgtgcaatttctggtttaa

SEQ ID NO: 412457 - DNA, 198 bp, Homo Sapiens
  misc_feature (96)..(96): n is a, c, g, or t
  misc_feature (100)..(100): n is a, c, g, or t
  misc_feature (103)..(103): n is a, c, g, or t
  misc_feature (124)..(124): n is a, c, g, or t
  misc_feature (131)..(131): n is a, c, g, or t
  misc_feature (137)..(137): n is a, c, g, or t
  misc_feature (139)..(139): n is a, c, g, or t
  misc_feature (146)..(146): n is a, c, g, or t
  misc_feature (165)..(165): n is a, c, g, or t
aacattcacctaataaagtttttggggtcaaagtgcctaaaagcctaaaatcgaaccctaaagggagccccaattaagaacttgacggggaaagcnggcnaancgttgccagaaatgaaggaanggccaangggacngnctcctanggccccttgcaagtttatngtcaaccctttgccgtaacccccggccgggctt

SEQ ID NO: 412458 - DNA, 379 bp, Homo Sapiens
gaagctattataacgccatagctttggcagctgtctaaagccagacacaatctctactccctctctctttcagctgaaattttccaaatatataaagacagttgtgtaagcttcctgaaatagagtacctgatcaataaatgttgtttcctttattcccctagtgttctcttgtccaagtaaaaattccgcattgcaggtcatcttcttccagatgccctctaccaggtgtataaatgcctctgcaaacaaactccccacactgaagagagtttcacagatgtgacgaaatgtgcaataaatacacaagaaccataatccagcttgacctagaaacagtagtttcctaatttggtggatccctttttttctattcgctt

SEQ ID NO: 412459 - DNA, 417 bp, Homo Sapiens
  misc_feature (149)..(191): n is a, c, g, or t
  misc_feature (289)..(349): n is a, c, g, or t
aaagaatgagtctgagtttgtaatcctgggaaattaagtgaatgttagtgctttcaacttactgagaaacagaaagctgtaaagtcttgatggaattgtccaaaaagtatctggaaatatgaatctggggtgcagacagtttggagtcnnnnnnnnnnnnnnnnnnnnnnnnnnnnnnnnnnnnnnnnnnnctgataaatacttgtatacctattcatccattctccctttattctttccagtcttctttctttagtttctaataaatcaaatggcataacttgttgcnnnnnnnnnnnnnnnnnnnnnnnnnnnnnnnnnnnnnnnnnnnnnnnnnnnnnnnnnnnnncttttgaatttaattcttttccttacacactctgcttgcatttcttcctgaagcttttcatccaggtc

SEQ ID NO: 412460 - DNA, 695 bp, Homo Sapiens
  misc_feature (259)..(356): n is a, c, g, or t
  misc_feature (676)..(676): n is a, c, g, or t
ccatccttcatctttagcttgggtacaacactgggcatctgaagctctctctctcttttaatttaattgtaatgacactttctatcagatgttatttactctaacctacaaatgcaatatgtagtgagcaacagttcatctgggcaattatatccatattcacttatgctaaatagttgaccagggagagggtaaacagcatgatgattaagcaagcaagtgatggcttctacccgcctgggttcatgttttcactctnnnnnnnnnnnnnnnnnnnnnnnnnnnnnnnnnnnnnnnnnnnnnnnnnnnnnnnnnnnnnnnnnnnnnnnnnnnnnnnnnnnnnnnnnnnnnnnnnngcaccatgcactgctacatgcaatctacatacagcaatttatgtaatgctcactaccatgcttgaggtaggtatccgtataacatcccattctacagatgagtaaaggtgctttgagaagttacataactatcctaattcacagctagacaatggaagtctgttgtctcaagccatgctctgagctacactttatgttgtagccctacctgagagatatcggtgataactgggaagacacaagatgattaacgaggtatgcatatggtgcataaacgttgtgctaagcttataacatactaaagattggtactgtgcagntttctgtactgacctgttt

SEQ ID NO: 412461 - DNA, 626 bp, Homo Sapiens
  misc_feature (97)..(114): n is a, c, g, or t
  misc_feature (161)..(173): n is a, c, g, or t
  misc_feature (471)..(471): n is a, c, g, or t
  misc_feature (500)..(500): n is a, c, g, or t
  misc_feature (522)..(522): n is a, c, g, or t
  misc_feature (584)..(584): n is a, c, g, or t
ccaaaaccttggcctaatctgcctgggggccagactcagacagccaagccaggcttcttagaaattgtagctctcttccttttaccctcttgagagnnnnnnnnnnnnnnnnnntctgcagattctttaaggcagtttagctcaagtatccaacaactggnnnnnnnnnnnnnaatgaagtcaacaaagtagactaagaggaagtaggataggaacaaaacaagggaaaataattttagaatattatggaagatagaagtaaaaaggacatcccaaatctatcagcttggtgtaagaatttggttaatgaaaggttaatgtggcatttacctttgagagtttggaagttcaaacccaacccaaagacctttctatgtgaagtaaatctgatggctacaaaataaatattaacagatttctcctcaaactgcttatttgtcactaactgacttctttatattatgttaccanaagagaaaggtgagaggtttggggtaagnggatgctaccatcttcacaatngaagctacatgcatcaatatgtagcaggctttgactatcatggtctaattttgcttggcttncacgaagctcagagctgagcatgctcaggtattatttattct

SEQ ID NO: 412462 - DNA, 695 bp, Homo Sapiens
gagatttttataccattatttatggctttgctttcctttcaaggtaagtcttattttcttgttttcattcttacatttataagactctcctgcctccagttgtgagcagctttataccagtcatggttttcccttaagaaacctgccagccatttcacatgaaagatttttgcttgaaaagtgcatatataaattatttttattattactctaaaaaggtgacaaatgttaactgatatgtacagctaaggcggtgtggagatggagatgaacaatgcacttaatgacattgcaaaatcatgatgttaaaaacattttgctatttcaaaaatttctttttaaagagaaactagcaaacctttcagacagcactagcacataccgtactattttaaattatgtattatttcctaagaaatttaaaaagaagcttgagatccataaatgccagcactgacttacttatacggacacgtttgcgaaaatgctgctgtctaacgagttatcttggcttcacttaccaaatttaagtggacacttttacccagcccccattattatctctattgcgatcttaatcaactcaggccctaagacttatttaaaggtgtcggctgggctgactagcccactgtatgcatcctgttaacttctctactgcacgccggcatactttcctcagttctcggccgccc

SEQ ID NO: 412463 - DNA, 493 bp, Homo Sapiens
ctgcctgtcatgcccacctagcctcacccagccccacaggccatggtacacgtggctctgtgatttgggacacccttgcatttgtattaaatgagccacagtcacctgctggcaaaggacaatatcaccatgctaagatcaacagggggactggtggaagaactgtggggcaggagaatctcaatggcattgtctgggtgcccagctttgacttgtccttgacacagttaactgcatgtgtctctactctgcttgtaaaataaaaagtgaccactgtattctgtaaaggcaaggacacaagtctttctacctgatgccatgaatatgcctggatatattgacatatgatatggatatatgtccacaaagatgtatacatgtgatatatacatgatcatttaaaaagtcgtgatacacgcgaccaacaagtttgtcgtcatgggtatgttggtatgaggtggaaggatggaacattctaggacagggggttgtt

SEQ ID NO: 412464 - DNA, 466 bp, Homo Sapiens
gaaggtttaggggatccccaggctggaaggagcctggtttctaaataggacaccgatgccgaccatctttttcaagttaaactttggaaagttccatttgccatgcaaactacccttgccctggatgggttgccccaagagtgacccaggaaagtttaggtggtaaagttgcaaaatcaagtggcttcagggcccaggcagagatttcactttcagtgccctgggatgaaatctctggatatccacgaggctgacctggacttcccggattgggaggccttgtggtcgccgagtccagtcctgaacaccagatctaaatgttcaagaagactgtgcagatttacaggcttcagagtccctggtagctgtttccgacctctgtatggggcttttagagtgctgtggtctcatacaggcgtttcccgaccattgcatcccacacagggcctcccttttgattttcgcg

SEQ ID NO: 412465 - DNA, 407 bp, Homo Sapiens
aaaacttgtttgtggaggtctggggagtttcttcagacccctgataaaacttgtttaatcctaaacaggtcctgttaagaattccttcattatcttgtcatgcttcaaggcccaggaaaagcctagacaaactcttggtgggcttttgttacatataagcttttgtgggcactggccctttcagcctttaacatttaacttacccactcagtcagggctgaaagttgtcttagaggcctgcctgttcagctgttagggagacctggcctgccacaggacctccatcatgggctaggcttttgccaggccccccgaagccaccagcagagggcccagcactcagcgaatccaggccagacctgctgagccctctgctgccttcctggagtctgtttctgactgcaggt

SEQ ID NO: 412466 - DNA, 395 bp, Homo Sapiens
caggcaccccctttaggctagctgggtttctctggcttagccccatcactgtttctggccctgtaggaatcttcttcactggcttacattgctgtttgtcaggaactgaccccatttcagcagagtggatcgtattattggagtcaaagctgtatgcaaagccatgacatctctgctctattatgaagttattcattactatttcacattcatctctgtcaaccgctctacagtcactttcagaagccatgcctctagcattttcaagcagcaagctggccaggactattaacctcattctgtagatatttaaatgcccaaatttggttttgatcttcatgtggtcttttttgggtcaagcagccgctctccaatttcattttttgtcagagggg

SEQ ID NO: 412467 - DNA, 379 bp, Homo Sapiens
cgacatagagaaataatccctctctgggatgtataggaaatagtctagaagaaaaacacaataggaagaataacatggggcaagttaaaataatgataatacccaccattacaacatgatctaacaggaaaagtatggacgttgaagtcactcatatgtagattcaaacctcaagtctgccatttacttatctacagattcacatggcatgatggttatgattggtgagacagatattttcaaaatgttactcctttcaaccccagttgattattatacaaatactatgatatccattagtttcttttattaaccacaacaaactaggacaaaaatgtaccctatgtagtttagagtattaccgaataaaactaataat

SEQ ID NO: 412468 - DNA, 413 bp, Homo Sapiens
ggttaatggaaatttccttaaagtacagtcctgctgtttgagaaactgattttacccttattctgtctcacataattcttctgtgaattttaaatttaaccagttaaaaatctccatattttgggtatgtttagatgatacaatctttggttgaaattagttggattgaattccataatattctccttgcctttgtattttctttattgctttttaataagattctagtaactactatgtaatgatattctttatactcattttaaatactttataccatgattaccttactgtcagatttttattaaaggcatacctacattggctattttgttacaagactgactctgttttagtttacagttcgctgtatgctcctttttcctggactagcaatgtgcttaatgttcgtc

SEQ ID NO: 412469 - DNA, 395 bp, Homo Sapiens
  misc_feature (307)..(322): n is a, c, g, or t
aaaatacctgctctacagactttattggattattataaacacaaaaggggtacatgaaggttaagtgaagacgcaataaggcttgttggccctggagcccaattctatgggtttgtatcaagtcaccaaccatcttcctttttgtttcttttttaatgagacagtgtcttgctctgtcactcaggctggagtgcagtagtacagtcacagctcattgtagccttgaactctggggctcaagtggtcctcccacctcagcctcctgagtagctgggactataggcatatatcaccgtgtctggctaannnnnnnnnnnnnnnngtagagatggagttttgctatgttgccaaagctcgtctcaaactccttcgtgatcctcccccttggccttgcg

SEQ ID NO: 412470 - DNA, 238 bp, Homo Sapiens
aagcgtcagtaaatctgacattctctttagggtgtaaatttttaataatgagcattgcaaatggaattctacacatttgcttagatgtcatggaatagctgaagagagcttgggcttttaataggcagacttgctcccaagagggtgaagagtaagacaaaagatgtttgtgcctagttgtttccctgtgcttacaaatcaaatgaatcattctatttccttaggggcaaattaaatg

SEQ ID NO: 412471 - DNA, 398 bp, Homo Sapiens
agagatgtcatcttattgttctgataccgtgccacgtttgtacatgcctcttcaatgttggtggcctgaagtaaatagacattttaggtccagaatagaattgaactttcacctatcttattttagcatctataattctactaatacagcttgtgtctatgcgtgtcagccatattcactgttgactcattttgaatttatagtcaaactaaaactcctgagttatgttcttattaactgttataaagctaagtttctgtaacttatgctatttcagtatgtttttgaccttaaatataagccttgtctgcattaaatgttttatcttttgtttcttgtttatctaaattatcaagacaatgattttatgttttattccttcaatatagttcttcacg

SEQ ID NO: 412472 - DNA, 413 bp, Homo Sapiens
aagcaaactaaaggactccatacttctatatttgagtccttgtggatgaactgtaacctagcttaacagtcaggcaaaattgcctaatttaggaccatttgccggtaacaataactgagtcttggctaattccagaggccatacttcaaccactcagactgctaactgttggaactgtgttcaaagaaggcaaacgccaacctgtaaccaatccagctgtttctgtacctcgctgccaatttctgtacatcgttttcctttctttgtatataactcttccaccacgtggctgcgctggagcctctgtgaatctgctgtgattctgggggcggcccaactggcgaattcttaattgctcaattaaactccttttataatttggttgaagtttttcttttatctatacacatatc

SEQ ID NO: 412473 - DNA, 419 bp, Homo Sapiens
gtgaacaatcagcgatgtctgctgaaatgaaatgatttgaagagtataatgtaaagaggaaactcatttaaggagccctgtcatggtacggtttcccagatggactcaaagcgaaagagcgaggagcagaacagtgagtttcgtgggctgcactgtgttgggggaggaggcgacgtctgcaatcgggctacacatgttcatcaagacaggggagcagcttcgcccactgggagcagaatcagggacttggtcagagggagacgttttgctctactcccttttgtgctgtttgaatttatcttctgcatattttcctttcatgtaattataacactggatagatgagaagctgcaggcacttctgctatcggctgccccagctggcctttggtaccacaggtcacgcccccttaccctcg

SEQ ID NO: 412474 - DNA, 389 bp, Homo Sapiens
gtttcaaattcagcctatgggtggagagtggtagcaaagatcaatttccttgatatctaaaagcttaaacataacagcagttgcaattatttaaacaatattctgttaaaaaatgcttttcttcttattaaaataactttaatacaactaattccatcacaataataattctaatattaaatttggcattgtattaataacagatagatggaaaatatagaaaaagccaaagtagaaaattagaatgacctattttgtaattctaagagattttataattttgattgcatttttcctattattttatgttcatgtatatttcactgagatcacagtgtgcatattgttttatactagcacactcccttttttttatatttctccctgtc

SEQ ID NO: 412475 - DNA, 333 bp, Homo Sapiens
ctgaggccagcttcactggacagatgcacagtattgtcatttatcatactgttagttcccaggattattttctagtagatttctaaatggatccaaattatcaaatgttctgtgcccttgtggaatttttagaggaagccaagtagaaattttaataataggaaattgataatatggggtagggcagtttcccttgttttgcctttttctagaaactgggcctggggacagtctgcctgaaggaataatgtcttaaacttgtcttctttggaacgtttgtttctccctgcagcgcaggatcattaggaggcatactactgctttcgcgtcctg

SEQ ID NO: 412476 - DNA, 678 bp, Homo Sapiens
  misc_feature (469)..(469): n is a, c, g, or t
  misc_feature (516)..(516): n is a, c, g, or t
  misc_feature (589)..(589): n is a, c, g, or t
  misc_feature (609)..(609): n is a, c, g, or t
  misc_feature (644)..(645): n is a, c, g, or t
cttatctgttgtgtgcaccatctttgctgggcacagttagacagccggcttgctacccgaatcaacatgagctaaggagctaggattcactggcttcccattccagctccagttcccattgccctccttacccttccaagtccttaccctccagctgtgccaaatcccctgccttggattcttcatgtccttcaataagtccagacacttgcaccagcagccccttcaacctggagtgtcctcctcatcccttcacttcttctgcagcccattcccagcgttctctgctcattttaaatgacccattttgagcatcacctcccacaagaaggcctctctaatcccttagcatcactatccgcttttgatgtcacagagtcccccaaatgcactgctgtgacagcatgtatcacactgggtcatcagagttaacacacaagcccatttcccccaggtagaccctgcactnttccagggcaggacagtaaatttaccacacaacctcttacatctaanagaaacgttgttactcattggtgaatggagaatgaatgacaactttcagtacttagatctacagagagaatanaagattttccctctggtggngagatcttttgggacgggagaccttccacagccgnngtgggatgaaggatctcctacttcgtcgagccg

SEQ ID NO: 412477 - DNA, 411 bp, Homo Sapiens
gtcaagcacgtgagccaacattgtttgagggtctactatatgccgagcatggtatacattttttcttatttaacctgacaacaacattctttcccctgttttacacaggaaagttgtttaatcttcctgggcctcagttcctcaaagacgcttgcatgatcattggaggagccagaaatgaaatgaagctttacctagcctagaaatatgttcaagttaatatttgctaaggatttgtcatgacacagagaagtacagtttctggtgaatttgagttctgtcctcaggactctgcccagagccacctttgtgaggtcctataattagaagggctgtcagagggtctctactctaacttccactcagatagccatttcctctacctctgcctggagacacccagttgggtgc

SEQ ID NO: 412478 - DNA, 442 bp, Homo Sapiens
ggaaacctactttgaagttatccccactattattatgggggttaaggagctagtagatttcaaacccgtagagcagggcgtggccatagtaaagatttcaataatatcaacctgtatttagtatttctatgtgacagatgatgttctagtaccactattctaccaaaggccaagcatatgttcttcacagagcccacatctgtattttgtggtgatttattggaatcctatatgagagtgtgctttactgagaatgattatgctgggtttctgaaatcaaggtttagatgtaagaatatttggtgggaaaattatgaataacagggagcttcaaacttctaaaaataagtttttaaacggtgaaagctaacaagaagctgcatgtctttgcctgaaataattgccctgggatggtgagagagtcatgttattctcggctgct

SEQ ID NO: 412479 - DNA, 448 bp, Homo Sapiens
acccactcacttaccatataactttgagagaatcttaggttaattttccactgattgcttttttcttgagtataggccaagtttttctgtctctttgtatgtctattaatttattattgttttgcatgaaggggatgtatttcagatattttagtttctgtaattttttcctaaggagagccgataactgtgtgtagtaggcagtttaattattggctaatttcactgatttcctttaaattgtttaatcttaattttatatgttttggtttggttctgtgggaaaccctaaaccatttttgcttggcagaactcaacctccctttatctactctgtgctccttattggtgtttggtttcaagctttgggggtaggtatagagtagcccttgttttcagtcatggtccttactcctgatgcagcctctttgatgtcttctttggattc

SEQ ID NO: 412480 - DNA, 436 bp, Homo Sapiens
ctgaagatggcaatgagcaaagaaagaacgaacttgggtccttcaagattactttgagacactgaataaaccaagtctggagctacccattgctggggatttttattacgtgaggtcataaaatccccattgtttgggttttttactcctcacaactaaaagcatcccagcccagagtgtcacttatccacgcccttcaccatgtttggcggggagaaaatatccctgccaaagggagataccatataaactcttcttcacctatggcccaaatcaggccctctgcttatttttgtaaatagtgttttattggaacacagccacactcattcacttacatattgcctatggttgcttttgcttgagcagttgcaagagagatagtgcagcctgcaaataggatattcattatctggccctttacgtgtttgcctcc

SEQ ID NO: 412481 - DNA, 358 bp, Homo Sapiens
  misc_feature (116)..(182): n is a, c, g, or t
gtttaatccattgtaacatcatatgggttccttcattaattagtgagttaagtgaaatttttgacatgttcattttatattcataaaaaagtcataacttacctttaaaaaataannnnnnnnnnnnnnnnnnnnnnnnnnnnnnnnnnnnnnnnnnnnnnnnnnnnnnnnnnnnnnnnnnntactcagccaacattcacatcatatcaggattgaacgagctgaacagactgtctactccttcattatttgtgtattaacagatgccatcacctctgcaagatgggttcaagagacaacacaggcttttgatttagagatctgactcacttttatcaagagtgttcatgtcggatac

SEQ ID NO: 412482 - DNA, 417 bp, Homo Sapiens
  misc_feature (342)..(351): n is a, c, g, or t
gtttgctcaaaacataatgggaaatagaatattatggtgtgatgagtgcaaagtcagaggtatggtgcaggatataatgagaacactggaaacttccactcttttgcgagttcagggaagactactcggacaaggtaattagtgaactgagtttggaaatataaaaataatcaggcagaagtaaatagaatgctaagtattttatatttcaagagagagatcaacatgtttgaaagatattaatttgaaatcagtttcacttaagctccagattccacaagctccagattcaaggactaagacatgatgtatatgatttcccatagatttcctccagcttgnnnnnnnnnngtcatggattcaaatgagatgggcacatatttatgggtgtacttgaagccaacagagctcgcactg

SEQ ID NO: 412483 - DNA, 407 bp, Homo Sapiens
tcagtgcttctcctctttgtcccgatttgcattgtcagtctcccagccccatcctttcaaagtgagtatttcttgcagtgggatcagattcagttcccctctcctttgcctggaagaatggatccagtttgcactgaagctttgcagagacatgctttataggcagtcttctcctagctggttaattttagggagacattacacctgagtgtcattgtgtgctcccttttgctgtgtccttgagccagattaatgttagtttctcacaatacgtactacactgcttatgtgcacacttccccactaccttctacgaggccttttagtagtgatgtccttatcgaagggaattgaggacatgtttctgtgagatgtatcattttcacaattcctttgtgcagaccttg

SEQ ID NO: 412484 - DNA, 416 bp, Homo Sapiens
atttttcaccaccttagcggaagtaggagcccaacagaagagatgtaaaacatactgagaattaaagagctacaactggccttaaaaatcttataaattctatagtaccaatatgtatctggaaagagatggaagtactccttcagggacttaaaattctttctgcaactctctttccctgcttttctaataaatgcaagataccctgtggaccagagaggtattctgagtatggaccacttgtctggatggttcagaaagaagctttttattaactctggaaccattttgtagtaagactcaagctaggtaagtatataacaagcccagagttttatttcgtaaggaataaggttcaggacattagtaatagaaaaacacaaatttaatttctaggtgctccttgggagttttcc

SEQ ID NO: 412485 - DNA, 182 bp, Homo Sapiens
  misc_feature (144)..(144): n is a, c, g, or t
aaataattggtcacatgcaacgaaaatatagataagttttcatttttcttttccaaataagagaactcacaaaattctagtattttaaagctgaaagcgtttaggacatttaaactcattattttacaaattgtactggcccgnggaggttagctgacgtgcctggaggtgtcaccctggcc

SEQ ID NO: 412486 - DNA, 565 bp, Homo Sapiens
ctcaaatgtgacttttttaaactttccacccccaggaatagtttttcagtcatttagttcacatgttttctgctttgactaaagtattttgaggtcccatttttgtttcctcaactgtttaagctcctttatctgaggaaactagattttctctttgatctgccaaagaatctgctacatcgtttgaccacagggtgaattctacttaaagtgactccatatttttgtggcactctcattcatccctttttaaatgctgcatctctgtcaaggtactccgcaccttggatatcaaagttgtagggcttttttgactagttaacccattgctatcaaatcttatctcagagattaatctgtcatcagtcacttttaccttcatgtgccattagtacgttacttcaattggggatatttgcaaatgaactctgtctttcaaaggtgggaagaaaagtaggagtttgtttgacatcataacaggttaacaaactactggcacttttgcaaagaaggcctttccaaagcctatcagcctatagaatacttttccttttgccattcatta

SEQ ID NO: 412487 - DNA, 708 bp, Homo Sapiens
  misc_feature (668)..(668): n is a, c, g, or t
gggttcattttattcacttgtaagtgatctcaggaagacagtagtcaggagcagagagaataagacaggaaaaggaaggtagtcagtataggacataagaatgaacaggttatcactccaggcaactagagttaaacctctgagaatgagactgaaacacatatctcccagtttttccactgaggggtgaggaggctgggatgcatgttcatctgtttcctactattcccattctcgttagttgggagttcacttccagctttcctatctagatctatagcggtggagcaggcttctgcaactagagagcaccttcaaatagagacacacacaaagctgcctatgtggacaggaactgcctgaaggggccctctggggtgaaccaacagaatatgggcaggaccctgtcacagggtggattctcctggaagcagactctgatattaagagtaatggacagggtattaactaatgagtgccctggcgatcaacactatggatgtgaagagaagggagcagtattgagcagagggtaaagtcaagcttctaagatgcaccagcatgtaacttaggatgagaataagtctactcagaagagtgatctaccgtaggatagtcttagaaggatatggcccaagagaagattttctctcctttcattatgaaanagtatatctatgtgcagttgcacattatcagtggctctgc

SEQ ID NO: 412488 - DNA, 659 bp, Homo Sapiens
  misc_feature (64)..(359): n is a, c, g, or t
  misc_feature (428)..(428): n is a, c, g, or t
  misc_feature (475)..(475): n is a, c, g, or t
  misc_feature (514)..(514): n is a, c, g, or t
  misc_feature (567)..(567): n is a, c, g, or t
  misc_feature (590)..(590): n is a, c, g, or t
  misc_feature (618)..(618): n is a, c, g, or t
catccccaagtcaaggaccaggtgctaattaagtttgcataccccagggcacctttaaaatagnnnnnnnnnnnnnnnnnnnnnnnnnnnnnnnnnnnnnnnnnnnnnnnnnnnnnnnnnnnnnnnnnnnnnnnnnnnnnnnnnnnnnnnnnnnnnnnnnnnnnnnnnnnnnnnnnnnnnnnnnnnnnnnnnnnnnnnnnnnnnnnnnnnnnnnnnnnnnnnnnnnnnnnnnnnnnnnnnnnnnnnnnnnnnnnnnnnnnnnnnnnnnnnnnnnnnnnnnnnnnnnnnnnnnnnnnnnnnnnnnnnnnnnnnnnnnnnnnnnnnnnnnnnnnnnnnnnnnnnnnnnnnnnnnnnnnnnntgtgctcggcctaaaaatagttttaaaagtacactgttgaagaaaaactcttaataaagacatgaattnttgtaacagcatatgatatgaacacagtttgcagaatgaatacattntcttcagagtttaaaactcttcagtcattatctctttgntcacgtggtcacaaagcattctattgggccacactaaaccagttccttctttntatatacagatggcctctttggnggatggttttatgcctgtctgccagaanggagactctcaagtctcctttgtctttctgatcaagatgaa

SEQ ID NO: 412489 - DNA, 412 bp, Homo Sapiens
tttactaattgtaaagggttgacatttcaaaattttatagattcatttcaattcttttttgcatctgaactaagcagcttcttcaataaatcataaataatgggaagtaaggtgcttaaaaataccaataatgagataattatgtataaaatggaaagtgtaatgggaattttgtctaaataaaaaatataaatcccattacttgttgcatttaagaatatgaaaagatacattatgaagaaaaatataatttaagtgtgcatctaagcagcattatttcttcatatgtagtcaagtaggaaaattaagagctgattagatccttaagaattaatcagtaatttctgagaatgaggacgaatcagtgaacagtagcacaactgaatgattatgtacaagattctttatagct

SEQ ID NO: 412490 - DNA, 441 bp, Homo Sapiens
cggattagcacaatggatctagaggcttggacgagagagacatgtacatatgtggatggcgccgctatggagtaagctgacgcatgattggtgagtacctgacatcggttaagagcagagggatatgcctgtggtcccgaatttttggatgcatgaggagtgcagactcgtgcccaagactcatacgctactgtgaggagagatagcgcgactgaattctggcttgcagagtagaatgagatgccatgtctgaataccatgatgagatactactagctgatgtgggacattacgactagcttgaggagagacattatgagaagtggccagagcatgacaacagcatctgcaggatatgggcagagagagaggatatcatcatgtcccgagagttcgttacggatggaatagtgagataatgcactaggacttagttgctgt

SEQ ID NO: 412491 - DNA, 412 bp, Homo Sapiens
  misc_feature (394)..(394): n is a, c, g, or t
ggagtcctttactgaatgcgttctccttcaatccttccgacgacgtcaatttcagcggagtccctccaacctgttcattccaaccctcactgctcaggcctgaacttttctgaactagtgtcttccctgaccccaagaataatgattccattctctagaacaagcagttacagatccctcaccattaacagggggaaataggagttgtaaccaaggccttcggaatttggccttggtaatgttacagtttggatctctgcttcctaagactctgaaaatattacaaggtgcttttgtaactgtaggcacccagtgtgtgcttccctttggagcctgtggtatatttgcataagcagtagccatttggtgattttttttccccctgtgggcttgngggtagggatgggttctg

SEQ ID NO: 412492 - DNA, 437 bp, Homo Sapiens
  misc_feature (367)..(367): n is a, c, g, or t
  misc_feature (382)..(382): n is a, c, g, or t
gaaacacaatagtctaagtagtctaaatactaaataaggtaaactgccagagagggaaaaagatgtgaaaaatacttaagaggccagcagtctttagaattagcatcccctcatcataccaattttaggttcacttgaaaaattcactaatggggttaaactgagggcttccaccggcgtgtcaccagcatttagtctctatatagaatccagctacagtccagcacacacttgattggtgatcagtaccttcacaaaatctaccttctaatgtaacagcacagcaagaattgagatccagaacaatcttacagatcaaatgaatttcgtgtgtgactgtatttgattgcccctttttactactctntactggcttaagttnttacatgaactagatacaagccctcttactatgccatattctctttcattgcctg

SEQ ID NO: 412493 - DNA, 406 bp, Homo Sapiens
acgaggaaggattctgttgcttgacacaactactgacctatctggcttgttttgtccatgtcagctctgctgtcctcactgccgatcacctatcctaagacttcaaccatgaatacttgcccaactcctgcttccattacttaaacatttccacatctcctgcagccactctatttgaggtggtttaaaaagagataaagtgagggaggctggactagaatgggtgctgctgacacttcaagcatgtgtgtgcacgcccttgtataattgtggtggtgctccaggctacattactctaccataacctagtagtgttagttttgatctcctaagaacccagaatatcctccttcttccagaactactatctggatctagtagaaggtgaagtgtctctgcacgtggg

SEQ ID NO: 412494 - DNA, 389 bp, Homo Sapiens
gcaacatctccctccaaaccagtattcagattcttctttcctctctaaactcttttgcctgaaaagagtgtaaagcaccactctggagacaatatagctgcatggaaattcatcaatatgaagttcctattatggaagaatggcaaggaaacgtgaaggactcatgaaacaaagtgttcagcagccatatgaataatcaattagatggagagccacctgatgctgcacatttggcggagcctccagctgccaccagttttctgccctgtcagtatcagcttaaaaaaatctgttccctgtttatcacgactatactcagttaatctattcttttgcacctcaccccatattttcctacttgctaattagagatgcaaatgttgattgtg

SEQ ID NO: 412495 - DNA, 422 bp, Homo Sapiens
tagcttttcagatacaacttaagctgattccccatatgtcaaaatggactgctgatgaatgaatgcttttggtacatattcttgtagtaattacttgtatctttgtgaattttctattaactttaaaaaaattcaaagctattacaaaggaaatatttaaagagcgacgataaaggcaaaagaccctgttttgttttctaaatgtcacagttctatacatctttgcattggatgaactgctatttctttttaatatgcttatgtaattttgttcatgtatgtatgcatatagatttttatatctctcagccttatgtaatttctacgcagttttctgaacaatgacttttaagttacttcttacgtctctatttctaatacgctgatttaccataacagagtatctgccggttttctgtggc

SEQ ID NO: 412496 - DNA, 422 bp, Homo Sapiens
  misc_feature (388)..(388): n is a, c, g, or t
  misc_feature (398)..(398): n is a, c, g, or t
acgagcatttacatagtgtcctaaactacatgctttcctgtgacactgattagaatctgtcccttagagaatgtcagcatcatctttgatttagcagcatcttaatgttgtatagaagtgtaacaacttataactgcaggataaaatatgtttttcagattaaggtgatcaataacctctaattccaaacacattattgctaaattacgatgcatgtgaaatctggatacaagttaactactgattaattcattgtgactcgcttggcttagggatacagtttaaacatggaaagataagagaagaaaataattttgttcatttggactctgtagttttggtttcttcagaacaactcaagaatttatattattactggagttagttntgcttcattntctcatagattagtgatacatggg

SEQ ID NO: 412497 - DNA, 418 bp, Homo Sapiens
caagattgacaaaagactggccctaatggagtttacagttctcagggagatacagtcaacaccatcataactggtttgggggaacaggggagatgaactggaccattctggaggcaagaggtgcatctgaaattggaaactggagaaaccaggggagacagacctgttgatctggaaggcatagaacagaaagaaccagagaatagtcagggactgacaatgaggttgtgattgttgacagccggaccaggccaggaaatgaagaaggtaaggagagaagcgtactgtctaacacccctcgaatgcacagttgctagggccagtaaagatcatcgggctactcatctctcaatttaggtaatgtaaatgatgcatcttattgacaatccatatccttaagattgtgtgagtcttttct

SEQ ID NO: 412498 - DNA, 417 bp, Homo Sapiens
ctgttttctaaatttaggtcttcttatagcccttctattccttattttacaatagaatatcatttaagtgacatggaatggaatctataaatattttaacattttaaaatttattcaatatattttcctcaaacctcttatgacagtgaaagatttcatctagacttttaatatgtaactattaactatagcttcattttactagattttaaagctaattaaaatatattctctcattactatagcttacttagtaactgtctctgaattcctaaggataattttaattctcgttttaggcttaggtaggcagcactaggattctataattccaagaatactttatttttgaagctagatgcataattcttcttcatatcagggcatcctgaatcaattgatgtcttttcttttctg

SEQ ID NO: 412499 - DNA, 420 bp, Homo Sapiens
  misc_feature (391)..(391): n is a, c, g, or t
gagaagagagaaaaggtgtagagtggtggggaaaacttgataggtggctggaagaagcctttgaaatgctaatacagttacccacacagcaaacatgacctcctatgtgtacagaataaatatttaagggacagggaccattcccagaactgaaagtaggaaaacatgttggagtgtatctagccatgaatgcactgccctctgcccaggcagcagtcttaagaggattccaccttgggggattcatggggctcatttttctatcgcaatctgtggtcagcattcagttaggcagagccactaggagattttgataggcagatacatagataagcaggctgacagacagatagatggacagatggatagacttagtatacagatttgactntatgcaattgtgcgacctggtcgcggctt

SEQ ID NO: 412500 - DNA, 397 bp, Homo Sapiens
  misc_feature (383)..(383): n is a, c, g, or t
gtaaatgcagggctagcacctgagggagtgcgtcctcccctcactctcatccttggcctgccctcatcttgcctaagagagctgtcccctggcctcagatagctccagtcactcccataacctgttgatttgcctcagagcccccccatcacctcgccgtcatcctcactactcactcggttggtactgactatatcttaggtggaacagcgcgaggcagggacgtcatgctttgcagtcactgccaagagcagtacctgtgttattcagacacaaagctaggctctattcagacatggagtgctgaataatacctgagtgagttaccatgtgtctgccaccctcttctccctgaggcctgcctgtactttcccctagacacnggctgctgcgtgcg

SEQ ID NO: 412501 - DNA, 411 bp, Homo Sapiens
catggggtccctgattagctgatctgagctggggtggggcttggcaatcattggatccagtgcttttcctgaaacatgagcattgagtttcctgcccacacaaccctgggcttaattaagtccaagcaacaaacagggtcctcagtatgcttaaagcattgacattggatggaagacaattcaatgtttgagaaatccctgcagaccctctgggagtgtcttgaattctaaggagaccatcttgccctacttccttatttgacagaaatggctgtggctcactgaggtggagtgaaataccccaggtcatccagcaaggtgagggtggagcggcttggtcccatggcatatattcatccatctccttgcccatccgttgtcttccagcagaatgtaagctctgagaagtgg

SEQ ID NO: 412502 - DNA, 135 bp, Homo Sapiens
ctagacactaccgttcattaattgcagtaccaataacatcatctcagagagaaagtgatctccaatacaacagtagtcaaagaacagaacttcccagaaactgacctccaactggatttacgatgctatgattct

SEQ ID NO: 412503 - DNA, 717 bp, Homo Sapiens
  misc_feature (366)..(377): n is a, c, g, or t
  misc_feature (379)..(431): n is a, c, g, or t
  misc_feature (510)..(511): n is a, c, g, or t
  misc_feature (522)..(522): n is a, c, g, or t
  misc_feature (703)..(703): n is a, c, g, or t
ggggagctactgtatttagatggtccctgacttactatggctcaacttaaaatttttcacccttactgtgagtttattagagtattaaatgcatttttgacttactatatttttggcttacagtggctttattgggacataaccccattgtaggtcaaggagcatctgtatatatattaattcaaatagaagtaaattaatgaaaaagagtcaccgctttgtaatacagtacaagttatactgcatgcatgatccatagtaccccagtaagaatgatcccttattcttacatgaagtaattatagattttaaagtgttcacttacatgaagtaactatagattttaaagtgttcagtctcaggacnnnnnnnnnnnngnnnnnnnnnnnnnnnnnnnnnnnnnnnnnnnnnnnnnnnnnnnnnnnnnnnnntgggctcaagcaatcctcttgtctcagcctcttgagtagctggtactacaggtgagtgccaccatgtctggctaatatnnttattttaatntttagtagagacagggtcttgctccgttgcccaggcttgtctccaaactctggcctcaagcagtccttccatctcagcctcctaaagctctggtattacaggtgcgaagcactgtgcctagccaggattccttttttgatccaattaagcttttcttcattttcttaagcaagttgcagtngattcgcctctgtc

SEQ ID NO: 412504 - DNA, 698 bp, Homo Sapiens
  misc_feature (467)..(467): n is a, c, g, or t
aagacagttggtaactgacaaattgcaggtgtgatcattactctctgtgactccctgtttctcagatgcactgttgcttacatctttgtatgcttttgcattcctgctgattgattcaaggtgcaacgtgcctgcttgtcaggtatgctgttgatcacattatttaagaagaaataaagtcgttcccgcagctccacctgcagtgatgggctttaatgttttgtgcttcccgaggaaaacctgccgatgatgtgaagtgacattcaacccgccgagagctgatactggcagacaaatttcatgtcctgtctcctgatcaccagtttgctgcctccaagttgttagggatattacaggggtgggaagtccccacttgacaggttcaatttgtaatgtgaaaggtgctgagaaacaaagcaaggacccaggcagctttctgccaaggctgctggccccacactcagcanggcaaagagggggatctatctgctagtagcatgagtgtgggagaggaggcggctgttgtagggtgccgtggaggactcatacatgactctgggaagagcgctgctgctagcccagggccacatagcgtcaaggaccgtgagctcctgtgcatgctcctgtagccttgtgtcatctgaagaagcacagaagtggcaggaattggcctttcataaggcatgggtgctgcttgt

SEQ ID NO: 412505 - DNA, 412 bp, Homo Sapiens
aatgcataacatagtatacattttagaaaaatgttataaaatgtataacattggctagaataaaagtaaattctcagtaaattatatctgtaactattaaggtagtaagcctcataaaaatataatttatttataaccataacaaaaatgaagtttactacagcaaaggtttgtgccaataaattaagaaatgcaatttcctagagttttctcattgggtaattatcagaaaaccacatttctggaaggaaggttctcctgatttctgttttttctttgtctatagaacaggtgactaaattagtacttatgatatttttaatgctaaattttataaatactagacttctgatgatcccaaatcactcatatctatctctttcttcaacagtttgctagtgtgttactgtgg

SEQ ID NO: 412506 - DNA, 275 bp, Homo Sapiens
aaattagctttaaagattagcttttaaaagccagttaagattcctaggtgcacaaacaagaactgtaaaattcacttgagaatgtgagatcagtaatgggggtgccacatgcaccaagaagtttgaaagtaagatgctgtgaattcggactccattaaacagactaaactcagtagtttatgatgaaaatattttctacttatttgtattttccttggtctgaaagattccagtaaagcaaaaaaggaattagagcttcattaaaaaatggcttt

SEQ ID NO: 412507 - DNA, 413 bp, Homo Sapiens
caaacatgcaaaaggtgaataattcgttagagcaaatccactgaagagattttactcaaggcaataatcaagttttcactaaagaaaattccctggagggtgaatggcaaaccagaggagagcaagaacagaagtaaaaggaccccaggacgagctgtcagcctgatcccaaggagacatcacaaaaccctggactgaggggcggcaagggtggggaggcgggctaaatcctggagacgcgcagatgggcttttggggatagtttggatgtggagtgttttgctggttgaaagattactaggcagtatgtaagcaagagatgaccgcatccacatcactgcctgttctaagaagctcctgagcatggtgtgtgagagggagggagcggcttttttgagtgtacctcacgcgct

SEQ ID NO: 412508 - DNA, 277 bp, Homo Sapiens
ctgacatctgatcggccagagcaatgatcaatgcccactacctaaaagaaaggctgagaaattgttggggctctgcccttatgcccttagctcacatcatctttctctaacctgctgtatggtcccattggatgtaactaatgtatccatcatcaaactatggagcagatgccaagagaatctgaggcctcacttttggcaatattaatctgctgagccaatactagcaaccactactgtacaggttccacattacacgagagactagctgaggcca

SEQ ID NO: 412509 - DNA, 402 bp, Homo Sapiens
gttacctgagaagaaacccgtgctttcatgttcatctctttaacatggggcaggtccttaggtacaaaacagatctgaacttcttgctttctgttactcttaatttaactggctaaatcagtaatatgactttgcttttagacagttatactagacagatattttattgagtactctttgaatttagaaaaacaagggtactaaaatatgcccagtgatgtaggaactatgtgcagttggaaggactctttgccaaaactctaaggaatcttgtggattccttacaatgtgtttcataattgctacctgggttacatttgtacttcctttcttcataggaatgatcttagagttaaataattttctattagtcttttaactacctcctctctataatttttg

SEQ ID NO: 412510 - DNA, 426 bp, Homo Sapiens
aaagggaggagcagtcagggcgctgtgtgaacagtgagcaatgaggccacaaaggcatcaagaggccataccatgtgggacttcccaagtaattactcttcctttatatgaaatggaagccagtggaaggttttgagtagagaagtgacataatgcaggacctgggacactcaaatggagaaaatgtacagaagtgagtgtgcaactgtaatgaaaaaatctaccagaaagcaaacaacctagtagacaaaaagtcaaaaaagtgtgaaaggccataaagagggtagttgctagccaaagagactgtaattcttcaaatatattagaagtttcttgtcacaggatgaaacttgtcagttttatctgcctttacaaacagatgagttgtgggagtctttctacctttctctggtgtatcaggcatac

SEQ ID NO: 412511 - DNA, 421 bp, Homo Sapiens
  misc_feature (368)..(368): n is a, c, g, or t
gagagagagagaaagtttgattctgttttacatcaaggcctggaacaaagagtcacaggacaaagctataagtaagaggcaggccctgggaagcctcctttaacctccatagagaagtctctcttgatcctctagataagcttggcctttgttgaaacaaagatcacactgaatttgtctatatgaagatggcagctgtgaggttcttcagggaaagaatacattatttatctatattccaatattcagtacacattcagtatttacagaatgaagttcaatcagaataaatgttcaaacaaacagacccctacagtagtggaaacagcactgtccattgtttagggaattcatccagtgaggccagngctggaggagatgaccttctaatagttgttctaattctgcttctgccttctgc

SEQ ID NO: 412512 - DNA, 125 bp, Homo Sapiens
gtatgcactgctataatcacctcatgaacattgtgttatagaccactctagtagtctaagtataacttacctgccggtcactttttgccgttacggagtttgatcttacccgtcccgccccctct

SEQ ID NO: 412513 - DNA, 142 bp, Homo Sapiens
gattagtgatgtcgagaattttttcatatgctttttgacagatagaatgccagctagactagtaaagagaaaaagtagagatgacccaaataaacacaaccagaaataacaaaaggacattaccactgaccacacagaaact

SEQ ID NO: 412514 - DNA, 426 bp, Homo Sapiens
atctcttgaaactgttcactattggcacaagtacctatgagttaaactaataatgccacattggacagtatatcccataccctaaaccataacgatatatatctaatcaataatcaatgccatatctgtatataaatatttccaacaaacaactttgtatcagcccactctctgtccttctcttgttgtctttacaaatcctcttgtaactgctgtgaatcaaagtgtagattccaggcaaattgaacctttgctcccaggttataatccttaaactggacccaaataaactgtctacttatattcatgttgtgtcagcttttttttgttatgtagacttatcatttagaatgtgctagagcagcctctatgaggggatccctcctttgtactccaattgctgtaacacccgatgcagccaggtgg

SEQ ID NO: 412515 - DNA, 471 bp, Homo Sapiens
  misc_feature (450)..(450): n is a, c, g, or t
ggtgtgattttttgttactgtaatctttttatgtaattatcaaagcaagctgcaccaaacaagccagagattaatatgctgggatgtccatttagctctttctagataggcttcaatttggctaaaatttagaattattatttttcttctgagcacatcacatagatgtcaaaaagttctctccaaaacttcttatgctgtcagctttaatagagtctgcttacacagatgaaaaataaaaatttcctccttaaaaaataacaacacagagattctttccactgaaaacttgcaactgttatttgaactctaaataactatagacatttagatattatttcttgagggcagaacatctttttgagttagaggttataatgagaaatcttgaacactggtggagtgataccaactccaaatctgccttgcttgccttttcttcagtagcanatatttagctctttgttgctt

SEQ ID NO: 412516 - DNA, 455 bp, Homo Sapiens
  misc_feature (151)..(357): n is a, c, g, or t
gcgagaccgcccgggggagatctgcgcaggcgcggagctgccgcggtcataggagggcgcgagcagcttggctggctagggcttgtagagttgccctggtaccctagtattcctaattgcaaaatctttatgaagcttaagaaaaaaatcnnnnnnnnnnnnnnnnnnnnnnnnnnnnnnnnnnnnnnnnnnnnnnnnnnnnnnnnnnnnnnnnnnnnnnnnnnnnnnnnnnnnnnnnnnnnnnnnnnnnnnnnnnnnnnnnnnnnnnnnnnnnnnnnnnnnnnnnnnnnnnnnnnnnnnnnnnnnnnnnnnnnnnnnnnnnnnnnnnnnnnnnnnnnnnnnnnnnnnnnnnnnnnntttaaagttactgtacagatgtgcaattttattccttagcctagtctcacctctgctgcatgtgactattgttcacatattaattccaccacatttgg

SEQ ID NO: 412517 - DNA, 461 bp, Homo Sapiens
gcacgaggtgcatgttgcctttgggccttgtgtcaaaatatcttcatcatctaagaataaaacccccaaagaggtcagcctgatcttgtagaaagccgtccctgggaaaatgattaaatgtcagtaaacaagagcatttcagaaactgacatggtccctaatgtttgtgtttagagactcctaatgtgtcagaattgagttggagacttacgatgtaattgcatgtcttgtatttcatgccagcctctcggcttggtgctggggcagagtgggaagcagaccacagagcagagagggcctctgcccttttattgtcctgtgagagagatggatattcacaaataatcctgtccctaattaattgcagctgagataaccattatgctagagagtgtgacaaggggtgactatctcttggtcttggttgtcaggcaatgctatgggggttatttagagtcgtg

SEQ ID NO: 412518 - DNA, 410 bp, Homo Sapiens
aacctgctccacctatagacccaggcttcactctcacctgaaaaccctcccaggcacaacataaaaaggctcctttcggtctcacaccacatcactcatggtcattttgttgacattctttaggccacaccgtcctgctttcgattttgcagatccctaccctattgattagtctgaatgttctatcctcactttgtacttcagattgagcagtgccttcccaactctcagctgactggagagtttttgggtgaagactcacctgctttgaggaaaccgacggaaccatgaactctttaggagctaccttcagcgtgttcccctctcatcacagctcactctcactccctggagagtggacacagtgataatttacctgttctacctcactgttcttgcccctttagggg

SEQ ID NO: 412519 - DNA, 400 bp, Homo Sapiens
gtagaacgcctctggaatgaggcatgaccttggagacatatttttatacagtccaattattccccaaaggtaatgacacaactaagattgatcaactagcactgccagcagatggaagacttaaggtattgattgttcaagggggatttggccagcacatcacagcatccacattgaaaatcaacttaggtagcaattctatagaacatacaatgtcagtgacatcaaccttgaagctacaaaaataagaggttcttttagggtcaccatagaagttctctagtttccagaccaagacttaagctgacaattttatttgagtttattattattttattctttataagaatttcagtgtaatcggcatctcactctatgatccttatggtcattgtcttgt

SEQ ID NO: 412520 - DNA, 480 bp, Homo Sapiens
ggatgttaggcaagagttcctgagtcttcaggatcatccatgacccagacaagatagatataaaataaatcatcagcattatgaatttagtgttttgagatgctagactatgatataagggctggttagcaattctctctttatccagaaatacagtcatgtgctgcataacattcatggaccacatatacaacagtgattctataaattataatggagttgaagaaaacctattaccaagtatttactatactgtttatggttattttagaggttattccttctacttattttttttaagttaattgtgaaacaacctcaggcaggtccttcaggaggtattccagaaggcagcatttttatcatgggcaatgacagccccatgcattgtcattgaagaccttccagtgggagaagaggtagaggtggaagtcagtgatatggatgatcctgaacctgtgtaggcctaggctaatatct

SEQ ID NO: 412521 - DNA, 124 bp, Homo Sapiens
aatttacccagaatagcttgttcagattaaatgcacacagcggttgaaaagcaaacttgattctgctccaaaatattctggatgcactttctgaccttctttttctattgtggattaagaaggt

SEQ ID NO: 412522 - DNA, 412 bp, Homo Sapiens
  misc_feature (99)..(242): n is a, c, g, or t
ctgacatgtcacatttatgccggtggtgagtcttgtgtctgctaaggctccgctcctgttctgggttgtgaaagggttggaaaagcagtccagtgcagnnnnnnnnnnnnnnnnnnnnnnnnnnnnnnnnnnnnnnnnnnnnnnnnnnnnnnnnnnnnnnnnnnnnnnnnnnnnnnnnnnnnnnnnnnnnnnnnnnnnnnnnnnnnnnnnnnnnnnnnnnnnnnnnnnnnnnnnnnnnnnnnccacatgcacctccacagtgcatcacctggcatattctgggtacatgatactctctgccactcaacgatgtgttacccaggagccatgctatgtgtggaggaacaatggggagcataacaggcataatccatgctgtcatgaatttcccattctgtctggggacacagcc

SEQ ID NO: 412523 - DNA, 409 bp, Homo Sapiens
gcgcgaatatttccccgataccttttcgactgcggttcgacaaaaatcccgctggatcatcggcattgttttccaaggctttcccataaatggacctccagcctgacgctgaactactttctctggcgcgaccgcaaaggggcaatcagtaactttgtcagcttcctcgcgatgctggtgatgatccagcttttgctgttgctggcgtatgaaagtttgtggcccgatgcctggcatttcctttctattttcagcggcagcgcatggttaatgaccctgctgtggctctttggtttgatggttaaccgcatcgtgcagcgggtgattttcgttactggctactacggcctgacgcaggggctgctttccgtcctgcgtcttttctggggcaacctgattcttcatggcc

SEQ ID NO: 412524 - DNA, 403 bp, Homo Sapiens
  misc_feature (361)..(361): n is a, c, g, or t
cctctcttaagctatggataaataatgattaaactacataaagataaggaacaatcactgaatgacttaacctgtcattcccaactctttgtattcacactctagcctttcctttctcccttgtcctttaggattcttcaccatcctatgtgggagccagctttagttcctcctgcacgaggccagggatgtgtattctgtgcttttgcaccctcgttgctccagtttgaatgcctattctgcatagtcagaactgctttccaactagttttcctgtaaatagtctccctatatttaatactgcctaccccccactgctgacagggttatcttaataaaaagcaaatatgattacactctntgtcctcctaatagcctattctgactctctgcccacaggttc

SEQ ID NO: 412525 - DNA, 392 bp, Homo Sapiens
accaacaccagttgcctggaagccctttggtggtcaacagattagctttgataaactcctagtttctggtgacccttatgatacttttgttctcaagccttaggtgctatagctgcttcttttagatcctatattgttttgcgttattaatacctgaggaaccaattatttacattaagtgacttatgtttgaaattcctagcatgatgtctatgttttgaatgtgccttacctgatatggaaagcattgagatattttgcccataggggtggcataaagtaatgtacttttaaaagtataattttatggtttgcagtattaacagaatatacaataatctgactaatgatgttcattacgaagaactattagtagtttaggtagatcagtc

SEQ ID NO: 412526 - DNA, 425 bp, Homo Sapiens
aaaaataagtcttgtgatgacattggcccacctagtaatctgagataatttccctgttttaaaatctttaatttaatcacatttgaaaaattccttctgctatgtaaggcaacatactcagaggttacagagactaagatatggacatctttggagaactattagtaagtctacttcatctaccataagtaaaacctttgagctggtaaagagaggaaagctaacagaactttgagagtgtggtgttggagtaagtctccaggaaaactctctactccccatttcaagttatatatctaggcaatttggggcacctgagaatagagaacatatgttctcatttcttgagtggagcccaagaaagcaaacaagatttgcttgatataataccagtgaagtttgagggttgacattttaggcatgct

SEQ ID NO: 412527 - DNA, 702 bp, Homo Sapiens
  misc_feature (16)..(16): n is a, c, g, or t
  misc_feature (633)..(633): n is a, c, g, or t
ccaggctgcaggaatngttacgagaccatgttgggaatcagaaatggtttccagtcccaggagctgtgcctcagtctcctccttggagggagagagtgaaagctgctgagcttggaggagactggcaggaatgtcacacaacctgagttcaggttgtagctgaggtggaagggacagtggggatgccctggttacccttctttcccagcagctttgtgattgtctcttggaaaagaggaagcagctatggaagcagtgtgggtggaaaggaaccttggcccttgtgatgctaagaccaggagggttggagggggcttaatgacatggtggcactggtcaaagaccagctatgccagcgggacaagagaacctcatgctgggcaaggggctctgttctcttcttgtaccaacaaatctttctcttgtttcccattcacagctaaaggcacatctccattcctgcttcagtatcttagggctctgagaagtggaattcaacagacctgggtgtagattccaaatctgtgattgatcagttacataatctaactgaatctgactttcatatataaagtgagcttgatagtcttctggctcttaagttttttggactctaatcaaataacacatgtnaaaatttcagcactgtcatgcaataaaggtggccggctttaggaatattagcaggtacctgattttctt

SEQ ID NO: 412528 - DNA, 680 bp, Homo Sapiens
acaaaacaaaacaactgaaacaacgtgaacatctatagtaggaattgacaatactctcatggcggactagtctccatttagggcagcagtccccaatctttttggcaccagggactggttttgtggcagataattttccatggatgagggtgggggacagtttcaggatgattcaagcacatgacatttattgtgtactttattcctatccttattacactgtaatatatcatgaaataattatagaactcaccatcatgtagaatcagtgggagtcctaagcttgttttcccgcaactaaacggtctcatgtgggggtgatgggagatggtgacagatcatcgggcattagattctcaggagcatgcaacctagatccctcgcgtgcacagttcacactagggttcaagttcctatgagaatctaatgctgctgctgacctgataggaggcagagctcaggcgataatgcaactgatgggaagcagctgtcaatacagatgaagcttcgcttactcacctgccaatcacctcctgctgcgtggccctagtcctaacaggacatggtctgtggcccgagggcgtgaggactcctgattaaggatacactacaccagacagctttgaaagcttcgtagcaagaaggagcccactgggtaactcataggtcctatgtccctg

SEQ ID NO: 412529 - DNA, 659 bp, Homo Sapiens
  misc_feature (328)..(362): n is a, c, g, or t
gttagataaaatgactaaaaacgtgaaaaacaggaagaaggtttctagtaggaaacaggcctccctgtgctgtaggagaggttattcctcgtgggccatatttccatttcataaacttgactgtagacttccctccaaagaacctaaggaaaccatacaacctccccttataatctacatagtcataagtaacatgcaaccgtaaatttgattcccttcatttaccattttactaaatgtcactattcgcttataatgtcagtgactggtgaaatctgcagaaaagacaaagcttttctccttaggtgaaaaaccccaatcccaaatnnnnnnnnnnnnnnnnnnnnnnnnnnnnnnnnnnnctattcttgaagcagcaaatgttttggcctgttttgtgcctgtctttgcactttgcttatcaagtcatcagttgtgcagagcttgctttctaatttttcaattgttgctggtgtaggaactagagctgcaccaaaagatcagagcctgtttctgtagctgctgcttcctccagtaacaattctattagcattttagagacaaagccttgcaacacatcgatacagggaaaggaatgaacacagaatggtgaagcatgttaacatcactaccaagaaccaactcatttactactgatg

SEQ ID NO: 412530 - DNA, 649 bp, Homo Sapiens
  misc_feature (254)..(314): n is a, c, g, or t
  misc_feature (391)..(404): n is a, c, g, or t
gctgatcctatgtggattgcattgggctttcctgaaatattccattcctataacccatatcccaggctccatccttagcctatgatccagcctcaacagagtggcatgttcaagactgctctgtggtgtttctgctctcacagtaaaagcccacactctcttagccaaagcccctcatggcctgcccttccaccttttccctccctctgcactatgccccgcttcttcccctcccttccagcattctccccaannnnnnnnnnnnnnnnnnnnnnnnnnnnnnnnnnnnnnnnnnnnnnnnnnnnnnnnnnnnnatgagttaaatgatttaaaaaaggaaattaaaaactactgctatatggaataaggagccattaaaatctcctaagannnnnnnnnnnnnnggaagcatgtgaggagtatatttttgggagtatgccctttttggtaatatgggaggtcagctctctaaaaatccatttattctagagcgtcccgactttcacacttctattcattcatgctctttaaagaacgcattcctttcgtcacgaggccatcctcccttccggcccctattgctccttgccttacctcccttgctcgacctctttgactgcggcacaccgtccgcgcccccttcggcccg

SEQ ID NO: 412531 - DNA, 359 bp, Homo Sapiens
gatggtactattctggttctttagtccaaactgagtaaactattacaaatttatccaaactcagctaaaaaagcaacaatatcttgcatgccttagtctgtgaaaccatataattctcaatatgtgtatgggtttatccaacatggtttagaaaaggcaattctgaaaaataatatcaatttattgatgctgggattacaatacctacttgtgttggagcagatagatcataaaggatccttccttaaatgatcagtacatgtatactgttccaggaatgtgaaagaccaaaaacagagtattttctagataatcggattcaacatatctgtccccaaggatccagatcctttttgcgt

SEQ ID NO: 412532 - DNA, 396 bp, Homo Sapiens
ggtaaaggagtattatgaagggacagggaccatacacattcatgtagtatagcgactcattgctggcattcatcatgatgggacaggcattgacaagctatggcctgtgggccagatctgacagcttgcccgtatgtctcgtgggctaagaatggttttcacattcctgaatggttggaaataaatcaaaagaagatcagtattttgtgacccatgaaatttagatgaaattcaaatttcagtgtctataaacaaagttttattggaacatagccatgctcatttggttacatattgtctacagctgctttcccgctgcagtggcagagttgagtagctgctggagactgtgggcccacagagcctgtatttactatgtggacctttacaggtttg

SEQ ID NO: 412533 - DNA, 353 bp, Homo Sapiens
gatgaattcagcctcttttaacaaaacttctgagatcaactctacttttagtgtttgtaaaaatagacgatttctatttggattattcagaataaacttgcttcattcaatttaaaggatttcagcattcagcctgctaaaaccatagggtggtaacctaatgatttcagtcagcatgatcctgggttcaattgctgtatcttctctataagttaccttagccatatgtttgtcagagatcaattaactggacactaacagtagcttcttggtagagttttcacatttgtcctaagtttacattttggtagtttattgtaagatatttttatttagaggtgatcatttagccc

SEQ ID NO: 412534 - DNA, 320 bp, Homo Sapiens
  misc_feature (138)..(138): n is a, c, g, or t
  misc_feature (161)..(274): n is a, c, g, or t
ggggcaagactctcttcctgtgagtccttcacaccgcctgcacctgtctaagccaccattccactccctttcccacctacagcctggtgatatctcccttctcctctgcactttatttctctccaggatcttcgcacntcaggccctcacatgcacctgcnnnnnnnnnnnnnnnnnnnnnnnnnnnnnnnnnnnnnnnnnnnnnnnnnnnnnnnnnnnnnnnnnnnnnnnnnnnnnnnnnnnnnnnnnnnnnnnnnnnnnnnnnnnnnnnnnnctttaccgcctatgccccatctctctccctcccttcgtccccactt

SEQ ID NO: 412535 - DNA, 222 bp, Homo Sapiens
agagagaccagaaacagttggggcagaataaatagctggcccagaccaggacttgaattaggacacgaagtgttccagaggaatcccactaacatgcttgaactacatttaaaagtggaagaagcatataggagagggaattcaagactataagctgaaaagatccagtgaggctagcacagagcatggctaagggcatggactccctggacttgaatccag

SEQ ID NO: 412536 - DNA, 718 bp, Homo Sapiens
  misc_feature (460)..(460): n is a, c, g, or t
  misc_feature (540)..(540): n is a, c, g, or t
  misc_feature (547)..(548): n is a, c, g, or t
  misc_feature (561)..(561): n is a, c, g, or t
  misc_feature (597)..(597): n is a, c, g, or t
cagagataagctttttgttttttgtctgtgagttattcttggccttgtttttcctgctgcttccccttacagttgggtcttacaagccctctcacctacagactccaatctggcccaggtcctgagccacacctaagtgaagctatgtaattacaccctttctcacctctccttccagtcatcaaagtgaggcatctggagccagccaatttagcatcccagtctctggggcttcaagtgtatctcatctcggaggcctgccatttgtttcagggtcttgttggcagcagttgggctttgcaaaactctggcccgaccactcttgctttcctgccttggtttctccacagccctgccacacctcacaacatcatatgggatttgggtccgagtcttgctgttatatcaccacctgggtcatctaggcttgtcactgaattgttctggaacccagctttgnttctcacccactcccaagctcctctagctaactgaagaactggactaattccctggtatttctgggcctcacgtagagtngcttggnngaacttctctaanatacagattcctggtctcctttagccgagggatttngattcagtagatttcagccactttgcccctagtgtcattggctcactgggttagtagagcccttgctcctgttctggtacctcttggtctctctgctggtgatgaccatctgacctgccct

SEQ ID NO: 412537 - DNA, 727 bp, Homo Sapiens
  misc_feature (528)..(528): n is a, c, g, or t
  misc_feature (566)..(566): n is a, c, g, or t
  misc_feature (575)..(575): n is a, c, g, or t
  misc_feature (589)..(589): n is a, c, g, or t
  misc_feature (613)..(613): n is a, c, g, or t
  misc_feature (620)..(620): n is a, c, g, or t
  misc_feature (649)..(649): n is a, c, g, or t
  misc_feature (692)..(692): n is a, c, g, or t
  misc_feature (694)..(694): n is a, c, g, or t
gttgagccaggtgcgtttctaacagccctgctgaaagacagccaatggcgtaagacttttcttttttcacatacccactaagcttcccgcagacatcaggcctttcacctgactcagggctcgcggttatacctgtgtagacctacgttagcaaacagcggcttatcggaactcgggccctctgacatcagccaggaaggagcaggctatgctgctgggaagtgcaggcctgaaaggctgtttttcttactgagtgagcagtaaggtcacccagataacccactcctgagtcacgaggcctttctgacctatgactctggagggcagctctgtttatttcttctttgtggtgacaatgtgggtgtcaccttgaggagcccattgaagaagttcattgagtgagaagactcggccgggtctccggggccgctgtaacagactcagggctgcagtaacagactcaggccaccgtagcagacttggggcctctgacgacagaaatgtatttcctcgccgtctggaagctgngaggacctggttcaaggtgcgggcagggctgctttccnctgagcctntccacagtgtcttncacccagggcttcacgtggtcttncctctgngtgcgtctgggttctaatcacctcttctngtaggacacgagtcatgggaccttttttaatcataatcacctntntagatcctgtctcctacagtcccattctgggtc

SEQ ID NO: 412538 - DNA, 476 bp, Homo Sapiens
  misc_feature (328)..(328): n is a, c, g, or t
ggggatgggagggggccgggcaggcaggttggcccacatggccacatgcgcacacagccatatgacgtcatctacagccctggatctcaccagcccaggaacccccacatgcagaccagagtccccatggtgaacggaacaggtctccctcacgccgcacacagacccagatgcacagccacacagaaaccccagtcccacgtgcgctgccacaggcacaggcccctgccagagcccggcagcagatacctggggaggcggcgagggtgccgtggggtcgctaagcctgtgtgcctggccccttggccctccccaacagccagtcttncccgggccggatggttcttaggacgggaacgatggtgtcactggcttccgggccattgcgccatatgcccctttcgaccacgtggctgccggtgccccgttgggggtggtggtgagcggtaactgtaccccgcccccaccttttgacg

SEQ ID NO: 412539 - DNA, 476 bp, Homo Sapiens
gggccctctctggggtgcaccgggtctcctctttccagctcatgtctcccggggggctgggctgtctcctgtcctgcagccgcagcacttgatctcagcaggtggaatgcagagcagaggaatccgccagacattacagggatctatctgagtataaaacgggactgctctttccactaaattgcttttggagaataaagttaagtgaattaaaattttcccagtctcaattgctaatatggtaaatattcgcagttacaactctcattaactctcttaggagtcctcagtaatttgagactgtgacgtcttgatactacaatgcctgagaacgagttctctggatcttacctgcccctcttacatgaggaggcaccctgatgtctgggtggcttaccctttggcctctggcgggcattcagcatgagtgcggtggctctcgagttgctccttactctcacagtgtcattccctct

SEQ ID NO: 412540 - DNA, 399 bp, Homo Sapiens
attaatatgcatataattttaatgatacagtctttatggtctttcaattcccttacttaatacttactatttctgtgtttgttcatagtctgttggctcccgtggggccagcacaatgactcttgcaggtctctgtaattcatacggagccagacactgaactccaccttcagatatcccatgcccatgtgttgagggtgacaaggaatgatttctttcatctaaccagagttcaacaaatgcgtcttgatcttcaaagaaaacacctgagagtccacaacaggggccataggatgaatgggaacttttagtacatcggagagtttaaaaagcacataggggaatataagttggggatattcggcaacatcagactcttgtgcatagggagagatccct

SEQ ID NO: 412541 - DNA, 201 bp, Homo Sapiens
gtgagccaccgcgcccggtgaaatatgagcagggatctttacggaactgctgaacggacttgcaattggctagcttgaataatttcagcaggcccttgtgtctagaggctatccctaggtgtctagtgcctggccctagggatgatttaggaaggaggattggcccagagcatgagtgcctggtagaggaggtgacctggc

SEQ ID NO: 412542 - DNA, 395 bp, Homo Sapiens
acggagggaccggtggcctgtcgagtctgatggctgtcccggcctagctggggcggccactcccgcgtggcttctgtgctcctgtgaaccacaccccccttgctcccctggccgcaggggttaggtggtgcctgtctggacccagcagtgtccactctgtgcccgcccagggctgggcactgaagtttgccaagatgaaccccagccctcggcctgggctatcctgcccagggtggccttggggacagggcttgggcgcaaggcctcagcagcagccccctcccactgccctgcatccacacagcccccacagcaccccaggccaacaatggcctgaaggatgggctgggacaccaagcactgtgggcaccctggccctacttggggcacggcct

SEQ ID NO: 412543 - DNA, 413 bp, Homo Sapiens
gcacgagattttcttaactgctattccaaatgttaaattcatatttaaaagatagattgtttatacactaatagtgatagagaagtatggaaaaaaatgcagaaatttaaaagtctgtagttcataccatccctgcccctaacttcaatctgacttgttgaaacaacacattttatgggttgatgttttacttacactttcacattttttgactttttattaagtatagataaaaagacttataagaaccttataagaaattcttgtaattcttataaggttcttagaagtctttttatcatctttatcttttaagtcttcccccgcaacttagggggatatggatgtctatgaaagcatatataattcattaggaatatgggctcctagaataagtaatatttttattagtg

SEQ ID NO: 412544 - DNA, 656 bp, Homo Sapiens
  misc_feature (525)..(525): n is a, c, g, or t
caggtatgtcatccagctgccatctttgttgacttttacatatccaaatgaaaacaaaattaaatgttcttagagaatgaactttgaagtgtatatcatactgggaaataaatgaccataagtacatgttaatgttttaacataaaagttatcccacttgaatctgagtgttcttggagaaaccttaaatctcttcttacaactagtaggatttgtgtccttcctcactaaacaaatattgaatgtttattttatacaagtagtttaaacttgcctaataatgtcaataatcaagggatttgaaaaccttgacctctgaccaatggaaggaccttagttattctagtgcaactagtgtagcacgttagtagaccagcatgtaagaatatatgctgttaatgcctgttcttttgaattcctgacagaaaagtaactggctatacactgaagtgtttcagctgtaaaattagcagtaaattaatataaaacttgcagcttaaatttaatgggacaacactttacatngttgcttgggttgtttttcaaaagtaaaattgacctttttcagcaaagaagaacttggtgcaagataggccagagttccaatccacaatctatgacttagtagttttggctggtacctttcctcttggttg

SEQ ID NO: 412545 - DNA, 677 bp, Homo Sapiens
  misc_feature (480)..(480): n is a, c, g, or t
ctacgactcgttccagcaccgtgggggctgacacccatctcactgctggataaaagagaatgagatcctctctccatcctacgttggatttgcttgctcacacaaactgacccttagggacagaattgttcaactacaattagatttagttaactaatcctggaagcgaagcttagcatatcagacagggttctggcaggagactcactgccctcagaaagttcaccctcacaggctgcaacgcagtgactgtctacagcgatggggatgtggcagggctaaggaagccaacaagagattgtcaccttcttagaggagaaagccaagatggggagatattaacccctatgcgtgaaaacatgaggggaggaaggaatgcttagcccagtgagactcagaggcacgagtcagcacctattacagacgtggtgcagaaacatggaggacatggagaagatatatcctgaccttgttccactntcaccctccaaattcctgacagtggttcccattgactgagcccagctcgcagtcacagccagggaccacgggtcaatctcctggtgcacaggcaggctgacgagggactgaatgtaggaagggcttgggagagtaagtgcatgcctacttagagcctcaggactttatctgttggatgataacattactttgtgcgg

SEQ ID NO: 412546 - DNA, 642 bp, Homo Sapiens
  misc_feature (479)..(479): n is a, c, g, or t
  misc_feature (526)..(526): n is a, c, g, or t
  misc_feature (567)..(567): n is a, c, g, or t
gagagaactagtctcccgggcttgatcagcaagggtcccttgaggatggtgggggatgaaggcagtacattgggccggtggcatccctttggtccttagcatgggtcatctgaatgtgcacgtgtcgtctgggcaacaggtccagaattctgcccaagcagggaagcccggagattccagcccagagctttttccacgcgggtctccggggcagacgtgcagctcagacgcagcgcgtgaacctttcgtcttgtggggcgcatcgcagtaattgaaaccttgcgcaccgcaggactgccgtggcgtctataaatactcaccgcctaactgctgacaaacaaaacgcgggctcccggcaccgcgggggaagaggcggcggcagcatgtgaccgaggacagggactgggtagaactgggggtaaccccttttgccagacaggaaggcatcccagagcggattcctgaagcacagttagcangcacacagcctggtcccaccccgggcggcggcctcaaggaaaatggngccgagggttgggcaggcagggtcccagcttgccgggcggngccctagagcgccccctgcgtgcagcgagcccggcatgcgcgcacagtaagcgcgcagaggaaagcctcgccgaa

SEQ ID NO: 412547 - DNA, 691 bp, Homo Sapiens
  misc_feature (155)..(187): n is a, c, g, or t
  misc_feature (439)..(439): n is a, c, g, or t
  misc_feature (501)..(501): n is a, c, g, or t
  misc_feature (544)..(544): n is a, c, g, or t
  misc_feature (623)..(623): n is a, c, g, or t
attaagttgaagaaattttctgcccagcttaataaacaaggtcaaaaatgtaaagttataacaaggaaggaagtgtagcattggctctatcattaaatcacagatctgagtatttatgactaagattaatccttggccattcaaagctacttatnnnnnnnnnnnnnnnnnnnnnnnnnnnnnnnnngcccataaagtatggtaaaaactggaattctaaaaagtaagacagcaatgacaagcaaagaccaaaatagctaaatttgccacaaacgcatctaatgacattctactgaatagaaagatgaatgaatagggaagtgtttttagctagagaagtgtcaacttgtgattaaataactgaaaggatatagggctgcatatcccttcatccactgggtacccacccattgctctcagcagaactaaccagtgacanactgcgtccacagatcaacacagaatggagtgcttcatacggatgcatacctaagccagtantgtctcaggccatcttgctcactagcagctaggtttgatgagngtgttgtaggtgtgacaccaaggattataagtctggtgcaagaaattctatcacccgggaagcagaaaggactaaattngagttcacccatgtggataaggtttagaagttgaaagggaatttctgtcctggtggcttttgttctgg

SEQ ID NO: 412548 - DNA, 406 bp, Homo Sapiens
aacaggcatccttgaaagtttcatagtttacaataataaacattaatctcactctgcaggagcagggagaagtacaaccagtctccacttctggggtagtgaaggagaaaggcagtgatggggagtttccaggtgctgagattcaacccaatgcaacttgctacctggctaagccatctatgacttccacatcctgaagtcctcagactttccttttactcctctcccaaactcagtactcctggggcatttcccccagattgtgggagccaccagcagagacaagatctggggaaatactggtgtcagagcagcccagggaagggagaagcattcctgaaatcaaaggttgaaattctccttatacgttttccatatgtggatgtttttggctctaagaataacg

SEQ ID NO: 412549 - DNA, 412 bp, Homo Sapiens
cacaaacaggggcttttagtccctaaagacctggggaccatgggcatgtggctggctcagggctggctgccccaccctcctgagccagagttcaggtgtggccaccaaaggtggctgtcaggactgtggtattcctgcacaaaggacagcccaaggaggggagccaccacagggtgactgcaatgacagaaacccaccgctctagctcctagctgttccctgcagctgccccatctcacaatttgcacattcatccgtggctcattgccgccgccttcctttcttccctttccagtaacttctctcaggctcctgtcccccgacacctccctcttcgggattacttccttcagagaccccaggactgtgcagggtcatcattgagaaagcgccttccctggcagtcgctcct

SEQ ID NO: 412550 - DNA, 399 bp, Homo Sapiens
cagcacttcccccaagtaaggacagggctgagtgtgttgtcctctactaagacatgttgaaacatgcggagaaaacaaaaaagtcatataaataagaaatttccagaaaatctttatagccaatgattgctttagtcagaagtttctttctgaaaagagctaggcataagggggagatttaagctaagcatgagattccttcccaattccacagaaaaccacttaggctcaaggtagggcaataatccacaagtacagggaacaaagcacagctagctgggatctcctgccatctcagggcctatgaagacttccaggaaatgctataatataattgttcaggggctgtgtctagatcatttagcagttggacacttcgtcagggctttagattatcac

SEQ ID NO: 412551 - DNA, 398 bp, Homo Sapiens
aaagacataacaaaaaatcagagtggcttagactagggttcagacatgaagacagagagattttgtattaagaatatatttctaatataattcataggacttggtgattaactaatgtgaaagcaaaaaatgtcagataaagactgaaaaactcataacatttgaagttttggttaatgaacgcaaataggaggcgtctgggaagaagtgccagagatacagaaataaatttttaatgggtaatcacgaagaagacaggtataaattatgtgtaactctctttctgtttactttttccttctgataggatgaccccagctaacttacagtttggttctattttctggcctgtgtttatagagatcggactttcttcaccgcttcttcctcccaccgcg

SEQ ID NO: 412552 - DNA, 558 bp, Homo Sapiens
tttttttccctctctcaacattatgtttggaagattaatccgtgttgatacatgtagctgtttcattaattttaattgctgcatggtgtccactctgtaaatgtaccacaatctatctatcgatctgctgttcatggagatgtagatgctaattttttttggctattacaaatcatcctgcagcagatactctcacggcggactttcacaaacaggagttttctaggatataagcttctgtgggcagtgactgagtcgaagggcatggctcaaactctttcccccgatctctgtctgcccgctctgctctccccactttaagtaccttctttcccggtggttctagcatatctccggattgtgtcttagtgtccccacttgggtcatgggccgagctcggaggtcagggaaaggtcaggatgctacggctaggggtgccacaactgctgagcactgctgggcaccgtgaggtgctgcttcgggtagatgggctccagctgttaggaggaagtagttcttttgcttcttgccctgagctgtcttagaaagcgcccagtc

SEQ ID NO: 412553 - DNA, 679 bp, Homo Sapiens
  misc_feature (285)..(405): n is a, c, g, or t
  misc_feature (573)..(573): n is a, c, g, or t
gtttttgttatatgtttaaatttcagattctgtgataaatgataccttctgaggagtcattctctctctctgagggaactctgaatgcattttaagcaagacaaaacagaaaatgcaaatgggagtaagttccatgggtccaggaaagaaagagaactcaacatcactggagagaagtgagtaagagagcaagtaatggtcaggggcagctcctgtaagcccgcttctcctcctctctttagaaggcagtaaagcagggggaagggatccatttctagtgtcctnnnnnnnnnnnnnnnnnnnnnnnnnnnnnnnnnnnnnnnnnnnnnnnnnnnnnnnnnnnnnnnnnnnnnnnnnnnnnnnnnnnnnnnnnnnnnnnnnnnnnnnnnnnnnnnnnnnnnnnnncaggaactgtgtggcttaagtgtgctaatacatgtaggtttagaatgtcatctgggcacaaagtaagtgtctgagtgttcaaatgttagtggtttatattgtcattcctctgagtagaagctactgctttatctaagaaagacacaggacagacctaggggttgattntttgagacactggtgcctcgctctaggtgtttctcccactactggttcaccttagccacatatgattgatttgtgatcttttacattctgtcagcattcatggtct

SEQ ID NO: 412554 - DNA, 690 bp, Homo Sapiens
  misc_feature (615)..(615): n is a, c, g, or t
aaagttactacccaagcaattattcccttagccacccatcacatcccaagcacctactgctagccaggccactgctgggtcctggggtacagaggacagtctgcccctcacctgttactgtcttctcgcccccccagccatcctagtggtgtgaagtggtatctcactgaggttttcatttgcatttccctagtgtccaatggtgctgagcattttttcacgtgcttattgggcaccacctcttggctttgccaccttaagtctcggttttcatatctgttggggacaatgacagcacctgcctcacagactgtgatgagggctcagtgagataatgtcagggtcctgggacatttgctgcttgaagctgcaggctggggttagggtccttcctctgaaagctggtatgagggagggacatggagaaagctggaagcctggaggtttctgtgagccccaaacccatgtagacagggacaaacatcagtagcgagggagctgacttaccagcccagccctgggtgatttctgctggagctctgatgctctgctgttctgcggcaggccgagtgaccccgacatgtctacacagccccagtgtgcagatggcacacngtcaatgcagacaggctcagcccatcacatgggcttctaattttctcatggggtttgggcctctgccccttgctg

SEQ ID NO: 412555 - DNA, 179 bp, Homo Sapiens
atacaaataaatttgtactgacatgttaactactatggacgtatcttcagatgcttataatagtttgctaaagctggatgcaaatttaagcagcagagggtgagctacttttttttcttaagaacatattatgacgacctaggttaatatgcttaattaatgtggttcagttttctttt

SEQ ID NO: 412556 - DNA, 143 bp, Homo Sapiens
gacatgaaatctttactagaagaattggccatcaaacaaattgcacttttttgtattgtttcctctatctttggtgcctcggatacgcttgctggacaaacagttttaaagaagtgctttgatgctgggtttcttaggcccct

SEQ ID NO: 412557 - DNA, 596 bp, Homo Sapiens
  misc_feature (505)..(505): n is a, c, g, or t
gttttttagtaaatgtaaagatgttgtatattaatttcatagttttattattatgaaagttatacatttgaaattcagatatcaaattaagtttctggatattaatgttttaaatactgtctgtgttgaattggtcaataggtataaaagtaatttaagacttctttgtctccattctataagatttggatttcatatttctttgtgaattattggtcttgttattcctgctatttgttttgattctatctgtgcagaaatgcatggaaatctattgaaaggtgattcagcaagtgctgtctcgcattacaaatgtcagctgctcaccacagcatgtgtgtatttttatttcatctcaaattttttaatcagaatataaagaaaaaaatccagcattattttgggaaaaagagaaaaataatttagatttcaattaagtatatttatcctctcccaaattatatgctctcctttttaaccttaatttaaattaaccaccacattnatcttacttatttatttttatttaggtaaaatatacatgtacaacttaccatatttgccatttttcagtgtataagttaagtggaattgga

SEQ ID NO: 412558 - DNA, 122 bp, Homo Sapiens
  misc_feature (57)..(57): n is a, c, g, or t
tcaataaaaaaggaagagaaaaactgggagtgaggaactcttcctcctcttcataantcatagttttcccacgtttagggaaaatgctttctggaggagttaaactttaaaagttactgtgt

SEQ ID NO: 412559 - DNA, 394 bp, Homo Sapiens
gccagtgtgaaagtgaggaactctgtgatgtgtgagttctggccctttctgcctgcaaggagaggtaagaaccccagtcttgcaaaatactcttccactgccacgcgatcctgtagtgactgctctgctcatgtgtgagaagctctggaaacaatcacaaatagaaatatgaagaaaaacaagacaagtagacactggtgctattaggaaacagtatttcattatgcgagactctatggcattcgcaccacctgagaggaagaatgagacaagttcattaattcttcttttatccttagctgagcactttcgatgtgaagcctaatgagggaaagaaaacaagacttcttccacctagggtatagaatgatggaaaagattttcactcccgtgg

SEQ ID NO: 412560 - DNA, 274 bp, Homo Sapiens
cttttcctttgaattgtaatatgggagcagtaatatctgagtcacacccgggcagtgtaacctgctcctgagttaaacatacagtattagtttgccaatggcttgcctggctcttagggacttaaaagttcttgaactccatatgatcactccaggtaactagtaaggtaattaatatctctttaaatccccagaccagaactgctgctgttctccatccaccaactacagtggtctccatctaggagacccatcatatttaaacaacaccccg

SEQ ID NO: 412561 - DNA, 365 bp, Homo Sapiens
  misc_feature (258)..(258): n is a, c, g, or t
  misc_feature (281)..(281): n is a, c, g, or t
  misc_feature (347)..(347): n is a, c, g, or t
cactgtacagggctctaagtcacagtatgggaagttttctggttccatggaacaattcagacacatccagaaaagccgaatgtacagaatcgagttatacaggcggaaaacagtgcatcagaccatagtaacacagttaaaactggagaaaaaagttccaggagctgacaaaaaagttgaaggaaagagtccttgccctagccaagcaagcagctgcagcttctcaaggggagagagtggaaggcagtgatatgcggncagcaggtcacacgcagcaaggncaagcccaagccgaggctgtcagattcacctggagaggaagaccctgcctggagaaatgaaattgncattcttaatgaagacag

SEQ ID NO: 412562 - DNA, 365 bp, Homo Sapiens
gggggttcagcgacggtcagtgccattcacaggtcactgtgatgtgggttgtggcggccaagccatggtttggggtcccgtatccctgggcttatgacatcattgtagtagcccatccccacagaaccacggtgtgtggtggcgctgaggcatcgtagatggtggaaatgctactggcttccccatgctctgccctgaggcctgactgcctcactccccttctcagttatgttccaggccccccgagcttcctggctggacagcttctctcctgggggccgttttgtcacagtgaccctgtgtttctagtcccaaatctgggtgttatagtctctttttagcgtggtggttgtcttagtcttttt

SEQ ID NO: 412563 - DNA, 492 bp, Homo Sapiens
cagagatagtgaaatatgaataagaccaagagggacttgttctctgctcaatgattcagcagcttgggcacagaagcaccactgaagatgtaagccatgtctcagggcacttgtagatcatgcttgttttccacttgtggaatctagagggcaaaatactgcatcaggcaagtgacagctcagctctgtactcctttaagaggtcagataaaaatggcatatcccaaagaacagttcttatttcaactgaagggagaaccagcaataaccctgaaaaaaataacccataaccaaagatgatagccttttttcagtgcctactgcttctctggaatgagtttctgtgttctctgtgaagggacaggaggaacaggtcaccctttccccacccttcagtgacataggacatggctgtcactgacacagcacttgacatattctctggcattggcaggtggttgttacatgtttattaaataaacaaatcttaac

SEQ ID NO: 412564 - DNA, 467 bp, Homo Sapiens
ttctcccctgctctgagaagctcttccaagaatggcagctggaaggatgctctaagcacagggaaaaacaggacctgtggaattaataagtaaatatgcaaaataatgttattagcagggattacagacaggaatacagaatctttgctacaaacctgcttctatgtgggaactggaacaccactaaagtgacacatgcatctcaatgaaggtgtgacaagtgaaagagacagttctggaaatttcctttgacaagaatataaacatacctctcagctaagactcttcaaccatgcggtcagcccctttctgcgtggcaccaactcctgcacactagcagcctagattcttagggaggatttccttctacgtgggtgggttcagacagatcttccacctactccacatactagatgcccgcacacagagggaatcacagtgaggggtttcagactctcctaagtctt

SEQ ID NO: 412565 - DNA, 256 bp, Homo Sapiens
ggatgagttccttgaaagacacagaaactattaaagctctctcaagaagatatagataagctgattagccctatatctattttattgaatttaaatgtaaaaatcaatatttagttactggaaaacttttaagtgtggttggaaatggtatacgaactttttcaactgaattttatgaagtctaatcacaggtaaaggttttctgatgaaaatttagtgtctgaattgagatatactgtaaaaaatgttatatatc

SEQ ID NO: 412566 - DNA, 415 bp, Homo Sapiens
ccataaaaacatctcatcagttatttaatctcatgtaattaatttttgttctgcttgatcttgataagtagtttcacaaattcatctgtttccttattagagttctgaagaattttcagttagtctgtcgatcttaaagttattagaaacctgtatttaagagtgcttcttagagtcttttccatgaatctgattgcaaatgcttttagagaaaaatcaaaacaataacaatggataaggaaaacagaatagctatggtttaaaatctggtggaagttcattataattagcaattgacaaggaaatctggctatttctgtagcatacaacataataactagagttatggcatattaggtttctgagagttttatacaattttgggacattcctataaaaacacacccataaatgt

SEQ ID NO: 412567 - DNA, 168 bp, Homo Sapiens
caatctagacagaggcaggaggccgacaagttaagaactgaaacaatattctcaatggtagaggttgccaacctatggtctgggggccagatttgtctgcaaagtgtgtttcatttggcccattcaatatttccgaattttgggaattcgtttcaaacatttaaaagt

SEQ ID NO: 412568 - DNA, 209 bp, Homo Sapiens
tgtcttaaggttataaaagtataaatccagactaaagacacaattatctttatttgtataactttttaatgactaagactaacactgttagtttaatcaaaattgctgtatcttctgtgttatcagcaaaatacccctatatttaagtttctcaggtgaaaacctgatactcataggctatacaaatgggggaaaagggaaataacttg

SEQ ID NO: 412569 - DNA, 441 bp, Homo Sapiens
atgccaagtaaaataatgcaatgtatctctctctgcgkatctgctcaccaggaggsatagtaacacaagagacagtacagtttttcacttgccacgtaacaatttttgaaaacatggaatggagaaattttacatcagagtagttcactagagaggaaacggagggaggctatttgcctagtgctttcctgcctcctgcttcccatgagatcacatgatgcagaacatttggaaataatcacctctttcacttctgtgtgatgatgtccagcctctgggtgactggtcagtaagccatatcctataacctgtagtatgatatttcatccatgtctaaaaatgggattgaaatgaagttctgagaggtgggatatggaccaggagaaagaggaaaggaactagttggaagaatattcctaacatagaaccttttcatttaaa

SEQ ID NO: 412570 - DNA, 175 bp, Homo Sapiens
ggaggcactccgtgcacatctcacctaggctgagaccccatctcactcgcactgccgggcacagggcctctcgctcgggtcctttctaggcagttctctgaggcagcaccaaggttcatgcagaaacacacgcgctgggatgtcctgtggaagacagtacatcccgcacccatca

SEQ ID NO: 412571 - DNA, 434 bp, Homo Sapiens
agactgcagcagatgactgccaaaagtgagccccctaggtcaaacgtcttgaatttttctgattttgatgaaacgctattgcctgtataattacaccaagaaatgtttctgtcacttgtttgtgtgaagactgataataataccttcctttttgagtccccctgtgccagggatgatgcagagtrcttttacaagcactcttgcctttatcaacccaaggagaaaggccgagttagcccatttatgaagtgaaaaaatgggggctctgtgaggttgggtagcttgtgtatgtgcctgtggttcatgaggccaagacagctgaggcgtgcctgaccgtgtggctgtttctcatgatgccgcagccgttcttcagcagataccttatgctcagtaaccacacagaatttgaggtggccataatttttattcttcct

SEQ ID NO: 412572 - DNA, 437 bp, Homo Sapiens
tgtgaactctggattattttgcaatggactgcttacttagcaaacacattttgctgttggtttacagtgtacctgcactgtggcaggaaacagtttctgcaggacaggcttgaatatttttgagacttgctttacggtccagcacatgtaatgcccaggttcatcagcttttgttaatgttccaagggcttaggaagaatgcacttactgagtgtggcatcacatgaaagtccatttgggagagagagtcatcaacacacccagtatgattaagtaccaactaaagacaaaatgtgaaaggcaggtgtgtacctggcagaatctaataaagccctaatcccctacagccagaaggcagacatggcagagccccactcaggacttgtaaaggtgagcagagcctccaataagtggaattctcagctccaccaggcttc

SEQ ID NO: 412573 - DNA, 355 bp, Homo Sapiens
  misc_feature (29)..(29): n is a, c, g, or t
  misc_feature (61)..(61): n is a, c, g, or t
  misc_feature (135)..(135): n is a, c, g, or t
tcattagccacaatttttaaaaaattggncgtcatagtttacatgttagagggcgttttgnagctttgtatttttaaattaaatgttatagagtgatgttttcatgttcataattgttttcatctgtgcatttgnagccaacttgaaaacaaagatccagggattactacttaaaagccagacttcttggaggttatagtgatgattttgatagtaatgaatcttgagccgtctcataataacctcagggtgagagatggccaacaggagacagtcgagggacttagaaatctgaatgaaatctgaagttcaaatcttcagacatattccactaaccaagagattggtacctcag

SEQ ID NO: 412574 - DNA, 336 bp, Homo Sapiens
  misc_feature (157)..(157): n is a, c, g, or t
cctttttcaaatgtgttcaagtttctgaggttgctgtttgaaatgctttgactaaaaattatttttaataaaacgctggagttgtttttatctgagaagataaccatcagtgagtacccagagctccatgcccattccacactctcctcgcagtggntcagcatttgctggttttgttgctttttttaaagtcgtatggtttatggctatcttattgcctctcgaaagtattctgaaaggcataacatttgctctcgaagatgggcttgttttaatgttcagtgcctactcatgccttagaatttgattaaaaatctcagatttgattggagatcc

SEQ ID NO: 412575 - DNA, 261 bp, Homo Sapiens
  misc_feature (11)..(11): n is a, c, g, or t
  misc_feature (144)..(144): n is a, c, g, or t
agaaggaaggnccagccacacaattagacctgtaaggaaggcccggaccatcatgtaaggactatgcttaaaaaacaatgaagagcaaggcagaagccaggcatctaattttcttagaagatcaggaaaggactacccattatngctggggcacaatatgagatgtgctggattcactgaacaaaataaaaagttcagggaccacactgaaagttgactgtgaaggcaattctccttcccttagctctacaccagactgag

SEQ ID NO: 412576 - DNA, 388 bp, Homo Sapiens
  misc_feature (72)..(81): n is a, c, g, or t
  misc_feature (128)..(140): n is a, c, g, or t
agaagcaccaaaagactgtgatacacctaggtagtacttttttcaactctacctgtgaaagattttaagggnnnnnnnnnnccccctgagggaaatttgcatttcactggagggcaaatcagctgtannnnnnnnnnnnnctggttctcccactaatgagtcctgtgaccctaggcagtcagttgcttttcagggcctctctgtcttcctctggggaatgctacatgattgctaaggttctttactaaaaactcaacattctatgtctcattacctccttagcacctaaggtcaaggtgtccctagggaatgggtgacaggttgggtgccatgccttagtgccatgctatgtgtgcacaaaaggtgctactccaaggcacctgcaagt

SEQ ID NO: 412577 - DNA, 420 bp, Homo Sapiens
  misc_feature (133)..(133): n is a, c, g, or t
  misc_feature (166)..(166): n is a, c, g, or t
ttttttttcagacagggtctcactctgtttgaccagactggagtacagtggcacgatcacagcccactgtagctttggcctccggggctcaattgatcctcctgtctcaggttcctgagtagctgggagtatnggtgtgcgccaccatgcccagctaatttttgtnttttctatagaaacaggatttcaacatgttgctcaggctaatctcaaactcctgggctcaagcaatctgcccaccttggcttcccaaagtgcacaggattacaggtgtgagccaccacacctggcctgcaatggatatttttaaataagcatcaaaggcaaaattcaattccagagaatccagaaggatgtggcgtcaggaagcagacataagaggggccaggaagccggcaggaggatgaggatgaacttggg

SEQ ID NO: 412578 - DNA, 396 bp, Homo Sapiens
  misc_feature (370)..(370): n is a, c, g, or t
cagccttctgggcagctaaaattttactgaattttatccaggagaacataatggcttaggctgggtgactaagactccaggaccatttggaagaattaggaaaccagggcaaaagccacatttccttggaacacgatgagctctgtcttaaatacggtgagtgtggaaaattgtaagagacagacatttggaagatgggtagactgggatgagctcagaagaggctcggctagagatacagacttgatatctgcaaaaaagaaaaccatcaaagatgtaagagcttcttcctcagccttagttttgctcttctactccccctactcaatatttcaactgagatcatgagctctggactcacgtcccacancacaagatgtccagagcacctggcat

SEQ ID NO: 412579 - DNA, 290 bp, Homo Sapiens
  misc_feature (23)..(23): n is a, c, g, or t
  misc_feature (28)..(28): n is a, c, g, or t
  misc_feature (89)..(89): n is a, c, g, or t
  misc_feature (112)..(112): n is a, c, g, or t
  misc_feature (159)..(159): n is a, c, g, or t
  misc_feature (162)..(162): n is a, c, g, or t
  misc_feature (188)..(188): n is a, c, g, or t
  misc_feature (196)..(196): n is a, c, g, or t
  misc_feature (237)..(237): n is a, c, g, or t
aagatcttagtaaacattagctngcagnacagaaagactcattttgtgtttggggcacgcttctgtatacaaaaattttgggtgttgangtcagtagcaatgttggtgcaancatagtaataacaaagtcttattgtgccttaaaaagtactttaagangtnatagggaaaaaatgaaacaagataanggggccanatcatcttatatgtcaggctaagaatagattttatcttatntgcaatggagcaccataaagataattttaagcagggagttagattagatttgg

SEQ ID NO: 412580 - DNA, 143 bp, Homo Sapiens
tgtagcttctgatctttttgtcctcaattctcttttacctaattgctttctctagaggtaaggttatgaagtggagatggtcaggacccctcaaataaaatttgggaatacaggaaacaaagactgggtcaatacacgtattc

SEQ ID NO: 412581 - DNA, 365 bp, Homo Sapiens
gtaaagagggatggctgtacttgttattttaacttagtggaatttttagtgaagcttttgaatactacaggagttagattgttatatttggacttgtgtagcttcagaattttgacaatagctcactggccagaaaaggataactactgacatatagagggaacggatctgaactgattggttaaatgctgtacttctcatgatgactcttagcataaaggaaagaaattcatatttagcttaggaagatagataagaacaaagataaaagcaaatgtcaacttttacatttctttaagcaaaattagtagaggataaaaaataagcccttgtagtcatacaccgttacttatcaaattagaggg

SEQ ID NO: 412582 - DNA, 265 bp, Homo Sapiens
  misc_feature (132)..(132): n is a, c, g, or t
gcccggcccttttaagtcttattgcagtggttattaaatacagttagtaaatacatttgtctttggtttcacatagtataaaaaatactaacagttttattcatcagtagttctgtgagcctcattaatatntggggtttattttatcttatgtagtgtttactttttgttcatagatattgaagcaatgggaaataatttctaagtaactacatgtatcaggtaatttgaagacattgataatgaaagtggtatattgtgtacc

SEQ ID NO: 412583 - DNA, 346 bp, Homo Sapiens
  misc_feature (315)..(315): n is a, c, g, or t
ctagagggagttacagtcaagttttgcaaggggagtgagctgttcatgggcccagggtgggcagaggacacacatgcaaaggcacattgtcccggtatggtgaagtgtggcactcacagctgtctgagggacagcaggtcgtccagttgactccaagcttgataacgcgtgtaggggccgtgaggccggcgcaggaggcctgggtcttttcatgtgggttagtcccttagaagtaaacaggctgcctcagttggcttctcccctctggtcagttgtagcactctgaggcactcagtctggcaggaagagggcagnccccagggtgccagtctcaggacattgcttt

SEQ ID NO: 412584 - DNA, 383 bp, Homo Sapiens
gccaagaggaaaagaacatctagtccaacaaaggattggcacaactgagccagtgcacaagaaagcaatggcatgtccaattcaaaagaacccatgtggtagcagtcagtgctagattccctaagtgaatgatgctttattttcagaaaaatgttaggtatcaagtaaactcaatattattattaaatgtattggagtattgtttgaatgcaaataaatgattgaatatatcacttttcattgaaatattttagcataatttaggaactgtcacttagtgttagcaggcttatcataatcttatcaagttagcctccctggattaaacttggaggcgagccttccatggaaaaaagctagctcttaaactccctaattatttt

SEQ ID NO: 412585 - DNA, 347 bp, Homo Sapiens
  misc_feature (155)..(155): n is a, c, g, or t
  misc_feature (157)..(158): n is a, c, g, or t
  misc_feature (171)..(171): n is a, c, g, or t
ttttttttcttgcttggcctttccccctatcctttctggcttaaagtttcatttcttggagaatttgtaggagaaatagaaaaatcatgttggacttaagtgtcactatgtgaattttcagccgtagccatgaataaatcttattaaaaagtacnanngagtagtattctnaagagatttttagacacaggtaggagaaagaaatcaaaattgtctgtttcacagtgcattattttacttgcaggctttcttgtaattttcttatcagatcgacatttaaagtagctatatttggtcacagtagaagtttggctggttatttaagtgcaatgtcactatggaggtag

SEQ ID NO: 412586 - DNA, 129 bp, Homo Sapiens
  misc_feature (96)..(96): n is a, c, g, or t
taagtcagggcaaaaagggtctgaaagctcactcttcactgagatcctacaggagtacatagtcaaacaaagaaatcttgtgaattagcaacttgnataggatagcatctgctctggataggaaggtct

SEQ ID NO: 412587 - DNA, 173 bp, Homo Sapiens
  misc_feature (111)..(111): n is a, c, g, or t
  misc_feature (116)..(116): n is a, c, g, or t
gatgtcgattatctctaagaaacttcctccaatgtcactgaaatttgtgcaattctgatatagctcatttgcttcttaagctgtccacaactcactggtggaccaggaganccctncagggctgctaacgcattatgcatttaggcacagatgtggtcaacagcatgcaacta

SEQ ID NO: 412588 - DNA, 464 bp, Homo Sapiens
  misc_feature (87)..(87): n is a, c, g, or t
  misc_feature (224)..(224): n is a, c, g, or t
  misc_feature (226)..(226): n is a, c, g, or t
  misc_feature (312)..(312): n is a, c, g, or t
  misc_feature (404)..(404): n is a, c, g, or t
  misc_feature (437)..(437): n is a, c, g, or t
ttaaagagaagtcaaatgtccggctcccttctctccacagtcatgacctttcaaatcattgtaccttgatagtcctctaatacctcnaagcagaggctgttttaacgatttattttcctggttattttagctcgctgttgggaaggttggtctgatctaatctagcccattatattgaagtagaagttgaagtacttctttaaggcactctaatcctacatgtntngataccttgatgctatgttcaataatttcaaatgccaagttgctgttaacctgtgccatcttgaactcttgtttatcagaagtttntggatcaagctactgaaaattttgtatagccataacgaaaacacctcaatgttatgtcatatgtttgcatttaaagatagtttacaaatttnactcatattattgcatttaatctttacaacagncatgtgatgtcaaatatcatgattaag

SEQ ID NO: 412589 - DNA, 455 bp, Homo Sapiens
  misc_feature (146)..(149): n is a, c, g, or t
  misc_feature (232)..(232): n is a, c, g, or t
  misc_feature (308)..(308): n is a, c, g, or t
  misc_feature (439)..(439): n is a, c, g, or t
tggatgggctggcattgaaacccagagctggtactcttatgatagtgtctagacaatatctgtgaccacacctctgattgtacctcaagaagaaagatttttaaagtgaaattactagagcataagatataaacatttaaaaggtnnnngatacatcttacaaaagtgctttgcaataacactgattgatcatgctcatttgcatttccatgagcactgtgtaattgatcanggactctaaaagttagataagccactgataaatggagatgcccctctaagtccctgggcagtaaaacctgaccagnatagcctccaataacctgcatagtgttgaggagagcttggatttaagagattaagagggtcaaactcttttctgtccattttaaaatgcaagttttatttaagaggaactatctaatatgctgaagacagnatcaggtatctgtaaa

SEQ ID NO: 412590 - DNA, 427 bp, Homo Sapiens
  misc_feature (188)..(188): n is a, c, g, or t
  misc_feature (191)..(191): n is a, c, g, or t
aggtcagtcttgcaaggaaaagtgtttgaggtggcagaagcagatgccaagttcttatcatgagtgactgcaagacagtatcagttaagacagccccatttcgagctgctgaaggcctgacattttaaagtcacagaggcctctggtgagaactgatcttggacgagtgtccttgtttgtgtctttanctnattggatgtaatctttatcttttttatttattaaacaaaacatcttatccttgttggcaaagtgccctctgaaacataaaatgaagtcttattctaagatggagtttgttatatcaagggtactctatacaatagggcatttttttatcgctaccattggtgaagttcaaatatggagtgttaaaatctagtttcctcaagttctctggaaatgcttggctactcactcctctccg

SEQ ID NO: 412591 - DNA, 416 bp, Homo Sapiens
gtctccccagtaatactgcagccttcttaatgacgagattatagattccatttttcatatccttcacaacacacctagcacaatgttggggtagggttagagtggacctcaggtatctggttcataacagaaattctggatgcattttctgttcatcttaagaccaaaccctcatccctgaaatgtctttgggaactccatggatgcttagacagttttaggctttggggtgacttgagtgtgccctcctggtctctatccctcacctatctctggttcatcctactctagagctaaatcttcaggttaggcccaggctgaactggcctctggaaactgtggtcaatataactttcatccagtgactctcttccatgttgggtctctaggtattatggaaccaaaaaggagaaggt

SEQ ID NO: 412592 - DNA, 478 bp, Homo Sapiens
  misc_feature (46)..(46): n is a, c, g, or t
  misc_feature (410)..(410): n is a, c, g, or t
  misc_feature (417)..(417): n is a, c, g, or t
ttgtatcatacgcatcgacctcaacagtttcttccaggctatttgncattcttgattgaatagactgttaccaaggtcactatgcgccaaatccagtgatcacatttctgtcctcatttttttactcagcggtagcaagtcacaaagttgacagttcttttcttcttcaaacactttctgctgtggcatcatgatgctatgttctcctccatacctactgctcttcttggcctttcttgctgacttctgctctgttggcttccaaatgctggtctgaaagactgtaatctttctgaaggtgattcagtactgtggcgtttaatgccatctaaatgctgatgaatcccaaatgtatatctctaatcctgatctctgcaatgagctcctaatttatgtaaaaaaccctctgnttgaccnttccactgggatgtcttagagctatctcaaacttctcaagacaaaacagagctatccatct

SEQ ID NO: 412593 - DNA, 425 bp, Homo Sapiens
  misc_feature (117)..(117): n is a, c, g, or t
  misc_feature (374)..(374): n is a, c, g, or t
gaattgctctggagatgttgtactctcagtcaaggcccagaggcagtgagcagtcagctcacccctactctgaatgcctgtcagaaggagccctgcttgccctcatgcggggacagnctcggtgccctttaatccagattctaatcgtgcatttgctttttccaagtgctagcacttcctccagtgggcttgagagagcaaacctagttggttttattttgtcaacagtaattctttcgcttatgcttgaagtcctccgaaatgaatttgtagggtcctgagtgagcacaatggtaaaggaattgagtagacatctctgctgtcatggttttaggccacagactgtagtggaaagagcacgtacttcagacgtnggcagacccgaggtcagggtcctgtcgtatcacttccagcagcgtgatctt

SEQ ID NO: 412594 - DNA, 411 bp, Homo Sapiens
  misc_feature (325)..(325): n is a, c, g, or t
  misc_feature (352)..(353): n is a, c, g, or t
cagggctggacgactttgaagctaataacagcttactaaattattccaatgctaaacatggacaggagaatgaggtgtgtcttctaaattatgactttctaatatttcagggggtaacagtcaatgagtcaactctcattcttaggaggtggctccataatactctgcccctcaatgtttataaacttttatatagctttttaaacataatgcctagaaaacatttgaaattatggagaagttaaaaaaagaaatgaagtcacttataaccacatttctcagaacagaattcacatttctctatgctatatataatatctatttnaaaaaataatatgtggatctactgttnnggtaaccttttttcctttataatgaataatttcccaagttattaaaatttagatttct

SEQ ID NO: 412595 - DNA, 258 bp, Homo Sapiens
  misc_feature (14)..(14): n is a, c, g, or t
atgtttgccatttngtgggtgtggggtcccacagtaagagtgactaggccttgtggtgaacttaacatagccccagtggtcagtgtaaggagccccagatgcaactgggaactcaggtagtattttcactctgctgtgatagtgtcaatataccagggtccagttatttctctacaactgagattcatcacttttcaagaacaactctctggctccaggttgagcctatgtcatgcacttggcctcttttacataaat

SEQ ID NO: 412596 - DNA, 338 bp, Homo Sapiens
ggcagagcctgtggatcacaagggtggcacaggggagccaaagggactcgggggtaagagaaagggaccaagtgcccggagtaccacgatggcagtgcaggaaaggaggcgggcaggaaggcggatgcaggctgcacccagagaaacagctacagctgcacgcagcagctccgcaagccgtgtttttgtgagctaaacaaagaaatattaaaaggaacaatggaagcaggaattggaaataaagaatgctgttttcaaaacaggcaggatgtgggatcgcatcccaattccaccatcgagagctcctagggcagaaacctctctgggctgggcttgtc

SEQ ID NO: 412597 - DNA, 330 bp, Homo Sapiens
aaaatcttcacctagcattgttgggattatatggttacatcatctgaagttgacagaccaaaatatagaggcttcagaggtctccaaatagaactaaacatgtaattcagattgttaggaggtagtataaatgagctaaatctcatctttattacggtagagttaatgggtgatgtctaaagttgtctgaagtctataaatcatgacaaattatgatgtggtgattgtattcaacagtctttcagttgcagggataaaaccccagtttaaactagagtaagagaaagaatgtgttggtttaagctcctggaaagtgcaggcaagggtagg

SEQ ID NO: 412598 - DNA, 105 bp, Homo Sapiens
cattttattttactctacagatttttaccaagacaagaaacttaaaatatggtcttactctacttgtacggctggatggagctaatatcataaaatacagactca

SEQ ID NO: 412599 - DNA, 344 bp, Homo Sapiens
  misc_feature (12)..(12): n is a, c, g, or t
  misc_feature (117)..(117): n is a, c, g, or t
  misc_feature (143)..(143): n is a, c, g, or t
  misc_feature (147)..(147): n is a, c, g, or t
  misc_feature (155)..(155): n is a, c, g, or t
  misc_feature (160)..(163): n is a, c, g, or t
  misc_feature (165)..(165): n is a, c, g, or t
  misc_feature (169)..(169): n is a, c, g, or t
  misc_feature (288)..(288): n is a, c, g, or t
  misc_feature (331)..(331): n is a, c, g, or t
gacagggtcagntgtggccagctgacccctcagagggagtttctttcaagacttgtaagcctggtgtgcccagagcccttgctctgctggggtggcccctggtgtgttgagatcagntctaatccatcccagatgccgggccncagnggagcccnctggnnnngncccnccccccgcatagcccaggctgccccttttactctcccccagatctcatatttgtgcccagaatgtcttaaaagatctgtttcctcacctgtgggatggtgattgtgctgcctgctttgnagggtcatttgaaggttaaatgcaggattgggtgtgaaaaggncctagcacattgg

SEQ ID NO: 412600 - DNA, 367 bp, Homo Sapiens
  misc_feature (155)..(155): n is a, c, g, or t
  misc_feature (263)..(263): n is a, c, g, or t
  misc_feature (293)..(293): n is a, c, g, or t
  misc_feature (311)..(311): n is a, c, g, or t
  misc_feature (314)..(314): n is a, c, g, or t
tgttgttgcagtttgtactgaaagtccttaaatgagcaaagcgaattggacaaacatttatttcaacattacttcttaaataaaactagaagccttatcaaaccttgatttagctttacaaatgttttgtaaacaaataccaagcttattgtatnacaagagaaaactaaaactcagcccctcctaagagcagggaatggtctctcacaatctacgccagtcgctgggtgatggcagcacgctgctggcctcttccctcttgnccctgcttccgcagacacacaggtggctgnctctcctcacaggcctgncancatcctggctcgagggcctgcactcctgctgggtcttctcactcccacctgga

SEQ ID NO: 412601 - DNA, 102 bp, Homo Sapiens
tagagaataaacaactacataaccacccaagcaagcagctcaagaaacagaataagataagggcggtgagttaccagttccattcagtcttgtgttgggtcc

SEQ ID NO: 412602 - DNA, 272 bp, Homo Sapiens
  misc_feature (135)..(135): n is a, c, g, or t
aatacttacttggtttgtgttagtgcttgtaattcgcccccagaatgtgtacacgttctggatgcattaaagtctggcctgtatccttaaagggccatcgctgtgctgcctgccctcagcaaggacacactttgnagacccacagagggtccgcctccacctcacaccaaagaaagggaggagtccaaagggcatcagtgccattactcacaaaatgataaatacacccttattctgaaccacgtggagtcatatggtttgtgatccctgtc

SEQ ID NO: 412603 - DNA, 344 bp, Homo Sapiens
  misc_feature (117)..(117): n is a, c, g, or t
  misc_feature (150)..(150): n is a, c, g, or t
  misc_feature (155)..(240): n is a, c, g, or t
catcagtgtatgtacgtgtgtgaaagagtatcaaattgtgtacagtttaaagctgctttaaaaaaagtgactcaaattgcaaaaaaatctattcctatgtaccttcttaggtattanagccacaagagctacacaatggaaagaccatangagtnnnnnnnnnnnnnnnnnnnnnnnnnnnnnnnnnnnnnnnnnnnnnnnnnnnnnnnnnnnnnnnnnnnnnnnnnnnnnnnnnnnnnntcacaatctatctctgggacagtacagtgaaagtaccttccataacaagtccttactgaacatctacaaaatatgacttgtttactggtacaaaggtaaagtat

SEQ ID NO: 412604 - DNA, 324 bp, Homo Sapiens
  misc_feature (162)..(162): n is a, c, g, or t
  misc_feature (170)..(170): n is a, c, g, or t
  misc_feature (178)..(178): n is a, c, g, or t
  misc_feature (184)..(184): n is a, c, g, or t
aacttttcaaataggcccagggcactcccaaacattttttaaataccaggtaagaaccctgacccacaccctccctcataacttggaatctaggccattcgcacattgatgggaacgaaacaggcatgcaggaactaaatgggaagactcttaaagcactgnctccttgnatcgaggnccttgnaacacattaaacaaagcagaaaggagccaaaagattgctgggttttagtcctaggtcaaagtcagctgtgggtacccagacccctaaaggcatgatgaacggtgctgggcttgaaacaaaagtccttcctgcagaacact

SEQ ID NO: 412605 - DNA, 277 bp, Homo Sapiens
agatggaaaatattggtagacctgggagatagagatcactgaaaactagataacaggatagtttgagaggggcacctagttagtacaggacagtgctattctagcgacgacccatggctccatgagcaccatggaggtgcttctgaacttaaaactttgtttttatcttggtgtaaaatgcttcctgatatctcagagatgatgaaaaaccctcctgagatttgcaaattgagttgtttaaacctgttgcaagtattaattagcagtagtggtacaa

SEQ ID NO: 412606 - DNA, 456 bp, Homo Sapiens
  misc_feature (39)..(39): n is a, c, g, or t
  misc_feature (81)..(81): n is a, c, g, or t
  misc_feature (103)..(103): n is a, c, g, or t
  misc_feature (241)..(241): n is a, c, g, or t
  misc_feature (384)..(384): n is a, c, g, or t
  misc_feature (403)..(403): n is a, c, g, or t
  misc_feature (445)..(445): n is a, c, g, or t
agcctgcctcttgccctctttactaaaaaggcctgatgnagaggctgcctgtgctctttctttctaggtctctctcatccnaggcccaccaggttgattctgnggagctgccctcttgacactcagtagcttgtggggtcttctctgtctagccacttaattgattgtgttcctcgagttgctgtccatggtctctcgttactgttttctctgtgtttctgcctctctccttggccttggnaggtccatcccctttgtgaccttggctgttgctactcatggacaactttctcttgctggtccttgtagtcctggcatccagcttctcgacacgggacttgtcctgccagtacctcagacttgcacttaaaattgaactagcancactgtcactctccagggnctcttcttggttaattagatcacgacgaggagttcttaatgncttgtctctgg

SEQ ID NO: 412607 - DNA, 301 bp, Homo Sapiens
  misc_feature (112)..(112): n is a, c, g, or t
  misc_feature (145)..(145): n is a, c, g, or t
  misc_feature (155)..(155): n is a, c, g, or t
  misc_feature (166)..(166): n is a, c, g, or t
  misc_feature (188)..(188): n is a, c, g, or t
  misc_feature (279)..(279): n is a, c, g, or t
cccaatggagagagggcggcctgagcgtgagggggtgggcgtcagctgccggagaagcttctgccaggcaggagggacgagcgggcccccagctctgacctcgcgggttctnttcatgtttgaaaatgaaatcggtggtttgggntggtcgtcantttcctgtggncgacagaagaaagcaccacagntgggccttcaaacaatgagaattcacccactgagtcctgggagttagagctctgcagtcgagggggccgtaggggcacgctccctccaggnttcccagagggggtccttcctg

SEQ ID NO: 412608 - DNA, 472 bp, Homo Sapiens
  misc_feature (136)..(136): n is a, c, g, or t
  misc_feature (140)..(140): n is a, c, g, or t
gatgacagggctgagtctcaccaacacactgagtaccttaaggctctcaggataatgggaaaaaaaagaaccagtatccaccccccgccccaccagccacacacacacaagtcccacaaaggaacaaggcacccanattnctgtacccctggggcccctttccaacccttgatgcgccaactcccgacatgccttcctctaagccttgacctttctcagaaatgatagcttagcggatgcttggcagatctcaacagtcaagccgagatccagctgcagtcaaaacacaatacgcctggttggagcctcttccaggttcaaacacgggaaccacgctcggagctggacccggacccgagcctcttccaggctcagacacgggaaccacgcccagagccggacccgagcctcttccaggctcagacacgggaagggaaccacgcccagagccggacccgagcctcttccagcc

SEQ ID NO: 412609 - DNA, 427 bp, Homo Sapiens
  misc_feature (167)..(169): n is a, c, g, or t
  misc_feature (171)..(173): n is a, c, g, or t
  misc_feature (189)..(189): n is a, c, g, or t
  misc_feature (192)..(192): n is a, c, g, or t
  misc_feature (216)..(216): n is a, c, g, or t
  misc_feature (328)..(328): n is a, c, g, or t
  misc_feature (331)..(331): n is a, c, g, or t
  misc_feature (350)..(351): n is a, c, g, or t
  misc_feature (354)..(354): n is a, c, g, or t
  misc_feature (357)..(358): n is a, c, g, or t
  misc_feature (366)..(366): n is a, c, g, or t
  misc_feature (368)..(368): n is a, c, g, or t
  misc_feature (371)..(373): n is a, c, g, or t
  misc_feature (375)..(375): n is a, c, g, or t
gtgtaactgcccagtgggttcaccttccctgttacctagacagccaatttatcaagaaagggcatttgcaacagagaaaaggtaattcacgcagagctagctgtgtgggagactggagttttattattactcggtctccctgggcatctggggtttggagtttttannnannngctggtgggtgggggncanccagtgagtcagaagtacccattngtcaggtcagagatgaaatcacagggagtcgaagctgttttcgcactgagtcagttcctgggtgccacaacatcagatgagcctgggtggtgccaggtgacccaccaagtgntgntcttaggctttacgatggnnatnttnnccccaggngnagnnngnggagggtcagaatcctgtagcctcccgctgcgtgactcttcaaccgtagttc

SEQ ID NO: 412610 - DNA, 226 bp, Homo Sapiens
  misc_feature (145)..(145): n is a, c, g, or t
cgcagacaccacctaactctcttccctcctggattcttctgtacggtgttcctgatcagccgccatggtatagacttcactcacttgcttttctgttgtctgtccccttacccgcatcccaacaaaatcttcactccaagaaggnagggggtctttctttaatctgctttgatcactgatgtatgcgctgccagtaacaggatagtatctagcactacttctgaat

SEQ ID NO: 412611 - DNA, 186 bp, Homo Sapiens
actctgtcctccagcatctgaggcttgggatctcccagaaagtcacaccaggatgggagcccaggtcgtttgagctgggtgctcttggctgctcacttgccttcttcctgtctaggccccttataggttcacctggcactgggacttgaagtagttatggcctgaggtctcacttacctgggctgg

SEQ ID NO: 412612 - DNA, 198 bp, Homo Sapiens
  misc_feature (188)..(188): n is a, c, g, or t
ccacctcctctcctcaggcttcctctgcctccagccccctccacccagcacagaatcaacacgcacaccattcccatcactgctcagtgctaaacctctagggcctcctcatgccaacctggcccttcctgattcagccactcctgccctctaccttctgtgttcttacgccagccagaccctatggntccagttacc

SEQ ID NO: 412613 - DNA, 365 bp, Homo Sapiens
  misc_feature (154)..(154): n is a, c, g, or t
  misc_feature (336)..(336): n is a, c, g, or t
  misc_feature (349)..(349): n is a, c, g, or t
aacacacatgtgaagggctgtaaggcagggtggccacagcagcaaacagaagttagtgtcaggtgggaaacagtcaagatgaccatgagaggccagggtggtgtggctaagcaaatgatttcttgggtggtgtcttgcctacgaggcgggtggntcctggagctggaaactggctagagcaaaagctcccaaaactgaggcccgcatcagatatgcccgcatcctctgtcctcctggggacacccttccttctgcttctcgggaggtgctgtggcagccacactggcttgcaagagctggctctgtgcatctcttctcaaccacagggtcaggggngtcatcttgcagntggaaactggcaccgg

SEQ ID NO: 412614 - DNA, 366 bp, Homo Sapiens
  misc_feature (37)..(37): n is a, c, g, or t
  misc_feature (100)..(100): n is a, c, g, or t
  misc_feature (107)..(107): n is a, c, g, or t
  misc_feature (135)..(135): n is a, c, g, or t
  misc_feature (137)..(137): n is a, c, g, or t
  misc_feature (145)..(145): n is a, c, g, or t
  misc_feature (151)..(151): n is a, c, g, or t
  misc_feature (153)..(153): n is a, c, g, or t
  misc_feature (157)..(157): n is a, c, g, or t
  misc_feature (169)..(169): n is a, c, g, or t
  misc_feature (201)..(201): n is a, c, g, or t
  misc_feature (227)..(227): n is a, c, g, or t
  misc_feature (237)..(237): n is a, c, g, or t
  misc_feature (243)..(243): n is a, c, g, or t
  misc_feature (271)..(271): n is a, c, g, or t
  misc_feature (280)..(280): n is a, c, g, or t
  misc_feature (291)..(291): n is a, c, g, or t
  misc_feature (293)..(293): n is a, c, g, or t
  misc_feature (322)..(322): n is a, c, g, or t
  misc_feature (341)..(341): n is a, c, g, or t
  misc_feature (355)..(355): n is a, c, g, or t
cgaacaggcactgaggcctggggagctgtcacaaacngctgcctgatgggggagggttaccgtaattgccggattaacttgggggactttaaactgcatncctcttnaaaatataaagtataattgttgatattngnggcaaatnccaaantntgtnttctatacaatngtgaaagagaaagggaaaagcttgagagtagncccatcagtacttacatagaattagntgataaattnacattntcctcatcagaaaaacagtgcagcctanttgcacatnctccaaaaatntntgctaaatagcagaaacagaatgttattntgtaatgcgctattgtggnagttgttgttttcncccagccccct

SEQ ID NO: 412615 - DNA, 152 bp, Homo Sapiens
catattcaaaaaatgtttccatattaagcccagagctacatttatatgaggattaaaaaaataggatttaactgataggtagcacaagatgaaagtggagaatttagattggttccatgcctctacaatgaggaggcatttaggatggtcaa

SEQ ID NO: 412616 - DNA, 667 bp, Homo Sapiens
  misc_feature (457)..(457): n is a, c, g, or t
  misc_feature (564)..(564): n is a, c, g, or t
  misc_feature (652)..(652): n is a, c, g, or t
aaggaaagcatttacatttaccaagatgaattctgcagttttgaatttcaacctcatttgcaaatgcttatctagtttgagtgtaaatttttatgtaaatgactacagtgggctatgtcattgctttggccaccttgccagacctcattcatgtggaagagactcacatgtttttaggtgacataagcagttctaagtttacactttataattaaggtattacccccttttaaatcacgttggctctatcccttgtcatcagtcaatatttagtgaccccacctgactagttgataacacagaggttctcaagacctgggatctgacctgtttactgtgttgacagagccttaagggctttatctgaataagttttgtgagtttaaattatacaacactatcctaaataacactttgccaaagtccattctctccccagtaccaggccacatggaanggctgtaagtcctggaagcgctgccctgcccactgtccccaacctaacctgatatatctactgcaaaattacgggttctcctccgacaaaacttaaattgcaatcancaaatgtccaaagtatgaaacaatgcttctgaattccctaatccggttgagccacaacaatggtcccctttaataacaaaacctgggngaaaaactgtgggaa

SEQ ID NO: 412617 - DNA, 124 bp, Homo Sapiens
agcatcctagtgggtatgaagtgatatctcactgtggttgtgatctgcatttccctgaggactaataacgttgagtatctccttatgtacttattgccatttctattatatgtcttctctgggg

SEQ ID NO: 412618 - DNA, 645 bp, Homo Sapiens
  misc_feature (18)..(18): n is a, c, g, or t
ggcctattgtttagctcnttgggcttatttaagacaattgtttaaagtctttgcatagtaagtccaatgtctgtgtttcttcagggatggttttcattattttgttttcaatgagccatactttcctgtgtctttgtatgctgtctttttgttgttgaaaactgtatgtttgaacatcataacgtggtggccctgaaaatcagatattccccccttcctgagagttagttttatttttattattgaagattgtagcagtctattgctacatgtgcagtcatttccaaactatttttgcaaagactgtattccttctgtgtgtcatcactgaagtctctgttccttagtttgtgtttagtagtttgacatagatttccttgaaaggagttaaaactagcagaaaaatctctctcccagtctttccagtctttgtagattggttctgtgctgggcttttccattaatacttagccaggcttgtactgagcctaacaatcaggcccaaaagcgtagggtctttgcagatcttgtctgagcatgcttcttgctgtgtatgcacgtagttttctaaatctccctgtatgtgctgttgaatattctaatttcccaaagaaactcctttgcagctttttctcacagaacata

SEQ ID NO: 412619 - DNA, 279 bp, Homo Sapiens
  misc_feature (235)..(235): n is a, c, g, or t
acactaaaattttattttgtatatgatgtttggttttttaaacttactaacataaggatttcctttaatattccaaatacagttcttgaaacagtatccaacatgaaatcttatctccttgcttttagacttagtgctatttactatctaaagacttttctatggtaagccagggtacatcctatatactacagataccttaggtttcagtatttttatgcagcttcttcattgngtcacattttgttttcatatctgtaacagagctctgctgaaatt

SEQ ID NO: 412620 - DNA, 651 bp, Homo Sapiens
  misc_feature (55)..(111): n is a, c, g, or t
  misc_feature (318)..(318): n is a, c, g, or t
  misc_feature (378)..(378): n is a, c, g, or t
  misc_feature (393)..(393): n is a, c, g, or t
  misc_feature (460)..(460): n is a, c, g, or t
  misc_feature (463)..(463): n is a, c, g, or t
  misc_feature (467)..(467): n is a, c, g, or t
  misc_feature (469)..(469): n is a, c, g, or t
  misc_feature (493)..(493): n is a, c, g, or t
  misc_feature (502)..(502): n is a, c, g, or t
  misc_feature (510)..(510): n is a, c, g, or t
  misc_feature (547)..(547): n is a, c, g, or t
  misc_feature (604)..(604): n is a, c, g, or t
  misc_feature (613)..(613): n is a, c, g, or t
  misc_feature (617)..(617): n is a, c, g, or t
gcactttattgcataggatttggggactgtggctctctacccttccactgtgttnnnnnnnnnnnnnnnnnnnnnnnnnnnnnnnnnnnnnnnnnnnnnnnnnnnnnnnnncacaggcaggcactttttgtgggggcaagagggctctagggagggagtaagaagcagtgggggacaggctggcaccagcctacactttcccagcaccaagaggccagccctgggcggcagtgacttgagtgtggtgggtggggcgccagcccaagcagcagggggcagccttcacacgttcgctgggctgtagcacagcaggtgtanctgcaggttttggtcccagtggcgcagtagcaagaagagccctcgggctgcggccttganggcggccaagtcaangccgtcaggcaagtgctgggcccgcaaccaacaatcagccttggccgctgtcaattcccactcctcnaangcancngcgcatcggtgctccaaccaagcnaatgctacngcaattgnccaagtccgggcccgcaagtccgttccgcccaacccntccgccccctccgaaggctccgtgtctgaaccccgcccaatgtccaactggcctggnccctcaaancccnaacttggggacgggcttcaagaaggccttggaac

SEQ ID NO: 412621 - DNA, 267 bp, Homo Sapiens
  misc_feature (85)..(125): n is a, c, g, or t
  misc_feature (150)..(150): n is a, c, g, or t
  misc_feature (164)..(172): n is a, c, g, or t
  misc_feature (183)..(183): n is a, c, g, or t
  misc_feature (189)..(189): n is a, c, g, or t
  misc_feature (210)..(210): n is a, c, g, or t
  misc_feature (237)..(237): n is a, c, g, or t
  misc_feature (251)..(251): n is a, c, g, or t
cccctatagaataaggggataaaaaatgtttttgtataactgtgcaacatgtttgccttttgagttaagttattacaacaagtcnnnnnnnnnnnnnnnnnnnnnnnnnnnnnnnnnnnnnnnnntacagtaagctaaattaataattgnattaattaattaannnnnnnnnccgaaaaaaantctcantcctgtcaaccaagctggaantcaatggggcaaaccttggtcaacaanaaactctggcctanagggtcaaagcaaatt

SEQ ID NO: 412622 - DNA, 678 bp, Homo Sapiens
  misc_feature (70)..(116): n is a, c, g, or t
  misc_feature (310)..(310): n is a, c, g, or t
  misc_feature (415)..(415): n is a, c, g, or t
  misc_feature (434)..(434): n is a, c, g, or t
  misc_feature (453)..(453): n is a, c, g, or t
  misc_feature (491)..(491): n is a, c, g, or t
  misc_feature (510)..(510): n is a, c, g, or t
  misc_feature (520)..(520): n is a, c, g, or t
  misc_feature (525)..(525): n is a, c, g, or t
  misc_feature (564)..(564): n is a, c, g, or t
  misc_feature (566)..(566): n is a, c, g, or t
  misc_feature (580)..(580): n is a, c, g, or t
  misc_feature (582)..(582): n is a, c, g, or t
  misc_feature (600)..(600): n is a, c, g, or t
  misc_feature (616)..(616): n is a, c, g, or t
  misc_feature (622)..(622): n is a, c, g, or t
  misc_feature (646)..(646): n is a, c, g, or t
  misc_feature (654)..(654): n is a, c, g, or t
aatataaatcaaggtcgcaaactgacattttagcagttttcaactaaaggggaaaagaaaggaggggacnnnnnnnnnnnnnnnnnnnnnnnnnnnnnnnnnnnnnnnnnnnnnnngggtcactatagatatttgtgtgtgtccttttccccttgtagaaggtagctaaggctcttgagtggcttctaataaattctctcatgtctttgcggattatatccacttaccaagcaagaactcctcctttagtaggtaggtaaggtgtaagagaaagggaagagcgggcaacgtgagtccatcattagagtcncaattgacaagaaaaaacacacacctttctgcacatcctcaaacttgggcctgaactttgagttttggtttttaagtgcccttgacgggtgggggcatcaattcngttttggtttgtcataaangggacctaacctaaccaanctaatcaatcccttaagggccaaattggagcaagaaanccttgtgggacatgccaantggcagctanagtantgcatctactaactaagtgtgaatattgaagggggcacnanggaaggaagatgcncnttcaacaaaagggctttngaaagggcttggaaantgggcnttggggtgactggggaataaaaanggggcccnaaaaacctgtctaaggctgattta

SEQ ID NO: 412623 - DNA, 686 bp, Homo Sapiens
  misc_feature (279)..(279): n is a, c, g, or t
  misc_feature (350)..(350): n is a, c, g, or t
  misc_feature (521)..(521): n is a, c, g, or t
  misc_feature (531)..(531): n is a, c, g, or t
  misc_feature (548)..(548): n is a, c, g, or t
  misc_feature (606)..(606): n is a, c, g, or t
  misc_feature (631)..(631): n is a, c, g, or t
  misc_feature (659)..(659): n is a, c, g, or t
  misc_feature (669)..(669): n is a, c, g, or t
ggccgtttttttggcctcctaagacacagaccctcacttatcccactgtattaggaacctttccatattgattatctgggatttgaaccagccagtgacaggcaaaccgacctgctaaggcagtaacagaagacccttggcttccctctatcccacaaagcctttgctaggccttgtccagtcccagatggcctctgcctagcaaccattgccatcaactccatcgctgccctggccccagtatctcacaatcattcactagaagcaaattccattggnatatagacagatagtctctgcaagcaagttcacattcaaagatattttctgaaagttttgttttaaactcntgtagaaaaaataatactgaaagcccattactgaaaagaaagttaacttcattatgtgatctgtattttcactcctgagctgtatgttctgggtccaaacaatactttatatcaatttgggaagagtgtctaagtggcaacagggatccaatgaggaatataatcaaacanggtcatttancaatcagattaccttantatcattacattacccattttatcctaaaatttatgttcaatttcaagaaccaacaanccaatctgccaatgtattcaaaggnaacacacatatttatgtttaaagtaacntgtctccaanctaaggaataaatatca

SEQ ID NO: 412624 - DNA, 676 bp, Homo Sapiens
  misc_feature (255)..(302): n is a, c, g, or t
  misc_feature (541)..(541): n is a, c, g, or t
  misc_feature (625)..(625): n is a, c, g, or t
  misc_feature (636)..(636): n is a, c, g, or t
  misc_feature (656)..(656): n is a, c, g, or t
ggctggtccaggtgaagattctggaatgctctattcaggatatatgggagtcaaagaggaaaatcagggaacttcccttttgtctttaagacccaaagcccctagacacttcattttctccttttcaagtcttcttatacagattaggcatactaatccaaaaatccaagatccaaaatatgaaattctccaaaatctgaaaccttttgagaaccgatataatgctcaacagtcatacccaaaggaaatgctcannnnnnnnnnnnnnnnnnnnnnnnnnnnnnnnnnnnnnnnnnnnnnnntaagtataatgcaaatattccaaaatctgaaaaatcagaaacacttctagtcccaaccattttagataaggaatactcaacctatacttgtttgttgcgttatgtctagggcttctcagttataaaggtgaggacctcattggaatatggttactccatactggcaagaataagaagtccaagattagtttttatattcaaaagtattccaagtcttcaatatccataaactcaaaggnaatttagaataatttcttaacccatctcctctaatgacttttttcattcataaaacttcctatttccaaagatcatactgtccnttgttcctccngggaagcaatctgaaggaanggtttggtcaatttaagtgc

SEQ ID NO: 412625 - DNA, 674 bp, Homo Sapiens
tgcacgggcccctactggtaattattcagttacagtaacatatttggtattgctttctctctttttcatttcgattttggggatggaagtgggaagtttaagttgtattgctttgtgtaccttacctactttttaaaaatagccttcagtgtcacaaatattacatttataggcatttgagagtcttaatgtgctaaaagaggaagacgacttcatacctaaaacctcatacattttcatatgaggaaaataaggcatggggctttcagagatcatgcagcttcacattagcagaattaagagaagaccgcaaaagtccttatgacgaagtgtaaatgagacatttggtttttatgagcttatttatagtacagaacacaaaaagtttttatacagatgtttcctaaaaccctgcctttgactgaatgcttgctttagagtatagtaggctccatagagcaagaaactgtagtttaatatctggcttaatatagatagctctccttctcatttataaaaaataatttttggcatgcatttggtgtagtattgtagtattccttgtgaataacacctgtaaaattagtaatactgaggtaactcagaattggtgtattttgtaacttgacagaatttaaataactcccctcatcccaagagtatacaaagtcctc

SEQ ID NO: 412626 - DNA, 294 bp, Homo Sapiens
  misc_feature (94)..(94): n is a, c, g, or t
  misc_feature (104)..(119): n is a, c, g, or t
  misc_feature (150)..(150): n is a, c, g, or t
  misc_feature (197)..(197): n is a, c, g, or t
  misc_feature (250)..(250): n is a, c, g, or t
tgggggcagagaggggaagcccatagacgtcataaagtgaaaaccaatggtaaagtttctgttcaccaacataaagagtcactggaccagtcanggtgaggggnnnnnnnnnnnnnnnncaaagcaagtgggaagagacccccaaaaggntcatgctccaagcagttccagacctaaccccagccatgcagatgaanggcccgggacttcttcagacaagaaaaactatcatgaacaagacagtgaccantttgcattggagagaccctctcgctggaggcaaggactgaatta

SEQ ID NO: 412627 - DNA, 634 bp, Homo Sapiens
  misc_feature (132)..(165): n is a, c, g, or t
  misc_feature (229)..(229): n is a, c, g, or t
  misc_feature (281)..(281): n is a, c, g, or t
  misc_feature (312)..(312): n is a, c, g, or t
  misc_feature (344)..(344): n is a, c, g, or t
  misc_feature (379)..(379): n is a, c, g, or t
  misc_feature (454)..(454): n is a, c, g, or t
  misc_feature (487)..(487): n is a, c, g, or t
  misc_feature (499)..(499): n is a, c, g, or t
  misc_feature (506)..(506): n is a, c, g, or t
  misc_feature (543)..(543): n is a, c, g, or t
  misc_feature (573)..(573): n is a, c, g, or t
  misc_feature (617)..(617): n is a, c, g, or t
ttttttttcaccttttaactgtctttattttgatctagtttaaacagataaagaagccaaaattttgccaatgagactacttgccaggtggaaaacggttaatttatagactcctgggtacaaaagccaaannnnnnnnnnnnnnnnnnnnnnnnnnnnnnnnnngaaagttatatacttatgtacaaaacatttagtttctccaccaacttgaacttttcataaaggngagcaaacattcttgcagtagaaaaaggatgtagccacaaactaatattganaaatcagaaaaatacccactctttaaaaggnagttaatcttaatagctccaaataaccatggnaagaagtcttgttacaatcgctatactcctttcangtttataaaaatttggttccatctataagaaataaagaacatccctccctcctaatcctcaaattcaaaataggnccttagcaattatttcaataatacataaaatgnatgcctttcacnataagtngatacattaaatatccttcctccttgccctaaagcanctgagtggattccctgagctgtcaacctcngggttctcctcaaagggagttaatggacaactaactggtgtcancctggttgcaaccctgc

SEQ ID NO: 412628 - DNA, 646 bp, Homo Sapiens
  misc_feature (428)..(428): n is a, c, g, or t
  misc_feature (520)..(520): n is a, c, g, or t
  misc_feature (544)..(544): n is a, c, g, or t
  misc_feature (554)..(554): n is a, c, g, or t
  misc_feature (563)..(563): n is a, c, g, or t
  misc_feature (613)..(613): n is a, c, g, or t
gaagggagggagaggtatgaagacagaggaggtgagccctgttgccatgggtgagggcatgaggatttattctaagttccagatacctggagttaaagtcccctgaactggacaacaactacaagccttcatatctcaatgctaccatctttaagcccccgttataagagctcagaggcttcagagatgacaggaaacaccagaacgctatggtggagcatatctaggtgccttctcccaactcagatcctttgactgcagaaagacacagatttcaaggctgagatccacaaaactctagcaaatactgcacagacactgaccaatgacagcaggtgctgcctgtcatcctggagcaccaggcagggttccaaagcacccttgctgtgccagcctctgattgctggttatagggaggtctggggtantcccaaaagctgggatgtgcaaggcagctggggtcagtcaggaggctcaaggcaatggcaagaaaatattttcctccctggtaaaaccacancggggtatccaagctgaatattantggcgaaaangaccatggnacaacaacaaagacctgcaaggacaaaactttgttggagctgaatccaanaaaaacaatcctcctcctaaaccaatccccctg

SEQ ID NO: 412629 - DNA, 404 bp, Homo Sapiens
  misc_feature (23)..(23): n is a, c, g, or t
  misc_feature (158)..(179): n is a, c, g, or t
  misc_feature (327)..(327): n is a, c, g, or t
ctctagcacgttggcctactggnatcatcgtttctatcttgcaataaatgaagctgcgagtaattggaaatttgcataaatataaatgggtttgcattctttcggctgctaaggccgacaaaggatctgggagggcaagccctagaacgggaaagccnnnnnnnnnnnnnnnnnnnnnnaaactgggccctccttcctagagagatgtaaaacctaaagtaagacctaatacattttaaacatcaggttgggggcgggtgaacaccaggaggtttggggtttgtagattcccctgcttgaaaacctcccaagcaatatgtggctcanccctctcctttctgcgcgcgctcatttgcactgggtctctgtgtgtgttctcaaatgtgcagccagatgcgctttta

SEQ ID NO: 412630 - DNA, 432 bp, Homo Sapiens
gagacagcagctcttgagtgaactcacagtcaaactcaagtgtcaccaacccacttggactttcaggaacaagctcatgggctcctgcccagaagggctaactgcttcgaatctggggatcacctcttcttcctttatgttcctccaacacccctctttctccctgttgcagttccagcttttccagtatatttccttgttcaaaattcctaaagtggcttccattttcctgctgaatgttgctttgcacccagatggaagtcaaggatattaaaagggatataaagcaaatgacactgtccctgccttgaaggaatgtgtaattttctagatgatagaacgaatgcatttgaaccaagaataaacaaaatagacatatccaagggcttaggtaaattgtacacagactacttgtgcaatgggaaggaaaat

SEQ ID NO: 412631 - DNA, 660 bp, Homo Sapiens
  misc_feature (503)..(503): n is a, c, g, or t
  misc_feature (630)..(630): n is a, c, g, or t
  misc_feature (636)..(636): n is a, c, g, or t
aaatcattctgttatatccaccaagattcacctagattcgagattatttcatttgagaacgtgagattatagaagtaattgggcacatcgttactgttgggatggacggtggactttttggctcttagcaacactgaaagggaagacgtgcctagattggtttgggtaaccatattcagactggcacaggaaggcgagtcaagacaatagcactagaaggcttaggggaaagaaagccagcctcttcctcctcaggaactggtcaccaggtaagcctctttgcatcctcaactgagttctcatgttttaattgggttcgtgatatagaatctagaaaaattgtgtatgttctgagatcctgaggaagacaagaccaccacaaaattccacctcttaaacacacccttgcttaattcagtcctaaacaaattagctgtcactgacctcaagccagttaggcctctctccaagttgggaaaactgctgtttgcaaaagcccagtnaaacacagttaatacatgaacaaatattaccaacacttgcaagccgattgcggtcatgaatgtcctaagagcgccatcgtgtacggtgggggtcaaccaaggtgggaaaaagggtatcattttgaancccaanttcttttgtccccggcgggatctg

SEQ ID NO: 412632 - DNA, 630 bp, Homo Sapiens
  misc_feature (252)..(252): n is a, c, g, or t
  misc_feature (254)..(254): n is a, c, g, or t
  misc_feature (285)..(285): n is a, c, g, or t
  misc_feature (314)..(314): n is a, c, g, or t
  misc_feature (340)..(340): n is a, c, g, or t
  misc_feature (366)..(366): n is a, c, g, or t
  misc_feature (402)..(402): n is a, c, g, or t
  misc_feature (446)..(446): n is a, c, g, or t
  misc_feature (449)..(449): n is a, c, g, or t
  misc_feature (453)..(453): n is a, c, g, or t
  misc_feature (487)..(487): n is a, c, g, or t
  misc_feature (496)..(496): n is a, c, g, or t
  misc_feature (520)..(521): n is a, c, g, or t
  misc_feature (579)..(579): n is a, c, g, or t
  misc_feature (588)..(588): n is a, c, g, or t
  misc_feature (591)..(592): n is a, c, g, or t
gcctaattggaaatacagtgccataacagagtactaaaaggaagcaattgagcggatccaaaagtacatacagttggctttagtctttatctaaaaactaagcacctccaaattcaaatattcaaatacgtggatttcatttacagtcctctacagagtgatcattggtaattatgaccaagacccttgcgtactgcaaaagccaaaaacgtctgttgagtagcactaaagatgaaacataatttaaaaggncntagttagtttaagtatgctgtgttaacggcnataagaacagaagtaaagcttgtcaagtnaatactgtgaacagttattttaaggngtttatcaaataagagaaactttganaaaaatgcaagaaaattttgtggtgataaaattganaacaaatcacctgatttgggataagtctcctctatctcctttcngtntgtncattctctccttggctgtgtcctttaagcacgangtggcgtanccctaagggcaaatgggctcagtnncctagatatgagcctgaggacactcagtttcacgaatcaaaaatccaaggagattggngagatgtcngtnnttgatccaagttacacagtgtttaatggtggcatccga

SEQ ID NO: 412633 - DNA, 694 bp, Homo Sapiens
  misc_feature (47)..(47): n is a, c, g, or t
  misc_feature (78)..(78): n is a, c, g, or t
  misc_feature (123)..(123): n is a, c, g, or t
  misc_feature (454)..(454): n is a, c, g, or t
  misc_feature (517)..(517): n is a, c, g, or t
  misc_feature (542)..(542): n is a, c, g, or t
  misc_feature (583)..(583): n is a, c, g, or t
  misc_feature (609)..(609): n is a, c, g, or t
  misc_feature (668)..(668): n is a, c, g, or t
gggccgatctttttaaggccagtggggccatgatctccatttgaccnatgagaaaactaaaataggaaattgacaaanagtagtgagattattagcgaagccttcagaattatcttaactcantaccctggtattagagagtagtctatagtgaaggggatcagagtatgacaccctcaaatatgccacttcagcatgaggattattttgaactacaggcaattaaaacagcaaacataggaggagctctctgccctcccctttacttcctaaaaatagggcataaatttcccttttgtaaaggaaattcatatttgtaatggcgtcctcctctccagtaccaggaagagaagaagcagactcttctcacttgactctgcctaataaaccttactaaacaacccttatttaccactcattccttaagtcacctatcattaatgcccaacctcancccaccaagaagtctaaacccccattttgtctagtctcttctccatactttatcactccttcntaaaatgatatgtaagccccttggnctcaatgggtttttgggggtttcaattcctttctgtgaggnttctcacgtgcatacaaaataatccntttatcctcctaaatttttgtcagtttaatttgcaagcaccaactactgaacataaganggtaaaggaaaagtttttccccccaa

SEQ ID NO: 412634 - DNA, 678 bp, Homo Sapiens
  misc_feature (526)..(526): n is a, c, g, or t
  misc_feature (596)..(596): n is a, c, g, or t
  misc_feature (609)..(609): n is a, c, g, or t
  misc_feature (621)..(621): n is a, c, g, or t
  misc_feature (639)..(639): n is a, c, g, or t
  misc_feature (649)..(649): n is a, c, g, or t
gcctactgggactgaactcaagaacattgttctctttgagaatgtgaagattttaaatagccaaagaattttcatgtataagagctagctaaatatagtatatcctgctctttcgaagaagatacaaaactgttgcctgtactaatgggtatagtagagcagttgaagaactaacacatacatggacttttcggtctgaatttgtgttggcatccatggtacttactgttcagtaggatgttattgcaaggagcagagtgccctctgctggagtaatcgcaattattcttgcagcagattaatttgacttgggtcatgaattcaacaaccagttacttgcctttcatcatacaatttcttcggtagttgagaatttggtctacatttatcaaatgaggaaagagtgtcacaaactctaaaaagctgaaggagaccccacagatcttctcactgtcagcagcccttacttctgcaaaatgttgaaggataatgttgctctgtttgcaaagaagatgcctccggctanaatgtttgtgcaattataagcaagggactgcttggttttggaagttatctcaactttaatcctgggaaantgcaaagggagtnaataaaaagacntcatatgaatgtaatggngtgaaatacngagtgtttgtcatgtcataataaaattac

SEQ ID NO: 412635 - DNA, 618 bp, Homo Sapiens
  misc_feature (533)..(533): n is a, c, g, or t
  misc_feature (550)..(550): n is a, c, g, or t
tacttagacagctcaattaaaatcatattgaacatctccttcaatgtgatattaggacatttctagaagtgtttacttgaatctacagatttggagctataagggacttgagtttaggaatttagtttaaatttgactaatagcatacagttttctacctcagcctaataaactcactgactctaataacgaatttgaaaaacaacatgtccttagcatcctgacaaacccacagaactgctgctccttcctcctacatgtcagtttgggtttcagcattgcatgacaaaaatctcaattttctttatgtgttagaagttcataattggaagtgtgaataaaagttaggggaaaaatgacttaaacttcagcagcaggaaaagataatctttactgtctgtctagttttagagcatccaataaacaagaacatccatcaaaaaactctttggtggcttgaggaaatgtggggagtgcctgagtatcacgctatccttcttgtgaaatttttgataatacatggtctgtaagtnagcatgatttacaactnctaactaaacaatttattaattccaacaatttcacctaaatttcaccaaaggggtgtttagaatttcc

SEQ ID NO: 412636 - DNA, 281 bp, Homo Sapiens
  misc_feature (86)..(86): n is a, c, g, or t
ccagacatgaagcatgaaatgcctctgctggcagcaagattctctgtacttagcttgtagtaacacggttgccagatggggctttngcctatctaaatttttataataaactctcagggtacaataaaatatccgattagtttaaagcagttctgtaatttaaatgatctatttagtttttgactatagagtctaccttaactagtcatttgtttcatttcatcaaagtcattagttaatatctcttatctcaatgaatagttaaaattacctcaatatag

SEQ ID NO: 412637 - DNA, 625 bp, Homo Sapiens
  misc_feature (517)..(517): n is a, c, g, or t
  misc_feature (597)..(597): n is a, c, g, or t
aagagagaccatcaacttagtatttttgttaaagagggagttttcaaaagagttatattttggacagaaatgtagcatgcccaatagctgccccataaaaagattaggcctgacttctgaatactgtgcactttcctactgcataagcaatcctgtttgttctccattttaatatttaaagagccttctcatctacagtttaggtcagggctcaagacacattaacagccttataattctggacatactcaagaaccacatccactaaatgacagggggtagtgaaatagtgtactttccatcttcaaatcaatgataagccctgtctattctaaaaatccagaaatacaaatcacctgacctccattatgaagactggttattggcacttgtctgccagaatatacttagagggccactgtgggagaagaggaaggaatggagagagaaacacatgcatacccacgcataagtctgtacaaaacggcaggatattctgccaagttttatcttccanctgttttattcactataagcgtgctttcctacgttttgaacccaaacttgagtgtaatcatccttgcaaaacaagttgcnttcaaggtccaacaattctccagtatta

SEQ ID NO: 412638 - DNA, 624 bp, Homo Sapiens
  misc_feature (563)..(563): n is a, c, g, or t
  misc_feature (590)..(590): n is a, c, g, or t
  misc_feature (592)..(592): n is a, c, g, or t
ggatcataaaaatgaagctaaaatatagctgaatccctaaacattagtgctggtaacacctgcctggtcatagaaacctgacaaacagctaagaggtcagaagagcacctgcatgttctccaagctcatgaagtctgatgcggcaaagcctccgtgtgtctcattatctgtacatctctcatttctcagctgaggaatttaaagcacttcaatcatctcaaaagcaaaattccctttctcaaagcagagctgggccatggtctaactccctagcaatcgtttttggatttggagaaatagaaggaagctgctcctgggttttgtctctaggtcatgagatacctccattagcaacatctggaagttgtctcttttgcataaagaattgtgaaagttaataaggtctggctggaagcacagctcatggcaccgtgcctttcctcaattcctggatcttacataaatcaaatattatgtcctctctccttaagctatttggtaaccaaatctactccaagtctaaagatttcatgggtaaaaacaccaagaagaaaacattaggncaatttatccctccaataaagttgtananggtggggaaactcctggaacaaaatatgtcca

SEQ ID NO: 412639 - DNA, 671 bp, Homo Sapiens
  misc_feature (157)..(284): n is a, c, g, or t
  misc_feature (501)..(501): n is a, c, g, or t
  misc_feature (561)..(561): n is a, c, g, or t
  misc_feature (572)..(572): n is a, c, g, or t
  misc_feature (596)..(596): n is a, c, g, or t
  misc_feature (610)..(610): n is a, c, g, or t
ttttaaaaaaaacatagtctcgctctgtcgcgcaggctgcagcgcagcggcgcgatctccactcactgcaacctctgaccctgggctcaagcaattcttgtacctcagcctttagagtggctgggactacaggtgtgcaccaccatgcccggcaaannnnnnnnnnnnnnnnnnnnnnnnnnnnnnnnnnnnnnnnnnnnnnnnnnnnnnnnnnnnnnnnnnnnnnnnnnnnnnnnnnnnnnnnnnnnnnnnnnnnnnnnnnnnnnnnnnnnnnnnnnnnnnnnatgagccaccatgcccggccttctactgtattttaaaggcagatgcttctcttccagtcctgtgtacaatcttttttcactcaataaatgctgctgcttgacttaatgatactctaacatcagataaagtcaggctgtagtaaaggttttgatataatggggtaaagtctctagagaaaaaagaaattgaccttggggcaaggtgaagcactctaanctgggggtatgtgacaaccaagttacttcactcgcctttgggtccattagcagtgtcaancatctggtccntccgaaaacatgtgtgggttcaanacatacaagactanaagaatagaggaaaattagattatcctgtgcaatcccaattctggagggcccaaatcaaac

SEQ ID NO: 412640 - DNA, 691 bp, Homo Sapiens
tgtggctttttttggcctttgttaggctgggagataagagtttgtggttttcatagactgccaagaacttaatttgcatacataaatctagatatggaaagatgtattgcaacattgtcaaatctcatctggacatgttactggaaagtatagctttgggagctaccaaacatcaccaaatatgttatcaagctgcaaaagaaatcaaatgcactttaaaatgtccctttagtgtactctgtcaatattttttttcaaagaacatagcctctgttctaggaatttcattaatgtgttatactatcaaaatgtcaatttgagtgaaacttacaagtaaaaagccattctcatagaagagtcagaaaatcaaatcaagtacaattcaataaaaatgcctaagataaaataaaacagaagaaatttatattaagctcctgagaaataaatgcttgattattttattttcagaaactattaaaagttcaacagccatctctggtgaaggagttcaattggactccaaagaattgttttatgtcagctgattgaggatgagaacgattatatcacccagaatgacttgctgtcaactggtacacttcactgaattcacacaaataattcccaacatcagttttctagtttttcatatgaaatttggattttcaagaaagggctatagaatataaag

SEQ ID NO: 412641 - DNA, 700 bp, Homo Sapiens
  misc_feature (21)..(21): n is a, c, g, or t
  misc_feature (35)..(35): n is a, c, g, or t
  misc_feature (53)..(53): n is a, c, g, or t
  misc_feature (198)..(261): n is a, c, g, or t
  misc_feature (275)..(395): n is a, c, g, or t
  misc_feature (418)..(418): n is a, c, g, or t
  misc_feature (471)..(471): n is a, c, g, or t
  misc_feature (473)..(473): n is a, c, g, or t
  misc_feature (518)..(518): n is a, c, g, or t
  misc_feature (528)..(528): n is a, c, g, or t
  misc_feature (530)..(530): n is a, c, g, or t
  misc_feature (573)..(573): n is a, c, g, or t
  misc_feature (575)..(575): n is a, c, g, or t
  misc_feature (577)..(577): n is a, c, g, or t
  misc_feature (585)..(585): n is a, c, g, or t
  misc_feature (598)..(598): n is a, c, g, or t
  misc_feature (617)..(617): n is a, c, g, or t
  misc_feature (643)..(643): n is a, c, g, or t
  misc_feature (647)..(647): n is a, c, g, or t
  misc_feature (680)..(680): n is a, c, g, or t
taattccaacgcttcaggatnctgaggtgggaggntcacttaagaccaggggnttgagaacagacgggacaacatagcaagaccatatacacacaaaaattaaaatgaacagccaggtctagtaacatacaactgtcgtctcagctacatgtgtggctgagacaagaggatggcttaagcgcaagagttcaaggccannnnnnnnnnnnnnnnnnnnnnnnnnnnnnnnnnnnnnnnnnnnnnnnnnnnnnnnnnnnnnnncaaacaaaagaaannnnnnnnnnnnnnnnnnnnnnnnnnnnnnnnnnnnnnnnnnnnnnnnnnnnnnnnnnnnnnnnnnnnnnnnnnnnnnnnnnnnnnnnnnnnnnnnnnnnnnnnnnnnnnnnnnnnnnnnngcatgagccaccttgccggcctntttccattggtttggtaactactgaggccagctattttttccttcacaattgngnacttaatcctttccattttctatcaagggcttatggatttttaanggaattactntnaaatttgactttcttgacagatctaatttaaagtttaaagggngncnagcctttnaaaatggcccttntactaaattgccttttttnaagaccttcctatgtttaaaccttgnctgnatggaatatttacataaacccgggaacctaatnggtaaaattaaaccctttta

SEQ ID NO: 412642 - DNA, 658 bp, Homo Sapiens
  misc_feature (19)..(19): n is a, c, g, or t
  misc_feature (35)..(35): n is a, c, g, or t
  misc_feature (37)..(37): n is a, c, g, or t
  misc_feature (51)..(51): n is a, c, g, or t
  misc_feature (65)..(65): n is a, c, g, or t
  misc_feature (403)..(403): n is a, c, g, or t
  misc_feature (571)..(571): n is a, c, g, or t
  misc_feature (577)..(577): n is a, c, g, or t
  misc_feature (611)..(611): n is a, c, g, or t
  misc_feature (624)..(624): n is a, c, g, or t
ttcatattgggagtttccntgaaaccagaaaaacntngaacaacataattngggtggtgtttttnggggtccccaaaaaaccatacttctcattagaagaatgaagacttagcccatctatctctgttttcctatacctttttttctaacagtttctgatttgtttatggcagaaatcaaggcactcttagggaatggaatctgcctgcatagattgctccattaataaaaagataggaaggagataaaggatctctgaatgggttgtgagtaaaacctgtgaaagaaggggggaaaggtctctagtaactgtcttttcctgattgttgttgaactcaaatcgggtattaagcacctagatatccttatgctcctttcttttccaatcccaggattagaaaanatcctgtctttggaaatttcactgatgaaagtcattccatgtgacagactgcagagctgctagtaccttatcccttttctccttttcattaaggctggtacatatatacaatccacaggtagaaaccactcttaagggccttcataagcaggcagtagtagaaatagntactgnaaatccttataagccaaaaataatatttattacngatgattatttangaatggcttcactatggctaaaaagcagaatgat

SEQ ID NO: 412643 - DNA, 684 bp, Homo Sapiens
  misc_feature (15)..(15): n is a, c, g, or t
  misc_feature (33)..(33): n is a, c, g, or t
  misc_feature (547)..(547): n is a, c, g, or t
  misc_feature (573)..(573): n is a, c, g, or t
  misc_feature (661)..(661): n is a, c, g, or t
gttgggcctttgaanttgatgcctttgccttgntttattattttctaaacagtgtttttcttaggaaagaggctctgccttagtgttttttgtagtctgcagacttagttcaaagtcagtgttctcaaatatgtattgactaaattagtaatataaggggaaatataaaaatttagaaaaaaacttagcttcttgagcagctcaagacttcagcatacttattaactcatttcagtggaaatcaaatgagccaccatactcattaactcatttcattaaatttgttcttgaggtaaccataattttctcattgggaaaaactaccaaactccttgctattccttatactatgccaaatcttcgataggcctaaatttagagaatgagtgcagaataggaaaaaagccaacattcacattcaaagtttaaagccacctagtatctgaggtcactgatcaaaaacagctgccacatttcccagtggggagtgaaataacccaacttaagaaaaaaatgcccacaaagtcaggacccaactaaccaaggnatgactttgaaacagattaacatacngagttctcgctgcggcaataaaggtaaatctcaaaacaccacttaaagaaggcgtttactttttaattaaataaaactaggacactgntatcaacttgaatggatgcttca

SEQ ID NO: 412644 - DNA, 636 bp, Homo Sapiens
  misc_feature (568)..(568): n is a, c, g, or t
  misc_feature (616)..(616): n is a, c, g, or t
  misc_feature (619)..(619): n is a, c, g, or t
cacatgcatatttcctaattgaggggaaacttcactgagcgatggcctctggcaggccccctgctccttgtgcaatgcagtcacatttctagtttggtaactcccactgcaaaatgatccagggatcaatgccaaactgaaaattaacttacattgtacctttttgtccccaagagaatgaaatggtatgctggcctccattaagacttgtagacttcctcattttactgtggccaacacattccactcatccatttctaatagtttacacattgctgttgaaacagaattgagtgcagactctatttgagctgatacaacgaaatttataaaggcataaatcccaagcctgttccatttttttgtattcttcattatcaacacaatacatttaaatctcttaattcccagataatactgtgagggaaaggaaataatttgtaggccaataaacaaaactttcacaagtatgaaatgtgatgatttcataaaacccttatggtattcccctaagtgctgatattaagtgtaattcattactgagatgccaaaaaggaaaaaatagacnatattgagaaatatgttaattcatcattttagtgggactgtgaaatgntgngagggtactagatttac

SEQ ID NO: 412645 - DNA, 424 bp, Homo Sapiens
  misc_feature (79)..(79): n is a, c, g, or t
  misc_feature (93)..(95): n is a, c, g, or t
  misc_feature (345)..(345): n is a, c, g, or t
aatgtagtagcgtttgggtttgactgtggtggtgaaaatggctttgtgttactgaatagctgtagctgccccatattgngcattttcagatgnnncagtcaagtgagcactaatccttagtgtccacaacaggaacgttcccgctctgcccctgatacgagcttggatggccatgaggcctgaggaagttcactgattgccttaggtgaattgattccatgctaatactggagtactctttgtaatggcttttctgtagagacatattaggagtagaaaacatggaggtgccctctgctgcttcacatttcacgctgcagaaaagatgagcttgttctgtcctgngtgctttgaaactggcatttggttctatagagtgctcctggttatctgcatgggctttgtttttcagctggagtgattg

SEQ ID NO: 412646 - DNA, 613 bp, Homo Sapiens
  misc_feature (520)..(520): n is a, c, g, or t
  misc_feature (536)..(536): n is a, c, g, or t
  misc_feature (538)..(538): n is a, c, g, or t
  misc_feature (556)..(556): n is a, c, g, or t
  misc_feature (581)..(581): n is a, c, g, or t
  misc_feature (603)..(603): n is a, c, g, or t
ctggctaataattctaatgtacgaaatctctgacagggatatctaaatttaatatttctgttggttcttattcaaggtaacttgctgtctctcgcatgtggttagggatttctgacagtgaattacttgatcttaatctgtggaatctgatagtcccaacctggagaagcttccatccagagaatatttccttccactgtcagggaaagagtgacatgcaaactaaaatatgaactcgtctacaggatttaagcacagaagataagtcctgatgctattgcaaggtttgctatcctcaaaattgtgttgctagagaaatctatccttggtaaccccacttctcttgggtgcctgcattttcaaaacctgctccttgccattgtgactcctatcttttcaacttcctgctactctgccatactctgtagactcaacttccagttctctcaatattcctacttttgtgcttgacactccactctaactcttaagtgctgaaccctaacttgtcaaactctgntcaaagttggttgctngntttggggtgaaaggttgncaaaaaccactcttacccttattgngatcatcaatcctcaaattccnatcttattga

SEQ ID NO: 412647 - DNA, 635 bp, Homo Sapiens
  misc_feature (501)..(538): n is a, c, g, or t
  misc_feature (549)..(549): n is a, c, g, or t
  misc_feature (605)..(605): n is a, c, g, or t
cacaaggttataaaacagtccgtacctagtacttgcctacctccctactctgtaagggccagcagaaaataaagcgagtacagtgaatttgcaaaccgctgtactagcgtaataccatggtgttagataattggaatatgtaaatttttttcagtaatttcagtttctaccctgaccgaaaagtatattgaaagctattcataaatattataattaactgggttgcattttgttcctttgtatgtattttttaacttttcattggcaccaggtaaaaatgtgtaaaaagtgagatacaaggcagttgatgatatggacttattttaaatcttaggacaaaacctacattttgttcctttatgaattctttgctttttatgagtgccagataaaatgggagaagtaaggagattgaggaaacagccttattttaattcttaggagaaccttcctggtgacatacgggatttacgtaaatgttaaatggcaaccaattatgcnnnnnnnnnnnnnnnnnnnnnnnnnnnnnnnnnnnnnnctgctaaaagntttattttgaaaacctctaaaagttagaagcttgattaatctgcagaatcccccanaattggtttaattgggcttctttctggcat

SEQ ID NO: 412648 - DNA, 374 bp, Homo Sapiens
  misc_feature (71)..(71): n is a, c, g, or t
  misc_feature (73)..(73): n is a, c, g, or t
  misc_feature (82)..(82): n is a, c, g, or t
  misc_feature (89)..(89): n is a, c, g, or t
  misc_feature (148)..(148): n is a, c, g, or t
  misc_feature (190)..(190): n is a, c, g, or t
  misc_feature (239)..(240): n is a, c, g, or t
  misc_feature (244)..(244): n is a, c, g, or t
  misc_feature (248)..(248): n is a, c, g, or t
  misc_feature (263)..(263): n is a, c, g, or t
  misc_feature (274)..(274): n is a, c, g, or t
  misc_feature (302)..(302): n is a, c, g, or t
  misc_feature (333)..(333): n is a, c, g, or t
aacgggatggtaggagttctgttagacaggtgttctgtcctttcctacctactaacttaatgcaactttgngnatctatagnaggtttnctttaggactacgctgccctggtcttttgtttatgtttttctctcatccattgtggatngtaatgccctcagtactgaataataaacacaagtctgatggnaggggctacctaatgaactctataccctatatctgcattcgtatatttnntctnaatntatgttagctccttnggtctaaaggnaggaacttaaacttcctaatatttattntcacttgcgttaatgatcttttgatagaatnatttatgtactcataatattgctccttaatgtattcttaaa

SEQ ID NO: 412649 - DNA, 594 bp, Homo Sapiens
  misc_feature (93)..(93): n is a, c, g, or t
  misc_feature (106)..(108): n is a, c, g, or t
  misc_feature (532)..(532): n is a, c, g, or t
  misc_feature (552)..(552): n is a, c, g, or t
  misc_feature (559)..(559): n is a, c, g, or t
cactgtcggcctactggtacttagttccataaaaatataatgcccacatataaaactgatttgtgaacataaaaattacagaccaattcgggnctcaagagaaatnnnagttaccttgaaaatcaaccctgtataccttcgcagtatctaattattttgtaaggtactgtagaaacatttgagcatttgaatgccaaaagctgttaagtaagtatagtgttggaatgtttaatggcattaattatcatttacacatgggactacccccttcctaaggcccaggaggcactgggcaatggctcactgggttgtcattaactgtcgttattgctactaaagtcagcatcctattcataaatataaagaaaaaattagtactgaaagtcacatcattctatattacagtatttgtgttgctaactaacttattgttagtggtgccaattatattggcattttgaaatgtagatgaatctcagtatttttatcacttaagttaaagccttttataagaattttctgcgtgtgttgnataattttcccattctctanggttctnctggtatgaaaaaaacacccacacaccttacaaaa

SEQ ID NO: 412650 - DNA, 424 bp, Homo Sapiens
  misc_feature (386)..(386): n is a, c, g, or t
gaaattttttttctcagaattctggaggctgggaagttgaagatcaaggtgctggtaggtttggttgactgatgagggcgcctctctgcttctgagatggcatcttgttgctgcatcttctggaggggaggaaccccatgccctcacatggcagacaggacagaatgggagcagtgccacagcttcacttcatgaagcctcttctataaagactttaacccatttatgccagaggttgcaaattttttttgtgtgtgaaaaatcagaccttggcgatgaccttgagcagtaggatataaataactcctacaagcttagtgttctgataatggaacactagtaggcataaatgggttaatcccattcatggcttaatcaccttttanagcttttgcctcttaatacccatcacattgactggtaa

SEQ ID NO: 412651 - DNA, 673 bp, Homo Sapiens
  misc_feature (27)..(27): n is a, c, g, or t
  misc_feature (43)..(43): n is a, c, g, or t
  misc_feature (57)..(57): n is a, c, g, or t
  misc_feature (59)..(60): n is a, c, g, or t
  misc_feature (71)..(71): n is a, c, g, or t
  misc_feature (74)..(74): n is a, c, g, or t
  misc_feature (452)..(452): n is a, c, g, or t
  misc_feature (506)..(506): n is a, c, g, or t
  misc_feature (539)..(539): n is a, c, g, or t
  misc_feature (542)..(542): n is a, c, g, or t
  misc_feature (560)..(561): n is a, c, g, or t
  misc_feature (564)..(564): n is a, c, g, or t
  misc_feature (619)..(619): n is a, c, g, or t
  misc_feature (647)..(647): n is a, c, g, or t
gcttgccttgtcagtgatttgttgacntgagtcagaatttttntccagcttaaaccngnncaactattttnggnaattcagaaaaatatgattcataaaaccaatatgattacatgatgtatgtagcttattttattaccactgccttgcatcaatctgagaagtgatggatactgtctgtctccagtaataaataacagagaggagttagtcgaacaagagaattgagaaaacagtatctctgcttgagtcagggagaactaaccttgtctctgccaaggataccttcaaagaagccgaactattcagtaacatattatgcaatcttaattctaggagatgtatttttaatgcaactaatcctactaaaactgaatgctattagtttaacacaatttttgagcacttactccgtatgagtgaacaaagtagaaaaattccccacccttcangagtgttatttgagtggagggctatttataaataaataaatgagccagatgatnacatacagcatggtacgacagggagagggcttncanggatgatgaatgccctgnngtntgggtgctttcccttatcctatgagacttaagattccatgttgggcacttttganatccgggccaccccgggtaatggtttgngataaaccccaattggggggaaggag

SEQ ID NO: 412652 - DNA, 118 bp, Homo Sapiens
  misc_feature (39)..(39): n is a, c, g, or t
  misc_feature (56)..(56): n is a, c, g, or t
  misc_feature (58)..(58): n is a, c, g, or t
agtatttattgaattaatgtaagaaggaacaaccagaantttataatagtaggcantnccaggtgaaccagggggttcaaaactaagggggaaaaaagtgccaaagaggggagtggga

SEQ ID NO: 412653 - DNA, 692 bp, Homo Sapiens
  misc_feature (363)..(363): n is a, c, g, or t
  misc_feature (560)..(560): n is a, c, g, or t
  misc_feature (630)..(630): n is a, c, g, or t
  misc_feature (638)..(638): n is a, c, g, or t
  misc_feature (648)..(648): n is a, c, g, or t
  misc_feature (658)..(658): n is a, c, g, or t
  misc_feature (664)..(664): n is a, c, g, or t
acaatttggagaacacttggctcccatagaaatcaaagccttcctgagtaattaattatttggcctgatgatgaattactgtgcctgagatgatagagctaatttatttttcaattcactcaggggacacacgttattttcactgtgaatttggttaaaatgaaaagatttcctgctctaagtcctggatagacctttatgtaatagcatactcttcactctttttgaatcgcatgcagttgtcagactggatgatttccagacagaggttccaagtctttcatcatgtttgggttaaagacctcattaacatactagtcctgccatttgagtctgttctcttcacggaatattttcacctgnatcagtgggtataattcatcaagtgtctggttgcttcaagttatttttcttaatgctgatgttaatgcatgcccatctttatgcctcaacacattgcacaatgaaaaacaaaaattattttggaagacacagctgacatctatatgaaatattcaagtatcagtgattgaacttcagcaagctcctgtggccagcanggttttacggaggtgcaactgctcttccacgatcacttatcataaagccagagcaattgggccaatgtancctcttgnctgcttttgngtacaaaatntaaatngaatagagcaaattagggaaaatagtcc

SEQ ID NO: 412654 - DNA, 689 bp, Homo Sapiens
  misc_feature (39)..(39): n is a, c, g, or t
  misc_feature (56)..(56): n is a, c, g, or t
  misc_feature (83)..(83): n is a, c, g, or t
  misc_feature (249)..(260): n is a, c, g, or t
  misc_feature (548)..(548): n is a, c, g, or t
  misc_feature (575)..(575): n is a, c, g, or t
  misc_feature (591)..(591): n is a, c, g, or t
  misc_feature (630)..(630): n is a, c, g, or t
  misc_feature (665)..(665): n is a, c, g, or t
  misc_feature (669)..(669): n is a, c, g, or t
aactagtcccgaaaattattgaaagtgagatttttttantattgaaaactcttttnatattgaaagtggtactttttttcttngggtaatttttttaatggggtcttctctgcatgtgtgtaattttcatgtcacttaggaataagcatgcatatactgatacttgtttacatgcatatggaaattgcatttttttcaaaactttgtgttgttttttccctaattttgttaatccagaactcttacagnnnnnnnnnnnntcttttattacatggtcccatatcatcatatacatctcagaagctgattttccttccccaggtatctggaccatctgttctgcccttgccagggaagactttcatatcctttatccaccgctgccaaaatgctatgtttttcctcaaaagaggagaaaatatgtgtatcatttatcaataacatgcagaatgaggcttgactcaacgaatgtcacaggaaagggaatggaagagaataccattatccatttttagaatgattaaggaaaatacgcttcctacctttgngaatcatttgattctcaaaacttctangaggaaggcctcatanacttgatgttgaagatgacttattaccagcatgccctgnatactacgtttgggcaaaatggaccacacattgcnatantccaataggattttaattcc

SEQ ID NO: 412655 - DNA, 549 bp, Homo Sapiens
atatagggaagttttttaacttaagtcttatcgatataaattatttgaaatgatttaaaaaggtgtgtctgaggagaggcagcataactaattagcataactaatatgcgaagcctttctggactcagttttggactatgtaacaattacacaaaattggaagccttttaaatgcctttgggaataataaataaagagttgcacctggatttcatttttaccgtaatcaaatgttttatattaggtattttggaaaactactggaatgaccagcaagattataataataattctggagccactttactattattgtctcatttatacctctcagcagaggctggagtacatggggactatgccattcccgtaaccatatgttttaccaccttgctctttgtcctgtagatgagcaagcaaagaagcatacaaagagcatcctataaaagagcacgaacaaagacaatgtttgaggagctctggtctttggtcttcccagagtaaatatcagcaatagtaggaaaaagtgtttaaaacacatatgaaggg

SEQ ID NO: 412656 - DNA, 413 bp, Homo Sapiens
  misc_feature (39)..(39): n is a, c, g, or t
  misc_feature (71)..(71): n is a, c, g, or t
  misc_feature (79)..(79): n is a, c, g, or t
  misc_feature (99)..(99): n is a, c, g, or t
  misc_feature (101)..(101): n is a, c, g, or t
tattcttggaaggaaacagtggtaaagcccaacaactcnttttctgttacaatattagggcctttgggagnggcctgangtgtgcctgttattgagagncncttgaatgctctcaaaatgaaatcttttaatgtttcccaatgaataatgcatgtctcttaatccacaaaccctgatagtcagcaaggagaaatgaacacagcactggacaaggtatgaagagacctggattctacctttgtctctgtcacagacagacagagatacttgacccagtcacttcacctctacgagtctcattttttccaactgcacaatgtgcactatgaacctactttacttcccaaagcataaaggtctcagatgtttgccattgctctgaaagtgacaagggctgaatctgtttctgacaa

SEQ ID NO: 412657 - DNA, 699 bp, Homo Sapiens
  misc_feature (59)..(59): n is a, c, g, or t
  misc_feature (90)..(90): n is a, c, g, or t
tggctaaatttgctaatttgtagactgtttcttcttaatttgtgagaaaaataagtttnttccatattcacttttcttaaaataactggnttctaaagttctgtttataagtggaatcaacactaaattatttgtgttactagaggagaaaagagatccaactaaaacaatagataatcacaaattgtttagatactaaaaaagtgctgaattttgtggaacaaagctgatttatggaccatctactcctttcttactataaattgtatggagcaggatttaaccatctcaaacctacatagtgacaagtatctttgcaatggaatgcccctcactgggccttatcatggtgtgttcacacctttacttatagcacagactccatgccatggtagatagtttatgaagacgagtttttgctcacccataatccagattcactataatattatgcatgtaagttctgcctagactcaatggaagaagttaaattaaatatattgccttcctgtttgactttggaattaaatttctctataaatatcttatcacgctcctaggagatagtttccttagataaagaaatcttgtgagtgaaaggaaggaaaatgaaggtggaaaaggataaatggcatcgatatagcacaatgagaaacaccacacctagcaagaagagaccccgagtcctattttcttcaa

SEQ ID NO: 412658 - DNA, 700 bp, Homo Sapiens
  misc_feature (50)..(50): n is a, c, g, or t
  misc_feature (411)..(411): n is a, c, g, or t
  misc_feature (548)..(548): n is a, c, g, or t
  misc_feature (642)..(642): n is a, c, g, or t
actggttcattaatagaaaacttccaagtggaatattgttcacaggcagntctttctgaccctggctcttgagtcacataaggaaaccacctttgacctctctgacacttttgtctttaagccacgtctctgaaatcttgtgaggggtgaagaaagaggactggagatgaatggacaatatgatcaaagactcatttttaggccttgaagaggccgagctttctccccccaattggtggaggacagtccagagatgagcagaaatcttaaattccttcctgatccagcctccacatgtggcctgcccttgccccagcatctttccagaacccctggacttgccaggtgcctgagcatcttcccaggatatgcctgccagccagcagcccctcaggaatgcttctataatanatccagtaatgaaagcagcaccatatcctaatctaatgtcagcttcgagaatgaagactgcagtcaggatcaaatcaagtcacagaagccatattcatgcaggtgctaaccggcttttctactggtgcaactgaaangaatatggtaacatgggtggatttttaaaattcacaatgaaggaaccagacaagcaaaacagaaaaaccgagaaggacatgcatgactaaaaangcttgaagttgcttgtgagcaacaagctttttatgctggtttcttacataagttctct

SEQ ID NO: 412659 - DNA, 142 bp, Homo Sapiens
caggtggtccgtggcgagtactctggccacgcagcgcctccccccaacccaacccactggtgcacgaagcaggtgcagatccgggcccagccacagtaacaggccgccggtgtggatcagctactgacgactcagcgaaagc

SEQ ID NO: 412660 - DNA, 625 bp, Homo Sapiens
  misc_feature (493)..(493): n is a, c, g, or t
  misc_feature (533)..(533): n is a, c, g, or t
  misc_feature (539)..(539): n is a, c, g, or t
  misc_feature (546)..(546): n is a, c, g, or t
  misc_feature (601)..(601): n is a, c, g, or t
gattcagcaaacatttcttgaatacctgttttatgccagaccttggggtggtgtgttggcatatcataactcattcaaacctcaaaacagcactgatgtagatatttctattctctattttagagatgaggccaaatgatctactcagtaagtggaaaaggaggatttaaacccaggtctcttgtgtacaaatgctatgttctttctattattaaacattgtattccttcgtttaacaaatatataaatgtgtagtatgtgtaagggacgatgttgggctcttaaagatgaagtttttctaccattaaagctaagagtaaataagaacagagctcactgtttacttttagcttcatggaagatgtatacttaagcttccctttgaaggatgggtaagaagtttgatagaagaacataggaagcatttcagatgaagtaatagcataagtcaggaaacaggaaaattcaagacgtattcatgaatatttactgncactctttgattgcagtgaaaaggtcgtataggggctaanaatggnaaagganctgattgtgaaaggcttactggccaggttgaaaacttgactttgtctaaagcagnggaaaggtaattggctgtatgtgg

SEQ ID NO: 412661 - DNA, 417 bp, Homo Sapiens
  misc_feature (89)..(89): n is a, c, g, or t
  misc_feature (103)..(103): n is a, c, g, or t
cgggttttacaatgaatgttaacttgcaccaggaggctaccttgggcccccagagccttcttaaaaccctggcaccctgccaggggagntccaactttgcagnccagagaaagccatgttggcagcttatcaggagccagggagttacatggcgccctgggggtaataatattttccagaacgctcaagctaatagtcccatgatgggcgattgaaaggactgcaggtatgctcttccttgtcctcagccttggaagtctcatccatctctgcaaagtgccacatcacactctgctgaccttcatggcagagttggggacactgtcttttgtttcactttacctcactgccgacagagtgttatgttcaagccaagtcaggcttctacttattatcgtgctttgaattcatttcttt

SEQ ID NO: 412662 - DNA, 698 bp, Homo Sapiens
  misc_feature (85)..(85): n is a, c, g, or t
  misc_feature (99)..(99): n is a, c, g, or t
  misc_feature (430)..(430): n is a, c, g, or t
  misc_feature (579)..(579): n is a, c, g, or t
  misc_feature (620)..(620): n is a, c, g, or t
  misc_feature (658)..(658): n is a, c, g, or t
gcctactgggtttgggcttaatctaaaggaagcctgagtaactagtattaggtgccaatataaatctctgagttggttaatattnttgtcccttaatanttaagaaagggatgctcagagaagtaaagcaagtagacctcaaatcatttgcttcaagtaagtttcagagccagactctgaactctaagatgttttgtttcaaagccagtgctttccaacttgggttccctgctacttaagcccatgaaggagtttttaggctcagaagtccatattagttctcatctagaaaaccctgtctggtcgattccaggcccactgggggatctgggcctgacacagtatctacaacagagtagctgcactcagctccgttcagggttagctagaactctgaacagtgagtagggaaaggcatagcggagggcanatcgcatcgttcctgactgcccagccttaagggggggaaaaaaagattatatgaataatctattcagtaacatcctcagaattagcatgtgcaatttccttaaaaccaatgaggatttcctgtgaaaaggctggggtggaatatgccanttcacattttagcaacagcgtgaacactttcttaaaaatgnatagattatggtttggctttgctttttgggcaatgtangcagaatatgggttgctattatataaatttggatcattat

SEQ ID NO: 412663 - DNA, 693 bp, Homo Sapiens
  misc_feature (575)..(575): n is a, c, g, or t
cctactggattaaagtaataaaccagaaataaaaatatataaggttagattggaaagattgatttcaccaattgcatatgcagataatattctatatttacattatattaaattctgtgatctaagtgttgaatgaataagcccattaaaactaaaaaattaatttcttgtatgcaaattttgtataaatatgttgtaaggtggcatttgaagttcagatagcttaattgagtttgaagggggaaaggtcatttaattggcctattgaaatgttaacagaaacagatataccgtggaatggactttaatggcagcagtgttgcactaatgtctgtattcacttgcaaaattgttaattagtgcactttggtagttcatttgtttttgtattgatgtgattagtccaatggggaaatcaattttataggagaaattgcatgacttgctagcaccctaaaatgcatgtttatttttgattcccaagagaatactttacactgtaaaactcaagtacatttccagttggagacctctgcttctcttctggatagtggaatgtctgatcatttttctgntttactcttttgataaagttcagatgtcctgtatgaacatttgaatgtctgaatctatatgaaactttcttaactgaacatttctagaaactaatggcatgtttccaggataaacatg

SEQ ID NO: 412664 - DNA, 691 bp, Homo Sapiens
  misc_feature (560)..(560): n is a, c, g, or t
  misc_feature (600)..(600): n is a, c, g, or t
  misc_feature (627)..(627): n is a, c, g, or t
  misc_feature (668)..(668): n is a, c, g, or t
cggcctactggcgagaagggaggtgtttcagaagctgtcaccatcaagggtagacactaatgaagcatcagagcgccgacagtaatggatagagggctggataatgaagggggaaatcaacagggctcagtaatgagttggctgcgggggacaaaagaaagaaaagagtcagagattctgatgaggttttgaggctcattatgattacgaaatgtaaggaatccagattttgctggatgtagtgtgtggtgatactgggctctgatacagatttcaaatggtggtgttgcttataatgctgactgaagcggtgttatctttaggctcatgtaagagttgaaatgtttttggaatgtgtaatacctttattttaagagtgtgtggtacaaccagttgaaaacctgtgaaaacgtttactccaaactaattcataataggttgtttttttggtggggagaggggaagagtgaataattcaaaatgagtttattttgaaaatacccttgcaataaatatgtgatcacttttgagcttctttgcagaattttattagacactgnatacacccctgcgtcttccagacactatttttcaactcangttgctcagtccgttgccttccactgnctggtctgctcaatgcctcaacctaatcagcacatcgtggncttttcattcacacatttccttt

SEQ ID NO: 412665 - DNA, 695 bp, Homo Sapiens
  misc_feature (24)..(24): n is a, c, g, or t
  misc_feature (108)..(108): n is a, c, g, or t
  misc_feature (603)..(603): n is a, c, g, or t
  misc_feature (617)..(617): n is a, c, g, or t
  misc_feature (643)..(643): n is a, c, g, or t
  misc_feature (663)..(663): n is a, c, g, or t
  misc_feature (665)..(665): n is a, c, g, or t
cctttttaattttacagatttctnctttcggtggatcgtgtaaattagtgagttgctttcacgtcttttggccagcttcagagaagaatgaagtacccaatgcttggngagaggcagtccatgttccggatgtaaagcacttctcactatattaattgtccgctggcttaattttttcatattctgtcgaatgcactttgcctgcgtgtacgaaggcagcttcctcatcagatgtgagttgggagcatccacatgtactccactgatgctccccaaacttccaagataaaaatttccacaaggggaagatagcagtcaaatgtgagaagaataatttgcaaatagataaatacgcaaataaataaaactgttcatggagttgtctactggaaaacgatgtgccaagggcacaatgagcgaaagtgaagcttgacaatgagttaggtcgccagatgtggcgcggtgatttgggggggcccaggggagcacccatgaggagaaaggctgggtgtaaatcagtcatagcaacgcttcactgcacctggggggccctgaggaaatcgttagtggtgaatcaagaaccaggcttcaaggccctgaggncagtgtgcttgganaggggcgtgtcaaaagcacatggganaggtgggcctgaagacagananaagctctagtcaaagcaaagacccaggttt

SEQ ID NO: 412666 - DNA, 687 bp, Homo Sapiens
  misc_feature (212)..(261): n is a, c, g, or t
  misc_feature (594)..(594): n is a, c, g, or t
  misc_feature (652)..(652): n is a, c, g, or t
  misc_feature (673)..(673): n is a, c, g, or t
cttcttcccctgttaatagttctacatttctaagcagtccacttatcggtattattgtataatggtcttaaaaatattaaagattatgtaagacctacaacataaatgatagaaaaaatgatgtggaataacccacattttagtttgtaatcactgaagctagtatagatggattttcaatttgatagccgaattctgaaaattgcaagagnnnnnnnnnnnnnnnnnnnnnnnnnnnnnnnnnnnnnnnnnnnnnnnnnncactactgtatttccagttctgctgcaaaactcctaggctgtgctaggctgactgcatttgcacacagataatatgccaaattgttgttttaatgcatacatctgtttgcaatcagggatgtcctattacaaaggccaaagaaataaatgtataccgatctgttttccatcatggatctcaaatcaaaacacatatttcttgcttatgctggcaagtaaccctatcagtctcttccataacctctattcaaatctcttttgaatagatgttgtacatgaaaacggtattttttggaacaaagaatgttggctgctactacaggcacagacggncaagctcattcccagggacatttgctaaagctggtaagtatatgcccaggtgaggaanagttactggcttttgaaggantttggagaaggaag

SEQ ID NO: 412667 - DNA, 677 bp, Homo Sapiens
  misc_feature (372)..(382): n is a, c, g, or t
  misc_feature (564)..(564): n is a, c, g, or t
  misc_feature (593)..(593): n is a, c, g, or t
  misc_feature (648)..(648): n is a, c, g, or t
gaagaaacctagaactatgaatcttagaatggaagtcaagatgaaaaggcaaaagaaaggattcttgcatattcttggatgtttcaaatgtagggttttggaatattcctctatttgattgatttcaacgtacgaatctgctcttggaaagagagagattcctgtgtgtttacaggacatataaatgtgctccaaaggactgaactaacatgcctggaagtagacatatggaatgaatattgtcatttagtgcagttatcatggaaagttatatcattttcttgtaatattacaacagctcaaaatgtgtttggaactcttttttggaggtgcctttacagaatcagcaatacattcaaatcagtgtgtgannnnnnnnnnncccttttgaggaggcatttgagttttcagaaacagcctacagtaatttactgttaattctagtgactacagtgggtaatcacacattttagctgtttgggatcaaaagcagacttagatttaaaaaatactaaaaataattttctcatgtggttcataaagcacatggaattgggttaatgntttaatgtcaaactttatgtgagccagangatgaaccttttggaagcataaatgcaaatagcaagaagttttctctcatttctncatctgaaactgctcatcatgtatcctca

SEQ ID NO: 412668 - DNA, 289 bp, Homo Sapiens
tcatccaaccctttttcggaaaaagttaaaaataaataacattgacgtattgacttactacagaaacaggtagtaatgaggcaagataaaaatgagcaaaagtgggacattgattataaatggctctcctctgtggatataagaatgtgtgggatagtttgattttgactttgaccttcattttaatgagctgagtgcagcctaaaggctaaatgtcatttgaggtcaatgttttccactctgacagaaggacttagactccttttgtattccttctccttgctttctt

SEQ ID NO: 412669 - DNA, 676 bp, Homo Sapiens
  misc_feature (583)..(583): n is a, c, g, or t
  misc_feature (624)..(624): n is a, c, g, or t
  misc_feature (651)..(651): n is a, c, g, or t
tgaatcctttgcctgtcggcctactggcagataaagccttatgctgcccaccagcccactaaatgtattaaatacctgtctctatgtagcttatgtaaaaactcaatgttgactgtcccgtgtctgctgcatttaaaagctcattgtgattctatcatcttgctatgccaatgccttatgttatggtgtcatgtatataggccatggtacaaaagtgactgtcaactgcttactcaacatctagtcagaaaaggtctgaggcagtgcaataacgcttttagtcaaactggctcactgttggagtcatttacatctgtgtattctttaccgtaaatactgaaatagtattttttaactgttttttcaggcttgtaataaatatctgtgtcatatctacatagtcaaaatacattgagtaattcagtttaaaagtgttgcctactaacaaactaaagagaaacatctactgattttccatataattgcttattttcattgccaatgtagacctgcctggaatggtgtctttcaccactatcatgtgtaaaataaagggaggctattgtggtgaattttcacctgnctgacattagctctttcactagcaaaaggatgtccatcctnaaaagtgacctgctacccgaggtccantttcaaaaggcatcttaatttaatt

SEQ ID NO: 412670 - DNA, 668 bp, Homo Sapiens
  misc_feature (425)..(425): n is a, c, g, or t
  misc_feature (494)..(494): n is a, c, g, or t
  misc_feature (526)..(526): n is a, c, g, or t
  misc_feature (578)..(578): n is a, c, g, or t
  misc_feature (593)..(593): n is a, c, g, or t
  misc_feature (622)..(622): n is a, c, g, or t
  misc_feature (651)..(651): n is a, c, g, or t
gcctactggattttgtgcttttgatgaccaccaaatgactacctactacttcaccacagctggagaaactaaaaacacatgcttttttgctgccgggtcagaaatgctttttttcccatatgaaagaggggctgtgttgcacgtaatctgtgcaacattatgaaaaatcttcatatacagacaaaatggtactagaattgaatctggactgcaggaagttcagtggcacataatttttcttttaataatctatatcgaaccctcctgacacccgatataatctaaaatggcattagttatacatcagtgacccaaaaaagatttgttttttttctaaatgcagcataccagtgaagttgctaattacattgaatcattctgtacacgttctattttgaagggaaaaaacactttctgatttttgnatgaaattgtatgaaagactacttttcaagccgtgactcatgagctccgctcattgcagctacttaagnatttattcccaaatgtctgacgacaccttcangtgcattaacatgtctattacacaagtgtcctattcatcggctaaggcttgntccatctggtggaangtctgaggaagcattatacccttctttanaagccagggttatatggggagcctaatgnctggtaggtggatttag

SEQ ID NO: 412671 - DNA, 570 bp, Homo Sapiens
  misc_feature (275)..(296): n is a, c, g, or t
  misc_feature (383)..(383): n is a, c, g, or t
  misc_feature (393)..(393): n is a, c, g, or t
  misc_feature (439)..(439): n is a, c, g, or t
  misc_feature (475)..(475): n is a, c, g, or t
  misc_feature (520)..(520): n is a, c, g, or t
  misc_feature (544)..(544): n is a, c, g, or t
ttttttggtatccctccagatccagatccattttcccttctttttccaccttccagggggctgacttggattacatcattagactcctatgccctatggttttctgtttgggtttgaccaaggagaggactagcaaaccactgcagagaagggagagtcttgggtcagagtattgattcccttcatctctttttccctgagtatcatttcgaggcaaattctgtccttaagagaaagccactgctcctcccaaggcattaaaatctgcatgatgnnnnnnnnnnnnnnnnnnnnnnctgggctctgagaaacctctctccccaacaacggcttcaggtctaggagaggtgacagctctgctgctgctagtcctagagtcttgngctatcttgngagatttccctacaccctgcccaatcctgagtatgtagtgccttgnaaataaagactcctcaacttaccctaatctgaatgngccatctggttcttggtgggactctgactgactgagatatcaacncaaatcccatcatgaaacaggacncaaattaagactttacaaaagtattg

SEQ ID NO: 412672 - DNA, 649 bp, Homo Sapiens
  misc_feature (555)..(555): n is a, c, g, or t
  misc_feature (611)..(611): n is a, c, g, or t
tactggtctgatgtagtcatagtttgttttactataggatacttgaggattttatagaggcgaaatagttttccttaaaatgaatattatgaaataaaaaatactttcgaaagagagagaaagtattttcataatgcaagaacaaaggaaggcttaattttatgccatcttgagaaatgagggaaacccaaaggagaaacttaatcccctgcaaggttaaagggaagtcagttgagtgccactgttcactcccccttctcaaaagcattctttctgatacaactcagatggaggaagagagaaacggtgttgcaacctaggttcgtacctaatggatgcctgagggggtctagacaaatccaaattatttgactcctagtcaccctccacatctcaccacgttgagctgacgtgtgggtcttttgttaaagagagcagtgttagagtcaatttaaaaataaatcaaaatctcattgctcaagaaattcaagttgacattgggatgaatgccttcaacttacaaattggtttactaaaaattgtcattaagaatgnattttctttcattttacgtttcttaagtaagagaagatggttttttcttgctgcangcatatcctgcattttctggtcaatcctttctaaacaa

SEQ ID NO: 412673 - DNA, 568 bp, Homo Sapiens
caggacattgtctggcctagacagtaagaatcagatgcaaattgtaacaatcttctttgatctgtgtgttcagcacaaatagatttatgaattcctctcctttagcttagttagtgttttgttggagtcagatagatactttgttaaccccatcgtcagtctagagcaatgttgtcatagaggcatgaccttcctgtgatgtatcaaactcttcatttgtaatattatagtcttataatagagaacactatattctgttccaagactcaaacctaactcttctccaggaaaacatatgcaactgactctttattagattgttttggaaactttttattttactggtcaatcaagtttagtgacctatttgatattcaggtatgtgcacaatgtagacatttttcaaattaccgtatgaatttagataatatctcctattgagaaagaaaagactatcacatggaataaccttgatttggtaatctggctagcacatttgccattggtatatctattcctggtgaaaaagccttcttgtcagacttgcatatgctggttggataactgg

SEQ ID NO: 412674 - DNA, 688 bp, Homo Sapiens
  misc_feature (55)..(55): n is a, c, g, or t
  misc_feature (507)..(507): n is a, c, g, or t
  misc_feature (528)..(528): n is a, c, g, or t
  misc_feature (569)..(569): n is a, c, g, or t
  misc_feature (589)..(589): n is a, c, g, or t
  misc_feature (591)..(591): n is a, c, g, or t
  misc_feature (644)..(645): n is a, c, g, or t
  misc_feature (667)..(667): n is a, c, g, or t
gcagatgacagaaatttctacagacacttaatagacagacattccttaggcctanttcaaatatctaaattccatctggggacttggctgtcaaaagataatcatctcttgcttcatttctcatataatttcctaaaccctcgggtctcagctagtgcaaggtcctgtcatggtcacctgtggcttgggccaattctcacttcccctgaagggcagctgcgtgtagggagcgggggctgccaaagtttcactctgactggaggtaaacttaacatcatttctgcattagtcatttagagccctgggctcagtactttcccccaactgggtttctgcttttgagctcgctctgcaatttcccaattctgactcaattctctctgggcccagggagctgcaacagcactcctcccaccatttctcagctgtagccctcttgcaggtgtctgccacaaaagaaaaccagcatacaacgccatgcagggccactctgagctggggaccttntgcagttgcacctgggatctntgcaggtgccagaagaaccttacaccagacatccctacagntgaacgctggtccaccaggntntggactttggggaaagtccaccggccactacttacccagcacatgtggcccanngctctggttccaatcatcacgnggcaagcctggcttttccaga

SEQ ID NO: 412675 - DNA, 295 bp, Homo Sapiens
  misc_feature (39)..(39): n is a, c, g, or t
  misc_feature (51)..(51): n is a, c, g, or t
  misc_feature (53)..(53): n is a, c, g, or t
  misc_feature (69)..(69): n is a, c, g, or t
  misc_feature (71)..(72): n is a, c, g, or t
  misc_feature (80)..(80): n is a, c, g, or t
  misc_feature (84)..(84): n is a, c, g, or t
  misc_feature (88)..(88): n is a, c, g, or t
  misc_feature (102)..(102): n is a, c, g, or t
  misc_feature (105)..(105): n is a, c, g, or t
  misc_feature (107)..(107): n is a, c, g, or t
  misc_feature (115)..(115): n is a, c, g, or t
  misc_feature (133)..(133): n is a, c, g, or t
  misc_feature (148)..(148): n is a, c, g, or t
  misc_feature (169)..(169): n is a, c, g, or t
  misc_feature (189)..(189): n is a, c, g, or t
  misc_feature (194)..(194): n is a, c, g, or t
  misc_feature (198)..(198): n is a, c, g, or t
  misc_feature (202)..(202): n is a, c, g, or t
  misc_feature (226)..(226): n is a, c, g, or t
  misc_feature (228)..(228): n is a, c, g, or t
  misc_feature (240)..(240): n is a, c, g, or t
  misc_feature (243)..(243): n is a, c, g, or t
tcaaggccactaccttgcgatgctttagactttcgggtntgatgaataatntntcattctttgttgtangnnggatccgngggnaaancttcagaagatggnatncnaacatttntaggatctgctgatgaancaatggtctttaagnttatcatagaagtaacatttntaggggctgctgcttagatngaaanttcngtgnctctattctgtctcttcctttcanangcaactgccagnttnggaaattcctcggcatcttcaatccttggaggctcttgaactgtcaggactt

SEQ ID NO: 412676 - DNA, 682 bp, Homo Sapiens
  misc_feature (211)..(387): n is a, c, g, or t
  misc_feature (608)..(608): n is a, c, g, or t
  misc_feature (610)..(610): n is a, c, g, or t
  misc_feature (615)..(615): n is a, c, g, or t
  misc_feature (624)..(624): n is a, c, g, or t
  misc_feature (647)..(647): n is a, c, g, or t
tgcaatttatatgccatatataggcaagtttgttggcttttttaaattctaaagttgaatttaaaaacagctatcacttacagagcacccagtgtaactactacactaagtttttgataaatattttatttaatcttccaaatactctccagtgaataaactgaggtttaaagaggataaataccttccctagggtctcaaaatctccatnnnnnnnnnnnnnnnnnnnnnnnnnnnnnnnnnnnnnnnnnnnnnnnnnnnnnnnnnnnnnnnnnnnnnnnnnnnnnnnnnnnnnnnnnnnnnnnnnnnnnnnnnnnnnnnnnnnnnnnnnnnnnnnnnnnnnnnnnnnnnnnnnnnnnnnnnnnnnnnnnnnnnnnnnnnnnnnnncctagtcatctagacttaggcctttgaggttcacctgtcacttgtctacatcttgataattttgtgattttgactgcatctaagagatttttaataagcaggagtaaaactgctgaaattagttatagcatcagtttattttcctccttttcatcataattagacagctttcaataaaaatactgcttaagtaagggttgaggtgaatggtcatgaaactngnatggncttaatggncttggaaatagtcatttatatgnagaagtcctaaatacattggagaagccttggcttc

SEQ ID NO: 412677 - DNA, 685 bp, Homo Sapiens
  misc_feature (171)..(182): n is a, c, g, or t
  misc_feature (504)..(523): n is a, c, g, or t
tccacaacagaaaatagactgaatttaaaaaaattgatgattatgaaaaatttggtgatttccagaaatatgagtttactcgtttaaaatagatgactcagtatagaatttcatgtgataatgtttttcattagtattcatgatctgatcctagaaatatttttctcgtgnnnnnnnnnnnnccaaacaatttattttagattgcaactagtagataattgctttatgttttagggaaaagaatcgcttaattattgtaatccctcaaacacaatattggaacttttaccatgaccatttctaatgccagccccacaatatagctgaatcttgccatcaagcttactatctaaggaatctcagtcttcttttctagtttatgaactacggtaattgaaaaaagggatttccaaaagataattgtattgattaatccaatttctgggttgagcataaggttgtaaattggagatcattcatataaattgaatacaaagggagaannnnnnnnnnnnnnnnnnnngacatattaaatgatttatgctgaactcctaaaagctttccagccccacagagcttcaatagatgtctaatggagcctgaatgccagctctatttttggtgcttatccagtaggtgggaaacctttaacagtaggatgagtctttggttccgttccatggaa

SEQ ID NO: 412678 - DNA, 675 bp, Homo Sapiens
  misc_feature (563)..(563): n is a, c, g, or t
  misc_feature (599)..(599): n is a, c, g, or t
  misc_feature (662)..(662): n is a, c, g, or t
ctttgatttttaaaactatgtgacagtctagatttttggttttatttatatagtaatcagtttacatctgagaagaatattagctttaatatgaagttatatatgaagtgtttgaagtcatacagaaattgtccccagaggaagaatcctgcttatatttttttgttggacagacatgatcatttgtgatcatcacttattattaatgacagaatcaagtcattgtgccgagggcttttcatgcattatctcaatctttacacaatcctacgatacagctactatttttcccccattttatagtcaagggaactgaggctttgagaagttaggaaccttgaccatgatctcacaactagtaagtgatggggctaagttttgatctcaagtctgactgatttaccaagactgtctttgagaaacacaaacatatatttgtgtcacacacacagtttgaggtcttatattctcacacacagattatatgctaattatacctggtatgctccattatgccaggttttgcagaaatacattaaataaacatgctggctatggtaganggttcactggctaagaaaatttaatccttttaaagngattataaatctatattcatctaaattaacatgatgctggtactcttctctggctacagtgcnttatgagattact

SEQ ID NO: 412679 - DNA, 496 bp, Homo Sapiens
  misc_feature (429)..(429): n is a, c, g, or t
aaatagcctggtaagtttagtaaagccatcaacatgctgcaatactgagaataatcccaagaagaaaaggtgtatagctttcctttcttagatgttttatttgttgtttcagattgctatcacattaacactttaaaaatgataatagatgcaatgccctatttctaatgattaaacattttttgaatgaggcagtatgtgctttgcatgctcatttatgatatgactttttttaagaaaacagatttatgaagtgatgtgagttaaggaagcattataaatgcatactgcctttggtttttagaaagataagaggattgaagtaacttagataaattccatactctgacttagagtctagaaaataggtcagtagagggtaggagtgtgtttaatgtggtggacccacttacattactttcaaactgngtaatatctttggtgaatagagagattattctgcagtaactttctggtacttcatttaaacttgtag

SEQ ID NO: 412680 - DNA, 683 bp, Homo Sapiens
  misc_feature (573)..(573): n is a, c, g, or t
  misc_feature (599)..(599): n is a, c, g, or t
ttaccaggtccagcttagcgctgcagacagatgtgtttctatttgcaattatctcagggcctgagtctggtgtctgcttatttaatgacttcactttctaataaaaattctgtatggcatagataattagattttttaaatgaaactggggaaatggagtgccccaaagggtttaattgcagttttacgatggatcaagcataaaaatgagattattcatttgacaaatatgtacggggtgggttcttgctctgtgttgtgctaggatacagtgatcaatatgacattacccctgccctcaagtagctctccctccatgggagaatcaggggaggaaacacatggcccagtggagcctggccagtgttttacaaagtgcagtgtgctgagggaagagggaagtattgttttgactcttacttcaatagagtcaatttccctccacatgggcgctctctgtggaccacctgaattacacctgatgttgcatagagagggagcacgaaacagaaacacgcttgtcctggaaaggctgcccacctaagctcaactgtcagctgcagtccttacttnctcgtaagggaagagcacatctctgngcttcaagtttcactggtggtgaaatgggaagactggatttgatgacttggaaagtgccttttcacatctagcctgatgattct

SEQ ID NO: 412681 - DNA, 661 bp, Homo Sapiens
  misc_feature (97)..(97): n is a, c, g, or t
  misc_feature (500)..(500): n is a, c, g, or t
  misc_feature (520)..(520): n is a, c, g, or t
  misc_feature (597)..(597): n is a, c, g, or t
  misc_feature (606)..(606): n is a, c, g, or t
  misc_feature (623)..(623): n is a, c, g, or t
  misc_feature (628)..(628): n is a, c, g, or t
ttttattttgtttaacagttttgctattcatcacatctaatcagtagcacctaataataaacaagtccctgaataataatgcttgcacggtctctgnaaattcttcgggcttcgataaaatagaaatgtatcacagaccaacaaaagtatgacctacaatggagttagtttaatttttgtttttggacaacttaataatatgaaacttctccaatagttgcatattggaaacaacaactatttgagttagccaaataggatcttcaaagacttttgacattcctattttatatggcactttgcttctgaaataagcacccttatttaatgcccgtaatatcatttctgataatgagccagtgaaacgagtgattagacatgtggtacaattcaaagaaaataaggtgaaggattgctagccaattgacttttgccaggtgatccaatcaactacttgaagagttaaatatagaagctaggtttaattccacagccactgntgatcagagcctaacacctngcattacagtggacccaaccttttctgacactgcagggctgcattaagacattttcagtgagattcaagggcaattnaaggttaanttaacttacatggggangggtngaaaaataatcatgacctttgggaaaagatgta

SEQ ID NO: 412682 - DNA, 542 bp, Homo Sapiens
  misc_feature (86)..(95): n is a, c, g, or t
  misc_feature (309)..(309): n is a, c, g, or t
  misc_feature (346)..(346): n is a, c, g, or t
  misc_feature (412)..(412): n is a, c, g, or t
acccctgtagcaaaagtgaacattcaaatacatttattggtaaagttctaggtggagggcattaaaggcagaaaaagggcctccannnnnnnnnnctattgttcttttaacccttctggctttcctcacaaattcaatgggggagcatattttaggacaatgttctagaaggctgtagtagctaccaaatatgttgtgtgttcctcacataacacaagtcaccatgtggtctgttttctctttgttcctatgctaaactcctctaagttttgatctttgagttctgcatttaccaactcaagatgcctncctgttcttcatgcacatccagatcaggcccattctncagcatgaccttggtaattttctctccttccaggagatctcctggccacccattctgcactgatgnctttcttaagcattctcagtcccttggtgctcatgatactaattgctgagtatcatcaagctacttggttcattattcaagctcttcaatggttggcttctttgagtcttattgccttggaaaatttaca

SEQ ID NO: 412683 - DNA, 700 bp, Homo Sapiens
  misc_feature (611)..(611): n is a, c, g, or t
  misc_feature (638)..(638): n is a, c, g, or t
  misc_feature (678)..(678): n is a, c, g, or t
  misc_feature (686)..(686): n is a, c, g, or t
ctgttggcctactgggagaacagcttctcgacgcctctatttaaatgataatcactgtgcaaaactcaaagtctcttcattcaggaacttacagtacacatcttaataaaccataatgaactggaaacatgaagaataactggataaacaggcctctgtctccagctgtcatgtctgtttgtgacagcaactggtatttcattgtaaaagatgctaatttcaatctgagctgtagcagcattgagaggagcataaaaggaattcttgattatctatatcagtaactgtggtccctggggatgcactcagaacttcagatcacatatggcaagagtgctgtgataaaatatgcatcaatggagctttgtgatttatgataataaagaaatggaaagttttgccctctatgataactatttgtggctggtatttctctttttactatttctggagttgtaaatgacatttgttgtactaattattacagcattcagtacctggatcaccgtatcatgtctataacttctgcaagttcctgagggcctgccatgatctggtttactgatgatgattcttccaatctaaatgtaataaataataattaccttaanttgctggaccacattggcaaataagancacaatattcttacttgacaaaattaaatggtagtaactntgcttctncctttggctggttt

SEQ ID NO: 412684 - DNA, 536 bp, Homo Sapiens
  misc_feature (315)..(315): n is a, c, g, or t
  misc_feature (401)..(401): n is a, c, g, or t
  misc_feature (508)..(508): n is a, c, g, or t
  misc_feature (525)..(525): n is a, c, g, or t
gagtgaggcactgtgcctggtggaagagttattttgtttgcgtatttatccatgtgtcagttgataaatatttggggttgtttccaccctttggctattatgaataatgctgataagaagatttacgtacaagttttgtgtgggcatatgttttcatttctcttgggtatatacttgagagtggaattgctgagtcacatggtaagtctatcttaaacattttgaggaactatgtaactgtttgccacactggctgcaccaacttacaatctcaacatccatgtgtaaggactccaatttctgtctctcacttgntatcgctttctaatttttttcagagacagtggtcactctgacactacacagaacaaatcactgatcaacaatgctgatgattttgnacttattaagagtgataaagaggaagtataaaggtctttaaacatcttgctaagacacatgtaaagacagaagacattaaacccacaaaaattaagagccccattgnctaagtaagaattctangggtccaatgg

SEQ ID NO: 412685 - DNA, 272 bp, Homo Sapiens
gcctgttggcctactgggatgcattcatttaaaatatattgagcaatcatataggttttctgatgttcataagccaagtactattctgaaggtgctgagtgactgctctggttatttgattgaaaaaaagatttttattcaatctttttttgaaaaatctagtttctaaacaagttagtctaccttgttacataatgtaggagaatgttatgttttagagaattaggaataattactattgcaaaatcattagattatactcaataaaatgg

SEQ ID NO: 412686 - DNA, 693 bp, Homo Sapiens
  misc_feature (596)..(596): n is a, c, g, or t
  misc_feature (643)..(643): n is a, c, g, or t
  misc_feature (662)..(662): n is a, c, g, or t
ttttttgtacattcgaacctttttaatgaaaattacaggtcatcgcctggttaagtgttaaatagcatgcatcagaccatgagaaagctgagacactccatcccccatccacactcccgtcatcctcttccactctcattagaatcaatgagatgtaaggtgatgcactgggcatcttaataagtgaaataagaaaaaagtaggaataagctatgtgagtcttatacggcaattttgctgactggggaagaggctcagtttaaggaaggaacatcatgtccagttttaggcattttaaacatcaaaccttgcgcctactgtgtaatgcagaaattcgactattgagttgtttcaatgaaaatttacaagactgagagcaaaacacattcactattaagtgcaaatgaatcacaaacaggcagaaaacacttccacatagtaattgctattttgagttgagattttaacttctaatctaaaactcctctgttttgtgtcctcacccttgctcaaccacagaataaagacaatattttggatcttctggactaaagaaagaactggcagagaaaaatctcctcatactcagtcactgnacaggaagatggcctgtagtctagattgggggggtgggttctggcantacaaccctgtcttccatnccaaagatctgaatttaaatttaagcaaagt

SEQ ID NO: 412687 - DNA, 683 bp, Homo Sapiens
  misc_feature (460)..(460): n is a, c, g, or t
  misc_feature (540)..(540): n is a, c, g, or t
  misc_feature (563)..(563): n is a, c, g, or t
  misc_feature (579)..(579): n is a, c, g, or t
  misc_feature (617)..(617): n is a, c, g, or t
  misc_feature (652)..(652): n is a, c, g, or t
gtgacttaagtcccttctaaacctttcagctctaagattttataattctttatatgagactgatacgtacaaatctaataattatacagagtaccatttacacaattttatgaataaactcattacttgggagttgcaaattatttaggttagtagaaaataattctgccacaataaatactgtattcttttcttagaattatttgctaagaactcttaaggcagttgttgaaacgattttgttcagaagtcagatgcagtttcatgtttgactgtattagattataatggctaattttaccggagataaaaaatacgcagaggttgccagcaacatgataaattagtttctgtgattacaaattttcactaatcaataagggataatttccctgtgtatctcattggttatctttggttctttgactcccacaggaagtctcttttaaaaactctttgnaatatgaaaacaaaaactgaaccaggttgaagtggtatgcacttgaactggttcctctttgagaaagtaatgcctggtgnattcttttcctaaaatattatgnagtcacactggtctgngattggttaaatggtaagaattcttggaaatgctgggnaacctgatcctgcttaataatttcaaggtgatagnaatttcctttaagacactatatttcatacag

SEQ ID NO: 412688 - DNA, 670 bp, Homo Sapiens
  misc_feature (482)..(482): n is a, c, g, or t
  misc_feature (550)..(550): n is a, c, g, or t
  misc_feature (601)..(601): n is a, c, g, or t
  misc_feature (615)..(615): n is a, c, g, or t
  misc_feature (625)..(625): n is a, c, g, or t
  misc_feature (639)..(639): n is a, c, g, or t
  misc_feature (649)..(649): n is a, c, g, or t
  misc_feature (660)..(660): n is a, c, g, or t
tttttaagctggttattagggaaaactactactctaaatatctctgtaatgcatcttggtatgacagttacaccaagtgactgaataagcattgagctggcttaccaaacacaaacctcacataggctcaggattcaaaatctgatcgagcaaacaaatgtcctttcaatatagcataacataaaatctgggttcataaaattcattcttttcagtgttacatgattcaccaaataaaatcaacatgagtttgattaaacattgctatctttgttactattaaggggtaactatcaaaggcacaacacaattgttcaggaacttccttaacttggtagagttagcaaataaattaaaaacacatttccagtacactttcaagtctggcaaagctttaagaaaaatctcatttaatttggtagagcagtattaatttcctttgataaacccttgctttagataagcaaactacaaacatttgnattagcaaatgggcaacatttgcattctttggaaactaaatggcagccaataccttaatgacaaatgngatccactattctatactattggaaccaaagtggaaacaatatatctaagnggtgcccagctatngaagtaaccngaatcggaagaaanaaggtagctntttgagccggnttgaacaaca

SEQ ID NO: 412689 - DNA, 295 bp, Homo Sapiens
cacgttggcctactggttgtttaggtttatataatggaacttgctgtgttctgccaggaattttgaaattatgcatctgcctttcctctccagttgggatcataaacactgaatagcattgccatttctcttggcataatgcctccctgtgagtgctccctgagtaaatacgtgttgaatccagttggaagtatcataattgatgtttaacctgacaatctttagtcttcaacgaaaggctaaattggatactgttgaggaggaaagtaagtgtgtgatgcattttaaaagattc

SEQ ID NO: 412690 - DNA, 700 bp, Homo Sapiens
  misc_feature (14)..(14): n is a, c, g, or t
  misc_feature (571)..(571): n is a, c, g, or t
  misc_feature (606)..(606): n is a, c, g, or t
  misc_feature (635)..(635): n is a, c, g, or t
  misc_feature (679)..(679): n is a, c, g, or t
cctcgatcacggtnggcctactgggaacaaatcattaccaaaaactatcaaataccaaagaaagacggcaagaaagagaggaacaaaacaatagcaaaatagatgaaaactattaacaaaatggcagtagtaagtcctcacctattaataattactttaaatataaatggattaaactctctaatcaaaaggcttagagtggctgaatggatttaaaaaacaagatccatcaattttcttctataaaagactcactttagatttaaaaacacacataggttgaaagtgaagggaaggaaaaattattctatgtaaatagtaaccaaaagaaaacagggctggctatacttgtatcagacaaaatagactttcagttaaaaactctctaaagacaaaaaaagtcattgcaaaatgataaaagggttgaataatctaacagttataaaaatatatacacccaataccaagagcacctaaatatataaagtaaatattgacggatctgaaggaaagaaattgacagcagtaaaatactgataggagaattcactgcctcattttcaataatggncaagaacatccagacagaaaatcataaagaaatantgactgaataatgctctagactaaatggncctaacagacatatttagaactttctaccaacagcaagaagatncacattccctcaaacatatat

SEQ ID NO: 412691 - DNA, 648 bp, Homo Sapiens
  misc_feature (471)..(471): n is a, c, g, or t
  misc_feature (520)..(520): n is a, c, g, or t
  misc_feature (556)..(556): n is a, c, g, or t
  misc_feature (572)..(572): n is a, c, g, or t
  misc_feature (580)..(580): n is a, c, g, or t
  misc_feature (583)..(583): n is a, c, g, or t
  misc_feature (613)..(613): n is a, c, g, or t
  misc_feature (622)..(622): n is a, c, g, or t
  misc_feature (630)..(630): n is a, c, g, or t
cctcatgggatgtgaggtggtatctcattgtgggttttgatttgcattttcctcatgattagtgatgctgagtatattttcatgtgcttcttggccatttgtatatcttactggagaaatgtgtactcaagtcttttgtccatttttgaatgaggttgttttattgttaagttttatgaattctctatatattctagatatctatcccttatcaaataaataatttgcaaatatattctcccattctgtggattacattttcactctgttgaatgattctttcactctgttgaatgatgcaaaatattttaaaattttcatgtagtccaatttatcatttttccttttgctgtctgtgcctttggtatcacatccaataaataactgccaaatccaatgtcatgtgaagcttctgctctgtattttcatccaaagagtcctacatttaatccactttgagttaatttttgnataagacgttaagtaagggtcaatttcaatcctttgcacctggatatcnaatttccctaacaacatctaatgaaaagactgggcnttctccactgaatggngttgtcanccntttcaacaatcaattggcaacaattggggngaattaacnccggatcnccaatccgtcccacaatc

SEQ ID NO: 412692 - DNA, 660 bp, Homo Sapiens
  misc_feature (170)..(179): n is a, c, g, or t
  misc_feature (189)..(455): n is a, c, g, or t
  misc_feature (467)..(467): n is a, c, g, or t
  misc_feature (502)..(502): n is a, c, g, or t
  misc_feature (504)..(504): n is a, c, g, or t
  misc_feature (573)..(573): n is a, c, g, or t
  misc_feature (596)..(596): n is a, c, g, or t
  misc_feature (598)..(598): n is a, c, g, or t
tagtctcctactataaacatgattttccttcttcccttcagagtcctgtcaatctttactttttttctcattaatatacagaagttatactacagatacattcaagctcatgactgctaaaaacttcctgaaatgagccttaattcatacgaatcatttctatttgttcnnnnnnnnnngagacagacnnnnnnnnnnnnnnnnnnnnnnnnnnnnnnnnnnnnnnnnnnnnnnnnnnnnnnnnnnnnnnnnnnnnnnnnnnnnnnnnnnnnnnnnnnnnnnnnnnnnnnnnnnnnnnnnnnnnnnnnnnnnnnnnnnnnnnnnnnnnnnnnnnnnnnnnnnnnnnnnnnnnnnnnnnnnnnnnnnnnnnnnnnnnnnnnnnnnnnnnnnnnnnnnnnnnnnnnnnnnnnnnnnnnnnnnnnnnnnnnnnnnnnnnnnnnnnnnnnnnnnnnnnngtgcctggctcnaatttttaatttaaataccttttggcctgaaatcnangtcctccgataacaacactgcttacaattttaattttggtggaattaattcaatcaatcccaactctanaacttacaatataaaaatttggntnagttacttaacctgcagttcctcccttttaaaatggataatattatccaacaaataaaatgg

SEQ ID NO: 412693 - DNA, 653 bp, Homo Sapiens
  misc_feature (453)..(453): n is a, c, g, or t
  misc_feature (536)..(536): n is a, c, g, or t
  misc_feature (572)..(572): n is a, c, g, or t
gccgggactcaagggtaatttcatatcagtgtgttctacaagctgggggaaaatgagttctaattgtcagagctaccaaatccttcacctttagcataaaggtttaaagatatcacaaagatgccaagtgattaataatgttttaaaccacccctttttctgtctgaaaaaacaactaaaacaatattacaacagtatagttacagaagggttctattttcatatgttttatgcacactgtgcctcaaaggtactatttaaatatatatacttttgagggggtggctaatgcagaaacacccaagacctaaggaagatacaaccccatttctaggtgtgaggtctaaatgcttcacacacccacttgtgaccttttttcatgaagaatcataacactgtgcagtgagaaacagtggcaaagcaatactgaaagcattttaaattaattactangttaaaagggtgaactggatactttaaatacatcaaatttcatcatccaagaccaatttttggtggcaaagtggtattgatcnttccaaatgcttaaaattaactaatttccaaaaggncattaattgattaaaggcattaaagtttgagggcaagaagcgatgcacttttcctccttcccaatcaaatcatcatataat

SEQ ID NO: 412694 - DNA, 297 bp, Homo Sapiens
  misc_feature (145)..(145): n is a, c, g, or t
aacccaagcattctgattcctgggatgagccattagagctgttcagaagtggaatgggctgtcttttaggacagtgctcctctcttctttccgggtcgctgccagcaagtacggagagaggagctatgactttaaggtcttagantttgtggaatgcagttactccccatttggccaaaatctcagaatttgtgtcgtgtctctaaaccagataaatggagagtactaaaagcattgttgcttctgctctgaaattgttataggattatttttattgcatccaagtcttaaacactg

SEQ ID NO: 412695 - DNA, 640 bp, Homo Sapiens
  misc_feature (500)..(500): n is a, c, g, or t
  misc_feature (503)..(529): n is a, c, g, or t
  misc_feature (535)..(535): n is a, c, g, or t
  misc_feature (578)..(578): n is a, c, g, or t
  misc_feature (612)..(612): n is a, c, g, or t
  misc_feature (627)..(627): n is a, c, g, or t
cttaaatcactcaaacattttatttataaaacaaagaatttgtgaaatggagacaaattataatgttgaaatatcattagagtttccttcagttctaccaagcatatttgggcaaaatttaaaatatcctttcctctttaattctgcaaatagtgcaatttcaaatacagcaactatcttctctctgtctagctaaaaattcaatgaaatacttcactttatttgtctaaatagttattctttttctccttggagaatcaaaattaacctccagttgtgttttcttttaggggatacaataaggtggaatgtttcttcttgaatggttcaagggtccagtatccatcatgaaagaggggaaggtgcagaaataagatggatccaggtgaccttggggagaaatcattcctaagtccctgcttttagctccaaaaccatccttcttttgcctttcatatcccttgtccctgaattacagagccctttgacctctgtaaaanggnnnnnnnnnnnnnnnnnnnnnnnnnnncaatcnccaactaaacacaataataaattaggagtccctatctttgtanaaagtggtgcaaggttctggggcttctcccttcntttcatcaagcctcnttttccccctggt

SEQ ID NO: 412696 - DNA, 558 bp, Homo Sapiens
  misc_feature (75)..(83): n is a, c, g, or t
  misc_feature (125)..(198): n is a, c, g, or t
  misc_feature (272)..(272): n is a, c, g, or t
  misc_feature (282)..(282): n is a, c, g, or t
  misc_feature (291)..(291): n is a, c, g, or t
  misc_feature (325)..(325): n is a, c, g, or t
  misc_feature (468)..(468): n is a, c, g, or t
  misc_feature (471)..(471): n is a, c, g, or t
  misc_feature (475)..(475): n is a, c, g, or t
  misc_feature (484)..(484): n is a, c, g, or t
  misc_feature (534)..(534): n is a, c, g, or t
tcaagtgatcttaccacctaagcctcctgagtagctgcgactacaggcatgcctcatcatgcttgggtaatttannnnnnnnncgtacagatggggtctcaccatgtctcccaggctgatcttgnnnnnnnnnnnnnnnnnnnnnnnnnnnnnnnnnnnnnnnnnnnnnnnnnnnnnnnnnnnnnnnnnnnnnnnnnngccccctcatttcctttaattatgaatgcagacaataaaccacaagtaatatcaagcactatctttactgccantagaaatcanactaatcangttattttacagttgtagattatctttaaattancgctttcactcatcactactttaaattaaggacttatagaactgctgccatactgcatgattacaagctttcctgtctgcagatgctcatgtgatggaactgggcaactatcaagtaactctgcatctaacaaaaaaaggcancanccanaacagtcancaacttcaatcgttcctccgagaaattaacaaccaagggaaatgattccnggcaagttacatcccaccaacata

SEQ ID NO: 412697 - DNA, 412 bp, Homo Sapiens
agctttaaaagagaacagtccccattctagctaccagtcttgctttcccccatcttggcaagccccagtgaatttgccattgaaagattaccctcccctttgccctcatctgcctgagctagaggccaggctgttgttaatgttttttcagttccaaagcccctgatgggacattcttgtttctgtgctactgctttctctctcttaaattaaggtgcaaggggataaatattactataactgggatgtaaggctcagtcagtgtggctattccctcccttcgggggaaatattccatctgtctgaacggttttaggtgatcatgaggagagcggcttagtcacacagccagccacgctcatcacaaaagatttgttcagactcactgtaaagaatgacaaggcagatagct

SEQ ID NO: 412698 - DNA, 432 bp, Homo Sapiens
gaaatggcatttttttggaactcagcttacacacaaattctgctagcaggaggaaagggtattgtggctttccgttgttaaaatgcggaggtagagttggaaaacaatcaaaagaaatgttcctctcattttttggaccaaatgaacaaatctagcatttgtttttgagagaataaatactcttcaaaaagaacagaaactgttctcaaaatctttgaagtatgtcactgatcctttaaccagtagttggagaagcaagtatcctactgacaaacacaggctttgtggggttgaaagccgatcataagtttacaaagactgattgggcctttggcttgtgactaatgcctggcactgacacagaggaggctcttaatcgacacagccacatatattttaagtaaaaatgcttgttctcaaagaaattaattt

SEQ ID NO: 412699 - DNA, 321 bp, Homo Sapiens
  misc_feature (30)..(30): n is a, c, g, or t
  misc_feature (61)..(61): n is a, c, g, or t
  misc_feature (65)..(65): n is a, c, g, or t
  misc_feature (89)..(89): n is a, c, g, or t
  misc_feature (93)..(93): n is a, c, g, or t
  misc_feature (109)..(109): n is a, c, g, or t
  misc_feature (115)..(116): n is a, c, g, or t
  misc_feature (128)..(128): n is a, c, g, or t
  misc_feature (135)..(135): n is a, c, g, or t
  misc_feature (143)..(143): n is a, c, g, or t
  misc_feature (146)..(146): n is a, c, g, or t
  misc_feature (156)..(156): n is a, c, g, or t
  misc_feature (163)..(163): n is a, c, g, or t
  misc_feature (166)..(166): n is a, c, g, or t
  misc_feature (192)..(192): n is a, c, g, or t
  misc_feature (213)..(213): n is a, c, g, or t
  misc_feature (228)..(228): n is a, c, g, or t
  misc_feature (230)..(230): n is a, c, g, or t
  misc_feature (310)..(310): n is a, c, g, or t
gctaatcctgttatgccagtcttagtttanacccattatcctttctcttcgttaagactgncatnaagttcttcctttacttttcttangcanggtgaatattccacanttttanngtatttgggccngttaacnttctgcantgnagccaagcanttgggtnaangagtcctgtatgtttttaaacagttncctttttaaagcataaaatcngcgtccagcaggaancnagctttaaaaaatctcccttgcatctttattttcatttaagctccccaagtggccttttaatctatttattatgtttganatgggggtctc

SEQ ID NO: 412700 - DNA, 630 bp, Homo Sapiens
  misc_feature (121)..(129): n is a, c, g, or t
  misc_feature (389)..(478): n is a, c, g, or t
  misc_feature (520)..(520): n is a, c, g, or t
  misc_feature (533)..(533): n is a, c, g, or t
  misc_feature (553)..(553): n is a, c, g, or t
  misc_feature (570)..(570): n is a, c, g, or t
  misc_feature (584)..(584): n is a, c, g, or t
  misc_feature (613)..(613): n is a, c, g, or t
ttaactttatattttcagaaaagtgtttttaattaaaaatatgtgatagggaccaaataagtaaagtacatttttctccactaaatttgaagtgagggaaagaggagccaaagtaagagannnnnnnnnaaggaaacttaatctgattgtgaaaatcatacatctggagaaacatcagatcaggcaatagagtcagagggtcatgagcaatagacgatgatgcgaggcatttggggagcttcctggaggaaaattaagtttttttcctagcaaactaccatgtcctacaagaacttggttatataatggtgcgtccctgaatcactgattaaaaccagttgcttctgattttagtcacaggttttacaagtattcagctctccctcatnnnnnnnnnnnnnnnnnnnnnnnnnnnnnnnnnnnnnnnnnnnnnnnnnnnnnnnnnnnnnnnnnnnnnnnnnnnnnnnnnnnnnnnnnngccattgttccgttagctgagctgatgtgtttggtcctaganggcctgacttcanatactccttgtgatcttgtnagggctctacacaaaanttcattaagtaggnaaatttgtattctaagggattggttatanaatggcttcgttaagaa

SEQ ID NO: 412701 - DNA, 605 bp, Homo Sapiens
  misc_feature (553)..(553): n is a, c, g, or t
  misc_feature (555)..(555): n is a, c, g, or t
cgctactggaaaggtatttaacatcctaaaacacttttgaaaaagccccaatttatatagaatctgaaaaacatgaaaatgccagaattaaatagtagttgtttgtgatcccttgaactctgatcattttaattagcaaaaagcaataatattttatattccatacttcccagaaagttaattgattcaaattcttgctatgttatgccgtcatgcagatcaaagagaacttgtacaaacaaaaagatattaactgttttttctagaaaaacctttgttagttatttagctatagcataatacacagtagaactcatttttccgaagatgattgccataaagctttaccattttacaaagctctagcattttaaaatgttttcctaggcattctctcattcagtcgttacctcaaagctttgaagggagtataattatcttcatttcacaaatcatgaagctaatgacatttcatgggaagctatttttataggaattatgggattggagccctcctttgagtgtccttggatgttgtcaccaccatcaacangnagtggtatccccaacatgtttggtgagaaaaaaacattaagggaagggac

SEQ ID NO: 412702 - DNA, 649 bp, Homo Sapiens
  misc_feature (470)..(470): n is a, c, g, or t
  misc_feature (472)..(472): n is a, c, g, or t
  misc_feature (523)..(523): n is a, c, g, or t
  misc_feature (533)..(533): n is a, c, g, or t
  misc_feature (562)..(562): n is a, c, g, or t
  misc_feature (581)..(581): n is a, c, g, or t
  misc_feature (592)..(592): n is a, c, g, or t
  misc_feature (606)..(606): n is a, c, g, or t
  misc_feature (612)..(612): n is a, c, g, or t
  misc_feature (615)..(615): n is a, c, g, or t
  misc_feature (624)..(624): n is a, c, g, or t
ataggcaggacaggaagcttgaggccatgtggattttgtagttttatacaagagcattcttatttttagtagaacaccaatgaacataaagagagaaaaccttgttcatatacaatgtgtggttccaaatgttcttattgaagacttgagacctagattggcattaggaatttttaatgtaatcataacttaaaattagtcaccttgatggctgtctttgtcagtgctcctcctggagcacactgacttctgttgctgtctttcttccctttgctgcgcctgggttcagcctgctgccacgaatacggagtcaaattttgcctgcacacaggccctcagaaatcagctgggccgttagagcctggtgctttctggattgtttttcccccaacttgaatatgattgaacatgaatgccttgtcaaaaccgtcatcagctgaggcattcatagtacgtagggattttttggngncttaaagaaatggtgtcaaccctggctggtcactaaaatcagctggggganactctggcantataaccaccaagcccaaaccccaaaaanttccggtaagtttgggccngggttgggatnaatggatcctaaangaaagnaangaaagaaanaacgttgccctgggcccaagtgatg

SEQ ID NO: 412703 - DNA, 688 bp, Homo Sapiens
  misc_feature (47)..(47): n is a, c, g, or t
  misc_feature (63)..(63): n is a, c, g, or t
  misc_feature (82)..(82): n is a, c, g, or t
  misc_feature (501)..(501): n is a, c, g, or t
  misc_feature (531)..(531): n is a, c, g, or t
  misc_feature (538)..(538): n is a, c, g, or t
  misc_feature (607)..(607): n is a, c, g, or t
  misc_feature (641)..(641): n is a, c, g, or t
  misc_feature (676)..(676): n is a, c, g, or t
atctcgatcacgttggcctactggagctgtttgggtgagaggagccnccctgagctataaaangtggcttgttagtgacacnggattactgaagccaaactggaaaattcccatcacctccaggatacctgagtctaggaatatgttccagctcactcatcgatgatctgcacagttgtggcctaaggacttcatttagaatatcagaaccagcagattccttagagatcttgtagttcgtttttcctaagacctccccacaatttcacacgttataataaggcctgatactgtgagtaggtaaagaagttagatattaggtgaatactatgaagatcagaatttaggcttttggataacattgaaacgcttagccagtttcttctttgggtcaaattttcctcggagatctcaggcagtatttcctctgtgcttgaggcaagaacttagggactctgacgttttctgtccctaagctctggtgaagagaactcctaacantggcatgagctctaacatgaaaggatccgnatttcanagtgaacccaagattcaagagagtctaatgcgtcatgccaacaactcctcgccaactgacaaaagccanggtaccaacaatgattggaaaggtgctgacgaanagaaacccaagaagaacaacctctgcggacaattnaagggtgccgga

SEQ ID NO: 412704 - DNA, 355 bp, Homo Sapiens
  misc_feature (78)..(78): n is a, c, g, or t
  misc_feature (104)..(104): n is a, c, g, or t
  misc_feature (127)..(127): n is a, c, g, or t
  misc_feature (141)..(141): n is a, c, g, or t
  misc_feature (149)..(149): n is a, c, g, or t
  misc_feature (152)..(152): n is a, c, g, or t
  misc_feature (161)..(161): n is a, c, g, or t
  misc_feature (169)..(169): n is a, c, g, or t
  misc_feature (175)..(175): n is a, c, g, or t
  misc_feature (191)..(191): n is a, c, g, or t
  misc_feature (198)..(198): n is a, c, g, or t
  misc_feature (214)..(214): n is a, c, g, or t
  misc_feature (220)..(220): n is a, c, g, or t
  misc_feature (239)..(239): n is a, c, g, or t
  misc_feature (268)..(268): n is a, c, g, or t
  misc_feature (294)..(294): n is a, c, g, or t
  misc_feature (317)..(317): n is a, c, g, or t
gacattataagaaatttttgcaaaatttaacattattatatgccattccaactaaatgctgaagagaactacatgtancttggggccatatacaagaaaaatcncttactattttggggattgaccngccgaacagcaggngcctgcanaanagttcctcncaagggancctganctggtggtgcaggaanagttgtntaaaccacctgggggnttgcangagctcttggtacagggantcttgtgggcacctggagttaccgggacnatgtgttacattcacggtaattgganccgtaggtaaataagtgtatggngggctgaaatggcccacttttttgggacccaaaatggt

SEQ ID NO: 412705 - DNA, 621 bp, Homo Sapiens
  misc_feature (97)..(97): n is a, c, g, or t
  misc_feature (390)..(390): n is a, c, g, or t
  misc_feature (405)..(405): n is a, c, g, or t
  misc_feature (409)..(409): n is a, c, g, or t
  misc_feature (518)..(518): n is a, c, g, or t
  misc_feature (522)..(522): n is a, c, g, or t
  misc_feature (527)..(527): n is a, c, g, or t
  misc_feature (541)..(541): n is a, c, g, or t
  misc_feature (569)..(569): n is a, c, g, or t
ttgaaagaacacaacatccaaggcagaagctctgccttttatattatcttttattggaactgatttacaatggaaggtaaatgcaaatttgcaccangggttattctgaagttccaaacatctgtgatgagtacaagcctgtactataagacccagtcacattgaaaatatggagctgagaagaggtaagctgctgttcaatgggctccttgggatagccagtaccttcatcttcattcatcctgctgagctgtttcggctttaagttctttaacaatgtctttttagcaacatcattacatcattttaggccaaaactcaaagtccagagataagaacccttaagtcactcatgtaactgcactgtgtgttaaaagtatttcagttcanccaaacactcttctnctangtattgcgattaagtatatttactaatccactcttgcttcactattttcattcttcttcaaagtcaatgcaagatgttaagaactgtgctggaagtgcagaaatttccnatgntaaancgcatgacttttgncctctttattccccttacatctagctgnttaccgctaatgaactggaatttcaggtatctggttgggccacatttgaata

SEQ ID NO: 412706 - DNA, 461 bp, Homo Sapiens
  misc_feature (177)..(231): n is a, c, g, or t
  misc_feature (249)..(249): n is a, c, g, or t
  misc_feature (366)..(366): n is a, c, g, or t
  misc_feature (426)..(426): n is a, c, g, or t
  misc_feature (436)..(436): n is a, c, g, or t
ttatatagttgaactaacctgactgtggaaacatgacttacaatctgggcttagatgataccgaagtaaactacaaagcactgtctgcaacctaaaggaacctcagggacactagaaaatgagtatctaccaactagtttaactgtgaccaaaaatatcacggtgaaaaagtaagtnnnnnnnnnnnnnnnnnnnnnnnnnnnnnnnnnnnnnnnnnnnnnnnnnnnnnnnccatatagatcaggcctnccactcagtagacaatcaaacttgttcaaacgtctctttgaacaaatcaaagagatgttcctggtgtcactgggggtcaacccaaattcatttcatatattaatatttaataatctnccaccaacttgagaagctattgaatgatttacatgttatgaagctaattatactatctgncacttttgangaaaatgtgtgacaaaaaattatgg

SEQ ID NO: 412707 - DNA, 700 bp, Homo Sapiens
  misc_feature (446)..(446): n is a, c, g, or t
  misc_feature (557)..(557): n is a, c, g, or t
  misc_feature (603)..(603): n is a, c, g, or t
  misc_feature (681)..(681): n is a, c, g, or t
cctcgatgcactgtggccctactggggtcaacaggttctgtgaacagtcctggggattcattaataaataaaggaagtcccttctctcaagaagctcaaagtccagaggcaatgcagtttttttctttaaggaaaatacagacattgtcaatgctaagatgggtactacaatgaccgtatgagaaaaacacagcaaatagaggcaaaggaaggggagagcacgtgcgtctcagagtccacatggtatcggccctgtctaatgcctgggtaggatgaaggagctgagtgccaaagctttgtaaaaccagtgggctggctcctgtggagtgagttgccataggccatgtctatggctgtcctctcctggccctgccatactccagtaggcaaaagtgctttcaacatttaaacatccatcctcttcctggtgctcctccccagcatanggtcttatgacatcagctatgcttcctgtctttgaggaaggtccttggctcagcctgttcccaagagtgccaggcaatggcaatagggatctgccaagcctgtgaactcanggatttgcacataggattctattgtttgacaactcacttgcagatnatagagacttgatggaattatgtaaccttaacatgctctattttcctaattttaacatgggaaaaataaacacaccanccttaaagggtacaatgag

SEQ ID NO: 412708 - DNA, 672 bp, Homo Sapiens
  misc_feature (385)..(385): n is a, c, g, or t
  misc_feature (593)..(593): n is a, c, g, or t
  misc_feature (603)..(603): n is a, c, g, or t
  misc_feature (630)..(630): n is a, c, g, or t
ttggacttagcagtcttttttgttgccttggaaaggcttgcttttgtgctgagctgttcaactgaaggtctttgttaagaagataaccaggacttttaggctcacaaacaggctttttgcaaacttttctatggaatattttaacatacataagcaaccttgaaatgtgtgcttaagtttgagttgaagatgaaagccgaaactcaaagtgatgtttagtttattgatattcatagtgacaattttaatgtgtttctggaaaacttagtatgaaccttgggcctttcaaatttaaggttaatatttttaagtcaaagccctagaagcaaacatttaaaataagactgtttctcccatcatatttgacattttccttgcaatttcntatataatttttgaaagctataatgttacatacataatgtaccaaataaatgtttacttaatgtagaaggtgatatatgcaaaaatattttggaaggcattataaagttttgaaatattaactttaatattttaatgtgattcatgcaaccctttgaaactctggccaaaccagtggatgagaagaaccttcgggagaaaatcgttcncaataagacntgaatatagtatagaatttaaagtacngtttgcctggtttccccttctgggtgtggggactaggataaa

SEQ ID NO: 412709 - DNA, 545 bp, Homo Sapiens
  misc_feature (13)..(13): n is a, c, g, or t
tctcgagcacgtngcgcctactggaatatatattcagtgggagtggtgaaggaaatagattttcacaagataggttgctcagaatacaaagaccaggttcagttagttaagatttgatcaatgtgaacttgaatttaaaaattaggaatttggggaatttttttaagagcaacctctgatttttccattgatttggcccagattttccacctaaaatttttttacaaacgttatgctcattagcttttaaaaatatctcagaaagtacaaaattatcacttaataactcacttattgcctataaaaaattgttcaggaaattcaaagtcgtgagagaatttctcactatccttcaaagtagttttaataaagtaatatcattaagctccaagttgaaatatagggtagaaattgtctgtctatattcctagactttaaaatgcttttcctatttaaaaaaacacattgtagtttccttgtaaaagattaatagggtcttgtgtaatgcagtttgacactttataagttggcctgcagaggcaagt

SEQ ID NO: 412710 - DNA, 700 bp, Homo Sapiens
  misc_feature (580)..(580): n is a, c, g, or t
  misc_feature (674)..(674): n is a, c, g, or t
tcctcgagcacgttggcctactggcctaatgtactttgggtgctctttgtgcctaaaatttttcatttaggtaagataataacttctcagttttgcttaaacacatttaaactgagtttttatcttttgcaacagaaagaatcctgacttaggcagtcgttttctttggaattcaaatgcctacatcatctgaggcttggtctcaatcaggtgaaatgcagcaacataacacaataaaattaacttgtgtagaatgccttctggggtccagagccaggtgcttcctcaaggactgcctctcagagcacaatggtgatgtggtactgactgtggaagctgagagcaaaactataactgtgccctgaatgcacatgctcaaactgagcctctggttcgataagtgccagatgttttggaccctatgggaacactgctgtgttcttatcattgacagaaagaaatgttcctcacattattaaggttcgatagtattatttaaggaagtaaatacagtatatgtatcaaatagtaaaagttaagaattttggttggttttgagggaacaaagtaaaagcctganggaaatgaagccagacttcctagtagtaaattacaaagttacaatcctgcccatggtcaactgagaagggatcatccaacaacgatggatctcntgagaaactaaataccttcgctaccc

SEQ ID NO: 412711 - DNA, 562 bp, Homo Sapiens
  misc_feature (42)..(54): n is a, c, g, or t
  misc_feature (293)..(293): n is a, c, g, or t
  misc_feature (423)..(423): n is a, c, g, or t
  misc_feature (520)..(520): n is a, c, g, or t
ataaaccactgtgcctgacctaatccccatttttgtagcacnnnnnnnnnnnnnaattttcagggctggttttaaatgctttgtgtccacaatctttcccgattccttgattattctttgttgtaggtgctataatacttatttcacagattcagaaactgacattcagaaaagttaagtagccttgcatagttacataattttaactgttagagtggggatttgaacctatgttttctgactccaaggtttatcttctatgtggtactatctcattcaatctactggcatancctgggtttcgtcctaaacatagatgaaaagtgtgggttaagtgtccttattaagagaaaaatttgtggagcaagcaaagagaactgtctgcaataagcacatctttgagtgggtggagatagctattangtagataaaacataactaatgaactgtaaaattctaaaatcctggacacctcataaatcccttcaattcactcaataattggtttggaaaagtcacnaagcaatcttaatcctgaaagaaaactatttaatgatacctt

SEQ ID NO: 412712 - DNA, 658 bp, Homo Sapiens
  misc_feature (350)..(350): n is a, c, g, or t
  misc_feature (433)..(433): n is a, c, g, or t
  misc_feature (455)..(455): n is a, c, g, or t
  misc_feature (509)..(509): n is a, c, g, or t
  misc_feature (521)..(521): n is a, c, g, or t
  misc_feature (530)..(530): n is a, c, g, or t
  misc_feature (625)..(625): n is a, c, g, or t
  misc_feature (633)..(633): n is a, c, g, or t
tttatctcaattttcaacagatttgctgcaatagaaaagttatctttttttagatttaagagctccaaatagcactgtagcctacattaagcatcaagtgccccgttcccttcacaaaagttttctggttcattcgagtcactgaattccaaataatgcacattgggttaccaacattagtcgccactgtcatattcagaaattaatcctaaatggtttacagtccttctcattttttctctttcaattatgtgacatagtccacacttttcattaaagttattaataatataaggatcttaggtggcaattttctgcacagctggggaaaagttgcatattcagtgtangtatgcagatgcttactgaatcccagagacataaatggtttattcccaggaatagtcctaccttgctattggttaataaaggnctaaattagattggcatcagtncaacaaagcattcatttttatttatgcatctcgaatcacttttatacatatgtnaaatgaacacantttgagagnttaataaggtttataaattatacttctagataaatgcactttttgagaaagacaagaaaaataattattttctgatggatttccattagccaaangggcctanaacataaccagggcaaattattgga

SEQ ID NO: 412713 - DNA, 651 bp, Homo Sapiens
  misc_feature (72)..(72): n is a, c, g, or t
  misc_feature (482)..(482): n is a, c, g, or t
  misc_feature (492)..(492): n is a, c, g, or t
  misc_feature (513)..(513): n is a, c, g, or t
  misc_feature (593)..(593): n is a, c, g, or t
  misc_feature (607)..(607): n is a, c, g, or t
  misc_feature (610)..(610): n is a, c, g, or t
gagttttgtcgcaatttctagtagtgacaagtagaagtaatgctagaagacttgtgccattagtgcattcanatcactgaatttttcatgatcctgcttccattcacaagtcctttattttacactggttccaactttgattttccattggtattttgtcagaccaagccatgtgactctttcttccttggatgcaaaaccaagtagttggaaaaatctttagggcatctgtaatctatgggaatcaaataattttgcatccaatccgtaaatttatgtatgtgtctggagaattcaaacaccccagaatgtttagaaaactagctgacagctcggtaaaggaagtatgctttcacttggtcacaaaggtttgttcatctctcaaatagtgtattaatagatggcaacagagtttaaatgcttttggaagatccttagccaggtatgaggaaagcctcaagagagtgcaagcttattatggngttataaggnttatcgggataatacactttngagagcaatgttcatgatttatcttcatctgatgaagaaaagacattttctaacacacattatcgagttaaaattggggnaaaaaagaattttntgnctcctattttatagcaaatttgggatccttttggctgaaaa

SEQ ID NO: 412714 - DNA, 468 bp, Homo Sapiens
  misc_feature (12)..(12): n is a, c, g, or t
  misc_feature (37)..(37): n is a, c, g, or t
gtaaaactagtntttacttagtacagtgtaatttaanccttgaaaactaaagtgttttatttatttgggggaaatcttttcaagagtaattagaactgtgcctggtttcttcttccctgttgtacagtgtggagtgagcatcatttctaggccttggacaagttgttaatacttctaaatttgaatcagcttcaaacattttatccattacattgtgaatatcaagaagtatatgtaaaagttcctttaatatgaaggatttttgctggcatgacttcctctgagacattgtcatccttttcaccataaccactctcttatgttgatcagtttaccttcagaaggttcctctggctgcatatttagtctccctgttggcagcggtgtcaccattctcacagtcaactctttcttttgtaactccatttatattccattagaattttatttccagcattatcgcttttg

SEQ ID NO: 412715 - DNA, 520 bp, Homo Sapiens
aatttgcgactcaacattgtgattgtatctaaaatgtaagacatctccaaaaatatgaaacctacatgtcaaaattactttcttcaaagactgattgtggcaaaactcattattagagccttctgtactttaaaagctttaaatgaaacactgcaatttacagaattcattatggtgcacaactaattagaactttaaaggaaatcacagtagggaattagacattttaaagagcattttcttgagctgaagtgttcttcaggataaaggttgttttgcagtaaacgagacacttggattttacatacatatatagacacacactctgaagggtagcatgtttgaccagtcgtgttcggaaatcattcttgttctctgtttagacaaaaggaaaaagcaacaaaggcgacaagggaggggcaagacagaaatgcaaattagatgtccgtagcatacttgggagccaaacaaaaaatgcagacatatctaattagtttccaaagccagctttaccctaggg

SEQ ID NO: 412716 - DNA, 665 bp, Homo Sapiens
  misc_feature (459)..(520): n is a, c, g, or t
  misc_feature (553)..(553): n is a, c, g, or t
  misc_feature (579)..(579): n is a, c, g, or t
  misc_feature (590)..(590): n is a, c, g, or t
  misc_feature (619)..(619): n is a, c, g, or t
  misc_feature (628)..(628): n is a, c, g, or t
ttttttcaggcaattcagttttcaggaagagtacaaaataaagtagaagatctagaaataaattcccttaaaaccatctgtgcctactccttggaatgccttcatgtactcccaggttactccactgtgaggacagctgttttaagaaatttcgaatcattacctgtgacaagaaatataaactggcacatcagaatctcctgataacttgtgtgtccacttcctcagttgtacctcacagctaaatagttatctgttaaaccaagagaagttgcagttctgggggcaatagccttattagtatttgtgcctgaatataattctgaactccctcttttctaccttctaggctttgagttcatttatttcagcagcaaaagatgtcaggagcaagaggcagtcccacatagtgtagattcattgaatgagggagccaaacagtgatttagaaacaacatnnnnnnnnnnnnnnnnnnnnnnnnnnnnnnnnnnnnnnnnnnnnnnnnnnnnnnnnnnnnnncaataactcccagtctggctgcaccttcgactnacacaaagatctttaaagagatctgntgccaagcatngccccaggaatatggatttgattctctgnttaattctnaagtgaaggcaaaacaggaaaagtcaaagttagaatc

SEQ ID NO: 412717 - DNA, 387 bp, Homo Sapiens
  misc_feature (197)..(197): n is a, c, g, or t
  misc_feature (367)..(367): n is a, c, g, or t
  misc_feature (370)..(370): n is a, c, g, or t
acttatgcaatatttgacagatcattcttttttaaaaaggcatgtaatggaaaggagggaaagaaagcaaatcggatgcagcatgccacataggcttctctggaattatcaattttttagtaagctataatatcaaaactaggaaccaaaaaacagggagattccccgatcttgactctttccaaggctacaccctncaccaggaaatgggagaccaagtgtctatggctgccaagaaaccccacttcatcgttgattcactgcaggaatgcataaaattgcttaaaccctctccttgagtgtggtgaaagagagccaagagtagtatctaagttttcagagatgtcaaaggagtccctttttattncangcttacttatgctacag

SEQ ID NO: 412718 - DNA, 619 bp, Homo Sapiens
  misc_feature (453)..(453): n is a, c, g, or t
  misc_feature (526)..(526): n is a, c, g, or t
  misc_feature (567)..(567): n is a, c, g, or t
gcctgttggcctactggattttacaaaagcattctagctttctgtaatcccgaggtgccaggttaagcaaaattaaactgttttctttcctgatataatagctgatatgcgttgtgagcccctaaggaggctacaatatgccattttttccaggatttctacccacttctagaatatcttaagaacgaatctcggaatattaaggacttttgcttttaatacctgtggaataggtaagatgcgagggactacttgcatagaatagaaacattttttaaaactagcaaatattgaaaatctacttgaggacaaggcatttggagtattaaatgagatttctgttatcaagtaacttaagggcaccaaaaaatggctgataatgcaaggtcattgtgagtgccaaggaactaggagttcagggttgcctgcactggcaacaggagcaagagacangtatgcgattttctccttcatggaatagtcttgagctgggccttaaagggtagataagtaagacttaagttgntaataacaaatgctggagaaacacacgtgaaaatagttcantttgaatgaaggaaacttgtagaagagtagtgatagggctaaaaaggatgaa

SEQ ID NO: 412719 - DNA, 700 bp, Homo Sapiens
  misc_feature (54)..(54): n is a, c, g, or t
  misc_feature (56)..(56): n is a, c, g, or t
  misc_feature (69)..(69): n is a, c, g, or t
  misc_feature (99)..(101): n is a, c, g, or t
  misc_feature (412)..(412): n is a, c, g, or t
  misc_feature (423)..(431): n is a, c, g, or t
  misc_feature (565)..(565): n is a, c, g, or t
  misc_feature (610)..(610): n is a, c, g, or t
  misc_feature (624)..(624): n is a, c, g, or t
  misc_feature (646)..(646): n is a, c, g, or t
agacctaactttatgacttcgttgcataagcaagagctttctgggagggggagncnaagggacaattantgaacaagctggggtggggaggggtagaannncagtctttacaatatcaaactcagtatgatatcttatgattccttataatactcccttcttactttcaaaattcacctttactaagtgacaagttactaacctgacaagttttaagctattcttatatttgaaagcgatccttgataaagctatcagaagtctaaaaatattcaagacccatgcactgaatttatttgtatattaattttgccgctagtgtggcatggctgctttttctcctgacagtatggcttctggccataggaatattttgaagaattctttaatgcctgaagaaagggtagttganatccaattgannnnnnnnnaacctaatcaatccaaatattacagtaatgataatatctttgatagttagctattctccaagaagagagctacatttctcccctactgactcacggcccctctgaaaatcagatgagggctataccttctcttnccgaaaaaatgtgcatgcacacctacaaaattcttcaatttccanaggcccctggactncctgaattctggtaacaagctntataccagaaaaagaggaatttacagagaaattgtaaactggcagactgacagt

SEQ ID NO: 412720 - DNA, 286 bp, Homo Sapiens
  misc_feature (55)..(55): n is a, c, g, or t
  misc_feature (71)..(71): n is a, c, g, or t
  misc_feature (73)..(73): n is a, c, g, or t
  misc_feature (75)..(76): n is a, c, g, or t
  misc_feature (81)..(81): n is a, c, g, or t
  misc_feature (83)..(83): n is a, c, g, or t
  misc_feature (88)..(88): n is a, c, g, or t
  misc_feature (92)..(93): n is a, c, g, or t
  misc_feature (96)..(96): n is a, c, g, or t
  misc_feature (100)..(101): n is a, c, g, or t
  misc_feature (103)..(103): n is a, c, g, or t
  misc_feature (106)..(106): n is a, c, g, or t
  misc_feature (108)..(108): n is a, c, g, or t
  misc_feature (111)..(111): n is a, c, g, or t
  misc_feature (115)..(115): n is a, c, g, or t
  misc_feature (127)..(127): n is a, c, g, or t
  misc_feature (130)..(131): n is a, c, g, or t
  misc_feature (133)..(133): n is a, c, g, or t
  misc_feature (141)..(142): n is a, c, g, or t
  misc_feature (155)..(155): n is a, c, g, or t
  misc_feature (157)..(157): n is a, c, g, or t
  misc_feature (159)..(159): n is a, c, g, or t
  misc_feature (168)..(168): n is a, c, g, or t
  misc_feature (171)..(171): n is a, c, g, or t
  misc_feature (177)..(178): n is a, c, g, or t
  misc_feature (183)..(183): n is a, c, g, or t
  misc_feature (191)..(192): n is a, c, g, or t
  misc_feature (195)..(195): n is a, c, g, or t
  misc_feature (197)..(198): n is a, c, g, or t
  misc_feature (201)..(201): n is a, c, g, or t
  misc_feature (209)..(209): n is a, c, g, or t
  misc_feature (213)..(213): n is a, c, g, or t
  misc_feature (215)..(215): n is a, c, g, or t
catcaatctttatccctttcaatgattagacaatgggaatcttgctatgtaagancaccatttattcaaanancnnttctnancatancctnnggnactnnanccncnggncaantgtgacttcaantgnncnccctcacnnttcacacctgacntnanaataaaganccnctgacnntccanctgatcannctnannacntcccaaancttnanaccaggtttagggggccaatgctaacatcatgaaaagcgtcattattgaaagctaagatctcaaaacatac

SEQ ID NO: 412721 - DNA, 678 bp, Homo Sapiens
  misc_feature (25)..(25): n is a, c, g, or t
  misc_feature (65)..(65): n is a, c, g, or t
  misc_feature (522)..(522): n is a, c, g, or t
  misc_feature (566)..(566): n is a, c, g, or t
  misc_feature (591)..(591): n is a, c, g, or t
  misc_feature (640)..(640): n is a, c, g, or t
  misc_feature (649)..(649): n is a, c, g, or t
  misc_feature (654)..(654): n is a, c, g, or t
taaaggttttctgtgtcaagctatnttatgaaataaaattttacaaacattgaagcttcattttnacacgttgtatttggggaatgcagacttggcctatacgagtttttgaaattaagggttttttccgtaaaactagcttaggagtttaatgagtcactgtgtctctcacctctgtaggatgagcacagagatcacatttgagaagcaggtgtgggtgttttctgctggtcacgtctcctctgcctctcctctggctcagcagttacttttcctcagtcatgggggctgcattcagctgcgatgccagcattagggccaagctctcccgcttctgtgacgttttattacacgtactctttatcagtaagtagctgcattccctgagtgttcctcccaccgtgcactgagaagggctgaggatttccgaacatcaacctcctctaaccctctgtatgggaattagatttttatcatcctgactgttggggctttctaaagctcagcaacttgccctgggcnggatggaacctgcctggggggaatgtgaatgaagcttctggtgnctgtggcttgctctctgtgggtggnaacttcagaacagtagaattcaagtgcaacatttggtgcccggacaaanttgtaaaanctgancttggggaagggccttaattggca

SEQ ID NO: 412722 - DNA, 625 bp, Homo Sapiens
  misc_feature (46)..(46): n is a, c, g, or t
  misc_feature (73)..(73): n is a, c, g, or t
  misc_feature (75)..(75): n is a, c, g, or t
  misc_feature (504)..(504): n is a, c, g, or t
  misc_feature (516)..(516): n is a, c, g, or t
  misc_feature (580)..(580): n is a, c, g, or t
  misc_feature (605)..(605): n is a, c, g, or t
aaaggagaaacaaaaccagacactgttttgacgttgttgctatttngggatgtcttacataattttatccatngntacattatttcctatgaaaagatgaccttacagtggcttcatagcatgacctgcatctcacacaattccctcccccatgcagggactagaatgtgatcgttgcaggaagttgatggcttctattcttgaaattgtggcattagctgctgtgtggccgtccctctcagcctgtgttttgaaggtcgcgcacttcctcagaatgccggccccactccgtttccagttcacagcgccacgcagcttgttctcccattaaatgcaccttactattgttggctaatttgaggtcattattggctgattttgagaatgacttatttaacttttctcatttaactgtcattgtgatggaatattttgggttttccaggaatataaaatgcattaatggcacaccgctctaagaagttaatttttgattaactttgntttgattaaagntgagttttctaagaacataattgggtttaataccagggtttggcagtgttcaataaagaaccanatggtaaacgttctctgctttacanggtcaagcctcttgcaactg

SEQ ID NO: 412723 - DNA, 674 bp, Homo Sapiens
  misc_feature (83)..(83): n is a, c, g, or t
  misc_feature (85)..(85): n is a, c, g, or t
  misc_feature (98)..(98): n is a, c, g, or t
  misc_feature (113)..(113): n is a, c, g, or t
  misc_feature (582)..(582): n is a, c, g, or t
  misc_feature (585)..(585): n is a, c, g, or t
  misc_feature (617)..(617): n is a, c, g, or t
  misc_feature (619)..(619): n is a, c, g, or t
atgtacccatgttcctctgctaggtgcttttcatttttttgagggccttcatttttctgttcaagtgtgcatggtgcttctangncttctcacttagntttgaaattagcatnctactcagaatagataaatgctgccaacttgcagttcttttgcttggcccagattcccttatagtttgcaggtaattttcagggtcttcagtatgagattattttcatttcctagtttcaacacagatggttttctctttacttttggttcatttccgtgcattttggggaaaggagatagataaatgtgcacttttcagctacctttctggacaatattagcatttcccctttacttctgaatatcctttggactctcctatattggaaaaagagggtgatttatgactattttaatggaaaacaaaaataaatctatagacaagttgttagatatattaagagtttaacaaggtgaatattatgacagctataccttcacccagctacccttgctgggctctaactcgctgctctttctcttggtattggtggtggtttcccccatgggtgaagtctttatggcagnctncaccatttcctcataatcattttccttttgantnctatattctgacatccagttccatcatactgggggagctgatctctcaaataaat

SEQ ID NO: 412724 - DNA, 540 bp, Homo Sapiens
  misc_feature (68)..(68): n is a, c, g, or t
  misc_feature (73)..(73): n is a, c, g, or t
  misc_feature (88)..(88): n is a, c, g, or t
  misc_feature (428)..(428): n is a, c, g, or t
acccctcccctttctggaagacttgtaggaggataggggattttttctgtgcatagattggcgtccgnttctnagaagtttcttcttntcaccttaaaaaaaattgtttgcatccttccccttagataaggaaccgtcaacatccttgttagagcccagtgcggaggggaccctgaggcacatactgttttcaaggttagatagcaacaaactttcagagtagccggagtttcaggggagggagggttctttgggttcaaggttacccatttttcccctgctaggaagaaagcccttttgttttcttttgccgacttcttccaatagcttagagcaaatagattagcaacccagcagaaaccaaaccaaggaacaaataaaggggaagtttgcagagggcccttggctgggggctggctgctgctgangaggccaacttgcggttttcattttcacggtgaaccgcattgctcagcgttcgctggtattcacaaaatcagaaagaaaggaaggtggtggtggaaggcgcacttttcagga

SEQ ID NO: 412725 - DNA, 691 bp, Homo Sapiens
  misc_feature (13)..(13): n is a, c, g, or t
  misc_feature (60)..(62): n is a, c, g, or t
  misc_feature (76)..(76): n is a, c, g, or t
  misc_feature (92)..(92): n is a, c, g, or t
  misc_feature (546)..(546): n is a, c, g, or t
  misc_feature (611)..(611): n is a, c, g, or t
  misc_feature (656)..(656): n is a, c, g, or t
gagagaaagcagncagtacaaagtccccagttcgggaaatgcttggcacacctgaggagnnnaaagaagggctggngtggctggagcctaangaaatttaaattgagaggaggatgtgtctaggccagtttatgtcatgcttgatagaccagggtaagaaatttgagttgtatttgagttgcaatggacagcattggaaggctttaaacaaggaagagacttttttttaaagaccgctggctacgatatagagaaaagactataatgatgcagagacaagttaagttttatctaagtagttatactgatttgttctgagggaaataaagtaatgcatattgtccttttaggttcaatctgagcgaattagagaaggaatggaaaaagttaccaaatagccactaacaatggcctaagattgtgaatgtggtggtcttggtttcctccttacttgtggcattaacaaagtgtatgagcttcctatttgaaatctgtggaatatgtatattgaaatctttagattttttggggttaaatgcttttcanaattgacaaactggttttcagttaatttcacatctaaattaaatgaaaaccatctcaaataagtncaattgctactgaaattgtcaaaggaattttgctgagcaaaaccntggaaacatttccttctataaagaaattttaagct

SEQ ID NO: 412726 - DNA, 103 bp, Homo Sapiens
  misc_feature (44)..(44): n is a, c, g, or t
  misc_feature (50)..(50): n is a, c, g, or t
actgggttgctttctatctcttgccagttaaggcctaaacctgnttctgnttaagaagacaaaagaattcttacagtggtgggggggtacttcctatatggca

SEQ ID NO: 412727 - DNA, 688 bp, Homo Sapiens
  misc_feature (60)..(60): n is a, c, g, or t
  misc_feature (92)..(92): n is a, c, g, or t
  misc_feature (481)..(481): n is a, c, g, or t
  misc_feature (504)..(504): n is a, c, g, or t
  misc_feature (549)..(549): n is a, c, g, or t
  misc_feature (565)..(565): n is a, c, g, or t
  misc_feature (567)..(567): n is a, c, g, or t
  misc_feature (610)..(610): n is a, c, g, or t
  misc_feature (627)..(627): n is a, c, g, or t
  misc_feature (668)..(668): n is a, c, g, or t
ttgagagttcattaggatttatgtgcccagatttttaaaaacgtgtatgagaaatattanttcacaaaacataacacactacttgggaagancatctggaaaaaatggatgacagaatgccaacatttacttatgaatacgcacctctggaaggaccaggggacctggacaccccagagaaatttggtaaaaccctctgcaccactttctatgctataaatatgttccttaaaaattgtatgtaaatcaactgttagtaaatcatttgttaaatacaagggtgagcatgattttaaagatatcataagaatgtacattttagtaaaggaaataattaccgatggagtaatagaaaaaaactcacggactgagcgaagttcaaggtccttcattattatcctggctctgccaccaactaaatgtgcgattcaagaaaatcactcaacctcctgggccaattccctcatcgagtttgggttgnaattctgaattttcacttattangttcttaatgcaaggtcaggggtactggcccacagccttaaagtncagtttcttctgagangnaatattacacactaaatccttgtgtacagaacttcaagctctnttacataagaagagctntagtaccatcattctggggtttgctctttacagtccaatgntctttttaaaattggcctta

SEQ ID NO: 412728 - DNA, 691 bp, Homo Sapiens
  misc_feature (12)..(12): n is a, c, g, or t
  misc_feature (90)..(90): n is a, c, g, or t
  misc_feature (590)..(590): n is a, c, g, or t
  misc_feature (612)..(612): n is a, c, g, or t
  misc_feature (631)..(631): n is a, c, g, or t
  misc_feature (660)..(660): n is a, c, g, or t
  misc_feature (662)..(662): n is a, c, g, or t
  misc_feature (673)..(673): n is a, c, g, or t
gtcaagccatanacatttttttccttcgaaagtgtctaagcaacaaaataaataaatgttttattcattctgggttgtgttaatttttcngggccagaggggaaaaatgaatttacagggaattcctggaagaatatcttgggacctaaaaataaaaatcatggttttattttaagcttgtcaacaggggtgacaagtgtaagaattgtagcccagatgtgcgggaagcaactcataaattctattttccactatgttttatcttgcctgccactttccctaaaatggaaatcatttttagtatcatagagcgagatgggaaacgtggaagtttatttgtaaaagtggcactatggtgagcaagcattcacagggacactggcctattttagcagctggcctctgggagagagggatgccctacagcttggcactggagctctttgggatgctgctgagcttgcattgctggtcctctttggggtctccaggctgcttttaaattctctaggaggtgaccatgggaccttattagatgagctttaatttctctttctaaagttggcttgtgcaaatacagatatctaagntttttttcaagtcagaaggganaggaaggatagaagttgangaagtgggccagtaagcattcccattcanangcagattccanctggtttggggagaccgt

SEQ ID NO: 412729 - DNA, 697 bp, Homo Sapiens
  misc_feature (67)..(67): n is a, c, g, or t
  misc_feature (81)..(82): n is a, c, g, or t
  misc_feature (114)..(114): n is a, c, g, or t
  misc_feature (644)..(644): n is a, c, g, or t
ccttttgaagtgcccaaactaattctcagaaggtcaaaaagaaataatcagtcacagaaacagattnttatctaataggcnnttacccataacaaaggcaacatcttagacagnaccaagtcctcccagttaaaatgaaggctctcatcttcctcctactaacattgtttcataatattattgtgtgatggttaggaataaatacatgcattatcatatccccaaatagatagaaacccaaaaataatcttgttcaatagacagtaaccctatattgactgatgtaagccccaggaacttattcactgttatatcccaagcccctggtacagggattagcatacagagtactcaataaattctagttgatctgaaacgaactgaactaccttgtaaatagtaggcattgatagtagacaggaatgtagatacagatatacatgatacagatatacatggcaggggttggagggagaaactcgtttttgtccagaaagaagaaaacaaaaatcaagctacactaaaaatgacacaaataccaatggtttaagaaatagatggagttaacgcataatcatgattttaaaatattgcaattgcaccaattaccaaagtaaatctacacctaacaaaatgaagatgcngataattcactggacttgcaatctaaggtctttcaccggctaaggctctgaag

SEQ ID NO: 412730 - DNA, 638 bp, Homo Sapiens
  misc_feature (558)..(558): n is a, c, g, or t
  misc_feature (578)..(578): n is a, c, g, or t
  misc_feature (598)..(598): n is a, c, g, or t
cctactggtgccttgtataattgtcagtttttctgtaactaaacttccgtctttatagggttataaaatagcctagtcaatagaaagacaaccataaatgtccacccttatggagtcagataatccttgaagaaccgccaaatcatttggaggacttggattactggttcccacccccagggttattgctacatggatgaagaagagatccaagaaactttaatggaatgatgtggggtaaataacagcaaagtctttctcctttttgtgttttctacgtcatcttaatgtcctgaggacttcattcttggccattttcttcttcagactggtggaaagaggaaggaaatgagaactccgtggtgtctcggacaggcagggcttggcaggtggaggagggtgaaagtgaagctgggctcagacagggggtatgagtcaccattcaaactcagaggcagctgaaagtgagagtgtcccattgccagcaaccattcccaggaagaagccaggtgtcgccttcatctgttctgcagctggggattccagtgaagatagganggaggcagagaacttaatancgtcttaacccacacttganggctggtcaagatatggggagaattttcaagtggcagttt

SEQ ID NO: 412731 - DNA, 648 bp, Homo Sapiens
  misc_feature (595)..(595): n is a, c, g, or t
  misc_feature (605)..(605): n is a, c, g, or t
ttgaaaacagaaaagttgtaaagataattgttaatatttattttatcttatgtctctgaattatgagagataactaatgtaatatacggaagatgggatttttagtcataagagctgggcttgaactgagtgctcctgatcagcctttggccacatcatttaatccttcagtttcctctcatagaaaataatcctatccttcttacctagcaagattattttgaaggtgaaacaagacaggttatgtgagaacacattgaaaagttaaaaacactgtacaagtgtgagtttttttattactacatgaatgaattcatcaatgaactcagctgagctttttcagacttctgcatttttaatcaagtatttacaaataatctaataaaagtcccaataattttttttcttaacataatctgtagaggcattctcctaatttactttttatgtgacaaaaattggataaatcaataatttttggaggcttttctgtaaactggttttagtgatagtgtgacctgaatacaaagtttgttcacaaacttcactaacaggataattccaatttagctaatctttgcagtgcttaaactgnttattggtgncttttcttaatcaaagggatgtataaatcagccaataatttgg

SEQ ID NO: 412732 - DNA, 649 bp, Homo Sapiens
  misc_feature (67)..(67): n is a, c, g, or t
  misc_feature (80)..(80): n is a, c, g, or t
  misc_feature (86)..(86): n is a, c, g, or t
  misc_feature (91)..(91): n is a, c, g, or t
  misc_feature (96)..(96): n is a, c, g, or t
  misc_feature (107)..(108): n is a, c, g, or t
  misc_feature (111)..(111): n is a, c, g, or t
  misc_feature (118)..(118): n is a, c, g, or t
  misc_feature (125)..(125): n is a, c, g, or t
  misc_feature (145)..(145): n is a, c, g, or t
  misc_feature (163)..(163): n is a, c, g, or t
  misc_feature (170)..(170): n is a, c, g, or t
  misc_feature (172)..(172): n is a, c, g, or t
  misc_feature (178)..(178): n is a, c, g, or t
  misc_feature (193)..(193): n is a, c, g, or t
  misc_feature (200)..(200): n is a, c, g, or t
  misc_feature (206)..(206): n is a, c, g, or t
  misc_feature (208)..(208): n is a, c, g, or t
  misc_feature (214)..(214): n is a, c, g, or t
  misc_feature (222)..(222): n is a, c, g, or t
  misc_feature (224)..(224): n is a, c, g, or t
  misc_feature (234)..(234): n is a, c, g, or t
  misc_feature (237)..(237): n is a, c, g, or t
  misc_feature (251)..(251): n is a, c, g, or t
  misc_feature (257)..(257): n is a, c, g, or t
  misc_feature (266)..(266): n is a, c, g, or t
  misc_feature (277)..(277): n is a, c, g, or t
  misc_feature (279)..(279): n is a, c, g, or t
  misc_feature (288)..(288): n is a, c, g, or t
  misc_feature (296)..(296): n is a, c, g, or t
  misc_feature (304)..(304): n is a, c, g, or t
  misc_feature (310)..(310): n is a, c, g, or t
  misc_feature (312)..(312): n is a, c, g, or t
  misc_feature (319)..(319): n is a, c, g, or t
  misc_feature (322)..(322): n is a, c, g, or t
  misc_feature (324)..(324): n is a, c, g, or t
  misc_feature (328)..(328): n is a, c, g, or t
  misc_feature (337)..(337): n is a, c, g, or t
  misc_feature (344)..(344): n is a, c, g, or t
  misc_feature (347)..(347): n is a, c, g, or t
  misc_feature (349)..(349): n is a, c, g, or t
  misc_feature (355)..(355): n is a, c, g, or t
  misc_feature (358)..(358): n is a, c, g, or t
  misc_feature (364)..(364): n is a, c, g, or t
  misc_feature (369)..(369): n is a, c, g, or t
  misc_feature (371)..(371): n is a, c, g, or t
  misc_feature (374)..(374): n is a, c, g, or t
  misc_feature (379)..(379): n is a, c, g, or t
  misc_feature (393)..(393): n is a, c, g, or t
  misc_feature (400)..(400): n is a, c, g, or t
  misc_feature (402)..(402): n is a, c, g, or t
  misc_feature (406)..(406): n is a, c, g, or t
  misc_feature (422)..(422): n is a, c, g, or t
  misc_feature (435)..(435): n is a, c, g, or t
  misc_feature (440)..(440): n is a, c, g, or t
  misc_feature (453)..(453): n is a, c, g, or t
  misc_feature (470)..(470): n is a, c, g, or t
  misc_feature (482)..(482): n is a, c, g, or t
  misc_feature (505)..(505): n is a, c, g, or t
  misc_feature (511)..(511): n is a, c, g, or t
  misc_feature (525)..(526): n is a, c, g, or t
  misc_feature (562)..(562): n is a, c, g, or t
  misc_feature (569)..(569): n is a, c, g, or t
  misc_feature (616)..(616): n is a, c, g, or t
  misc_feature (623)..(623): n is a, c, g, or t
cctttcatactttatttaaatttttccacaaagcagttcatgaattaataatacttctttagacgtntatgatctaaatngaaacngactnagttntaaaagaatgnntgngaaaatngcagacnaaaataaatccctaacatgnaatactaaatttttaacntaaaatntngaactntgaaaattttgggcnttcaagncaaatntnataggnttatgatncngtatgggatntancggtttaaaaaatnttaagnctgaatcanatttattggtntntcaatcctntcaatagnccacaatnaaaagncnaaatttnccntnaccntgccgaatntgatgcngtntngagatntcnttaacntaacntnggnagacnttttggaatatacntcactgncntagnaaaaccttattaaggntaatttaaactgntatgnctaaaatttgaanttttaaaaagatatgcngtttaagcactnacaagccttcatttttttctttnaagggnatgatttcaaatgnnccaaattgcattggcccaggtttcctattcaaatcntttgggncctggcttaatggccaaatagaatgcttttaattccattcttaaggnaaccccnttaataaaaggcttaaaatttgcctt

SEQ ID NO: 412733 - DNA, 670 bp, Homo Sapiens
  misc_feature (489)..(489): n is a, c, g, or t
  misc_feature (599)..(599): n is a, c, g, or t
  misc_feature (603)..(603): n is a, c, g, or t
  misc_feature (620)..(620): n is a, c, g, or t
  misc_feature (629)..(629): n is a, c, g, or t
  misc_feature (641)..(641): n is a, c, g, or t
  misc_feature (645)..(645): n is a, c, g, or t
tcaagctcatgccatggggcaaaagagggaagaagtcaagctgagcaagtgaaagatgccaggacaatggaaggaaggactatcttgggttagggtgaagttcctttggtttcttccttccatttgcagctgctaaactgccgcctcaacccaggtttcacatccctgcagggctcctcacagaagctggggggtagtgttttgccgaggctctctagcctcttagtcccagggaccttaaacagcagcagatgctgctggctctcttttccatccccaccagaaacctcttctgctgctcaagcattgtgacatgtcctttattctgtcccttcaaccactatgcatggcaccctcctagaccccacagcatctggcaagggagcagctgttaaggtgtctacctcccttgagattcacagatctttgagggcaggggccttccttttcacattcatcacgccatccccactgccagatacacattangtgctcatgaaagtgatctcaaatgtattgggtgcctattctatgccagacatctatttgtacgaattgaaatagaatcagacaccaacggtgactcctggtgatgtggntggntgcgaaggaaggaaggnatgatgtgntgggtaggtcantgangggaggaagaaggttggccgtggca

SEQ ID NO: 412734 - DNA, 654 bp, Homo Sapiens
  misc_feature (440)..(440): n is a, c, g, or t
  misc_feature (496)..(496): n is a, c, g, or t
  misc_feature (581)..(581): n is a, c, g, or t
  misc_feature (584)..(584): n is a, c, g, or t
  misc_feature (606)..(606): n is a, c, g, or t
  misc_feature (608)..(608): n is a, c, g, or t
  misc_feature (621)..(621): n is a, c, g, or t
gagacaaggtctcactctgttgcataggctggggtacagtagcacgatcacagttcactgaagcgtcgacctcctgggctcaagcaatcctcccagatcagccttgcaagtagctggcacatgccaacatgcccagataacttcttaatttctgatacagactgggtctcactatgatgcccatgctaagatttcttttttaaatgctagaaatggatgttgaagttaatatccctttcagtatttatggaaaggatcatatgttctttttttaatatggtagtattgaattaacagatttcctcattttgaaccatctttatacttccaatacgaccctctcttgtgcatagtccattattcaaagtgctcgcagacactatatgttaaaattttacactaaaatttaacattaatattcctacatataattctatagntttatgaaagctgcagcaattaaaaaatatttaactttcacttttgagataattgnaaattcacatggagttgtatgaaaaaaggagagaccccatatcccttcaccagttccttcaatgggtaacactttgcataactgnagncagtttccagaccgaaaactgncncattggtacaatntaccaacacccagatttactcatttacatggaa

SEQ ID NO: 412735 - DNA, 636 bp, Homo Sapiens
  misc_feature (415)..(415): n is a, c, g, or t
ggcctactggataaaggctcataagctttgtacttttatagcttataagcttcgaacttttacatgcgtattttcactcttaccctatttgtttgttgaggatagggaggagccaggtataattatagactgacaatatttgtccctgtgtatccatcagttatggcagtaaaaaagtgagctggccacttattctgtcatgtataggaggccaccttgtgtcaggcagtggtataaaagtgttttatgactaattgacaaggcagaggagcagaaaagctgaaatcagcatataatttgattattcactgagaaactagaatgccttgtgttctaaaaatcttcaagctattcatcattacattagctagttgctgccttaagaatatctcttctacgtgtttctcactatggnttttgtagtaagaatccatgaattgaagttagaagatgcttatgtatttgatgtatacacacaggcaaataacagacaccccttgagcatcatgtgcttctttttttatgaaggagtaataatttctgctttgcatacaagtgatcacataagataatcattagaattgagagtttctatagattatccaatactattcaactattaagtggtaagtggta

SEQ ID NO: 412736 - DNA, 133 bp, Homo Sapiens
  misc_feature (107)..(107): n is a, c, g, or t
  misc_feature (122)..(122): n is a, c, g, or t
acttggttccagataacttacttaagtatagaatgcaacaagattccagtcataaggcatattttaggagatgttaggaactaaagataccgacagtgaaataatgnatactcaaaatcatnacagaagattt

SEQ ID NO: 412737 - DNA, 653 bp, Homo Sapiens
  misc_feature (549)..(549): n is a, c, g, or t
tttcattaacttcctttaaaacgcttttcttttgggtcaaatgacacatctgacatttctttggtttcttgaaacttctacacccaccttccacttattagacaattacctatagggactctactgatactagtgggcttggggaggtccccaaatgctggtgggaccctgatcccggcaggtgtccaggctcttgacaccgtctcaagaaggaattcaaggatgagtcaggcaacagtggaagtacagagatttataacaacgggaaaagtacacactcaagaaagggggagtgtaggcggactcaagagagcaccatgcctaaggggatttggggctgctacctttatgtgtttctttagccaaggggtggaatacttatgaaaattcctgggaaagggtggaaatttcttagaattgtgatgccatccatttttacaccaaacgtaggtattctcggaattcatggtgctggtcacctaggacctcgtgatatgctcattaacatggtaagtcactcattaacatcccaagtcacaagtgacttangatgttaacaaacacatcacgagggcctaagtgaatcctagtcaaattcagcaccatgttgggtccacttgggcttaaccagcttgggccatgccccgggtttt

SEQ ID NO: 412738 - DNA, 284 bp, Homo Sapiens
  misc_feature (72)..(72): n is a, c, g, or t
  misc_feature (102)..(102): n is a, c, g, or t
  misc_feature (172)..(172): n is a, c, g, or t
  misc_feature (242)..(242): n is a, c, g, or t
cgcctactggatgcattgtgcttaattacaaaatatcaaagtttttgtcattagtgaatttagagtggctgnccccttgttcccttgtggaatttactttgntagaatagattgccacattctttgaagacaattgccttgatactgataccagtcaccatgccttcactanatctggggatggacaataaagtatatgaggagtactggcatactaagtcataataaaattagctaaatgntctatatatcaaagaatgaggtgattttggtaggtaaaaggt

SEQ ID NO: 412739 - DNA, 505 bp, Homo Sapiens
  misc_feature (129)..(129): n is a, c, g, or t
  misc_feature (134)..(135): n is a, c, g, or t
  misc_feature (173)..(347): n is a, c, g, or t
  misc_feature (369)..(370): n is a, c, g, or t
  misc_feature (374)..(374): n is a, c, g, or t
  misc_feature (393)..(393): n is a, c, g, or t
  misc_feature (395)..(395): n is a, c, g, or t
  misc_feature (469)..(469): n is a, c, g, or t
  misc_feature (472)..(472): n is a, c, g, or t
  misc_feature (481)..(481): n is a, c, g, or t
ttagtatccagtgcctccaacctttttaaaatataatgggtttatctgctatttacatatattttattctttcttgaaactggttcttctggagcacagagaacttataaatgctatttctaagcgttnatgcnnctaaaaattattggaacaatacacagtatagtggatannnnnnnnnnnnnnnnnnnnnnnnnnnnnnnnnnnnnnnnnnnnnnnnnnnnnnnnnnnnnnnnnnnnnnnnnnnnnnnnnnnnnnnnnnnnnnnnnnnnnnnnnnnnnnnnnnnnnnnnnnnnnnnnnnnnnnnnnnnnnnnnnnnnnnnnnnnnnnnnnnnnnnnnnnnnnnngggcaatattaagcaaaaggcnntatnaggaaaattactctacagngnctaactcttcacgtcaggcaacattcatacagcaatattcatatagcgcttacagcctgctaggcagcaattanggnactgcctangttggaaagccttatataaatggt

SEQ ID NO: 412740 - DNA, 628 bp, Homo Sapiens
  misc_feature (505)..(505): n is a, c, g, or t
  misc_feature (595)..(595): n is a, c, g, or t
aattattcagttgcggagacctgtttgagaaaaaaaactctttgtcttctttaatcaagtgttgtattgtctgtggcactgttttaaatgaaagacaattaaattgctttgctgttttatacattgttgtctttaatcactagtctaaactctatgtttttatgaaagcatctttaaattttttttcttagctgttctttcttgtttgtggtataacctttctgtaccatcttttggttctgtggaaatgcccttaataacacataggattaggactaaattttggagatgggtaagtttgagcaaagagtcagtcaacacaggggaggatttttgaaattttatctctaaaaacagttttccaattcagagtttttaaaacccttttaaaaatatagttagttttcagtggtttcttttacttttaagtgtttttacacttggaagtcagatatctaaaaatagggaatggtcttttgctattttaagatctctactaaaatgnaatctgtagtgtttcttggttcagagcatatcttaaaagatcagacaggggcatttggggccctcttcccatccactgctttcactcaanggaaaataagactcttggtctgcaaatctggct

SEQ ID NO: 412741 - DNA, 664 bp, Homo Sapiens
  misc_feature (90)..(90): n is a, c, g, or t
  misc_feature (578)..(578): n is a, c, g, or t
  misc_feature (617)..(617): n is a, c, g, or t
cagatgaactaggtcagatcccttggaaagattgaatatagaattttaatggcatcaaatagttctgtccttccatattagacaattatntttcaaccgaagtcacattttggagaagactctataccagaatcttagtaagagctttttattctctgtgtagtagtaggatagctttttgggggtgttttcctggtttttccaaattgctacaattttaacaattatgatcatgaatagcaaaaagaaagaaaacatcactcagaagtgaagaaaagcgcttggtcagacacaaaagcccagtcacaaaggttaaaataaccatcattttgtgagcctttttacaatgcactagacaccgtgaggtgtgcatcatctccatccctcacagcagcactgaagggtagatgatattattcccagcatcctattgctatccagagggaaaggaggcttagccaacgggctgcaaacattccaattccttttcctgagatggacgcatgaactctcttggcccaaaggcattaaatattccggccatgtaacccgatgccccttcttggaattcagagctnccctgcaacctgctgggtatcatttggcttctatcacangctggcaacggtgagaagtacacatgggtcacgctcatgtaaatatt

SEQ ID NO: 412742 - DNA, 668 bp, Homo Sapiens
  misc_feature (61)..(93): n is a, c, g, or t
  misc_feature (96)..(144): n is a, c, g, or t
  misc_feature (462)..(462): n is a, c, g, or t
tttctttttagagaagaacactgtgaggaaattcagaataggtagagagtcatattaaatnnnnnnnnnnnnnnnnnnnnnnnnnnnnnnnnnatnnnnnnnnnnnnnnnnnnnnnnnnnnnnnnnnnnnnnnnnnnnnnnnnnaatctcccacagcaacaaacatgatttttattttaactatattccaatgcaatatctcttttcagagaagatatatttctgcttggagaagcaaataaaacaataatggcttaacaatttgttcaccttctcaaaacctacaaaaaacagatgtggatttgtattttcacttgataactaatacctcaatctatacaaataaaaacatggtttcagatcagcttggggggacagtaccaatttcaccattttggttatacatgaatcattacctggacaaggacatttctctttaagctattagattatgtgcactgntttattttttctgcccaaagttcaataaaacctgtatccattggctatcttagaagagctccaaaaatagcctatcatgaacatgccccctcttctctgcatttcatattatagctagccaaatgagcaaaagtagacaagcaaaggcaagaatgaaaggcatatgaaataccagagaggatcacccattattttacaaagcaatg

SEQ ID NO: 412743 - DNA, 700 bp, Homo Sapiens
  misc_feature (52)..(65): n is a, c, g, or t
  misc_feature (184)..(193): n is a, c, g, or t
  misc_feature (606)..(606): n is a, c, g, or t
  misc_feature (616)..(616): n is a, c, g, or t
  misc_feature (639)..(639): n is a, c, g, or t
  misc_feature (656)..(656): n is a, c, g, or t
  misc_feature (677)..(677): n is a, c, g, or t
ctgttggcctactggtttattactatctaaacatagaactgatttgctgagnnnnnnnnnnnnnntcaagctgaattcaaccaagtagttcttttaaacataattagtaacttagcagaattcaaccggggttttttatttaagctgttctctgtatgtaaggaaaacttctgaagctagtttnnnnnnnnnngattgagggggggctaaactgtaaaaaactcacagaggccagagtacaaggtggccatgtgaagacatacagagattttaactactggaataaggcacagctatctgagctgggtgggtaaatcagagggtcacagtccagcatttcttgtgtcactgtaactgctttgaagtcttagactggtgactttgacacacacatacccatactattgggaagggtcctttgttaattctaccgggattttccccgaggttatcaatctgaaattaggccctccaaatcagtctgaagctgagcttttccatactctttagatcaaattttaattgaactgtgacctcatctctatcctcaattatgaagctaaagagcatgtcaagccaggctactaggacatccttagaatctgngagattatgngtattggaaccagaaagctaatncaaatgaactgggaaangcagttacaggaagaagagcnggtgatctttcatctatttttga

SEQ ID NO: 412744 - DNA, 700 bp, Homo Sapiens
  misc_feature (517)..(517): n is a, c, g, or t
  misc_feature (567)..(567): n is a, c, g, or t
  misc_feature (620)..(620): n is a, c, g, or t
  misc_feature (663)..(663): n is a, c, g, or t
ctgtcggcctactggattttatatttaaattctgatatcacattactaaattgtgattggatgaccattggataaaagttggttgggtagacagccattataagaagaagaaacagtgaaaagaataaagtagtgttctagtatcactttaattatcatactcattattaattgaaaggaaaactttgagggtctaaaacatgccgggatgaagagtggggaatgtaaaggtatgagacatttagtttagcatagtgagtgttctaccttctgtttaccactgggggaaatctgaattctttaaaaaactggtttacaatactctaggggataatgaaagtaattgaattgagcaaatcacaaggcaaatctagaattcgaacacttactgccttgactctgtcagttctagcaagaaactgtacctctcagttatctttcctttaacagatatatttctctgataaaacttttgaatagataatacccacttgatatgttatccatttagaattgnataatagtttcataattattttgctgaacaagagccattatttgcattgnctggtcatagatcccagggaaataaattaagtattagttaagtcataataaangtattacaaaataagttaaatcaaagaaattttagaaaaatgnatatagcttgggtaggtatcctaaaattaatatatgg

SEQ ID NO: 412745 - DNA, 700 bp, Homo Sapiens
  misc_feature (615)..(615): n is a, c, g, or t
  misc_feature (661)..(661): n is a, c, g, or t
  misc_feature (675)..(675): n is a, c, g, or t
ctgtcggcctactggacattagggatcagaacaggcaatcacacatactaatgctgaaataaaatcatatttccaggtctgctagtgttgtctccttcaccactgccctccatcatagtcctccattcagagctgacctctacccccagctggtcatattgcttttccttgctgccccagtacaatgagcaaccatgggaatacagtctcaggatacccaggttttcactatactgaagagtttacatgcaaagctcatcatcttctctcatacagcaggtccccatttctaactttgatagcattctcattcaggagggaagtcttggatggttgttcactcctgattctttttcctcatctgtatctggtcctagcaactctacttccaagttttcagatattagtaacagactaacagcttcattaacttggattttggttctctgtgaaagtagcctcaagatctgccaaatctgaatcttagttccatattccatcccttaaccttagatttcacattacacaaattgccaacacctctctatggctcacccatctgcctgtcagcccttcatatcctggtaaacacatagacttggtgactctttcttncttcaaatctggaataaagcgacagtcccacagctgatggtcatgnctcttgggctcttncctttaagccatcctttgggatgga

SEQ ID NO: 412746 - DNA, 700 bp, Homo Sapiens
  misc_feature (583)..(583): n is a, c, g, or t
  misc_feature (592)..(592): n is a, c, g, or t
  misc_feature (660)..(660): n is a, c, g, or t
catgctctgtgtcactcaatctgcaatgaagaaaaagtgcttttgacaagagcattgagcacactggcaaatgtggttgataaagctttatttccaggcatattcaattgaaagtaataaaggctttattgtattaaaaagctttattgtgctttgtaatgaagacacaaagcacttagttgaaataatagtcttttaaactaatatgctttatactctatagcagagatgcagatacaagggaatccaaaagtgatttctgcaaaatgattacttaaagtcgctgtatcttttgagtggaagcctcagtttttcccaggtatcctcctgggctagggtttctttcttttcccttttcctaagacatttgtggcaggcgctcgctgagctttctcaatgtttattctgcttgggaggactagatagacttccccacaaatgctgctacatattatatgatcgcaatcagggtacacaaaccctgtactacctacctgcacatatgcccagcagaatgtaacacagctggctcagtgggagaagatggaaatgaggatttttaaagcctttaaataaagattgnaactggtgntggactgccaaagatagagagtaattaaaaagctcttcaaagaatggaataagccctttaaatccagntaaataatttttcaagaaccctggaagaacatcttggtgg

SEQ ID NO: 412747 - DNA, 666 bp, Homo Sapiens
  misc_feature (520)..(520): n is a, c, g, or t
  misc_feature (538)..(538): n is a, c, g, or t
aactgtagggttttgtttccttcatgagacatgagaaagaaggaacaatgaattatgccatatgttagaggaatgtagaatacaggtggaaaggagcaaggacatctcccttgcctctcccaggtagggtgaatttgaacattttatttttttaacattccttttccacttttcctttctgagcactgcaaacgtaaagattatcttctgtcagcttcttcctattcataactagggatttttccttttatcataatgatgtggttcaatcttgggcatgcatataatgggaaaacacaggaaacaaacattgaatttgaggtcatgaatctcagaaagagccgtctgtatatttaaattttacccagggtgatgtaaatgtagaagaaaaacatattgtgtaaaaacattgagaagtattgtgaacactgggaggatggtaatgaaaatgaggagaggagaatctaaaccaattacaagggcactccagaaggaagctactaggcaaagtagttagtgngtctcttagaaacaacanagaaaaatgaagataattctgaactatccttttaatgaaacatttggaagaatgataaactcttgaaagaagtttaaaggaatgtggtgtcattcagatgtgacaattaaactggattaatggaaagt

SEQ ID NO: 412748 - DNA, 619 bp, Homo Sapiens
  misc_feature (436)..(436): n is a, c, g, or t
  misc_feature (544)..(544): n is a, c, g, or t
  misc_feature (574)..(574): n is a, c, g, or t
  misc_feature (604)..(604): n is a, c, g, or t
ctcaaatcctttccattgtccttgccacagaagcgttcccatttttactgaacagaaatccatatagtctcacacatattttttttcttggaaaatcttagtatattgaatacagcccctcatcttgaggcctctggtgaggatataatgggacacttaacatgcctatacctgaggccctctcccgagagccaacacaggcatttgatttcgtgtctggcacaaactgtgagcccaccataatctctaaatagctggctccacaagtcaccctagggaaccccagggcttctctcttcctcccagtcctcactctcctcccatgattccatggagtaactatcaacaagcaggttagctggagggagtcaggaagaggaggaataagctgtttccactagcactgttggctaaaacaacttccagcagcttcctntggcaaaaaaataggggtgggtaagggagtcccttgagggaggcaggaacctaaatttctcttctaaagccaagtaaggggttgccagggtagaactgcctaaaccanggcacagcttagaaagagacatcatcttanccaactactggcagaggatgcccgttaaanccaatccttttcata

SEQ ID NO: 412749 - DNA, 568 bp, Homo Sapiens
  misc_feature (420)..(420): n is a, c, g, or t
ctctcatccccacaccatccctaagatggagacacaattaacttactctcaagaaagcatgttggaattgcaaatagattccagagtggttgttacacagtttgtatgtaaataaccttctgatttcagcacctttgaattagtaacatgtttcttgaaacactgagaaatgcctggggatttcttatctgaaggtaaggattagcagaaatcctaaaagatagagaccttggtggtgtttggctatggctctttaaaatgtaattgatggaagagtaggcaactagtgtcaagggaagactgggcagtatctgaactctactggcaaagagagggtttgcaggagcctctcagagttactcccttttctttcttccttagctcccagagagccacttgcagccaagaaaaccaaccctnccctgctcgtttgtctcagggaacagccttttgtggcactaccctcaaggctgatgccttcaccaccccagggacactggggcacaaatcctgactggaaatgaacagatacatagatcataatcccttcctggttgccccacccaac

SEQ ID NO: 412750 - DNA, 647 bp, Homo Sapiens
  misc_feature (477)..(477): n is a, c, g, or t
  misc_feature (529)..(529): n is a, c, g, or t
  misc_feature (577)..(577): n is a, c, g, or t
  misc_feature (600)..(600): n is a, c, g, or t
  misc_feature (611)..(611): n is a, c, g, or t
  misc_feature (634)..(634): n is a, c, g, or t
gatagaaatttatgctctctccatttgtctgatgttcaatgaaagacacaaacaactaaacaggtagttacaaatactgtgtaataagttgttgtggaaagtacattgtgctatgagaactcaggaataagacatagtccagatttggaggatcaggaaagacctccatgggaagagatgtataagctaagactagaaatgggacctggaaataaaacttgggctcattacggtagcaacaagacctggagacttagatgtaagatagaagaagaaaggctccttgagaagcttaaggagacttagatgtaagatagagggaaaagaaagcctcctggagaagcttaaggaggggcatgggatgcataatgggcaaggtggggctgtccatgtattaactaagaggagagctggaaaagacgatgaagggccttgacatctaaattacacacaaacatgtaaaattacatgcaatgnattttctttgcaaagaagacagagtgatgtctaatatatttcagatttctgncataaaagcattttaaaaggtcataaaacttaatatttaaaatggtanttttttttagaaaaataccttgngtgacttaagnatttcctgaataaatgagctttnctgggaatcctca

SEQ ID NO: 412751 - DNA, 646 bp, Homo Sapiens
  misc_feature (19)..(19): n is a, c, g, or t
  misc_feature (223)..(223): n is a, c, g, or t
  misc_feature (583)..(583): n is a, c, g, or t
  misc_feature (599)..(599): n is a, c, g, or t
  misc_feature (610)..(610): n is a, c, g, or t
  misc_feature (621)..(621): n is a, c, g, or t
gttcatgatgtccaagaanattgagaggagctactgaattgtgtttccctaagttcatttacactttagcagcaaatcttgatgatcagagcctaaggatgcctaagtttacatggagtggtaatggttaagtaaattgatttgggtaatttttcaacctcatctacaccacactaagaccaaagttctctaaaaatttctgaaataatgatttttatatagnttcattaaaagttttaaaagtatctatcagcattttctgtaaaagtgtcaggctgaaaagataccactaaacagtcagctcaaaaaagatagtagataaaatatgatgaattgccacatctgcatttcctatgtttgcaagccaccagtaagactgcatgatttccaagttggaggacagagtctaggaatgtgaaggatgaagggtttcttgtgcaccgttctcttgagcacgtacgccttcagaaggtagataggctaacctgcatcactggataaaaactggatttctcttactttttcatgtgtatgtggctcatgtagattttggtatttttcttggaaaatatgttcccgctgnctactgaagtaactgngtaataatttncaattttctgntgggcattacctcatggacaccatg

SEQ ID NO: 412752 - DNA, 646 bp, Homo Sapiens
  misc_feature (557)..(557): n is a, c, g, or t
  misc_feature (622)..(622): n is a, c, g, or t
aagtatccagatttctctttattaagtgaaatacacagaaaacacatttcttgcttgctatatgtagcaggattagacatctacagcattatgctttcaagaaaatttttcttgacattgtttaagaaggagagagaacagtgagatttccacatctgttaaataatcattagcatgtaggattgaattctgtcttctttttcaacctaagaccagctgttgaagtaaactagaagggccccttaattattgcatatttcaatagcttgctgaggattcagttacctagatccaccactctgatcaaaggggactgatttactttgtcaccattgttattgaaagcattccttatttgattgttttgcttctaaaatgttctataaaaggtcagacagggtgtctttctctgattccatcaggcctctgggaagaacctctgctaccaattatgtgctacttggacgggtgctaagacattgcacggcttctttcccttggccttcatacaggtttgcttttgcaccaatattgctgagtcaaaggtgtcttaatgnccatatggcatttggcatcagtgaaaagcaaattcagaaaaatgaacttatttcctcttggttgngacgcgatttggtaccattggcga

SEQ ID NO: 412753 - DNA, 149 bp, Homo Sapiens
agttcagggagtcaagtgaggaaaaaggtgggatgaaacagcatttgacatgcataggtttacttaagcccctgatgttcagtaaggtatccctccttcagttgtgcttggtgcctttgagtcttgagatcttctgttttatattctcc

SEQ ID NO: 412754 - DNA, 197 bp, Homo Sapiens
tttgtagccataagagaaagccattattcattactgaataattgaatgttcaataatcaatcattattttaaggttattatgattagatatgtattaaagccattaaccttgcctagtaggtgctccaaaacagaaaagctcctgggacatcctgggagataggaagtcacatatttatcatataaaacgtgttgcc

SEQ ID NO: 412755 - DNA, 154 bp, Homo Sapiens
gtcacggaaggagcaattacatggtagcgtaaacacatttctcaatatgtttattgagtgaaagggttagatactttccctgatgaggggtgataggtaagtgccttataatttccttccagcctataataaaccgagtttgagagattttgcc

SEQ ID NO: 412756 - DNA, 171 bp, Homo Sapiens
gcctagccccggccacgctcatgtcaggattctgaagacctcgagcacacacagacacgcacctggtcacgtgcactttcacacatacacttggcaccagggtggcagcagcggaggtgactgagaagcctgcttttcacagagaatcagaacccagcgggggctttagcc

SEQ ID NO: 412757 - DNA, 310 bp, Homo Sapiens
accttggacacagagggaaggaaggactcaaggccacccctcagggctgcgttctagtgtgggaagacaaacacatgccaggaaatgaggggacgcctgatactgcaggacctggtcagcgccatgaaggacagcagggaaaacggtggaaagactgtgcaagtgcagggcagcacttcatctgtgctgctggcagcttctctctgttaagatgactttgagcagagactggaatgagtaaaggagagagccacagagatgactgttggcatccaagagttcaaaccaatggcaaatggaaaacattcag

SEQ ID NO: 412758 - DNA, 218 bp, Homo Sapiens
tggtaaaggcagtagtggagatacaaatgcagtgttaggggagtccagaggagggcggcttctgtaaaagtgtccaagccaaagctgagtttcctctaacacatggcatgatgtccctttccatgcttcaatatggactttgggtgacattttggactcttcatattttatcttctcaaactcattttgactccctcatcctaacttagttctcatcc

SEQ ID NO: 412759 - DNA, 201 bp, Homo Sapiens
  misc_feature (109)..(151): n is a, c, g, or t
gcctgtcgattattttaaaaagctcttaattccctgatatctatataattgggtgcatattaatgcagatggaggtgttagtttgtatcattttgttatacatgggacnnnnnnnnnnnnnnnnnnnnnnnnnnnnnnnnnnnnnnnnnnnaagtgtgtgacatgaggtttatgtgtttcatactctttaatacattactg

SEQ ID NO: 412760 - DNA, 160 bp, Homo Sapiens
ggacacatggcttaaaggagttaagaatggcaaaagctaggttctcagaacacattcaaaaccagctttattcttttgggctcagtatcaccctgcagatatacaacacgaagtcactgctaattcttgtttgtctgtgggccttagtttcgcttgatag

SEQ ID NO: 412761 - DNA, 192 bp, Homo Sapiens
gtcacggaagggaagtgggagagagagctttgactagcagaggcttggaagccagccagccagcagccaacagtgcatgtgtgcattgggaagctagtggtccagggaccaggcactgctcctgtgggatccatcccagccctctaaggagcggtgcaaaggttcttatcctatttatcggagccagtgtcc

SEQ ID NO: 412762 - DNA, 157 bp, Homo Sapiens
ttctagccctagaatcccatgattctgatttcacctcttatcaactaataattgtagaaatcagaagatcagggtgtgtgtgctcggttaataatccaagagcataggcacatgtgcagcagagattttaaccgaggtttgcaatagtacatcgttc

SEQ ID NO: 412763 - DNA, 311 bp, Homo Sapiens
  misc_feature (201)..(260): n is a, c, g, or t
agtgccaataactaggagctaatagagaaaagctaactaatggtgaaggtttgggcatagaaaagaggacactgttaagagtgaaacttgggaaatgagtagatgttatcagaaggagccagagcaccacaacggaggaatacatgtgtccatgtataatagcataaactaaggtggattcagtgaactgaaacaatgatnnnnnnnnnnnnnnnnnnnnnnnnnnnnnnnnnnnnnnnnnnnnnnnnnnnnnnnnnnnngttttcaattgaagggaaatttgggggagtaataaaagaattctatgccat

SEQ ID NO: 412764 - DNA, 435 bp, Homo Sapiens
accttggacacaggaagaagtagggtaaggcactgggctggaaacagggaggtcaagtgaaaacctattactgaatggtgacctggtcccattccaaccactagggaccatatcctccaggaaggaggatgagcgttgtgactgaagaaatgtcagatactgtcctttgggagacctttagtgtaaaagctgcctggttggctagttaacctataagaaagcctcccagttgacaagccaataacttccaggccacttcctaatgcctcacgcaaatatttatggaaagccaaatatcaccagttatttgaggaagtcttccagtataaaagaatgagatcttggaggaacaaacaatgcagggaaaaagcaagtttaattagtgtcctctgagtgttgagacaaaattgattccccaagaaaaagtaacttgcc

SEQ ID NO: 412765 - DNA, 246 bp, Homo Sapiens
  misc_feature (37)..(37): n is a, c, g, or t
  misc_feature (39)..(39): n is a, c, g, or t
  misc_feature (49)..(50): n is a, c, g, or t
  misc_feature (64)..(64): n is a, c, g, or t
  misc_feature (69)..(69): n is a, c, g, or t
  misc_feature (79)..(81): n is a, c, g, or t
  misc_feature (99)..(99): n is a, c, g, or t
  misc_feature (102)..(102): n is a, c, g, or t
  misc_feature (110)..(110): n is a, c, g, or t
  misc_feature (115)..(115): n is a, c, g, or t
  misc_feature (131)..(131): n is a, c, g, or t
  misc_feature (136)..(137): n is a, c, g, or t
  misc_feature (141)..(141): n is a, c, g, or t
  misc_feature (168)..(168): n is a, c, g, or t
  misc_feature (172)..(172): n is a, c, g, or t
  misc_feature (184)..(185): n is a, c, g, or t
  misc_feature (198)..(198): n is a, c, g, or t
  misc_feature (200)..(200): n is a, c, g, or t
  misc_feature (204)..(204): n is a, c, g, or t
  misc_feature (212)..(212): n is a, c, g, or t
  misc_feature (228)..(228): n is a, c, g, or t
ggttggaaaagcgaaggaagtttcctacaatgcactngnctcacacatnntctcagaggatggngacantccagaggtnnnagaagctcgggaagtctntgncttacccnttgtnaagccttcttgggtgnttctnnccgntcagtgtggaactcttctgacagtaantggngtatctccaganncatgtcaaatttntnctgnaatcactnactgaccacctcaggngtcatctgaagacagaag

SEQ ID NO: 412766 - DNA, 147 bp, Homo Sapiens
  misc_feature (41)..(41): n is a, c, g, or t
  misc_feature (43)..(43): n is a, c, g, or t
  misc_feature (59)..(59): n is a, c, g, or t
  misc_feature (72)..(73): n is a, c, g, or t
  misc_feature (79)..(79): n is a, c, g, or t
  misc_feature (84)..(84): n is a, c, g, or t
  misc_feature (89)..(89): n is a, c, g, or t
  misc_feature (98)..(98): n is a, c, g, or t
  misc_feature (103)..(103): n is a, c, g, or t
  misc_feature (106)..(106): n is a, c, g, or t
aacacatctctacctccctcttattgcctgtgcatacgcgntngtgactcgactctcanagagagggtgcgnncatcgnctcgngaagntggggtcancagcnccnccatgtgcctggattatccttccccaggtggccagaagttg

SEQ ID NO: 412767 - DNA, 219 bp, Homo Sapiens
  misc_feature (27)..(27): n is a, c, g, or t
  misc_feature (75)..(75): n is a, c, g, or t
  misc_feature (82)..(82): n is a, c, g, or t
  misc_feature (90)..(90): n is a, c, g, or t
  misc_feature (92)..(92): n is a, c, g, or t
  misc_feature (114)..(114): n is a, c, g, or t
  misc_feature (130)..(130): n is a, c, g, or t
  misc_feature (151)..(151): n is a, c, g, or t
  misc_feature (153)..(153): n is a, c, g, or t
  misc_feature (156)..(156): n is a, c, g, or t
  misc_feature (165)..(165): n is a, c, g, or t
  misc_feature (179)..(179): n is a, c, g, or t
  misc_feature (181)..(181): n is a, c, g, or t
  misc_feature (199)..(199): n is a, c, g, or t
  misc_feature (204)..(204): n is a, c, g, or t
ccccatggggctacaaggactattatngactttattttttatttccatgtgcaagtttaattattttaaaagggnaacattncattaaangncttttataagcatgtttttatnctttaaataacagaangactaataaattatcattatngnggnaagctggtntgaactgtgtcaantnttaaatggggactaatgnccatngccaaaaataattat

SEQ ID NO: 412768 - DNA, 437 bp, Homo Sapiens
  misc_feature (54)..(54): n is a, c, g, or t
  misc_feature (219)..(219): n is a, c, g, or t
  misc_feature (264)..(264): n is a, c, g, or t
  misc_feature (280)..(280): n is a, c, g, or t
  misc_feature (373)..(373): n is a, c, g, or t
gaaaataattctttgtctagtaggacaaactgtgtagttaactgagtctcgtanagaggtgcctgcctcacatgattattgggagcattagatgagtttatgcattataagtcatttgacctagtgcctagcacttagtaaatgtaagctattaatagaaaatttattgctataaaattataaaaataataaactttaaactttataatcatttgtggntataactcttcacttggctttcttgataccattcttcccaacatnttctctgcctgatttntctgacttattctaaattcttcatcctcaggtctcctctctcttacctttttctcattattccctgtgtcagtgtcagcacctcctgctgaanctcactacagagtttctctacaaaatctcttgcctttcttagggaggaaagtaacacgattcag

SEQ ID NO: 412769 - DNA, 338 bp, Homo Sapiens
actagttctctctcgctaaatattgtcttgggacctgatgttttgttattggctttgatctgtaggtgtacaacctttgtttccctgacttgtaggaagtgacctcttcagactgtctcatgggtagagaaattctaccaaatgaggccaagagggatttatgtactgttgaggctttgtgctttagcatagtgcattgtggtaaagttacagtttaatagcagttgtaatatactgggtttgaaaataattgaratattagctcaaatctcattttgactttcagagtttaaatcactcaataatcttatagttgaatgactctgtttttcarwagg

SEQ ID NO: 412770 - DNA, 451 bp, Homo Sapiens
aaatcacattgtccttcaggtaaccaaatacttaagaaatattgtagcaatatgagctgcagaggaactggaaggacaatgatcctacagtgttaccacatgagttgagttatttaagtggggaagagagaaaaatgaatggatttttttccccctgaaggtatcagataagccctattcctaaatccaggaggactgagtatcgccaataggtctatgaaagactgtaactaaacgcacagcatcagattggattacagtttacacaagcaacatcccaagatccccctgatggctgggmcacataatacagatcatcactcactaagaaatgttatggttttgaaacagtttgagctctgagaccagcattggtaacgtgaagagggatttacaaagagaaagtctsacgctaaatgtcaaaatgatggcatgaacttttaacagtgga

SEQ ID NO: 412771 - DNA, 308 bp, Homo Sapiens
  misc_feature (170)..(214): n is a, c, g, or t
gctagtctatgagtccctccagagagagtttctttcccttgtatcttgcatatgataagtacttgataaacattcagtcagttgaaatgagggttgtacttttctttgaaagcataattttccttattttaaaagatgtggctgtcttctctggttgtgagaacaatacnnnnnnnnnnnnnnnnnnnnnnnnnnnnnnnnnnnnnnnnnnnnntgaactgattgtttgccatggaattttatcattggmtcaatacacacttacttgttaaaccagcttttatgaaaaacatatatgtvatactatg

SEQ ID NO: 412772 - DNA, 225 bp, Homo Sapiens
  misc_feature (129)..(175): n is a, c, g, or t
dggkggccgttcccgtctttycttgctgtgttycccatgtgycacttataacacgytactcttcsggcgtttgycggtscsgttycctatgtgmctcgtgggtcgcgmactgcctcgggtacccggggnnnnnnnnnnnnnnnnnnnnnnnnnnnnnnnnnnnnnnnnnnnnnnntcacaacacggttcaacgcaaattacgytttcccctccccsgcscgcccc

SEQ ID NO: 412773 - DNA, 429 bp, Homo Sapiens
agccttgtccactgacaagtgatggttagcttcyttcagggctattgtcagttaccactcatcccyttgbgtttcagmttcttgagctttgtggctattgyctcctgkgttggaagactattctccatgrgccyttcacacatctgmacatcttgagagtgaggcactgmctgcccyttgtactggactatcytttmaagcyttttaaggatsyttatttcccatggtagatcactgtaatagaggcctccaacytttagrtcatgcttttaaaataaaavtcybttactatacbggkkgtggggyttcagaagagaaaaagttaaatgaatgwattcaatccatgatattaaggkgtatcccctttggatgagttacccyctgctctatttcaagtcagaaggytgtgtcaatcataccttctactcc

SEQ ID NO: 412774 - DNA, 214 bp, Homo Sapiens
  misc_feature (14)..(14): n is a, c, g, or t
  misc_feature (167)..(169): n is a, c, g, or t
tttwaaccattttnhcgaatmggcaaacaccaaaatatcaaacttttaacgaacagtgaaamggtacctctcaccccagatatccaccattctcaaattycgcgtttatccttccmgagaatagtaatgtctttttcacatagataatmgcataccacatatattbnnnccgcatccgvgctttcataatctyggsgatgtttccacaccawtt

SEQ ID NO: 412775 - DNA, 240 bp, Homo Sapiens
  misc_feature (62)..(138): n is a, c, g, or t
caagaatahcctcgtgtggaatgggatagtbggaaasgttatgcatgbgctsgtgacaacannnnnnnnnnnnnnnnnnnnnnnnnnnnnnnnnnnnnnnnnnnnnnnnnnnnnnnnnnnnnnnnnnnnnnnnnnnnnttaaaaataataatgckttgysvccagctaggrtttwctttaaaavtggcacaatggttcamtcatttcartgtcaagaatctagtaacataatttbtctht

SEQ ID NO: 412776 - DNA, 328 bp, Homo Sapiens
  misc_feature (38)..(38): n is a, c, g, or t
atatacattkrtaacytaacaattgctatataccbbkntttaaaamaactagattgtmttcgkggaaagaactgacattgagaacctagtatccataacgagtgcacsacaatagrcacaacagagacaccctcstatctcaaggactgacctaatggcatacactatatatgcgcktgtcactgtagtrcacawataggatgttatccattacactgctctacattgagaggcagctgatgvtkaagcgcmgwacatacacgctcckvtatccagmcttatgtatkytagaaggtgacasagagaaagagctgacaaagcgctgctc

SEQ ID NO: 412777 - DNA, 127 bp, Homo Sapiens
acagtcaaacttgactataatccaacttcttaaataataggttagtacaamvvgtattattacatctmatgacccttcattcaaagaagggtctcaaaattctgavatcttccagttctgtgaatat

SEQ ID NO: 412778 - DNA, 250 bp, Homo Sapiens
  misc_feature (153)..(209): n is a, c, g, or t
taaaaattyyccccygctattataacattgaaacttgcaaacatttttstacacttcgctttatttcccagaatcattgctggtatgamaaaaaaatctcccaagttgagataattgattcaaggagtacaaagttttybccttgtttaaaannnnnnnnnnnnnnnnnnnnnnnnnnnnnnnnnnnnnnnnnnnnnnnnnnnnnnnnnaatctactgtattggcatcgttatcacttggatgtgtactt

SEQ ID NO: 412779 - DNA, 306 bp, Homo Sapiens
  misc_feature (99)..(99): n is a, c, g, or t
cccgsctgagcttcccaaagtgcygggttataagcgtgascactkcacccagccccacggcttcttactgcactcagaataaaatccaaatgaattmgnatagcctacagagtgtcaataatccgggsctaatcacccattgcatcatcctttactgtgctccacccatgcyggcgtcctttcygtttatysmgygcagcaagctttaaccygttcgggtctttcatttgcmgtttaccctgaatattccctttctcttacctcaccttygatcsgcgttttccccgttgcagacctgcamtcygg

SEQ ID NO: 412780 - DNA, 355 bp, Homo Sapiens
cstccctggscttcagtcagggttctgtctgttgactctccaacctcgaaagcagcagcggtattgtytctgagaaagtttgtytgcattgcttaggaaccgtaacaagcctctcytcataaggataggaagaagcccaagggcattagtgggaggcggataagggagcctaacttcccagtttggctatcattctttgcaaaatcacttctaatctccaaagaggagggggtttctcctctttcaagttgcttagaagggcacccacagatctgcttatytctcacagcatctctctgtccttgcaatctttcctctccacctcaccatccacttttagtgcaattagkgaatt

SEQ ID NO: 412781 - DNA, 285 bp, Homo Sapiens
tataaataatcctgtggacagacaactacaaatgacctatacagagaagaaaaactattgggagatattcaagaactagaaaatatgtctsgyagttttcctgtgttkatggatttsgaccagaataatgctaatgggctgactactcaacaaaggacaagataaatcagtgtacatgtggattcaagagtgttctatactaagasagtgctgtagaagtccccatggaatgttactagattcctgggatgatgatactgaatagtctggaatgtssmattcttt

SEQ ID NO: 412782 - DNA, 313 bp, Homo Sapiens
rgaagcgcccaccaccaaccsgacgtgttttyattgcgtgctggttcctccagtgagkcggttctgsgactgcrctccrtggccagtgttycgtcatccaggggytcgtgwtamggctaargaggtaagtaaagggctctgggccgcaccaraaaaatccgggggtggataggatgcttgggccgagagggctcgaagcgagaacagggacgcgccctgcgaaaagggcgctctttgcgcgccgggaccaggcctttcctcgctkccaaacggcctcgcgcggggcgggagctkcttcgtgttcctcttkggg

SEQ ID NO: 412783 - DNA, 315 bp, Homo Sapiens
  misc_feature (94)..(171): n is a, c, g, or t
gtttcataaaggtagtaactctsaatttatggactgagcataggctttgaagctagcgttgtagctgtaaaamamagggaacccagtcttgtcnnnnnnnnnnnnnnnnnnnnnnnnnnnnnnnnnnnnnnnnnnnnnnnnnnnnnnnnnnnnnnnnnnnnnnnnnnnnnnataaccgcttatattgaagttgttctaactcttctactagcttacctcactgaacttgagaacttaagcagttccagtggggtgggggtttgctaaagagaaagttggattyctcagtctaaataaataagrmacttatttata

SEQ ID NO: 412784 - DNA, 151 bp, Homo Sapiens
  misc_feature (37)..(37): n is a, c, g, or t
agcagactccacataggacagtggsccctggccaggnatttttttgtcaccaacgttgaatgaaactatgttattgaggcactgctgtatgtagagccaggtatgcccgtytctggaacggagtgcttgcagattgccaggtcagagggtg

SEQ ID NO: 412785 - DNA, 214 bp, Homo Sapiens
ctgggttgygwttkkaagctcttctgagccckkttttccwattttctkaatttttctcaaggggttttgwctgcagatrktgttcayatgaaccggtgacatcactctytaggattctttggcagyycyctgavmttggctcaacgtttgtsgaggtggttatttccctgwwgtactgagctttgttttataataattaaaahcccyatttggt

SEQ ID NO: 412786 - DNA, 460 bp, Homo Sapiens
tattttttaaataaacagtatgatcccacactgttctctctgcctgtttagggtgtttagagctggccccttgttcagatcatagtgcagacctcacctcgagagcctttcctgacaaccctatcagcctgggcctcaccctcccttgtatcatagtctcagcatcctcttcttaataacaccttgagatgatatatttgtttactgattttgggactcttccccgccatagactgagtcccctgagagcagagctgagatctgagttgtgcatgaccgtatctataaaccacatccaactggccgcctgtttttgtgagccaggaaggttttcaaaggtgaacatgtaccatcaattgacggcaggaaatacaactgggggcccaattaagtgaatgttatccccaaaagaattccactcttatgaatagacttgggkctagtcatttgcatcgyataa

SEQ ID NO: 412787 - DNA, 219 bp, Homo Sapiens
maaattctagaacttttttattatcatcatacataagataaagtagtatttattaaatttacatgtatgwaaatargtactagaaamcaaawtthwtagttgatgttaatctgggtgttcattagtwatcaggtttctgtgttgamcctattattatgccctaaatctaaaaatcttcacaagwahttctgtggggtgaggtwtttttvmgcccctttt

SEQ ID NO: 412788 - DNA, 228 bp, Homo Sapiens
  misc_feature (136)..(136): n is a, c, g, or t
agcacaggccatcttgttggacactgtcactttgggscttggcaggkstscacagaatcacatcggtgkatttattbgtataatattgtgaatattbggawgttytsagtgmgttgcyctttyagaagttttsggngtgtggatcgctyggttccmmgaaagaagatbtgccccggbcccttsgaaagattgtgaattyyagagatagaggccttaggatkccttctc

SEQ ID NO: 412789 - DNA, 248 bp, Homo Sapiens
ttttgtagaaattgccagggaacctgaattttctgccccttccttcctaacagacaagccttccagccctccctgacacagctcttccctatctcctactctctggtcatcaagcttttagagatgccctggcctttctctagttgccccagctgtatttttttctcctctgggaatgcgttgattccagagcctgactsggaataaatctcagctcctccatttagcagttatgggattcaagtact

SEQ ID NO: 412790 - DNA, 264 bp, Homo Sapiens
gttgaatttgtgtgcgcgcctttagccttgcttggtggatgagttggattttagtgcattttcaatcaatgtgcgtgtacacttamgcacaaggagaggtggctttgtgctgtcatcgaggattagatgtgtgatgagacccacccagctctgccctgtgccctaattctgctgctttgcctgttgaaaccttgcctgtctcgtcaccccaaattctctaaacttagcagtacttaacctttattaaaaacagcagaatcactc

SEQ ID NO: 412791 - DNA, 283 bp, Homo Sapiens
gttctatcaagttacttgccttgatatcatcacatgctttgctgtctgcttaaaatatgagttcatccccctcatacttatttgttttagggacccaattggaccagtgctggcacatgcccttcaaggtacaatttctkaaaagagactkcgctgccaaacttatgtgtgcctttacctcagtccccccagtataaggggtgacttaatcttgataaatgagtgactkagcaccatgctagttaaatatttgwgaattaaaagcctgaacccaatggctcta

SEQ ID NO: 412792 - DNA, 244 bp, Homo Sapiens
  misc_feature (129)..(188): n is a, c, g, or t
ctgcttgcttaaatkacagcagtcacatkacagctccackgggckkccckccckggcgctgcwaktacaaacgccgccccagtcgtacgtgtcktagtgtktgttagcaagctgtgtkcgcgcagcaannnnnnnnnnnnnnnnnnnnnnnnnnnnnnnnnnnnnnnnnnnnnnnnnnnnnnnnnnnnaccgtcgcgtgcgtagtgcgtcgtkccgcccaaaaaacccgtgcgtgtgtcaaaaa

SEQ ID NO: 412793 - DNA, 268 bp, Homo Sapiens
tcttcagtcctcaatatagctgggaaacaattatgagatagactcagtctccccctcccaccccttttcccctgccatatctaattaagcactaactgattttattactttattgcctttacactgcttattctttttgactgaattctgcccctgattcactgttttgtttgaaatttaaaggttattttcttactgtatttatcatacctgttttaatctgttttctttaaatgcaataaatcccaaatgggtttgcatattcttt

SEQ ID NO: 412794 - DNA, 359 bp, Homo Sapiens
cagacttcatccttctctactttcggggttctggtctgcctccaggctccaggtcctgcttgggcccttgcgtactcacctgtagtctgagaagagacagagtccaaggagcacaagctttggagccaagtagacttggacaagtttcttatcctttcccaacttccattttcttttttgctcataaaatgcaggcagaaacacctggggctatttggggaattaatgtatagaaagtatctaaaacatacaagatgcttatactaattattatgtgcttcctgaaagacatttgccaaaatataactgtttagatcacacttcaattytagtcatccagaattgatcccaattttggg

SEQ ID NO: 412795 - DNA, 276 bp, Homo Sapiens
ggatttaaaataacarggagatgattttccytaaattggaaaaaacagagtgatgttttactcaaatgctttctaagtacactgatgattatagtatctctytattaagtataattyaataatagatattsayttactttgtaaattatgaagtaagatttgatgctaaatattgttttattattagagttcaggatagcaaaattgagactcaggacaaatttgggcggataatagatttymagatggtctgaactacttaaggattgasataaa

SEQ ID NO: 412796 - DNA, 316 bp, Homo Sapiens
attcacaggragtcaaaaaaggacctatttcaattatgtctgcttgaatcctgtttaattgtttccctggctgagtagctagtgtgacacagcagcaagactaaaggggctctgtggtccacattgtcctcgagtctattcttgcccattatagacctbcccattggtgctcactyactgcatsccaggaggcttgactgtcctcaggaagcatgttggggtgccttaagggtaagtatccctggggagcacagkttggagaaaaccaatacgtcttcatgtatgttgagaagcgctgggccaaagtacagacttt

SEQ ID NO: 412797 - DNA, 424 bp, Homo Sapiens
atttaavaacaaataatttcattatattttgaaatcgaaaacaaacgacaggatatgaaaatgtacgtsgtatcgacaaagcagatgctgaacaacgcacagcgcggcggttatgcggttccggcattcaatattcacaatctcgaaacgatgcaagtsgtggtagaaaccgctgccaacctgcatgcgccggtcatcatcgccggaacgcctggcacatttactcatgctggtacagaaaatctgttggcgctggtcagcgcgatggcgaagaatatcaccatccactggcaattcatctcgaccatcacacgaaatttgacgatatcgctcagaaggttcgttctggcgtgcgctcagtcatgattgcgcctcgcatttsctttygcgcaaaatattcacgggccaaagrggtggtggattt

SEQ ID NO: 412798 - DNA, 363 bp, Homo Sapiens
ctccagcaaaaggaaaagctgccccctggtttggttccttccctgcaagttatcttccaccttttcacttatgtccttcccatttcaaattagatcctaaagtccttcaatcactttcttgcctcaatggattacacctgccttgaaaaccacaaccttggattatggctcaatataatcactgcttgctgccctccactgccctatggatatcttactgagatcattaatgaacactgactgccaaatataacacttttctactaagctctcaaagyaagtaatggaaaagcaacaatctgatactattgagctctctccccttcataatcactcccctttggggcttcaagggcaccattc

SEQ ID NO: 412799 - DNA, 208 bp, Homo Sapiens
ctcgtgcsatttcggcagrgttggaaacgtgggctttctccaaaccaaggcctgagtttcctgtaagggtcctctgtttttgattcacccaaaagtctgcaaacccccagcatctctgctctggccagccctgamtctgaagcctgtgtctactaagaggggbgccagtgccccactgggcaggacgggaagcctagcctgggcccca

SEQ ID NO: 412800 - DNA, 435 bp, Homo Sapiens
tctttctaggcccttcctgggctacatgggaatctctagattacttccatgctgggcacagtctgttggtgcaaggttatgccaggtggagtggcaattggtccctgatgccaagcagagaacatggcaaaagttcctctgctcccagctttccactgagcctatcaaacacctatcacatctggaatttgaagcatgaatgacagcctcctgactgactgtgtctcacaatccccagagctgaagaagttgactttatcccccgttccccaattcctctatgacaagaacttacaacattccctctaactatagcatacaataaaactctatgatatacttggmaaagtctcactcttagtatgaaatagatgattaamcaattagaatatcatgtcccttatgtccctttctctaaatatggattgaaactag

SEQ ID NO: 412801 - DNA, 306 bp, Homo Sapiens
  misc_feature (141)..(255): n is a, c, g, or t
agaagtagaaggtggaggtttccctgaagaagaagactcaacctggttccagagagactgccactcagcaactgcaagtatggccttggratcggagagacttgggttcatgtcctggcttagccaagttccaccgaatgnnnnnnnnnnnnnnnnnnnnnnnnnnnnnnnnnnnnnnnnnnnnnnnnnnnnnnnnnnnnnnnnnnnnnnnnnnnnnnnnnnnnnnnnnnnnnnnnnnnnnnnnnnnnnnnnnnncacttagcactcttggcaaaaactaagtscccagtaaatattaactatttt

SEQ ID NO: 412802 - DNA, 266 bp, Homo Sapiens
  misc_feature (68)..(68): n is a, c, g, or t
racattataakkktaaaacatycccacacttatacacasrtaaaactagttycccthtttttccagtnstaatvtgyacttttyyttttttgcaatttttgaaacagctacattaatccctaaaaatcccaccatwctgaaaatgtatggcgtgtatttyctatagtaagtaatatgaggaaaacatgattagctgtgccaaagaaattttatacattgtttacatgatgaggccacagtacttactgrgggcttcatatggkttt

SEQ ID NO: 412803 - DNA, 396 bp, Homo Sapiens
aaaatgtaagttgtagactgtagtcattaacccgacatcataaagcactgaaacccatcctgccattcagaagattcttctaaaacgccccttacaccacttcttgtgactttytttccgtttttttgctgaaccactgttgagtacactgttaagtaatactggtttttbtcttgtatgtatttagggagccattgtgaaatgagagaaaattcaaacctcaaattgagtttcctccttgtgtttagaaataaacacgtcgagggaaagaggataacttggagcatcgtggtgtagagcatgagcttccaggggaagttggaaatggmtcatttttaatgtttttacaaattatgtttaawaaggatgtgtttcagtacttaataatgtattgba

SEQ ID NO: 412804 - DNA, 211 bp, Homo Sapiens
tattagcactcctgaggcctctggmatgctgcttttctatccaggtatcttgcttgctaccagcagaattgactggtattggttctcactggccagggagcctctsytgtgttcctggmatataaggcttttmttcaggagcaaatcattgatagtaactttbctttatctagccattgacttcagcaggctaaaactacattgtgtaact

SEQ ID NO: 412805 - DNA, 316 bp, Homo Sapiens
ggatagtdcaacacagcaagagcacacagttatttgtatawtaaaacaacttaattaatgaggragatgggatgtttgattcctgctaccaccagttcacttcacaaaggccttcttctggtattaccaggaaaactttcctgcattttctagggaaaaagaaaagtcgtttattaggmgcacaatgcagatatgtatctgtgttttcatagcttcagcaaacttctkagtaaaaytcccatttcaacaaaaccaaaatactkwttgtbtgaatgtagaaaggtatagaataaagcctacaaagggggawtttymc

SEQ ID NO: 412806 - DNA, 311 bp, Homo Sapiens
ctgagacagaagtagatttaaggcagaaacaagamttcactgaagcaaataaaagcacacatgtaaggvaccaagcaggcaactcaaaaattcagtactctgcctgattgctggctcaggactcgcagatttgctattttctgactttycccgtctcttcctcttgtccctcccccttggcaggctgttggctaattgctgcatgtgcaatgtcttgctagtatctggggggggcacatgtgccatactgaagttacgkgcatgctctcttagggcaattcycccttattggctagtgccccagaggaagg

SEQ ID NO: 412807 - DNA, 345 bp, Homo Sapiens
aaaataaggcggggaactbgggcgggggtgcgttgcgggaagaaaagagaaagaagtgaactggagctttcggacacagaaggacaggaagcttgagagaaaaggagaggataatgagtgahatgcaatgcagcacctccttggmacacacagttacaattcakttcacagggcacactggctcaccgtattttttactagtttctctccccacctcctttttaawawttycttttttgctcttatyccaaagatatgccagctcaaaaccaaggcagttggaatttacagctctaggaagctctagtgagaataatwgccaaatwatatgatccmgccaaaatt

SEQ ID NO: 412808 - DNA, 355 bp, Homo Sapiens
caaagcgcgtcggttaccggctgcatgggttaaggtgtacaaggttatattaaaataaaagsgkgacgtgcgcgbataagggcggtattagtgkctaagcgacgtatcgtaacagtaccggccacggtkbgagktkttcacggtcgttatcgttttcatcatgcaggtcgagttkgcacgacckkakttggcgtgcgtccaacgtttccgagtgtaaatactycgtccttagtcataatgagtaatacagcaatgctaattaatatcaatatcggcagtacagccacgcgacgctcgccaaatatcttcgcaagttagaaamgaacgtcagcggccgtggcgggcgkaccagggt

SEQ ID NO: 412809 - DNA, 405 bp, Homo Sapiens
  misc_feature (371)..(371): n is a, c, g, or t
gtagaagattggaattggtactataaattagacttctagaaactagagaaaattcagcctctaaaatatttgtgtcttttcaaatatttagatacattattttactgaaccccttagacatggtattctgatacttgatttaatctaatcagatgaattccttcttgccttctcaaaaagagtgatgatgttgccattttaataataaatatagtgaaatgtaagatgagacaatgtcagggagttatgaacaaatatgcctctttctctaaatagcccagtttttagtggtatctatttttgtgtagccatgcactgaaaatatcacttgagtgatataatttcattgagtagtgcttttctgtatttynaaacccaaagctctttaggggggkgggtagatag

SEQ ID NO: 412810 - DNA, 510 bp, Homo Sapiens
ccaggggagtcagagacacaggagagaaccagggcagagtgggcattctggwaagtcaagagaattcaacagggtaacaggactcaatgccacagaggataagtgaggattttttaaatgtccactgaatttgacaagtaggaggtcactgatgacactgcagaagtggcgtcgttagaatgtggggacagatgccagattatagtgggtaatgggaggaggaaatgcaggccttgagaaagaatatgtttttaagaactttggcactcgaggggaggattgttctgtgacagcagccagcagggaagcaggacccagagagaacgggtggttttttttctcctactacctcttatatttctaacaatatcctaattttttcaggtctttgaaaacaccttacagatactttttaaagtttcatttgctagtgataaataaaatgtgcttgtatgtgtaatttgtatagaggatttccttatacttcctctatgcccgctgccataaagg

SEQ ID NO: 412811 - DNA, 226 bp, Homo Sapiens
gtgacattcccaattcatcagagtgaccggaagagatccaatacgttctcatttttctgaaataccaccaacattttcctggaactttacttcggcctctttccctgtaatgtgagccagtctgatacatctgcagtgcccttgctatatgcattacacgctatgactaggcacccggctgggtcaactctacgccaaggttatattcagggtcgtacacttgatt

SEQ ID NO: 412812 - DNA, 158 bp, Homo Sapiens
tagaggtgtatatttgtgttctgacctgtaaagatgctccacatatctgtctaaatgtgtacaggtatgtgtgtataatgcatgtacgtgtggatatgtgtcatgtgtgcatatgtcctttgaaatcagggctgttcagccttgggttggacatttgg

SEQ ID NO: 412813 - DNA, 318 bp, Homo Sapiens
cctgtattcaactgaaacatttaaggaggtcagcattaatattatgtcaaaagcacaaagcttgggttagacaaattagatgagtcaacattttggctctgcagctggttaactgtattcttaatcaggtacttcactaaacctcagtatactcactcgtcaagctgggttacgattctgtagcaaccaccttagggtttttgtaaggctgtaaaaagtgaaaaagaatgcatgtggagtgcttagcccagtgcctgcgaccttgtatgtgttgacagctgtgatgattctaagtggcatttaaaattatttatttat

SEQ ID NO: 412814 - DNA, 264 bp, Homo Sapiens
gatgttttggctgaatgcctggtatgtgtggtaaggagagaaaggaaaaaagcaagtcataattgcttcattcagaaactatggaacccggattcgaatggggagacaactcttggatacttgtagagttaagaataaaagtttaggattcagggccagaataataacagtaacagttaattcgacaggaatttctcaaaaggggtgctcagggtgaggaggcactttcagggagtaaggtataactcaggttcatcctggaat

SEQ ID NO: 412815 - DNA, 288 bp, Homo Sapiens
atacctgtcttggtgtatctgagagtaacatatctatgtctgggtgtgtttcagagacagagattgaaattcatcatctccatagccctcatctagatcaatatttcatgtttttaaatgataggcatttcaagaaaagaagataccaattttgaggagtatagtagacaaagggcatgactcactgcttgttcatgtaaatcttctacctttatcacaggacagaatatgctcagagcaccaggattctccttttccctccttaccaccctccatgtgcatggttgg

SEQ ID NO: 412816 - DNA, 340 bp, Homo Sapiens
tacatgtgcttaaaagcattattgtagcttcatttgcctctgaatttcccgagtggttgtaacaaggttgtcttcctgaatctctgcaaatttaagtcagcttgcactaggaagccacagatgtcctttagagttgagtttaatcttgactcaaatcagcttctcctccagagctttgacatatgacttagcaagagcttttccttcttctttctgccttcacttcccagttcccaaagtaccattttcaggacagtgtgatcctagagatatgggaagagagggaggaagcaggctttgatctttgccattgtgtacccatagaactcactccagattc

SEQ ID NO: 412817 - DNA, 218 bp, Homo Sapiens
ttttgtttgccatatctcacattgctttctcggtttgttagtacctttcttggaagagtacaagggagctaaattatttttagacatgtcatgactgataacgactattctacctttatgccggatagtttgggtgtaggatagtaagatgggatcattttttttcagawtttttaaggcattgctccattgttaccttgcttccagtgttgctgtgt

SEQ ID NO: 412818 - DNA, 248 bp, Homo Sapiens
  misc_feature (193)..(194): n is a, c, g, or t
cttggcgatttaatttctgcaatttacagtaaaggaaatttttttaaaccycggaaccaaattcaatgccctgttttggtcaatgtgctttagatttgaggtctttgaacaaggaacacaatgtaacgggtagaatgtttcattgcttaagacatggcttgagattaactttgttgctgttatttatgagatnnttttaaccatcagtattgtcctttgaaaatattgccttaaaaagacctcatatg

SEQ ID NO: 412819 - DNA, 287 bp, Homo Sapiens
  misc_feature (74)..(79): n is a, c, g, or t
ggtaaaaccaaacaaaatgcagtagggaatcaggagagagtgaggcgacatctagttacctcactaaatgtttnnnnnnggaggggtttgatcattaatgatagtgcaaaagaatagcttaatgtttggcctttagggctgtctcccatggctatactaaagtggataggaggtaaatagcatggccttaaataattccatttctgacctccatataaattgtactgtggcttaacatttgttggataattgagctacagacatctctgcatatagttaccagtttt

SEQ ID NO: 412820 - DNA, 333 bp, Homo Sapiens
tatggtttagtgtttgctttcatagtatgccatgtacaatgttttatatttcatagtttcttttaagtaactaccatgagtctctctaagcctcatggacaaagatgtagaccaaatgcaagagctgagcttgctttgggttcaaccatgatcaaagaaaaactgaggtcacctgcaggcttacgtgggaagctaagaaaatatcacagaaaaatggaaagaaatatggatgtrcagaggtaataaaaagagctgctgctggacatttatcaaagataggcaccttacagtatcttgttgcaagtccaatcaggggagactttgttaatatga

SEQ ID NO: 412821 - DNA, 284 bp, Homo Sapiens
gtcatgtggtcggaagggctctgggctgggagtccaggcagggtaagaggggctgcagccctgccacttaccccctccaggtcatttgaaggatgtaaagaccgcattctgtactgatgattcttcaccctggttgcatgttggactcacctgcagagctttttaaaacactgatgcccaagcctctctccaggccactgaaatcaagttgtattgggtggggcccttggcagagatctatttgaaaagctcccagtgattctaatgggcagctdgggagaacc

SEQ ID NO: 412822 - DNA, 210 bp, Homo Sapiens
gtaaaactttacaaaatcaaatgagctactctgaagcatttgcaatgacttcatagtttaaactgggatagaatctcaaactagaaaagggcaaggagcctgttctcactaaccatgtcactcttggaggcagatggcctttcctgaaggctgcgacattttttgcatatccctttatttcaaaggctgttatggtcatgaattggatta

SEQ ID NO: 412823 - DNA, 431 bp, Homo Sapiens
  misc_feature (218)..(219): n is a, c, g, or t
gaagacttgagtgatacaattctgtggctaccacagcaaagacagagagagtaattctcttacatatggggagattatatggatatgtgttatatatgttaacaggaataatatatattttaaggtctccattactttagtgaagtagaaaacaggcaacctaaataaatatgttaaatgctattgacagaaatgcacaactggcaacattttgatgnnggtataataagtttctcaaaagcagccatgggagactttttgcttgtcagattgaaccaaaattcactttgtaatcaattttcttctacctaattatgcattcacatactggcactttcgggttcttgcactggacccaaacctattttaaacttgcttgtatagggtacattctttttttcaatgactattccctgtcacatactgttcag

SEQ ID NO: 412824 - DNA, 388 bp, Homo Sapiens
atagatggcccacagatgggcgtgggaagcaggcagggtgttgatggcactaacatcatccaggggacttttatggcaaagaactttgcttcatccacaggctggaggtgagacacgagttcaatactgcaacgctgaaaactgacagagccagcctcccatctagggtggaactagaccaccttcctagggtgtagcgggacttgggtcaggtctccgagcatgtgcacactgcatgatcctcagtaagctataggtttgaaattgcacctagagagctggtggttgtctagagtgtggctgtctgggtgcttcacatgcaattgagttatcacttcctagagacttttggaaagttaggtaattaaaagcgggtttagctggggtt

SEQ ID NO: 412825 - DNA, 343 bp, Homo Sapiens
aaattatattccaatattttatctaaacttaagtgtggccagcattattggtttcagagttgcctaaacaacacagaatatccttaattcagtttgtaaaagagttttgaccagtgtaaaaaagtgaagacacagtttcatgtttcaagtttaaaatggaaagttaatatcatttgagcacttatgtgttttcatgtcttctacttaatctgtatgtgaaagtaaaatatttttaacaccattatttatgccatgtaaggtgggttctcagaagcacaagcacagatattaccttctgaagacatttttggctataaaagtcattggatggcaaacactattt

SEQ ID NO: 412826 - DNA, 316 bp, Homo Sapiens
aacagctggttttttttagcgaattggctgtgatctgccttcctcccaggctgaggactggtctgcatggtagagggtcaggggctcctgcgtctcactgagaatgactcacagctggagcatgcatcctgggcctcctgtgccctggccgcccatcctaggatgttgggcaggtaacagttgtaggtatgtggacttaccagtacatgttgacataccctgacagcctcattaattttggtatcatatatttattcctagtgaccactgaaatacttgtgtgctgatatctaggttcctcaacttaaattcccac

SEQ ID NO: 412827 - DNA, 254 bp, Homo Sapiens
  misc_feature (187)..(190): n is a, c, g, or t
atggtttggggccagatggggaaagctgtgttatggggcttgtcagtttctgccagccaaggcttcagcatagctgactgtaacaaagttgggaaggccttgcttttgagagccagaccaggagtacctgtgactaacaaggggtctgggaggatctgctgctcccatgccctcctttgtatatttnnnntctgtttgagccttctgggttcctgtgaattagggagaggcagttcctcagtctaactcctact

SEQ ID NO: 412828 - DNA, 299 bp, Homo Sapiens
gstcaaagcggtcctgcaccggtgcttggacgagttcgagaaggaccccgtccccgaccggttcctgaaggacctggacgagaaggtcgacctcgactcagcgtggtcactctggttgtgggacaaggcctcgttgagagaccggagtttcaggcacctcagaaaagacttccaccggccctacgtcatggacgtgccccaggacccsgggtagtatttgttcccacaaaaatccycttcttcatgcamcccgaccgggggtcgtttcaccytcaattccbacattcccacgaggccga

SEQ ID NO: 412829 - DNA, 357 bp, Homo Sapiens
agcagtctgattgaagaatggttttccccctacacccaggaggggccacagtcttggggcagatgctggcctctggaggccctgggtggccaggccccctcatgggaaaggactgggcatccctttggtgtgtggaattgggaccttccaactccttcctgtagaggaacccagcaaacgtgggccttacaacactacatttttttcgggttatcagtttaaaagttggaagcccagaaaaagagaagagccttgaggaaggtcaagctttccttgttgtgttttgcatgttacttaattcactcagctttctgaagttggtggtttttgtgaagacagacagcagagggtcacaga

SEQ ID NO: 412830 - DNA, 191 bp, Homo Sapiens
gaataaagttccctctccccacttttatttcttccttatgaactctgatcatgttctttgccagcaaaacttttctttctcttggccgacaaactttctgtggaaaaccagctgagatggaatcatttaaatatcagcaactgcagctcccctgctgacagataaattaccaccaccatcaagtgcccagt

SEQ ID NO: 412831 - DNA, 333 bp, Homo Sapiens
ttttaaaacaacaatattattatcaaacctacaaaaaacatttcgctcactttccctatcttcccactggattaatatataaggcaaaccccaaacaccacccatcacctagacttaacaggtggtaattgcaataccataattcacttgacaaagttaataatgatttctttgtgtcatgtaatagtctatatttcatcttccctggttgtagctggtttgtgtatggaattgtttgccagataaaggtcaagcctctcagagaaggggcagcttttcctaattctgcccatggggtcatatggggctggtcctagatgcccccatgggtca

SEQ ID NO: 412832 - DNA, 254 bp, Homo Sapiens
  misc_feature (106)..(158): n is a, c, g, or t
ctggatccaagccaaaactttaccctagttactgattgtaggataccaaatatgtaaaattaaatgatctttaaggtacttctaagtctaaccttctgtttgatannnnnnnnnnnnnnnnnnnnnnnnnnnnnnnnnnnnnnnnnnnnnnnnnnnnntgtcaatgacctgtcagcctcccagggccactggaagatctaatgaagtgatgactaagatagagctgaactccttacagatataagagttggtga

SEQ ID NO: 412833 - DNA, 230 bp, Homo Sapiens
ctagatgtgaggacaggattggaaggattaaccctgaaggcagacagatcaattagcagattgtactatggtccagaccagaaataatggcccagaacaggccagtggcagtggaaatggaggagaagatctattgatgatgtgggggaagtggatggaggtaagagaatttttaggaaatagaacgagcagtccttaatggggggattaggrcaamaaarggggagcat

SEQ ID NO: 412834 - DNA, 331 bp, Homo Sapiens
atatttgtaaaatggggtcaacacctacactagacttttgagagtcctcaattgcagccagtttttataacctaatcctgccctgtctcctaccagatcagcatgaaataaatgtgacctcatgacataaactaagccctggaatctggagtagcatcatgaaaactctaatcagttttatttggatgcctatactggggagtcacataacacaggaagtcgatagcgatgaatggcttatgtgcaaattaggcagggcaaacagtttaaagagagcaatagagtagagggagctcaagaaggaggttgatgaggtatcccataattctgg

SEQ ID NO: 412835 - DNA, 226 bp, Homo Sapiens
  misc_feature (87)..(87): n is a, c, g, or t
  misc_feature (101)..(103): n is a, c, g, or t
caaaaccaaaagttgaccttctgggggtttcatgcaccgttcttcctaagctgggctaacatttcactgtggtctgtgtttgctgtnggaagaagccaccnnntgttgaaatgtaagggcctgctgtttatgcactgttcattcagggctgcacgtgcctatgtgacttggaattctttattgatggctgagctgcaggattgagcatgacttcttgcctggggtc

SEQ ID NO: 412836 - DNA, 345 bp, Homo Sapiens
gagaagtccatttttaaggcatcagaggtgaatgtgtatttagggatggaggaggcatattacaacacagctgtatttaacataacacaatcatatcatgctataaacaatagcagttccagaatggctactaaggattttggactgccagactttggaaattggcaagccttataccttgtccaatgaagttaagtacatttgagtgacagttcaacatacaagcaaaaaatatatagaggacattgtacatttgttattattggacatgtttactttacatgtcagagtatccatccatctctagggtttccattagatgcttcattgtatccacagacctgt

SEQ ID NO: 412837 - DNA, 219 bp, Homo Sapiens
ttgttttatttgaatattagcacatataagaataaacttttgggaaataactacttcctattctgcccaccctttacttaagcagtaaagtacctcttttctaaagaaccaggaaacatcaaaataaccacaacaaaaatctaaacagttttcaaataatacattcagttctcataataataagggctatataccatgggtccacacagactgttctgc

SEQ ID NO: 412838 - DNA, 174 bp, Homo Sapiens
ctttgtcctgtatctcccctcaaccctatgtcactgcatcattatgcttgattttaattatagtcatagaacccctacctactttcctcaattcagggcttctcctctattctatctaccacacgtaaaatcaccagagtgaaacttcaaccacagtggctactcctttgttgg

SEQ ID NO: 412839 - DNA, 162 bp, Homo Sapiens
ggagtcacataacaccaggtggaaaagatttgttactaattccagggaagaaccattcacatagtgttggttaaatggtcgcctgcgttcacacttcagtgcctgtagaccagagccctggaaacaaaagggttacttgtttccccaccatcgcctttacca

SEQ ID NO: 412840 - DNA, 687 bp, Homo Sapiens
  misc_feature (97)..(97): n is a, c, g, or t
  misc_feature (509)..(509): n is a, c, g, or t
  misc_feature (555)..(555): n is a, c, g, or t
  misc_feature (557)..(557): n is a, c, g, or t
  misc_feature (634)..(634): n is a, c, g, or t
  misc_feature (659)..(659): n is a, c, g, or t
  misc_feature (669)..(669): n is a, c, g, or t
ttactggaaagcataaatatttcattcccaatatttttaaaggaactatctttctgcttccactcagtgtataggtctttaatgaaaactttagcangatcaagctctcatattaattgtctctctttatgattcttttgaatatctgaccaaatgtggatgatgcaatattataagccttttcaacttcattccattgtgatatagaataaaaatttatccagtaaaatacagaagtctcatgaaaaaattatttccataacgtagttgttctaaggaaaaattatacaattttgaaattaaattttgtgtacctaccattgggccctcatcctataatttgtcactccctactctgcttttgtgaggaaatacggcaatatcttctagctggcaggctgtggttttaataatggcaagtctctaaaacctgcctatgctgaatttcctgatctccagtaattgaatcttttaagatttccacttgatttggggcaaaaatgcaaacnagatttaaaggattcatacactcattaccagggtagcatagttacngngagatccaagaagttttcaaagctggcatatttctaaaatctgacaatgaccggggccaaaagagcaagtggggtcnttccacaatgaggggggttttgganttaaccttantattggaaaaaatctgga

SEQ ID NO: 412841 - DNA, 621 bp, Homo Sapiens
  misc_feature (483)..(483): n is a, c, g, or t
ctgttggcctactggtttctaagttatttataaatgaaattgaatcccattggtccagaagagagctctgaataatgccttcggacagcttttttttcgacttggtgttatgagtgataactagctttttaattggtttcccactgagtttcagatcaatttgacttgttcagcgatgtcaaccacagtgtagttatacatgtaggccccaagtattattatttttattctttacttgccagaacgttttattctctgctaaataatagaaataaatataactccacattttaaagccaatgcttaaaaggtggcaattacgagtaatacactgtctatttaaccttttgtttccgaggcatagaacatgaataaaagaactttttgaaagtttattcttcatgaaatttctttgaaataaaacatttatatttagtttgagaaataattggtgggagaattgttggatataatagaacttgntatattaattcctttcctgctggcagataaatggtaccatcaaatgaaagccagcgtagtttattggttgaaataaaacaatgaatagggttctaatataaagaatcctaaaattaagtaaaagcagccattattttg

SEQ ID NO: 412842 - DNA, 624 bp, Homo Sapiens
  misc_feature (353)..(353): n is a, c, g, or t
  misc_feature (557)..(557): n is a, c, g, or t
tgataaaagtcagtaatcctctaattacgaatcctctgattttgtataagcttccaggacaaagaaactttgtgcccttttccataaggaacaaagagggccctgtgggaacattctgcattcacgtaggtttggagaggagaacggaaagctacagaagcagacacattagcaagcatattggtaggatgattgtagttgtgagaattctgaaacaaatgtaaaaagggtgatgttatgaagactgaagggaggctattgttagattgcttggaaaggaaaggcccggtgaaaaaaggtacactcatgctgacacctgattgacaagaagaagccagacacgaggattgcanatccttctatgcaaagggtaaaggaaatgcaaatcctgatatgaagtaaatatcctagatatgtattagtaaatagcatccaaaggtatattattagaatcattgtatgcagagttattccagcaatgcaaagatttcattcggaaaagttttaatgtaattaattacaatcataattacataaaaaccttcacaggaaaacantttgatgataaacaaaagagtgactacttaaatgacaggtgacttttaataactgcagtggaagtca

SEQ ID NO: 412843 - DNA, 671 bp, Homo Sapiens
  misc_feature (493)..(493): n is a, c, g, or t
  misc_feature (612)..(612): n is a, c, g, or t
  misc_feature (644)..(644): n is a, c, g, or t
ccttttttgtattctcagagctgccaggagtgcatcgagcctgtaatttcctgttctctgaatcccccatctttctgcagctccaagctttgtgtcccacagcctgtgactctgtgctaacaaatcgctattgtccagtggggcgaatggtggctggaactaaagaattgctgtctggtttctattcaaatccaggtagcgagatatatgaatggacttttcgaatcgtcatgtgaataacgtctgctcggcatgaaggctcagagccatgctaggaaggattaactcgtaggctgaccactaacatcctttgtggtacgagggagaaacattcccaagtatcattttattcacacttaattttctatcccatacccccaaaataaggctagctatttaattagttggccgcttttctcttaatttttagtgtttctgttgataatgtgtgagtttgggaaaatgctaagtagcttttcacttagaacactgntattttctctttaaaggtttctaccttacatttattatagcatagttatctttatagcatagatgcagaaagtaagagagagcttggtttttcaagaaaacaaccctttaaaatctttncaacccatgaagggaaaaatcctccttttttncccaaggcattctacttattactttgc

SEQ ID NO: 412844 - DNA, 642 bp, Homo Sapiens
  misc_feature (67)..(81): n is a, c, g, or t
  misc_feature (400)..(400): n is a, c, g, or t
  misc_feature (552)..(552): n is a, c, g, or t
  misc_feature (575)..(575): n is a, c, g, or t
  misc_feature (603)..(603): n is a, c, g, or t
  misc_feature (617)..(617): n is a, c, g, or t
ctgcttgttcctaccattgggatcgccttcatgaaggtcatcagtgatctctgacttgccaaatacnnnnnnnnnnnnnnnctggcattgtgtatacttttcaatgcttctctgaaattatgtacttttcttttgtatttgattctattgaatgttacttccttaaaaagttcttctgttttggtttttgtgattctactctttatggatttttcttgttcatacatggctatttgttagtgaacttgctgtctgtcctctctctccttttcagaatttttgtgtcactgttctgtcttggacccttgaccttatcactctacaacctctcctggagcaaacccttttatgggtctgctgctatttccatattctctagcttcagcgtaggcatttctgntacacttcagatcatgacatccaattgcttccagacatttccacttaaataacctacacacacttcatacttgatacatttgatgataataaaagtggtcctctttctggttgctatttcaatgggtgataacagcctttctcaagtttctnaaaccagagagttggtaaagcantttcgactttcatttaactcaatatagnataaccatcatggnacctgcatatcctaagcatgccata

SEQ ID NO: 412845 - DNA, 682 bp, Homo Sapiens
  misc_feature (404)..(404): n is a, c, g, or t
  misc_feature (502)..(502): n is a, c, g, or t
  misc_feature (529)..(554): n is a, c, g, or t
  misc_feature (620)..(620): n is a, c, g, or t
taatatagcctttcttaggcgtagcagtccggcaatcagggttcaatggtttcctctggaaggtagcatactgaaaaagacgaagtgcagagaaaagacagggtgggggtgcagcatgtctagtttgggggcctggctgtgggtcagaatggagagattgacacttcagagaaggccgggaatgaaattgaatgtgcagagcacacgttccactcagcaccgattagagctgggattgcctctcgcaactccccaaagaaaatgctgcgtccttgtaagaccgtgtctgcccagtgggggcctggacactaagtgccacttctctgcccatggcaaattccaagggccaggacgatggagacaagggaagtagaagttgaaagaaactcccaacggcaaattangtcgagtgccagaaagaattacatcaggagaatctgagatgtagtgaaagtgcccccaagctccccgctccatttcatgtgctactgctggctgtganatctgaaaaggactgggcccagactcnnnnnnnnnnnnnnnnnnnnnnnnnnccgtgctcttaaatcaatgtaaattaggctatatacagctgccaataatctgcaaaagatgacagnttcatatgattccaatggcttaaactaacaaattcatgaatgattgcccagaccagaaatgg

SEQ ID NO: 412846 - DNA, 645 bp, Homo Sapiens
  misc_feature (549)..(549): n is a, c, g, or t
  misc_feature (562)..(562): n is a, c, g, or t
  misc_feature (600)..(600): n is a, c, g, or t
  misc_feature (624)..(624): n is a, c, g, or t
atggtgctaaaagaggttaacttgagatcactaaatgttagagtcaagattccattttgattgaagtctcctgacttcataggttaagccttttttcagaatatctacttacagtacttacatttagaagtattgacttttatctgggtaaatcagagactagcatatgatattaatggtaagcaagggagatatatcagcttgaagtttatatgaataacatcccctggagtcacgcagttcattatgtagagaccctagaaatgtgcaagtagtaataactgagaggtgtaatacagttgtttaccaaatatgtaaagtggctgtgtgtactcatcactggaatcctttaaagagaaatcccaagctttgaaaaatactgagacagctactcttctttcatgtctctagtaataatcaagtgagcttggatcagccaggtagggcagagtttcacctctctttatggctgctctagtaagtagacaaaccgattagtttcaaatcgatgatatggtgatatttaaactagtcagcttataattttangtttaaatgttgnctgagaagaaattaatggtgctgctacccttgcacagncttaaacctctttaccaaaattgngaattcaactcatttgggggc

SEQ ID NO: 412847 - DNA, 311 bp, Homo Sapiens
tatttaaagcagaagccgctagtcagggttagtaaataagcttagtggagttcatgaacccactggaattccatgtatatttttgcatatctgttttatggaggtggtccttcatacggccaatcaattcattgattctgagtgatttgattatgatttgcttgcctaaaagaataatgtttagatgattttgagcatctaagaaaacctgatagttataattttgaactggtttgccttaaagttcttgaatataatttaggaaggtatgttaagacacacatatgtgtgggtgtgtacagggggagtac

SEQ ID NO: 412848 - DNA, 659 bp, Homo Sapiens
  misc_feature (633)..(633): n is a, c, g, or t
cctactggcagtattcagtgagataatgattaaaaggtttccagaatttaaggtttcatattgaactgagttttcatattgaaatagcgcactgctgaacagttgcttaccaggataaattttttaaatcttctagatgctcaaaagtgaaattgcagatcataaaacataaaagcttttcaaaatgaaaaatgccacagtccctacactaaaatattagttaaattaacaacgtatttaccagaacagtgtcttccagaagataaaaggatcttctttcctccgaatgtataaggaatataactgttgaccttgattctatactcatttaaactattatctgtcagcaagaatgaggcccaaagtgaggaaatacacaaaatagagagctcctcacttacagaagcttgatgggagaaccaaagattgtcttcagcaagaatagtaaaccagggagaaggaggaattgcaaaaaataatacagtggcaaacaaagaattggcaaaatatttgataaatcaagttgagttgattgcaaatacataatttttaaagtagaatcaaaactctagacaataacaagaaagttggaaaatagagttgagtcaggaatgctactatcttgctttggtnccaaaagtagcacaaaaagagacact

SEQ ID NO: 412849 - DNA, 700 bp, Homo Sapiens
  misc_feature (493)..(501): n is a, c, g, or t
gctaatcccagtttcaatttttgtcagctgtccctctatattttcagtgtaaatccctgtctctttgtaattataaccaaaacatacatgtgtttaatcacctctctatcttggacaatttttgttttaatacttgggatgccttcatggtgtaggcctagggaatcctgccttgaactacattcaaggggcaggaattctagctgcggattccatttccctgtaaaattatgcagccctggctgcataatgctgtcactgcctgaagcagctgctcctgctgctttcagcattgtacattgtcaacttttctgtcacttcattcacaaactttgctcccacattgttcacataatcatctctttgcttcttcctacacccagattttaaggaaaataattatgaaataatttggtagatataatatgattttagagtagtaactccagaactctttagaaaagccagttgttcccttattgatctctctacnnnnnnnnnaacgtacttaggaaaaaattgtcgcatgactatttaccgcaggtctgactcaagggaaaggcatgcatggcaagtaataaagaagcaagatcctcacagacatgctgaaaattagcccatgggggtataatcaaaccacatcaagaaaggtgactgagaccaaataaaatgaaatgtgaatggcattcacttttgctgg

SEQ ID NO: 412850 - DNA, 603 bp, Homo Sapiens
  misc_feature (474)..(474): n is a, c, g, or t
  misc_feature (503)..(503): n is a, c, g, or t
  misc_feature (549)..(549): n is a, c, g, or t
tggagtcaagctaatagaatattttctgaggaacattattatttgtggaatattttttctaccctcatccatttccttctctgcatttttctttcttactggtctttgtacagattttattcaattttctgttaaagttgtaatagtatgcataagacctgtggcattgagtacttttttaaaatcccacatagagtcaaaaatcccaattacttgcatttgttagttgctgagaagacagaccttataaagagctgaattggttaaagtccagagcaccaattcatgatgttgtgaccaatttacaaagacattcagacacagctggataccatagacaaagatgaaattatgataatgctgttcaaaattaacggtccataactatcaaaggcaggtgcaaggcaaattgaatttggatattgatgaggctgaaatgggatagttcatacagggaccttggatttatactgntgcttttttatggccatgttaaaagcatntactttccccatgggaggaaggtgcatgctgagtgatcctgttganctgtcactggtctggcaggaaattcttgttgatggacatatggctgacccttgg

SEQ ID NO: 412851 - DNA, 652 bp, Homo Sapiens
  misc_feature (76)..(76): n is a, c, g, or t
  misc_feature (567)..(567): n is a, c, g, or t
  misc_feature (613)..(613): n is a, c, g, or t
ccaacttcactagtctcttggaatgaggtttaaataaaatgcataggctaacatgtgactgtcatatccaaactcntaatactgtgcaggttaaatgtgtaaattaagtcttataattatgcataggatgttttcatttaagaagcattgcagtggatattactaatgggggcgctattctttctaatgtatgaaaaaggaaattttaagtgtcaaataatctttaaaatgtgatgtcatatagcacgttctttttccttaagatttatgcatgtttaaaacttaaaagtacaaattatgttaatttcagctttcattgagaggccctttatgattgtctgaatgttatattagcagtccagaaatatcccagtcatagcttggatgggggtgaagcagaggaagtgggtggtgcttcgtgatgacagattattgcagattatatggctgcctgccaaaatgacactcgttgaagggaaaagtagaagttacaaactccatcctattaatttgtcatgtttatttaaccacttataactggttgcttggtttatacatagatgacanggtttaaactcctgaattacttaaaacgtgcttaaccttctctagnttattggggctatattccttatctctgatctgcaaagat

SEQ ID NO: 412852 - DNA, 643 bp, Homo Sapiens
  misc_feature (559)..(559): n is a, c, g, or t
aagaaacactgaatattatagattgaaaaggtgataagattgcatatttccaagataatttttaaggaagtgtcctaatttctcgttttaggaaaatttaataaggtcaaaatggtcacacacaacagccaatatctgttattttcttagattatatgtaaaagtgtacagcagtcatcaaaagtgttaagctggagtaaacagacttttagtcatcttagtttttggtcttgcatacaaagcttggcagatattagatacatgatcaaagtttgtggtgcaaatgtattaacatacaaaattaatcacggtagaatgtagccttacctatctggatcactaacataatactaaaagtatatacaaagcagtaaaatgtcaagaatattccataattttgaagacaaacagatacatggtcagagaacaaatagatgactggaattagacattcagaaaagaaacacatgaatacccgaaaacttagtagatgatataaatggcattacaaatcagtgattgtgctgagacccagtgctactcatatgaaaaaaagaanattcgatacctttttaagataataactatagttgggattaaaacccaaaatgtataaagcaagcctttatgactcctagaagaa

SEQ ID NO: 412853 - DNA, 611 bp, Homo Sapiens
  misc_feature (354)..(369): n is a, c, g, or t
  misc_feature (573)..(573): n is a, c, g, or t
agatgcttatatattaaaagtacataccattttttatttttaatagactatttgaatagtttcagaggcaagagatttattctaatgaataagataatgatactgtgtgtgtggtatataaaaataacagtttataagataagaatataacatctaaaatactgctaatttgatacttttcatgactttcaattttatatgttcttgttagtttaatcagtgtctgaatgatgaaaaactaatttcactcttagtgaattagctgtctgttaccagttatggagagtagcaaaggattggccggttaaaaagaaaactaattcagcattgcttaggctaaaattcccctacccnnnnnnnnnnnnnnnnaaatgaaaactacagcgataaacaatcttttttcttgtatttataaacctacctcttggggcagtcttttgtagatttcctgaaacaccacatgccagaaaaatgaaggcaaactggtttgtcacccatgtttagaaccccaagacggaattatgtgcaatggttgaagttgcaatgcccgtttaaaatgggcaacaatgcagnttctgagcccttttggtattctttttaccatttggcct

SEQ ID NO: 412854 - DNA, 675 bp, Homo Sapiens
  misc_feature (18)..(18): n is a, c, g, or t
  misc_feature (536)..(536): n is a, c, g, or t
  misc_feature (618)..(618): n is a, c, g, or t
  misc_feature (654)..(654): n is a, c, g, or t
gtaaatattttaacaaanctatgactcaggaaccttcgagaagattagttccccacttagatttttaaggagtaaaaagggctgagttatgcctttaagtgctgtcaagaattcacttgggtttgggacatttgctggtgtaatgctagatgcccacagcagcataatattgtactttgtcaaaggtaggtaaattctctgtttctcagcagccctttccccaaaaggtatggtgtttatttttagtaaaaatagctaatctctttttaccatctcacatgataactctttggagtcatgtcaagtgccccaaatttgtctgtgattttcccatctctgagctctttatctgcctccgtttccttgtttttctggggccagagtctcatctctgcctttttttggtgtatcaccttctgacttgccttcattgcttgtctgatgtgaccaacagtgtgatcttggacacactaaggattttaagatgcaaagaaactttatacaacattatgaaagactatccttttcattttggntatttcagcattttaagttgcaacctgggattagattagaagtttccaacgtgatgaaaagtggaatgatagcattctatantttccataattttctactggcccgaccaaatctaanagctttggagttgctatttca

SEQ ID NO: 412855 - DNA, 550 bp, Homo Sapiens
  misc_feature (373)..(373): n is a, c, g, or t
  misc_feature (444)..(444): n is a, c, g, or t
  misc_feature (451)..(451): n is a, c, g, or t
  misc_feature (469)..(469): n is a, c, g, or t
  misc_feature (491)..(491): n is a, c, g, or t
  misc_feature (518)..(518): n is a, c, g, or t
atgtgagctactgcaccgcacctgccttagacaggttttgtgagcacatccaagctcagtaagaagagacatagttggtggggggcagggtggcacagtcagtcatgaggataagatgagtcagagggagcactgcatatttgccaggcctgcccatgttcctaggtgagtcccacaggtaagctgataagctgacatgatggggaaacagtgccgtcatgacccagccaagtcttggagaggtgaatgagtggaggtctgggtacagaaggggtacagcgacagtatgtgcagaagccacagctttgcctgttttcttccccacaaccagaatttgttttcaactgtagaaaggacggtactggtccagctnacaaagcactcagtgagttgcagatgcaaatgcactattcagtatcatatatgaaacagggaaagactganggaggtngcatgaagaggttaaatncaggaagatgaagaaagaaccnctttaaaagagatggagatttaaaccnaaaaataaaacatgccaccctagtgaggtcct

SEQ ID NO: 412856 - DNA, 600 bp, Homo Sapiens
  misc_feature (307)..(307): n is a, c, g, or t
tttgagatgttcatgggcaaattacccatcaaggtattgtgcttataggctaatatggacttactgagggaccttggccatggaaaatgggtctgcatggttctgcagaagaccctgaaaatgggtctggctgattctgcagagtgggcctaggagctacactgaagtgtgactttaggcctcccgttctgtaactttacctccagatcctttactgtatccctctcatatcatgatgccatattccttttgacctgaactccaggggctcaaaatctaacacccacctatgcagttccccattcanatcttccacctgtttccccactccatgccctgtgaatgaaacagatggctttcctgacctctaatcaaagcctacccatattgatctgttccttctagtccttagtatgtgctacctcttcttttctgtgccgaagtggtgagtagccaatagttatttcctctaccagtggtattttactaggcaattattggaaatagaatgctgccacccggtagtgataaatctaacacttctcgtagaagatataggtggattaagttactccctggggcaatatggattaagtcctg

SEQ ID NO: 412857 - DNA, 576 bp, Homo Sapiens
  misc_feature (49)..(49): n is a, c, g, or t
  misc_feature (430)..(430): n is a, c, g, or t
  misc_feature (496)..(496): n is a, c, g, or t
  misc_feature (512)..(512): n is a, c, g, or t
  misc_feature (533)..(533): n is a, c, g, or t
ttgcatttgcggaagatcccatgcagaaacagatgtcacactgcagctncaaggacagtgaggagggagatggccatggtgccttggtccccagagtgacggcatgcggaggcgtcaatgcatctacctccagcacaccaggcatgatgtcaggtgcagcaggaggtacctggccctttgctacacagaccacatggtcttgctggggacaagacctagggaacagctcattttggtacagtgtggttggttcctggagagggagagggaatagcccacgggctaagcagcccactgcaggtacctaatgcaaccaggaaggtcagggaaggagatggccagccacgcggtggagtttgaacatcatgtagcagttagccaggtgaagaggagatgctggggagacagggagaggccactcctggctganggacctgtacctgcaaagactctcaagggaggaggacggctttctgtcactggttctgtgtgtganggaaatcagaaggtangcccggctgtccctgcctttnctgtggggcctgactgcatgtaccccttttcccaaacccttca

SEQ ID NO: 412858 - DNA, 599 bp, Homo Sapiens
ttccttggcctgttggcctactggtgtgaatattggaaattaatgggtttcattttcatttatttcccttgcctcttcttgaggaggattcgacaggcgatgaaatgggtaaaaaggcagtcagactaacaggaagaaggaaagataggctagctgtcaactgatgagcctgcctgaataatctcaaatgggcttttgaaaagaccttaacaaacactgttgcactcttgtcaaatatctttatctacaccctacttataagtaccaaaaagacagcatttgatgccaagtttgaagcagttaggtcctatgcaggctgtgtattaacatacagtgaattgcactttaaaattcagaaagctttcatttggtcacatcaaaaataaacactacaaaatatataaaaagttaaatgataggactctttttttggtattaagagtaaaatagaagaagatctaagaaatacaaatacttacattatttctccttatgacattaactttgggactagagccacaccacccccttccttcttcacttactgattggattgcatataattttcatgcccacataaatcctgattcatatatttg

SEQ ID NO: 412859 - DNA, 650 bp, Homo Sapiens
  misc_feature (498)..(498): n is a, c, g, or t
  misc_feature (518)..(518): n is a, c, g, or t
  misc_feature (545)..(545): n is a, c, g, or t
  misc_feature (552)..(552): n is a, c, g, or t
  misc_feature (561)..(561): n is a, c, g, or t
  misc_feature (570)..(570): n is a, c, g, or t
  misc_feature (584)..(584): n is a, c, g, or t
  misc_feature (604)..(604): n is a, c, g, or t
  misc_feature (606)..(606): n is a, c, g, or t
  misc_feature (613)..(613): n is a, c, g, or t
  misc_feature (624)..(624): n is a, c, g, or t
cccattcttgagttttacaatgtctcctatccaaacttcaaatttcattagagccggctacatttgttttagtgccagatacaggtatcaagtgatgacagacacttacgtgaggtatacaatcaattaaagactggaaattggggtattatcatgtaagacatttgagaggccaaaagtcatataattttaagatacttcatgatgttacagtaataattcatctatataacaattattttgacataagtggcatatcagaatttaacttatttacttagatcttaaggaatattagatgtattctcacatgaacactcaaatcatgctattattatcagtcactgggagaacagccaaagtaatcaggcagtctaaggcacatatagacccaataatttagaaattttcaccattatgaggtccctgtttttaataaatatgacaataacaggcgcttgaaatgggggcaaggtgaataagtatccagtcaattgnatacttttataaagtagtgnatttgagacataaactgagatcaaaangaatttncttactttnaaaaaaggngcttctatcttagnagattcttttaaatacttancntatattnaaaagtagtcnttacatacttaagaaatcaccgtaat

SEQ ID NO: 412860 - DNA, 380 bp, Homo Sapiens
  misc_feature (156)..(175): n is a, c, g, or t
  misc_feature (236)..(236): n is a, c, g, or t
  misc_feature (251)..(267): n is a, c, g, or t
ctgactacctagatgattttgcattaatataataaccattacctgccttagtgctttgtacagtattgtggcaaaatagctaagcctaaaggagttatacaaaaagcagaattccataatgaaacagaattttactttccacataaatagcatgcnnnnnnnnnnnnnnnnnnnnaagaccgaaatattatatcagaagtgtgttttctttcctgtatgatagttacttgcatggnacctggttggttcannnnnnnnnnnnnnnnnaataccatggagaaatagaagctttctaacttttctgtttgccaatacatctgttgtatccattgacttgtaattatgaaaacttgttttccacagggggcctgaggtgatga

SEQ ID NO: 412861 - DNA, 608 bp, Homo Sapiens
  misc_feature (133)..(133): n is a, c, g, or t
  misc_feature (140)..(156): n is a, c, g, or t
  misc_feature (191)..(191): n is a, c, g, or t
  misc_feature (193)..(193): n is a, c, g, or t
  misc_feature (196)..(196): n is a, c, g, or t
  misc_feature (233)..(233): n is a, c, g, or t
  misc_feature (249)..(249): n is a, c, g, or t
  misc_feature (287)..(287): n is a, c, g, or t
  misc_feature (305)..(305): n is a, c, g, or t
  misc_feature (311)..(311): n is a, c, g, or t
  misc_feature (314)..(314): n is a, c, g, or t
  misc_feature (374)..(374): n is a, c, g, or t
  misc_feature (377)..(377): n is a, c, g, or t
  misc_feature (419)..(419): n is a, c, g, or t
  misc_feature (439)..(439): n is a, c, g, or t
  misc_feature (503)..(503): n is a, c, g, or t
  misc_feature (519)..(519): n is a, c, g, or t
  misc_feature (521)..(521): n is a, c, g, or t
atttcatgccttctaccttaacctccttgagataacaacattcatttctgatgttttctgtgctacagggttcatgccttaactgggagttcaagctaattcttgatttctttctcaaaagacgatttaaatntaaggcnnnnnnnnnnnnnnnnntttccgatactgtaactaccttaactgtttgagtntntanaaatgagtatgttttatgagttaacaatgaatcatanaaggcaatttatgaanaactagaatgattctgtctagctgccttcagggatcanaaattcaaattaaacttntggcanacntttaaagaatgctagcatacaaaactgaatttaaaaaaacgcacacagttaacactcctnagnggagtttcaagaggaaatcatgaattaaaaaaacacacggcntgatacactgttgactgatnccaactgggtgtggtcagatcccaggtgcacccaaacctgcgggaatggcagaaatacagctgngcttggccatcacagntntgctagtatggcctgctgtaccttaataccagcaactgggaaaacggtgttagcactaaaactggtggtaaaagcccatacccactg

SEQ ID NO: 412862 - DNA, 237 bp, Homo Sapiens
gatatgaacaaagtttacagtgggaacaaaggtttaaaaaaaggttgtggttctctctctgtgatccagtgtgcacataaacctttctctgatctttcactgccatcctctggattatgtcttctgacctgtccattttgacccattaactggaaagttgaaaaactacattaactggaaagttgaaaaactacattactttggagaataaaaccgaaagttcgtgtataccttctt

SEQ ID NO: 412863 - DNA, 659 bp, Homo Sapiens
  misc_feature (556)..(556): n is a, c, g, or t
  misc_feature (606)..(606): n is a, c, g, or t
  misc_feature (619)..(619): n is a, c, g, or t
taagtaaacatttcatgaaaaatcccaaaagtatatggttattcctagatatccttgttctttgcgttacgagagcatgactaaaaatgactataaactatatgtataaacgaggttaaaaaggcagttgagtggctttttcacactgtaaagacagcctgttgatttaagaagcatacttactgcttcccgggctggatgctgtttttcatctttcttctttatctgaagatgttctaatttccttagatgtaagaggctcacctgcctcctccaccctcctcccaacaaattgctactggagcaggagagttgcagccacactttttgacatcctgtacttatatattctacccacaatcatcccagaggagaaaagtaaagcctattgcaattctagagttctcagatttatgatgatttttttacacaaattctgtattcattcataactagtatttccacaatggcctgtttaataattggcattggtttttactttgtgtgattttataattcaataagcaggttcatcaaattagtaattattgattgngaaattttcagaacagaaagctaaaatcagatctagcctctggtttcttncgcattttatcanggtttttcttattcttggaagaagtccttaaacacttcta

SEQ ID NO: 412864 - DNA, 669 bp, Homo Sapiens
ctgaaatattaataggtggcctataaggatctttcatgttttttgaatttcttaattaagtatcattttgtgttaagcttagaagactgagagctgaggagagtggacaaataaatgttggaattaggaaagttacatgaaggaaagtgggtctgagctgggttttgaaagtaggcagaatttagatcagtagagcaaagaggataggatagtctaaatgtggagaatgctgtatgaatggaggcagaatatgtattgaacatgaggaaccatcaagaggccggctcagtgagggaagaagggggcttctggaggcaccataggtagacataagacattaacagattattgaccaacaggcaggggaggttaatatgctccaatgaataaagagccatcatatattttataatggagactaacaggttgatgttgctgagaaaataatatggactttgcattcaatgatgtatcttttcacaaccatatctttgataaacacaatttgggttatactggcagggattaagtagtggaaaatctcttagaagaaatgtgcttctactgtcccccttaccaaaatagaacagatgagccctaatcagagctggtaactgtaatggtgattgctctgaggacccaatgtatataaacatcactatttgaata

SEQ ID NO: 412865 - DNA, 465 bp, Homo Sapiens
actaattcagttcatttaactttgcctccagcagctcaccataaaatttgggtccaaaaaggccaaggaatgtattatcagaaatgttagctatctctaggaaaatctgtcattcatttaagtgataatctttaaaattagcataactatattctggatcattttattacgagactatcatgtgatttcaatgtctgagtttattaccattgtacgagcaacatgctaagttacaactgtaactcccagggttggtttagcaggaaagtgatggaggcagacttaacagtgatgcgtgtagttcagcaaaggccaaatgacagcactgggagccataatggtggtttcctagtaattcaaacagaggaaagtagcaagaatacactgatctcagaataccaggcttgtcagactaaaaaatcctgtgctttaacagtcagtggttgacagcaacttatcctaagc

SEQ ID NO: 412866 - DNA, 656 bp, Homo Sapiens
gtagagatagggtctcactatgttgcctaagctcgtctcaaactcatgggctcaagtaatcctccttcctcagcctcccaaactgctaggatcacaggcgtgagctgctgcacctagccagaagatcaattttgatacacactatggtatcaattgaattttttatatatttgactgtggagaaaataatggactgaaaaccctagcgttcttactttgaaatccatcactgcatgtgcaatgaggtcataatcaagggtggtgaggataccgagtcaggtctattctggaaaatgcagtcctcctctgaaggagaaggtttgtctcaagaagtcagcatcaaccttttaatctttctataattgcatgctgtctaagttttttccatccaaccttccctctcttctttgcaagtgtaagactgtcatccaactctgatggctctcctggcctcctctaacttcccatttttcctcacaggtatttcccctcatacataacttgcatgtctaatcctgtcttggagtctgattctcatagacctcagcctaacaaaaatggcaccagaagtggtccaagaaaacaaacagtataatagagatataggaacggctcatataccaccaagtgggcaaaaagaacagtatcctgactgg

SEQ ID NO: 412867 - DNA, 565 bp, Homo Sapiens
atgtaattatttatgtaagcatcagcccctgtgctctgccccactactgcacgtttttaagaagaggagtgactgatcaaattcatagtttagaaagatcaatctgacaaagcagtatgacaaatggattatataaggacaatataaggtgtatagggatttatgaggcctttaagatatttcaggtgaaaaatgatgagaacctaaaaagtatcagtgtctataaaaaggagagaatgaacaccaaacttacacttgcaatataaagccaatctattttgacgacatcatagatgtagtgtccactaattggggatggtttaggttggattgggatgagaatggaatgatgcagttattgaggcaaaggaaaatatgtaagatgacagtcagttttctagcttggtagtcattctttttcactagtcattatggggtcaaatggagtgcctactgatccataagatgtgctaattgttaccatcgactacagttaacttgaattccatgtgtctagtctgcctctactcaacaattacaagagtttcttggagcttcagaattg

SEQ ID NO: 412868 - DNA, 638 bp, Homo Sapiens
tgtatgaaattttccaatttttaaaacagaggaggattgaaaaaacacatatatgtggcatgacgcaaaatgctgcaataaggattccatcctcaggctatcaaatgggcacctctgacctgttgtgtactgaatagttcagtatttcttgacaagatgatgtactcagaaggccctgaatgtcaaggtttagaacaaaacactcaccatgtgtgtactttaaaaaaaatcaaaacactgtgtgtgtgaagggtccattcctgagccctggttgctggaccccgttgagtcctccagcttttctccctgtttctctgctctatcacatttccttcaaatgcccccaaaatgcagtgacactgactaaaatttaatacacaaagcatcggaatttgcaggggggagggatgttgcaaagagtatagaccgataggatgggtagacaagacattcgtaaagaagaaactgagccctctagagacctcaattatcataaccgcttccagcatgctccctagaaacatgtgtgaccttgaaaacacctgccaaactctcagcctcagtttcctcccctatcactttgtgagtcagggtctgtccatctgcccaggtttcctgtgagaataatggggacgttg

SEQ ID NO: 412869 - DNA, 643 bp, Homo Sapiens
  misc_feature (356)..(356): n is a, c, g, or t
  misc_feature (428)..(428): n is a, c, g, or t
  misc_feature (584)..(584): n is a, c, g, or t
  misc_feature (613)..(613): n is a, c, g, or t
tatcccctctgttttatgtatattcttattgtcaacgagtttctcatacaaaatgaggcattcattaataaaatgattactagagttttataaaaactgctgaatcattacaaacaactactaaatggacaggttgtgttttttccttttgtctttaaggagaggatcagtatctacttcctcgatgttcagggccctccttgggccctggtgcaggcaggttcttgggcggggctatcggttgttttacgtgtttttggtttttagatggttattatcttaattcattgcatataaaaaatacacaatacacattctctgtctttctctcacacccacccatgcacacccacatntacacagaagtgcaagagtgcatccaattcccagcataatatggtgagtcaaagcccatttttttcctctgngctctgggtattacagccaaagttgaattttgggggcttgagatcactgagaattacctcccattgttaaaattacataaatgcaggattgagtacaaagtggcattcagtacattgttggctttctgatcttctaccagattgggcagccacatntccaggtcaccatggcttgtggcctctanctgggccattctgcttgtgggccctcccca

SEQ ID NO: 412870 - DNA, 671 bp, Homo Sapiens
  misc_feature (153)..(153): n is a, c, g, or t
  misc_feature (582)..(582): n is a, c, g, or t
  misc_feature (611)..(611): n is a, c, g, or t
  misc_feature (624)..(624): n is a, c, g, or t
  misc_feature (643)..(643): n is a, c, g, or t
  misc_feature (653)..(653): n is a, c, g, or t
ggttaccctgctgtgtgctgaaagccaccctggtatctgcttgtttctctcttttgcacttgatgaaatattcacaggtggttacagtctcagtcaccactgttttcagtatcaagcttggtgctgaacaattgctcagtaaatgtccatcanatgaacagtgggtacctacttgggaaaacataataaaatgtatttgtcctatcacctaactttatttacaaaggaattttaaatagaatcataaagcgtcagaataggaaagaaaccatgaagtcaccagaggaagtggtggtaactgtttcccagtgaaaatccccaaataggtttatgtgggcaaatgagaaggaaccttggaaagattccactggaaggcattttgatttcccagagtgggctggcccctgtaatgcaaacacagatctgatcatgagctctgagccgagcagacttgctctttttgaacctactcctgctaggattcttgggcccttcaaggggcactccagactagggtaacaggggtttctaccactacagaagtgtggaatattatgggaatactataaagtgactctggtnccttcaaccccttcacttccgcttacctnttcatcactctgnccccattgctgacttcttntgggtctgangaagctcttcttctgact

SEQ ID NO: 412871 - DNA, 436 bp, Homo Sapiens
  misc_feature (43)..(43): n is a, c, g, or t
  misc_feature (57)..(57): n is a, c, g, or t
  misc_feature (62)..(62): n is a, c, g, or t
  misc_feature (97)..(97): n is a, c, g, or t
  misc_feature (107)..(107): n is a, c, g, or t
  misc_feature (116)..(116): n is a, c, g, or t
  misc_feature (127)..(127): n is a, c, g, or t
  misc_feature (131)..(131): n is a, c, g, or t
  misc_feature (144)..(144): n is a, c, g, or t
  misc_feature (177)..(177): n is a, c, g, or t
  misc_feature (183)..(183): n is a, c, g, or t
  misc_feature (188)..(188): n is a, c, g, or t
  misc_feature (202)..(202): n is a, c, g, or t
  misc_feature (214)..(214): n is a, c, g, or t
  misc_feature (224)..(224): n is a, c, g, or t
  misc_feature (229)..(229): n is a, c, g, or t
  misc_feature (238)..(238): n is a, c, g, or t
  misc_feature (241)..(241): n is a, c, g, or t
  misc_feature (256)..(256): n is a, c, g, or t
  misc_feature (260)..(260): n is a, c, g, or t
  misc_feature (275)..(275): n is a, c, g, or t
  misc_feature (305)..(305): n is a, c, g, or t
  misc_feature (395)..(395): n is a, c, g, or t
cccaaaccactcatcatttattttctagctttgggatggagcntaaaggacagcctntatgngccttgattttgctataagtcaagaaggaatgatncccaactcanactcagggngagaattaaangcantaaatcacaaagngagaaaattcttcttctttcttccttccctgtnacttgngcctntcccctcagggagnggagccatcagngctgaaaggnggtanaggcagcanagngacctgatatttttnactntaccttgatggacanaatgggactgatagcttctccatgtgaaanaagctacagacactacattgacaggcagctggagttggaatagggcatgaggcctccatcaccacagattctaagcaaatgaaagatgtntacagagggagagcacaaagatatttaaaaaccatactgta

SEQ ID NO: 412872 - DNA, 347 bp, Homo Sapiens
  misc_feature (20)..(20): n is a, c, g, or t
taataagattagatttgatnggttagtttaataagatttctttgtatagactggtggacttgacctatttagtctcttggttataggctgtatctgccatcataaaaatgtatgtctcagtggggaagatgtggtgagagaattgggttgatcatcacaaatctgtcaccatttgcaggataaaaaccagctaactaaccaacaatagaaacccatgatgtgctacaaagggtagagcccacaggcactatgaaattgtaaaggatcctacttgaaaagaggagtgaaggtacatttgtgatttcatattatgttcagttatctgtgaactgaacttctttattgat

SEQ ID NO: 412873 - DNA, 672 bp, Homo Sapiens
  misc_feature (42)..(42): n is a, c, g, or t
  misc_feature (103)..(103): n is a, c, g, or t
  misc_feature (111)..(112): n is a, c, g, or t
  misc_feature (319)..(319): n is a, c, g, or t
  misc_feature (402)..(402): n is a, c, g, or t
  misc_feature (520)..(520): n is a, c, g, or t
  misc_feature (539)..(539): n is a, c, g, or t
  misc_feature (565)..(565): n is a, c, g, or t
  misc_feature (574)..(574): n is a, c, g, or t
  misc_feature (604)..(604): n is a, c, g, or t
  misc_feature (612)..(612): n is a, c, g, or t
  misc_feature (622)..(622): n is a, c, g, or t
  misc_feature (636)..(636): n is a, c, g, or t
  misc_feature (644)..(644): n is a, c, g, or t
  misc_feature (659)..(659): n is a, c, g, or t
tccttggcctgttggcctactggtacttaagctatttccctngaaagtaatactctcttcctaccttttaaaaccctacctatttttcatgaccacaaatggnaccacctnncatgttgtcttcccaatctcctgcaaccacttactttgaacataaggtgcacctattttctatgacttccttggcctttatctcttgctaccaattcttctgagcaaggcttgtgttttcccagtttgattgtcagccctttcagacaaagaccatgccaccactctcaacagagtgttacaacccttggctcctggggaccatgantttcagtgaagagcaacattcatgtttgggcaggtggacgtgttcaggctgccaagtgttcattttatggtctctaaaatggngtgctaatgtttcaaggacagctctgaaacagctagggtaaagtggaggagagcggggagcagtccagcctcgactagaactctaagtggcatgtcgaggggctgctctcaagaaganaacagcttctttggtctgngcattccttttgggaccacggtaaanattgtttangatgagtttgggaatttcaggttgcctganacactgtntgagaacctncttatacttgggtnctgacagnaagtgctgaagcggnaaaaacatttcat

SEQ ID NO: 412874 - DNA, 679 bp, Homo Sapiens
  misc_feature (616)..(616): n is a, c, g, or t
  misc_feature (627)..(627): n is a, c, g, or t
gcctgttggcctactggagaattataagtgcaagtgcagtaggaaatggtcaccctggactttttactgaatcctaaatccaggcttctcagaggagaccattcatacccattcaatccagaatcagagattggcaaggaaagaagggcaccagtggtctccaggcccacctcgctccctgggcaatgcctctgagagacgggaaggtgacattgtcacagtaagagctgcgtggaatcacaagaacctgattgcatcagtgaccagcaaaccctcaggggttccctgtaaaccccaggctgaaggaacgaggcgctcagggacccactgaggccacaaagagaaggcatggcttgccagccagaagaagagaaggaagggaggactcacctgaaccatggattctgccctgagggtctgtttgaaaacagctttttcggtctggctttatgtagatgacatttccatcatccctacgaaaaattgaatataccatttattactataactctattagataaatggggttattctgctggtacaaaaataattgcatggaaaatgtgccttttgagttctctgccataagaatttgcccttttatctctttctgagnttggctatagnatgcatcttcgtcatagcagaaatgataaattgggagacactttgaagattg

SEQ ID NO: 412875 - DNA, 676 bp, Homo Sapiens
  misc_feature (272)..(272): n is a, c, g, or t
  misc_feature (315)..(315): n is a, c, g, or t
gatgtaatcaaataatgtatctaatttccacattagaagtgtacattgtggagtgtcttgggaataaaagtgggtaatggaggagagagtcttaggtagaggtagaattgagttgtgttctcagagttcttgagctttgtattttaatacatattatatataccgtgtgagcattttttattttagaaatgaaaaacttaaattattttattagtctcttagaatcagtttcctgaaatggtaaggataacatgaattccagaggatttggntttttagctgtgtggtcactgattatcagaacttgtgagatanatcattgggtatgtcctcgtaccatatcccttaaattatagacctagtgaagttcattgcttctgagttgaagtagtttagaatatgtatcatttgctaatctgataagcaaaatggtttttaataataataaccgtaatctattttataattattcctgtcatatttacttttcagattgtaactggtttgcttacatctaagcaacttgtacactaaattttaaattaataggacacagtaatgaaatgataggaggttggagggaaaaagcaatttctctctaaaatgatagtaatgtaaatgccttttaagtagacattggtgataattggggtatagaaaggtcacattttacaag

SEQ ID NO: 412876 - DNA, 644 bp, Homo Sapiens
  misc_feature (484)..(484): n is a, c, g, or t
  misc_feature (499)..(499): n is a, c, g, or t
  misc_feature (521)..(521): n is a, c, g, or t
  misc_feature (586)..(586): n is a, c, g, or t
  misc_feature (594)..(594): n is a, c, g, or t
gataaatgacatttatatctagactttgagttttccaattatttgtaaaatggaattctgtagagccatcctaagatgtggtagtcatttagaaataactgtagtcacagcttccaagggtcttttgatgaagaatagtcttgtgtaagtacgaatgttgtgcattttattcagcagcttttgtcagatgatgtttaaggattcattgtatctttgcagccgattagggacagttatctcatgtttaggttgaagacagcttggggatggggtgctgttttttctagattcacatgtttttaaaaagaatgtttactgtcaacatgggcatgtatatttgacctgcattcaaacagctgaacgttattttaatagagaataatcaggccactcctcactatgggagaataattgggaagtatgcatacagctagcattggtaagtactaatggcaatcttgcttcggtttacttctattggtgnttttaatgcttttgncaatcctttttattcctgctgnatattgaggctggtttgcatctttggcttaactacctataatgccggtttattaaaataaaatgnattatttnctggacatatgtaagacaggcagggaatacattacagacaagttaatggg

SEQ ID NO: 412877 - DNA, 584 bp, Homo Sapiens
  misc_feature (37)..(37): n is a, c, g, or t
ccctttttaggaaatccacacttttcattattattgntattatactctcatccgaagtttatagctcaagagtttgaattctagcttttctggggttaaaggtctaaaatgaaaattaatttttttggaagaggtggcgaagagacaatacaggggaagagaggggtagcttattttaagcaaaccaagaaatttgggagaaaaatcacagagggaaaaagaacttggtgggggagggaatagatgtctgccgaccatattcacagctgccgcactcagtttacattggtgtaatttaaaggcatatatatagccgccgttgctcctctctgtaataccccaggactgtaaatctataaccactgcaatgatttagtgattaaaaacatgataacatattgtgtaactgcaaaccacagaacccctgccaactctctctctctaagataaaggggaaaaaaatacagaaaatgtgttgcttgcagccatcttcctaaacccaaaagattttaataaaagaacctatacagcagacgaattggaaaggggtgagtgaattctgtgtgaagccagcaaagggagag

SEQ ID NO: 412878 - DNA, 643 bp, Homo Sapiens
  misc_feature (505)..(505): n is a, c, g, or t
  misc_feature (520)..(520): n is a, c, g, or t
accataaacaagtagagactaaaacatagactttaatgcatttatgaggccatacagtaagtaggccaggccctgtgtgacagttggtgacaaaaccatgaataagggatgatccttgcccttgaagaattctgtctagttgtagcagttctgagctctgagaacgtgatgaaagcaattaaatatctgcattgtcgtgagctttgagttccccttggagcccatctagaagtttcaggagtggtgaatgagtaccgaattttgacaactacatgagagaagaatgaatgaagtgcaatctgagattcaagcaactttgaaatcattttaaacatttggtgggggaatgacttatccatctgttgatttatctagtcatttctaaatctaatgcctatactctgtttccagagttcactttcaaaaatacagcattaatcatgtcaccccatgttttaaatttcccatggacatacaccatcagagagcctgaagacagttcctncccacccagcactgnccctgccagtgcctgccacatcattgaggcctgggtaccaacccacctgccggagtccagacacattgtcagggatctgaggattcacccgcctgctaccaccactggtgtctgtgcacttct

SEQ ID NO: 412879 - DNA, 668 bp, Homo Sapiens
  misc_feature (144)..(167): n is a, c, g, or t
  misc_feature (456)..(456): n is a, c, g, or t
  misc_feature (568)..(568): n is a, c, g, or t
  misc_feature (624)..(624): n is a, c, g, or t
tttgccaaaataaaaagtctggatggagtcttcccgcagagaagaaataaaaagagtgcttgaattgttggatggttctgaaggcttctgaatttgcaaacgaattttagaactatttgcagaggtctacttgctgccagtcannnnnnnnnnnnnnnnnnnnnnnngttttatgtcctgctatctccatcatgcctctgttactatgaagactttctgcctgtgtaagtaagtgagagtgtgcattccttaatgtttgaatcaagacacacgtctgcatgcatttctaatctaagaagcctatagcagttactacaactatcaattagtcagcaatagctgagaacttcaacgcctctgaaggaacaaaggtggaaagacaggcagatactccagcatctggatcatgcaacttgctggctacaaataatggcaccttctctggcttttatctgngtttaagtcctcaaatctatgtaacgttatgggttattaatgtatccagccacataattagatatggagcatctaagacatatatggttcttggcattattgggaataaaanccttaagctgaactaaaaggaattgcctgctgacaaaaagaagttatcggatatgngactacgtccatttaatcaactccactagaactggaattactat

SEQ ID NO: 412880 - DNA, 700 bp, Homo Sapiens
  misc_feature (423)..(423): n is a, c, g, or t
  misc_feature (513)..(513): n is a, c, g, or t
  misc_feature (535)..(535): n is a, c, g, or t
  misc_feature (629)..(629): n is a, c, g, or t
  misc_feature (633)..(633): n is a, c, g, or t
  misc_feature (687)..(687): n is a, c, g, or t
gtgtattggattttgcagtattagctgtggcatgagagttgatagaacttttttttctgacaattagctactttcttatttggaaaattaagattatagaagttacagtgcatacttcgactgctgactgccttgttctttgaaactgaaaaacactccagttatttccacatgtatcaaagtaagcacctataataaaagctttattaaaacaaaaggaatatgaggcaaagtattgtttatcaaaggttttgaaatttttctgtataactaagtaatatttcattgaaatcatccttctgcaaaattttgtccaaggttagtattttctctttcattcttcagcccttctggtattatttattctttaactttctgatgagtcttctgacatctacatttatcaaaaatgaacagtatcgnttttataggctactcttatccaattctctaaatatttaaagacaaaattataactaccatacttatcaatttaaatttcctggggacctnccacaaactcttttccttatgnatagctactatcagaattttgacttttcaaaaagcatacataaaacatctttttaatattgggtattcatatacaattggggtaacctctcatncctnacaaagatcttcccaattctagagagatgcaagatttggggactcactggtaanttttgcaatctca

SEQ ID NO: 412881 - DNA, 665 bp, Homo Sapiens
  misc_feature (92)..(101): n is a, c, g, or t
ttgggcactgctggcctactgggtcttaaatttgttaagctaaatatatgttggttctttttattttggaatcctttaagcatcttaaacannnnnnnnnngaagagaagttacaaataacatttctatcaggtagtacttgtatgaaaccacctttcttattctataattttgatttttcaattttatatacttaatatactcactgtcttactatcagaaagttattttgaccaagatttttattatcttcatagattcagaaagagatgctaattctgtaccaatgtcttcctggttactattctcttccctctaatatatactggccatttgtaaaaccattgtgttgttgggatcacttagttatactatacgcagatagagcatctcaactctgtcatagtgttcgctgaacagttttcaagtgtcatgcacctttggctgctaattgtcctgacgtgcactcttccgagttggtaaaggcacagtgtgttcatgccagacttctaagagaaacaccagcctcttaaatcagaagcctacacacaacccccttaacaatccaaagaagcttgatggtgtgcaaagaagcatcctgccagccttgtcattggtctggtctatgctaatcctgctggggtggctaaaagatggagggaaga

SEQ ID NO: 412882 - DNA, 640 bp, Homo Sapiens
  misc_feature (341)..(355): n is a, c, g, or t
  misc_feature (581)..(581): n is a, c, g, or t
tttgaagagaatctgccaccataaagttctgacattggtgtaattattctttgtgaatattgtctggaagatgtggtgttggtaactatgcttgctatctcaagtaatacattgttaaccagtgattgatttatgtaactatgaaaaacactttaaaaaaagtagaaatcaatgtttaattatgcccagacatgtcattattgaactttgtattaagagattgtttaagcgtgattttaagagggcctaacccatcttacagattaactgtacaagttcatatattaaaatcaaacgtctctcattttgcctgccctcatcccctaagatataaaagattnnnnnnnnnnnnnnnactttggagctcattcttcgcaatatttaaaattgtagctctttgcatgtaatttagaacattctgacccatactcaactgctgggagactctgttatttatatttaaaatgttgacagtgagttaggaatttggagcagaaaccatatctaagtctaagtgaaaagacttcctaagtattggtagaactaactgtagtggggctgagtcattattacagtactgnacaggctgcgtactatctgtagaattgataatggtaataccaggttaaagtgttagccg

SEQ ID NO: 412883 - DNA, 648 bp, Homo Sapiens
  misc_feature (585)..(585): n is a, c, g, or t
taaccaggggttgcccccaactcaagtgatgctgtaacacaaccgacactccaacttcatcaaatttccagaatgccaacccagggtgcagtttgctttgagagaaggagaaaatgtccccatcacccctctcccaccacctcctgcctccacccatgaacctggacctctggccacccaaaccagatttactgaaccaatgagagacagagaagctagaacagggaacagagacctggctgggactgccagaaggaggctcagcgtggtcttcttgctgcacgaaggcggaaacaaaggcaggagccacgggaggcatctatcttacatctgaggcattctacagtttcaaaacctgataggttagtttgcttccatgaaaaagggggaagcttcccttccagaagtcctgagagagtggaagaagagaatgtgaatgggaagaggaagagaaggctccctgcagagagtgggtggaagggatttcagcagaggggcatcttctcaagaaatgctggttgaggaaaacattgacaaaaaagcatcaatatccataagcccaagctcctcggatgggtggagcanttcagcacctgagataaaaatgttatcatcaggagaaaagaaaatgatctacccctgtgttgc

SEQ ID NO: 412884 - DNA, 672 bp, Homo Sapiens
  misc_feature (567)..(567): n is a, c, g, or t
  misc_feature (576)..(576): n is a, c, g, or t
  misc_feature (648)..(648): n is a, c, g, or t
  misc_feature (661)..(661): n is a, c, g, or t
ttcccttttttttgccagtggatgagaaggaacggagtatctgcaactaacatcaatatttattcagaaaagtgcttcttatctttttaagcacttggaaacacaccaagttctgttccattacatggcattctaatgggtaattcttcatgatgtaatactttagcttacatcattagtgtaagatcaatttatttggttatcacaccgattaaataaaggaagtttccttctccagcagttgaaatgtttctgcaactcttatataaaaaagagttacaggtctttggcctaagctgtctatcttcttgaaaagtacagaaccagagaatacacttttccagcctaagccatccattttcttgataaatccaaaccacagaatgtgctttccctggacttaacactttggctatcttttctgagaatggaaaatttttcttactaaaacatctgcctcactccccacatcacattctctgccatctgacctgcctttgctatgctctgataactgccagaagtctacagcaatctcattttaagagtgaccctaccactaactgngaataaagntttctcacctgggttttgccagtcttactctagaacctttccttcccttgacacatatttcttattccatangtagtgggatatnaaataggcaaa

SEQ ID NO: 412885 - DNA, 651 bp, Homo Sapiens
  misc_feature (411)..(411): n is a, c, g, or t
aatcgctgcagtaacttcagggctgtttgctctgctgctgacctcactgtacgcaaattagcccttcttctgaggctcaactatgctatgtccattaccctagttactgctcacaatctacataatgtgacagatcatgaaacatgaactagtaaaatgtgtatttataaagtaggcaataccgttattgttttcagaggaaatgacagtatgtctagagagctcatgaaaaatagaagagatagaaaatgggtattccaaagcctagaccttttaaaagcaattatcaatcataagctataatgaaaagaatgtgattcacaacagtggttcttctgtgagccagatgggtgtggattccattcagaagtagtgcatagtccccaagcttgcacctcacttgagccctgnatccccaaatcattctgtttttgtccagagtttcacaaggttgattttgaaaatgttcccaccagctctggctatgggaatcacagtgggaaataaacgccatagcatcttccccatcatccccgtctcctcctgagacaaaacacattttcccctaaatgctaactgggctgctgccttcagcatagacaatcttttacatttttaccacaaagtagttttaactgcctggccacatac

SEQ ID NO: 412886 - DNA, 673 bp, Homo Sapiens
  misc_feature (599)..(599): n is a, c, g, or t
  misc_feature (606)..(606): n is a, c, g, or t
ttggattcctcggcctgttggcctactggagttcctctgatgcatataatattcttagtagcagtgactcaatatagcaaagattttcaaacaggtagaggggctgagaactctggcctagtgatattactctgagttcattaagttctcatttacaactatgccttagcataaactatcgcagttaaataattagaatttcagatcggtcaaaatactttggcatctgaaagcaggagcttagaaccagaattccttctcagacataatcccagcatccccagcccagtgcttttgctctttcgcaccaggccagataactctgtgatcatggacgtatgcaggaatttgtaaatatttgatggatgatagtcagattgccaaatggcagaaaggtttctggttttgcagtttgaaaaggattatagagcggggaacaaggtaaatatctgaaggtctgcatgatagtacttcttttcctattgctttggagttattttttatacctctttacacaatgtgtgagactaccaaatttacattgcactgttccaggtgacttgtgcagttgacaaactatgacccacatagcaacctangcaagangagcctatataattcattcttattcctatttgctattcaacttgttctggtttataactgcaagtgg

SEQ ID NO: 412887 - DNA, 434 bp, Homo Sapiens
  misc_feature (67)..(67): n is a, c, g, or t
tcatggatgacaacaaggctaggtactcaagaagtactcaacaaaaaactaaataaagccaaacctnacagaaacagctatccctgtaagcacaggattctgatcctatcagaatctggctacactctagctgatgaggttgcaggtgcaagacctggccagctccactgtccccagcttccagcttggcctgtgagccacgacctcaagatcatatcatgttctctgccctcagcagttagtggaaagtacatattcgaaaacgaggccagaagccaaataattttgtccaactttaaaatatttaccccttaggatccttcccccaaaatccagtttctggtctaaggcacaaggttaaacacagccttgccctaatttgcagagccaatgtgagtgaaacactctgagtttaagaaaggcagaagtccttt

SEQ ID NO: 412888 - DNA, 310 bp, Homo Sapiens
ttatttcaaaactgtgctattcttttaagaggagtggaggtgaccccttcgatgctgctgctatcgggagacaaggtgccataccaatacgtgggcttgactaatcccaggccaccatgggagagagcaaagcagggctgccaggagttcagttgcatcaagggcgtagagcacgcgggggctgggctcggaatagcagtacttttccactttgatgccttagaactctcacttctcatctccacagaccagactcagtaaaatctcaggccactagagaatggaaggcggtgaaacaggatttaaatgc

SEQ ID NO: 412889 - DNA, 351 bp, Homo Sapiens
  misc_feature (165)..(165): n is a, c, g, or t
  misc_feature (221)..(221): n is a, c, g, or t
  misc_feature (302)..(302): n is a, c, g, or t
  misc_feature (313)..(313): n is a, c, g, or t
gagctgaaaaatcattttatttccccttccaatgtacaatttctaagacatttgaattatcgatgttgaagtttcattgagaatgagctgagtgtcctgctttcggcctgaaaacaaagcctcagccacagtcttcgtctcaccctctttctctctgtttatttncttttaaaaagtttctcccatttctttgttctttaacaaagagttgtgtgcatctnctaagctccaagtgctgcactggcttccagcagacaatggcatccgtggccctgacctcatggcgtgactgaacggagggnctcggccaggnatgtgagggacgccagaaagagggcattggtgggcaat

SEQ ID NO: 412890 - DNA, 372 bp, Homo Sapiens
  misc_feature (30)..(30): n is a, c, g, or t
  misc_feature (35)..(35): n is a, c, g, or t
  misc_feature (159)..(159): n is a, c, g, or t
aaaacaacggaaatttattatctgacagtnctggnggccagaaatctgaaatcagtatcactgggccatgttggcagggctgtgctccctccagaggctgtaggggagaatccattccttgcctctcccaacctctggtgggtgctggcatcgcttgtnttgcggctgcgtcgctctagtcttcaaggctagcatcttcgaatcattctctactctgtcttcacatggccttttcctctgtgtgtgtaggtggaaatttttttgaacttgccaacactaaaagaaacacttttaaagaccagtgttcacttgaaaatggctctctgtcaaattccaagaaaaccagttcactgaaagtcagttctacaaaag

SEQ ID NO: 412891 - DNA, 315 bp, Homo Sapiens
ctggaagaattcacggccttgtcgtcagtgacgatgcagccgcccacgtacgaatcgacctgtcgcaggcaatggcacatctcgtcgctgtcgttcccgaccgcgacgaagtacgccttcgggccggccagaacgtcgccaccgcgccgcgctcgatcgacacgcccttgaacagcccgttgaccacgtgacgcttgccgttcgcatagcgctgcacgaccgcgatgcgttgagcgtgacgcccgctacttccggcacgaccttgccgtcgcggaacggcacccacacttcctggaagaacttctcgtggccgcg

SEQ ID NO: 412892 - DNA, 421 bp, Homo Sapiens
  misc_feature (50)..(50): n is a, c, g, or t
gccttgtacaacaatccaaatcaggccaaaagtaggaggagagctatttncttcctgcctgctttccctctgagcatacaaatttggaggccccataacaactgctcccctcttcatgctggcagagcctaattatttctcaacttatccctaaacaaagaatagatcaccaaaatacttcagatgaaacgtagagcagacaggtcctgggctgggaatccaggagactgatgcaacaaatgcaacaaagagcattaagagactagcaatgtccatgaagaagggaacctaataagtaagctgccacagctcaagtcctcctggccaaagccaggtcatgtccctctataaccagccagtgagaagggaatgaggtccctaaacgggttcggggggattcatgatttctctctgggggact

SEQ ID NO: 412893 - DNA, 391 bp, Homo Sapiens
  misc_feature (267)..(267): n is a, c, g, or t
  misc_feature (304)..(304): n is a, c, g, or t
gtgagctcttcagacccacttgggcctgccctggccagacacgcgggatcccgccctgccagcaggagggcctaacatttacctttaagcttattacgaagggtgtgcgggaactctgcggagaatcaggagctccagcaaatatgatccctgttggcagattcagcgttttgatccccagcccttggatggataagctgcaaaacccacaggccacggcatctaggctcggccagcgtgggcgtcctggggcgattcagtggcttncgggttctctgacccacttgcccaccaacagcagctncagagagatcggcagcacgtgccccagatggtcgtgctttggagtcatgagcgctggggtcccagtgatgctcactgaacagcaact

SEQ ID NO: 412894 - DNA, 387 bp, Homo Sapiens
  misc_feature (74)..(74): n is a, c, g, or t
  misc_feature (172)..(172): n is a, c, g, or t
catggagaaacaaaagttacttgaaaatgctattctctaagtgaaaaagagaaatactgcaagtagctgttttnctttttgccacccagattaaaccagttttcatacattacaagagttcttggatgaattcatttattacaatgtattttgatgtggacatatgtcatgncttgacacttatttgcacatcatgtcattatgccatgaattgctcacttctgttgatggtgacaatgacagcagttacactcgtttctagcattatgttggttgctctgtgtataccatagctaatcctcccaataatcctgcgaagttgagatccatatcctcatttgtagaagagggaactgatgctccgaggggttatgtgctttgggccga

SEQ ID NO: 412895 - DNA, 378 bp, Homo Sapiens
  misc_feature (13)..(13): n is a, c, g, or t
  misc_feature (80)..(80): n is a, c, g, or t
cctcgtgcaaggnagacattaactcttgttctgaagcacaaatcagaacagatatttttcacgtgttgagcatgtatgtnccccacctgggtactgggcagcatttctgattgaacactgccacagtgcttgatgcaggtttacgtgagccccaatttcacgagggggtcccctctcctccctccctcggatgtctcatgtctccatctgcactcttagtggcctggtctttctctgagacaattccaggctggttcccctgctttgctaccccccacaacctctcccacaccattgcccagctcccaagagctcactgtggctgaggaaagggggtgccttgacacggagttcccttcccatgagggtccccagaca

SEQ ID NO: 412896 - DNA, 329 bp, Homo Sapiens
  misc_feature (161)..(161): n is a, c, g, or t
  misc_feature (210)..(210): n is a, c, g, or t
  misc_feature (302)..(302): n is a, c, g, or t
gaatcgaaagtttcctttattaagttattttaccaagtgagcttgtatcaaggctgagctttcagcgcagtatttatgagctgcatttctttcaaaacattctatcaaactgacatttccttaaatcagactgaccttccacaatatggaataaatcaggnggtttaactctactgactaaagagtgttttccccaaccctgagccaggnggctttgtccgtgtcgctcagctgccggctcactgaagggtggtcatggaagagcaggccgccgtcgggggttgactgattacaatcatttnttgtgatgcatcgcaaattaaagggac

SEQ ID NO: 412897 - DNA, 419 bp, Homo Sapiens
  misc_feature (27)..(27): n is a, c, g, or t
aatgatgctctgtagactacctaagtnaatcggcactgtgaatctttttgataagcagggtttaagcagcaatttcaccattgcacttggttgcctgctgcagtgtcagtttctactacctagcaaccagcattcattactacactccaacaaaatccttagggagtcatattcagtctgagtggaagaaagtctatttatgcattcctatgaattcaacagcaatagcgtgtctcatgtattgagcatgtgagggaagaaaaagaccgtaatataaatagagggataaataatatcactaaggcatttgggagccttgagactgctgattaattcctatttctcatgtttattttttgttaggaagacaattgtcacttttattattggccacggaaacatgtattactctatatccc

SEQ ID NO: 412898 - DNA, 384 bp, Homo Sapiens
caagcttggcacgaggattctttccaaaagaagaacagactcactcagcagcagcttttctgctctctctggaaaggaggtattgagtcgtcttagattaactcatggtcttcctgacaggattgggtatggattttaacagattacagtcatcttggatgccttccagaaactgattctaaactgcttttatttttcataggaaacacccaacaacactgcatagaaattagatactcctaaagtggatttgaaccagtaaaattagctgtaaatatcgaagcataactaaggtttagtgtcttctctttgtaggtaatttgtgcagccctaacatttctcccctctggagcttagctgtacaattctaatcactactgtggg

SEQ ID NO: 412899 - DNA, 335 bp, Homo Sapiens
  misc_feature (85)..(85): n is a, c, g, or t
  misc_feature (90)..(90): n is a, c, g, or t
  misc_feature (113)..(113): n is a, c, g, or t
  misc_feature (173)..(173): n is a, c, g, or t
  misc_feature (201)..(202): n is a, c, g, or t
  misc_feature (215)..(215): n is a, c, g, or t
  misc_feature (237)..(237): n is a, c, g, or t
  misc_feature (258)..(258): n is a, c, g, or t
  misc_feature (266)..(266): n is a, c, g, or t
aatggtctgcatataccacacactaccactggcacttttacatattacctaacttgtttttctcaataaattttcaagataaggnttatnctccaaactgtacttatcaagangctcacaagcaatgagataaggtaggtcactcataatgatacagagtgtcagggatagancccaaatctaactccactcttctgaaannctcttgattatanccagggctggcttcggggacangagattggtttaattgcacanggccccangctgtaatgttctgctgttgccacttaaaattattaatttctgaatatgggggcttgcatatttatttt

SEQ ID NO: 412900 - DNA, 116 bp, Homo Sapiens
  misc_feature (36)..(36): n is a, c, g, or t
  misc_feature (94)..(94): n is a, c, g, or t
cacacctacctcaacatgctggaagaagcagaaaancgcgatcaccgccggctggccaagcagctcgacctgttccacatgcaggaagaggcgncgggcatggtgttctggcaccc

SEQ ID NO: 412901 - DNA, 318 bp, Homo Sapiens
  misc_feature (130)..(130): n is a, c, g, or t
  misc_feature (210)..(210): n is a, c, g, or t
ctctttttattgatacttaaaatacctttactaaaaaaatgaagccttccatttccattcccttatatttacatgaagataaaaatacttactaagtcgttgtatttgtccattctggcagtgctataangacatacctgagcgtgggtcatttctgaagaaaagaggtttaattggctcatggttttatgggctgtacaggcttctgtnctgggggaggcctcaggaaacttacaatcagcagaaggcaaagggaaagcaagcccatcttacatggcaggagcaagaggaagagagcaaagggggaggggttacaca

SEQ ID NO: 412902 - DNA, 352 bp, Homo Sapiens
gtaaaatggcaacctttatgtagttcactctactgtcacaagatggcaataactctttacctacaaattactctaaaacatttttcttccacttgtgaacttgctaaactgatgagtaaatactttatataacccgaagcttcaaatgtaaggccttttcatactttattactggcctgtccattacatactactgttttagaagccctaaatatggaatcgggaaaagccttggaagttttccatacgtatacgctaggttaaatgaaaaaaatactttacacggaaacaaggagccaataacttataaattggctctctaaccctaactggttacaagaaaggctccaaa

SEQ ID NO: 412903 - DNA, 321 bp, Homo Sapiens
ggggtagggaaatgggaaaacggagtcatctgtctacagaagcactcctgtggtgttttaagatgttgacacttaattctgacccagcagtgaggggcaagaaggacacttcgtcacccacgattactattcttgaggatctaacccctctattggcctggggggtggggagatgggagaagctcctttaaggcatccttaggacccttggttgttatgttttagggtgggggttgatgcctttgtctaaaatttcctcagctcaaaaccacatgccagtttctaggtgctctgtgtagaaggcgggtggataacaggagt

SEQ ID NO: 412904 - DNA, 355 bp, Homo Sapiens
  misc_feature (71)..(71): n is a, c, g, or t
gggaataggaagaatacagatatggatattcaagagacaatcatagggctgtggaaaatggtccttatgtnctgagtccacttctgcttgggaccacagaggagtcgctgttccaggtggagtcatccagtcagttgtcagaaatgtaaaagtctgaaaagacatcttaaaaagccaatcttaagttccacaatagtgatgttatttacaggagcaattggcaatgttgcaaatcttgtgatctctggaacaatggctattaatcatttcactacacctgtatcttagcagaattcaggcccctttcataatcttaaattgtggccttgtattagttttataaaggcagtttagt

SEQ ID NO: 412905 - DNA, 336 bp, Homo Sapiens
  misc_feature (235)..(235): n is a, c, g, or t
  misc_feature (290)..(290): n is a, c, g, or t
  misc_feature (308)..(308): n is a, c, g, or t
aagacaggctgtttaatcaatttcagagaatgcagatctttaaatattttagcagggctgtataaacaggaggaatatttgtttattcatacacttatttcttaagaaacatcagtcaccccacagtgggctaagcactaatgcaggactatttactcagcacaacttacatgtaaaatgaatttccttgtgaaattctccttaaaacaccaccccttcactagctcccattggnatactgtgccagcttcccaaatatcaactaggagagccccaggcctgttccacgncaggcatctcagactttntaatcacctgggggatattgctaaaatg

SEQ ID NO: 412906 - DNA, 116 bp, Homo Sapiens
  misc_feature (85)..(85): n is a, c, g, or t
tgagcattcgcgcccggccgggaaagttccctttaagcaaacatatggacgcatggttcagtccctgctccgtgatcacggccgnctcagctgcacagaatcctgatattcctgct

SEQ ID NO: 412907 - DNA, 306 bp, Homo Sapiens
  misc_feature (163)..(163): n is a, c, g, or t
atagagacagggttttgccatgttgcccagccttgtctcgaactcctgagctcaagccattcagccacctcagcttcctaaaatactggaattacaggagtgagccacctcacctgggctgacttcacattcttgtaccaagtagctattagttacaggcttnttaaagctatgcttagtctgtagttttatattctatttgttaaatgcaaggcccattggcagtggtaaggatttcaaagacctaactttctgttttacacaactttatttgtagagtctatttccttactaaaagatgtcatg

SEQ ID NO: 412908 - DNA, 102 bp, Homo Sapiens
  misc_feature (43)..(43): n is a, c, g, or t
ccagaaggctacctagagtgtccatacagattgcaagaacagntttaaactacactgagatggaagagttatcaggcaaggtccgtcggggcacatttcact

SEQ ID NO: 412909 - DNA, 309 bp, Homo Sapiens
  misc_feature (12)..(12): n is a, c, g, or t
  misc_feature (102)..(102): n is a, c, g, or t
  misc_feature (183)..(183): n is a, c, g, or t
  misc_feature (242)..(242): n is a, c, g, or t
  misc_feature (295)..(295): n is a, c, g, or t
tcgacgacatcnaggtgttcatcccccatcaggccaacggcgatatcaacgagctactcaccaagggcctggagctcaagccggaaactgttgttgcccaanatattcaggatgccggcaacacgtcggccgcctcgattccgctggcgatgtacaccctgctgagcagcggcgaggccaaanccggcagcctggcgctactcctgggctacggcgcgggcctggcctacgccgcccaggtnatccggctgccgggatagcggctcagccggccatactggccagcttgcgcttntcctcgtagaaccg

SEQ ID NO: 412910 - DNA, 234 bp, Homo Sapiens
  misc_feature (175)..(175): n is a, c, g, or t
tgggccccacccggtggagcgtgggggtccctgcgggagggacgcaggcgcctcgggttcagactccaacccgcgcttggtgtttctggcggtccctgggccgctcagctattggacattgtgttctgagagggcccatccggacttctttccctccctgccacgccgctctccnttttgggggttatccgggatcccggaacgaattgatcaaagggactaatccccgggcca

SEQ ID NO: 412911 - DNA, 377 bp, Homo Sapiens
  misc_feature (349)..(349): n is a, c, g, or t
ataaaatggacgccgacaaccattacgccgcgattttgcatttgtgcgcgtttaaggttatccaacccttcaacatcaaaccatttacgtacgcgactgtcgggccagaaccatgccatgccggtttctaccagcgccatgccgagtgaacgaaagttttcggcaatcatcttctcgcgttcttccgcagaatgctgcgggaaacaaagttccaggtttttacgggcgatagattcacgacgtttcaggaatggtcgcgccattgcggcaatacgcgtgccgagaaagcagagaacaggataaggaagcttgtacccaaagccagagtacaccaagcccaaaccatgtnagccagtagcgaggatgtaggaactcgc

SEQ ID NO: 412912 - DNA, 291 bp, Homo Sapiens
  misc_feature (40)..(40): n is a, c, g, or t
  misc_feature (72)..(72): n is a, c, g, or t
  misc_feature (96)..(96): n is a, c, g, or t
  misc_feature (111)..(172): n is a, c, g, or t
cagatttattttagaaactaattacactgtgacatctggnctgcacagatcaatcagcaatattagaaagangtgttgaaagagaatgagattttnggtcagaagattaannnnnnnnnnnnnnnnnnnnnnnnnnnnnnnnnnnnnnnnnnnnnnnnnnnnnnnnnnnnnngaagtgtatgcacataatacctttcataatagaatagttgtgttcccattgtttccatgcctttctatatccactctccttgacttttcagttcctctcattaagaatagagactattt

SEQ ID NO: 412913 - DNA, 161 bp, Homo Sapiens
  misc_feature (43)..(43): n is a, c, g, or t
  misc_feature (118)..(118): n is a, c, g, or t
  misc_feature (123)..(123): n is a, c, g, or t
  misc_feature (126)..(126): n is a, c, g, or t
  misc_feature (144)..(144): n is a, c, g, or t
aagagatacttgaccatatttataaaacaatgagatggaattnctgcttctggtatggctgacaatcttacagtagataacaactataagctttgaacaaacttataaaaagcaactnctggnggnacaccaaattagtacccncacaagaaagcaccttt

SEQ ID NO: 412914 - DNA, 432 bp, Homo Sapiens
tggactagatgcacttctgccgctggccagctggggtgcctttgcagctttgtggccctttctgatcaccagtgaactggggaatctggggcagtggaaacagaattgtgttggggatcagaacatgcagtctcttttatcagctgtcacaggacgggctgagcgacccagcgggaggcttcacttctgcagctgggtttcctcacatgtaaggcagtttgcctagctggcacctggtcacagctgcgcctcacagaccaactcctctgggttagctgctgtgtggatcaatagctaaggaacattctgaggccttgcctaggctcctcaaaagatggcagaaatcaactgccttgtcgtctacaggcagggaatgccattctggcctcaatgagctataaagtttgttcttattttcgacattctccaatt

SEQ ID NO: 412915 - DNA, 344 bp, Homo Sapiens
aagctgtggcaataaaaagtcattttcagaatgcacttatgaactattatgcctagcttgaatgcagtgaaatagcagaaatcccttgaggtgataatccaggtgggttcaacactggacccttgaaaattcaggttttattcacgttgcaaaaggacttctctgcatcgctttctaaaatttcattcacgggcactgatttaggatcccagttactgcataagtcaagaccacttggaacaaaattcttttgctagatgctctgcatcttatccctaccctgacccaacaggacttcagttatagcattttaggatgggcagccaggcttatcacccattcca

SEQ ID NO: 412916 - DNA, 426 bp, Homo Sapiens
  misc_feature (162)..(162): n is a, c, g, or t
  misc_feature (168)..(168): n is a, c, g, or t
  misc_feature (185)..(185): n is a, c, g, or t
  misc_feature (192)..(192): n is a, c, g, or t
  misc_feature (200)..(239): n is a, c, g, or t
  misc_feature (311)..(311): n is a, c, g, or t
agaattgctatttctctacttacattacctatctactcttgaatattgtctggttttttttccattagctcttaacacgatagtcatatttattttacatttctggtctgataatttcaccattcctgccatatttgattctggttcttatgcttatttttncttgtngtttcaaactctctttngcttttnagaatacnnnnnnnnnnnnnnnnnnnnnnnnnnnnnnnnnnnnnnnntaaaagctggatgtgatgtactgggtgaaaaaacctgcattcaacagtactttagtgatgcatttgtaagtngtgtgtggagaagtgtactatagtcctgtgcttagttctgttttttagtgagcttgtgcctctgtgttgtgacttaacaaatccttttcagtctcctctgctttggtgagacaga

SEQ ID NO: 412917 - DNA, 343 bp, Homo Sapiens
  misc_feature (16)..(16): n is a, c, g, or t
  misc_feature (92)..(92): n is a, c, g, or t
  misc_feature (150)..(150): n is a, c, g, or t
  misc_feature (171)..(171): n is a, c, g, or t
  misc_feature (251)..(251): n is a, c, g, or t
gccgctcgagatcganttgcgcggctacgatctcgcgtcgctcgaaaaggccggcaagaagctgacgagcctgatgaacgcttcgtcggttnttgccgacgtgaagtcgaccgtcgagggcggttatccggaaatccagatccgtttcgntcaggatcgcgccgccggctncggcctgaccacgaagcaggtggccgaccaggtcgtcaacaaggtcaagggttcggtggcgacgcgctacagcttccgcnaccgcaagatcgacgtgctcgttcgcgcccaggaaaatcagcgcggctcggtcgacgacatccgcaacctgatcgtgggattcgcgcagtgc

SEQ ID NO: 412918 - DNA, 346 bp, Homo Sapiens
  misc_feature (132)..(132): n is a, c, g, or t
  misc_feature (144)..(144): n is a, c, g, or t
  misc_feature (155)..(156): n is a, c, g, or t
  misc_feature (159)..(171): n is a, c, g, or t
  misc_feature (207)..(207): n is a, c, g, or t
  misc_feature (244)..(244): n is a, c, g, or t
  misc_feature (253)..(253): n is a, c, g, or t
acagagtttctcactgatttaagttaaatattctagtctttagagaatgggtcacatgactcaggaattgccaacagcctgttttcacccagcggcttcctggtttaccccctttaggagatgattaatggnaattgagaatgngtctcataaannacnnnnnnnnnnnnnaaagcagcacagttttaggaacttttcgagacagancagctcagccagcctagacttccacttgtcctccctnctcccactnctgccaattaacaccagtcaccagaggcaagaaccgtctagatcagaagcgaccccaggaaccaggtttcagcacccctgatctttcatcaat

SEQ ID NO: 412919 - DNA, 116 bp, Homo Sapiens
  misc_feature (29)..(29): n is a, c, g, or t
acaaccaatagtcactaatcataaaattncctgtgtttgcaaacatttacttggttggcatattatagaagacctgtttcaaggttattcctatgaaaatgttactctcatccttt

SEQ ID NO: 412920 - DNA, 364 bp, Homo Sapiens
tggtggagcctcaacccgcctctggggcctgtgctggtgccgtggggccgccagctgcttggcacttagtggggtgggtatcagtgcgtctaagtccctggtgtgctggtccttacagcgctgcccgtagaaggctcatgggaaccacaggcatcatttaaaattttccaggagctgcgtttaaaaagtaaaaagaaacacagatgaaactattttaataatatacttgagcccaagacatgaagaatattagaatttaaacacgtgataccttatttcacttgctcagtagctacgtgtggttggcacaatggtgcagatctaagaaatagaattttgaaaatgcagagtggtttttttattt

SEQ ID NO: 412921 - DNA, 265 bp, Homo Sapiens
  misc_feature (43)..(43): n is a, c, g, or t
  misc_feature (78)..(78): n is a, c, g, or t
  misc_feature (134)..(134): n is a, c, g, or t
  misc_feature (174)..(174): n is a, c, g, or t
  misc_feature (249)..(249): n is a, c, g, or t
cagcagaaataaaatttatttctaatactcaatattatctgcnccttgaagctatgcaaagactaataagtgcataancttcttgagcagtgttacataaatgtaaaacatggttcataggtatgtttatggcnacagacacattaattgatagtcttcagaaagacttaagtncctttacaaattaaacggggacatgtgtgctgtttctgctcatttgctgagtatgcaactggaaaacccaatctnctattctggcatttaa

SEQ ID NO: 412922 - DNA, 182 bp, Homo Sapiens
  misc_feature (107)..(107): n is a, c, g, or t
  misc_feature (120)..(120): n is a, c, g, or t
gcagaaaaggttaaaagacaggtttctctgcagcacgtttatatagataggtacatacatagcagagaagtcaaggctggggaatctggcggtgggtagcgacagtnctgtggcagaggnacactggaatgtgcttatgtaacttttcaccagagacagattttaaagcagcagttgtcact

SEQ ID NO: 412923 - DNA, 400 bp, Homo Sapiens
  misc_feature (285)..(285): n is a, c, g, or t
  misc_feature (330)..(330): n is a, c, g, or t
  misc_feature (363)..(363): n is a, c, g, or t
aagagaccatgaaagcagtcaggggagggctcaggtcgtcaggcgtggaggacagggggcctggctcaggcatccggggcccacgtggctgggaggccaccattgggtgggtgtcagctattatggccgtggcaggctagggactctcactgaacgcctcctcccaacaccaacctctcaggcttgggagaactgcccccactgtgccgctggagtcagcgctcccacaggcattcgggggaggccagggctgaaggggaccccagggcccacctccaccttttncaaggcgaggcaagggtctggaatgctcccaggtggatgtggttnggcgacacctgggggtctgtctcataagctcangtttggaaaataagaccatccactagctgttagcccc

SEQ ID NO: 412924 - DNA, 345 bp, Homo Sapiens
  misc_feature (207)..(207): n is a, c, g, or t
  misc_feature (239)..(239): n is a, c, g, or t
  misc_feature (250)..(250): n is a, c, g, or t
  misc_feature (256)..(272): n is a, c, g, or t
attgtgccaaataattgacaccattctcctttgcaccattagtagcaattcgagatggggcaaagacactgcaactaaactgctgaatgtaacaaccagattactccaaactgatccattgtactattttgcggggagggcttagacttttctctttaaaagtgaattttaacgaaatagccttgcagatgggcttatctataagtnctacaggttggttaaaatttgtggtgggcctntagttagccgnttacannnnnnnnnnnnnnnnnataggctgtgaagctcaggaaaagggtaggcaggtaaaatttgtttttaatgagttgatactctttagaaacc

SEQ ID NO: 412925 - DNA, 298 bp, Homo Sapiens
  misc_feature (83)..(83): n is a, c, g, or t
aggttttcaatgtcagaagttattagagccactggcaaagctcatggttgaatatgacatttttctgcttttccctctaagangtttttgagaatgttaatgttgaagtatgcaggctggacctaccagcaagtttaacacgttaattaggttaaaaagaatattaaaaggcaataattaaatatttcaattattttgtaattataatggtatcaaataagatgcaaaagaagttgatgcttattggtgcttaagagaattacaatactggttttatgagcatctttttctctgcaac

SEQ ID NO: 412926 - DNA, 293 bp, Homo Sapiens
  misc_feature (118)..(118): n is a, c, g, or t
  misc_feature (188)..(189): n is a, c, g, or t
  misc_feature (203)..(203): n is a, c, g, or t
  misc_feature (248)..(248): n is a, c, g, or t
atgcaaaggctgaaatacacctgaactcatccttctggggcaaccagaagtcatagaagggtttcgggtagggaagtggtgactgggtttccagcagcacccagttgagaggcaggtncagagtaggcaccttggagatacttgttaaatctcagtccagccaggtgttggtcatcacccagggcagnnagcagcaagagatnggcaggagggagggcatggcgcagactgttcatggaggacttctnagagcacaaggaggaggtctcaagctgggtcacaagcctgaagca

SEQ ID NO: 412927 - DNA, 183 bp, Homo Sapiens
acaactcccaaatcttggtaacttcaaacatcagaagttgtttttctcactcatgcttcatctgcagggaggtgtggggtgctctgtttcccatcaaacttgccctaagactaaggttaatgggggttgcaatacctcgagtatcaccaagcagggaacagagggagaagaatgttagagagt

SEQ ID NO: 412928 - DNA, 377 bp, Homo Sapiens
  misc_feature (116)..(116): n is a, c, g, or t
  misc_feature (221)..(221): n is a, c, g, or t
  misc_feature (244)..(244): n is a, c, g, or t
  misc_feature (330)..(330): n is a, c, g, or t
  misc_feature (350)..(350): n is a, c, g, or t
gggaaaatggtttcactctataaaccacttcttgtttagggatatgtcaaaaacacagttaaaattcattctcttctttacagtgaaaattccagaacagatggaacacatctttncccacttcagagcgcgaggggggacgaggagaagcatcctctgtgtctcaggaagctgcgtcattagttcggggtcaggataaaggggaaggatgaacgcatttntgtgtcaggctgcagggcacccncacgtggagagagtctgcaggccgtcagtcaatcacaccgatgtgaaagcgaggatggaaggggagggaaattacatttacctgtntcctggctgcagccacgatnggtgcttggggaaagtcaggaggactc

SEQ ID NO: 412929 - DNA, 300 bp, Homo Sapiens
  misc_feature (189)..(189): n is a, c, g, or t
  misc_feature (224)..(224): n is a, c, g, or t
gatggggcatcattaacttgttgttattggggcagctgggtgacatcgtgtgttccttggccctctgggtgcacctcctgcccatctgggccagcgtggctgcagaggcgtggatgcttaggcagcctggggagggacaggtgggaacactcgtgctccgcaggcgcccacaggcccagtgcccacggntgctgagaggtgccctcacggaggccccagccccntgccccttggaggagcagcagagcccagtggacagggagagaactctcaagagtatggcccacagaggatgccagc

SEQ ID NO: 412930 - DNA, 157 bp, Homo Sapiens
ttcctacaggagctagccagctggttctctatccctgggaaattcccaagtcaccaccgatagctttgccctaggtcatgaggacagaggggttcccaacagtttggtggtcagcagattgtcagaggggtgaagggagcagagcagcattcccacc

SEQ ID NO: 412931 - DNA, 288 bp, Homo Sapiens
  misc_feature (23)..(23): n is a, c, g, or t
  misc_feature (73)..(73): n is a, c, g, or t
tcatctactacatcagtggagancccagcgaaagggtcacctgagaaaagttacctgtttaatcaagcaagtntggggtaccccaggttcgctacagccagctccttaatgaaagctcaccagggccagctgtctctcgtgcggctgcagcgtgtttaatttgcaggtggactccgcgggctgctcctccacaggtgaagtgaaaacagtggaggtcctgggtgaaaatgcgggttctgttcatcctcagaaggtggtaagtgggcagactagagcgtgaagccagag

SEQ ID NO: 412932 - DNA, 288 bp, Homo Sapiens
  misc_feature (111)..(171): n is a, c, g, or t
  misc_feature (185)..(185): n is a, c, g, or t
  misc_feature (212)..(212): n is a, c, g, or t
accatgacagcccgttattttaattaccaggaaaagagttattcccattttgaaaataagtttgacataaaaattaaactgtaagaaactagggaaaatttttttggcaannnnnnnnnnnnnnnnnnnnnnnnnnnnnnnnnnnnnnnnnnnnnnnnnnnnnnnnnnnnntttataaaattggntattcaaataattaataaataggtttncgaaagtcagacttaccagacaaaaagaaaggttcattaaatcaatgaaatacccatttctgttttcattttcatc

SEQ ID NO: 412933 - DNA, 478 bp, Homo Sapiens
  misc_feature (94)..(94): n is a, c, g, or t
  misc_feature (219)..(219): n is a, c, g, or t
  misc_feature (335)..(335): n is a, c, g, or t
  misc_feature (379)..(379): n is a, c, g, or t
  misc_feature (404)..(404): n is a, c, g, or t
  misc_feature (406)..(406): n is a, c, g, or t
  misc_feature (467)..(467): n is a, c, g, or t
gaagagattcaggagactcagagctgatcgtgggcaagggtaactttctagtgaggggtgaaggcaattgacaatgagcaatgttgatattttnaggtctcagagcacgtggaatggatgcacttcttgaaattaaaaaaacagttccctaaacaaaggaagacgacggaaatttggggtgattcttagcagcatgtctggccggcagccttgcaagtnatttatggggcccgtccccttccccctcctgcgctggctgaagtcaaagccatatgccctgtttctgtgcagaggcctgagctctacgaagcaggagcttcacccagacggggctngcggggagggaaccaagctgggccaccgggcttttcatgccagntcctaaaagtgggcatttgtttccngnttttttagaatcaagtcagtccaaaccttatgggtgtatttcccatttaaaaatgtcattnggattttcgca

SEQ ID NO: 412934 - DNA, 171 bp, Homo Sapiens
  misc_feature (35)..(35): n is a, c, g, or t
  misc_feature (48)..(48): n is a, c, g, or t
  misc_feature (75)..(75): n is a, c, g, or t
  misc_feature (116)..(116): n is a, c, g, or t
  misc_feature (123)..(123): n is a, c, g, or t
gtctaactactacagaaagatgacatccaaatctnttccaaaagagantaatgaaggaggaaaggagtacaaaantaggagagaaaagagcaagaaagaggtgaagaaggaaaaangattaancgagcaagttacaagaggcatttccatacttagaaacccattttttaa

SEQ ID NO: 412935 - DNA, 141 bp, Homo Sapiens
  misc_feature (65)..(66): n is a, c, g, or t
  misc_feature (83)..(83): n is a, c, g, or t
tcaggctgcaggtaacagaagacttgactggaaatgccttcaacagagaagggatgtatcatttnntagaaggagaaattctncagctgggacggttccagggttggtttctttggaaactcagaacttcatcgaggctct

SEQ ID NO: 412936 - DNA, 116 bp, Homo Sapiens
taacacttgcttagaaaacccagccctttcccccagtctcctgcgctcttatacattgatactttacaactatttttgctgtacctctcagtctatcctggataatgggaccactt

SEQ ID NO: 412937 - DNA, 333 bp, Homo Sapiens
  misc_feature (52)..(52): n is a, c, g, or t
  misc_feature (171)..(171): n is a, c, g, or t
  misc_feature (200)..(200): n is a, c, g, or t
  misc_feature (208)..(208): n is a, c, g, or t
  misc_feature (285)..(285): n is a, c, g, or t
  misc_feature (307)..(307): n is a, c, g, or t
aaaatattatttttaattttaatggaggaaaggacccaaaaaggtgaaagtncctagggcccaggaaagtcataatgcagctctgctggttggggtgggtagggtcaggatagggtaggaaatggtgattggaactctgcttcccctggctccctgccaaagccccctgtncgtggtgcccagggcagggggagactgtntccctgtnacagccctacccaggccatacttccttcagctgggatgtctggttgtgggggtggggtggtatctcttggggttttnttttgccactatatctcctggntgagtgctcagttaaatgtttgctga

SEQ ID NO: 412938 - DNA, 351 bp, Homo Sapiens
  misc_feature (93)..(94): n is a, c, g, or t
  misc_feature (144)..(144): n is a, c, g, or t
  misc_feature (159)..(159): n is a, c, g, or t
  misc_feature (263)..(263): n is a, c, g, or t
  misc_feature (267)..(267): n is a, c, g, or t
  misc_feature (269)..(269): n is a, c, g, or t
  misc_feature (280)..(280): n is a, c, g, or t
  misc_feature (282)..(282): n is a, c, g, or t
  misc_feature (287)..(287): n is a, c, g, or t
  misc_feature (303)..(303): n is a, c, g, or t
  misc_feature (315)..(315): n is a, c, g, or t
ctggtgggatattagcaagtaataagatcatggggtcccctgctccaccattcccaaaatccacagtgagccaaggtctcccaggcccttttnntggtctctctaatggaggcatttcaggcactgtggtcacaggagggaagngctgggggagaaagntcccctgcttgcttgatgtagaggcctccagctgggagggacggtccctgtcctctgactcgccagcagcccatccacaccacaggcacactcacctgctgctncccnanatttgctgggntnctctncagggtgaccaacttngaggtcccctantgtgagggtcaggggtaaggtcagtgagattatcct

SEQ ID NO: 412939 - DNA, 450 bp, Homo Sapiens
gcaataccgccaccctgcgaaaatacatactccgaagatgcccacttccgccggcatgcaactggatgctgtcggtcgcgccaatccctgtaccgaaccgcgtcccaatatgattggcttgtccaacgctctcgtcgtgtatcgaccgaccgctggtaccgcccgacgtcgtcgtcgcagtttccgatgcgatgctctgggtatcacccctctcggtggcgcgaccgaaactctcgttgctaccgacagagctgcccgagcgcgtcgagctgctccatccggacgtcgcggttgaaccgtgaatctatcgaagctgtggccggagttctgcgcgtcctcgagctgcatcgaagtcagcaggtggttgccgagcttctggtacgcgcggaccattgctggatacagtcatcgtcgagccatccgcagctgacggtttaatgcagagtttat

SEQ ID NO: 412940 - DNA, 121 bp, Homo Sapiens
  misc_feature (73)..(73): n is a, c, g, or t
attttaggctccagaacagctggaaagagcactacactgtccttggcctccctgctgggttgcacctttcctnttttgccccctgtgggtcataggtgcgggggcaaggggggccagcagt

SEQ ID NO: 412941 - DNA, 251 bp, Homo Sapiens
  misc_feature (46)..(46): n is a, c, g, or t
  misc_feature (57)..(57): n is a, c, g, or t
  misc_feature (74)..(74): n is a, c, g, or t
  misc_feature (85)..(85): n is a, c, g, or t
  misc_feature (100)..(100): n is a, c, g, or t
  misc_feature (106)..(106): n is a, c, g, or t
  misc_feature (133)..(133): n is a, c, g, or t
  misc_feature (141)..(141): n is a, c, g, or t
  misc_feature (209)..(209): n is a, c, g, or t
  misc_feature (222)..(222): n is a, c, g, or t
acaagagcaacataagtcaattttatttctattcactagcaatganctttccaaaantaaaatacacaaaacanttccatttganatagcatcaaacggnataaantacagtctgtgacttatgatggttcancttaacanttttccaactttacaatggtgcaaacgtgatgcagtcagtagaaaccatactttgagtacccataaanccattctgttttncactttcagtgtaatattcaataaattaa

SEQ ID NO: 412942 - DNA, 317 bp, Homo Sapiens
tgagcaccgcacccggccctgagacatggcttctgtttatgagtccctgttaagtgtttccttctgagaaactggatctgttagcttttttccctcagcctttgggggtaggtttgcatagacctgctcaccgcagcactgctgtttgtgagtctgcagtaggtgctccagaaattctcactgtgtgcgtgaaggctggggaagggaggaagggcatgggacgtggacagaaaggctcagggaccctgggggctcagcatgaggctgacctggacaagggtaggcataggccctggggagcaccagacagaggggcc

SEQ ID NO: 412943 - DNA, 271 bp, Homo Sapiens
  misc_feature (18)..(18): n is a, c, g, or t
  misc_feature (34)..(34): n is a, c, g, or t
  misc_feature (51)..(51): n is a, c, g, or t
  misc_feature (80)..(80): n is a, c, g, or t
  misc_feature (95)..(95): n is a, c, g, or t
  misc_feature (236)..(236): n is a, c, g, or t
  misc_feature (259)..(259): n is a, c, g, or t
ttggttttttttgggtcnttgctttttccccttnccttacggtgtttttgnagtgcaatgttttttccttcccctgtgcntatgttccctattcnagttttgggaagtgccccgtgacttactttggcggcttaacttttttaaactgccaccgaatttgctacggttttgggaccttccaatgttttaaaaagtgtgggaccctgctacatctacacttggttggcttaaatcancctctaacaatggtgggccctgnggaagcgccacc

SEQ ID NO: 412944 - DNA, 299 bp, Homo Sapiens
  misc_feature (274)..(274): n is a, c, g, or t
aattaaaaacactttattgctgaaaattgctaatgatcatctgagccttcagcgagttgtcattttttttgttgttggtgaatggtcttgccttgatattgatagctgctgactggtgggtgctaaaggttgaggtgggtataacattttattaaaataagacaaagaagtttgctgcatcagttcactctccctttcatgaaagatgtctctgtagcatgtggtgctgtttgatagcattttactcaaatagaacttctttcaaaactagagncaatcttctcaaaccctgccccctt

SEQ ID NO: 412945 - DNA, 353 bp, Homo Sapiens
  misc_feature (337)..(337): n is a, c, g, or t
ttttatttccgtctgaaattagggcttaatgatcaaatcattctgacttccaattttcagaaacatgttccatgtttattgtgataagcactagatattatagtctcatgtttttaatttatgaataacgtctgattcatttgattttgtatttacagaagatgtcagggctatctcattcagttattaataaatggatcagagtagtaagtcaagaataagtgcataatgtggtttaaattttaaaaaatactcagaatgaggtagtattttaatttttaattcatccacccaccttgctcttctctgttccataataggccttccctgtggacgntagccttatctggctt

SEQ ID NO: 412946 - DNA, 290 bp, Homo Sapiens
cgaaccagaaaatccagggcagggaatggttttaaaatataggctttatcatgatttaggtagagtaaggtcaacagaccaggagacgactgctcttgagaagaaagttttgttactttcccaagaaggtcccaagaagatgggggtgtcatatcacgcagggccccatggaggagctcaggagacggaaggagtaggaagaaaaaaatgggtgagaggctttattgcggtttctgtaggaaggaacaggtgaggtaggatgagcaggtttaggattgcctagtttgaat

SEQ ID NO: 412947 - DNA, 424 bp, Homo Sapiens
gaagggtgaacaagatgaagaagagctttatttagtgctagaacagctcagaggaggcccacagtgggtagctcctctctgtaggcaggtcatctgtccagtgctcagttctcagtggagaggaggccctggaaagggtggcttctctctgctggcaggttgtctctgcagctctcagtggagaaggtagctcttctctgcagccagccatcccattgtctccagctatcagcagagagtactcctctctgcagctggtcatcccaccacctctctgccctctttgtcctctggccatcctctgccctgctctggctgagcccagggcttttatggacctcagagaggaggaaagtggctgccaatttgtcccacggggacccagaagaggcaccataagtccctactacaatccacagatttg

SEQ ID NO: 412948 - DNA, 191 bp, Homo Sapiens
atgagcggctgtgcctggccttatcctctctttgctggaatcctcccatatctgggacctggcattgcaatgacttacttatacctctgttttcccttactaaaaccctggagctccttgaagggtcgagacctttgtatttattcaatctttggcattccctaggtaacctatttacaaaatggaaaggg

SEQ ID NO: 412949 - DNA, 463 bp, Homo Sapiens
  misc_feature (299)..(299): n is a, c, g, or t
  misc_feature (394)..(394): n is a, c, g, or t
  misc_feature (423)..(423): n is a, c, g, or t
  misc_feature (441)..(441): n is a, c, g, or t
  misc_feature (449)..(449): n is a, c, g, or t
gaggctggctttaaaaacagtaacagcaaagtgataaatagcattggtttttaaattagataaatttgctttcaaattcagcgtctacttatagctatgtgaacttaagtcatttaacctctgaaagaacagaatgatgccatgtactttataggagatgcaatgaatgttagataagaatatatgaaaagtgcctagaacaatgtctcacatagtgtaagtgctcacgaagagaatgtcttatctaggaaccagacgctcctataactgagaagttactctctcagatactgccaggncaacaggagcctgttttctctctgttatctttacttcatagattaggtgaatcatactgcattggtaattctagcccttgaaagctgaaatatgnactactgcccggaaataatgattttcccntatcaaggggtaacatanccccggcncataattaaaatca

SEQ ID NO: 412950 - DNA, 326 bp, Homo Sapiens
ggcattctcttttctccctatctcaggacatatttacagatgcactggctgctttacagacatgctaaaagttcttgctgcagttgatcaaagttggaatgtctgaggaaattactcaacttagacagcctggaattatatctagccaaatagagcactctactttcaacatgtgttaaagtaatattttagctatcctggatgtaagttgagagaacatttgtttgcatcacattctgtgaacacttgagtcaaacatagtatgttgaataccaggttttagtatctgtgacagttcatttttttaactattcaatttacaaaag

SEQ ID NO: 412951 - DNA, 373 bp, Homo Sapiens
  misc_feature (87)..(87): n is a, c, g, or t
  misc_feature (115)..(115): n is a, c, g, or t
  misc_feature (125)..(125): n is a, c, g, or t
  misc_feature (132)..(132): n is a, c, g, or t
  misc_feature (138)..(138): n is a, c, g, or t
  misc_feature (170)..(170): n is a, c, g, or t
  misc_feature (293)..(293): n is a, c, g, or t
  misc_feature (310)..(310): n is a, c, g, or t
cttcataattttccactgtcactaccattactacgaattgtgaccatcattttaaaaccttctaccagccccactggtcgacactgngtcagactcagtgcaatacccagcatcnagcaaagtanccaacancccgtnagacatgtagtgcatgtgtgcataaatttagntatgagacaaagaataacatttctcgaaaactgggatcgcggttagctgcatgctcaaaatgtaacgtggatcctggttcctccaataaacttgtccaacgtgcggggattgggaagttggtngtttgttaccttcgagntggggaagctgctctactttcagtgcaacaatcgagcagaggaggtggcaggggaagagctgc

SEQ ID NO: 412952 - DNA, 114 bp, Homo Sapiens
  misc_feature (28)..(28): n is a, c, g, or t
  misc_feature (53)..(53): n is a, c, g, or t
  misc_feature (57)..(57): n is a, c, g, or t
  misc_feature (71)..(71): n is a, c, g, or t
catgcttagtgtttcaaaacctaaaagntgtcacgtcttatggccagagcatntatnctcagggggatgcnctcaacacacaccaacaccaaacgtcaggggccaaaagctgtt

SEQ ID NO: 412953 - DNA, 180 bp, Homo Sapiens
aatttataaagaaaagaattttaattgatttaaagttcaggatggggggggagggtttaggaaatttaaaatcatggcagaaagggaagcaaaaaagtgcttttttacatggttggaggaaggagaagtatgagaactgcgctaagggggaagccctttataaaaccatcagaccttgcg

SEQ ID NO: 412954 - DNA, 491 bp, Homo Sapiens
aagaaatggggtctaacagccgggtgccaatttacttttgacctctgggtatctgcacccctttactacttagggagatgctctgccggtaggtttggtggaagacggaaagcaaggggccaggctctctagaacggcctgtatcatgagacgccacaagagaattaagccccacacaaagtgattcaagcaactactttcacatcaaccaaaggatgatgaaaagactgtactatcctagagaacacaggagagaaggtaccgattgccttagacaacaaggttgcatttcctcactttggccagcctcacaccccagccctgaactttcaatctggacacttggtcagtggtgagagaagtggccgtgagtctagctgtggcaccctgaagagttttacagcacgggggccagaaacacattatctttcacatacatgacagaggtaaaatatttttttatcttaaaatttggtcccgaaaaggccaca

SEQ ID NO: 412955 - DNA, 369 bp, Homo Sapiens
  misc_feature (191)..(191): n is a, c, g, or t
  misc_feature (256)..(256): n is a, c, g, or t
  misc_feature (308)..(308): n is a, c, g, or t
  misc_feature (341)..(341): n is a, c, g, or t
attctggtggttcccgcagctacgtgacgatcgatggcggtctgtacgccatcatcaacgccgaactgaccgcacaagtcgatcctgtgttttatcaggatgttcacaacgacaagctgggcaaatgggggaacggccatgccgcggccttcatcgcgcgcgctccgatgaccgacggcctcccgcatgtnatcggacgctatcaaccagagacagttgtcgatctcgcgacgctgctcgatcgagagggagtttngtattgatcgcgacgtttggcccaggaagtggacggttatttcggacgtcantcctggatatgcgacaggactcgatggtgggtnatggtttgtacgcattgtgttctggtgt

SEQ ID NO: 412956 - DNA, 189 bp, Homo Sapiens
  misc_feature (72)..(72): n is a, c, g, or t
  misc_feature (82)..(82): n is a, c, g, or t
  misc_feature (109)..(124): n is a, c, g, or t
  misc_feature (178)..(178): n is a, c, g, or t
ttctggggaggcccagggagcttttactcatggcggaaggcaaattgggagtaggcgtcttacattgcaggngcaggacccngagagggggggtgaggtgctacacacnnnnnnnnnnnnnnnnagatggagttttgctctttttgtccagacccgagtgcaatagtgcaatcttggntcatcacaacc

SEQ ID NO: 412957 - DNA, 203 bp, Homo Sapiens
  misc_feature (61)..(61): n is a, c, g, or t
  misc_feature (74)..(74): n is a, c, g, or t
  misc_feature (94)..(94): n is a, c, g, or t
  misc_feature (108)..(108): n is a, c, g, or t
  misc_feature (129)..(129): n is a, c, g, or t
gtgtttaaagctatttgcagatttattagagaaacaaatacaaatatgcatttctacaganctgttttaatttnccaaaatgagcttaaaacgngttccacagttttnccttgtttatatatctatggnaacccaagtattggcttctgtaccactttgtaatgagacaattgcctttccattgcaattataaaaaactattt

SEQ ID NO: 412958 - DNA, 323 bp, Homo Sapiens
  misc_feature (31)..(31): n is a, c, g, or t
  misc_feature (44)..(44): n is a, c, g, or t
  misc_feature (50)..(50): n is a, c, g, or t
  misc_feature (55)..(55): n is a, c, g, or t
  misc_feature (66)..(66): n is a, c, g, or t
  misc_feature (75)..(75): n is a, c, g, or t
  misc_feature (93)..(93): n is a, c, g, or t
  misc_feature (100)..(101): n is a, c, g, or t
  misc_feature (103)..(103): n is a, c, g, or t
  misc_feature (114)..(114): n is a, c, g, or t
  misc_feature (213)..(213): n is a, c, g, or t
  misc_feature (239)..(239): n is a, c, g, or t
atgtcatgaggctgacaacaaattagcattncatgcactgaagntttagnctccngaaaaggaagnctacaagangagaaattggtcatagcnttttccnntnggtagttcaancatgtaaatagttgaaatgtaaatattgaactgttagttaaatagttgaaatacaattatcaaataattaatttatgtagtcaaaatagatggactagnttcactcaatcattgaacaagtattngctgagtagctcccatagtatgtaaagagccattctaggtgtgcgataaacaatgaacagaacacagaactgccctcatagggt

SEQ ID NO: 412959 - DNA, 397 bp, Homo Sapiens
  misc_feature (84)..(84): n is a, c, g, or t
  misc_feature (205)..(205): n is a, c, g, or t
  misc_feature (287)..(287): n is a, c, g, or t
  misc_feature (326)..(326): n is a, c, g, or t
  misc_feature (345)..(345): n is a, c, g, or t
  misc_feature (378)..(378): n is a, c, g, or t
tgtgaaaaaaactgtgctacttacaatctatgaaagctggtgttatcccacttggcaggtaaggaaactgaggtcctgtgagtnaagtgacctcatgatcacacaacaggagatggcagggctgggattcaaacccgggagtgtctgctgccacatcccacactcccactgcctggctccaagtcccaggaagctcgagactgtnagttttctcccttgaaactcacctggagagagtccgggcacctgtgcctatgtggagggttccagccccagccaggcccctncgctgcccacaccctgggaggagaagcgggcctcccttncaggcttatctgctcactncccgcaattttcctgggcagagctggaggtctnagagatcttgggacttcaa

SEQ ID NO: 412960 - DNA, 130 bp, Homo Sapiens
caatgaacgccaaacgaacttgagaagtggttgctgaaaggcgctgatgtttccacgtgagatttctgggtcaccctcctggtgactcttgtgcctctgacttctatctgatcctaagtccctgtgcatt

SEQ ID NO: 412961 - DNA, 442 bp, Homo Sapiens
  misc_feature (337)..(337): n is a, c, g, or t
  misc_feature (397)..(397): n is a, c, g, or t
caacaagttgattttttttaggtctactattgattgaacattctccaatgggcaaggctcattgtcaaagcagggtgaacatgatcagattttcttctgcatcatcacacaagctgcgagtgttgctgcaaagacttctcagtactccttccctaacctcagtatgttaatagccattaatacttggcttaagcatcaccattctggccacagtctgagagattagtgatcaaagctcccttccctatcactaccaccacctactgataacaaagatttctgaatacttagtagtagtaaaatatttttcaagcacagagttacagctaatcctggntcacttgttctaaattcataagggagtatatcaagagcaaatgaagtaaatgattctttncctgcgtgtggggagtcaccatcattttatttcaaagggagttcc

SEQ ID NO: 412962 - DNA, 426 bp, Homo Sapiens
ctttctaaacttcagacaccacagacagatcttgatggattttgccatttctgcacaccattctaattttatatttaaaactactatgtgcttagtacttttaaagtcaactcactgtttgatgtaaatttattttaaaaaggaagcatatcactttggcaaatggaaaattagtatcactttctgcaactagaagactaccttaaaatgtaataaaaacagtgttattaaacactagctatgcagtatggccagtgaagagagcccaaagtctatcctttttttaattaaaaggtgtgataagtaagtaacgttaggtaagggtaaaagacacgtaaacaccaaattgagtctttctgcatgatgtgatcaaatgggttttgaggacttttcttgagtacttaccttaccatcctactctgggaa

SEQ ID NO: 412963 - DNA, 295 bp, Homo Sapiens
ttttgtaaagagtcacagcctacaaggtggcaatcctgatagctgggaagcatcctcccgcagagcacagaaacagaccttcaagggaggatagaacagggatttatgctgaacgggttggccaagtttatatatttaacaggttataggaggagctatgaatattcacaaagtgggggaggtcatgcacatgcaggctgaataaacatgtatgttacatacttatccatattcacttgtggggtggagactttaacatctaaaaagggatttacaattgaggccctgtagtcag

SEQ ID NO: 412964 - DNA, 213 bp, Homo Sapiens
  misc_feature (145)..(145): n is a, c, g, or t
  misc_feature (167)..(167): n is a, c, g, or t
  misc_feature (187)..(188): n is a, c, g, or t
ttctatcctaagggacccctctttctgacagaaagatacagacagaaaaattcataccacaaagtacaacatattcactacagcttaagactagcctcttgaatcctttttcttattaattaaaactgtacagaggagataaacngtgatttttatcattcctttanccagtttgcacaaacaaagnngctggaaacctgactgataagaagt

SEQ ID NO: 412965 - DNA, 336 bp, Homo Sapiens
  misc_feature (44)..(44): n is a, c, g, or t
  misc_feature (58)..(58): n is a, c, g, or t
  misc_feature (136)..(136): n is a, c, g, or t
  misc_feature (162)..(162): n is a, c, g, or t
  misc_feature (311)..(311): n is a, c, g, or t
accaagttctgttcctcttaattttcaagtgatagtttattttncttaagcttatgtncctatattacaatgctttttaactgattcatactcttgaatgaatagtaaaaattgcttttcaatgttaaatcacgantacatttaaacatgcatgtatttctnctattaaacacaatacttataataaaactggacgttaaatgaatattatatctaagaatgacctcttcctctgactatctccttttatgtcttgatgagacactgtactgaaaagatgtgcccataccttggggcatttgatcaagtgntctgaatgcatgttgctatagtgtg

SEQ ID NO: 412966 - DNA, 161 bp, Homo Sapiens
gtttcttttccatttaataatgtttgaacaatctttacagttcttggaaattttgacaaagatttaaaccacgttattggtacctttaataaatggtatttatgagaaataataacttacaggtgatcaggaccatatgagaaaacccagttttcttgatg

SEQ ID NO: 412967 - DNA, 354 bp, Homo Sapiens
  misc_feature (213)..(213): n is a, c, g, or t
  misc_feature (249)..(249): n is a, c, g, or t
  misc_feature (254)..(254): n is a, c, g, or t
  misc_feature (293)..(293): n is a, c, g, or t
  misc_feature (299)..(299): n is a, c, g, or t
  misc_feature (306)..(306): n is a, c, g, or t
tgattattccttccaggagcagcttttaaaagtgcacagcctgtgtagttggagagttctttggaattccaaagccccctgctctttattgaactaaggtttaactggtgttgttatgggctcatctctgtgtcaggtgtccagaattcagcagcaaataaaatgggcatagtcctgacccttaagagcttcaatatagtggaagatttggancaataaaaaaagacatcgtcgttccatgtaatgggnaacantgacaggagcagtagggggcatgatgagcgcagttaggntactgnccaaaancatttctagggtcaatgaaagcatcccaggtgcatgaaaataatattt

SEQ ID NO: 412968 - DNA, 107 bp, Homo Sapiens
  misc_feature (17)..(17): n is a, c, g, or t
  misc_feature (22)..(22): n is a, c, g, or t
aataacactgtcacgtncactnttgtaagtctccccacctcccagggccctaaatttcttgaatatccttcctacagcatttgatacatatgcaggcatacactccc

SEQ ID NO: 412969 - DNA, 325 bp, Homo Sapiens
  misc_feature (61)..(61): n is a, c, g, or t
  misc_feature (233)..(233): n is a, c, g, or t
  misc_feature (267)..(267): n is a, c, g, or t
atgtgtcatgggccttgggtgagactcattgctgggctggcttcaggtgtgacccagagcntccccagctgtggtggccatggagaagggattccttctgtttgaagaaaggaaagggaagaataaagggaactttgccttgcagcttgggtaccagcttggccacagtgacgtagagcactaagtggacccctggggtttctgattctagactttggttcctggatgaaatntttggtcccatcctgggccaaagggaggatactncccttaacggagaggcacagggctttcagcattcaccacaagctgaccgaagagccct

SEQ ID NO: 412970 - DNA, 322 bp, Homo Sapiens
  misc_feature (16)..(16): n is a, c, g, or t
  misc_feature (102)..(102): n is a, c, g, or t
  misc_feature (108)..(108): n is a, c, g, or t
  misc_feature (130)..(130): n is a, c, g, or t
  misc_feature (147)..(147): n is a, c, g, or t
  misc_feature (153)..(153): n is a, c, g, or t
  misc_feature (257)..(257): n is a, c, g, or t
  misc_feature (291)..(291): n is a, c, g, or t
ttgctgagtgattttnaacgttgacaccagtgtggagccagtgtgggtgtggggagcagtgccttcctcaggtcccagctggtcctgatatgccacgtagantgtgcntctgttttggtccatgggcttngtgggaacatgcttctncttgtntgttttccatacctgagggctgacgtagcttaaaccacagggcatcatgccaaacactcactgctgggcaggtttatttctggggatgtcagggtactcgggtntaggcactaagcaggatagagtttagggtttctnactagtaaggggttctggacgcctctgggtc

SEQ ID NO: 412971 - DNA, 367 bp, Homo Sapiens
  misc_feature (356)..(356): n is a, c, g, or t
cttcttcagggggtctgacacagaaactgtgtcctagggggagattctcagtgtggtaagggactgagtgcgtcagggactccccagcagctgagggcctctctctccctgttgtgctcttgctggggctggtgatccaggggctcttaccccttggaagccgggtggaacatgagttccacaccctgttgctgtagccaaattcattgtcgtatcagaaaatgagtttgaaaaagtggttgttgaaggcagtgccagccccagcatcaaaggtgaaggaatgagtatcactagtaaagttggaggagacaacctgttgctcagtgtagtccagaatgcctttgaaggggaccctnccaatgcctgt

SEQ ID NO: 412972 - DNA, 383 bp, Homo Sapiens
  misc_feature (61)..(61): n is a, c, g, or t
cctagaaacacctattcatgccttcttccttcctggaagccctaggagtttcctggggttncttgagctatggcaacccgatatgtatgattccaaatttagacagaggagtgtaacctgtgtcctagtgtgcaagcccaggaaagagaattagcaccaatatgtgatactaaacacttgacaatctttccctcatttaattcctacgacaaaactaggtaatactgtcattatcaacaatttgcagatagggcttagagactctgaaatctgaagtccatgcctttggctactccaccataatttctcctaggatttagtagtttttattccttgaaacattggcaacgaatggcctactatattattatgctgaattccct

SEQ ID NO: 412973 - DNA, 328 bp, Homo Sapiens
  misc_feature (15)..(15): n is a, c, g, or t
  misc_feature (185)..(185): n is a, c, g, or t
ctacaatggcagganctaggggcttccacaagtgccagagattacaggagactgggttttataggtttgaagagcagaaagccaaaacgggagggaaggggggtagtgaggtgcacagtcctttgtggctcagatgacagatgcggccttcgtggcctgacactttccaccaccgtctgattttntgaagtgatgaacacgggtaacgtaaatactggtgttagatttatactgacagccgctctgctcatcaagagtgcagtgatttcctgggaacttagggggtgtcagggaataaggtgaaacaaaattcccccaagttctgtcc

SEQ ID NO: 412974 - DNA, 373 bp, Homo Sapiens
  misc_feature (240)..(240): n is a, c, g, or t
  misc_feature (253)..(253): n is a, c, g, or t
  misc_feature (303)..(303): n is a, c, g, or t
  misc_feature (321)..(321): n is a, c, g, or t
  misc_feature (343)..(343): n is a, c, g, or t
  misc_feature (353)..(353): n is a, c, g, or t
cccattcaacaacatatatcagaatcccctactaccgctagtatttgccaaaaaagaaaagaaacccaccctaagggaagcattggtaacaatcgttgttataaacatggcttgggtatcacatctctccatcttgccatctcttacctgtaagaacggtgactattacaacagtgactattattatatccaaataatctcagcatttgctggagtttgaaccagagctgaatacatggnattttaatgtagnaatttaggcaaaactccaagccattttttcttctcctctggccaaaacgntatttcctcaaacagggnaatatgagtctctatggggccnggttataggngcaaatgtgaacaacctgag

SEQ ID NO: 412975 - DNA, 240 bp, Homo Sapiens
  misc_feature (24)..(24): n is a, c, g, or t
  misc_feature (154)..(154): n is a, c, g, or t
  misc_feature (170)..(170): n is a, c, g, or t
catctacataagatgtagtatggnctgatgccaagtgagcctggggtggaaatcagaactggatgcaaatcctgatgttatccgagaacaggcacctgttacataggctgtgttactgtggcaaaggtaatggtaaaacacagactggccagangcattgtgtacaatgngaccttgcaactttgtgtatattagtatgtggggggatgtgaattattaaagacatttaaaactgactga

SEQ ID NO: 412976 - DNA, 360 bp, Homo Sapiens
  misc_feature (249)..(292): n is a, c, g, or t
  misc_feature (311)..(311): n is a, c, g, or t
  misc_feature (335)..(335): n is a, c, g, or t
atacaacacattttgaaatatgtatacactgtggaatggttcaactgagctaattaatatatgcgttacctcacatacttattgttttttgtagtgaaaacacttaacatggactcttagagattttcaaatacaatacattgttattaactatagtcccatgctgttgaaattattcctcttacttagctgacatgttgtgtcctttgaccaatatctcatagaaagattagtgatcattgtgtgtcnnnnnnnnnnnnnnnnnnnnnnnnnnnnnnnnnnnnnnnnnnnncctgccccaccatttaggntaggggcatgtatggatgcagatngggtgtggggagaccttgtcttttt

SEQ ID NO: 412977 - DNA, 115 bp, Homo Sapiens
tgaggagggcgtcaggccagtgcaggggtccatctggggtctgggtgctgagtagaatgccccccccatcatccattcaacagagttcttcatggcccaggactggggcccatgt

SEQ ID NO: 412978 - DNA, 374 bp, Homo Sapiens
  misc_feature (198)..(198): n is a, c, g, or t
  misc_feature (298)..(298): n is a, c, g, or t
  misc_feature (325)..(325): n is a, c, g, or t
  misc_feature (335)..(335): n is a, c, g, or t
  misc_feature (349)..(349): n is a, c, g, or t
atgacttgtataatatttacaatttagactaaattttgtcttgctttgtatgctgactctcctgaatagaacttatttttttaaatagatataaaccagcaggtcaggcaagtaagaatggttgttttagttggtggggaattacataagggaaatcttgtgactctaggggatagaaattgtggattttttggtccngatgaatttttacaatggcctaatcacacaggtgttggtcaatcaacacttcttgtaaatgtgatctgtcattttagctatggtttaaaaagcatatggnttaatagttacagtattttagaagcgnaccatggatnatcatgatagggtntaaagaattaaaagaggtactggcc

SEQ ID NO: 412979 - DNA, 372 bp, Homo Sapiens
  misc_feature (38)..(38): n is a, c, g, or t
  misc_feature (53)..(53): n is a, c, g, or t
  misc_feature (76)..(76): n is a, c, g, or t
  misc_feature (78)..(106): n is a, c, g, or t
  misc_feature (311)..(311): n is a, c, g, or t
  misc_feature (345)..(345): n is a, c, g, or t
  misc_feature (357)..(357): n is a, c, g, or t
tcaagtaagatgatgtcttatgtagctcaaggacaggntttgttttgcttgtnctgtttgtttgcatttacagaantnnnnnnnnnnnnnnnnnnnnnnnnnnnnntcataaatgttgctattggcttctaaataattgcaactttaaatatctaactttctgcaagaagctgatgacagtcactcataatacataaagtgctttaaaatttttgagatatatttagacacattaaattaggctgaaatgaacattatggacagttctttatcagctaaaaggccagaaatgaggaagcttaagggagggntatgtaggaaagggaggcccatctttttgtgggnaataaatttttngtttggaccaatccc

SEQ ID NO: 412980 - DNA, 214 bp, Homo Sapiens
  misc_feature (40)..(40): n is a, c, g, or t
  misc_feature (143)..(143): n is a, c, g, or t
tccggagtttcgcaaacacaacatcggacgcatgcttctnggccgctcccgggaagtgcttgaacaatggtcgcgcgatcacccggacgaggccgtcatgggggttgctggagtaatccagaatcctgcgctggtcgcaaagnagcggcctccgacctcgccggtgggcgcctttacgctggtgggatacacgcaagagggcgaacagatccgc

SEQ ID NO: 412981 - DNA, 347 bp, Homo Sapiens
  misc_feature (311)..(311): n is a, c, g, or t
tttaaatagaactggcggaagcacaagcacaccgtatcagcagcttatcagggaccatggttttccacgtacatttgctaggcacttcagtttacccaactccatcagcactgagttaaattgcaaggttgggctgtactacgctgagccagggcagggagaacaagccagttactggggatgagggtgtcgggggggccctcaagaccttatttgcattctgcccacatagagaataaagctgtgatagcctgtgtactaagaggcacccaaagagaaccagtcagtcttaggaatgcacccggaaggtnggatgagtccaggcctccctatgggtggaagtagtt

SEQ ID NO: 412982 - DNA, 187 bp, Homo Sapiens
ccactgtgtctggcctgccatgagctttagaagccagaaagctgcacttgttaaaattgtttgtaaagtaagaataaaccatctatgaaaatgaattctatgaacaaaaggaataagctttagaaagcttggactttgcaaaatatagtcttgtttcaaacagctcttttttggctttttaaactcc

SEQ ID NO: 412983 - DNA, 450 bp, Homo Sapiens
  misc_feature (416)..(416): n is a, c, g, or t
tgctgtctcagtgcctctgattaaaacccacatctgttagtaaatgaggggtgagatctctgttgattaccagcatgtcagctctcagccttattgacacattcgatcaaagagcatttattttgtaggcacagacaagataatttgaaaagatgaattttcttcttcacaggggtgtgtttctgggttctagtgaggggactattctggacagaattagggccaggaccccggggactttgtccagtttgctagtagtggggcaggtgtggacgttgtctgggttgcccagttttgcccgtctctgaatggggccattgtctaagatggttctagagggcaggggcctcgtgggcgagcaggcttgtccttctaaggaagtgcatgggttgggtagcacttgtcgggatctgcanccctgtgtgctggactacgtgctcttagccaagt

SEQ ID NO: 412984 - DNA, 375 bp, Homo Sapiens
  misc_feature (83)..(83): n is a, c, g, or t
  misc_feature (288)..(288): n is a, c, g, or t
  misc_feature (326)..(326): n is a, c, g, or t
  misc_feature (340)..(340): n is a, c, g, or t
  misc_feature (342)..(342): n is a, c, g, or t
gcggacgtatgcgaccaggccttggcatcgcgagtcttggcgcctcgcaacgtgtacagattgtgcatcgtgtgcgtgacgtnctcagctgaaccgagcgctttgaaatcaggcaggtagaacagcatttcggacggggcttcggttcccggagcaagcatgaaggtcactcgcacgccgtcgatcacttcttcgtgtaccggttcggtaatgatgtcggttggcacggcgaacgtcgacgtgccgtgcgaaggtggacaatccgagaccaccggatacctgcccctntggacccgggcgcaggaacgatccgtacatgtacattncgcgacgggtcatngncgtgccggcaaagttacgttcttcggaaatccg

SEQ ID NO: 412985 - DNA, 119 bp, Homo Sapiens
  misc_feature (42)..(42): n is a, c, g, or t
gcaaatgcaaattcctttggggaaaaacacttcaacccaggncttaagaaatccaaagtgcgatttctcatgaacaatccccaataaacactcaaagtcaacagcacagagaaacaagg

SEQ ID NO: 412986 - DNA, 233 bp, Homo Sapiens
  misc_feature (36)..(36): n is a, c, g, or t
  misc_feature (79)..(79): n is a, c, g, or t
  misc_feature (115)..(115): n is a, c, g, or t
  misc_feature (199)..(199): n is a, c, g, or t
gcggcttcgacgatgtcggctgcatcgacccccgtnatcgtcgccgcatgttccggcgtataggcgtcgagcgctttcnaatagaggtcgaaggccggcgtgcaggccacatgcntgcagtgcccggccgaatcccggactgccacgcggcggaccccggccatcaacagatcggcaggtcgggtcgcggtttcctctncggccagctccagccgatcgagcgtcgcgttcca

SEQ ID NO: 412987 - DNA, 355 bp, Homo Sapiens
  misc_feature (317)..(317): n is a, c, g, or t
aagcatcgtctcgtacttcaggtcgccgacttccgcggtgttcgacaccagcagcagcgcgatatcgaggcgatcgtcgaccagcatctcctcgatggcttcgcgttcgctttcgacgatgctcacgctcaggttgccgaaccgccgcgaaatggcggacatcagcgacggcatcagatacgccgagatggtttcggtcatcccgatacggacatgccccgagatttgctcggggtcctcctgcgcggctgaaacggtgcgatcgatggacatcgtcgcgtgctgcacatgacgcaggaatcgttcgccggccggtntcagacggacgccttttcggatgacgcagaagcagcgt

SEQ ID NO: 412988 - DNA, 177 bp, Homo Sapiens
  misc_feature (85)..(85): n is a, c, g, or t
  misc_feature (108)..(108): n is a, c, g, or t
  misc_feature (130)..(130): n is a, c, g, or t
  misc_feature (162)..(162): n is a, c, g, or t
tcgcttctcacttccccatgctgccctggacgccaggcctttggagggcaggcccgggttgtgtgttccccacggagccttgcgngccctcagtggatgtgtggagtnagatgagtatcttccgtgactncagggcccctcgtatttctggtgcgttgcttngtttgagtttcacac

SEQ ID NO: 412989 - DNA, 395 bp, Homo Sapiens
  misc_feature (351)..(351): n is a, c, g, or t
atgaatgtggtttatacaattcctcctttgttctccagggtctgggcagaccaaatgttctccagaaggcatctcagcaggtgtccttggatgtgtgtgctttatttaggcttcctcaagctatagaacttaatggacagcctagctagaaaatgcagcagccaaaaaagaaaattcaagaacagtgagtgttgttcaactccattagagggaaactcattcgccatcatgtatcctcagttcacactgtgtttttgatcccaggataaaagacagtcagaggcaatataactcagtgattaagcactcaggccagagtcaagtgtaccagccttttagtcctgggggctntcacaaactggttgaatgcccctgggaatggtccttggggttgg

SEQ ID NO: 412990 - DNA, 344 bp, Homo Sapiens
  misc_feature (59)..(59): n is a, c, g, or t
  misc_feature (64)..(64): n is a, c, g, or t
  misc_feature (222)..(222): n is a, c, g, or t
  misc_feature (292)..(292): n is a, c, g, or t
  misc_feature (322)..(322): n is a, c, g, or t
tggccagggctgctgcactggggaccctggtggaggatttcgctggaaacgcaggtggngaccngaccatgaagagtctcaaacacagacttgaggactctgacctttatcctgggggcagcaagaagccatgttaggtgaaggaacaaggctgtttctccctcagcactagtgcaaggaaaggccagggaggccctcagtggaagcttgctgctggatttnttgatgtgccttttctcctgcctgcactggggtcagaatggccttgggtactgcacacttcctaccaggnatagaaggccccacagctatagcacctctnttccttttagttctttggaagg

SEQ ID NO: 412991 - DNA, 279 bp, Homo Sapiens
  misc_feature (95)..(95): n is a, c, g, or t
  misc_feature (98)..(98): n is a, c, g, or t
  misc_feature (254)..(254): n is a, c, g, or t
aagatagtcacctctgacagttttttaagggttcttggtggtgtcagagctttgctacttagtattggaacttaaactctggtctgttgtttctnccngttctgagtgagacttgcggtgagcactggaacttaaacattgccctggaactatattgctgctctgtcaacatttcccagttcagggaagatgtaagtgggtatcagaacttaatcttgagctttttgttgtttccaggccaggggagggctctngagtatacctaggctcgtggaaaat

SEQ ID NO: 412992 - DNA, 355 bp, Homo Sapiens
  misc_feature (73)..(73): n is a, c, g, or t
  misc_feature (158)..(159): n is a, c, g, or t
  misc_feature (167)..(167): n is a, c, g, or t
  misc_feature (190)..(190): n is a, c, g, or t
  misc_feature (258)..(258): n is a, c, g, or t
  misc_feature (289)..(289): n is a, c, g, or t
ccctcaggtcacttgtgatgaccttggaaacataggtagctctcagtggtctgggggcccctggcagcccctncaccttcctcacactttttcagtcagtcatttctggaaggatttgggaaaacttcatttgctagtggacattttagtcattgggnnagcaagangaaatggcatacttccttatttnagccaatctgccttctcaaaagtgtgatcactcttaaaagagtcatgatatggtgtgggcagtctctnaaccaaacacaatgctgaaatgactttcggncaaaggttgatggtgcacttagttctgtcttgggtggcagggacaacttttcagaagctgtcatgg

SEQ ID NO: 412993 - DNA, 420 bp, Homo Sapiens
  misc_feature (297)..(297): n is a, c, g, or t
  misc_feature (332)..(332): n is a, c, g, or t
  misc_feature (368)..(368): n is a, c, g, or t
  misc_feature (373)..(373): n is a, c, g, or t
tttcctccttgggattgagaagcaatggattatagagaaagaaaggtggattagcactccaaaactttgaagagtaattgaccaagacccccaaagccaaagctgtgggcatccccacttccagtataccctgtaccaacacgtaatggctactagatacaggggcactagtacctacctgtctgcttggctacctgccctctttgcagaagtggtgaagggaatcactcaacctcagaaagggaaaatggctttctcattttcagattgaaagaggttggcagtgggtgaggagantaacaggtaaggatctcttttaatatacccatttnaagccaaaacctctgtttagacatacgggtattttnaaccngggggattattcattgcccatgttttgtggaattatcagaaagcaga

SEQ ID NO: 412994 - DNA, 398 bp, Homo Sapiens
  misc_feature (224)..(224): n is a, c, g, or t
  misc_feature (253)..(253): n is a, c, g, or t
  misc_feature (276)..(276): n is a, c, g, or t
  misc_feature (322)..(322): n is a, c, g, or t
  misc_feature (372)..(372): n is a, c, g, or t
tactgataggtacctgagattttttaaatgaggttaaaacattgttacccactgccctgagtgtactttttctagttgggtaatttggaacctcctccacagagtttctcagtccgggctagataaaatgtgctaccacatttaaagtggtttcatttacgtttcatgtactgtttttcataagttagtgttcagggcagtgatcatagtaaaatactagatgngcatctggggcatttgggaatgacccagngcagtagccctggttctcactgncttcctgtggctgggccacacttaaggcaactggaagaaacagctntgtcaagacagcccagtttctccggcctcctgaaatcttgagacaggtgnggggaatgcaatttagggggtttctt

SEQ ID NO: 412995 - DNA, 301 bp, Homo Sapiens
  misc_feature (19)..(19): n is a, c, g, or t
  misc_feature (271)..(271): n is a, c, g, or t
cctcgtgcaacgaaacatnggcgcaaacaaaaccagggcgtttcagctggtaaatgctgccatgaggcagaacttgcttttccccaggctggaaattggagaacagtttgtcctggaccaagtgatgaaaggcagggcgacatgggggaagaattggaactcccagtcctatggctcagctgtaaattctgcagagtagagcagagaagggattgttttgttccctcttgggagaggacgtgatgctgagggcccagtgtgagaggctttnggcacagagcggacctttaatgattcccag

SEQ ID NO: 412996 - DNA, 329 bp, Homo Sapiens
  misc_feature (32)..(32): n is a, c, g, or t
  misc_feature (60)..(60): n is a, c, g, or t
  misc_feature (262)..(262): n is a, c, g, or t
  misc_feature (281)..(281): n is a, c, g, or t
  misc_feature (283)..(283): n is a, c, g, or t
  misc_feature (313)..(313): n is a, c, g, or t
cggcgagctgacgcagcgttcgaacgctgggngttgccgcggctgccagtgcgtagtggngacaggtacggtccggacatcttgtagccacgggcacgcagcgctggtatgacctcggcgtcgcggagtggtccgcggccgggtgggcaaatcgtgtcgaacagccggttgaggcgcgccgcgaaggtgcccgaatcgatcgagtgctcgcgccgaccatgttgctggctatggtcatcgcgaatccagagtgtctggattnaggcgtgtgggccaccggntngcggcggaacaacggtagtcgcctcgggtntcacgtcggaccctct

SEQ ID NO: 412997 - DNA, 185 bp, Homo Sapiens
ctgaggttctgtggcctgttgtcagtcctgagctccctctttgccaactttgtttatgttgtcaccagaactctccagcgcattcaaaggatgagaattgtggacccacataccctgccaaggtccctctgccagggaagcattggccggtttttcagtgctccacataggatcctagacaccgg

SEQ ID NO: 412998 - DNA, 298 bp, Homo Sapiens
  misc_feature (130)..(130): n is a, c, g, or t
  misc_feature (185)..(185): n is a, c, g, or t
  misc_feature (235)..(235): n is a, c, g, or t
  misc_feature (252)..(252): n is a, c, g, or t
  misc_feature (269)..(269): n is a, c, g, or t
tagggatccaacccacaatgttgtacacctctttgtagcaagagtgtataatcatgtatcatacagatcgttatttgctcagtacagagtagcatctcaccagataggtatttagggatagggtgaccangagggtagtcaaggctagttggctggtcatcaaattgctattagaatgctggagngtttgtcggtctctggcacagaggatcatgactggactctcagtactttnggagcctgacgttggtnggtcacctggaggtcangggtgcaagtccaggctgaccaataagga

SEQ ID NO: 412999 - DNA, 249 bp, Homo Sapiens
  misc_feature (50)..(50): n is a, c, g, or t
  misc_feature (165)..(165): n is a, c, g, or t
  misc_feature (186)..(186): n is a, c, g, or t
  misc_feature (221)..(221): n is a, c, g, or t
gccatttaatagggggcagtgaatattgaggagcgtcttctgcatgaggncattccatggttcatcgcgtgtgtacttgtagcatctcaccaagctcagctcactagcgattgagtagtcctgtcagactcaacaccatcaggttctgccttcctgtgagctggngggtgatcaagagtaagcgantgttccaattcctggaagactcagcatcctcctcncagcatcccacctccctgctgcagctca

SEQ ID NO: 413000 - DNA, 173 bp, Homo Sapiens
  misc_feature (67)..(67): n is a, c, g, or t
acgaggagaattaatgaacgggacagtatcggatagttattgaaaaactaagctatcactccacttngagcacgtacagacaaaaataaagatggagacccaggttatggctgcctttcaacctggagaatcagcccttataccagtaaggtcgattcacaatgcaagccgtg

SEQ ID NO: 413001 - DNA, 304 bp, Homo Sapiens
  misc_feature (287)..(287): n is a, c, g, or t
tgttgatggagtctggggaattgcctcatttatttcaatcaatgtcgatggtcatccggttgtccttcaagaatctcctggcgacgttctgttttcaccaacatattcccgatgaggagcgagtggtaatcctgcgcctccatgtacagacgtctctatccagggtcaccatgtctgaactcctggtgaaaacgggcgagtacctctgtctcagaccgacgggaagtgtagtgactccacgctactgagaaaactcgcttagaagagattaaggcgacgctggtcangtgcttgagcagatgtc

SEQ ID NO: 413002 - DNA, 402 bp, Homo Sapiens
  misc_feature (11)..(11): n is a, c, g, or t
  misc_feature (343)..(343): n is a, c, g, or t
  misc_feature (392)..(392): n is a, c, g, or t
ccaaaaccgcnccggtttgacctttgttttgtggtaaccccgtgatagccaaatgcgcaccaccccacaggtacgcgccgcccccatgcacgcgcctacccatgttttactacgcacccgtgtgtgtggttgtggcgctgtggctgcccctgccgccgttaccccgtggatgttggccaccttagcgcccttagcaccgttattatttgcggctgcgactaaaggtcggcgtagattaccaaagcactggcataaacgccgttcggcaccctaagctacatttactcgtcaaccgccaccacgcctgcgtctgcgtcaacgtacaccacatatgccgtgtacncgacttaccagcttggcatcccttgttaatctgcggtatatgtggcgcnatatgggcca

SEQ ID NO: 413003 - DNA, 391 bp, Homo Sapiens
  misc_feature (39)..(39): n is a, c, g, or t
  misc_feature (158)..(158): n is a, c, g, or t
  misc_feature (235)..(235): n is a, c, g, or t
  misc_feature (314)..(314): n is a, c, g, or t
ccgatcatcctacaactcatcccagggcctcgaggcccncttgccgtattaccctgctgggtagtgtgccgaaacgccagaggcggcttaggtaaagcattttggtagggcattgtaatgatagcccgggatagcgattaaggagcatggttatttangcccaaacggttaccctattcggtaacctgcacaatcccaactggcagtaggtagtgccaaagtttaggtattactnggttaccactcaccagtttgttaaaagtaacaccgctcaggctgcctctgcactgatccgtcgccactgttatgccacngtggtagtattagccacaacctgccccctgtaggggctacccccccactttaaaaccccgtagtagtgtgctttttg

SEQ ID NO: 413004 - DNA, 341 bp, Homo Sapiens
  misc_feature (220)..(220): n is a, c, g, or t
  misc_feature (226)..(226): n is a, c, g, or t
gttgtcctgatcccaagggaggatagggatagatgtgaacggtaacaagcagggatgtataagggacgaagcatgggccaaacgatacgaaaagcgcgcactacgggtactgataggaggagggcggccacgtgaaacgatgttataccgcggggcagatagcttgcgggccccggactaagcgatggggtgccggaaatagtaagcccccggatatagntagtgntgtaataaatatacctgttgtgaagagagcgaaagagcatgccgtattggttatgtggaactgaaagcgcagacggtgcctggagctgtaggtgcgggtgactacttgttttagc

SEQ ID NO: 413005 - DNA, 348 bp, Homo Sapiens
  misc_feature (160)..(160): n is a, c, g, or t
  misc_feature (246)..(246): n is a, c, g, or t
  misc_feature (304)..(304): n is a, c, g, or t
ccaactgatcacaccttggtacaagaagcgtatattagagcgacgtgtagtctaactgaaacaggctttacagagcaaataggggacgccaaaccaggcagtgtacaccacacccatgctgcctacagagaaagttaaacaccaccaaaccggggtagcngtatttaaacaaacatagaggtatggtaagccatggtatgggttaccggcctatgagcactgcctatatacaacatccatttaaanagctgaactaaaaaaaccatgatggtgcttaagcctaccgtgttgttgcggccgtctntagtggccatccagagccaaacttggccttataataccgatgat

SEQ ID NO: 413006 - DNA, 432 bp, Homo Sapiens
  misc_feature (38)..(38): n is a, c, g, or t
  misc_feature (306)..(306): n is a, c, g, or t
  misc_feature (350)..(350): n is a, c, g, or t
cggttgggtgggaggaggggggttcaaaaacccggggncgactaaaaataccttcgcacagtttggctgttgcgtggctagactgggaggcccaaatgcccccacccctagtattttttacttgggagtacacaacaccaccgcgagtggcgttacacagggccaccaccaggattgttgcccaaccacggcaacccgcccgcaccaagtgctggtggtacaatactagccacatgttgcctgctgacgtgccacagggccactaaccagtggcatacaccctgcgtaaacgcgcagtgggcgtgnctgtgccctaaagcgcgtagtccacccagtttcagcccggttanccgctatagttaacattttacctagttgtaccgcctggtatactgcgccgaatcatgcgctgtacaagtggacgtactgcca

SEQ ID NO: 413007 - DNA, 351 bp, Homo Sapiens
  misc_feature (63)..(63): n is a, c, g, or t
  misc_feature (174)..(174): n is a, c, g, or t
aactacacccctgccatattgtgcttagcctattacagcatgtgttggttttactatacgtgncattgccctccatggcggccaaacctggtgccagcttatccatgttatcattaattaatgaccaggctgctgctggcgagggaggtcttgttaagcaaccaggttgccacntattacaggtgccaatgggtgccaattaaataggggttttacatgcctgataaccaataagtccttgtgccatgcgaccgcgccattgctacaccagttccgaccctgtttacacagtaacgccatttacatttggtccagtcttgcttttccgttgaggcagttgtggatgttgtg

SEQ ID NO: 413008 - DNA, 118 bp, Homo Sapiens
tgtaaggtagaaagccatgcgtggataagaaaccgcagaaaaaagtgtgcggttgggtggggcccggggtatatgggggatttttagaaaaatttatgctacgtaggcgtacgacgga

SEQ ID NO: 413009 - DNA, 415 bp, Homo Sapiens
  misc_feature (282)..(282): n is a, c, g, or t
agcatactactcgcagagcgtgtgtgtgggagatcccaagcgtcagactaaagaaaggtggagcgaatatagtagataagggtaaagttgccaagtatgctagcccaggtgcgaagccaggatagctgaaacgcatacggggtagtaaaaccacaacagaaaagcgtaggagtgtgcaacaacccgtacgttgcgctttatctgccttcgccccacgcactccacgtgttggctttgcttgccgccgcctgtgcttgcgcaccgcctgtgtataccgttgcnttaaccctatgccctatatgttggtaatatacaatacttaccgttctgctgttaccttgctgccctggttgaacccgctgcccaaccgcgcccaaatggccgccagacgccaatacccgcccttatttaatta

SEQ ID NO: 413010 - DNA, 352 bp, Homo Sapiens
  misc_feature (189)..(189): n is a, c, g, or t
  misc_feature (295)..(297): n is a, c, g, or t
catcgccaaccacctgtagcgtgtacgtcatcccaacgctacgcatgttatctgatgcactaatggcaggacaacacagcaacctcatctcgccttaacgcaggcacacctgcttgcacacttttctattattttctccactatcgatttacccattcaactttgcagcggggtgtcttgtgttgtacngtcacgcgatgctatttaacttagcactccggaagggaatgtgagccgcgttcctctccgacataggttcaccataggggcggctcggcaaggagtgcattagttnnngttgatgctgcatgtgatttaggtgtgggcccaacaacgttttggtgtcctttta

SEQ ID NO: 413011 - DNA, 323 bp, Homo Sapiens
  misc_feature (153)..(153): n is a, c, g, or t
  misc_feature (221)..(221): n is a, c, g, or t
actaaggagttagggggaggggcgggataggctatgcaaaagggatagtagatggggataaacggttggggtagaaaaagagatggtgggataaaacgcgagctaggaagagaacaccacgacttacggctacaacaaataggcgggatatancagtggaaagcgaggacttggaataggaagcaagcaagtaggcggaggctacgtagggcaagaaatancaagaaagaatgcagcctagaaaagggaaaatgctagttgcttacgacacgattagcgccacaaaagcctagcaaggtttaatatatgcgtgtgtaaccccc

SEQ ID NO: 413012 - DNA, 267 bp, Homo Sapiens
  misc_feature (66)..(66): n is a, c, g, or t
  misc_feature (80)..(80): n is a, c, g, or t
  misc_feature (82)..(82): n is a, c, g, or t
  misc_feature (113)..(113): n is a, c, g, or t
  misc_feature (148)..(148): n is a, c, g, or t
  misc_feature (190)..(190): n is a, c, g, or t
  misc_feature (232)..(232): n is a, c, g, or t
  misc_feature (243)..(243): n is a, c, g, or t
ggactggaatatctaatgccacactgtgggtagaagcaaatatgccgcgttaggggatagcatggnagacgtgagtgcgngngcaagttgcaaaagtggccttgttgtgccanaaaccgtgcgaggggatactgccggaagcgcgccnagaaaactaccagcagcacctggcagtggaatttaccagganttatagcgcccttatacctacgggcaatgggccgggcaaagncacgttgctgnccgcaaaccggaagacttttatga

SEQ ID NO: 413013 - DNA, 353 bp, Homo Sapiens
  misc_feature (17)..(17): n is a, c, g, or t
  misc_feature (48)..(48): n is a, c, g, or t
  misc_feature (50)..(50): n is a, c, g, or t
  misc_feature (213)..(213): n is a, c, g, or t
  misc_feature (314)..(314): n is a, c, g, or t
atgcgatgcaaacttcngtacaggacacaataatattatacagctaangngtacagaagggcagggccggttatcccaggtgtggagttaacggcttattataaccaaccaatgacgtacaaaacgtatataaccttgtataggatagctgtaggggagaacaagcaatgcccatccagtgtggacatggtatggtttgacctggggtactanaattgaaaccctgcctagttagatgctccgcgtaaggagccctgctgtacattgctttattgtacctgctgtgagtgtgcgttggcagtggtgtccttaanatctcactgagatacaaagcgttgccatgaggataatgt

SEQ ID NO: 413014 - DNA, 228 bp, Homo Sapiens
  misc_feature (212)..(212): n is a, c, g, or t
tactactgtaacatggtgctactgttattattacaacaggataccagccctagtggaagagacaccgccgtatacgacatacaaatatacctgtgtacttataggtattacgacgagcgtaaacccaccaatcggcatacatttcgtgtgaaagtgctgcagccgcatactaagatgccaaccccaaaccggaacggttacgcgctggtatnacttagtagttatgta

SEQ ID NO: 413015 - DNA, 418 bp, Homo Sapiens
  misc_feature (40)..(40): n is a, c, g, or t
  misc_feature (48)..(48): n is a, c, g, or t
  misc_feature (263)..(263): n is a, c, g, or t
acgacaagcccccggtgatcgggggcctgaccgccgtgtncaatgttnccattgtaccgcagtgctttcttgtactcttaaacgctgcccaggataccgcgcacttatgcgatttcctaccctaccatgggtagagggtacagcgcaatatcactggccagaccaggccgctgcccaacactacaacaccaactgcccaaccgccattacgctatgagcgcaaccgctttgatacctacctgtccaactggacatggttgggncgcccgaacacccaatgctgcaaccaggacaaacttccccggacagtgccaggtgcaaactaatggcccaccagagtgactagactaataccaggaggccttgtagtagtactaggtctgacaggcatgacatgcgtgcgttacagtgcctggcc

SEQ ID NO: 413016 - DNA, 332 bp, Homo Sapiens
  misc_feature (196)..(196): n is a, c, g, or t
  misc_feature (259)..(259): n is a, c, g, or t
cacatacccagcatccatgggtctttttttgacatgacaaaatctggatttccctcagagaggtcacaatacctatggtcatactcaacatctgacaaattgagtactatagtatctagactatcagattctagatatcacctcaggggaaagagtagtcccacattcaggtggtcctagaaaggggggaactgtntcttcaggtgacggccagagcatacagcgcatatgacagtccttcaggaggtgccgttgactnacttggccgaaatgtatcccctttgacagggaggaggaggtgggaactaggggcaggtattcaactctcatat

SEQ ID NO: 413017 - DNA, 244 bp, Homo Sapiens
  misc_feature (77)..(78): n is a, c, g, or t
  misc_feature (121)..(121): n is a, c, g, or t
gaattatccaacagaaaccactaggtcatagagtacggtagtattctaattaaagcaaataggacactcaccatagnnataaaacgacatattcaccaaatgctgcattcacctttaagtnactccatcataaaaaatatggattgagtcaatattcatatgacataaaatctagaacctggaagccatttcagtagatctctccatgttcgcacaattctaatatctatggttcaggtcacta

SEQ ID NO: 413018 - DNA, 328 bp, Homo Sapiens
  misc_feature (65)..(65): n is a, c, g, or t
  misc_feature (197)..(276): n is a, c, g, or t
  misc_feature (314)..(314): n is a, c, g, or t
acacggactaggaagtcaaactttataggtagctgaaagagaactcaccagagcgagatataggnggtaagggttacaaggatcatgcaattgtgtccttgagaggtttcatggaacattatgacccatccactgaggacatcaccatgaacaacagggcttaattgaggacgagcagattgaaaatattctaactnnnnnnnnnnnnnnnnnnnnnnnnnnnnnnnnnnnnnnnnnnnnnnnnnnnnnnnnnnnnnnnnnnnnnnnnnnnnnnnnattactcaccatgcggctactgcagttgatgaattgantctttcacacaaca

SEQ ID NO: 413019 - DNA, 270 bp, Homo Sapiens
  misc_feature (107)..(107): n is a, c, g, or t
  misc_feature (124)..(124): n is a, c, g, or t
  misc_feature (141)..(141): n is a, c, g, or t
  misc_feature (146)..(146): n is a, c, g, or t
  misc_feature (159)..(159): n is a, c, g, or t
  misc_feature (184)..(184): n is a, c, g, or t
  misc_feature (243)..(243): n is a, c, g, or t
cgagggaaggctggctgccagaagatagcgagtttacttcagacattgccaaaggtgctgataacacagctgctatcagagctttcagaacacataccaactgcaangaaagtacagtagccgngctgagtgtccaatagngtcanggttcattctccnccgatgactagacacaaaagaattncctccggtgtagttctaataaaaagaagctcaagctccaagtgaagggaggagagtggnctgtagcagaggttggcttcaggcttg

SEQ ID NO: 413020 - DNA, 419 bp, Homo Sapiens
  misc_feature (42)..(42): n is a, c, g, or t
  misc_feature (91)..(91): n is a, c, g, or t
  misc_feature (130)..(130): n is a, c, g, or t
  misc_feature (186)..(186): n is a, c, g, or t
  misc_feature (217)..(217): n is a, c, g, or t
  misc_feature (345)..(345): n is a, c, g, or t
  misc_feature (393)..(393): n is a, c, g, or t
gaggatcactgagggagtctgtccatacgagtcaaggaagcnaggcattgcaggactctgcttggtggggctagtacaggccccaactctncacttcgaggccttcctctagattcttgaggagtaggtntctcggaaaggatagtcactagtagaacacctcctccaccaggcaaacctcctagncaccgaccggatccaggttgtcttggaggtncccctgccagtcctacaggtagatctggctcaggctgaggttttgctgaagggactgtagtggttcctgctctaagagtagacgctccaggaggactcggtgtgacaataccagcatatggccctcgnggatcccgtctaaggtatagtagattgggtatcagtcactatggctancttctagagagtcatctgactgcaaa

SEQ ID NO: 413021 - DNA, 607 bp, Homo Sapiens
  misc_feature (111)..(111): n is a, c, g, or t
  misc_feature (118)..(118): n is a, c, g, or t
  misc_feature (138)..(138): n is a, c, g, or t
  misc_feature (151)..(151): n is a, c, g, or t
  misc_feature (327)..(327): n is a, c, g, or t
  misc_feature (557)..(557): n is a, c, g, or t
cggcatgtctctctctacatacgtgtttgtcgatagcaaatagattcttttgttacacatcatacaatgtcaactcctggaatcactgcatagaatcctgtgggggattanatgcttnagttacaggcttcatcaggnggagtacgatagnatgtcatatatctctgcaagcaagggtcagctcctgcctcccacgttgccccgccggggaagtgctgcgggaggtctcctatggcctgccctggctgggggctctgatctcgtgtaggtggctctcacaggctcctgtccaagggcactgccccacactcctcacacacacagggncagccccagcgtccgtgtgcattccaggatcctgtgctgggacttccataagaggtgctgggacggatgtaggggaaacctccggtgccgcatagatgctcaaaagaggggtatcccggtccacccccataacccaactcggagcatgctacttcctgcctgaccagcgaaggaacggcttggcagagagggcttcaaccccatcccccctccacgggttcctgaactgnaatcctcttcttttgggcagtcccctgaggccccgccccttgcccacaag

SEQ ID NO: 413022 - DNA, 461 bp, Homo Sapiens
  misc_feature (112)..(112): n is a, c, g, or t
  misc_feature (242)..(242): n is a, c, g, or t
agcacgtgtaaaaagtcaagcctaaaccaaaaaagcaagaaaaggaaaagccccgtaccacaaaacccttagccctatatataccacccctacgtacgcctgcactgccacntgcaactaccccaaggttggaccgcgtaggagtgtcgttaatttccacattgttgttcccaacttttttattcgtatcatgctgcctggcataaacctcttaggatgccttgcctagggtcaacgactcngggtttaggtatatgcttagtaggggggttttacacctgtaggtaggcctccatattaagttacgacttacctggcaaagtgcgcacattgatatgtagcatccgcttttcctcaccccagccgtttcttcttctattgtatactcctgcttatccccagccactgcctgccctggtgttgtcctacctctgccctccctgtccatgttgctgcacttt

SEQ ID NO: 413023 - DNA, 577 bp, Homo Sapiens
  misc_feature (112)..(112): n is a, c, g, or t
  misc_feature (244)..(244): n is a, c, g, or t
  misc_feature (260)..(260): n is a, c, g, or t
  misc_feature (265)..(265): n is a, c, g, or t
  misc_feature (376)..(376): n is a, c, g, or t
  misc_feature (506)..(506): n is a, c, g, or t
ggaacgaggcactgcaacaactcaatagaggggtacatcatagtcagagttcagattttttatgataggagtatcaagttcgtagtctggggtatcagatatgtgaccaagnacgggaacttctccacatcgtagcactacatgactaatctgaaaggaataaagcactgaatcggctactatacattctgatagggtggacccctgaggagtgtacagagagcatcatgaggcgcccacaccnacagcagagcggggtnctcanacaggggaatctcccagtctggtagcgagaaatcgtcttttcctcatgtagctcataatactgacatctctcaacagtcaagatgaattctcacaccagatcctacccctntcccagagccacatgtgtcacacaagtgtagtagaatggcaggggatccaccacaagatggaggatggccaggacaaacccgtgcctgttcctcctcaaacgcgttttttaggcactaaggaatctcttntattctttcaggtaaacccggccgcggattatcttactacttggagggggcccctccccaacttttccatc

SEQ ID NO: 413024 - DNA, 211 bp, Homo Sapiens
tcttgttgtccaggttggagtgcaacggggcgatcactgaaacctccgcctcctgggttgaagcgatcctcctgtttcagcctccttgagtagctgggattacaggcgtgtgccaccacgcccggataattttgttctttcagtagagacggggattctccacgtcggtcaggcttgttcttaaaatccctccctcagatgtaccaccagc

SEQ ID NO: 413025 - DNA, 383 bp, Homo Sapiens
  misc_feature (40)..(40): n is a, c, g, or t
  misc_feature (56)..(56): n is a, c, g, or t
  misc_feature (268)..(268): n is a, c, g, or t
  misc_feature (360)..(360): n is a, c, g, or t
ggaggaatctaaatactagaacggaggtcacagaagtctntgattttttcttgatngaagcctcacctccgttcaatctcagcattctgacagaagagacggtaggcagagtgtcatccagtggacaccggacggcagcgtcactccgctcctagctgggactgggaatacctagggcggtatctatatgtctctgggccacatctggctctccaagggcttgccagagaacttcacctacgagcaccaggcgagggtggtacacggnccatgggtaaccaggaaaccacggctcagcacacggctgcatcgggggtcctcggttcccaccgacacatacagcaccgcaaccagagcttntgatgcaggggggatccgcggat

SEQ ID NO: 413026 - DNA, 288 bp, Homo Sapiens
  misc_feature (46)..(46): n is a, c, g, or t
  misc_feature (49)..(49): n is a, c, g, or t
  misc_feature (104)..(104): n is a, c, g, or t
  misc_feature (159)..(159): n is a, c, g, or t
  misc_feature (194)..(194): n is a, c, g, or t
  misc_feature (218)..(218): n is a, c, g, or t
agatgggggagtcgtcgggcgccgggccgggacatggagctgtggncgngtctggccgcggtgttgctgtagctgatgttgttggtgcagctgagccgcgcggncgagttactacgtcaaggtcgtcctgtactgtgcgctgtgcttcatggtgtccgnacgtggcctcgctcgtctgtctgttgcgccacggnggccgagacggtggagaacatgantatcatcggttggtgtcgagcgatggttcaagtacttcttacgggctccgctttcgaagtgcggcaaccc

SEQ ID NO: 413027 - DNA, 380 bp, Homo Sapiens
  misc_feature (28)..(28): n is a, c, g, or t
  misc_feature (47)..(47): n is a, c, g, or t
  misc_feature (90)..(90): n is a, c, g, or t
  misc_feature (99)..(99): n is a, c, g, or t
  misc_feature (180)..(180): n is a, c, g, or t
  misc_feature (189)..(189): n is a, c, g, or t
  misc_feature (195)..(195): n is a, c, g, or t
  misc_feature (203)..(203): n is a, c, g, or t
  misc_feature (266)..(266): n is a, c, g, or t
  misc_feature (291)..(291): n is a, c, g, or t
  misc_feature (345)..(345): n is a, c, g, or t
gtgtcactgcattgccctctttttgaanagcgacaaccacccgatanaacatcccagtttggcgtgggaaccaccttgaaatgcaccgcntaggacacntgtacactggttttacgcacaccaactccaacccgaccgtgttatcgcaccattatagtgtgccctgtacttgagcttganggtgtgtcntttgcngttggctnggtctgtatttttggtagtttgcacaccacggcttttaatgataggtatcggcagttacgcanagcctgtacatgtacccggtcgctngttcgcccccaattcgcattttagccatatccagtgctggacgtggtttgcacnaccatgagttggccgtagcctgttttttgaccaat

SEQ ID NO: 413028 - DNA, 401 bp, Homo Sapiens
cgctcgccgctcctcgccaccacccctgagctacaagatgaggctcgccgcgcgcctgctggcctgcgccgccctggggtgtgtctggccgtcacggagaagaccgtgcgatggtgcgccgtgaatgatcacgaggccagcaagtgcgccaacttccgggacagtatgaaaaaagtccttcaagaggatggcccccgtatcatctgtgtgaagaaggcctcctacctggactgcatcaaggccatcgcggcacacgaagcggacgccgtgtacactggacgcgggtctggtgcatgaggccggcctgactcccaacaaactgaagcctgtagtagcagagttctatgggtcaaaagagaatccaaagaccttctactatgctgtggctctggtgaaaaagg

SEQ ID NO: 413029 - DNA, 346 bp, Homo Sapiens
caggcttctttcacttaataatatgcatttacatttcctctgttttttcatggcttgatagcccatttatttttagcactgaataatatcccactgtctagatattccatagtttatttatccattcacctaccaaaggacgttttggtagtaaatgtaaatctaatctttatttcaaatctaatctttatttcttttcctctctttatcttgggtttactttattctttattcttattctatcttattaagatagataattctggcccagaatgtgggctatcttggtgaatattccatgtgaacttgagaataatgtgtattctgccatgttagatgaaatggt

SEQ ID NO: 413030 - DNA, 317 bp, Homo Sapiens
aatatctgaagatggcagtcacttagcatacaataaaaatgtttggcaggctatattttaatgtttcatgacattttgcagtgtagcacagtattttgaagggcaaatatttctttagcaccattttaggctcgagatagaagaaaggatgaaattttggttgcggcaagcttctctgagcagacgacattcatgtagagacctcattgttggaaagaagtcctccatgaacgatctggatgaaagtgtagcaggtatagggaacagtatgtaaagatctgcagacaccctgatagatgtggtgagggagtagagtc

SEQ ID NO: 413031 - DNA, 187 bp, Homo Sapiens
tttggagcttgagctgggatggtgggaacagccctcagcctgctaattcgagcagaattaggtcagccagggactctactcggggatgatcaaatctataatgtaatcgtcaccgcacatgcctttgtaataatcttctttatagtcatgcctattataattggaggcttcgggaactggcttgtcc

SEQ ID NO: 413032 - DNA, 289 bp, Homo Sapiens
tgggatttgccttcaaggaaatcaatgggaaagaaatcaagatcgtccccattttcaaactcttcttctggattacgactttggttcctttgctgaggatgtggagatgtaggagaagtagggggattcttgtttaaaatgaagatattcctggataattgatgtatgagtaaagtgttaggggattaagttgctattcattatgaaagtaagttagaggaaatgggacataagagagccatgttttgaaagtagagtgctgggtaatagccaagagatagtcccagcc

SEQ ID NO: 413033 - DNA, 337 bp, Homo Sapiens
acctcaagtttgatgacagatcttctcatgtgatgctagagatgggactggagaagtcacctcaagtttggtgacagatcttctcatgtgatgctagagatgggactggagaagtcacctcaagtttggtgacagatcttctcatgtgatgctagagatgggactggagaagtcacctcaagtttggtgacagatcatctcatgtgatgctagagatgggactagggaagtcacctcaagtttggtgacagatcttctcatgtgatgctagagatgggactagggaagtcacctcaagtttggtgacagatcttctcatgtgatgctagagatggga

SEQ ID NO: 413034 - DNA, 240 bp, Homo Sapiens
tgaaccaccaaaatgcaaaggcgaaatgctcaatgacctgttctgaaacaactaatgcaatggggactaagaagagatgtttaagaactaggcctcagggggtccacgactctcctctcaagaagcagccaaatggactgcagcactttgcaaaaaagacattccttgagaagcacttgggtgcacaacaggataacagcaaaaaagtgactgaactttctaaggagcctgtttacagtg

SEQ ID NO: 413035 - DNA, 220 bp, Homo Sapiens
tcaagtgtctgaaggatggtcttggggatgtggcctttgtcaagcaagagaccagatttgagaacctgcccagcaaggatgagatggatcagtatgagctgctgtgcctggacaagtcccgtaagccagtggacgagtatgagcagtgccacctggctcgggtcctttccctatgcagtctgtggcctcgaagtgtgtgatctgcaagtgatggacctga

SEQ ID NO: 413036 - DNA, 209 bp, Homo Sapiens
gagaacatcaaaaatatagtccagttttgaaactgagcataaatcattaagattttgtcactacaaggagtcattcactgtgacctatttaggtgaggcacagatgggagctcatttctcacccttgccgggtgatctagttcttcatcctgccctctgaagtgctccagatttgtgttgtgtagtatggacactgcctttagcagtgt

SEQ ID NO: 413037 - DNA, 190 bp, Homo Sapiens
caagatctcatgaaagaaaagactgtttctaagacggaaatgctctccagcagtgtaaacagtgtgcatgggtgtgggctgatgcagtacctctcctcccagggacctgcacaaggagaccagggagataccacagccgagagtgtcaccagtaagaactctattagtttttactgccacaggtaatatc

SEQ ID NO: 413038 - DNA, 286 bp, Homo Sapiens
cgcccggaacaaggatggtcgggtcgggatgatccctgttccttatgttgaagagctcgtgagatcctcgccacacggaaagcacggaaataggaattccaatagctatgggatgccagaacctgctgatgcgtatgctcaacctcagaccacaactcctctacatgcagtttccagtagtcctggggcaggaatcaacaccttgccatccacacagaatggacctgtctttgcgaaggaattccagaaagaagtgccctgtggttaccgacagacagcgatggca

SEQ ID NO: 413039 - DNA, 368 bp, Homo Sapiens
  misc_feature (72)..(124): n is a, c, g, or t
cgagggatactaaaggaaggtggaattagagcaaatatgtgctgaaatggggggagagctatttctttctcnnnnnnnnnnnnnnnnnnnnnnnnnnnnnnnnnnnnnnnnnnnnnnnnnnnnngacaccaggatgggtccaaaaatgcaacaagcttagtcacaagtgaggcagattccactagaagtaaaaaaattgtcaagaaataggaatcaataggtttgggataaatgaggtgggaaccttcaaatgacagatcatcctagagcccgtgatcagtcacgacccagaaatgagaggaaactgggggctggcaggaaaaaggttgggagcccaatgttgccagctcgttgagcaacagagagga

SEQ ID NO: 413040 - DNA, 101 bp, Homo Sapiens
cgaggaaactcaaagacatacacattttaaaattctcattctgtttcagaattgcttctctaatgaaaggatccagcttgtcctcatgatctgctcgtgcc

SEQ ID NO: 413041 - DNA, 107 bp, Homo Sapiens
caccccttacccatgataatttagaagagctgatgctaacatcactgctgggaagatgcacttaggtcatgcagtgagctactttagacccatatatacttgatact

SEQ ID NO: 413042 - DNA, 471 bp, Homo Sapiens
  misc_feature (111)..(178): n is a, c, g, or t
tgaaagtgcagatcagcaagatctgagggagaaaagacagctcttctttgacttggttcagaagttccgagcggtggggaatgcaagcaggaatttttgtctatttcattnnnnnnnnnnnnnnnnnnnnnnnnnnnnnnnnnnnnnnnnnnnnnnnnnnnnnnnnnnnnnnnnnnnngcttagcatggggttgcaaagagagaatgagttaagcaaaggaggcaaagtggagaacacaaaactttactgtgtcgttttatttctctgctgagaactctgccaagttatcaattcccaaacattctagacatactgttatttgatataagtacaagaatcccttcctcccttctttaaatcagtataatctgccttgtggggattaaccaggtttctgtttattaacatgagggactagggtgatgcttttaaaggcatcagttccagcaacttagtggaagatgctctag

SEQ ID NO: 413043 - DNA, 454 bp, Homo Sapiens
aattcggcacgagaattttggaagaccatttccctgaggtcaggttctctggagtatacctgggaaagtggaaagtataaacagagcaggggagggtttcaaaattcactggactcggattgtacaactctgtcctatgaatgagcaagaactaggtgggattctatagaatgggatctaggtagctagaaagggcaaaggtgaagcattagatgtattagcagtcagggagaaactaccaagcaaatccaaaatattctgtttgtactggaaaagtctgttttgtgaatccagagtcatccccagcgggaataaaattcttccttttatagccgtccaactctctcccaaatcctttcattccatccccactctgcaccagcaagggatcccactctcccaccactaggaagttatccctcaggtttaagatatttatagcaccagacattct

SEQ ID NO: 413044 - DNA, 463 bp, Homo Sapiens
  misc_feature (229)..(378): n is a, c, g, or t
  misc_feature (428)..(428): n is a, c, g, or t
tcagaggagagaaagtgtacgatgttttcaggacaaattagtccttcaccatggcaggaatctaggcggccgaaggacatttgtgggaaattgtagcagaaaatacgaggaggactttgatgccaggccacagagtttgcagtcctttttggagactcaggggagttattgaacaattagaaactaaaggctgatgtgacctccacaggatactggctaaacgcatgannnnnnnnnnnnnnnnnnnnnnnnnnnnnnnnnnnnnnnnnnnnnnnnnnnnnnnnnnnnnnnnnnnnnnnnnnnnnnnnnnnnnnnnnnnnnnnnnnnnnnnnnnnnnnnnnnnnnnnnnnnnnnnnnnnnnnnnnnnnnnnnnnnnnngtaaactaatgtggagaatgcattctgcagtgtctggaattcagcgaccnctcagtacatgttaacacactaatactttctacgt

SEQ ID NO: 413045 - DNA, 444 bp, Homo Sapiens
ctcttttttttgctgccccggattctgcctctcttggagcacgtcctcttggtccctctgggccagaagcttctccagcagctgcccttgctccttctgaagcctcagctcttcgtccctccgggcaagggcctgctggagctgctgcatgtcctcccggtgtcgcaggccctggtcctggatctcaccttcacgcgtcctcagggcctcctccagctgccgggcgtgtgtctggcaggtgttcagggtggcctgcaaggtggcggtgctggcctctagactgtgactcaattctgtctgctccaggagatgccgctctttttcctgcagcacagcctgggccctgctgagggcctcctgcagtgcctcgacctggccccaggcagcctcctcctgaagcacggagaaccgggtttctgtccgcagagctttcagctcctggtc

SEQ ID NO: 413046 - DNA, 158 bp, Homo Sapiens
aactcttttttcctgattgactgctctggttttacccagagccaggtaggttttccccttcccattttgttattaagggacatgtgcagaggttcaggactcctgagtctttgggcagtgctgatctcactcctctgctcagcctcatgctttgtctt

SEQ ID NO: 413047 - DNA, 432 bp, Homo Sapiens
cgagatcatgcaccatcacccaggaatcctggaaagagcccctttaaatgcaaggaacaataagcattctgtactgaaggtgccaggctcaatttacccccagattagcactgggcatctgtggtcatctccatcagcaagagtacccctctgagctgcaggctggaagggagggtgcccagggaccacctgcaccaggcacttttctcctcaaagttcaagttcaccctcagatgctttcctgggccctatcaacatcagatttggttccatcaatttgctgggtgatacgtatgtgggtgataggtattcattacactatcttctctgcctttgtacattttataataaatattccataattttttagtggaaaaagagcaatcttaacaaacaaattttttttctatccaaagttgttgaatattccat

SEQ ID NO: 413048 - DNA, 420 bp, Homo Sapiens
gcaaccgggggtgtttgaatggtaggggcgaccagccgaaggtgtggtgggtgtaaaaggcaaggtgggcgccgaaggcgtggttgtggcagggttaaggccgttgttgtacatggccgtaggttttgtaggtgggggaagggaaattcattaaaaaaagatgataccttaaggaatttacagtctacccagagtcgacagcaacagtcattaacaactaacactttgcatggcacttatgtgtcaaatgctattttaaattccttacatatattaacttcttcactattattatccttatttcaaaggtgaagaaactgagggcacgggaaattaagtgctttggtcgggccacacaaattaaagtagtaaagccaagtgaatgttagaggtatgactcaagagcttgtgctcttgcct

SEQ ID NO: 413049 - DNA, 209 bp, Homo Sapiens
atgtatttataccctacctattacagaacaccgagtctctgaaatggagttacaggaagagtgggttaatcactcatgctatcggaaggagggctgtgaagatgctgcctgattttgcagcctgagggttttggcgaaatacgtggacagcctttttgctccccttcttttgaaagcctgaccaaatcactaggttgagaagggaaagc

SEQ ID NO: 413050 - DNA, 458 bp, Homo Sapiens
  misc_feature (113)..(323): n is a, c, g, or t
  misc_feature (325)..(384): n is a, c, g, or t
ttttagtcactattggtaggtgttttacaattcgcaaagcacttttttgagcatcattatcctcaagagaggtagtacagcataactgagatactttgggtttcaaaagtagnnnnnnnnnnnnnnnnnnnnnnnnnnnnnnnnnnnnnnnnnnnnnnnnnnnnnnnnnnnnnnnnnnnnnnnnnnnnnnnnnnnnnnnnnnnnnnnnnnnnnnnnnnnnnnnnnnnnnnnnnnnnnnnnnnnnnnnnnnnnnnnnnnnnnnnnnnnnnnnnnnnnnnnnnnnnnnnnnnnnnnnnnnnnnnnnnnnnnnnnnnnnnnnnnnngnnnnnnnnnnnnnnnnnnnnnnnnnnnnnnnnnnnnnnnnnnnnnnnnnnnnnnnnnnnngggttgctatgaggaataacctgttatgcaatgtgtttaaaacagtacctgacacataagtgtacaataatagt

SEQ ID NO: 413051 - DNA, 460 bp, Homo Sapiens
acagatggaaggaagtctttaatgccaggcaataggagttaggagcctcttgcatcaagcctggctcttcctccagattctgaagaagcagcaaaataacttggtttgagcttaaagtgagaggttcatcttcctgagctcccttccagggctgaaatggtgaccttttccccagtctttcttctctgtgtactgtctagtggagatgatgagaagtcatcactgtgaggacattacctccccatccaaaccccttcaccagcactcctggccaagatggtacatgtgcagtgcaagtcttcaaggatttggggagagcagtagaatcccttcttttatgcctttttctcttttggcaaagactgactccatgctcaccaattagattagagtcatgtcactggattctagtcaggcagcctgtacagggctggcctctaaaacattcaacacaatcttc

SEQ ID NO: 413052 - DNA, 463 bp, Homo Sapiens
ggggagctctcaggtcaggctgcctcctgcaggacagctgtccatccctctctgtcccacttccctggctgcgtcgcaggggtcagtctggacccttctgtcacagcctttgtcattttgtcacaaaacgctgccagctcacgaggtgacatttgccaggttatttccaaattttccaaggatcactacctccagatcaacccaaagtcagcttcacattctagacttctaagatccactttgtgtctggactctgcaacagtgagtttcaaaagggaaagctctctgaggtcctccgtaatcctggggaatgtcaacggccctgagatcacagtgtgagaaccgtgacactagctggggtcaacacgctctctgaagaaaagccacaggggaaacctgtgtagactctgcttggagcaattccttctaaagtaaaagagcgaggcggactgtgggtccagaa

SEQ ID NO: 413053 - DNA, 360 bp, Homo Sapiens
tctccagttccatccatgttgttgcaaatgccaggatctcattaatttttatggctgaatagtactccattgtgtatataaaccaaattttctttattcattcacctgctgatggacacttaggttgcttccaaatcttagctatggtgaacaatgctgcaacaaatgtgggagtgcatatatctctttgatacactgatttcctttctttggggtatatacccagaagagggattgctgaatcatacttttagttttttgagaaacctccacacatcttcacagtggttgtactaacacggtggagattctaaacacaccttttatttcccagggaagaaaagcactaaatagagagct

SEQ ID NO: 413054 - DNA, 432 bp, Homo Sapiens
ccaaatgcactcccatgaaggctctaaatagcacctggatgatgtagagaagatactcagtcctaaccgagctccccacttcacatgcctactcactgcaaaccaagtactgcccaaccaggactcttgacttcctaccaccactccctctcccacttccttcttctcagcacccaccaagtttcttaagccaaaaatcaaagccctccgcatttctcgtccgctcctcagcaactatgtgcaatcagcaggcagatccagaacacatctcaaatccctccacctcttgtcatctctctgccactttatttacttcataaaacctcttgtctggctgcctgaatgtgtctcctgactgacacccctgactacattcgattctccacacagcaggaagggtcattttttaacacagaaaccggatgccatcac

SEQ ID NO: 413055 - DNA, 460 bp, Homo Sapiens
ggggctttgcatgtctgctacacagtggcagctgatgtctcctgctccatccttaaaacaggatgctttaatttttaatggagcacatgttcgattggctatacaaacaggctaatctgcaaagcatgtgctcaataacaagcctgactatgccgccagaatatcaacatgactcggctaagctggggaggagtgggtgggactcctgctcacctctgccagccaagggctgggagctgggagcactggccagctgaaagtccaggggtggctgtggccagaggcacatgtgacctcctctggagaccccgagggtcttcagcttctgggtgcctgcaaatcctagccagcagggaaaagaacaaaattgtgcatccggcaggttcaggcctctagtgtaaagccagatgtggcattaaagatgaaactcccctctgctgcatgggcatgactagaatga

SEQ ID NO: 413056 - DNA, 402 bp, Homo Sapiens
ttagctcactacgcagtgcttggagccggggcacaggccccgggaagggagctccgtcctcagagcgggatgcagtgaggacgcccggcgaccatggcagcggccgacgagctggccttccacgagttcgaggaagccaccaatctcctggccgagacccccgatgccgccaccacgagcaagagtgaccaagtgaccccccaggggcacgtggcagtggccatgggctcgagcggcagctacggcgccgaggaagaggaggaggcggaggaggaggggggcgacaaggcagcgctcctgcaggagaagccgcagcccggattctggaccttcggctactaccagagcttcttcgacgtggacacttggcaggtcctagaccgcatcaagggctccctgctg

SEQ ID NO: 413057 - DNA, 428 bp, Homo Sapiens
aacattatcctgtctgctgctgctggagactcaaccaccaccttctctactggactccttcattcaaacagacccactcataactgatggctgttcaagagatgaatattgtatatttaaattaaaccacacaatttactttcttcataaggatgccgagagaaggaaaccttattgtaaagttcaagtatatacttgcaatgaagcctaaacattattttatatgtagaaaaagacttgcatcactttttggccactcccaagtttccttcctttaccttctttttctagagacacttatagaggcagtgtaatatagtgtgttaagctataagcactataaaagagttaaataattagggtcagaatgcatgggtttgaacctggtgctatcccttatgaacttgtgaccctaaaaactacttaac

SEQ ID NO: 413058 - DNA, 366 bp, Homo Sapiens
ttaaacaaaatgttttctcctccccaagtatcaagtaaacctgataagctaagaagatatgccctgtgtaacctctgccttcactttcagcagactctcctacactctgggcttgggaaaagaatgacccaggctgaaaaacataggccgtagtagaacatagagggctagggacaggagcatgaatacagggactgaaatgtcagtatttgggaaatgaaaggaagaagaaggacttgtacaaagaaggaaagaattgttagagaagtgaggccaaattgtcataacagagaacaaagcagggtgagagtttccacactatcaaatgctacatggaaatgtctaaaaggttaagaaattgcaaag

SEQ ID NO: 413059 - DNA, 471 bp, Homo Sapiens
tgatttctgaggccttctccattgctgcccccttcccaacatctagttctgtgcccagatccaagtgagacttggctaaaatgtgttgaataaatggaaggtctaacagcaaagcctcgcattttatctcttccatctaccccttccaccctttttaagaaagtgcaaaaacagacttggggtgatctataagttggattcactgcctggaaatgtaagaattgagtaggaacagatttgagatgagaaatttggttgagcatgtgaggaattgttcccaggctagagcttttcttctggtagacagaatacaaaaccctccattttacttgaaatacaaatgaagaaactttttgtccaatgaggccaaaatactcacccagatttattagagtttgaaacactctgagataatccaccttaatcttatagcagtctgtgtttgataaaatgaaaattaatagcaactga

SEQ ID NO: 413060 - DNA, 337 bp, Homo Sapiens
tggcatataaaattctttatgactttgacctctgccttatacagtctgttttcctcttatactccatctgcctattgtgttatggtcttatacaactatttgtagtctgtggaacatatgttctctcgggtttccttggctttgcagaaactgctccctcagctggaaatgctcacagttccaattcatctggctatcttagacctgtcccttaagatgctccagtgccatctcttctgtgatgctgtttgattttctaaggtagagccaattactccatcctttctggggtctaccaatcttcgcaaactttttatagtgcaaaaaggcagaatag

SEQ ID NO: 413061 - DNA, 316 bp, Homo Sapiens
tatagatatacttatcagaccccccctgaccatttagattggcagtgctttgagaaatgcactatgacctttctgtgtcaatgggaatatacagaaggaacattcgggaccccgctgtcccccacagcctcattgttgtctccaggacactgctgggtcacacgaatgctccaggacagacagggacctggagtgcatcaggatctgaccagataggagtttttgcctcgtatctgggtgctacgattttgtgccgttctctgaggtccaccacctgcccttcctggcatggtttccttcgtgaccatccctgctg

SEQ ID NO: 413062 - DNA, 139 bp, Homo Sapiens
aataaggtactctatgcagaaaaaagcaaaccttattttgtgtgaagatggctctacaaaacatcctgctaatgtgtgcagcttccagaatgacctacgccaatttcacatctgttataacctttagttgtgtgtggtg

SEQ ID NO: 413063 - DNA, 434 bp, Homo Sapiens
tttttttgaactttcactcacttttttatgatgaaatatacattagaaattttaaaaaacacttcatcctgtcaatcacttcaaaattcagcacattctgttttcaaagactttcatgaggcagtctgcttgaaatctattttaacttatttttttaaaatagcattttattttgttctgtggagcaagagtatatttggctctaaaattaattccactcgaacagccccagttttctttccacttagtcttggagaaagggagtcttttccttcctcctgtctttctaattaatgtatttcctcatttagtactccgcttacaatcctgcttctgcttcttaacccaggacccaccaatagaatttaagggttcagtgaacttacataggaataaaaatgtaatctttattttactaacttccagtgaattta

SEQ ID NO: 413064 - DNA, 449 bp, Homo Sapiens
ttgcaaagattcactttattcatccatctcaccaacattcgcaaggttaaagccaaggagggggtgagggccgggaggggaggggctggaggactgtggtgggaatgggtccactgaggggagggagcggcgaggctgggcctcagggtcactggcggtgccctggcaggcgtctcgctctaacagtcacccctattgaagctctggacgactgaggtcgtgccctgggtcaccttgcaggtgtactctttgtggctgttgtactgtgtgctggtcagtgtcagagtgctgctgaggttgtaggtacaatctgcagaattctgcggtgttttactgttctcgatgccagttgtttgagtggtgccatccacctcccaggtgacggtgacatcgggaaagtatttattcgccacacacacgatggtgactgttccagttgccacctgatc

SEQ ID NO: 413065 - DNA, 292 bp, Homo Sapiens
cgagtgatagcttacaaaatgttacaatgttatgaagacatggcgattgtgtgtatacttaaatttccctggggaagagccagactttgggttacagggactatttagtcacctaaatatcaaccattatccactcccagtagaacagtatgttaatcactcagcttatcagatattcgcacaaagagaacaggagacactttggttagtaaataaatattgtactaaactttctttaaaccttgagaatgtcaaaatttgcctaacttcttccaattatacagggattact

SEQ ID NO: 413066 - DNA, 388 bp, Homo Sapiens
  misc_feature (359)..(359): n is a, c, g, or t
aagtgttactgtaatgccaagctaattgctgcaggacacacctgagtggcttggcacctgcttaagcagtgggatgctcaagattgggtgcaaggactccctcctctctggtactaaaacgttagcatgttctactgtctctttcagaagaaaccaaatgggactgaggatacatatttcagtgttgaacagtgtggctccaccgtgctgggcagacactgacggggtgtggggagacagcgagccccatcttgttactgaactggggatggcttgtggatacaggctgtcccccaccccaccctcccaggcccctgggccatacacacatcccttcactttcctttcttattttttgntattagaatcattgctttgtgggatccaa

SEQ ID NO: 413067 - DNA, 427 bp, Homo Sapiens
cgaggattttcgttgtttttaatcaggaggagaagggttccgtacccagaggggctcccacagccaggccgtaggtggtgggcgtgggcggcgtggactcgcggctgttaggtgaccccggcggtctggcaggcaggcaggcaggcagtcctctctagttgcgtctgtccttggccttgtcgctgcccggagcctggaacctgggcgaatcttggtagttctgggtcatgaactgggtgcttgcttccggttcattcaggtggtaacggttcaggaagatgtccattttccaagaggctcgagttttgttttctttaggaaggagagaaatggcccttccttcttggaggtagacgaagaactggtaccgatggaagccactgtgcaccggcggggagggaggctggtaggctgttaacacctggcc

SEQ ID NO: 413068 - DNA, 327 bp, Homo Sapiens
aacaagatgagtttattactcattgctgcatataagaacacacaacatagggaaccatggggtgtctcagtatgagagtgtttataagaacctactatagaatttgggattggtagagggtctaaggaaacgggtttgctccagattggctactatcagaaagaatgagaatttgatgattatctgactacatcttttctatagggaaggcagactaaatctgggacagagctgtcactggtaaagtagcagttgctcattttagctgagagaggctgattcttggtattttgtggatggcaccatgaccctctttttgcctgtgct

SEQ ID NO: 413069 - DNA, 421 bp, Homo Sapiens
  misc_feature (156)..(294): n is a, c, g, or t
tggcccctgcccttgaggaactggctagccagcgggggagggatacccacagtgtaaaaggcacacagatcctggagctctacagccttagttcagacctcagctccaccattatgaactgtgtaacgctgaacaaagtactgacttcactgtgcnnnnnnnnnnnnnnnnnnnnnnnnnnnnnnnnnnnnnnnnnnnnnnnnnnnnnnnnnnnnnnnnnnnnnnnnnnnnnnnnnnnnnnnnnnnnnnnnnnnnnnnnnnnnnnnnnnnnnnnnnnnnnnnnnnnnnnnnnnntttcaatataatgcagtcacatttctatataatcacatttcaatataatgccaggacagagggtgccacaggaacccagaggccatgggagcccagagtgatacttgccttactcactggaggattc

SEQ ID NO: 413070 - DNA, 422 bp, Homo Sapiens
taccctctgcctttctggggcggggctccctgcacccctgagaggccacactgcatggttcccatgtgccccaggccccaagagcttggttggtcctggagaatatgaggaggtcattcacaaagtgggaaagatatcgatacagtctgtgccactttcccagcttttcaggctctgccaaccctaacacagggaagggaagccggtggtgtccaggagaagagcgtggtgccagggaagagtgtggtgagcagcaccagtgtccacaggtggtgggcacacctaccacgggacaggagaggcaagaaactcatcaaactcccagcctcagaatttgatgcctcaaaagaatgcctgggtttggggagtaataagaccttggtacagaatgacatgactgagagaccatgcagacatgaagg

SEQ ID NO: 413071 - DNA, 422 bp, Homo Sapiens
tattttaaagatgcttaaaatggtgacacctcaaaatatgagtgtcccctgggctcttgaagacacctgcttcaaagttcacccctggggtggcagaaggtctcagcacccaggcagcaagagatgggctccaggtgcaggtggaggcaaggcactggcgcggacaccaggaaggaactgcagcgccatgcgaaggtccctccccattcccctggttcccggacaagtgcccaaggcctgggcttgattccttaagctgaagatggagaggatggggtacaagggggcaagaactgatttcttccgctcgattcacggacttctctcagtgaactgtgccaggattttggttttaagcactgacaggagctccctttgggtggccacatgattatcaagcacggcagcttctctgccactcc

SEQ ID NO: 413072 - DNA, 286 bp, Homo Sapiens
taaactacattttaaaagacaaagtcttgttgggcagtgctactgtgatcgaatggaggatgaaatggtttgagtaacaccgtcttgtttcttcctagactggcatctgccacaaggggcagcccatctgctccatccttggggaagaactaaatgagtgtcccttggctgagacggctgaatggaagatgccctgacatcagccaccatgtgtgtcctcaaatacatgtctctggtgttatgctacagatgcccacggcatattttgctctttgtctgagttagt

SEQ ID NO: 413073 - DNA, 441 bp, Homo Sapiens
cgagatcttaaccacattcaatgtgatggggcttgctagaaagctgctgcattccatccctaaccaggacattcttgaaaaaggagaggatccaaaggttaacacaattggcggaacttcaggaagtaatcttagcccaggatgccttggctaataatcagcccgtccacacacctttacagactcatggaccactgccaatcatctggccttctagtcttgccaatggcaggaacaacaatttcttacccagagtttctgcctttggagtacagaactccacgaatctcttgcctcatagatatccaacatataaatcaaggtcacacatgtctctgtacctacaaaaaccacagtacaaagcctccctaagacacttcttatatcattttgtgttctgaacaaagcacgcatttcacttctcaacagacataatgctgg

SEQ ID NO: 413074 - DNA, 449 bp, Homo Sapiens
aaatttgttgtattttggaaggcagacagagatcttccacccactggttcactccccagatgtcaacaacagccaaggctgggccagactgaagccagcgtccaagaactccatccaagtctcccatgtgggtagcagggacccaaatacttgggccattacctgatgcgtcctggggttcaaattaggaagctagatctgaagcacagtggagattccaaccaggcactccaatatagtatgcaagtgtcccaagcagttacttatctactgcactacacaaccacctcaaggataataaactttaatattaatctaagaaatataaatctgattaggaatgtaattggtataacctagaattttagtaagagtgacctaaatgaaacagcccttaaaaactaattcaaagtgcaactgaatataagatatctgggatgtagctggtt

SEQ ID NO: 413075 - DNA, 434 bp, Homo Sapiens
tggttccttgaaagaccccacttgcaaggctttttttattaggcatgattcaagagtgtgctcagtgtgaaaaactttttccttggggtatttgtcaaaaataattagagacaaatgattaactttacagctgcctatggtaataggtaacagttgtggtgaacattaagctaaccaaaaagcttaaaagtaaatgctggggaatgagatgtccatatggagcttagaaaacctccaacaaatacctgggaatctaaaaggctatgcatatgcacaggatgataggcattcccaaggctgtgcacatgctcagaaaacacctaagaaaggccaaagttctcacctatggctgaacttcaagctctgtacaagtgaagtgctaaggcaaagttgcccccaacatacacacagagcatcttggtaaagactgggag

SEQ ID NO: 413076 - DNA, 390 bp, Homo Sapiens
agaaaatggggaaactgacatgttaagatgccaggtaacttgcctgtggtcacataattaataaatggctcaactggattcaaatcctgatttgcctcactccaaagcctgggctgcttgcacagtgctaagtggcctcctaaaggaacctccacagcctgtgcaagaacagaattattggccaggtagtctaccattaaatggggtcgccagcttgtggctaaagaaacagatgatgaaagaagtgctgaggagaaaacgcctgtttacaaacatagcttaattaattagtcaactcagatgaggcagaaaaggcgggtttccagatgtctgacatcgagaattaattagcagaaaggcaccagtcctcaggccttgggttcatggcca

SEQ ID NO: 413077 - DNA, 425 bp, Homo Sapiens
aagctgtactgtcaggctcatcctgtcgctcctgtattcaaagctttacgaatggattataaatactttgggcttctcttctggtgatggggtgctggaaagttctatgttgtccacaagaacattcttgtcttccagtctaatgacagtgggctctgggctgggagtaggtggtgttgggtttttgtgcatgtggggcaagttggcccagctgatggccaggtctttgaaagcatgaagcatgaacacgcccaagatgatggtgacaaagccagcaagggttcccatgatgtccacagctgacatgctgttccattccttgaagaggatgatggaagaggtgacgaccaccgtggtgaagaacacgtagtagatggggaacaccagggaggtattaaaaatatccagcgccctgttgaggaagt

SEQ ID NO: 413078 - DNA, 395 bp, Homo Sapiens
  misc_feature (354)..(354): n is a, c, g, or t
ttacagataccactttgtcttcatttttaacactttttgagttacaatttacataccataaaattcacccctagtaaaagtgcaactcaatgatttttaataaattttcagagttttgcagtcttcaccacaatccagtttttagaacatttcctcaccaccatccatgaaaagaatagtcatgaccattttcagtcaacccccagcaccaagcagtcactaatctgccctttctggacatttcaggtaaatgaaatcctaccatatgtagtcattaagtttgacttctttcacttagcgtaatgttttcaaggtgcatccatatggagcatatatcagtatttcattcctttntattgcccagtaatattccattgcatggatagaccacactg

SEQ ID NO: 413079 - DNA, 145 bp, Homo Sapiens
ttgtgaaaacgtatcaagttgtataattacgtgttatcttatatacatgtttattatgcctcaattacaaagttctaaatgaaatggcagggagcccatactaatatcaagatacttgatagtcaggcactggcatagaaaacag

SEQ ID NO: 413080 - DNA, 373 bp, Homo Sapiens
gtcacccccgcaccagcttctcccatgttaaagggcatgggcctccaggggcagtgccttttctgagcttcccagactttccccaactcttcccacgtctcattctcctggtcaggctagtcttggacctgactcctcccactaggccctggggctgaaattgttgttccttctgacccatagcagcagaatagaagcctcagaacacaactgatactcaggctgggacaacaggcagtcaggggagggcctgtgtgtccacagagccattgcacccacatgtactcgctgtacctgcatataccctctacccgcatatacccactacacctgcatatacccgcttcacctgcctgtacctaccctggggtct

SEQ ID NO: 413081 - DNA, 409 bp, Homo Sapiens
aaaaaagtgcattgcaaaaggactgtggggagcaactcggactagactaagttactggaattaagacttattctatgcatctgctctcccacaatatggcgctgagaagggagtaaacaacttctacgcagctgtctctcgccaacttgagtgatgacctgcaggagctgatcctgctcctgattggaggagagcagcgtactcagcgtgtgggtagcagagttgggattggtggaagaggactataaaggaggagagagataacatgcacgaggaacatctaaagggaacatccggataacatctgagcagcccccgagagagccggccggcagtgtgccactcccccgcggaagtggggaaagtggcagggggagccgcccttccacagaggtggaaggatcggcag

SEQ ID NO: 413082 - DNA, 342 bp, Homo Sapiens
cttaggaaaggctttggaaaacaatatttcccaagtttttgcattctatattggtttatgcctttatattcaccattaagttttgttgggtgtaaaatccttggctcacatttttttccatcaggatatcaaatgtggtacaacactttcttaaagcataaggcaatgctgttgaaaagtctggtgatgatctaattttctttcccttttaagtaattagtttttgtttagataactaaaggcatttacttttcatggttcagtaattttactaaaatttatattaatgttggtctttttggatgtatactctctggtgctctttcaacattaatttcaatt

SEQ ID NO: 413083 - DNA, 394 bp, Homo Sapiens
  misc_feature (117)..(117): n is a, c, g, or t
  misc_feature (163)..(163): n is a, c, g, or t
  misc_feature (173)..(173): n is a, c, g, or t
tcgtaccccgggcaccctggcgctggcggcgggtactacgcaggcgggtacggaggggctcccggaggaccctcgtttcctgcacaaactcaggatcctctttacgggtactttgtngccgtagctggacaggatgggcagatagatgcggacgagctacagnggtgtctgcngcagtccggcattgccggaagctacaaacctttcaactggagacttgtccacttatggtctcaatgctggatagagaatatgtctggcacattgggtttcactgaattttaagaactctggggcgtgctggatggggtgaagaaacacttcatcagttttgcagcccagggagtgaaaccgtgaggccaaggagttgcgaagcgcttacgcaagggattta
